United States Patent Application Publication US 2020/0216857 A1 - sequence listing, part 5

SEQ ID NO: 58105 - DNA, 20 bp, Artificial Sequence
  Description of Artificial Sequence: Synthetic oligonucleotide
  Target: ATXN2; (-) strand; PAM type: YTN; PAM sequence: TTG
tcaccttgtatgaaatgttg

SEQ ID NO: 58106 - DNA, 20 bp, Artificial Sequence
  Description of Artificial Sequence: Synthetic oligonucleotide
  Target: ATXN2; (-) strand; PAM type: YTN; PAM sequence: TTA
atattgtcaccttgtatgaa

SEQ ID NO: 58107 - DNA, 20 bp, Artificial Sequence
  Description of Artificial Sequence: Synthetic oligonucleotide
  Target: ATXN2; (-) strand; PAM type: YTN; PAM sequence: TTG
tgccattaatattgtcacct

SEQ ID NO: 58108 - DNA, 20 bp, Artificial Sequence
  Description of Artificial Sequence: Synthetic oligonucleotide
  Target: ATXN2; (-) strand; PAM type: YTN; PAM sequence: TTT
gtgccattaatattgtcacc

SEQ ID NO: 58109 - DNA, 20 bp, Artificial Sequence
  Description of Artificial Sequence: Synthetic oligonucleotide
  Target: ATXN2; (-) strand; PAM type: YTN; PAM sequence: TTA
gaaatttgtgccattaatat

SEQ ID NO: 58110 - DNA, 20 bp, Artificial Sequence
  Description of Artificial Sequence: Synthetic oligonucleotide
  Target: ATXN2; (-) strand; PAM type: YTN; PAM sequence: TTT
agaaatttgtgccattaata

SEQ ID NO: 58111 - DNA, 20 bp, Artificial Sequence
  Description of Artificial Sequence: Synthetic oligonucleotide
  Target: ATXN2; (-) strand; PAM type: YTN; PAM sequence: CTT
tagaaatttgtgccattaat

SEQ ID NO: 58112 - DNA, 20 bp, Artificial Sequence
  Description of Artificial Sequence: Synthetic oligonucleotide
  Target: ATXN2; (-) strand; PAM type: YTN; PAM sequence: TTG
tagaaatcctttagaaattt

SEQ ID NO: 58113 - DNA, 20 bp, Artificial Sequence
  Description of Artificial Sequence: Synthetic oligonucleotide
  Target: ATXN2; (-) strand; PAM type: YTN; PAM sequence: TTT
gtagaaatcctttagaaatt

SEQ ID NO: 58114 - DNA, 20 bp, Artificial Sequence
  Description of Artificial Sequence: Synthetic oligonucleotide
  Target: ATXN2; (-) strand; PAM type: YTN; PAM sequence: CTA
atatttgtagaaatccttta

SEQ ID NO: 58115 - DNA, 20 bp, Artificial Sequence
  Description of Artificial Sequence: Synthetic oligonucleotide
  Target: ATXN2; (-) strand; PAM type: YTN; PAM sequence: TTA
aataggaaggagtactaata

SEQ ID NO: 58116 - DNA, 20 bp, Artificial Sequence
  Description of Artificial Sequence: Synthetic oligonucleotide
  Target: ATXN2; (-) strand; PAM type: YTN; PAM sequence: TTT
aaataggaaggagtactaat

SEQ ID NO: 58117 - DNA, 20 bp, Artificial Sequence
  Description of Artificial Sequence: Synthetic oligonucleotide
  Target: ATXN2; (-) strand; PAM type: YTN; PAM sequence: TTG
gtatttaaataggaaggagt

SEQ ID NO: 58118 - DNA, 20 bp, Artificial Sequence
  Description of Artificial Sequence: Synthetic oligonucleotide
  Target: ATXN2; (-) strand; PAM type: YTN; PAM sequence: TTT
ggtatttaaataggaaggag

SEQ ID NO: 58119 - DNA, 20 bp, Artificial Sequence
  Description of Artificial Sequence: Synthetic oligonucleotide
  Target: ATXN2; (-) strand; PAM type: YTN; PAM sequence: CTT
tggtatttaaataggaagga

SEQ ID NO: 58120 - DNA, 20 bp, Artificial Sequence
  Description of Artificial Sequence: Synthetic oligonucleotide
  Target: ATXN2; (-) strand; PAM type: YTN; PAM sequence: TTG
gactttggtatttaaatagg

SEQ ID NO: 58121 - DNA, 20 bp, Artificial Sequence
  Description of Artificial Sequence: Synthetic oligonucleotide
  Target: ATXN2; (-) strand; PAM type: YTN; PAM sequence: CTT
ggactttggtatttaaatag

SEQ ID NO: 58122 - DNA, 20 bp, Artificial Sequence
  Description of Artificial Sequence: Synthetic oligonucleotide
  Target: ATXN2; (-) strand; PAM type: YTN; PAM sequence: CTA
gtcttggactttggtattta

SEQ ID NO: 58123 - DNA, 20 bp, Artificial Sequence
  Description of Artificial Sequence: Synthetic oligonucleotide
  Target: ATXN2; (-) strand; PAM type: YTN; PAM sequence: CTC
aaaataaaaaataaaaataa

SEQ ID NO: 58124 - DNA, 20 bp, Artificial Sequence
  Description of Artificial Sequence: Synthetic oligonucleotide
  Target: ATXN2; (-) strand; PAM type: YTN; PAM sequence: CTG
tctcaaaataaaaaataaaa

SEQ ID NO: 58125 - DNA, 20 bp, Artificial Sequence
  Description of Artificial Sequence: Synthetic oligonucleotide
  Target: ATXN2; (-) strand; PAM type: YTN; PAM sequence: CTC
tgtctcaaaataaaaaataa

SEQ ID NO: 58126 - DNA, 20 bp, Artificial Sequence
  Description of Artificial Sequence: Synthetic oligonucleotide
  Target: ATXN2; (-) strand; PAM type: YTN; PAM sequence: CTG
ggcaacagagagagactctg

SEQ ID NO: 58127 - DNA, 20 bp, Artificial Sequence
  Description of Artificial Sequence: Synthetic oligonucleotide
  Target: ATXN2; (-) strand; PAM type: YTN; PAM sequence: CTC
aggcctgggcaacagagaga

SEQ ID NO: 58128 - DNA, 20 bp, Artificial Sequence
  Description of Artificial Sequence: Synthetic oligonucleotide
  Target: ATXN2; (-) strand; PAM type: YTN; PAM sequence: CTG
cactcaggcctgggcaacag

SEQ ID NO: 58129 - DNA, 20 bp, Artificial Sequence
  Description of Artificial Sequence: Synthetic oligonucleotide
  Target: ATXN2; (-) strand; PAM type: YTN; PAM sequence: TTG
taccactgcactcaggcctg

SEQ ID NO: 58130 - DNA, 20 bp, Artificial Sequence
  Description of Artificial Sequence: Synthetic oligonucleotide
  Target: ATXN2; (-) strand; PAM type: YTN; PAM sequence: CTG
agattgtaccactgcactca

SEQ ID NO: 58131 - DNA, 20 bp, Artificial Sequence
  Description of Artificial Sequence: Synthetic oligonucleotide
  Target: ATXN2; (-) strand; PAM type: YTN; PAM sequence: TTG
cagtgagctgagattgtacc

SEQ ID NO: 58132 - DNA, 20 bp, Artificial Sequence
  Description of Artificial Sequence: Synthetic oligonucleotide
  Target: ATXN2; (-) strand; PAM type: YTN; PAM sequence: CTG
gaggtggaggttgcagtgag

SEQ ID NO: 58133 - DNA, 20 bp, Artificial Sequence
  Description of Artificial Sequence: Synthetic oligonucleotide
  Target: ATXN2; (-) strand; PAM type: YTN; PAM sequence: TTC
catgaaccctggaggtggag

SEQ ID NO: 58134 - DNA, 20 bp, Artificial Sequence
  Description of Artificial Sequence: Synthetic oligonucleotide
  Target: ATXN2; (-) strand; PAM type: YTN; PAM sequence: TTG
ggaggcggaggcacaagagt

SEQ ID NO: 58135 - DNA, 20 bp, Artificial Sequence
  Description of Artificial Sequence: Synthetic oligonucleotide
  Target: ATXN2; (-) strand; PAM type: YTN; PAM sequence: CTT
gggaggcggaggcacaagag

SEQ ID NO: 58136 - DNA, 20 bp, Artificial Sequence
  Description of Artificial Sequence: Synthetic oligonucleotide
  Target: ATXN2; (-) strand; PAM type: YTN; PAM sequence: CTA
cttgggaggcggaggcacaa

SEQ ID NO: 58137 - DNA, 20 bp, Artificial Sequence
  Description of Artificial Sequence: Synthetic oligonucleotide
  Target: ATXN2; (-) strand; PAM type: YTN; PAM sequence: CTG
tagtcccagctacttgggag

SEQ ID NO: 58138 - DNA, 20 bp, Artificial Sequence
  Description of Artificial Sequence: Synthetic oligonucleotide
  Target: ATXN2; (-) strand; PAM type: YTN; PAM sequence: CTA
ccaaagcatggtggcacgca

SEQ ID NO: 58139 - DNA, 20 bp, Artificial Sequence
  Description of Artificial Sequence: Synthetic oligonucleotide
  Target: ATXN2; (-) strand; PAM type: YTN; PAM sequence: CTC
taccaaagcatggtggcacg

SEQ ID NO: 58140 - DNA, 20 bp, Artificial Sequence
  Description of Artificial Sequence: Synthetic oligonucleotide
  Target: ATXN2; (-) strand; PAM type: YTN; PAM sequence: CTA
tctctaccaaagcatggtgg

SEQ ID NO: 58141 - DNA, 20 bp, Artificial Sequence
  Description of Artificial Sequence: Synthetic oligonucleotide
  Target: ATXN2; (-) strand; PAM type: YTN; PAM sequence: CTG
gccaacatggtgaaacccta

SEQ ID NO: 58142 - DNA, 20 bp, Artificial Sequence
  Description of Artificial Sequence: Synthetic oligonucleotide
  Target: ATXN2; (-) strand; PAM type: YTN; PAM sequence: TTC
gagaacagcctggccaacat

SEQ ID NO: 58143 - DNA, 20 bp, Artificial Sequence
  Description of Artificial Sequence: Synthetic oligonucleotide
  Target: ATXN2; (-) strand; PAM type: YTN; PAM sequence: TTG
aggccaggagttcgagaaca

SEQ ID NO: 58144 - DNA, 20 bp, Artificial Sequence
  Description of Artificial Sequence: Synthetic oligonucleotide
  Target: ATXN2; (-) strand; PAM type: YTN; PAM sequence: CTT
gaggccaggagttcgagaac

SEQ ID NO: 58145 - DNA, 20 bp, Artificial Sequence
  Description of Artificial Sequence: Synthetic oligonucleotide
  Target: ATXN2; (-) strand; PAM type: YTN; PAM sequence: TTG
cttgaggccaggagttcgag

SEQ ID NO: 58146 - DNA, 20 bp, Artificial Sequence
  Description of Artificial Sequence: Synthetic oligonucleotide
  Target: ATXN2; (-) strand; PAM type: YTN; PAM sequence: TTG
ggaggccgaggtgggtggat

SEQ ID NO: 58147 - DNA, 20 bp, Artificial Sequence
  Description of Artificial Sequence: Synthetic oligonucleotide
  Target: ATXN2; (-) strand; PAM type: YTN; PAM sequence: TTT
gggaggccgaggtgggtgga

SEQ ID NO: 58148 - DNA, 20 bp, Artificial Sequence
  Description of Artificial Sequence: Synthetic oligonucleotide
  Target: ATXN2; (-) strand; PAM type: YTN; PAM sequence: CTT
tgggaggccgaggtgggtgg

SEQ ID NO: 58149 - DNA, 20 bp, Artificial Sequence
  Description of Artificial Sequence: Synthetic oligonucleotide
  Target: ATXN2; (-) strand; PAM type: YTN; PAM sequence: CTG
taatcccagtactttgggag

SEQ ID NO: 58150 - DNA, 20 bp, Artificial Sequence
  Description of Artificial Sequence: Synthetic oligonucleotide
  Target: ATXN2; (-) strand; PAM type: YTN; PAM sequence: CTC
acgcctgtaatcccagtact

SEQ ID NO: 58151 - DNA, 20 bp, Artificial Sequence
  Description of Artificial Sequence: Synthetic oligonucleotide
  Target: ATXN2; (-) strand; PAM type: YTN; PAM sequence: TTG
taaaaataagggccggacgt

SEQ ID NO: 58152 - DNA, 20 bp, Artificial Sequence
  Description of Artificial Sequence: Synthetic oligonucleotide
  Target: ATXN2; (-) strand; PAM type: YTN; PAM sequence: TTT
gtaaaaataagggccggacg

SEQ ID NO: 58153 - DNA, 20 bp, Artificial Sequence
  Description of Artificial Sequence: Synthetic oligonucleotide
  Target: ATXN2; (-) strand; PAM type: YTN; PAM sequence: TTG
tagggcaatttgtaaaaata

SEQ ID NO: 58154 - DNA, 20 bp, Artificial Sequence
  Description of Artificial Sequence: Synthetic oligonucleotide
  Target: ATXN2; (-) strand; PAM type: YTN; PAM sequence: TTT
gtagggcaatttgtaaaaat

SEQ ID NO: 58155 - DNA, 20 bp, Artificial Sequence
  Description of Artificial Sequence: Synthetic oligonucleotide
  Target: ATXN2; (-) strand; PAM type: YTN; PAM sequence: CTA
tttgtagggcaatttgtaaa

SEQ ID NO: 58156 - DNA, 20 bp, Artificial Sequence
  Description of Artificial Sequence: Synthetic oligonucleotide
  Target: ATXN2; (-) strand; PAM type: YTN; PAM sequence: TTC
ctatttgtagggcaatttgt

SEQ ID NO: 58157 - DNA, 20 bp, Artificial Sequence
  Description of Artificial Sequence: Synthetic oligonucleotide
  Target: ATXN2; (-) strand; PAM type: YTN; PAM sequence: TTT
cctatttgtagggcaatttg

SEQ ID NO: 58158 - DNA, 20 bp, Artificial Sequence
  Description of Artificial Sequence: Synthetic oligonucleotide
  Target: ATXN2; (-) strand; PAM type: YTN; PAM sequence: TTT
tcctatttgtagggcaattt

SEQ ID NO: 58159 - DNA, 20 bp, Artificial Sequence
  Description of Artificial Sequence: Synthetic oligonucleotide
  Target: ATXN2; (-) strand; PAM type: YTN; PAM sequence: TTT
ttcctatttgtagggcaatt

SEQ ID NO: 58160 - DNA, 20 bp, Artificial Sequence
  Description of Artificial Sequence: Synthetic oligonucleotide
  Target: ATXN2; (-) strand; PAM type: YTN; PAM sequence: TTA
aggtacatttttcctatttg

SEQ ID NO: 58161 - DNA, 20 bp, Artificial Sequence
  Description of Artificial Sequence: Synthetic oligonucleotide
  Target: ATXN2; (-) strand; PAM type: YTN; PAM sequence: TTT
aaggtacatttttcctattt

SEQ ID NO: 58162 - DNA, 20 bp, Artificial Sequence
  Description of Artificial Sequence: Synthetic oligonucleotide
  Target: ATXN2; (-) strand; PAM type: YTN; PAM sequence: TTT
taaggtacatttttcctatt

SEQ ID NO: 58163 - DNA, 20 bp, Artificial Sequence
  Description of Artificial Sequence: Synthetic oligonucleotide
  Target: ATXN2; (-) strand; PAM type: YTN; PAM sequence: CTT
ttaaggtacatttttcctat

SEQ ID NO: 58164 - DNA, 20 bp, Artificial Sequence
  Description of Artificial Sequence: Synthetic oligonucleotide
  Target: ATXN2; (-) strand; PAM type: YTN; PAM sequence: CTG
gaaatgaacttttaaggtac

SEQ ID NO: 58165 - DNA, 20 bp, Artificial Sequence
  Description of Artificial Sequence: Synthetic oligonucleotide
  Target: ATXN2; (-) strand; PAM type: YTN; PAM sequence: TTC
tggaaatgaacttttaaggt

SEQ ID NO: 58166 - DNA, 20 bp, Artificial Sequence
  Description of Artificial Sequence: Synthetic oligonucleotide
  Target: ATXN2; (-) strand; PAM type: YTN; PAM sequence: CTT
ctggaaatgaacttttaagg

SEQ ID NO: 58167 - DNA, 20 bp, Artificial Sequence
  Description of Artificial Sequence: Synthetic oligonucleotide
  Target: ATXN2; (-) strand; PAM type: YTN; PAM sequence: TTC
ttctggaaatgaacttttaa

SEQ ID NO: 58168 - DNA, 20 bp, Artificial Sequence
  Description of Artificial Sequence: Synthetic oligonucleotide
  Target: ATXN2; (-) strand; PAM type: YTN; PAM sequence: TTT
cttctggaaatgaactttta

SEQ ID NO: 58169 - DNA, 20 bp, Artificial Sequence
  Description of Artificial Sequence: Synthetic oligonucleotide
  Target: ATXN2; (-) strand; PAM type: YTN; PAM sequence: CTT
tcttctggaaatgaactttt

SEQ ID NO: 58170 - DNA, 20 bp, Artificial Sequence
  Description of Artificial Sequence: Synthetic oligonucleotide
  Target: ATXN2; (-) strand; PAM type: YTN; PAM sequence: CTG
ggcagagctttcttctggaa

SEQ ID NO: 58171 - DNA, 20 bp, Artificial Sequence
  Description of Artificial Sequence: Synthetic oligonucleotide
  Target: ATXN2; (-) strand; PAM type: YTN; PAM sequence: TTC
atggagaaagtctgggcaga

SEQ ID NO: 58172 - DNA, 20 bp, Artificial Sequence
  Description of Artificial Sequence: Synthetic oligonucleotide
  Target: ATXN2; (-) strand; PAM type: YTN; PAM sequence: CTT
catggagaaagtctgggcag

SEQ ID NO: 58173 - DNA, 20 bp, Artificial Sequence
  Description of Artificial Sequence: Synthetic oligonucleotide
  Target: ATXN2; (-) strand; PAM type: YTN; PAM sequence: CTC
cttcatggagaaagtctggg

SEQ ID NO: 58174 - DNA, 20 bp, Artificial Sequence
  Description of Artificial Sequence: Synthetic oligonucleotide
  Target: ATXN2; (-) strand; PAM type: YTN; PAM sequence: TTG
ctccttcatggagaaagtct

SEQ ID NO: 58175 - DNA, 20 bp, Artificial Sequence
  Description of Artificial Sequence: Synthetic oligonucleotide
  Target: ATXN2; (-) strand; PAM type: YTN; PAM sequence: CTG
gcaaaaagtacagaaatagt

SEQ ID NO: 58176 - DNA, 20 bp, Artificial Sequence
  Description of Artificial Sequence: Synthetic oligonucleotide
  Target: ATXN2; (-) strand; PAM type: YTN; PAM sequence: CTC
cccacctggcaaaaagtaca

SEQ ID NO: 58177 - DNA, 20 bp, Artificial Sequence
  Description of Artificial Sequence: Synthetic oligonucleotide
  Target: ATXN2; (-) strand; PAM type: YTN; PAM sequence: CTC
tccccacctggcaaaaagta

SEQ ID NO: 58178 - DNA, 20 bp, Artificial Sequence
  Description of Artificial Sequence: Synthetic oligonucleotide
  Target: ATXN2; (-) strand; PAM type: YTN; PAM sequence: TTG
gacagcacaggtcccctctc

SEQ ID NO: 58179 - DNA, 20 bp, Artificial Sequence
  Description of Artificial Sequence: Synthetic oligonucleotide
  Target: ATXN2; (-) strand; PAM type: YTN; PAM sequence: CTT
ggacagcacaggtcccctct

SEQ ID NO: 58180 - DNA, 20 bp, Artificial Sequence
  Description of Artificial Sequence: Synthetic oligonucleotide
  Target: ATXN2; (-) strand; PAM type: YTN; PAM sequence: TTA
tcttggacagcacaggtccc

SEQ ID NO: 58181 - DNA, 20 bp, Artificial Sequence
  Description of Artificial Sequence: Synthetic oligonucleotide
  Target: ATXN2; (-) strand; PAM type: YTN; PAM sequence: CTC
aggtcattatcttggacagc

SEQ ID NO: 58182 - DNA, 20 bp, Artificial Sequence
  Description of Artificial Sequence: Synthetic oligonucleotide
  Target: ATXN2; (-) strand; PAM type: YTN; PAM sequence: CTC
tcaggtcattatcttggaca

SEQ ID NO: 58183 - DNA, 20 bp, Artificial Sequence
  Description of Artificial Sequence: Synthetic oligonucleotide
  Target: ATXN2; (-) strand; PAM type: YTN; PAM sequence: TTA
agcaagagatcatgacctct

SEQ ID NO: 58184 - DNA, 20 bp, Artificial Sequence
  Description of Artificial Sequence: Synthetic oligonucleotide
  Target: ATXN2; (-) strand; PAM type: YTN; PAM sequence: CTT
aagcaagagatcatgacctc

SEQ ID NO: 58185 - DNA, 20 bp, Artificial Sequence
  Description of Artificial Sequence: Synthetic oligonucleotide
  Target: ATXN2; (-) strand; PAM type: YTN; PAM sequence: TTG
agcttaagcaagagatcatg

SEQ ID NO: 58186 - DNA, 20 bp, Artificial Sequence
  Description of Artificial Sequence: Synthetic oligonucleotide
  Target: ATXN2; (-) strand; PAM type: YTN; PAM sequence: CTT
gagcttaagcaagagatcat

SEQ ID NO: 58187 - DNA, 20 bp, Artificial Sequence
  Description of Artificial Sequence: Synthetic oligonucleotide
  Target: ATXN2; (-) strand; PAM type: YTN; PAM sequence: CTC
aggatatcttgagcttaagc

SEQ ID NO: 58188 - DNA, 20 bp, Artificial Sequence
  Description of Artificial Sequence: Synthetic oligonucleotide
  Target: ATXN2; (-) strand; PAM type: YTN; PAM sequence: TTC
aggaagcagacccctcagga

SEQ ID NO: 58189 - DNA, 20 bp, Artificial Sequence
  Description of Artificial Sequence: Synthetic oligonucleotide
  Target: ATXN2; (-) strand; PAM type: YTN; PAM sequence: CTC
aaaaaataaaatattcagga

SEQ ID NO: 58190 - DNA, 20 bp, Artificial Sequence
  Description of Artificial Sequence: Synthetic oligonucleotide
  Target: ATXN2; (-) strand; PAM type: YTN; PAM sequence: CTG
tctcaaaaaataaaatattc

SEQ ID NO: 58191 - DNA, 20 bp, Artificial Sequence
  Description of Artificial Sequence: Synthetic oligonucleotide
  Target: ATXN2; (-) strand; PAM type: YTN; PAM sequence: TTC
tgtctcaaaaaataaaatat

SEQ ID NO: 58192 - DNA, 20 bp, Artificial Sequence
  Description of Artificial Sequence: Synthetic oligonucleotide
  Target: ATXN2; (-) strand; PAM type: YTN; PAM sequence: CTG
ggtggcagagcgaaattctg

SEQ ID NO: 58193 - DNA, 20 bp, Artificial Sequence
  Description of Artificial Sequence: Synthetic oligonucleotide
  Target: ATXN2; (-) strand; PAM type: YTN; PAM sequence: CTC
cagcctgggtggcagagcga

SEQ ID NO: 58194 - DNA, 20 bp, Artificial Sequence
  Description of Artificial Sequence: Synthetic oligonucleotide
  Target: ATXN2; (-) strand; PAM type: YTN; PAM sequence: CTC
cactccagcctgggtggcag

SEQ ID NO: 58195 - DNA, 20 bp, Artificial Sequence
  Description of Artificial Sequence: Synthetic oligonucleotide
  Target: ATXN2; (-) strand; PAM type: YTN; PAM sequence: TTG
cagtgagccgaagtcgtgcc

SEQ ID NO: 58196 - DNA, 20 bp, Artificial Sequence
  Description of Artificial Sequence: Synthetic oligonucleotide
  Target: ATXN2; (-) strand; PAM type: YTN; PAM sequence: TTG
ggaggcagaggttgcagtga

SEQ ID NO: 58197 - DNA, 20 bp, Artificial Sequence
  Description of Artificial Sequence: Synthetic oligonucleotide
  Target: ATXN2; (-) strand; PAM type: YTN; PAM sequence: CTT
gggaggcagaggttgcagtg

SEQ ID NO: 58198 - DNA, 20 bp, Artificial Sequence
  Description of Artificial Sequence: Synthetic oligonucleotide
  Target: ATXN2; (-) strand; PAM type: YTN; PAM sequence: TTG
aacttgggaggcagaggttg

SEQ ID NO: 58199 - DNA, 20 bp, Artificial Sequence
  Description of Artificial Sequence: Synthetic oligonucleotide
  Target: ATXN2; (-) strand; PAM type: YTN; PAM sequence: CTT
gaacttgggaggcagaggtt

SEQ ID NO: 58200 - DNA, 20 bp, Artificial Sequence
  Description of Artificial Sequence: Synthetic oligonucleotide
  Target: ATXN2; (-) strand; PAM type: YTN; PAM sequence: TTG
cttgaacttgggaggcagag

SEQ ID NO: 58201 - DNA, 20 bp, Artificial Sequence
  Description of Artificial Sequence: Synthetic oligonucleotide
  Target: ATXN2; (-) strand; PAM type: YTN; PAM sequence: CTG
agacaggagaattgcttgaa

SEQ ID NO: 58202 - DNA, 20 bp, Artificial Sequence
  Description of Artificial Sequence: Synthetic oligonucleotide
  Target: ATXN2; (-) strand; PAM type: YTN; PAM sequence: CTA
gggaggctgagacaggagaa

SEQ ID NO: 58203 - DNA, 20 bp, Artificial Sequence
  Description of Artificial Sequence: Synthetic oligonucleotide
  Target: ATXN2; (-) strand; PAM type: YTN; PAM sequence: CTA
ctagggaggctgagacagga

SEQ ID NO: 58204 - DNA, 20 bp, Artificial Sequence
  Description of Artificial Sequence: Synthetic oligonucleotide
  Target: ATXN2; (-) strand; PAM type: YTN; PAM sequence: CTC
agctactagggaggctgaga

SEQ ID NO: 58205 - DNA, 20 bp, Artificial Sequence
  Description of Artificial Sequence: Synthetic oligonucleotide
  Target: ATXN2; (-) strand; PAM type: YTN; PAM sequence: CTA
taatctcagctactagggag

SEQ ID NO: 58206 - DNA, 20 bp, Artificial Sequence
  Description of Artificial Sequence: Synthetic oligonucleotide
  Target: ATXN2; (-) strand; PAM type: YTN; PAM sequence: CTG
gcatgcgcctataatctcag

SEQ ID NO: 58207 - DNA, 20 bp, Artificial Sequence
  Description of Artificial Sequence: Synthetic oligonucleotide
  Target: ATXN2; (-) strand; PAM type: YTN; PAM sequence: CTA
aaaaatacaaaaatcagcca

SEQ ID NO: 58208 - DNA, 20 bp, Artificial Sequence
  Description of Artificial Sequence: Synthetic oligonucleotide
  Target: ATXN2; (-) strand; PAM type: YTN; PAM sequence: CTA
ctaaaaaatacaaaaatcag

SEQ ID NO: 58209 - DNA, 20 bp, Artificial Sequence
  Description of Artificial Sequence: Synthetic oligonucleotide
  Target: ATXN2; (-) strand; PAM type: YTN; PAM sequence: CTC
tactaaaaaatacaaaaatc

SEQ ID NO: 58210 - DNA, 20 bp, Artificial Sequence
  Description of Artificial Sequence: Synthetic oligonucleotide
  Target: ATXN2; (-) strand; PAM type: YTN; PAM sequence: CTC
catctctactaaaaaataca

SEQ ID NO: 58211 - DNA, 20 bp, Artificial Sequence
  Description of Artificial Sequence: Synthetic oligonucleotide
  Target: ATXN2; (-) strand; PAM type: YTN; PAM sequence: CTA
gccaacatggtaaaactcca

SEQ ID NO: 58212 - DNA, 20 bp, Artificial Sequence
  Description of Artificial Sequence: Synthetic oligonucleotide
  Target: ATXN2; (-) strand; PAM type: YTN; PAM sequence: TTC
aagaccagcctagccaacat

SEQ ID NO: 58213 - DNA, 20 bp, Artificial Sequence
  Description of Artificial Sequence: Synthetic oligonucleotide
  Target: ATXN2; (-) strand; PAM type: YTN; PAM sequence: CTG
aggtcagcagttcaagacca

SEQ ID NO: 58214 - DNA, 20 bp, Artificial Sequence
  Description of Artificial Sequence: Synthetic oligonucleotide
  Target: ATXN2; (-) strand; PAM type: YTN; PAM sequence: CTG
aggcgggtggatcatctgag

SEQ ID NO: 58215 - DNA, 20 bp, Artificial Sequence
  Description of Artificial Sequence: Synthetic oligonucleotide
  Target: ATXN2; (-) strand; PAM type: YTN; PAM sequence: TTG
ggaggctgaggcgggtggat

SEQ ID NO: 58216 - DNA, 20 bp, Artificial Sequence
  Description of Artificial Sequence: Synthetic oligonucleotide
  Target: ATXN2; (-) strand; PAM type: YTN; PAM sequence: TTT
gggaggctgaggcgggtgga

SEQ ID NO: 58217 - DNA, 20 bp, Artificial Sequence
  Description of Artificial Sequence: Synthetic oligonucleotide
  Target: ATXN2; (-) strand; PAM type: YTN; PAM sequence: CTT
tgggaggctgaggcgggtgg

SEQ ID NO: 58218 - DNA, 20 bp, Artificial Sequence
  Description of Artificial Sequence: Synthetic oligonucleotide
  Target: ATXN2; (-) strand; PAM type: YTN; PAM sequence: CTG
taatcccagtgctttgggag

SEQ ID NO: 58219 - DNA, 20 bp, Artificial Sequence
  Description of Artificial Sequence: Synthetic oligonucleotide
  Target: ATXN2; (-) strand; PAM type: YTN; PAM sequence: CTC
acacctgtaatcccagtgct

SEQ ID NO: 58220 - DNA, 20 bp, Artificial Sequence
  Description of Artificial Sequence: Synthetic oligonucleotide
  Target: ATXN2; (-) strand; PAM type: YTN; PAM sequence: CTC
aggaagggccaggcacggtg

SEQ ID NO: 58221 - DNA, 20 bp, Artificial Sequence
  Description of Artificial Sequence: Synthetic oligonucleotide
  Target: ATXN2; (-) strand; PAM type: YTN; PAM sequence: TTA
aaatactcaggaagggccag

SEQ ID NO: 58222 - DNA, 20 bp, Artificial Sequence
  Description of Artificial Sequence: Synthetic oligonucleotide
  Target: ATXN2; (-) strand; PAM type: YTN; PAM sequence: TTT
aaaatactcaggaagggcca

SEQ ID NO: 58223 - DNA, 20 bp, Artificial Sequence
  Description of Artificial Sequence: Synthetic oligonucleotide
  Target: ATXN2; (-) strand; PAM type: YTN; PAM sequence: CTA
aaggtttaaaatactcagga

SEQ ID NO: 58224 - DNA, 20 bp, Artificial Sequence
  Description of Artificial Sequence: Synthetic oligonucleotide
  Target: ATXN2; (-) strand; PAM type: YTN; PAM sequence: CTG
tgcatggctaaaggtttaaa

SEQ ID NO: 58225 - DNA, 20 bp, Artificial Sequence
  Description of Artificial Sequence: Synthetic oligonucleotide
  Target: ATXN2; (-) strand; PAM type: YTN; PAM sequence: TTC
agtcctgtgcatggctaaag

SEQ ID NO: 58226 - DNA, 20 bp, Artificial Sequence
  Description of Artificial Sequence: Synthetic oligonucleotide
  Target: ATXN2; (-) strand; PAM type: YTN; PAM sequence: TTT
cagtcctgtgcatggctaaa

SEQ ID NO: 58227 - DNA, 20 bp, Artificial Sequence
  Description of Artificial Sequence: Synthetic oligonucleotide
  Target: ATXN2; (-) strand; PAM type: YTN; PAM sequence: TTT
tcagtcctgtgcatggctaa

SEQ ID NO: 58228 - DNA, 20 bp, Artificial Sequence
  Description of Artificial Sequence: Synthetic oligonucleotide
  Target: ATXN2; (-) strand; PAM type: YTN; PAM sequence: CTT
ttcagtcctgtgcatggcta

SEQ ID NO: 58229 - DNA, 20 bp, Artificial Sequence
  Description of Artificial Sequence: Synthetic oligonucleotide
  Target: ATXN2; (-) strand; PAM type: YTN; PAM sequence: CTA
agggaaaaacttttcagtcc

SEQ ID NO: 58230 - DNA, 20 bp, Artificial Sequence
  Description of Artificial Sequence: Synthetic oligonucleotide
  Target: ATXN2; (-) strand; PAM type: YTN; PAM sequence: TTG
atgaaatactaagggaaaaa

SEQ ID NO: 58231 - DNA, 20 bp, Artificial Sequence
  Description of Artificial Sequence: Synthetic oligonucleotide
  Target: ATXN2; (-) strand; PAM type: YTN; PAM sequence: TTG
aataggattgatgaaatact

SEQ ID NO: 58232 - DNA, 20 bp, Artificial Sequence
  Description of Artificial Sequence: Synthetic oligonucleotide
  Target: ATXN2; (-) strand; PAM type: YTN; PAM sequence: TTA
attgaataggattgatgaaa

SEQ ID NO: 58233 - DNA, 20 bp, Artificial Sequence
  Description of Artificial Sequence: Synthetic oligonucleotide
  Target: ATXN2; (-) strand; PAM type: YTN; PAM sequence: TTT
aattgaataggattgatgaa

SEQ ID NO: 58234 - DNA, 20 bp, Artificial Sequence
  Description of Artificial Sequence: Synthetic oligonucleotide
  Target: ATXN2; (-) strand; PAM type: YTN; PAM sequence: TTT
taattgaataggattgatga

SEQ ID NO: 58235 - DNA, 20 bp, Artificial Sequence
  Description of Artificial Sequence: Synthetic oligonucleotide
  Target: ATXN2; (-) strand; PAM type: YTN; PAM sequence: TTT
ttaattgaataggattgatg

SEQ ID NO: 58236 - DNA, 20 bp, Artificial Sequence
  Description of Artificial Sequence: Synthetic oligonucleotide
  Target: ATXN2; (-) strand; PAM type: YTN; PAM sequence: CTA
ccaggatttttaattgaata

SEQ ID NO: 58237 - DNA, 20 bp, Artificial Sequence
  Description of Artificial Sequence: Synthetic oligonucleotide
  Target: ATXN2; (-) strand; PAM type: YTN; PAM sequence: TTA
tgcctaccaggatttttaat

SEQ ID NO: 58238 - DNA, 20 bp, Artificial Sequence
  Description of Artificial Sequence: Synthetic oligonucleotide
  Target: ATXN2; (-) strand; PAM type: YTN; PAM sequence: TTT
atgcctaccaggatttttaa

SEQ ID NO: 58239 - DNA, 20 bp, Artificial Sequence
  Description of Artificial Sequence: Synthetic oligonucleotide
  Target: ATXN2; (-) strand; PAM type: YTN; PAM sequence: CTG
ataagatgaaatttatgcct

SEQ ID NO: 58240 - DNA, 20 bp, Artificial Sequence
  Description of Artificial Sequence: Synthetic oligonucleotide
  Target: ATXN2; (-) strand; PAM type: YTN; PAM sequence: TTC
tgataagatgaaatttatgc

SEQ ID NO: 58241 - DNA, 20 bp, Artificial Sequence
  Description of Artificial Sequence: Synthetic oligonucleotide
  Target: ATXN2; (-) strand; PAM type: YTN; PAM sequence: TTA
tattctgataagatgaaatt

SEQ ID NO: 58242 - DNA, 20 bp, Artificial Sequence
  Description of Artificial Sequence: Synthetic oligonucleotide
  Target: ATXN2; (-) strand; PAM type: YTN; PAM sequence: TTT
atattctgataagatgaaat

SEQ ID NO: 58243 - DNA, 20 bp, Artificial Sequence
  Description of Artificial Sequence: Synthetic oligonucleotide
  Target: ATXN2; (-) strand; PAM type: YTN; PAM sequence: TTA
tttatattctgataagatga

SEQ ID NO: 58244 - DNA, 20 bp, Artificial Sequence
  Description of Artificial Sequence: Synthetic oligonucleotide
  Target: ATXN2; (-) strand; PAM type: YTN; PAM sequence: TTT
atttatattctgataagatg

SEQ ID NO: 58245 - DNA, 20 bp, Artificial Sequence
  Description of Artificial Sequence: Synthetic oligonucleotide
  Target: ATXN2; (-) strand; PAM type: YTN; PAM sequence: TTA
aaatgtttatttatattctg

SEQ ID NO: 58246 - DNA, 20 bp, Artificial Sequence
  Description of Artificial Sequence: Synthetic oligonucleotide
  Target: ATXN2; (-) strand; PAM type: YTN; PAM sequence: CTT
aaaatgtttatttatattct

SEQ ID NO: 58247 - DNA, 20 bp, Artificial Sequence
  Description of Artificial Sequence: Synthetic oligonucleotide
  Target: ATXN2; (-) strand; PAM type: YTN; PAM sequence: TTG
gtataaacttaaaatgttta

SEQ ID NO: 58248 - DNA, 20 bp, Artificial Sequence
  Description of Artificial Sequence: Synthetic oligonucleotide
  Target: ATXN2; (-) strand; PAM type: YTN; PAM sequence: CTT
ggtataaacttaaaatgttt

SEQ ID NO: 58249 - DNA, 20 bp, Artificial Sequence
  Description of Artificial Sequence: Synthetic oligonucleotide
  Target: ATXN2; (-) strand; PAM type: YTN; PAM sequence: TTA
tacacacacacacacacaca

SEQ ID NO: 58250 - DNA, 20 bp, Artificial Sequence
  Description of Artificial Sequence: Synthetic oligonucleotide
  Target: ATXN2; (-) strand; PAM type: YTN; PAM sequence: TTT
atacacacacacacacacac

SEQ ID NO: 58251 - DNA, 20 bp, Artificial Sequence
  Description of Artificial Sequence: Synthetic oligonucleotide
  Target: ATXN2; (-) strand; PAM type: YTN; PAM sequence: TTA
tttatacacacacacacaca

SEQ ID NO: 58252 - DNA, 20 bp, Artificial Sequence
  Description of Artificial Sequence: Synthetic oligonucleotide
  Target: ATXN2; (-) strand; PAM type: YTN; PAM sequence: TTT
atttatacacacacacacac

SEQ ID NO: 58253 - DNA, 20 bp, Artificial Sequence
  Description of Artificial Sequence: Synthetic oligonucleotide
  Target: ATXN2; (-) strand; PAM type: YTN; PAM sequence: TTA
aaatgtttatttatacacac

SEQ ID NO: 58254 - DNA, 20 bp, Artificial Sequence
  Description of Artificial Sequence: Synthetic oligonucleotide
  Target: ATXN2; (-) strand; PAM type: YTN; PAM sequence: TTT
aaaatgtttatttatacaca

SEQ ID NO: 58255 - DNA, 20 bp, Artificial Sequence
  Description of Artificial Sequence: Synthetic oligonucleotide
  Target: ATXN2; (-) strand; PAM type: YTN; PAM sequence: TTG
gtataaatttaaaatgttta

SEQ ID NO: 58256 - DNA, 20 bp, Artificial Sequence
  Description of Artificial Sequence: Synthetic oligonucleotide
  Target: ATXN2; (-) strand; PAM type: YTN; PAM sequence: CTT
ggtataaatttaaaatgttt

SEQ ID NO: 58257 - DNA, 20 bp, Artificial Sequence
  Description of Artificial Sequence: Synthetic oligonucleotide
  Target: ATXN2; (-) strand; PAM type: YTN; PAM sequence: TTA
tacacacacacacacacaca

SEQ ID NO: 58258 - DNA, 20 bp, Artificial Sequence
  Description of Artificial Sequence: Synthetic oligonucleotide
  Target: ATXN2; (-) strand; PAM type: YTN; PAM sequence: TTT
atacacacacacacacacac

SEQ ID NO: 58259 - DNA, 20 bp, Artificial Sequence
  Description of Artificial Sequence: Synthetic oligonucleotide
  Target: ATXN2; (-) strand; PAM type: YTN; PAM sequence: CTT
tatacacacacacacacaca

SEQ ID NO: 58260 - DNA, 20 bp, Artificial Sequence
  Description of Artificial Sequence: Synthetic oligonucleotide
  Target: ATXN2; (-) strand; PAM type: YTN; PAM sequence: CTA
aacagctttatacacacaca

SEQ ID NO: 58261 - DNA, 20 bp, Artificial Sequence
  Description of Artificial Sequence: Synthetic oligonucleotide
  Target: ATXN2; (-) strand; PAM type: YTN; PAM sequence: TTC
ctaaacagctttatacacac

SEQ ID NO: 58262 - DNA, 20 bp, Artificial Sequence
  Description of Artificial Sequence: Synthetic oligonucleotide
  Target: ATXN2; (-) strand; PAM type: YTN; PAM sequence: CTT
cctaaacagctttatacaca

SEQ ID NO: 58263 - DNA, 20 bp, Artificial Sequence
  Description of Artificial Sequence: Synthetic oligonucleotide
  Target: ATXN2; (-) strand; PAM type: YTN; PAM sequence: TTA
gagaaacttcctaaacagct

SEQ ID NO: 58264 - DNA, 20 bp, Artificial Sequence
  Description of Artificial Sequence: Synthetic oligonucleotide
  Target: ATXN2; (-) strand; PAM type: YTN; PAM sequence: TTG
ttagagaaacttcctaaaca

SEQ ID NO: 58265 - DNA, 20 bp, Artificial Sequence
  Description of Artificial Sequence: Synthetic oligonucleotide
  Target: ATXN2; (-) strand; PAM type: YTN; PAM sequence: CTT
gttagagaaacttcctaaac

SEQ ID NO: 58266 - DNA, 20 bp, Artificial Sequence
  Description of Artificial Sequence: Synthetic oligonucleotide
  Target: ATXN2; (-) strand; PAM type: YTN; PAM sequence: TTC
cttgttagagaaacttccta

SEQ ID NO: 58267 - DNA, 20 bp, Artificial Sequence
  Description of Artificial Sequence: Synthetic oligonucleotide
  Target: ATXN2; (-) strand; PAM type: YTN; PAM sequence: TTT
ccttgttagagaaacttcct

SEQ ID NO: 58268 - DNA, 20 bp, Artificial Sequence
  Description of Artificial Sequence: Synthetic oligonucleotide
  Target: ATXN2; (-) strand; PAM type: YTN; PAM sequence: TTT
tccttgttagagaaacttcc

SEQ ID NO: 58269 - DNA, 20 bp, Artificial Sequence
  Description of Artificial Sequence: Synthetic oligonucleotide
  Target: ATXN2; (-) strand; PAM type: YTN; PAM sequence: CTA
atattttccttgttagagaa

SEQ ID NO: 58270 - DNA, 20 bp, Artificial Sequence
  Description of Artificial Sequence: Synthetic oligonucleotide
  Target: ATXN2; (-) strand; PAM type: YTN; PAM sequence: CTG
ggaaatgcctaatattttcc

SEQ ID NO: 58271 - DNA, 20 bp, Artificial Sequence
  Description of Artificial Sequence: Synthetic oligonucleotide
  Target: ATXN2; (-) strand; PAM type: YTN; PAM sequence: TTG
cataccaagcaaatgtgact

SEQ ID NO: 58272 - DNA, 20 bp, Artificial Sequence
  Description of Artificial Sequence: Synthetic oligonucleotide
  Target: ATXN2; (-) strand; PAM type: YTN; PAM sequence: TTT
gcataccaagcaaatgtgac

SEQ ID NO: 58273 - DNA, 20 bp, Artificial Sequence
  Description of Artificial Sequence: Synthetic oligonucleotide
  Target: ATXN2; (-) strand; PAM type: YTN; PAM sequence: TTT
tgcataccaagcaaatgtga

SEQ ID NO: 58274 - DNA, 20 bp, Artificial Sequence
  Description of Artificial Sequence: Synthetic oligonucleotide
  Target: ATXN2; (-) strand; PAM type: YTN; PAM sequence: TTT
ttgcataccaagcaaatgtg

SEQ ID NO: 58275 - DNA, 20 bp, Artificial Sequence
  Description of Artificial Sequence: Synthetic oligonucleotide
  Target: ATXN2; (-) strand; PAM type: YTN; PAM sequence: TTC
agaaatcaatttttgcatac

SEQ ID NO: 58276 - DNA, 20 bp, Artificial Sequence
  Description of Artificial Sequence: Synthetic oligonucleotide
  Target: ATXN2; (-) strand; PAM type: YTN; PAM sequence: TTT
cagaaatcaatttttgcata

SEQ ID NO: 58277 - DNA, 20 bp, Artificial Sequence
  Description of Artificial Sequence: Synthetic oligonucleotide
  Target: ATXN2; (-) strand; PAM type: YTN; PAM sequence: TTG
tttcagaaatcaatttttgc

SEQ ID NO: 58278 - DNA, 20 bp, Artificial Sequence
  Description of Artificial Sequence: Synthetic oligonucleotide
  Target: ATXN2; (-) strand; PAM type: YTN; PAM sequence: TTA
atgaaaaatggagttgtttc

SEQ ID NO: 58279 - DNA, 20 bp, Artificial Sequence
  Description of Artificial Sequence: Synthetic oligonucleotide
  Target: ATXN2; (-) strand; PAM type: YTN; PAM sequence: CTG
gagttaatgaaaaatggagt

SEQ ID NO: 58280 - DNA, 20 bp, Artificial Sequence
  Description of Artificial Sequence: Synthetic oligonucleotide
  Target: ATXN2; (-) strand; PAM type: YTN; PAM sequence: TTA
agaaggctggagttaatgaa

SEQ ID NO: 58281 - DNA, 20 bp, Artificial Sequence
  Description of Artificial Sequence: Synthetic oligonucleotide
  Target: ATXN2; (-) strand; PAM type: YTN; PAM sequence: TTT
aagaaggctggagttaatga

SEQ ID NO: 58282 - DNA, 20 bp, Artificial Sequence
  Description of Artificial Sequence: Synthetic oligonucleotide
  Target: ATXN2; (-) strand; PAM type: YTN; PAM sequence: TTA
aaatggaaatacccaattta

SEQ ID NO: 58283 - DNA, 20 bp, Artificial Sequence
  Description of Artificial Sequence: Synthetic oligonucleotide
  Target: ATXN2; (-) strand; PAM type: YTN; PAM sequence: TTT
aaaatggaaatacccaattt

SEQ ID NO: 58284 - DNA, 20 bp, Artificial Sequence
  Description of Artificial Sequence: Synthetic oligonucleotide
  Target: ATXN2; (-) strand; PAM type: YTN; PAM sequence: TTT
taaaatggaaatacccaatt

SEQ ID NO: 58285 - DNA, 20 bp, Artificial Sequence
  Description of Artificial Sequence: Synthetic oligonucleotide
  Target: ATXN2; (-) strand; PAM type: YTN; PAM sequence: TTT
ttaaaatggaaatacccaat

SEQ ID NO: 58286 - DNA, 20 bp, Artificial Sequence
  Description of Artificial Sequence: Synthetic oligonucleotide
  Target: ATXN2; (-) strand; PAM type: YTN; PAM sequence: TTC
agtttttaaaatggaaatac

SEQ ID NO: 58287 - DNA, 20 bp, Artificial Sequence
  Description of Artificial Sequence: Synthetic oligonucleotide
  Target: ATXN2; (-) strand; PAM type: YTN; PAM sequence: TTA
tatatataaataattcagtt

SEQ ID NO: 58288 - DNA, 20 bp, Artificial Sequence
  Description of Artificial Sequence: Synthetic oligonucleotide
  Target: ATXN2; (-) strand; PAM type: YTN; PAM sequence: CTT
atatatataaataattcagt

SEQ ID NO: 58289 - DNA, 20 bp, Artificial Sequence
  Description of Artificial Sequence: Synthetic oligonucleotide
  Target: ATXN2; (-) strand; PAM type: YTN; PAM sequence: TTG
aaagtacttatatatataaa

SEQ ID NO: 58290 - DNA, 20 bp, Artificial Sequence
  Description of Artificial Sequence: Synthetic oligonucleotide
  Target: ATXN2; (-) strand; PAM type: YTN; PAM sequence: TTA
ttgaaagtacttatatatat

SEQ ID NO: 58291 - DNA, 20 bp, Artificial Sequence
  Description of Artificial Sequence: Synthetic oligonucleotide
  Target: ATXN2; (-) strand; PAM type: YTN; PAM sequence: TTG
tgccagtcaaattattgaaa

SEQ ID NO: 58292 - DNA, 20 bp, Artificial Sequence
  Description of Artificial Sequence: Synthetic oligonucleotide
  Target: ATXN2; (-) strand; PAM type: YTN; PAM sequence: CTT
gtgccagtcaaattattgaa

SEQ ID NO: 58293 - DNA, 20 bp, Artificial Sequence
  Description of Artificial Sequence: Synthetic oligonucleotide
  Target: ATXN2; (-) strand; PAM type: YTN; PAM sequence: TTC
cttgtgccagtcaaattatt

SEQ ID NO: 58294 - DNA, 20 bp, Artificial Sequence
  Description of Artificial Sequence: Synthetic oligonucleotide
  Target: ATXN2; (-) strand; PAM type: YTN; PAM sequence: TTT
ccttgtgccagtcaaattat

SEQ ID NO: 58295 - DNA, 20 bp, Artificial Sequence
  Description of Artificial Sequence: Synthetic oligonucleotide
  Target: ATXN2; (-) strand; PAM type: YTN; PAM sequence: TTT
tccttgtgccagtcaaatta

SEQ ID NO: 58296 - DNA, 20 bp, Artificial Sequence
  Description of Artificial Sequence: Synthetic oligonucleotide
  Target: ATXN2; (-) strand; PAM type: YTN; PAM sequence: TTG
aacaatattttccttgtgcc

SEQ ID NO: 58297 - DNA, 20 bp, Artificial Sequence
  Description of Artificial Sequence: Synthetic oligonucleotide
  Target: ATXN2; (-) strand; PAM type: YTN; PAM sequence: TTG
ttgaacaatattttccttgt

SEQ ID NO: 58298 - DNA, 20 bp, Artificial Sequence
  Description of Artificial Sequence: Synthetic oligonucleotide
  Target: ATXN2; (-) strand; PAM type: YTN; PAM sequence: CTT
gttgaacaatattttccttg

SEQ ID NO: 58299 - DNA, 20 bp, Artificial Sequence
  Description of Artificial Sequence: Synthetic oligonucleotide
  Target: ATXN2; (-) strand; PAM type: YTN; PAM sequence: TTA
agggagtagacttgttgaac

SEQ ID NO: 58300 - DNA, 20 bp, Artificial Sequence
  Description of Artificial Sequence: Synthetic oligonucleotide
  Target: ATXN2; (-) strand; PAM type: YTN; PAM sequence: TTA
aaggatacatgttaagggag

SEQ ID NO: 58301 - DNA, 20 bp, Artificial Sequence
  Description of Artificial Sequence: Synthetic oligonucleotide
  Target: ATXN2; (-) strand; PAM type: YTN; PAM sequence: TTT
aaaggatacatgttaaggga

SEQ ID NO: 58302 - DNA, 20 bp, Artificial Sequence
  Description of Artificial Sequence: Synthetic oligonucleotide
  Target: ATXN2; (-) strand; PAM type: YTN; PAM sequence: TTT
taaaggatacatgttaaggg

SEQ ID NO: 58303 - DNA, 20 bp, Artificial Sequence
  Description of Artificial Sequence: Synthetic oligonucleotide
  Target: ATXN2; (-) strand; PAM type: YTN; PAM sequence: TTT
ttaaaggatacatgttaagg

SEQ ID NO: 58304 - DNA, 20 bp, Artificial Sequence
  Description of Artificial Sequence: Synthetic oligonucleotide
  Target: ATXN2; (-) strand; PAM type: YTN; PAM sequence: CTT
tttaaaggatacatgttaag

SEQ ID NO: 58305 - DNA, 20 bp, Artificial Sequence
  Description of Artificial Sequence: Synthetic oligonucleotide
  Target: ATXN2; (-) strand; PAM type: YTN; PAM sequence: TTG
tacagtaaaacactttttaa

SEQ ID NO: 58306 - DNA, 20 bp, Artificial Sequence
  Description of Artificial Sequence: Synthetic oligonucleotide
  Target: ATXN2; (-) strand; PAM type: YTN; PAM sequence: TTA
attgtacagtaaaacacttt

SEQ ID NO: 58307 - DNA, 20 bp, Artificial Sequence
  Description of Artificial Sequence: Synthetic oligonucleotide
  Target: ATXN2; (-) strand; PAM type: YTN; PAM sequence: TTT
aattgtacagtaaaacactt

SEQ ID NO: 58308 - DNA, 20 bp, Artificial Sequence
  Description of Artificial Sequence: Synthetic oligonucleotide
  Target: ATXN2; (-) strand; PAM type: YTN; PAM sequence: TTT
taattgtacagtaaaacact

SEQ ID NO: 58309 - DNA, 20 bp, Artificial Sequence
  Description of Artificial Sequence: Synthetic oligonucleotide
  Target: ATXN2; (-) strand; PAM type: YTN; PAM sequence: TTT
ttaattgtacagtaaaacac

SEQ ID NO: 58310 - DNA, 20 bp, Artificial Sequence
  Description of Artificial Sequence: Synthetic oligonucleotide
  Target: ATXN2; (-) strand; PAM type: YTN; PAM sequence: CTA
atttttaattgtacagtaaa

SEQ ID NO: 58311 - DNA, 20 bp, Artificial Sequence
  Description of Artificial Sequence: Synthetic oligonucleotide
  Target: ATXN2; (-) strand; PAM type: YTN; PAM sequence: TTA
tactaatttttaattgtaca

SEQ ID NO: 58312 - DNA, 20 bp, Artificial Sequence
  Description of Artificial Sequence: Synthetic oligonucleotide
  Target: ATXN2; (-) strand; PAM type: YTN; PAM sequence: TTT
atactaatttttaattgtac

SEQ ID NO: 58313 - DNA, 20 bp, Artificial Sequence
  Description of Artificial Sequence: Synthetic oligonucleotide
  Target: ATXN2; (-) strand; PAM type: YTN; PAM sequence: TTT
tatactaatttttaattgta

SEQ ID NO: 58314 - DNA, 20 bp, Artificial Sequence
  Description of Artificial Sequence: Synthetic oligonucleotide
  Target: ATXN2; (-) strand; PAM type: YTN; PAM sequence: TTT
ttatactaatttttaattgt

SEQ ID NO: 58315 - DNA, 20 bp, Artificial Sequence
  Description of Artificial Sequence: Synthetic oligonucleotide
  Target: ATXN2; (-) strand; PAM type: YTN; PAM sequence: TTT
tttatactaatttttaattg

SEQ ID NO: 58316 - DNA, 20 bp, Artificial Sequence
  Description of Artificial Sequence: Synthetic oligonucleotide
  Target: ATXN2; (-) strand; PAM type: YTN; PAM sequence: TTG
ggttttttatactaattttt

SEQ ID NO: 58317 - DNA, 20 bp, Artificial Sequence
  Description of Artificial Sequence: Synthetic oligonucleotide
  Target: ATXN2; (-) strand; PAM type: YTN; PAM sequence: TTG
ccagtgagttgggtttttta

SEQ ID NO: 58318 - DNA, 20 bp, Artificial Sequence
  Description of Artificial Sequence: Synthetic oligonucleotide
  Target: ATXN2; (-) strand; PAM type: YTN; PAM sequence: TTT
gccagtgagttgggtttttt

SEQ ID NO: 58319 - DNA, 20 bp, Artificial Sequence
  Description of Artificial Sequence: Synthetic oligonucleotide
  Target: ATXN2; (-) strand; PAM type: YTN; PAM sequence: CTT
tgccagtgagttgggttttt

SEQ ID NO: 58320 - DNA, 20 bp, Artificial Sequence
  Description of Artificial Sequence: Synthetic oligonucleotide
  Target: ATXN2; (-) strand; PAM type: YTN; PAM sequence: CTA
ctttgccagtgagttgggtt

SEQ ID NO: 58321 - DNA, 20 bp, Artificial Sequence
  Description of Artificial Sequence: Synthetic oligonucleotide
  Target: ATXN2; (-) strand; PAM type: YTN; PAM sequence: TTC
tactttgccagtgagttggg

SEQ ID NO: 58322 - DNA, 20 bp, Artificial Sequence
  Description of Artificial Sequence: Synthetic oligonucleotide
  Target: ATXN2; (-) strand; PAM type: YTN; PAM sequence: TTT
ctactttgccagtgagttgg

SEQ ID NO: 58323 - DNA, 20 bp, Artificial Sequence
  Description of Artificial Sequence: Synthetic oligonucleotide
  Target: ATXN2; (-) strand; PAM type: YTN; PAM sequence: CTT
tctactttgccagtgagttg

SEQ ID NO: 58324 - DNA, 20 bp, Artificial Sequence
  Description of Artificial Sequence: Synthetic oligonucleotide
  Target: ATXN2; (-) strand; PAM type: YTN; PAM sequence: TTC
tttctactttgccagtgagt

SEQ ID NO: 58325 - DNA, 20 bp, Artificial Sequence
  Description of Artificial Sequence: Synthetic oligonucleotide
  Target: ATXN2; (-) strand; PAM type: YTN; PAM sequence: CTT
ctttctactttgccagtgag

SEQ ID NO: 58326 - DNA, 20 bp, Artificial Sequence
  Description of Artificial Sequence: Synthetic oligonucleotide
  Target: ATXN2; (-) strand; PAM type: YTN; PAM sequence: TTA
ccatacaacaaggagacaag

SEQ ID NO: 58327 - DNA, 20 bp, Artificial Sequence
  Description of Artificial Sequence: Synthetic oligonucleotide
  Target: ATXN2; (-) strand; PAM type: YTN; PAM sequence: TTC
agcatgtcccaaattaccat

SEQ ID NO: 58328 - DNA, 20 bp, Artificial Sequence
  Description of Artificial Sequence: Synthetic oligonucleotide
  Target: ATXN2; (-) strand; PAM type: YTN; PAM sequence: TTC
ccaaattcagcatgtcccaa

SEQ ID NO: 58329 - DNA, 20 bp, Artificial Sequence
  Description of Artificial Sequence: Synthetic oligonucleotide
  Target: ATXN2; (-) strand; PAM type: YTN; PAM sequence: TTT
cccaaattcagcatgtccca

SEQ ID NO: 58330 - DNA, 20 bp, Artificial Sequence
  Description of Artificial Sequence: Synthetic oligonucleotide
  Target: ATXN2; (-) strand; PAM type: YTN; PAM sequence: CTA
tttcccaaattcagcatgtc

SEQ ID NO: 58331 - DNA, 20 bp, Artificial Sequence
  Description of Artificial Sequence: Synthetic oligonucleotide
  Target: ATXN2; (-) strand; PAM type: YTN; PAM sequence: TTC
tatttcccaaattcagcatg

SEQ ID NO: 58332 - DNA, 20 bp, Artificial Sequence
  Description of Artificial Sequence: Synthetic oligonucleotide
  Target: ATXN2; (-) strand; PAM type: YTN; PAM sequence: TTT
ctatttcccaaattcagcat

SEQ ID NO: 58333 - DNA, 20 bp, Artificial Sequence
  Description of Artificial Sequence: Synthetic oligonucleotide
  Target: ATXN2; (-) strand; PAM type: YTN; PAM sequence: CTT
tctatttcccaaattcagca

SEQ ID NO: 58334 - DNA, 20 bp, Artificial Sequence
  Description of Artificial Sequence: Synthetic oligonucleotide
  Target: ATXN2; (-) strand; PAM type: YTN; PAM sequence: TTA
cctttctatttcccaaattc

SEQ ID NO: 58335 - DNA, 20 bp, Artificial Sequence
  Description of Artificial Sequence: Synthetic oligonucleotide
  Target: ATXN2; (-) strand; PAM type: YTN; PAM sequence: TTT
acctttctatttcccaaatt

SEQ ID NO: 58336 - DNA, 20 bp, Artificial Sequence
  Description of Artificial Sequence: Synthetic oligonucleotide
  Target: ATXN2; (-) strand; PAM type: YTN; PAM sequence: CTA
atttacctttctatttccca

SEQ ID NO: 58337 - DNA, 20 bp, Artificial Sequence
  Description of Artificial Sequence: Synthetic oligonucleotide
  Target: ATXN2; (-) strand; PAM type: YTN; PAM sequence: CTC
aaaaggctaatttacctttc

SEQ ID NO: 58338 - DNA, 20 bp, Artificial Sequence
  Description of Artificial Sequence: Synthetic oligonucleotide
  Target: ATXN2; (-) strand; PAM type: YTN; PAM sequence: TTG
gaaaatgcacacctcaaaag

SEQ ID NO: 58339 - DNA, 20 bp, Artificial Sequence
  Description of Artificial Sequence: Synthetic oligonucleotide
  Target: ATXN2; (-) strand; PAM type: YTN; PAM sequence: TTT
ggaaaatgcacacctcaaaa

SEQ ID NO: 58340 - DNA, 20 bp, Artificial Sequence
  Description of Artificial Sequence: Synthetic oligonucleotide
  Target: ATXN2; (-) strand; PAM type: YTN; PAM sequence: TTC
cagaaaatttggaaaatgca

SEQ ID NO: 58341 - DNA, 20 bp, Artificial Sequence
  Description of Artificial Sequence: Synthetic oligonucleotide
  Target: ATXN2; (-) strand; PAM type: YTN; PAM sequence: TTT
ccagaaaatttggaaaatgc

SEQ ID NO: 58342 - DNA, 20 bp, Artificial Sequence
  Description of Artificial Sequence: Synthetic oligonucleotide
  Target: ATXN2; (-) strand; PAM type: YTN; PAM sequence: CTT
tccagaaaatttggaaaatg

SEQ ID NO: 58343 - DNA, 20 bp, Artificial Sequence
  Description of Artificial Sequence: Synthetic oligonucleotide
  Target: ATXN2; (-) strand; PAM type: YTN; PAM sequence: CTA
atatgtcaacctttccagaa

SEQ ID NO: 58344 - DNA, 20 bp, Artificial Sequence
  Description of Artificial Sequence: Synthetic oligonucleotide
  Target: ATXN2; (-) strand; PAM type: YTN; PAM sequence: TTA
ctaatatgtcaacctttcca

SEQ ID NO: 58345 - DNA, 20 bp, Artificial Sequence
  Description of Artificial Sequence: Synthetic oligonucleotide
  Target: ATXN2; (-) strand; PAM type: YTN; PAM sequence: TTA
tgcatgaatacaaaaagaaa

SEQ ID NO: 58346 - DNA, 20 bp, Artificial Sequence
  Description of Artificial Sequence: Synthetic oligonucleotide
  Target: ATXN2; (-) strand; PAM type: YTN; PAM sequence: TTA
tgaaaatgaattatgcatga

SEQ ID NO: 58347 - DNA, 20 bp, Artificial Sequence
  Description of Artificial Sequence: Synthetic oligonucleotide
  Target: ATXN2; (-) strand; PAM type: YTN; PAM sequence: CTT
atgaaaatgaattatgcatg

SEQ ID NO: 58348 - DNA, 20 bp, Artificial Sequence
  Description of Artificial Sequence: Synthetic oligonucleotide
  Target: ATXN2; (-) strand; PAM type: YTN; PAM sequence: CTC
ttatgaaaatgaattatgca

SEQ ID NO: 58349 - DNA, 20 bp, Artificial Sequence
  Description of Artificial Sequence: Synthetic oligonucleotide
  Target: ATXN2; (-) strand; PAM type: YTN; PAM sequence: TTG
tcatctcttatgaaaatgaa

SEQ ID NO: 58350 - DNA, 20 bp, Artificial Sequence
  Description of Artificial Sequence: Synthetic oligonucleotide
  Target: ATXN2; (-) strand; PAM type: YTN; PAM sequence: CTT
gtcatctcttatgaaaatga

SEQ ID NO: 58351 - DNA, 20 bp, Artificial Sequence
  Description of Artificial Sequence: Synthetic oligonucleotide
  Target: ATXN2; (-) strand; PAM type: YTN; PAM sequence: TTA
aagtgcttgtcatctcttat

SEQ ID NO: 58352 - DNA, 20 bp, Artificial Sequence
  Description of Artificial Sequence: Synthetic oligonucleotide
  Target: ATXN2; (-) strand; PAM type: YTN; PAM sequence: TTT
aaagtgcttgtcatctctta

SEQ ID NO: 58353 - DNA, 20 bp, Artificial Sequence
  Description of Artificial Sequence: Synthetic oligonucleotide
  Target: ATXN2; (-) strand; PAM type: YTN; PAM sequence: CTG
tagcagtgtttaaagtgctt

SEQ ID NO: 58354 - DNA, 20 bp, Artificial Sequence
  Description of Artificial Sequence: Synthetic oligonucleotide
  Target: ATXN2; (-) strand; PAM type: YTN; PAM sequence: TTC
tgtagcagtgtttaaagtgc

SEQ ID NO: 58355 - DNA, 20 bp, Artificial Sequence
  Description of Artificial Sequence: Synthetic oligonucleotide
  Target: ATXN2; (-) strand; PAM type: YTN; PAM sequence: TTA
aaattctgtagcagtgttta

SEQ ID NO: 58356 - DNA, 20 bp, Artificial Sequence
  Description of Artificial Sequence: Synthetic oligonucleotide
  Target: ATXN2; (-) strand; PAM type: YTN; PAM sequence: TTT
aaaattctgtagcagtgttt

SEQ ID NO: 58357 - DNA, 20 bp, Artificial Sequence
  Description of Artificial Sequence: Synthetic oligonucleotide
  Target: ATXN2; (-) strand; PAM type: YTN; PAM sequence: TTT
taaaattctgtagcagtgtt

SEQ ID NO: 58358 - DNA, 20 bp, Artificial Sequence
  Description of Artificial Sequence: Synthetic oligonucleotide
  Target: ATXN2; (-) strand; PAM type: YTN; PAM sequence: CTT
ttaaaattctgtagcagtgt

SEQ ID NO: 58359 - DNA, 20 bp, Artificial Sequence
  Description of Artificial Sequence: Synthetic oligonucleotide
  Target: ATXN2; (-) strand; PAM type: YTN; PAM sequence: TTC
ttttaaaattctgtagcagt

SEQ ID NO: 58360 - DNA, 20 bp, Artificial Sequence
  Description of Artificial Sequence: Synthetic oligonucleotide
  Target: ATXN2; (-) strand; PAM type: YTN; PAM sequence: TTT
cttttaaaattctgtagcag

SEQ ID NO: 58361 - DNA, 20 bp, Artificial Sequence
  Description of Artificial Sequence: Synthetic oligonucleotide
  Target: ATXN2; (-) strand; PAM type: YTN; PAM sequence: CTT
tcttttaaaattctgtagca

SEQ ID NO: 58362 - DNA, 20 bp, Artificial Sequence
  Description of Artificial Sequence: Synthetic oligonucleotide
  Target: ATXN2; (-) strand; PAM type: YTN; PAM sequence: TTA
gtcctttcttttaaaattct

SEQ ID NO: 58363 - DNA, 20 bp, Artificial Sequence
  Description of Artificial Sequence: Synthetic oligonucleotide
  Target: ATXN2; (-) strand; PAM type: YTN; PAM sequence: TTT
agtcctttcttttaaaattc

SEQ ID NO: 58364 - DNA, 20 bp, Artificial Sequence
  Description of Artificial Sequence: Synthetic oligonucleotide
  Target: ATXN2; (-) strand; PAM type: YTN; PAM sequence: TTC
cggtttagtcctttctttta

SEQ ID NO: 58365 - DNA, 20 bp, Artificial Sequence
  Description of Artificial Sequence: Synthetic oligonucleotide
  Target: ATXN2; (-) strand; PAM type: YTN; PAM sequence: CTT
ccggtttagtcctttctttt

SEQ ID NO: 58366 - DNA, 20 bp, Artificial Sequence
  Description of Artificial Sequence: Synthetic oligonucleotide
  Target: ATXN2; (-) strand; PAM type: YTN; PAM sequence: CTA
agtacagaagaacagtgtct

SEQ ID NO: 58367 - DNA, 20 bp, Artificial Sequence
  Description of Artificial Sequence: Synthetic oligonucleotide
  Target: ATXN2; (-) strand; PAM type: YTN; PAM sequence: TTG
acacctaagtacagaagaac

SEQ ID NO: 58368 - DNA, 20 bp, Artificial Sequence
  Description of Artificial Sequence: Synthetic oligonucleotide
  Target: ATXN2; (-) strand; PAM type: YTN; PAM sequence: CTT
gacacctaagtacagaagaa

SEQ ID NO: 58369 - DNA, 20 bp, Artificial Sequence
  Description of Artificial Sequence: Synthetic oligonucleotide
  Target: ATXN2; (-) strand; PAM type: YTN; PAM sequence: TTA
agcaagtcagcatgacaact

SEQ ID NO: 58370 - DNA, 20 bp, Artificial Sequence
  Description of Artificial Sequence: Synthetic oligonucleotide
  Target: ATXN2; (-) strand; PAM type: YTN; PAM sequence: TTT
aagcaagtcagcatgacaac

SEQ ID NO: 58371 - DNA, 20 bp, Artificial Sequence
  Description of Artificial Sequence: Synthetic oligonucleotide
  Target: ATXN2; (-) strand; PAM type: YTN; PAM sequence: TTT
taagcaagtcagcatgacaa

SEQ ID NO: 58372 - DNA, 20 bp, Artificial Sequence
  Description of Artificial Sequence: Synthetic oligonucleotide
  Target: ATXN2; (-) strand; PAM type: YTN; PAM sequence: CTT
ttaagcaagtcagcatgaca

SEQ ID NO: 58373 - DNA, 20 bp, Artificial Sequence
  Description of Artificial Sequence: Synthetic oligonucleotide
  Target: ATXN2; (-) strand; PAM type: YTN; PAM sequence: TTA
cttttaagcaagtcagcatg

SEQ ID NO: 58374 - DNA, 20 bp, Artificial Sequence
  Description of Artificial Sequence: Synthetic oligonucleotide
  Target: ATXN2; (-) strand; PAM type: YTN; PAM sequence: TTT
acttttaagcaagtcagcat

SEQ ID NO: 58375 - DNA, 20 bp, Artificial Sequence
  Description of Artificial Sequence: Synthetic oligonucleotide
  Target: ATXN2; (-) strand; PAM type: YTN; PAM sequence: TTT
tacttttaagcaagtcagca

SEQ ID NO: 58376 - DNA, 20 bp, Artificial Sequence
  Description of Artificial Sequence: Synthetic oligonucleotide
  Target: ATXN2; (-) strand; PAM type: YTN; PAM sequence: CTT
ttacttttaagcaagtcagc

SEQ ID NO: 58377 - DNA, 20 bp, Artificial Sequence
  Description of Artificial Sequence: Synthetic oligonucleotide
  Target: ATXN2; (-) strand; PAM type: YTN; PAM sequence: TTC
cttttacttttaagcaagtc

SEQ ID NO: 58378 - DNA, 20 bp, Artificial Sequence
  Description of Artificial Sequence: Synthetic oligonucleotide
  Target: ATXN2; (-) strand; PAM type: YTN; PAM sequence: TTA
ttccttttacttttaagcaa

SEQ ID NO: 58379 - DNA, 20 bp, Artificial Sequence
  Description of Artificial Sequence: Synthetic oligonucleotide
  Target: ATXN2; (-) strand; PAM type: YTN; PAM sequence: TTT
attccttttacttttaagca

SEQ ID NO: 58380 - DNA, 20 bp, Artificial Sequence
  Description of Artificial Sequence: Synthetic oligonucleotide
  Target: ATXN2; (-) strand; PAM type: YTN; PAM sequence: TTT
tattccttttacttttaagc

SEQ ID NO: 58381 - DNA, 20 bp, Artificial Sequence
  Description of Artificial Sequence: Synthetic oligonucleotide
  Target: ATXN2; (-) strand; PAM type: YTN; PAM sequence: TTA
gataatgattttattccttt

SEQ ID NO: 58382 - DNA, 20 bp, Artificial Sequence
  Description of Artificial Sequence: Synthetic oligonucleotide
  Target: ATXN2; (-) strand; PAM type: YTN; PAM sequence: TTA
ttagataatgattttattcc

SEQ ID NO: 58383 - DNA, 20 bp, Artificial Sequence
  Description of Artificial Sequence: Synthetic oligonucleotide
  Target: ATXN2; (-) strand; PAM type: YTN; PAM sequence: TTT
attagataatgattttattc

SEQ ID NO: 58384 - DNA, 20 bp, Artificial Sequence
  Description of Artificial Sequence: Synthetic oligonucleotide
  Target: ATXN2; (-) strand; PAM type: YTN; PAM sequence: TTT
tattagataatgattttatt

SEQ ID NO: 58385 - DNA, 20 bp, Artificial Sequence
  Description of Artificial Sequence: Synthetic oligonucleotide
  Target: ATXN2; (-) strand; PAM type: YTN; PAM sequence: TTT
ttattagataatgattttat

SEQ ID NO: 58386 - DNA, 20 bp, Artificial Sequence
  Description of Artificial Sequence: Synthetic oligonucleotide
  Target: ATXN2; (-) strand; PAM type: YTN; PAM sequence: TTG
gtgtttttattagataatga

SEQ ID NO: 58387 - DNA, 20 bp, Artificial Sequence
  Description of Artificial Sequence: Synthetic oligonucleotide
  Target: ATXN2; (-) strand; PAM type: YTN; PAM sequence: TTC
agtagaatgccatgttggtg

SEQ ID NO: 58388 - DNA, 20 bp, Artificial Sequence
  Description of Artificial Sequence: Synthetic oligonucleotide
  Target: ATXN2; (-) strand; PAM type: YTN; PAM sequence: TTG
ttcagtagaatgccatgttg

SEQ ID NO: 58389 - DNA, 20 bp, Artificial Sequence
  Description of Artificial Sequence: Synthetic oligonucleotide
  Target: ATXN2; (-) strand; PAM type: YTN; PAM sequence: TTA
tatcaaggttgttcagtaga

SEQ ID NO: 58390 - DNA, 20 bp, Artificial Sequence
  Description of Artificial Sequence: Synthetic oligonucleotide
  Target: ATXN2; (-) strand; PAM type: YTN; PAM sequence: TTT
atatcaaggttgttcagtag

SEQ ID NO: 58391 - DNA, 20 bp, Artificial Sequence
  Description of Artificial Sequence: Synthetic oligonucleotide
  Target: ATXN2; (-) strand; PAM type: YTN; PAM sequence: TTG
gtacatgatttatatcaagg

SEQ ID NO: 58392 - DNA, 20 bp, Artificial Sequence
  Description of Artificial Sequence: Synthetic oligonucleotide
  Target: ATXN2; (-) strand; PAM type: YTN; PAM sequence: TTT
ggtacatgatttatatcaag

SEQ ID NO: 58393 - DNA, 20 bp, Artificial Sequence
  Description of Artificial Sequence: Synthetic oligonucleotide
  Target: ATXN2; (-) strand; PAM type: YTN; PAM sequence: TTT
tggtacatgatttatatcaa

SEQ ID NO: 58394 - DNA, 20 bp, Artificial Sequence
  Description of Artificial Sequence: Synthetic oligonucleotide
  Target: ATXN2; (-) strand; PAM type: YTN; PAM sequence: TTA
ttttggtacatgatttatat

SEQ ID NO: 58395 - DNA, 20 bp, Artificial Sequence
  Description of Artificial Sequence: Synthetic oligonucleotide
  Target: ATXN2; (-) strand; PAM type: YTN; PAM sequence: TTT
attttggtacatgatttata

SEQ ID NO: 58396 - DNA, 20 bp, Artificial Sequence
  Description of Artificial Sequence: Synthetic oligonucleotide
  Target: ATXN2; (-) strand; PAM type: YTN; PAM sequence: TTT
tattttggtacatgatttat

SEQ ID NO: 58397 - DNA, 20 bp, Artificial Sequence
  Description of Artificial Sequence: Synthetic oligonucleotide
  Target: ATXN2; (-) strand; PAM type: YTN; PAM sequence: TTG
taaaatagttttattttggt

SEQ ID NO: 58398 - DNA, 20 bp, Artificial Sequence
  Description of Artificial Sequence: Synthetic oligonucleotide
  Target: ATXN2; (-) strand; PAM type: YTN; PAM sequence: CTT
gtaaaatagttttattttgg

SEQ ID NO: 58399 - DNA, 20 bp, Artificial Sequence
  Description of Artificial Sequence: Synthetic oligonucleotide
  Target: ATXN2; (-) strand; PAM type: YTN; PAM sequence: TTA
aacttgtaaaatagttttat

SEQ ID NO: 58400 - DNA, 20 bp, Artificial Sequence
  Description of Artificial Sequence: Synthetic oligonucleotide
  Target: ATXN2; (-) strand; PAM type: YTN; PAM sequence: TTG
aattaaacttgtaaaatagt

SEQ ID NO: 58401 - DNA, 20 bp, Artificial Sequence
  Description of Artificial Sequence: Synthetic oligonucleotide
  Target: ATXN2; (-) strand; PAM type: YTN; PAM sequence: CTA
ttgaattaaacttgtaaaat

SEQ ID NO: 58402 - DNA, 20 bp, Artificial Sequence
  Description of Artificial Sequence: Synthetic oligonucleotide
  Target: ATXN2; (-) strand; PAM type: YTN; PAM sequence: TTG
tgtgtctattgaattaaact

SEQ ID NO: 58403 - DNA, 20 bp, Artificial Sequence
  Description of Artificial Sequence: Synthetic oligonucleotide
  Target: ATXN2; (-) strand; PAM type: YTN; PAM sequence: TTG
caaaattgtgtgtctattga

SEQ ID NO: 58404 - DNA, 20 bp, Artificial Sequence
  Description of Artificial Sequence: Synthetic oligonucleotide
  Target: ATXN2; (-) strand; PAM type: YTN; PAM sequence: TTT
gcaaaattgtgtgtctattg

SEQ ID NO: 58405 - DNA, 20 bp, Artificial Sequence
  Description of Artificial Sequence: Synthetic oligonucleotide
  Target: ATXN2; (-) strand; PAM type: YTN; PAM sequence: TTT
tgcaaaattgtgtgtctatt

SEQ ID NO: 58406 - DNA, 20 bp, Artificial Sequence
  Description of Artificial Sequence: Synthetic oligonucleotide
  Target: ATXN2; (-) strand; PAM type: YTN; PAM sequence: TTT
ttgcaaaattgtgtgtctat

SEQ ID NO: 58407 - DNA, 20 bp, Artificial Sequence
  Description of Artificial Sequence: Synthetic oligonucleotide
  Target: ATXN2; (-) strand; PAM type: YTN; PAM sequence: TTA
gtaatgtttttgcaaaattg

SEQ ID NO: 58408 - DNA, 20 bp, Artificial Sequence
  Description of Artificial Sequence: Synthetic oligonucleotide
  Target: ATXN2; (-) strand; PAM type: YTN; PAM sequence: TTC
cattagtaatgtttttgcaa

SEQ ID NO: 58409 - DNA, 20 bp, Artificial Sequence
  Description of Artificial Sequence: Synthetic oligonucleotide
  Target: ATXN2; (-) strand; PAM type: YTN; PAM sequence: TTT
ccattagtaatgtttttgca

SEQ ID NO: 58410 - DNA, 20 bp, Artificial Sequence
  Description of Artificial Sequence: Synthetic oligonucleotide
  Target: ATXN2; (-) strand; PAM type: YTN; PAM sequence: TTC
aggataatgacatttccatt

SEQ ID NO: 58411 - DNA, 20 bp, Artificial Sequence
  Description of Artificial Sequence: Synthetic oligonucleotide
  Target: ATXN2; (-) strand; PAM type: YTN; PAM sequence: TTT
caggataatgacatttccat

SEQ ID NO: 58412 - DNA, 20 bp, Artificial Sequence
  Description of Artificial Sequence: Synthetic oligonucleotide
  Target: ATXN2; (-) strand; PAM type: YTN; PAM sequence: CTT
tcaggataatgacatttcca

SEQ ID NO: 58413 - DNA, 20 bp, Artificial Sequence
  Description of Artificial Sequence: Synthetic oligonucleotide
  Target: ATXN2; (-) strand; PAM type: YTN; PAM sequence: CTA
gataatctttcaggataatg

SEQ ID NO: 58414 - DNA, 20 bp, Artificial Sequence
  Description of Artificial Sequence: Synthetic oligonucleotide
  Target: ATXN2; (-) strand; PAM type: YTN; PAM sequence: TTA
ctagataatctttcaggata

SEQ ID NO: 58415 - DNA, 20 bp, Artificial Sequence
  Description of Artificial Sequence: Synthetic oligonucleotide
  Target: ATXN2; (-) strand; PAM type: YTN; PAM sequence: TTG
gatccattactagataatct

SEQ ID NO: 58416 - DNA, 20 bp, Artificial Sequence
  Description of Artificial Sequence: Synthetic oligonucleotide
  Target: ATXN2; (-) strand; PAM type: YTN; PAM sequence: TTT
ggatccattactagataatc

SEQ ID NO: 58417 - DNA, 20 bp, Artificial Sequence
  Description of Artificial Sequence: Synthetic oligonucleotide
  Target: ATXN2; (-) strand; PAM type: YTN; PAM sequence: TTT
tggatccattactagataat

SEQ ID NO: 58418 - DNA, 20 bp, Artificial Sequence
  Description of Artificial Sequence: Synthetic oligonucleotide
  Target: ATXN2; (-) strand; PAM type: YTN; PAM sequence: TTT
ttggatccattactagataa

SEQ ID NO: 58419 - DNA, 20 bp, Artificial Sequence
  Description of Artificial Sequence: Synthetic oligonucleotide
  Target: ATXN2; (-) strand; PAM type: YTN; PAM sequence: CTA
aatttttggatccattacta

SEQ ID NO: 58420 - DNA, 20 bp, Artificial Sequence
  Description of Artificial Sequence: Synthetic oligonucleotide
  Target: ATXN2; (-) strand; PAM type: YTN; PAM sequence: CTA
tgatcctaaatttttggatc

SEQ ID NO: 58421 - DNA, 20 bp, Artificial Sequence
  Description of Artificial Sequence: Synthetic oligonucleotide
  Target: ATXN2; (-) strand; PAM type: YTN; PAM sequence: TTG
ctatgatcctaaatttttgg

SEQ ID NO: 58422 - DNA, 20 bp, Artificial Sequence
  Description of Artificial Sequence: Synthetic oligonucleotide
  Target: ATXN2; (-) strand; PAM type: YTN; PAM sequence: CTT
gctatgatcctaaatttttg

SEQ ID NO: 58423 - DNA, 20 bp, Artificial Sequence
  Description of Artificial Sequence: Synthetic oligonucleotide
  Target: ATXN2; (-) strand; PAM type: YTN; PAM sequence: TTC
ttgctatgatcctaaatttt

SEQ ID NO: 58424 - DNA, 20 bp, Artificial Sequence
  Description of Artificial Sequence: Synthetic oligonucleotide
  Target: ATXN2; (-) strand; PAM type: YTN; PAM sequence: TTA
tattcttgctatgatcctaa

SEQ ID NO: 58425 - DNA, 20 bp, Artificial Sequence
  Description of Artificial Sequence: Synthetic oligonucleotide
  Target: ATXN2; (-) strand; PAM type: YTN; PAM sequence: TTT
atattcttgctatgatccta

SEQ ID NO: 58426 - DNA, 20 bp, Artificial Sequence
  Description of Artificial Sequence: Synthetic oligonucleotide
  Target: ATXN2; (-) strand; PAM type: YTN; PAM sequence: TTC
atgtttatattcttgctatg

SEQ ID NO: 58427 - DNA, 20 bp, Artificial Sequence
  Description of Artificial Sequence: Synthetic oligonucleotide
  Target: ATXN2; (-) strand; PAM type: YTN; PAM sequence: TTA
ataagaaataatattcatgt

SEQ ID NO: 58428 - DNA, 20 bp, Artificial Sequence
  Description of Artificial Sequence: Synthetic oligonucleotide
  Target: ATXN2; (-) strand; PAM type: YTN; PAM sequence: TTT
aataagaaataatattcatg

SEQ ID NO: 58429 - DNA, 20 bp, Artificial Sequence
  Description of Artificial Sequence: Synthetic oligonucleotide
  Target: ATXN2; (-) strand; PAM type: YTN; PAM sequence: TTT
taataagaaataatattcat

SEQ ID NO: 58430 - DNA, 20 bp, Artificial Sequence
  Description of Artificial Sequence: Synthetic oligonucleotide
  Target: ATXN2; (-) strand; PAM type: YTN; PAM sequence: TTA
tgtagacatgttttaataag

SEQ ID NO: 58431 - DNA, 20 bp, Artificial Sequence
  Description of Artificial Sequence: Synthetic oligonucleotide
  Target: ATXN2; (-) strand; PAM type: YTN; PAM sequence: TTT
atgtagacatgttttaataa

SEQ ID NO: 58432 - DNA, 20 bp, Artificial Sequence
  Description of Artificial Sequence: Synthetic oligonucleotide
  Target: ATXN2; (-) strand; PAM type: YTN; PAM sequence: CTT
tatgtagacatgttttaata

SEQ ID NO: 58433 - DNA, 20 bp, Artificial Sequence
  Description of Artificial Sequence: Synthetic oligonucleotide
  Target: ATXN2; (-) strand; PAM type: YTN; PAM sequence: CTA
cccctttatgtagacatgtt

SEQ ID NO: 58434 - DNA, 20 bp, Artificial Sequence
  Description of Artificial Sequence: Synthetic oligonucleotide
  Target: ATXN2; (-) strand; PAM type: YTN; PAM sequence: CTC
aaataccctacccctttatg

SEQ ID NO: 58435 - DNA, 20 bp, Artificial Sequence
  Description of Artificial Sequence: Synthetic oligonucleotide
  Target: ATXN2; (-) strand; PAM type: YTN; PAM sequence: TTA
aatacactcaaataccctac

SEQ ID NO: 58436 - DNA, 20 bp, Artificial Sequence
  Description of Artificial Sequence: Synthetic oligonucleotide
  Target: ATXN2; (-) strand; PAM type: YTN; PAM sequence: TTT
aaatacactcaaatacccta

SEQ ID NO: 58437 - DNA, 20 bp, Artificial Sequence
  Description of Artificial Sequence: Synthetic oligonucleotide
  Target: ATXN2; (-) strand; PAM type: YTN; PAM sequence: TTC
caggtgtatttaaatacact

SEQ ID NO: 58438 - DNA, 20 bp, Artificial Sequence
  Description of Artificial Sequence: Synthetic oligonucleotide
  Target: ATXN2; (-) strand; PAM type: YTN; PAM sequence: CTT
ccaggtgtatttaaatacac

SEQ ID NO: 58439 - DNA, 20 bp, Artificial Sequence
  Description of Artificial Sequence: Synthetic oligonucleotide
  Target: ATXN2; (-) strand; PAM type: YTN; PAM sequence: TTG
atgtgtatccttccaggtgt

SEQ ID NO: 58440 - DNA, 20 bp, Artificial Sequence
  Description of Artificial Sequence: Synthetic oligonucleotide
  Target: ATXN2; (-) strand; PAM type: YTN; PAM sequence: TTT
gatgtgtatccttccaggtg

SEQ ID NO: 58441 - DNA, 20 bp, Artificial Sequence
  Description of Artificial Sequence: Synthetic oligonucleotide
  Target: ATXN2; (-) strand; PAM type: YTN; PAM sequence: TTT
tgatgtgtatccttccaggt

SEQ ID NO: 58442 - DNA, 20 bp, Artificial Sequence
  Description of Artificial Sequence: Synthetic oligonucleotide
  Target: ATXN2; (-) strand; PAM type: YTN; PAM sequence: TTA
acattttgatgtgtatcctt

SEQ ID NO: 58443 - DNA, 20 bp, Artificial Sequence
  Description of Artificial Sequence: Synthetic oligonucleotide
  Target: ATXN2; (-) strand; PAM type: YTN; PAM sequence: TTT
aacattttgatgtgtatcct

SEQ ID NO: 58444 - DNA, 20 bp, Artificial Sequence
  Description of Artificial Sequence: Synthetic oligonucleotide
  Target: ATXN2; (-) strand; PAM type: YTN; PAM sequence: TTT
taacattttgatgtgtatcc

SEQ ID NO: 58445 - DNA, 20 bp, Artificial Sequence
  Description of Artificial Sequence: Synthetic oligonucleotide
  Target: ATXN2; (-) strand; PAM type: YTN; PAM sequence: CTT
ttaacattttgatgtgtatc

SEQ ID NO: 58446 - DNA, 20 bp, Artificial Sequence
  Description of Artificial Sequence: Synthetic oligonucleotide
  Target: ATXN2; (-) strand; PAM type: YTN; PAM sequence: CTG
ccttttaacattttgatgtg

SEQ ID NO: 58447 - DNA, 20 bp, Artificial Sequence
  Description of Artificial Sequence: Synthetic oligonucleotide
  Target: ATXN2; (-) strand; PAM type: YTN; PAM sequence: CTG
acaactgccttttaacattt

SEQ ID NO: 58448 - DNA, 20 bp, Artificial Sequence
  Description of Artificial Sequence: Synthetic oligonucleotide
  Target: ATXN2; (-) strand; PAM type: YTN; PAM sequence: CTC
cacctgacaactgcctttta

SEQ ID NO: 58449 - DNA, 20 bp, Artificial Sequence
  Description of Artificial Sequence: Synthetic oligonucleotide
  Target: ATXN2; (-) strand; PAM type: YTN; PAM sequence: TTA
aaaaaaaaaaaaatgaaaag

SEQ ID NO: 58450 - DNA, 20 bp, Artificial Sequence
  Description of Artificial Sequence: Synthetic oligonucleotide
  Target: ATXN2; (-) strand; PAM type: YTN; PAM sequence: TTA
agttaaaaaaaaaaaaaatg

SEQ ID NO: 58451 - DNA, 20 bp, Artificial Sequence
  Description of Artificial Sequence: Synthetic oligonucleotide
  Target: ATXN2; (-) strand; PAM type: YTN; PAM sequence: TTA
atgcagataagtaagaaaat

SEQ ID NO: 58452 - DNA, 20 bp, Artificial Sequence
  Description of Artificial Sequence: Synthetic oligonucleotide
  Target: ATXN2; (-) strand; PAM type: YTN; PAM sequence: TTT
aatgcagataagtaagaaaa

SEQ ID NO: 58453 - DNA, 20 bp, Artificial Sequence
  Description of Artificial Sequence: Synthetic oligonucleotide
  Target: ATXN2; (-) strand; PAM type: YTN; PAM sequence: TTG
gtagtttaatgcagataagt

SEQ ID NO: 58454 - DNA, 20 bp, Artificial Sequence
  Description of Artificial Sequence: Synthetic oligonucleotide
  Target: ATXN2; (-) strand; PAM type: YTN; PAM sequence: TTT
ggtagtttaatgcagataag

SEQ ID NO: 58455 - DNA, 20 bp, Artificial Sequence
  Description of Artificial Sequence: Synthetic oligonucleotide
  Target: ATXN2; (-) strand; PAM type: YTN; PAM sequence: TTT
tggtagtttaatgcagataa

SEQ ID NO: 58456 - DNA, 20 bp, Artificial Sequence
  Description of Artificial Sequence: Synthetic oligonucleotide
  Target: ATXN2; (-) strand; PAM type: YTN; PAM sequence: TTT
ttggtagtttaatgcagata

SEQ ID NO: 58457 - DNA, 20 bp, Artificial Sequence
  Description of Artificial Sequence: Synthetic oligonucleotide
  Target: ATXN2; (-) strand; PAM type: YTN; PAM sequence: TTG
tttttggtagtttaatgcag

SEQ ID NO: 58458 - DNA, 20 bp, Artificial Sequence
  Description of Artificial Sequence: Synthetic oligonucleotide
  Target: ATXN2; (-) strand; PAM type: YTN; PAM sequence: TTT
gtttttggtagtttaatgca

SEQ ID NO: 58459 - DNA, 20 bp, Artificial Sequence
  Description of Artificial Sequence: Synthetic oligonucleotide
  Target: ATXN2; (-) strand; PAM type: YTN; PAM sequence: TTG
atttgtttttggtagtttaa

SEQ ID NO: 58460 - DNA, 20 bp, Artificial Sequence
  Description of Artificial Sequence: Synthetic oligonucleotide
  Target: ATXN2; (-) strand; PAM type: YTN; PAM sequence: TTT
gatttgtttttggtagttta

SEQ ID NO: 58461 - DNA, 20 bp, Artificial Sequence
  Description of Artificial Sequence: Synthetic oligonucleotide
  Target: ATXN2; (-) strand; PAM type: YTN; PAM sequence: TTT
tgatttgtttttggtagttt

SEQ ID NO: 58462 - DNA, 20 bp, Artificial Sequence
  Description of Artificial Sequence: Synthetic oligonucleotide
  Target: ATXN2; (-) strand; PAM type: YTN; PAM sequence: TTT
ttgatttgtttttggtagtt

SEQ ID NO: 58463 - DNA, 20 bp, Artificial Sequence
  Description of Artificial Sequence: Synthetic oligonucleotide
  Target: ATXN2; (-) strand; PAM type: YTN; PAM sequence: TTT
tttgatttgtttttggtagt

SEQ ID NO: 58464 - DNA, 20 bp, Artificial Sequence
  Description of Artificial Sequence: Synthetic oligonucleotide
  Target: ATXN2; (-) strand; PAM type: YTN; PAM sequence: CTT
ttttgatttgtttttggtag

SEQ ID NO: 58465 - DNA, 20 bp, Artificial Sequence
  Description of Artificial Sequence: Synthetic oligonucleotide
  Target: ATXN2; (-) strand; PAM type: YTN; PAM sequence: TTA
gatccagaatccttttttga

SEQ ID NO: 58466 - DNA, 20 bp, Artificial Sequence
  Description of Artificial Sequence: Synthetic oligonucleotide
  Target: ATXN2; (-) strand; PAM type: YTN; PAM sequence: TTA
ggaagaattagatccagaat

SEQ ID NO: 58467 - DNA, 20 bp, Artificial Sequence
  Description of Artificial Sequence: Synthetic oligonucleotide
  Target: ATXN2; (-) strand; PAM type: YTN; PAM sequence: CTA
gagccattaggaagaattag

SEQ ID NO: 58468 - DNA, 20 bp, Artificial Sequence
  Description of Artificial Sequence: Synthetic oligonucleotide
  Target: ATXN2; (-) strand; PAM type: YTN; PAM sequence: CTA
actagagccattaggaagaa

SEQ ID NO: 58469 - DNA, 20 bp, Artificial Sequence
  Description of Artificial Sequence: Synthetic oligonucleotide
  Target: ATXN2; (-) strand; PAM type: YTN; PAM sequence: TTC
cgactaactagagccattag

SEQ ID NO: 58470 - DNA, 20 bp, Artificial Sequence
  Description of Artificial Sequence: Synthetic oligonucleotide
  Target: ATXN2; (-) strand; PAM type: YTN; PAM sequence: TTT
ccgactaactagagccatta

SEQ ID NO: 58471 - DNA, 20 bp, Artificial Sequence
  Description of Artificial Sequence: Synthetic oligonucleotide
  Target: ATXN2; (-) strand; PAM type: YTN; PAM sequence: TTT
tccgactaactagagccatt

SEQ ID NO: 58472 - DNA, 20 bp, Artificial Sequence
  Description of Artificial Sequence: Synthetic oligonucleotide
  Target: ATXN2; (-) strand; PAM type: YTN; PAM sequence: CTT
ttccgactaactagagccat

SEQ ID NO: 58473 - DNA, 20 bp, Artificial Sequence
  Description of Artificial Sequence: Synthetic oligonucleotide
  Target: ATXN2; (-) strand; PAM type: YTN; PAM sequence: TTC
agaaacagtaataatacaac

SEQ ID NO: 58474 - DNA, 20 bp, Artificial Sequence
  Description of Artificial Sequence: Synthetic oligonucleotide
  Target: ATXN2; (-) strand; PAM type: YTN; PAM sequence: TTT
cagaaacagtaataatacaa

SEQ ID NO: 58475 - DNA, 20 bp, Artificial Sequence
  Description of Artificial Sequence: Synthetic oligonucleotide
  Target: ATXN2; (-) strand; PAM type: YTN; PAM sequence: CTT
tcagaaacagtaataataca

SEQ ID NO: 58476 - DNA, 20 bp, Artificial Sequence
  Description of Artificial Sequence: Synthetic oligonucleotide
  Target: ATXN2; (-) strand; PAM type: YTN; PAM sequence: TTA
cctttcagaaacagtaataa

SEQ ID NO: 58477 - DNA, 20 bp, Artificial Sequence
  Description of Artificial Sequence: Synthetic oligonucleotide
  Target: ATXN2; (-) strand; PAM type: YTN; PAM sequence: TTT
acctttcagaaacagtaata

SEQ ID NO: 58478 - DNA, 20 bp, Artificial Sequence
  Description of Artificial Sequence: Synthetic oligonucleotide
  Target: ATXN2; (-) strand; PAM type: YTN; PAM sequence: TTT
tacctttcagaaacagtaat

SEQ ID NO: 58479 - DNA, 20 bp, Artificial Sequence
  Description of Artificial Sequence: Synthetic oligonucleotide
  Target: ATXN2; (-) strand; PAM type: YTN; PAM sequence: CTT
ttacctttcagaaacagtaa

SEQ ID NO: 58480 - DNA, 20 bp, Artificial Sequence
  Description of Artificial Sequence: Synthetic oligonucleotide
  Target: ATXN2; (-) strand; PAM type: YTN; PAM sequence: TTA
tggtgatgcttttacctttc

SEQ ID NO: 58481 - DNA, 20 bp, Artificial Sequence
  Description of Artificial Sequence: Synthetic oligonucleotide
  Target: ATXN2; (-) strand; PAM type: YTN; PAM sequence: TTT
atggtgatgcttttaccttt

SEQ ID NO: 58482 - DNA, 20 bp, Artificial Sequence
  Description of Artificial Sequence: Synthetic oligonucleotide
  Target: ATXN2; (-) strand; PAM type: YTN; PAM sequence: TTT
tatggtgatgcttttacctt

SEQ ID NO: 58483 - DNA, 20 bp, Artificial Sequence
  Description of Artificial Sequence: Synthetic oligonucleotide
  Target: ATXN2; (-) strand; PAM type: YTN; PAM sequence: TTG
ttttatggtgatgcttttac

SEQ ID NO: 58484 - DNA, 20 bp, Artificial Sequence
  Description of Artificial Sequence: Synthetic oligonucleotide
  Target: ATXN2; (-) strand; PAM type: YTN; PAM sequence: TTT
gttttatggtgatgctttta

SEQ ID NO: 58485 - DNA, 20 bp, Artificial Sequence
  Description of Artificial Sequence: Synthetic oligonucleotide
  Target: ATXN2; (-) strand; PAM type: YTN; PAM sequence: TTT
tgttttatggtgatgctttt

SEQ ID NO: 58486 - DNA, 20 bp, Artificial Sequence
  Description of Artificial Sequence: Synthetic oligonucleotide
  Target: ATXN2; (-) strand; PAM type: YTN; PAM sequence: CTA
attttgttttatggtgatgc

SEQ ID NO: 58487 - DNA, 20 bp, Artificial Sequence
  Description of Artificial Sequence: Synthetic oligonucleotide
  Target: ATXN2; (-) strand; PAM type: YTN; PAM sequence: CTA
atccatctaattttgtttta

SEQ ID NO: 58488 - DNA, 20 bp, Artificial Sequence
  Description of Artificial Sequence: Synthetic oligonucleotide
  Target: ATXN2; (-) strand; PAM type: YTN; PAM sequence: TTC
taatccatctaattttgttt

SEQ ID NO: 58489 - DNA, 20 bp, Artificial Sequence
  Description of Artificial Sequence: Synthetic oligonucleotide
  Target: ATXN2; (-) strand; PAM type: YTN; PAM sequence: CTT
ctaatccatctaattttgtt

SEQ ID NO: 58490 - DNA, 20 bp, Artificial Sequence
  Description of Artificial Sequence: Synthetic oligonucleotide
  Target: ATXN2; (-) strand; PAM type: YTN; PAM sequence: CTC
ttctaatccatctaattttg

SEQ ID NO: 58491 - DNA, 20 bp, Artificial Sequence
  Description of Artificial Sequence: Synthetic oligonucleotide
  Target: ATXN2; (-) strand; PAM type: YTN; PAM sequence: CTA
ctcttctaatccatctaatt

SEQ ID NO: 58492 - DNA, 20 bp, Artificial Sequence
  Description of Artificial Sequence: Synthetic oligonucleotide
  Target: ATXN2; (-) strand; PAM type: YTN; PAM sequence: CTC
acatctactcttctaatcca

SEQ ID NO: 58493 - DNA, 20 bp, Artificial Sequence
  Description of Artificial Sequence: Synthetic oligonucleotide
  Target: ATXN2; (-) strand; PAM type: YTN; PAM sequence: TTA
cagatgtgagccaccacgcc

SEQ ID NO: 58494 - DNA, 20 bp, Artificial Sequence
  Description of Artificial Sequence: Synthetic oligonucleotide
  Target: ATXN2; (-) strand; PAM type: YTN; PAM sequence: CTG
ggattacagatgtgagccac

SEQ ID NO: 58495 - DNA, 20 bp, Artificial Sequence
  Description of Artificial Sequence: Synthetic oligonucleotide
  Target: ATXN2; (-) strand; PAM type: YTN; PAM sequence: CTC
ccaaagtgctgggattacag

SEQ ID NO: 58496 - DNA, 20 bp, Artificial Sequence
  Description of Artificial Sequence: Synthetic oligonucleotide
  Target: ATXN2; (-) strand; PAM type: YTN; PAM sequence: CTA
ggcctcccaaagtgctggga

SEQ ID NO: 58497 - DNA, 20 bp, Artificial Sequence
  Description of Artificial Sequence: Synthetic oligonucleotide
  Target: ATXN2; (-) strand; PAM type: YTN; PAM sequence: CTG
cctaggcctcccaaagtgct

SEQ ID NO: 58498 - DNA, 20 bp, Artificial Sequence
  Description of Artificial Sequence: Synthetic oligonucleotide
  Target: ATXN2; (-) strand; PAM type: YTN; PAM sequence: TTG
tctgcctaggcctcccaaag

SEQ ID NO: 58499 - DNA, 20 bp, Artificial Sequence
  Description of Artificial Sequence: Synthetic oligonucleotide
  Target: ATXN2; (-) strand; PAM type: YTN; PAM sequence: TTT
gtctgcctaggcctcccaaa

SEQ ID NO: 58500 - DNA, 20 bp, Artificial Sequence
  Description of Artificial Sequence: Synthetic oligonucleotide
  Target: ATXN2; (-) strand; PAM type: YTN; PAM sequence: TTG
tgatttgtctgcctaggcct

SEQ ID NO: 58501 - DNA, 20 bp, Artificial Sequence
  Description of Artificial Sequence: Synthetic oligonucleotide
  Target: ATXN2; (-) strand; PAM type: YTN; PAM sequence: CTT
gtgatttgtctgcctaggcc

SEQ ID NO: 58502 - DNA, 20 bp, Artificial Sequence
  Description of Artificial Sequence: Synthetic oligonucleotide
  Target: ATXN2; (-) strand; PAM type: YTN; PAM sequence: CTG
accttgtgatttgtctgcct

SEQ ID NO: 58503 - DNA, 20 bp, Artificial Sequence
  Description of Artificial Sequence: Synthetic oligonucleotide
  Target: ATXN2; (-) strand; PAM type: YTN; PAM sequence: TTC
tgaccttgtgatttgtctgc

SEQ ID NO: 58504 - DNA, 20 bp, Artificial Sequence
  Description of Artificial Sequence: Synthetic oligonucleotide
  Target: ATXN2; (-) strand; PAM type: YTN; PAM sequence: CTT
ctgaccttgtgatttgtctg

SEQ ID NO: 58505 - DNA, 20 bp, Artificial Sequence
  Description of Artificial Sequence: Synthetic oligonucleotide
  Target: ATXN2; (-) strand; PAM type: YTN; PAM sequence: CTC
gaacttctgaccttgtgatt

SEQ ID NO: 58506 - DNA, 20 bp, Artificial Sequence
  Description of Artificial Sequence: Synthetic oligonucleotide
  Target: ATXN2; (-) strand; PAM type: YTN; PAM sequence: CTG
atctcgaacttctgaccttg

SEQ ID NO: 58507 - DNA, 20 bp, Artificial Sequence
  Description of Artificial Sequence: Synthetic oligonucleotide
  Target: ATXN2; (-) strand; PAM type: YTN; PAM sequence: TTG
gccaggctgatctcgaactt

SEQ ID NO: 58508 - DNA, 20 bp, Artificial Sequence
  Description of Artificial Sequence: Synthetic oligonucleotide
  Target: ATXN2; (-) strand; PAM type: YTN; PAM sequence: CTT
ggccaggctgatctcgaact

SEQ ID NO: 58509 - DNA, 20 bp, Artificial Sequence
  Description of Artificial Sequence: Synthetic oligonucleotide
  Target: ATXN2; (-) strand; PAM type: YTN; PAM sequence: TTC
accgtcttggccaggctgat

SEQ ID NO: 58510 - DNA, 20 bp, Artificial Sequence
  Description of Artificial Sequence: Synthetic oligonucleotide
  Target: ATXN2; (-) strand; PAM type: YTN; PAM sequence: TTT
caccgtcttggccaggctga

SEQ ID NO: 58511 - DNA, 20 bp, Artificial Sequence
  Description of Artificial Sequence: Synthetic oligonucleotide
  Target: ATXN2; (-) strand; PAM type: YTN; PAM sequence: TTA
gtagagacggggtttcaccg

SEQ ID NO: 58512 - DNA, 20 bp, Artificial Sequence
  Description of Artificial Sequence: Synthetic oligonucleotide
  Target: ATXN2; (-) strand; PAM type: YTN; PAM sequence: TTT
agtagagacggggtttcacc

SEQ ID NO: 58513 - DNA, 20 bp, Artificial Sequence
  Description of Artificial Sequence: Synthetic oligonucleotide
  Target: ATXN2; (-) strand; PAM type: YTN; PAM sequence: TTT
tagtagagacggggtttcac

SEQ ID NO: 58514 - DNA, 20 bp, Artificial Sequence
  Description of Artificial Sequence: Synthetic oligonucleotide
  Target: ATXN2; (-) strand; PAM type: YTN; PAM sequence: TTT
ttagtagagacggggtttca

SEQ ID NO: 58515 - DNA, 20 bp, Artificial Sequence
  Description of Artificial Sequence: Synthetic oligonucleotide
  Target: ATXN2; (-) strand; PAM type: YTN; PAM sequence: TTG
tatttttagtagagacgggg

SEQ ID NO: 58516 - DNA, 20 bp, Artificial Sequence
  Description of Artificial Sequence: Synthetic oligonucleotide
  Target: ATXN2; (-) strand; PAM type: YTN; PAM sequence: TTT
gtatttttagtagagacggg

SEQ ID NO: 58517 - DNA, 20 bp, Artificial Sequence
  Description of Artificial Sequence: Synthetic oligonucleotide
  Target: ATXN2; (-) strand; PAM type: YTN; PAM sequence: TTT
tgtatttttagtagagacgg

SEQ ID NO: 58518 - DNA, 20 bp, Artificial Sequence
  Description of Artificial Sequence: Synthetic oligonucleotide
  Target: ATXN2; (-) strand; PAM type: YTN; PAM sequence: TTT
ttgtatttttagtagagacg

SEQ ID NO: 58519 - DNA, 20 bp, Artificial Sequence
  Description of Artificial Sequence: Synthetic oligonucleotide
  Target: ATXN2; (-) strand; PAM type: YTN; PAM sequence: CTA
caggtgtgcgccaccacgac

SEQ ID NO: 58520 - DNA, 20 bp, Artificial Sequence
  Description of Artificial Sequence: Synthetic oligonucleotide
  Target: ATXN2; (-) strand; PAM type: YTN; PAM sequence: CTC
ccgagtaggtgggactacag

SEQ ID NO: 58521 - DNA, 20 bp, Artificial Sequence
  Description of Artificial Sequence: Synthetic oligonucleotide
  Target: ATXN2; (-) strand; PAM type: YTN; PAM sequence: CTC
agcctcccgagtaggtggga

SEQ ID NO: 58522 - DNA, 20 bp, Artificial Sequence
  Description of Artificial Sequence: Synthetic oligonucleotide
  Target: ATXN2; (-) strand; PAM type: YTN; PAM sequence: CTG
cctcagcctcccgagtaggt

SEQ ID NO: 58523 - DNA, 20 bp, Artificial Sequence
  Description of Artificial Sequence: Synthetic oligonucleotide
  Target: ATXN2; (-) strand; PAM type: YTN; PAM sequence: TTC
tgcctcagcctcccgagtag

SEQ ID NO: 58524 - DNA, 20 bp, Artificial Sequence
  Description of Artificial Sequence: Synthetic oligonucleotide
  Target: ATXN2; (-) strand; PAM type: YTN; PAM sequence: TTT
ctgcctcagcctcccgagta

SEQ ID NO: 58525 - DNA, 20 bp, Artificial Sequence
  Description of Artificial Sequence: Synthetic oligonucleotide
  Target: ATXN2; (-) strand; PAM type: YTN; PAM sequence: TTT
tctgcctcagcctcccgagt

SEQ ID NO: 58526 - DNA, 20 bp, Artificial Sequence
  Description of Artificial Sequence: Synthetic oligonucleotide
  Target: ATXN2; (-) strand; PAM type: YTN; PAM sequence: TTT
ttctgcctcagcctcccgag

SEQ ID NO: 58527 - DNA, 20 bp, Artificial Sequence
  Description of Artificial Sequence: Synthetic oligonucleotide
  Target: ATXN2; (-) strand; PAM type: YTN; PAM sequence: TTC
aagcggtttttctgcctcag

SEQ ID NO: 58528 - DNA, 20 bp, Artificial Sequence
  Description of Artificial Sequence: Synthetic oligonucleotide
  Target: ATXN2; (-) strand; PAM type: YTN; PAM sequence: CTC
ccaggttcaagcggtttttc

SEQ ID NO: 58529 - DNA, 20 bp, Artificial Sequence
  Description of Artificial Sequence: Synthetic oligonucleotide
  Target: ATXN2; (-) strand; PAM type: YTN; PAM sequence: CTG
cctcccaggttcaagcggtt

SEQ ID NO: 58530 - DNA, 20 bp, Artificial Sequence
  Description of Artificial Sequence: Synthetic oligonucleotide
  Target: ATXN2; (-) strand; PAM type: YTN; PAM sequence: CTG
caacatctgcctcccaggtt

SEQ ID NO: 58531 - DNA, 20 bp, Artificial Sequence
  Description of Artificial Sequence: Synthetic oligonucleotide
  Target: ATXN2; (-) strand; PAM type: YTN; PAM sequence: CTC
actgcaacatctgcctccca

SEQ ID NO: 58532 - DNA, 20 bp, Artificial Sequence
  Description of Artificial Sequence: Synthetic oligonucleotide
  Target: ATXN2; (-) strand; PAM type: YTN; PAM sequence: CTC
agctcactgcaacatctgcc

SEQ ID NO: 58533 - DNA, 20 bp, Artificial Sequence
  Description of Artificial Sequence: Synthetic oligonucleotide
  Target: ATXN2; (-) strand; PAM type: YTN; PAM sequence: CTG
aagtgcagcggtgcgatctc

SEQ ID NO: 58534 - DNA, 20 bp, Artificial Sequence
  Description of Artificial Sequence: Synthetic oligonucleotide
  Target: ATXN2; (-) strand; PAM type: YTN; PAM sequence: TTC
tgaagtgcagcggtgcgatc

SEQ ID NO: 58535 - DNA, 20 bp, Artificial Sequence
  Description of Artificial Sequence: Synthetic oligonucleotide
  Target: ATXN2; (-) strand; PAM type: YTN; PAM sequence: CTG
tcacccattctgaagtgcag

SEQ ID NO: 58536 - DNA, 20 bp, Artificial Sequence
  Description of Artificial Sequence: Synthetic oligonucleotide
  Target: ATXN2; (-) strand; PAM type: YTN; PAM sequence: CTC
tgtcacccattctgaagtgc

SEQ ID NO: 58537 - DNA, 20 bp, Artificial Sequence
  Description of Artificial Sequence: Synthetic oligonucleotide
  Target: ATXN2; (-) strand; PAM type: YTN; PAM sequence: CTC
actctgtcacccattctgaa

SEQ ID NO: 58538 - DNA, 20 bp, Artificial Sequence
  Description of Artificial Sequence: Synthetic oligonucleotide
  Target: ATXN2; (-) strand; PAM type: YTN; PAM sequence: TTG
aggtagtctcactctgtcac

SEQ ID NO: 58539 - DNA, 20 bp, Artificial Sequence
  Description of Artificial Sequence: Synthetic oligonucleotide
  Target: ATXN2; (-) strand; PAM type: YTN; PAM sequence: TTT
gaggtagtctcactctgtca

SEQ ID NO: 58540 - DNA, 20 bp, Artificial Sequence
  Description of Artificial Sequence: Synthetic oligonucleotide
  Target: ATXN2; (-) strand; PAM type: YTN; PAM sequence: TTT
tgaggtagtctcactctgtc

SEQ ID NO: 58541 - DNA, 20 bp, Artificial Sequence
  Description of Artificial Sequence: Synthetic oligonucleotide
  Target: ATXN2; (-) strand; PAM type: YTN; PAM sequence: TTT
ttgaggtagtctcactctgt

SEQ ID NO: 58542 - DNA, 20 bp, Artificial Sequence
  Description of Artificial Sequence: Synthetic oligonucleotide
  Target: ATXN2; (-) strand; PAM type: YTN; PAM sequence: TTT
tttgaggtagtctcactctg

SEQ ID NO: 58543 - DNA, 20 bp, Artificial Sequence
  Description of Artificial Sequence: Synthetic oligonucleotide
  Target: ATXN2; (-) strand; PAM type: YTN; PAM sequence: TTT
ttttgaggtagtctcactct

SEQ ID NO: 58544 - DNA, 20 bp, Artificial Sequence
  Description of Artificial Sequence: Synthetic oligonucleotide
  Target: ATXN2; (-) strand; PAM type: YTN; PAM sequence: TTT
tttttgaggtagtctcactc

SEQ ID NO: 58545 - DNA, 20 bp, Artificial Sequence
  Description of Artificial Sequence: Synthetic oligonucleotide
  Target: ATXN2; (-) strand; PAM type: YTN; PAM sequence: TTT
ttttttgaggtagtctcact

SEQ ID NO: 58546 - DNA, 20 bp, Artificial Sequence
  Description of Artificial Sequence: Synthetic oligonucleotide
  Target: ATXN2; (-) strand; PAM type: YTN; PAM sequence: TTT
tttttttgaggtagtctcac

SEQ ID NO: 58547 - DNA, 20 bp, Artificial Sequence
  Description of Artificial Sequence: Synthetic oligonucleotide
  Target: ATXN2; (-) strand; PAM type: YTN; PAM sequence: TTT
ttttttttgaggtagtctca

SEQ ID NO: 58548 - DNA, 20 bp, Artificial Sequence
  Description of Artificial Sequence: Synthetic oligonucleotide
  Target: ATXN2; (-) strand; PAM type: YTN; PAM sequence: TTT
tttttttttgaggtagtctc

SEQ ID NO: 58549 - DNA, 20 bp, Artificial Sequence
  Description of Artificial Sequence: Synthetic oligonucleotide
  Target: ATXN2; (-) strand; PAM type: YTN; PAM sequence: TTT
ttttttttttgaggtagtct

SEQ ID NO: 58550 - DNA, 20 bp, Artificial Sequence
  Description of Artificial Sequence: Synthetic oligonucleotide
  Target: ATXN2; (-) strand; PAM type: YTN; PAM sequence: TTT
tttttttttttgaggtagtc

SEQ ID NO: 58551 - DNA, 20 bp, Artificial Sequence
  Description of Artificial Sequence: Synthetic oligonucleotide
  Target: ATXN2; (-) strand; PAM type: YTN; PAM sequence: TTT
ttttttttttttgaggtagt

SEQ ID NO: 58552 - DNA, 20 bp, Artificial Sequence
  Description of Artificial Sequence: Synthetic oligonucleotide
  Target: ATXN2; (-) strand; PAM type: YTN; PAM sequence: TTT
tttttttttttttgaggtag

SEQ ID NO: 58553 - DNA, 20 bp, Artificial Sequence
  Description of Artificial Sequence: Synthetic oligonucleotide
  Target: ATXN2; (-) strand; PAM type: YTN; PAM sequence: TTT
ttttttttttttttgaggta

SEQ ID NO: 58554 - DNA, 20 bp, Artificial Sequence
  Description of Artificial Sequence: Synthetic oligonucleotide
  Target: ATXN2; (-) strand; PAM type: YTN; PAM sequence: TTT
tttttttttttttttgaggt

SEQ ID NO: 58555 - DNA, 20 bp, Artificial Sequence
  Description of Artificial Sequence: Synthetic oligonucleotide
  Target: ATXN2; (-) strand; PAM type: YTN; PAM sequence: TTT
ttttttttttttttttgagg

SEQ ID NO: 58556 - DNA, 20 bp, Artificial Sequence
  Description of Artificial Sequence: Synthetic oligonucleotide
  Target: ATXN2; (-) strand; PAM type: YTN; PAM sequence: TTT
tttttttttttttttttgag

SEQ ID NO: 58557 - DNA, 20 bp, Artificial Sequence
  Description of Artificial Sequence: Synthetic oligonucleotide
  Target: ATXN2; (-) strand; PAM type: YTN; PAM sequence: TTT
ttttttttttttttttttga

SEQ ID NO: 58558 - DNA, 20 bp, Artificial Sequence
  Description of Artificial Sequence: Synthetic oligonucleotide
  Target: ATXN2; (-) strand; PAM type: YTN; PAM sequence: TTT
tttttttttttttttttttg

SEQ ID NO: 58559 - DNA, 20 bp, Artificial Sequence
  Description of Artificial Sequence: Synthetic oligonucleotide
  Target: ATXN2; (-) strand; PAM type: YTN; PAM sequence: TTT
tttttttttttttttttttt

SEQ ID NO: 58560 - DNA, 20 bp, Artificial Sequence
  Description of Artificial Sequence: Synthetic oligonucleotide
  Target: ATXN2; (-) strand; PAM type: YTN; PAM sequence: TTT
tttttttttttttttttttt

SEQ ID NO: 58561 - DNA, 20 bp, Artificial Sequence
  Description of Artificial Sequence: Synthetic oligonucleotide
  Target: ATXN2; (-) strand; PAM type: YTN; PAM sequence: TTT
tttttttttttttttttttt

SEQ ID NO: 58562 - DNA, 20 bp, Artificial Sequence
  Description of Artificial Sequence: Synthetic oligonucleotide
  Target: ATXN2; (-) strand; PAM type: YTN; PAM sequence: CTT
tttttttttttttttttttt

SEQ ID NO: 58563 - DNA, 20 bp, Artificial Sequence
  Description of Artificial Sequence: Synthetic oligonucleotide
  Target: ATXN2; (-) strand; PAM type: YTN; PAM sequence: CTC
tttttttttttttttttttt

SEQ ID NO: 58564 - DNA, 20 bp, Artificial Sequence
  Description of Artificial Sequence: Synthetic oligonucleotide
  Target: ATXN2; (-) strand; PAM type: YTN; PAM sequence: CTA
ctcttttttttttttttttt

SEQ ID NO: 58565 - DNA, 20 bp, Artificial Sequence
  Description of Artificial Sequence: Synthetic oligonucleotide
  Target: ATXN2; (-) strand; PAM type: YTN; PAM sequence: CTC
acatctactctttttttttt

SEQ ID NO: 58566 - DNA, 20 bp, Artificial Sequence
  Description of Artificial Sequence: Synthetic oligonucleotide
  Target: ATXN2; (-) strand; PAM type: YTN; PAM sequence: CTC
tcacatctactctttttttt

SEQ ID NO: 58567 - DNA, 20 bp, Artificial Sequence
  Description of Artificial Sequence: Synthetic oligonucleotide
  Target: ATXN2; (-) strand; PAM type: YTN; PAM sequence: TTC
ctctcacatctactcttttt

SEQ ID NO: 58568 - DNA, 20 bp, Artificial Sequence
  Description of Artificial Sequence: Synthetic oligonucleotide
  Target: ATXN2; (-) strand; PAM type: YTN; PAM sequence: TTT
cctctcacatctactctttt

SEQ ID NO: 58569 - DNA, 20 bp, Artificial Sequence
  Description of Artificial Sequence: Synthetic oligonucleotide
  Target: ATXN2; (-) strand; PAM type: YTN; PAM sequence: TTT
tcctctcacatctactcttt

SEQ ID NO: 58570 - DNA, 20 bp, Artificial Sequence
  Description of Artificial Sequence: Synthetic oligonucleotide
  Target: ATXN2; (-) strand; PAM type: YTN; PAM sequence: TTT
ttcctctcacatctactctt

SEQ ID NO: 58571 - DNA, 20 bp, Artificial Sequence
  Description of Artificial Sequence: Synthetic oligonucleotide
  Target: ATXN2; (-) strand; PAM type: YTN; PAM sequence: TTT
tttcctctcacatctactct

SEQ ID NO: 58572 - DNA, 20 bp, Artificial Sequence
  Description of Artificial Sequence: Synthetic oligonucleotide
  Target: ATXN2; (-) strand; PAM type: YTN; PAM sequence: TTT
ttttcctctcacatctactc

SEQ ID NO: 58573 - DNA, 20 bp, Artificial Sequence
  Description of Artificial Sequence: Synthetic oligonucleotide
  Target: ATXN2; (-) strand; PAM type: YTN; PAM sequence: TTT
tttttcctctcacatctact

SEQ ID NO: 58574 - DNA, 20 bp, Artificial Sequence
  Description of Artificial Sequence: Synthetic oligonucleotide
  Target: ATXN2; (-) strand; PAM type: YTN; PAM sequence: TTA
attttttttcctctcacatc

SEQ ID NO: 58575 - DNA, 20 bp, Artificial Sequence
  Description of Artificial Sequence: Synthetic oligonucleotide
  Target: ATXN2; (-) strand; PAM type: YTN; PAM sequence: TTT
aattttttttcctctcacat

SEQ ID NO: 58576 - DNA, 20 bp, Artificial Sequence
  Description of Artificial Sequence: Synthetic oligonucleotide
  Target: ATXN2; (-) strand; PAM type: YTN; PAM sequence: CTT
taattttttttcctctcaca

SEQ ID NO: 58577 - DNA, 20 bp, Artificial Sequence
  Description of Artificial Sequence: Synthetic oligonucleotide
  Target: ATXN2; (-) strand; PAM type: YTN; PAM sequence: TTA
ctttaattttttttcctctc

SEQ ID NO: 58578 - DNA, 20 bp, Artificial Sequence
  Description of Artificial Sequence: Synthetic oligonucleotide
  Target: ATXN2; (-) strand; PAM type: YTN; PAM sequence: CTA
agaagttactttaatttttt

SEQ ID NO: 58579 - DNA, 20 bp, Artificial Sequence
  Description of Artificial Sequence: Synthetic oligonucleotide
  Target: ATXN2; (-) strand; PAM type: YTN; PAM sequence: TTC
taagaagttactttaatttt

SEQ ID NO: 58580 - DNA, 20 bp, Artificial Sequence
  Description of Artificial Sequence: Synthetic oligonucleotide
  Target: ATXN2; (-) strand; PAM type: YTN; PAM sequence: CTT
ctaagaagttactttaattt

SEQ ID NO: 58581 - DNA, 20 bp, Artificial Sequence
  Description of Artificial Sequence: Synthetic oligonucleotide
  Target: ATXN2; (-) strand; PAM type: YTN; PAM sequence: CTA
ccccatcccttctaagaagt

SEQ ID NO: 58582 - DNA, 20 bp, Artificial Sequence
  Description of Artificial Sequence: Synthetic oligonucleotide
  Target: ATXN2; (-) strand; PAM type: YTN; PAM sequence: CTC
taccccatcccttctaagaa

SEQ ID NO: 58583 - DNA, 20 bp, Artificial Sequence
  Description of Artificial Sequence: Synthetic oligonucleotide
  Target: ATXN2; (-) strand; PAM type: YTN; PAM sequence: TTG
cctctaccccatcccttcta

SEQ ID NO: 58584 - DNA, 20 bp, Artificial Sequence
  Description of Artificial Sequence: Synthetic oligonucleotide
  Target: ATXN2; (-) strand; PAM type: YTN; PAM sequence: TTC
catcattgcctctaccccat

SEQ ID NO: 58585 - DNA, 20 bp, Artificial Sequence
  Description of Artificial Sequence: Synthetic oligonucleotide
  Target: ATXN2; (-) strand; PAM type: YTN; PAM sequence: CTT
ccatcattgcctctacccca

SEQ ID NO: 58586 - DNA, 20 bp, Artificial Sequence
  Description of Artificial Sequence: Synthetic oligonucleotide
  Target: ATXN2; (-) strand; PAM type: YTN; PAM sequence: CTA
acttccatcattgcctctac

SEQ ID NO: 58587 - DNA, 20 bp, Artificial Sequence
  Description of Artificial Sequence: Synthetic oligonucleotide
  Target: ATXN2; (-) strand; PAM type: YTN; PAM sequence: TTA
atctaacttccatcattgcc

SEQ ID NO: 58588 - DNA, 20 bp, Artificial Sequence
  Description of Artificial Sequence: Synthetic oligonucleotide
  Target: ATXN2; (-) strand; PAM type: YTN; PAM sequence: CTT
aatctaacttccatcattgc

SEQ ID NO: 58589 - DNA, 20 bp, Artificial Sequence
  Description of Artificial Sequence: Synthetic oligonucleotide
  Target: ATXN2; (-) strand; PAM type: YTN; PAM sequence: CTC
ttaatctaacttccatcatt

SEQ ID NO: 58590 - DNA, 20 bp, Artificial Sequence
  Description of Artificial Sequence: Synthetic oligonucleotide
  Target: ATXN2; (-) strand; PAM type: YTN; PAM sequence: TTG
atgtctcttaatctaacttc

SEQ ID NO: 58591 - DNA, 20 bp, Artificial Sequence
  Description of Artificial Sequence: Synthetic oligonucleotide
  Target: ATXN2; (-) strand; PAM type: YTN; PAM sequence: TTT
gatgtctcttaatctaactt

SEQ ID NO: 58592 - DNA, 20 bp, Artificial Sequence
  Description of Artificial Sequence: Synthetic oligonucleotide
  Target: ATXN2; (-) strand; PAM type: YTN; PAM sequence: CTT
tgatgtctcttaatctaact

SEQ ID NO: 58593 - DNA, 20 bp, Artificial Sequence
  Description of Artificial Sequence: Synthetic oligonucleotide
  Target: ATXN2; (-) strand; PAM type: YTN; PAM sequence: CTC
tttgatgtctcttaatctaa

SEQ ID NO: 58594 - DNA, 20 bp, Artificial Sequence
  Description of Artificial Sequence: Synthetic oligonucleotide
  Target: ATXN2; (-) strand; PAM type: YTN; PAM sequence: CTG
ccccggcctctttgatgtct

SEQ ID NO: 58595 - DNA, 20 bp, Artificial Sequence
  Description of Artificial Sequence: Synthetic oligonucleotide
  Target: ATXN2; (-) strand; PAM type: YTN; PAM sequence: TTA
caggcgtgagccactgcccc

SEQ ID NO: 58596 - DNA, 20 bp, Artificial Sequence
  Description of Artificial Sequence: Synthetic oligonucleotide
  Target: ATXN2; (-) strand; PAM type: YTN; PAM sequence: CTG
ggattacaggcgtgagccac

SEQ ID NO: 58597 - DNA, 20 bp, Artificial Sequence
  Description of Artificial Sequence: Synthetic oligonucleotide
  Target: ATXN2; (-) strand; PAM type: YTN; PAM sequence: CTC
ccaaagtgctgggattacag

SEQ ID NO: 58598 - DNA, 20 bp, Artificial Sequence
  Description of Artificial Sequence: Synthetic oligonucleotide
  Target: ATXN2; (-) strand; PAM type: YTN; PAM sequence: CTC
agcctcccaaagtgctggga

SEQ ID NO: 58599 - DNA, 20 bp, Artificial Sequence
  Description of Artificial Sequence: Synthetic oligonucleotide
  Target: ATXN2; (-) strand; PAM type: YTN; PAM sequence: CTC
aggtgatccacccacctcag

SEQ ID NO: 58600 - DNA, 20 bp, Artificial Sequence
  Description of Artificial Sequence: Synthetic oligonucleotide
  Target: ATXN2; (-) strand; PAM type: YTN; PAM sequence: TTC
ccgacctcaggtgatccacc

SEQ ID NO: 58601 - DNA, 20 bp, Artificial Sequence
  Description of Artificial Sequence: Synthetic oligonucleotide
  Target: ATXN2; (-) strand; PAM type: YTN; PAM sequence: TTG
aattcccgacctcaggtgat

SEQ ID NO: 58602 - DNA, 20 bp, Artificial Sequence
  Description of Artificial Sequence: Synthetic oligonucleotide
  Target: ATXN2; (-) strand; PAM type: YTN; PAM sequence: CTT
gaattcccgacctcaggtga

SEQ ID NO: 58603 - DNA, 20 bp, Artificial Sequence
  Description of Artificial Sequence: Synthetic oligonucleotide
  Target: ATXN2; (-) strand; PAM type: YTN; PAM sequence: CTG
gtcttgaattcccgacctca

SEQ ID NO: 58604 - DNA, 20 bp, Artificial Sequence
  Description of Artificial Sequence: Synthetic oligonucleotide
  Target: ATXN2; (-) strand; PAM type: YTN; PAM sequence: TTG
gtcaggctggtcttgaattc

SEQ ID NO: 58605 - DNA, 20 bp, Artificial Sequence
  Description of Artificial Sequence: Synthetic oligonucleotide
  Target: ATXN2; (-) strand; PAM type: YTN; PAM sequence: TTC
accatgttggtcaggctggt

SEQ ID NO: 58606 - DNA, 20 bp, Artificial Sequence
  Description of Artificial Sequence: Synthetic oligonucleotide
  Target: ATXN2; (-) strand; PAM type: YTN; PAM sequence: TTT
caccatgttggtcaggctgg

SEQ ID NO: 58607 - DNA, 20 bp, Artificial Sequence
  Description of Artificial Sequence: Synthetic oligonucleotide
  Target: ATXN2; (-) strand; PAM type: YTN; PAM sequence: TTA
gtagagacagggtttcacca

SEQ ID NO: 58608 - DNA, 20 bp, Artificial Sequence
  Description of Artificial Sequence: Synthetic oligonucleotide
  Target: ATXN2; (-) strand; PAM type: YTN; PAM sequence: TTT
agtagagacagggtttcacc

SEQ ID NO: 58609 - DNA, 20 bp, Artificial Sequence
  Description of Artificial Sequence: Synthetic oligonucleotide
  Target: ATXN2; (-) strand; PAM type: YTN; PAM sequence: TTT
tagtagagacagggtttcac

SEQ ID NO: 58610 - DNA, 20 bp, Artificial Sequence
  Description of Artificial Sequence: Synthetic oligonucleotide
  Target: ATXN2; (-) strand; PAM type: YTN; PAM sequence: TTT
ttagtagagacagggtttca

SEQ ID NO: 58611 - DNA, 20 bp, Artificial Sequence
  Description of Artificial Sequence: Synthetic oligonucleotide
  Target: ATXN2; (-) strand; PAM type: YTN; PAM sequence: TTG
tgtttttagtagagacaggg

SEQ ID NO: 58612 - DNA, 20 bp, Artificial Sequence
  Description of Artificial Sequence: Synthetic oligonucleotide
  Target: ATXN2; (-) strand; PAM type: YTN; PAM sequence: TTT
gtgtttttagtagagacagg

SEQ ID NO: 58613 - DNA, 20 bp, Artificial Sequence
  Description of Artificial Sequence: Synthetic oligonucleotide
  Target: ATXN2; (-) strand; PAM type: YTN; PAM sequence: TTT
tgtgtttttagtagagacag

SEQ ID NO: 58614 - DNA, 20 bp, Artificial Sequence
  Description of Artificial Sequence: Synthetic oligonucleotide
  Target: ATXN2; (-) strand; PAM type: YTN; PAM sequence: TTT
ttgtgtttttagtagagaca

SEQ ID NO: 58615 - DNA, 20 bp, Artificial Sequence
  Description of Artificial Sequence: Synthetic oligonucleotide
  Target: ATXN2; (-) strand; PAM type: YTN; PAM sequence: CTA
atttttgtgtttttagtaga

SEQ ID NO: 58616 - DNA, 20 bp, Artificial Sequence
  Description of Artificial Sequence: Synthetic oligonucleotide
  Target: ATXN2; (-) strand; PAM type: YTN; PAM sequence: CTG
gctaatttttgtgtttttag

SEQ ID NO: 58617 - DNA, 20 bp, Artificial Sequence
  Description of Artificial Sequence: Synthetic oligonucleotide
  Target: ATXN2; (-) strand; PAM type: YTN; PAM sequence: CTA
caggtgcccgccaccacacc

SEQ ID NO: 58618 - DNA, 20 bp, Artificial Sequence
  Description of Artificial Sequence: Synthetic oligonucleotide
  Target: ATXN2; (-) strand; PAM type: YTN; PAM sequence: CTG
ggactacaggtgcccgccac

SEQ ID NO: 58619 - DNA, 20 bp, Artificial Sequence
  Description of Artificial Sequence: Synthetic oligonucleotide
  Target: ATXN2; (-) strand; PAM type: YTN; PAM sequence: CTG
agtagctgggactacaggtg

SEQ ID NO: 58620 - DNA, 20 bp, Artificial Sequence
  Description of Artificial Sequence: Synthetic oligonucleotide
  Target: ATXN2; (-) strand; PAM type: YTN; PAM sequence: CTC
ctgagtagctgggactacag

SEQ ID NO: 58621 - DNA, 20 bp, Artificial Sequence
  Description of Artificial Sequence: Synthetic oligonucleotide
  Target: ATXN2; (-) strand; PAM type: YTN; PAM sequence: CTC
agcctcctgagtagctggga

SEQ ID NO: 58622 - DNA, 20 bp, Artificial Sequence
  Description of Artificial Sequence: Synthetic oligonucleotide
  Target: ATXN2; (-) strand; PAM type: YTN; PAM sequence: CTG
cctcagcctcctgagtagct

SEQ ID NO: 58623 - DNA, 20 bp, Artificial Sequence
  Description of Artificial Sequence: Synthetic oligonucleotide
  Target: ATXN2; (-) strand; PAM type: YTN; PAM sequence: CTC
ctgcctcagcctcctgagta

SEQ ID NO: 58624 - DNA, 20 bp, Artificial Sequence
  Description of Artificial Sequence: Synthetic oligonucleotide
  Target: ATXN2; (-) strand; PAM type: YTN; PAM sequence: TTC
tcctgcctcagcctcctgag

SEQ ID NO: 58625 - DNA, 20 bp, Artificial Sequence
  Description of Artificial Sequence: Synthetic oligonucleotide
  Target: ATXN2; (-) strand; PAM type: YTN; PAM sequence: TTC
aagcagttctcctgcctcag

SEQ ID NO: 58626 - DNA, 20 bp, Artificial Sequence
  Description of Artificial Sequence: Synthetic oligonucleotide
  Target: ATXN2; (-) strand; PAM type: YTN; PAM sequence: CTG
ggttcaagcagttctcctgc

SEQ ID NO: 58627 - DNA, 20 bp, Artificial Sequence
  Description of Artificial Sequence: Synthetic oligonucleotide
  Target: ATXN2; (-) strand; PAM type: YTN; PAM sequence: CTC
ctgggttcaagcagttctcc

SEQ ID NO: 58628 - DNA, 20 bp, Artificial Sequence
  Description of Artificial Sequence: Synthetic oligonucleotide
  Target: ATXN2; (-) strand; PAM type: YTN; PAM sequence: CTC
cgcctcctgggttcaagcag

SEQ ID NO: 58629 - DNA, 20 bp, Artificial Sequence
  Description of Artificial Sequence: Synthetic oligonucleotide
  Target: ATXN2; (-) strand; PAM type: YTN; PAM sequence: CTG
caaactccgcctcctgggtt

SEQ ID NO: 58630 - DNA, 20 bp, Artificial Sequence
  Description of Artificial Sequence: Synthetic oligonucleotide
  Target: ATXN2; (-) strand; PAM type: YTN; PAM sequence: CTC
cctgcaaactccgcctcctg

SEQ ID NO: 58631 - DNA, 20 bp, Artificial Sequence
  Description of Artificial Sequence: Synthetic oligonucleotide
  Target: ATXN2; (-) strand; PAM type: YTN; PAM sequence: CTC
agctccctgcaaactccgcc

SEQ ID NO: 58632 - DNA, 20 bp, Artificial Sequence
  Description of Artificial Sequence: Synthetic oligonucleotide
  Target: ATXN2; (-) strand; PAM type: YTN; PAM sequence: CTG
gagtgcagtggcgcgatctc

SEQ ID NO: 58633 - DNA, 20 bp, Artificial Sequence
  Description of Artificial Sequence: Synthetic oligonucleotide
  Target: ATXN2; (-) strand; PAM type: YTN; PAM sequence: CTG
ccacccaggctggagtgcag

SEQ ID NO: 58634 - DNA, 20 bp, Artificial Sequence
  Description of Artificial Sequence: Synthetic oligonucleotide
  Target: ATXN2; (-) strand; PAM type: YTN; PAM sequence: CTC
tgccacccaggctggagtgc

SEQ ID NO: 58635 - DNA, 20 bp, Artificial Sequence
  Description of Artificial Sequence: Synthetic oligonucleotide
  Target: ATXN2; (-) strand; PAM type: YTN; PAM sequence: CTC
cctctgccacccaggctgga

SEQ ID NO: 58636 - DNA, 20 bp, Artificial Sequence
  Description of Artificial Sequence: Synthetic oligonucleotide
  Target: ATXN2; (-) strand; PAM type: YTN; PAM sequence: TTG
agaaggagtctccctctgcc

SEQ ID NO: 58637 - DNA, 20 bp, Artificial Sequence
  Description of Artificial Sequence: Synthetic oligonucleotide
  Target: ATXN2; (-) strand; PAM type: YTN; PAM sequence: TTT
gagaaggagtctccctctgc

SEQ ID NO: 58638 - DNA, 20 bp, Artificial Sequence
  Description of Artificial Sequence: Synthetic oligonucleotide
  Target: ATXN2; (-) strand; PAM type: YTN; PAM sequence: TTT
tgagaaggagtctccctctg

SEQ ID NO: 58639 - DNA, 20 bp, Artificial Sequence
  Description of Artificial Sequence: Synthetic oligonucleotide
  Target: ATXN2; (-) strand; PAM type: YTN; PAM sequence: TTT
ttgagaaggagtctccctct

SEQ ID NO: 58640 - DNA, 20 bp, Artificial Sequence
  Description of Artificial Sequence: Synthetic oligonucleotide
  Target: ATXN2; (-) strand; PAM type: YTN; PAM sequence: TTA
atttttgagaaggagtctcc

SEQ ID NO: 58641 - DNA, 20 bp, Artificial Sequence
  Description of Artificial Sequence: Synthetic oligonucleotide
  Target: ATXN2; (-) strand; PAM type: YTN; PAM sequence: TTT
aatttttgagaaggagtctc

SEQ ID NO: 58642 - DNA, 20 bp, Artificial Sequence
  Description of Artificial Sequence: Synthetic oligonucleotide
  Target: ATXN2; (-) strand; PAM type: YTN; PAM sequence: TTT
taatttttgagaaggagtct

SEQ ID NO: 58643 - DNA, 20 bp, Artificial Sequence
  Description of Artificial Sequence: Synthetic oligonucleotide
  Target: ATXN2; (-) strand; PAM type: YTN; PAM sequence: TTT
ttaatttttgagaaggagtc

SEQ ID NO: 58644 - DNA, 20 bp, Artificial Sequence
  Description of Artificial Sequence: Synthetic oligonucleotide
  Target: ATXN2; (-) strand; PAM type: YTN; PAM sequence: TTT
tttaatttttgagaaggagt

SEQ ID NO: 58645 - DNA, 20 bp, Artificial Sequence
  Description of Artificial Sequence: Synthetic oligonucleotide
  Target: ATXN2; (-) strand; PAM type: YTN; PAM sequence: TTT
ttttaatttttgagaaggag

SEQ ID NO: 58646 - DNA, 20 bp, Artificial Sequence
  Description of Artificial Sequence: Synthetic oligonucleotide
  Target: ATXN2; (-) strand; PAM type: YTN; PAM sequence: TTT
tttttaatttttgagaagga

SEQ ID NO: 58647 - DNA, 20 bp, Artificial Sequence
  Description of Artificial Sequence: Synthetic oligonucleotide
  Target: ATXN2; (-) strand; PAM type: YTN; PAM sequence: TTT
ttttttaatttttgagaagg

SEQ ID NO: 58648 - DNA, 20 bp, Artificial Sequence
  Description of Artificial Sequence: Synthetic oligonucleotide
  Target: ATXN2; (-) strand; PAM type: YTN; PAM sequence: TTT
tttttttaatttttgagaag

SEQ ID NO: 58649 - DNA, 20 bp, Artificial Sequence
  Description of Artificial Sequence: Synthetic oligonucleotide
  Target: ATXN2; (-) strand; PAM type: YTN; PAM sequence: TTA
ttttttttttaatttttgag

SEQ ID NO: 58650 - DNA, 20 bp, Artificial Sequence
  Description of Artificial Sequence: Synthetic oligonucleotide
  Target: ATXN2; (-) strand; PAM type: YTN; PAM sequence: TTT
attttttttttaatttttga

SEQ ID NO: 58651 - DNA, 20 bp, Artificial Sequence
  Description of Artificial Sequence: Synthetic oligonucleotide
  Target: ATXN2; (-) strand; PAM type: YTN; PAM sequence: TTT
tattttttttttaatttttg

SEQ ID NO: 58652 - DNA, 20 bp, Artificial Sequence
  Description of Artificial Sequence: Synthetic oligonucleotide
  Target: ATXN2; (-) strand; PAM type: YTN; PAM sequence: TTT
ttattttttttttaattttt

SEQ ID NO: 58653 - DNA, 20 bp, Artificial Sequence
  Description of Artificial Sequence: Synthetic oligonucleotide
  Target: ATXN2; (-) strand; PAM type: YTN; PAM sequence: TTT
tttattttttttttaatttt

SEQ ID NO: 58654 - DNA, 20 bp, Artificial Sequence
  Description of Artificial Sequence: Synthetic oligonucleotide
  Target: ATXN2; (-) strand; PAM type: YTN; PAM sequence: TTA
ttttttattttttttttaat

SEQ ID NO: 58655 - DNA, 20 bp, Artificial Sequence
  Description of Artificial Sequence: Synthetic oligonucleotide
  Target: ATXN2; (-) strand; PAM type: YTN; PAM sequence: TTT
attttttattttttttttaa

SEQ ID NO: 58656 - DNA, 20 bp, Artificial Sequence
  Description of Artificial Sequence: Synthetic oligonucleotide
  Target: ATXN2; (-) strand; PAM type: YTN; PAM sequence: TTA
tttattttttattttttttt

SEQ ID NO: 58657 - DNA, 20 bp, Artificial Sequence
  Description of Artificial Sequence: Synthetic oligonucleotide
  Target: ATXN2; (-) strand; PAM type: YTN; PAM sequence: TTT
atttattttttatttttttt

SEQ ID NO: 58658 - DNA, 20 bp, Artificial Sequence
  Description of Artificial Sequence: Synthetic oligonucleotide
  Target: ATXN2; (-) strand; PAM type: YTN; PAM sequence: TTT
tatttattttttattttttt

SEQ ID NO: 58659 - DNA, 20 bp, Artificial Sequence
  Description of Artificial Sequence: Synthetic oligonucleotide
  Target: ATXN2; (-) strand; PAM type: YTN; PAM sequence: TTT
ttatttattttttatttttt

SEQ ID NO: 58660 - DNA, 20 bp, Artificial Sequence
  Description of Artificial Sequence: Synthetic oligonucleotide
  Target: ATXN2; (-) strand; PAM type: YTN; PAM sequence: TTT
tttatttattttttattttt

SEQ ID NO: 58661 - DNA, 20 bp, Artificial Sequence
  Description of Artificial Sequence: Synthetic oligonucleotide
  Target: ATXN2; (-) strand; PAM type: YTN; PAM sequence: TTA
ttttttatttattttttatt

SEQ ID NO: 58662 - DNA, 20 bp, Artificial Sequence
  Description of Artificial Sequence: Synthetic oligonucleotide
  Target: ATXN2; (-) strand; PAM type: YTN; PAM sequence: TTT
attttttatttattttttat

SEQ ID NO: 58663 - DNA, 20 bp, Artificial Sequence
  Description of Artificial Sequence: Synthetic oligonucleotide
  Target: ATXN2; (-) strand; PAM type: YTN; PAM sequence: TTT
tattttttatttatttttta

SEQ ID NO: 58664 - DNA, 20 bp, Artificial Sequence
  Description of Artificial Sequence: Synthetic oligonucleotide
  Target: ATXN2; (-) strand; PAM type: YTN; PAM sequence: TTT
ttattttttatttatttttt

SEQ ID NO: 58665 - DNA, 20 bp, Artificial Sequence
  Description of Artificial Sequence: Synthetic oligonucleotide
  Target: ATXN2; (-) strand; PAM type: YTN; PAM sequence: TTT
tttattttttatttattttt

SEQ ID NO: 58666 - DNA, 20 bp, Artificial Sequence
  Description of Artificial Sequence: Synthetic oligonucleotide
  Target: ATXN2; (-) strand; PAM type: YTN; PAM sequence: TTT
ttttattttttatttatttt

SEQ ID NO: 58667 - DNA, 20 bp, Artificial Sequence
  Description of Artificial Sequence: Synthetic oligonucleotide
  Target: ATXN2; (-) strand; PAM type: YTN; PAM sequence: TTT
tttttattttttatttattt

SEQ ID NO: 58668 - DNA, 20 bp, Artificial Sequence
  Description of Artificial Sequence: Synthetic oligonucleotide
  Target: ATXN2; (-) strand; PAM type: YTN; PAM sequence: TTT
ttttttattttttatttatt

SEQ ID NO: 58669 - DNA, 20 bp, Artificial Sequence
  Description of Artificial Sequence: Synthetic oligonucleotide
  Target: ATXN2; (-) strand; PAM type: YTN; PAM sequence: TTT
tttttttattttttatttat

SEQ ID NO: 58670 - DNA, 20 bp, Artificial Sequence
  Description of Artificial Sequence: Synthetic oligonucleotide
  Target: ATXN2; (-) strand; PAM type: YTN; PAM sequence: TTT
ttttttttattttttattta

SEQ ID NO: 58671 - DNA, 20 bp, Artificial Sequence
  Description of Artificial Sequence: Synthetic oligonucleotide
  Target: ATXN2; (-) strand; PAM type: YTN; PAM sequence: TTT
tttttttttattttttattt

SEQ ID NO: 58672 - DNA, 20 bp, Artificial Sequence
  Description of Artificial Sequence: Synthetic oligonucleotide
  Target: ATXN2; (-) strand; PAM type: YTN; PAM sequence: TTT
ttttttttttattttttatt

SEQ ID NO: 58673 - DNA, 20 bp, Artificial Sequence
  Description of Artificial Sequence: Synthetic oligonucleotide
  Target: ATXN2; (-) strand; PAM type: YTN; PAM sequence: CTT
tttttttttttattttttat

SEQ ID NO: 58674 - DNA, 20 bp, Artificial Sequence
  Description of Artificial Sequence: Synthetic oligonucleotide
  Target: ATXN2; (-) strand; PAM type: YTN; PAM sequence: CTC
tttttttttttttatttttt

SEQ ID NO: 58675 - DNA, 20 bp, Artificial Sequence
  Description of Artificial Sequence: Synthetic oligonucleotide
  Target: ATXN2; (-) strand; PAM type: YTN; PAM sequence: CTG
tgcccagcctcttttttttt

SEQ ID NO: 58676 - DNA, 20 bp, Artificial Sequence
  Description of Artificial Sequence: Synthetic oligonucleotide
  Target: ATXN2; (-) strand; PAM type: YTN; PAM sequence: TTA
caggcgtgagccactgtgcc

SEQ ID NO: 58677 - DNA, 20 bp, Artificial Sequence
  Description of Artificial Sequence: Synthetic oligonucleotide
  Target: ATXN2; (-) strand; PAM type: YTN; PAM sequence: CTG
ggattacaggcgtgagccac

SEQ ID NO: 58678 - DNA, 20 bp, Artificial Sequence
  Description of Artificial Sequence: Synthetic oligonucleotide
  Target: ATXN2; (-) strand; PAM type: YTN; PAM sequence: CTC
ccaaagtgctgggattacag

SEQ ID NO: 58679 - DNA, 20 bp, Artificial Sequence
  Description of Artificial Sequence: Synthetic oligonucleotide
  Target: ATXN2; (-) strand; PAM type: YTN; PAM sequence: CTC
agcctcccaaagtgctggga

SEQ ID NO: 58680 - DNA, 20 bp, Artificial Sequence
  Description of Artificial Sequence: Synthetic oligonucleotide
  Target: ATXN2; (-) strand; PAM type: YTN; PAM sequence: CTG
cctcagcctcccaaagtgct

SEQ ID NO: 58681 - DNA, 20 bp, Artificial Sequence
  Description of Artificial Sequence: Synthetic oligonucleotide
  Target: ATXN2; (-) strand; PAM type: YTN; PAM sequence: CTC
gtgatccgcctgcctcagcc

SEQ ID NO: 58682 - DNA, 20 bp, Artificial Sequence
  Description of Artificial Sequence: Synthetic oligonucleotide
  Target: ATXN2; (-) strand; PAM type: YTN; PAM sequence: CTG
acctcgtgatccgcctgcct

SEQ ID NO: 58683 - DNA, 20 bp, Artificial Sequence
  Description of Artificial Sequence: Synthetic oligonucleotide
  Target: ATXN2; (-) strand; PAM type: YTN; PAM sequence: CTC
ctgacctcgtgatccgcctg

SEQ ID NO: 58684 - DNA, 20 bp, Artificial Sequence
  Description of Artificial Sequence: Synthetic oligonucleotide
  Target: ATXN2; (-) strand; PAM type: YTN; PAM sequence: TTG
atctcctgacctcgtgatcc

SEQ ID NO: 58685 - DNA, 20 bp, Artificial Sequence
  Description of Artificial Sequence: Synthetic oligonucleotide
  Target: ATXN2; (-) strand; PAM type: YTN; PAM sequence: CTT
gatctcctgacctcgtgatc

SEQ ID NO: 58686 - DNA, 20 bp, Artificial Sequence
  Description of Artificial Sequence: Synthetic oligonucleotide
  Target: ATXN2; (-) strand; PAM type: YTN; PAM sequence: TTA
gccaggatggtcttgatctc

SEQ ID NO: 58687 - DNA, 20 bp, Artificial Sequence
  Description of Artificial Sequence: Synthetic oligonucleotide
  Target: ATXN2; (-) strand; PAM type: YTN; PAM sequence: CTG
tgttagccaggatggtcttg

SEQ ID NO: 58688 - DNA, 20 bp, Artificial Sequence
  Description of Artificial Sequence: Synthetic oligonucleotide
  Target: ATXN2; (-) strand; PAM type: YTN; PAM sequence: TTC
actgtgttagccaggatggt

SEQ ID NO: 58689 - DNA, 20 bp, Artificial Sequence
  Description of Artificial Sequence: Synthetic oligonucleotide
  Target: ATXN2; (-) strand; PAM type: YTN; PAM sequence: TTT
cactgtgttagccaggatgg

SEQ ID NO: 58690 - DNA, 20 bp, Artificial Sequence
  Description of Artificial Sequence: Synthetic oligonucleotide
  Target: ATXN2; (-) strand; PAM type: YTN; PAM sequence: TTA
gtagagatggggtttcactg

SEQ ID NO: 58691 - DNA, 20 bp, Artificial Sequence
  Description of Artificial Sequence: Synthetic oligonucleotide
  Target: ATXN2; (-) strand; PAM type: YTN; PAM sequence: TTT
agtagagatggggtttcact

SEQ ID NO: 58692 - DNA, 20 bp, Artificial Sequence
  Description of Artificial Sequence: Synthetic oligonucleotide
  Target: ATXN2; (-) strand; PAM type: YTN; PAM sequence: TTG
tttagtagagatggggtttc

SEQ ID NO: 58693 - DNA, 20 bp, Artificial Sequence
  Description of Artificial Sequence: Synthetic oligonucleotide
  Target: ATXN2; (-) strand; PAM type: YTN; PAM sequence: TTT
gtttagtagagatggggttt

SEQ ID NO: 58694 - DNA, 20 bp, Artificial Sequence
  Description of Artificial Sequence: Synthetic oligonucleotide
  Target: ATXN2; (-) strand; PAM type: YTN; PAM sequence: TTT
tgtttagtagagatggggtt

SEQ ID NO: 58695 - DNA, 20 bp, Artificial Sequence
  Description of Artificial Sequence: Synthetic oligonucleotide
  Target: ATXN2; (-) strand; PAM type: YTN; PAM sequence: TTG
tattttgtttagtagagatg

SEQ ID NO: 58696 - DNA, 20 bp, Artificial Sequence
  Description of Artificial Sequence: Synthetic oligonucleotide
  Target: ATXN2; (-) strand; PAM type: YTN; PAM sequence: TTT
gtattttgtttagtagagat

SEQ ID NO: 58697 - DNA, 20 bp, Artificial Sequence
  Description of Artificial Sequence: Synthetic oligonucleotide
  Target: ATXN2; (-) strand; PAM type: YTN; PAM sequence: TTT
tgtattttgtttagtagaga

SEQ ID NO: 58698 - DNA, 20 bp, Artificial Sequence
  Description of Artificial Sequence: Synthetic oligonucleotide
  Target: ATXN2; (-) strand; PAM type: YTN; PAM sequence: TTT
ttgtattttgtttagtagag

SEQ ID NO: 58699 - DNA, 20 bp, Artificial Sequence
  Description of Artificial Sequence: Synthetic oligonucleotide
  Target: ATXN2; (-) strand; PAM type: YTN; PAM sequence: TTT
tttgtattttgtttagtaga

SEQ ID NO: 58700 - DNA, 20 bp, Artificial Sequence
  Description of Artificial Sequence: Synthetic oligonucleotide
  Target: ATXN2; (-) strand; PAM type: YTN; PAM sequence: CTA
attttttgtattttgtttag

SEQ ID NO: 58701 - DNA, 20 bp, Artificial Sequence
  Description of Artificial Sequence: Synthetic oligonucleotide
  Target: ATXN2; (-) strand; PAM type: YTN; PAM sequence: CTA
caggcgcccgccaccatgcc

SEQ ID NO: 58702 - DNA, 20 bp, Artificial Sequence
  Description of Artificial Sequence: Synthetic oligonucleotide
  Target: ATXN2; (-) strand; PAM type: YTN; PAM sequence: CTA
ggactacaggcgcccgccac

SEQ ID NO: 58703 - DNA, 20 bp, Artificial Sequence
  Description of Artificial Sequence: Synthetic oligonucleotide
  Target: ATXN2; (-) strand; PAM type: YTN; PAM sequence: CTC
ccgagtagctaggactacag

SEQ ID NO: 58704 - DNA, 20 bp, Artificial Sequence
  Description of Artificial Sequence: Synthetic oligonucleotide
  Target: ATXN2; (-) strand; PAM type: YTN; PAM sequence: CTC
agcctcccgagtagctagga

SEQ ID NO: 58705 - DNA, 20 bp, Artificial Sequence
  Description of Artificial Sequence: Synthetic oligonucleotide
  Target: ATXN2; (-) strand; PAM type: YTN; PAM sequence: CTA
cctcagcctcccgagtagct

SEQ ID NO: 58706 - DNA, 20 bp, Artificial Sequence
  Description of Artificial Sequence: Synthetic oligonucleotide
  Target: ATXN2; (-) strand; PAM type: YTN; PAM sequence: CTC
ctacctcagcctcccgagta

SEQ ID NO: 58707 - DNA, 20 bp, Artificial Sequence
  Description of Artificial Sequence: Synthetic oligonucleotide
  Target: ATXN2; (-) strand; PAM type: YTN; PAM sequence: TTC
tcctacctcagcctcccgag

SEQ ID NO: 58708 - DNA, 20 bp, Artificial Sequence
  Description of Artificial Sequence: Synthetic oligonucleotide
  Target: ATXN2; (-) strand; PAM type: YTN; PAM sequence: TTC
acgccattctcctacctcag

SEQ ID NO: 58709 - DNA, 20 bp, Artificial Sequence
  Description of Artificial Sequence: Synthetic oligonucleotide
  Target: ATXN2; (-) strand; PAM type: YTN; PAM sequence: CTG
cgttcacgccattctcctac

SEQ ID NO: 58710 - DNA, 20 bp, Artificial Sequence
  Description of Artificial Sequence: Synthetic oligonucleotide
  Target: ATXN2; (-) strand; PAM type: YTN; PAM sequence: CTC
ctgcgttcacgccattctcc

SEQ ID NO: 58711 - DNA, 20 bp, Artificial Sequence
  Description of Artificial Sequence: Synthetic oligonucleotide
  Target: ATXN2; (-) strand; PAM type: YTN; PAM sequence: CTC
cgcctcctgcgttcacgcca

SEQ ID NO: 58712 - DNA, 20 bp, Artificial Sequence
  Description of Artificial Sequence: Synthetic oligonucleotide
  Target: ATXN2; (-) strand; PAM type: YTN; PAM sequence: CTG
cacgctccgcctcctgcgtt

SEQ ID NO: 58713 - DNA, 20 bp, Artificial Sequence
  Description of Artificial Sequence: Synthetic oligonucleotide
  Target: ATXN2; (-) strand; PAM type: YTN; PAM sequence: CTC
actgcacgctccgcctcctg

SEQ ID NO: 58714 - DNA, 20 bp, Artificial Sequence
  Description of Artificial Sequence: Synthetic oligonucleotide
  Target: ATXN2; (-) strand; PAM type: YTN; PAM sequence: CTC
agctcactgcacgctccgcc

SEQ ID NO: 58715 - DNA, 20 bp, Artificial Sequence
  Description of Artificial Sequence: Synthetic oligonucleotide
  Target: ATXN2; (-) strand; PAM type: YTN; PAM sequence: CTG
gagtgcagtggcgtgatctc

SEQ ID NO: 58716 - DNA, 20 bp, Artificial Sequence
  Description of Artificial Sequence: Synthetic oligonucleotide
  Target: ATXN2; (-) strand; PAM type: YTN; PAM sequence: CTG
tcgcccaggctggagtgcag

SEQ ID NO: 58717 - DNA, 20 bp, Artificial Sequence
  Description of Artificial Sequence: Synthetic oligonucleotide
  Target: ATXN2; (-) strand; PAM type: YTN; PAM sequence: CTC
cctgtcgcccaggctggagt

SEQ ID NO: 58718 - DNA, 20 bp, Artificial Sequence
  Description of Artificial Sequence: Synthetic oligonucleotide
  Target: ATXN2; (-) strand; PAM type: YTN; PAM sequence: CTC
tccctgtcgcccaggctgga

SEQ ID NO: 58719 - DNA, 20 bp, Artificial Sequence
  Description of Artificial Sequence: Synthetic oligonucleotide
  Target: ATXN2; (-) strand; PAM type: YTN; PAM sequence: TTG
agatggagtctctccctgtc

SEQ ID NO: 58720 - DNA, 20 bp, Artificial Sequence
  Description of Artificial Sequence: Synthetic oligonucleotide
  Target: ATXN2; (-) strand; PAM type: YTN; PAM sequence: TTT
gagatggagtctctccctgt

SEQ ID NO: 58721 - DNA, 20 bp, Artificial Sequence
  Description of Artificial Sequence: Synthetic oligonucleotide
  Target: ATXN2; (-) strand; PAM type: YTN; PAM sequence: TTT
tgagatggagtctctccctg

SEQ ID NO: 58722 - DNA, 20 bp, Artificial Sequence
  Description of Artificial Sequence: Synthetic oligonucleotide
  Target: ATXN2; (-) strand; PAM type: YTN; PAM sequence: TTT
ttgagatggagtctctccct

SEQ ID NO: 58723 - DNA, 20 bp, Artificial Sequence
  Description of Artificial Sequence: Synthetic oligonucleotide
  Target: ATXN2; (-) strand; PAM type: YTN; PAM sequence: TTT
tttgagatggagtctctccc

SEQ ID NO: 58724 - DNA, 20 bp, Artificial Sequence
  Description of Artificial Sequence: Synthetic oligonucleotide
  Target: ATXN2; (-) strand; PAM type: YTN; PAM sequence: TTT
ttttgagatggagtctctcc

SEQ ID NO: 58725 - DNA, 20 bp, Artificial Sequence
  Description of Artificial Sequence: Synthetic oligonucleotide
  Target: ATXN2; (-) strand; PAM type: YTN; PAM sequence: CTT
tttttgagatggagtctctc

SEQ ID NO: 58726 - DNA, 20 bp, Artificial Sequence
  Description of Artificial Sequence: Synthetic oligonucleotide
  Target: ATXN2; (-) strand; PAM type: YTN; PAM sequence: CTC
tttttttgagatggagtctc

SEQ ID NO: 58727 - DNA, 20 bp, Artificial Sequence
  Description of Artificial Sequence: Synthetic oligonucleotide
  Target: ATXN2; (-) strand; PAM type: YTN; PAM sequence: TTG
atgtctctttttttgagatg

SEQ ID NO: 58728 - DNA, 20 bp, Artificial Sequence
  Description of Artificial Sequence: Synthetic oligonucleotide
  Target: ATXN2; (-) strand; PAM type: YTN; PAM sequence: TTT
gatgtctctttttttgagat

SEQ ID NO: 58729 - DNA, 20 bp, Artificial Sequence
  Description of Artificial Sequence: Synthetic oligonucleotide
  Target: ATXN2; (-) strand; PAM type: YTN; PAM sequence: CTT
tgatgtctctttttttgaga

SEQ ID NO: 58730 - DNA, 20 bp, Artificial Sequence
  Description of Artificial Sequence: Synthetic oligonucleotide
  Target: ATXN2; (-) strand; PAM type: YTN; PAM sequence: CTC
tttgatgtctctttttttga

SEQ ID NO: 58731 - DNA, 20 bp, Artificial Sequence
  Description of Artificial Sequence: Synthetic oligonucleotide
  Target: ATXN2; (-) strand; PAM type: YTN; PAM sequence: TTA
tctctttgatgtctcttttt

SEQ ID NO: 58732 - DNA, 20 bp, Artificial Sequence
  Description of Artificial Sequence: Synthetic oligonucleotide
  Target: ATXN2; (-) strand; PAM type: YTN; PAM sequence: CTT
atctctttgatgtctctttt

SEQ ID NO: 58733 - DNA, 20 bp, Artificial Sequence
  Description of Artificial Sequence: Synthetic oligonucleotide
  Target: ATXN2; (-) strand; PAM type: YTN; PAM sequence: TTG
tcaaaaaccttatctctttg

SEQ ID NO: 58734 - DNA, 20 bp, Artificial Sequence
  Description of Artificial Sequence: Synthetic oligonucleotide
  Target: ATXN2; (-) strand; PAM type: YTN; PAM sequence: TTT
gtcaaaaaccttatctcttt

SEQ ID NO: 58735 - DNA, 20 bp, Artificial Sequence
  Description of Artificial Sequence: Synthetic oligonucleotide
  Target: ATXN2; (-) strand; PAM type: YTN; PAM sequence: TTT
tgtcaaaaaccttatctctt

SEQ ID NO: 58736 - DNA, 20 bp, Artificial Sequence
  Description of Artificial Sequence: Synthetic oligonucleotide
  Target: ATXN2; (-) strand; PAM type: YTN; PAM sequence: CTT
ttgtcaaaaaccttatctct

SEQ ID NO: 58737 - DNA, 20 bp, Artificial Sequence
  Description of Artificial Sequence: Synthetic oligonucleotide
  Target: ATXN2; (-) strand; PAM type: YTN; PAM sequence: TTA
gaaagggcttttgtcaaaaa

SEQ ID NO: 58738 - DNA, 20 bp, Artificial Sequence
  Description of Artificial Sequence: Synthetic oligonucleotide
  Target: ATXN2; (-) strand; PAM type: YTN; PAM sequence: CTT
agaaagggcttttgtcaaaa

SEQ ID NO: 58739 - DNA, 20 bp, Artificial Sequence
  Description of Artificial Sequence: Synthetic oligonucleotide
  Target: ATXN2; (-) strand; PAM type: YTN; PAM sequence: CTA
tcttagaaagggcttttgtc

SEQ ID NO: 58740 - DNA, 20 bp, Artificial Sequence
  Description of Artificial Sequence: Synthetic oligonucleotide
  Target: ATXN2; (-) strand; PAM type: YTN; PAM sequence: CTA
gctatcttagaaagggcttt

SEQ ID NO: 58741 - DNA, 20 bp, Artificial Sequence
  Description of Artificial Sequence: Synthetic oligonucleotide
  Target: ATXN2; (-) strand; PAM type: YTN; PAM sequence: TTC
tagctatcttagaaagggct

SEQ ID NO: 58742 - DNA, 20 bp, Artificial Sequence
  Description of Artificial Sequence: Synthetic oligonucleotide
  Target: ATXN2; (-) strand; PAM type: YTN; PAM sequence: TTT
ctagctatcttagaaagggc

SEQ ID NO: 58743 - DNA, 20 bp, Artificial Sequence
  Description of Artificial Sequence: Synthetic oligonucleotide
  Target: ATXN2; (-) strand; PAM type: YTN; PAM sequence: CTT
tctagctatcttagaaaggg

SEQ ID NO: 58744 - DNA, 20 bp, Artificial Sequence
  Description of Artificial Sequence: Synthetic oligonucleotide
  Target: ATXN2; (-) strand; PAM type: YTN; PAM sequence: CTC
tttctagctatcttagaaag

SEQ ID NO: 58745 - DNA, 20 bp, Artificial Sequence
  Description of Artificial Sequence: Synthetic oligonucleotide
  Target: ATXN2; (-) strand; PAM type: YTN; PAM sequence: TTG
acctctttctagctatctta

SEQ ID NO: 58746 - DNA, 20 bp, Artificial Sequence
  Description of Artificial Sequence: Synthetic oligonucleotide
  Target: ATXN2; (-) strand; PAM type: YTN; PAM sequence: CTT
gacctctttctagctatctt

SEQ ID NO: 58747 - DNA, 20 bp, Artificial Sequence
  Description of Artificial Sequence: Synthetic oligonucleotide
  Target: ATXN2; (-) strand; PAM type: YTN; PAM sequence: TTG
accttgacctctttctagct

SEQ ID NO: 58748 - DNA, 20 bp, Artificial Sequence
  Description of Artificial Sequence: Synthetic oligonucleotide
  Target: ATXN2; (-) strand; PAM type: YTN; PAM sequence: CTA
aaaaagtattgaccttgacc

SEQ ID NO: 58749 - DNA, 20 bp, Artificial Sequence
  Description of Artificial Sequence: Synthetic oligonucleotide
  Target: ATXN2; (-) strand; PAM type: YTN; PAM sequence: TTC
taaaaaagtattgaccttga

SEQ ID NO: 58750 - DNA, 20 bp, Artificial Sequence
  Description of Artificial Sequence: Synthetic oligonucleotide
  Target: ATXN2; (-) strand; PAM type: YTN; PAM sequence: TTA
ttctaaaaaagtattgacct

SEQ ID NO: 58751 - DNA, 20 bp, Artificial Sequence
  Description of Artificial Sequence: Synthetic oligonucleotide
  Target: ATXN2; (-) strand; PAM type: YTN; PAM sequence: TTT
attctaaaaaagtattgacc

SEQ ID NO: 58752 - DNA, 20 bp, Artificial Sequence
  Description of Artificial Sequence: Synthetic oligonucleotide
  Target: ATXN2; (-) strand; PAM type: YTN; PAM sequence: TTT
tattctaaaaaagtattgac

SEQ ID NO: 58753 - DNA, 20 bp, Artificial Sequence
  Description of Artificial Sequence: Synthetic oligonucleotide
  Target: ATXN2; (-) strand; PAM type: YTN; PAM sequence: TTA
ttttattctaaaaaagtatt

SEQ ID NO: 58754 - DNA, 20 bp, Artificial Sequence
  Description of Artificial Sequence: Synthetic oligonucleotide
  Target: ATXN2; (-) strand; PAM type: YTN; PAM sequence: TTA
aatgataaaataggataatt

SEQ ID NO: 58755 - DNA, 20 bp, Artificial Sequence
  Description of Artificial Sequence: Synthetic oligonucleotide
  Target: ATXN2; (-) strand; PAM type: YTN; PAM sequence: CTG
aacagttaaatgataaaata

SEQ ID NO: 58756 - DNA, 20 bp, Artificial Sequence
  Description of Artificial Sequence: Synthetic oligonucleotide
  Target: ATXN2; (-) strand; PAM type: YTN; PAM sequence: TTA
ctgaacagttaaatgataaa

SEQ ID NO: 58757 - DNA, 20 bp, Artificial Sequence
  Description of Artificial Sequence: Synthetic oligonucleotide
  Target: ATXN2; (-) strand; PAM type: YTN; PAM sequence: CTA
acattactgaacagttaaat

SEQ ID NO: 58758 - DNA, 20 bp, Artificial Sequence
  Description of Artificial Sequence: Synthetic oligonucleotide
  Target: ATXN2; (-) strand; PAM type: YTN; PAM sequence: TTA
atacacatatgctaacatta

SEQ ID NO: 58759 - DNA, 20 bp, Artificial Sequence
  Description of Artificial Sequence: Synthetic oligonucleotide
  Target: ATXN2; (-) strand; PAM type: YTN; PAM sequence: TTT
aatacacatatgctaacatt

SEQ ID NO: 58760 - DNA, 20 bp, Artificial Sequence
  Description of Artificial Sequence: Synthetic oligonucleotide
  Target: ATXN2; (-) strand; PAM type: YTN; PAM sequence: TTA
gtatgtttaatacacatatg

SEQ ID NO: 58761 - DNA, 20 bp, Artificial Sequence
  Description of Artificial Sequence: Synthetic oligonucleotide
  Target: ATXN2; (-) strand; PAM type: YTN; PAM sequence: TTT
agtatgtttaatacacatat

SEQ ID NO: 58762 - DNA, 20 bp, Artificial Sequence
  Description of Artificial Sequence: Synthetic oligonucleotide
  Target: ATXN2; (-) strand; PAM type: YTN; PAM sequence: TTT
tagtatgtttaatacacata

SEQ ID NO: 58763 - DNA, 20 bp, Artificial Sequence
  Description of Artificial Sequence: Synthetic oligonucleotide
  Target: ATXN2; (-) strand; PAM type: YTN; PAM sequence: TTT
ttagtatgtttaatacacat

SEQ ID NO: 58764 - DNA, 20 bp, Artificial Sequence
  Description of Artificial Sequence: Synthetic oligonucleotide
  Target: ATXN2; (-) strand; PAM type: YTN; PAM sequence: TTA
aatttttagtatgtttaata

SEQ ID NO: 58765 - DNA, 20 bp, Artificial Sequence
  Description of Artificial Sequence: Synthetic oligonucleotide
  Target: ATXN2; (-) strand; PAM type: YTN; PAM sequence: TTT
aaatttttagtatgtttaat

SEQ ID NO: 58766 - DNA, 20 bp, Artificial Sequence
  Description of Artificial Sequence: Synthetic oligonucleotide
  Target: ATXN2; (-) strand; PAM type: YTN; PAM sequence: TTT
taaatttttagtatgtttaa

SEQ ID NO: 58767 - DNA, 20 bp, Artificial Sequence
  Description of Artificial Sequence: Synthetic oligonucleotide
  Target: ATXN2; (-) strand; PAM type: YTN; PAM sequence: TTT
ttaaatttttagtatgttta

SEQ ID NO: 58768 - DNA, 20 bp, Artificial Sequence
  Description of Artificial Sequence: Synthetic oligonucleotide
  Target: ATXN2; (-) strand; PAM type: YTN; PAM sequence: TTG
tttttaaatttttagtatgt

SEQ ID NO: 58769 - DNA, 20 bp, Artificial Sequence
  Description of Artificial Sequence: Synthetic oligonucleotide
  Target: ATXN2; (-) strand; PAM type: YTN; PAM sequence: TTA
ttgtttttaaatttttagta

SEQ ID NO: 58770 - DNA, 20 bp, Artificial Sequence
  Description of Artificial Sequence: Synthetic oligonucleotide
  Target: ATXN2; (-) strand; PAM type: YTN; PAM sequence: CTG
attattgtttttaaattttt

SEQ ID NO: 58771 - DNA, 20 bp, Artificial Sequence
  Description of Artificial Sequence: Synthetic oligonucleotide
  Target: ATXN2; (-) strand; PAM type: YTN; PAM sequence: CTG
caaaatgaaatcctgattat

SEQ ID NO: 58772 - DNA, 20 bp, Artificial Sequence
  Description of Artificial Sequence: Synthetic oligonucleotide
  Target: ATXN2; (-) strand; PAM type: YTN; PAM sequence: CTA
atgactgcaaaatgaaatcc

SEQ ID NO: 58773 - DNA, 20 bp, Artificial Sequence
  Description of Artificial Sequence: Synthetic oligonucleotide
  Target: ATXN2; (-) strand; PAM type: YTN; PAM sequence: TTG
aaaacataggaccactaatg

SEQ ID NO: 58774 - DNA, 20 bp, Artificial Sequence
  Description of Artificial Sequence: Synthetic oligonucleotide
  Target: ATXN2; (-) strand; PAM type: YTN; PAM sequence: TTA
tagccatagccaaaggcatt

SEQ ID NO: 58775 - DNA, 20 bp, Artificial Sequence
  Description of Artificial Sequence: Synthetic oligonucleotide
  Target: ATXN2; (-) strand; PAM type: YTN; PAM sequence: TTG
ttatagccatagccaaaggc

SEQ ID NO: 58776 - DNA, 20 bp, Artificial Sequence
  Description of Artificial Sequence: Synthetic oligonucleotide
  Target: ATXN2; (-) strand; PAM type: YTN; PAM sequence: TTA
attgttatagccatagccaa

SEQ ID NO: 58777 - DNA, 20 bp, Artificial Sequence
  Description of Artificial Sequence: Synthetic oligonucleotide
  Target: ATXN2; (-) strand; PAM type: YTN; PAM sequence: TTC
attaattgttatagccatag

SEQ ID NO: 58778 - DNA, 20 bp, Artificial Sequence
  Description of Artificial Sequence: Synthetic oligonucleotide
  Target: ATXN2; (-) strand; PAM type: YTN; PAM sequence: CTC
attcattaattgttatagcc

SEQ ID NO: 58779 - DNA, 20 bp, Artificial Sequence
  Description of Artificial Sequence: Synthetic oligonucleotide
  Target: ATXN2; (-) strand; PAM type: YTN; PAM sequence: TTC
tcattcattaattgttatag

SEQ ID NO: 58780 - DNA, 20 bp, Artificial Sequence
  Description of Artificial Sequence: Synthetic oligonucleotide
  Target: ATXN2; (-) strand; PAM type: YTN; PAM sequence: TTT
ctcattcattaattgttata

SEQ ID NO: 58781 - DNA, 20 bp, Artificial Sequence
  Description of Artificial Sequence: Synthetic oligonucleotide
  Target: ATXN2; (-) strand; PAM type: YTN; PAM sequence: TTT
tctcattcattaattgttat

SEQ ID NO: 58782 - DNA, 20 bp, Artificial Sequence
  Description of Artificial Sequence: Synthetic oligonucleotide
  Target: ATXN2; (-) strand; PAM type: YTN; PAM sequence: CTT
ttctcattcattaattgtta

SEQ ID NO: 58783 - DNA, 20 bp, Artificial Sequence
  Description of Artificial Sequence: Synthetic oligonucleotide
  Target: ATXN2; (-) strand; PAM type: YTN; PAM sequence: TTA
tgtcaccttttctcattcat

SEQ ID NO: 58784 - DNA, 20 bp, Artificial Sequence
  Description of Artificial Sequence: Synthetic oligonucleotide
  Target: ATXN2; (-) strand; PAM type: YTN; PAM sequence: TTT
atgtcaccttttctcattca

SEQ ID NO: 58785 - DNA, 20 bp, Artificial Sequence
  Description of Artificial Sequence: Synthetic oligonucleotide
  Target: ATXN2; (-) strand; PAM type: YTN; PAM sequence: TTT
tatgtcaccttttctcattc

SEQ ID NO: 58786 - DNA, 20 bp, Artificial Sequence
  Description of Artificial Sequence: Synthetic oligonucleotide
  Target: ATXN2; (-) strand; PAM type: YTN; PAM sequence: TTG
gtgacaattttatgtcacct

SEQ ID NO: 58787 - DNA, 20 bp, Artificial Sequence
  Description of Artificial Sequence: Synthetic oligonucleotide
  Target: ATXN2; (-) strand; PAM type: YTN; PAM sequence: TTA
atgcaaacagaagaacatgc

SEQ ID NO: 58788 - DNA, 20 bp, Artificial Sequence
  Description of Artificial Sequence: Synthetic oligonucleotide
  Target: ATXN2; (-) strand; PAM type: YTN; PAM sequence: TTT
aatgcaaacagaagaacatg

SEQ ID NO: 58789 - DNA, 20 bp, Artificial Sequence
  Description of Artificial Sequence: Synthetic oligonucleotide
  Target: ATXN2; (-) strand; PAM type: YTN; PAM sequence: TTA
aaacatttaatgcaaacaga

SEQ ID NO: 58790 - DNA, 20 bp, Artificial Sequence
  Description of Artificial Sequence: Synthetic oligonucleotide
  Target: ATXN2; (-) strand; PAM type: YTN; PAM sequence: TTT
aaaacatttaatgcaaacag

SEQ ID NO: 58791 - DNA, 20 bp, Artificial Sequence
  Description of Artificial Sequence: Synthetic oligonucleotide
  Target: ATXN2; (-) strand; PAM type: YTN; PAM sequence: TTT
taaaacatttaatgcaaaca

SEQ ID NO: 58792 - DNA, 20 bp, Artificial Sequence
  Description of Artificial Sequence: Synthetic oligonucleotide
  Target: ATXN2; (-) strand; PAM type: YTN; PAM sequence: TTT
ttaaaacatttaatgcaaac

SEQ ID NO: 58793 - DNA, 20 bp, Artificial Sequence
  Description of Artificial Sequence: Synthetic oligonucleotide
  Target: ATXN2; (-) strand; PAM type: YTN; PAM sequence: CTA
ggtttttaaaacatttaatg

SEQ ID NO: 58794 - DNA, 20 bp, Artificial Sequence
  Description of Artificial Sequence: Synthetic oligonucleotide
  Target: ATXN2; (-) strand; PAM type: YTN; PAM sequence: CTA
catcatatctaggtttttaa

SEQ ID NO: 58795 - DNA, 20 bp, Artificial Sequence
  Description of Artificial Sequence: Synthetic oligonucleotide
  Target: ATXN2; (-) strand; PAM type: YTN; PAM sequence: TTA
agctacatcatatctaggtt

SEQ ID NO: 58796 - DNA, 20 bp, Artificial Sequence
  Description of Artificial Sequence: Synthetic oligonucleotide
  Target: ATXN2; (-) strand; PAM type: YTN; PAM sequence: TTT
aagctacatcatatctaggt

SEQ ID NO: 58797 - DNA, 20 bp, Artificial Sequence
  Description of Artificial Sequence: Synthetic oligonucleotide
  Target: ATXN2; (-) strand; PAM type: YTN; PAM sequence: TTT
taagctacatcatatctagg

SEQ ID NO: 58798 - DNA, 20 bp, Artificial Sequence
  Description of Artificial Sequence: Synthetic oligonucleotide
  Target: ATXN2; (-) strand; PAM type: YTN; PAM sequence: TTT
ttaagctacatcatatctag

SEQ ID NO: 58799 - DNA, 20 bp, Artificial Sequence
  Description of Artificial Sequence: Synthetic oligonucleotide
  Target: ATXN2; (-) strand; PAM type: YTN; PAM sequence: CTT
tttaagctacatcatatcta

SEQ ID NO: 58800 - DNA, 20 bp, Artificial Sequence
  Description of Artificial Sequence: Synthetic oligonucleotide
  Target: ATXN2; (-) strand; PAM type: YTN; PAM sequence: TTC
tttttaagctacatcatatc

SEQ ID NO: 58801 - DNA, 20 bp, Artificial Sequence
  Description of Artificial Sequence: Synthetic oligonucleotide
  Target: ATXN2; (-) strand; PAM type: YTN; PAM sequence: TTT
ctttttaagctacatcatat

SEQ ID NO: 58802 - DNA, 20 bp, Artificial Sequence
  Description of Artificial Sequence: Synthetic oligonucleotide
  Target: ATXN2; (-) strand; PAM type: YTN; PAM sequence: TTT
tctttttaagctacatcata

SEQ ID NO: 58803 - DNA, 20 bp, Artificial Sequence
  Description of Artificial Sequence: Synthetic oligonucleotide
  Target: ATXN2; (-) strand; PAM type: YTN; PAM sequence: CTT
ttctttttaagctacatcat

SEQ ID NO: 58804 - DNA, 20 bp, Artificial Sequence
  Description of Artificial Sequence: Synthetic oligonucleotide
  Target: ATXN2; (-) strand; PAM type: YTN; PAM sequence: TTG
tgcttttctttttaagctac

SEQ ID NO: 58805 - DNA, 20 bp, Artificial Sequence
  Description of Artificial Sequence: Synthetic oligonucleotide
  Target: ATXN2; (-) strand; PAM type: YTN; PAM sequence: TTG
agtatgaattgtgcttttct

SEQ ID NO: 58806 - DNA, 20 bp, Artificial Sequence
  Description of Artificial Sequence: Synthetic oligonucleotide
  Target: ATXN2; (-) strand; PAM type: YTN; PAM sequence: TTT
gagtatgaattgtgcttttc

SEQ ID NO: 58807 - DNA, 20 bp, Artificial Sequence
  Description of Artificial Sequence: Synthetic oligonucleotide
  Target: ATXN2; (-) strand; PAM type: YTN; PAM sequence: CTT
tgagtatgaattgtgctttt

SEQ ID NO: 58808 - DNA, 20 bp, Artificial Sequence
  Description of Artificial Sequence: Synthetic oligonucleotide
  Target: ATXN2; (-) strand; PAM type: YTN; PAM sequence: CTC
aaaggaaccaaatactttga

SEQ ID NO: 58809 - DNA, 20 bp, Artificial Sequence
  Description of Artificial Sequence: Synthetic oligonucleotide
  Target: ATXN2; (-) strand; PAM type: YTN; PAM sequence: TTC
tcaaaggaaccaaatacttt

SEQ ID NO: 58810 - DNA, 20 bp, Artificial Sequence
  Description of Artificial Sequence: Synthetic oligonucleotide
  Target: ATXN2; (-) strand; PAM type: YTN; PAM sequence: TTT
ctcaaaggaaccaaatactt

SEQ ID NO: 58811 - DNA, 20 bp, Artificial Sequence
  Description of Artificial Sequence: Synthetic oligonucleotide
  Target: ATXN2; (-) strand; PAM type: YTN; PAM sequence: TTT
tctcaaaggaaccaaatact

SEQ ID NO: 58812 - DNA, 20 bp, Artificial Sequence
  Description of Artificial Sequence: Synthetic oligonucleotide
  Target: ATXN2; (-) strand; PAM type: YTN; PAM sequence: TTG
tcataaattttctcaaagga

SEQ ID NO: 58813 - DNA, 20 bp, Artificial Sequence
  Description of Artificial Sequence: Synthetic oligonucleotide
  Target: ATXN2; (-) strand; PAM type: YTN; PAM sequence: TTA
aatatattgtcataaatttt

SEQ ID NO: 58814 - DNA, 20 bp, Artificial Sequence
  Description of Artificial Sequence: Synthetic oligonucleotide
  Target: ATXN2; (-) strand; PAM type: YTN; PAM sequence: TTA
taaatatattaaatatattg

SEQ ID NO: 58815 - DNA, 20 bp, Artificial Sequence
  Description of Artificial Sequence: Synthetic oligonucleotide
  Target: ATXN2; (-) strand; PAM type: YTN; PAM sequence: TTT
ataaatatattaaatatatt

SEQ ID NO: 58816 - DNA, 20 bp, Artificial Sequence
  Description of Artificial Sequence: Synthetic oligonucleotide
  Target: ATXN2; (-) strand; PAM type: YTN; PAM sequence: TTT
tataaatatattaaatatat

SEQ ID NO: 58817 - DNA, 20 bp, Artificial Sequence
  Description of Artificial Sequence: Synthetic oligonucleotide
  Target: ATXN2; (-) strand; PAM type: YTN; PAM sequence: TTA
tattttataaatatattaaa

SEQ ID NO: 58818 - DNA, 20 bp, Artificial Sequence
  Description of Artificial Sequence: Synthetic oligonucleotide
  Target: ATXN2; (-) strand; PAM type: YTN; PAM sequence: TTT
atattttataaatatattaa

SEQ ID NO: 58819 - DNA, 20 bp, Artificial Sequence
  Description of Artificial Sequence: Synthetic oligonucleotide
  Target: ATXN2; (-) strand; PAM type: YTN; PAM sequence: CTG
aacaatttatattttataaa

SEQ ID NO: 58820 - DNA, 20 bp, Artificial Sequence
  Description of Artificial Sequence: Synthetic oligonucleotide
  Target: ATXN2; (-) strand; PAM type: YTN; PAM sequence: TTC
cctgaacaatttatatttta

SEQ ID NO: 58821 - DNA, 20 bp, Artificial Sequence
  Description of Artificial Sequence: Synthetic oligonucleotide
  Target: ATXN2; (-) strand; PAM type: YTN; PAM sequence: CTT
ccctgaacaatttatatttt

SEQ ID NO: 58822 - DNA, 20 bp, Artificial Sequence
  Description of Artificial Sequence: Synthetic oligonucleotide
  Target: ATXN2; (-) strand; PAM type: YTN; PAM sequence: CTC
atcttccctgaacaatttat

SEQ ID NO: 58823 - DNA, 20 bp, Artificial Sequence
  Description of Artificial Sequence: Synthetic oligonucleotide
  Target: ATXN2; (-) strand; PAM type: YTN; PAM sequence: TTA
tactcatcttccctgaacaa

SEQ ID NO: 58824 - DNA, 20 bp, Artificial Sequence
  Description of Artificial Sequence: Synthetic oligonucleotide
  Target: ATXN2; (-) strand; PAM type: YTN; PAM sequence: TTT
atactcatcttccctgaaca

SEQ ID NO: 58825 - DNA, 20 bp, Artificial Sequence
  Description of Artificial Sequence: Synthetic oligonucleotide
  Target: ATXN2; (-) strand; PAM type: YTN; PAM sequence: TTT
tatactcatcttccctgaac

SEQ ID NO: 58826 - DNA, 20 bp, Artificial Sequence
  Description of Artificial Sequence: Synthetic oligonucleotide
  Target: ATXN2; (-) strand; PAM type: YTN; PAM sequence: TTA
attttatactcatcttccct

SEQ ID NO: 58827 - DNA, 20 bp, Artificial Sequence
  Description of Artificial Sequence: Synthetic oligonucleotide
  Target: ATXN2; (-) strand; PAM type: YTN; PAM sequence: TTA
catagaagtgttaattttat

SEQ ID NO: 58828 - DNA, 20 bp, Artificial Sequence
  Description of Artificial Sequence: Synthetic oligonucleotide
  Target: ATXN2; (-) strand; PAM type: YTN; PAM sequence: CTT
acatagaagtgttaatttta

SEQ ID NO: 58829 - DNA, 20 bp, Artificial Sequence
  Description of Artificial Sequence: Synthetic oligonucleotide
  Target: ATXN2; (-) strand; PAM type: YTN; PAM sequence: CTA
caacaaacttacatagaagt

SEQ ID NO: 58830 - DNA, 20 bp, Artificial Sequence
  Description of Artificial Sequence: Synthetic oligonucleotide
  Target: ATXN2; (-) strand; PAM type: YTN; PAM sequence: TTA
taaactacaacaaacttaca

SEQ ID NO: 58831 - DNA, 20 bp, Artificial Sequence
  Description of Artificial Sequence: Synthetic oligonucleotide
  Target: ATXN2; (-) strand; PAM type: YTN; PAM sequence: CTT
ataaactacaacaaacttac

SEQ ID NO: 58832 - DNA, 20 bp, Artificial Sequence
  Description of Artificial Sequence: Synthetic oligonucleotide
  Target: ATXN2; (-) strand; PAM type: YTN; PAM sequence: TTC
ttataaactacaacaaactt

SEQ ID NO: 58833 - DNA, 20 bp, Artificial Sequence
  Description of Artificial Sequence: Synthetic oligonucleotide
  Target: ATXN2; (-) strand; PAM type: YTN; PAM sequence: TTG
aagtacattcttataaacta

SEQ ID NO: 58834 - DNA, 20 bp, Artificial Sequence
  Description of Artificial Sequence: Synthetic oligonucleotide
  Target: ATXN2; (-) strand; PAM type: YTN; PAM sequence: TTT
gaagtacattcttataaact

SEQ ID NO: 58835 - DNA, 20 bp, Artificial Sequence
  Description of Artificial Sequence: Synthetic oligonucleotide
  Target: ATXN2; (-) strand; PAM type: YTN; PAM sequence: TTA
tatcaaatataaacaaaatt

SEQ ID NO: 58836 - DNA, 20 bp, Artificial Sequence
  Description of Artificial Sequence: Synthetic oligonucleotide
  Target: ATXN2; (-) strand; PAM type: YTN; PAM sequence: TTA
ttatatcaaatataaacaaa

SEQ ID NO: 58837 - DNA, 20 bp, Artificial Sequence
  Description of Artificial Sequence: Synthetic oligonucleotide
  Target: ATXN2; (-) strand; PAM type: YTN; PAM sequence: CTT
attatatcaaatataaacaa

SEQ ID NO: 58838 - DNA, 20 bp, Artificial Sequence
  Description of Artificial Sequence: Synthetic oligonucleotide
  Target: ATXN2; (-) strand; PAM type: YTN; PAM sequence: TTC
aaagccttattatatcaaat

SEQ ID NO: 58839 - DNA, 20 bp, Artificial Sequence
  Description of Artificial Sequence: Synthetic oligonucleotide
  Target: ATXN2; (-) strand; PAM type: YTN; PAM sequence: TTT
caaagccttattatatcaaa

SEQ ID NO: 58840 - DNA, 20 bp, Artificial Sequence
  Description of Artificial Sequence: Synthetic oligonucleotide
  Target: ATXN2; (-) strand; PAM type: YTN; PAM sequence: CTT
tcaaagccttattatatcaa

SEQ ID NO: 58841 - DNA, 20 bp, Artificial Sequence
  Description of Artificial Sequence: Synthetic oligonucleotide
  Target: ATXN2; (-) strand; PAM type: YTN; PAM sequence: TTA
gactttcaaagccttattat

SEQ ID NO: 58842 - DNA, 20 bp, Artificial Sequence
  Description of Artificial Sequence: Synthetic oligonucleotide
  Target: ATXN2; (-) strand; PAM type: YTN; PAM sequence: TTA
ttagactttcaaagccttat

SEQ ID NO: 58843 - DNA, 20 bp, Artificial Sequence
  Description of Artificial Sequence: Synthetic oligonucleotide
  Target: ATXN2; (-) strand; PAM type: YTN; PAM sequence: TTG
aattattagactttcaaagc

SEQ ID NO: 58844 - DNA, 20 bp, Artificial Sequence
  Description of Artificial Sequence: Synthetic oligonucleotide
  Target: ATXN2; (-) strand; PAM type: YTN; PAM sequence: TTT
gaattattagactttcaaag

SEQ ID NO: 58845 - DNA, 20 bp, Artificial Sequence
  Description of Artificial Sequence: Synthetic oligonucleotide
  Target: ATXN2; (-) strand; PAM type: YTN; PAM sequence: TTA
tttgaattattagactttca

SEQ ID NO: 58846 - DNA, 20 bp, Artificial Sequence
  Description of Artificial Sequence: Synthetic oligonucleotide
  Target: ATXN2; (-) strand; PAM type: YTN; PAM sequence: TTT
atttgaattattagactttc

SEQ ID NO: 58847 - DNA, 20 bp, Artificial Sequence
  Description of Artificial Sequence: Synthetic oligonucleotide
  Target: ATXN2; (-) strand; PAM type: YTN; PAM sequence: CTG
cagtgatttatttgaattat

SEQ ID NO: 58848 - DNA, 20 bp, Artificial Sequence
  Description of Artificial Sequence: Synthetic oligonucleotide
  Target: ATXN2; (-) strand; PAM type: YTN; PAM sequence: TTA
aatctgcagtgatttatttg

SEQ ID NO: 58849 - DNA, 20 bp, Artificial Sequence
  Description of Artificial Sequence: Synthetic oligonucleotide
  Target: ATXN2; (-) strand; PAM type: YTN; PAM sequence: TTC
attaaatctgcagtgattta

SEQ ID NO: 58850 - DNA, 20 bp, Artificial Sequence
  Description of Artificial Sequence: Synthetic oligonucleotide
  Target: ATXN2; (-) strand; PAM type: YTN; PAM sequence: CTT
cattaaatctgcagtgattt

SEQ ID NO: 58851 - DNA, 20 bp, Artificial Sequence
  Description of Artificial Sequence: Synthetic oligonucleotide
  Target: ATXN2; (-) strand; PAM type: YTN; PAM sequence: TTC
ttcattaaatctgcagtgat

SEQ ID NO: 58852 - DNA, 20 bp, Artificial Sequence
  Description of Artificial Sequence: Synthetic oligonucleotide
  Target: ATXN2; (-) strand; PAM type: YTN; PAM sequence: TTA
agcatgttcttcattaaatc

SEQ ID NO: 58853 - DNA, 20 bp, Artificial Sequence
  Description of Artificial Sequence: Synthetic oligonucleotide
  Target: ATXN2; (-) strand; PAM type: YTN; PAM sequence: CTT
aagcatgttcttcattaaat

SEQ ID NO: 58854 - DNA, 20 bp, Artificial Sequence
  Description of Artificial Sequence: Synthetic oligonucleotide
  Target: ATXN2; (-) strand; PAM type: YTN; PAM sequence: CTG
cttaagcatgttcttcatta

SEQ ID NO: 58855 - DNA, 20 bp, Artificial Sequence
  Description of Artificial Sequence: Synthetic oligonucleotide
  Target: ATXN2; (-) strand; PAM type: YTN; PAM sequence: TTA
atctgcttaagcatgttctt

SEQ ID NO: 58856 - DNA, 20 bp, Artificial Sequence
  Description of Artificial Sequence: Synthetic oligonucleotide
  Target: ATXN2; (-) strand; PAM type: YTN; PAM sequence: TTT
aatctgcttaagcatgttct

SEQ ID NO: 58857 - DNA, 20 bp, Artificial Sequence
  Description of Artificial Sequence: Synthetic oligonucleotide
  Target: ATXN2; (-) strand; PAM type: YTN; PAM sequence: CTA
tgccatcataagccataatt

SEQ ID NO: 58858 - DNA, 20 bp, Artificial Sequence
  Description of Artificial Sequence: Synthetic oligonucleotide
  Target: ATXN2; (-) strand; PAM type: YTN; PAM sequence: TTC
tatgccatcataagccataa

SEQ ID NO: 58859 - DNA, 20 bp, Artificial Sequence
  Description of Artificial Sequence: Synthetic oligonucleotide
  Target: ATXN2; (-) strand; PAM type: YTN; PAM sequence: TTG
ttctatgccatcataagcca

SEQ ID NO: 58860 - DNA, 20 bp, Artificial Sequence
  Description of Artificial Sequence: Synthetic oligonucleotide
  Target: ATXN2; (-) strand; PAM type: YTN; PAM sequence: TTT
gttctatgccatcataagcc

SEQ ID NO: 58861 - DNA, 20 bp, Artificial Sequence
  Description of Artificial Sequence: Synthetic oligonucleotide
  Target: ATXN2; (-) strand; PAM type: YTN; PAM sequence: TTT
tgttctatgccatcataagc

SEQ ID NO: 58862 - DNA, 20 bp, Artificial Sequence
  Description of Artificial Sequence: Synthetic oligonucleotide
  Target: ATXN2; (-) strand; PAM type: YTN; PAM sequence: TTG
ttttgttctatgccatcata

SEQ ID NO: 58863 - DNA, 20 bp, Artificial Sequence
  Description of Artificial Sequence: Synthetic oligonucleotide
  Target: ATXN2; (-) strand; PAM type: YTN; PAM sequence: TTA
aaaaaaagaaaacataagaa

SEQ ID NO: 58864 - DNA, 20 bp, Artificial Sequence
  Description of Artificial Sequence: Synthetic oligonucleotide
  Target: ATXN2; (-) strand; PAM type: YTN; PAM sequence: TTT
aaaaaaaagaaaacataaga

SEQ ID NO: 58865 - DNA, 20 bp, Artificial Sequence
  Description of Artificial Sequence: Synthetic oligonucleotide
  Target: ATXN2; (-) strand; PAM type: YTN; PAM sequence: CTA
tttaaaaaaaagaaaacata

SEQ ID NO: 58866 - DNA, 20 bp, Artificial Sequence
  Description of Artificial Sequence: Synthetic oligonucleotide
  Target: ATXN2; (-) strand; PAM type: YTN; PAM sequence: CTC
tatttaaaaaaaagaaaaca

SEQ ID NO: 58867 - DNA, 20 bp, Artificial Sequence
  Description of Artificial Sequence: Synthetic oligonucleotide
  Target: ATXN2; (-) strand; PAM type: YTN; PAM sequence: CTG
tctctatttaaaaaaaagaa

SEQ ID NO: 58868 - DNA, 20 bp, Artificial Sequence
  Description of Artificial Sequence: Synthetic oligonucleotide
  Target: ATXN2; (-) strand; PAM type: YTN; PAM sequence: CTG
ggtgacagagcaagaccctg

SEQ ID NO: 58869 - DNA, 20 bp, Artificial Sequence
  Description of Artificial Sequence: Synthetic oligonucleotide
  Target: ATXN2; (-) strand; PAM type: YTN; PAM sequence: CTG
taatccagcctgggtgacag

SEQ ID NO: 58870 - DNA, 20 bp, Artificial Sequence
  Description of Artificial Sequence: Synthetic oligonucleotide
  Target: ATXN2; (-) strand; PAM type: YTN; PAM sequence: CTA
tcatggcaccactgtaatcc

SEQ ID NO: 58871 - DNA, 20 bp, Artificial Sequence
  Description of Artificial Sequence: Synthetic oligonucleotide
  Target: ATXN2; (-) strand; PAM type: YTN; PAM sequence: CTA
cagtgagctatcatggcacc

SEQ ID NO: 58872 - DNA, 20 bp, Artificial Sequence
  Description of Artificial Sequence: Synthetic oligonucleotide
  Target: ATXN2; (-) strand; PAM type: YTN; PAM sequence: TTG
aggctacagtgagctatcat

SEQ ID NO: 58873 - DNA, 20 bp, Artificial Sequence
  Description of Artificial Sequence: Synthetic oligonucleotide
  Target: ATXN2; (-) strand; PAM type: YTN; PAM sequence: TTT
gaggctacagtgagctatca

SEQ ID NO: 58874 - DNA, 20 bp, Artificial Sequence
  Description of Artificial Sequence: Synthetic oligonucleotide
  Target: ATXN2; (-) strand; PAM type: YTN; PAM sequence: CTT
tgaggctacagtgagctatc

SEQ ID NO: 58875 - DNA, 20 bp, Artificial Sequence
  Description of Artificial Sequence: Synthetic oligonucleotide
  Target: ATXN2; (-) strand; PAM type: YTN; PAM sequence: TTG
agtccaggactttgaggcta

SEQ ID NO: 58876 - DNA, 20 bp, Artificial Sequence
  Description of Artificial Sequence: Synthetic oligonucleotide
  Target: ATXN2; (-) strand; PAM type: YTN; PAM sequence: CTT
gagtccaggactttgaggct

SEQ ID NO: 58877 - DNA, 20 bp, Artificial Sequence
  Description of Artificial Sequence: Synthetic oligonucleotide
  Target: ATXN2; (-) strand; PAM type: YTN; PAM sequence: CTG
agatgggaggatcacttgag

SEQ ID NO: 58878 - DNA, 20 bp, Artificial Sequence
  Description of Artificial Sequence: Synthetic oligonucleotide
  Target: ATXN2; (-) strand; PAM type: YTN; PAM sequence: CTA
cacaggaagctgagatggga

SEQ ID NO: 58879 - DNA, 20 bp, Artificial Sequence
  Description of Artificial Sequence: Synthetic oligonucleotide
  Target: ATXN2; (-) strand; PAM type: YTN; PAM sequence: CTG
tagtcccacctacacaggaa

SEQ ID NO: 58880 - DNA, 20 bp, Artificial Sequence
  Description of Artificial Sequence: Synthetic oligonucleotide
  Target: ATXN2; (-) strand; PAM type: YTN; PAM sequence: CTA
ccaaaaaaaaaaaaaaaaaa

SEQ ID NO: 58881 - DNA, 20 bp, Artificial Sequence
  Description of Artificial Sequence: Synthetic oligonucleotide
  Target: ATXN2; (-) strand; PAM type: YTN; PAM sequence: CTC
taccaaaaaaaaaaaaaaaa

SEQ ID NO: 58882 - DNA, 20 bp, Artificial Sequence
  Description of Artificial Sequence: Synthetic oligonucleotide
  Target: ATXN2; (-) strand; PAM type: YTN; PAM sequence: CTA
ggcaagatggcgagatccca

SEQ ID NO: 58883 - DNA, 20 bp, Artificial Sequence
  Description of Artificial Sequence: Synthetic oligonucleotide
  Target: ATXN2; (-) strand; PAM type: YTN; PAM sequence: TTC
aagaccagtctaggcaagat

SEQ ID NO: 58884 - DNA, 20 bp, Artificial Sequence
  Description of Artificial Sequence: Synthetic oligonucleotide
  Target: ATXN2; (-) strand; PAM type: YTN; PAM sequence: TTA
gcccaggtgttcaagaccag

SEQ ID NO: 58885 - DNA, 20 bp, Artificial Sequence
  Description of Artificial Sequence: Synthetic oligonucleotide
  Target: ATXN2; (-) strand; PAM type: YTN; PAM sequence: CTT
agcccaggtgttcaagacca

SEQ ID NO: 58886 - DNA, 20 bp, Artificial Sequence
  Description of Artificial Sequence: Synthetic oligonucleotide
  Target: ATXN2; (-) strand; PAM type: YTN; PAM sequence: CTG
aagtggaggatcgcttagcc

SEQ ID NO: 58887 - DNA, 20 bp, Artificial Sequence
  Description of Artificial Sequence: Synthetic oligonucleotide
  Target: ATXN2; (-) strand; PAM type: YTN; PAM sequence: TTG
gggaggctgaagtggaggat

SEQ ID NO: 58888 - DNA, 20 bp, Artificial Sequence
  Description of Artificial Sequence: Synthetic oligonucleotide
  Target: ATXN2; (-) strand; PAM type: YTN; PAM sequence: CTT
ggggaggctgaagtggagga

SEQ ID NO: 58889 - DNA, 20 bp, Artificial Sequence
  Description of Artificial Sequence: Synthetic oligonucleotide
  Target: ATXN2; (-) strand; PAM type: YTN; PAM sequence: CTG
taatccaagaacttggggag

SEQ ID NO: 58890 - DNA, 20 bp, Artificial Sequence
  Description of Artificial Sequence: Synthetic oligonucleotide
  Target: ATXN2; (-) strand; PAM type: YTN; PAM sequence: CTG
acacctgtaatccaagaact

SEQ ID NO: 58891 - DNA, 20 bp, Artificial Sequence
  Description of Artificial Sequence: Synthetic oligonucleotide
  Target: ATXN2; (-) strand; PAM type: YTN; PAM sequence: CTG
ggcatggtggctgacacctg

SEQ ID NO: 58892 - DNA, 20 bp, Artificial Sequence
  Description of Artificial Sequence: Synthetic oligonucleotide
  Target: ATXN2; (-) strand; PAM type: YTN; PAM sequence: CTA
ggagctgggcatggtggctg

SEQ ID NO: 58893 - DNA, 20 bp, Artificial Sequence
  Description of Artificial Sequence: Synthetic oligonucleotide
  Target: ATXN2; (-) strand; PAM type: YTN; PAM sequence: CTA
aaaaggacactaggagctgg

SEQ ID NO: 58894 - DNA, 20 bp, Artificial Sequence
  Description of Artificial Sequence: Synthetic oligonucleotide
  Target: ATXN2; (-) strand; PAM type: YTN; PAM sequence: TTA
agaccctaaaaaggacacta

SEQ ID NO: 58895 - DNA, 20 bp, Artificial Sequence
  Description of Artificial Sequence: Synthetic oligonucleotide
  Target: ATXN2; (-) strand; PAM type: YTN; PAM sequence: CTT
aagaccctaaaaaggacact

SEQ ID NO: 58896 - DNA, 20 bp, Artificial Sequence
  Description of Artificial Sequence: Synthetic oligonucleotide
  Target: ATXN2; (-) strand; PAM type: YTN; PAM sequence: TTG
tggtgcttaagaccctaaaa

SEQ ID NO: 58897 - DNA, 20 bp, Artificial Sequence
  Description of Artificial Sequence: Synthetic oligonucleotide
  Target: ATXN2; (-) strand; PAM type: YTN; PAM sequence: TTT
gtggtgcttaagaccctaaa

SEQ ID NO: 58898 - DNA, 20 bp, Artificial Sequence
  Description of Artificial Sequence: Synthetic oligonucleotide
  Target: ATXN2; (-) strand; PAM type: YTN; PAM sequence: CTT
tgtggtgcttaagaccctaa

SEQ ID NO: 58899 - DNA, 20 bp, Artificial Sequence
  Description of Artificial Sequence: Synthetic oligonucleotide
  Target: ATXN2; (-) strand; PAM type: YTN; PAM sequence: TTC
cctttgtggtgcttaagacc

SEQ ID NO: 58900 - DNA, 20 bp, Artificial Sequence
  Description of Artificial Sequence: Synthetic oligonucleotide
  Target: ATXN2; (-) strand; PAM type: YTN; PAM sequence: TTA
atcaagattccctttgtggt

SEQ ID NO: 58901 - DNA, 20 bp, Artificial Sequence
  Description of Artificial Sequence: Synthetic oligonucleotide
  Target: ATXN2; (-) strand; PAM type: YTN; PAM sequence: CTA
gttaatcaagattccctttg

SEQ ID NO: 58902 - DNA, 20 bp, Artificial Sequence
  Description of Artificial Sequence: Synthetic oligonucleotide
  Target: ATXN2; (-) strand; PAM type: YTN; PAM sequence: TTG
tcactagttaatcaagattc

SEQ ID NO: 58903 - DNA, 20 bp, Artificial Sequence
  Description of Artificial Sequence: Synthetic oligonucleotide
  Target: ATXN2; (-) strand; PAM type: YTN; PAM sequence: TTG
tgattgtcactagttaatca

SEQ ID NO: 58904 - DNA, 20 bp, Artificial Sequence
  Description of Artificial Sequence: Synthetic oligonucleotide
  Target: ATXN2; (-) strand; PAM type: YTN; PAM sequence: TTG
ttgtgattgtcactagttaa

SEQ ID NO: 58905 - DNA, 20 bp, Artificial Sequence
  Description of Artificial Sequence: Synthetic oligonucleotide
  Target: ATXN2; (-) strand; PAM type: YTN; PAM sequence: CTT
gttgtgattgtcactagtta

SEQ ID NO: 58906 - DNA, 20 bp, Artificial Sequence
  Description of Artificial Sequence: Synthetic oligonucleotide
  Target: ATXN2; (-) strand; PAM type: YTN; PAM sequence: CTG
tggacttgttgtgattgtca

SEQ ID NO: 58907 - DNA, 20 bp, Artificial Sequence
  Description of Artificial Sequence: Synthetic oligonucleotide
  Target: ATXN2; (-) strand; PAM type: YTN; PAM sequence: CTA
ggagcaaggctgtggacttg

SEQ ID NO: 58908 - DNA, 20 bp, Artificial Sequence
  Description of Artificial Sequence: Synthetic oligonucleotide
  Target: ATXN2; (-) strand; PAM type: YTN; PAM sequence: CTG
tatggaggcaggctaggagc

SEQ ID NO: 58909 - DNA, 20 bp, Artificial Sequence
  Description of Artificial Sequence: Synthetic oligonucleotide
  Target: ATXN2; (-) strand; PAM type: YTN; PAM sequence: CTG
tctgtatggaggcaggctag

SEQ ID NO: 58910 - DNA, 20 bp, Artificial Sequence
  Description of Artificial Sequence: Synthetic oligonucleotide
  Target: ATXN2; (-) strand; PAM type: YTN; PAM sequence: TTG
ctgtctgtatggaggcaggc

SEQ ID NO: 58911 - DNA, 20 bp, Artificial Sequence
  Description of Artificial Sequence: Synthetic oligonucleotide
  Target: ATXN2; (-) strand; PAM type: YTN; PAM sequence: TTA
attgctgtctgtatggaggc

SEQ ID NO: 58912 - DNA, 20 bp, Artificial Sequence
  Description of Artificial Sequence: Synthetic oligonucleotide
  Target: ATXN2; (-) strand; PAM type: YTN; PAM sequence: TTT
aattgctgtctgtatggagg

SEQ ID NO: 58913 - DNA, 20 bp, Artificial Sequence
  Description of Artificial Sequence: Synthetic oligonucleotide
  Target: ATXN2; (-) strand; PAM type: YTN; PAM sequence: TTA
cacaggtggtatttaattgc

SEQ ID NO: 58914 - DNA, 20 bp, Artificial Sequence
  Description of Artificial Sequence: Synthetic oligonucleotide
  Target: ATXN2; (-) strand; PAM type: YTN; PAM sequence: TTT
acacaggtggtatttaattg

SEQ ID NO: 58915 - DNA, 20 bp, Artificial Sequence
  Description of Artificial Sequence: Synthetic oligonucleotide
  Target: ATXN2; (-) strand; PAM type: YTN; PAM sequence: CTG
cagtttacacaggtggtatt

SEQ ID NO: 58916 - DNA, 20 bp, Artificial Sequence
  Description of Artificial Sequence: Synthetic oligonucleotide
  Target: ATXN2; (-) strand; PAM type: YTN; PAM sequence: CTC
ctgcagtttacacaggtggt

SEQ ID NO: 58917 - DNA, 20 bp, Artificial Sequence
  Description of Artificial Sequence: Synthetic oligonucleotide
  Target: ATXN2; (-) strand; PAM type: YTN; PAM sequence: CTC
tcctgcagtttacacaggtg

SEQ ID NO: 58918 - DNA, 20 bp, Artificial Sequence
  Description of Artificial Sequence: Synthetic oligonucleotide
  Target: ATXN2; (-) strand; PAM type: YTN; PAM sequence: CTA
ctctcctgcagtttacacag

SEQ ID NO: 58919 - DNA, 20 bp, Artificial Sequence
  Description of Artificial Sequence: Synthetic oligonucleotide
  Target: ATXN2; (-) strand; PAM type: YTN; PAM sequence: CTG
aactactctcctgcagttta

SEQ ID NO: 58920 - DNA, 20 bp, Artificial Sequence
  Description of Artificial Sequence: Synthetic oligonucleotide
  Target: ATXN2; (-) strand; PAM type: YTN; PAM sequence: CTC
agccaaatctgaactactct

SEQ ID NO: 58921 - DNA, 20 bp, Artificial Sequence
  Description of Artificial Sequence: Synthetic oligonucleotide
  Target: ATXN2; (-) strand; PAM type: YTN; PAM sequence: TTA
ctcagccaaatctgaactac

SEQ ID NO: 58922 - DNA, 20 bp, Artificial Sequence
  Description of Artificial Sequence: Synthetic oligonucleotide
  Target: ATXN2; (-) strand; PAM type: YTN; PAM sequence: TTC
atgccaggaaaaagttactc

SEQ ID NO: 58923 - DNA, 20 bp, Artificial Sequence
  Description of Artificial Sequence: Synthetic oligonucleotide
  Target: ATXN2; (-) strand; PAM type: YTN; PAM sequence: TTT
catgccaggaaaaagttact

SEQ ID NO: 58924 - DNA, 20 bp, Artificial Sequence
  Description of Artificial Sequence: Synthetic oligonucleotide
  Target: ATXN2; (-) strand; PAM type: YTN; PAM sequence: CTT
tcatgccaggaaaaagttac

SEQ ID NO: 58925 - DNA, 20 bp, Artificial Sequence
  Description of Artificial Sequence: Synthetic oligonucleotide
  Target: ATXN2; (-) strand; PAM type: YTN; PAM sequence: TTC
tttcatgccaggaaaaagtt

SEQ ID NO: 58926 - DNA, 20 bp, Artificial Sequence
  Description of Artificial Sequence: Synthetic oligonucleotide
  Target: ATXN2; (-) strand; PAM type: YTN; PAM sequence: TTA
gagccggttctttcatgcca

SEQ ID NO: 58927 - DNA, 20 bp, Artificial Sequence
  Description of Artificial Sequence: Synthetic oligonucleotide
  Target: ATXN2; (-) strand; PAM type: YTN; PAM sequence: CTA
gtcattagagccggttcttt

SEQ ID NO: 58928 - DNA, 20 bp, Artificial Sequence
  Description of Artificial Sequence: Synthetic oligonucleotide
  Target: ATXN2; (-) strand; PAM type: YTN; PAM sequence: CTG
gaatgaactagtcattagag

SEQ ID NO: 58929 - DNA, 20 bp, Artificial Sequence
  Description of Artificial Sequence: Synthetic oligonucleotide
  Target: ATXN2; (-) strand; PAM type: YTN; PAM sequence: CTA
atgtccagtgaaatctggaa

SEQ ID NO: 58930 - DNA, 20 bp, Artificial Sequence
  Description of Artificial Sequence: Synthetic oligonucleotide
  Target: ATXN2; (-) strand; PAM type: YTN; PAM sequence: CTA
gatctaatgtccagtgaaat

SEQ ID NO: 58931 - DNA, 20 bp, Artificial Sequence
  Description of Artificial Sequence: Synthetic oligonucleotide
  Target: ATXN2; (-) strand; PAM type: YTN; PAM sequence: TTG
caaacaaaacaaagcactag

SEQ ID NO: 58932 - DNA, 20 bp, Artificial Sequence
  Description of Artificial Sequence: Synthetic oligonucleotide
  Target: ATXN2; (-) strand; PAM type: YTN; PAM sequence: TTA
tgtgtgggcaaataggaaat

SEQ ID NO: 58933 - DNA, 20 bp, Artificial Sequence
  Description of Artificial Sequence: Synthetic oligonucleotide
  Target: ATXN2; (-) strand; PAM type: YTN; PAM sequence: TTT
atgtgtgggcaaataggaaa

SEQ ID NO: 58934 - DNA, 20 bp, Artificial Sequence
  Description of Artificial Sequence: Synthetic oligonucleotide
  Target: ATXN2; (-) strand; PAM type: YTN; PAM sequence: TTA
gaccccaaagtccatttatg

SEQ ID NO: 58935 - DNA, 20 bp, Artificial Sequence
  Description of Artificial Sequence: Synthetic oligonucleotide
  Target: ATXN2; (-) strand; PAM type: YTN; PAM sequence: CTT
agaccccaaagtccatttat

SEQ ID NO: 58936 - DNA, 20 bp, Artificial Sequence
  Description of Artificial Sequence: Synthetic oligonucleotide
  Target: ATXN2; (-) strand; PAM type: YTN; PAM sequence: TTG
aagagcagtggggccttaga

SEQ ID NO: 58937 - DNA, 20 bp, Artificial Sequence
  Description of Artificial Sequence: Synthetic oligonucleotide
  Target: ATXN2; (-) strand; PAM type: YTN; PAM sequence: TTT
gaagagcagtggggccttag

SEQ ID NO: 58938 - DNA, 20 bp, Artificial Sequence
  Description of Artificial Sequence: Synthetic oligonucleotide
  Target: ATXN2; (-) strand; PAM type: YTN; PAM sequence: CTA
gaacatgtccatttgaagag

SEQ ID NO: 58939 - DNA, 20 bp, Artificial Sequence
  Description of Artificial Sequence: Synthetic oligonucleotide
  Target: ATXN2; (-) strand; PAM type: YTN; PAM sequence: TTC
ctagaacatgtccatttgaa

SEQ ID NO: 58940 - DNA, 20 bp, Artificial Sequence
  Description of Artificial Sequence: Synthetic oligonucleotide
  Target: ATXN2; (-) strand; PAM type: YTN; PAM sequence: CTT
cctagaacatgtccatttga

SEQ ID NO: 58941 - DNA, 20 bp, Artificial Sequence
  Description of Artificial Sequence: Synthetic oligonucleotide
  Target: ATXN2; (-) strand; PAM type: YTN; PAM sequence: CTA
cttcctagaacatgtccatt

SEQ ID NO: 58942 - DNA, 20 bp, Artificial Sequence
  Description of Artificial Sequence: Synthetic oligonucleotide
  Target: ATXN2; (-) strand; PAM type: YTN; PAM sequence: TTC
ataactacttcctagaacat

SEQ ID NO: 58943 - DNA, 20 bp, Artificial Sequence
  Description of Artificial Sequence: Synthetic oligonucleotide
  Target: ATXN2; (-) strand; PAM type: YTN; PAM sequence: TTT
cataactacttcctagaaca

SEQ ID NO: 58944 - DNA, 20 bp, Artificial Sequence
  Description of Artificial Sequence: Synthetic oligonucleotide
  Target: ATXN2; (-) strand; PAM type: YTN; PAM sequence: TTT
tcataactacttcctagaac

SEQ ID NO: 58945 - DNA, 20 bp, Artificial Sequence
  Description of Artificial Sequence: Synthetic oligonucleotide
  Target: ATXN2; (-) strand; PAM type: YTN; PAM sequence: TTG
aggtacagatgattttcata

SEQ ID NO: 58946 - DNA, 20 bp, Artificial Sequence
  Description of Artificial Sequence: Synthetic oligonucleotide
  Target: ATXN2; (-) strand; PAM type: YTN; PAM sequence: TTT
gaggtacagatgattttcat

SEQ ID NO: 58947 - DNA, 20 bp, Artificial Sequence
  Description of Artificial Sequence: Synthetic oligonucleotide
  Target: ATXN2; (-) strand; PAM type: YTN; PAM sequence: CTG
tgtttgaggtacagatgatt

SEQ ID NO: 58948 - DNA, 20 bp, Artificial Sequence
  Description of Artificial Sequence: Synthetic oligonucleotide
  Target: ATXN2; (-) strand; PAM type: YTN; PAM sequence: CTA
tagggtaaatactgtgtttg

SEQ ID NO: 58949 - DNA, 20 bp, Artificial Sequence
  Description of Artificial Sequence: Synthetic oligonucleotide
  Target: ATXN2; (-) strand; PAM type: YTN; PAM sequence: TTG
aaacagcctatagggtaaat

SEQ ID NO: 58950 - DNA, 20 bp, Artificial Sequence
  Description of Artificial Sequence: Synthetic oligonucleotide
  Target: ATXN2; (-) strand; PAM type: YTN; PAM sequence: TTT
gaaacagcctatagggtaaa

SEQ ID NO: 58951 - DNA, 20 bp, Artificial Sequence
  Description of Artificial Sequence: Synthetic oligonucleotide
  Target: ATXN2; (-) strand; PAM type: YTN; PAM sequence: TTT
tgaaacagcctatagggtaa

SEQ ID NO: 58952 - DNA, 20 bp, Artificial Sequence
  Description of Artificial Sequence: Synthetic oligonucleotide
  Target: ATXN2; (-) strand; PAM type: YTN; PAM sequence: TTG
gttttgaaacagcctatagg

SEQ ID NO: 58953 - DNA, 20 bp, Artificial Sequence
  Description of Artificial Sequence: Synthetic oligonucleotide
  Target: ATXN2; (-) strand; PAM type: YTN; PAM sequence: TTC
attggttttgaaacagccta

SEQ ID NO: 58954 - DNA, 20 bp, Artificial Sequence
  Description of Artificial Sequence: Synthetic oligonucleotide
  Target: ATXN2; (-) strand; PAM type: YTN; PAM sequence: TTG
gatgaatgttcattggtttt

SEQ ID NO: 58955 - DNA, 20 bp, Artificial Sequence
  Description of Artificial Sequence: Synthetic oligonucleotide
  Target: ATXN2; (-) strand; PAM type: YTN; PAM sequence: TTT
ggatgaatgttcattggttt

SEQ ID NO: 58956 - DNA, 20 bp, Artificial Sequence
  Description of Artificial Sequence: Synthetic oligonucleotide
  Target: ATXN2; (-) strand; PAM type: YTN; PAM sequence: TTT
tggatgaatgttcattggtt

SEQ ID NO: 58957 - DNA, 20 bp, Artificial Sequence
  Description of Artificial Sequence: Synthetic oligonucleotide
  Target: ATXN2; (-) strand; PAM type: YTN; PAM sequence: CTT
ttggatgaatgttcattggt

SEQ ID NO: 58958 - DNA, 20 bp, Artificial Sequence
  Description of Artificial Sequence: Synthetic oligonucleotide
  Target: ATXN2; (-) strand; PAM type: YTN; PAM sequence: TTC
atcttttggatgaatgttca

SEQ ID NO: 58959 - DNA, 20 bp, Artificial Sequence
  Description of Artificial Sequence: Synthetic oligonucleotide
  Target: ATXN2; (-) strand; PAM type: YTN; PAM sequence: CTT
catcttttggatgaatgttc

SEQ ID NO: 58960 - DNA, 20 bp, Artificial Sequence
  Description of Artificial Sequence: Synthetic oligonucleotide
  Target: ATXN2; (-) strand; PAM type: YTN; PAM sequence: CTG
gcttcatcttttggatgaat

SEQ ID NO: 58961 - DNA, 20 bp, Artificial Sequence
  Description of Artificial Sequence: Synthetic oligonucleotide
  Target: ATXN2; (-) strand; PAM type: YTN; PAM sequence: CTG
ccaacatctggcttcatctt

SEQ ID NO: 58962 - DNA, 20 bp, Artificial Sequence
  Description of Artificial Sequence: Synthetic oligonucleotide
  Target: ATXN2; (-) strand; PAM type: YTN; PAM sequence: TTC
actgccaacatctggcttca

SEQ ID NO: 58963 - DNA, 20 bp, Artificial Sequence
  Description of Artificial Sequence: Synthetic oligonucleotide
  Target: ATXN2; (-) strand; PAM type: YTN; PAM sequence: TTC
attcactgccaacatctggc

SEQ ID NO: 58964 - DNA, 20 bp, Artificial Sequence
  Description of Artificial Sequence: Synthetic oligonucleotide
  Target: ATXN2; (-) strand; PAM type: YTN; PAM sequence: TTG
tgttcattcactgccaacat

SEQ ID NO: 58965 - DNA, 20 bp, Artificial Sequence
  Description of Artificial Sequence: Synthetic oligonucleotide
  Target: ATXN2; (-) strand; PAM type: YTN; PAM sequence: CTC
attgtgttcattcactgcca

SEQ ID NO: 58966 - DNA, 20 bp, Artificial Sequence
  Description of Artificial Sequence: Synthetic oligonucleotide
  Target: ATXN2; (-) strand; PAM type: YTN; PAM sequence: CTC
ctcattgtgttcattcactg

SEQ ID NO: 58967 - DNA, 20 bp, Artificial Sequence
  Description of Artificial Sequence: Synthetic oligonucleotide
  Target: ATXN2; (-) strand; PAM type: YTN; PAM sequence: TTC
tcctcattgtgttcattcac

SEQ ID NO: 58968 - DNA, 20 bp, Artificial Sequence
  Description of Artificial Sequence: Synthetic oligonucleotide
  Target: ATXN2; (-) strand; PAM type: YTN; PAM sequence: TTT
ctcctcattgtgttcattca

SEQ ID NO: 58969 - DNA, 20 bp, Artificial Sequence
  Description of Artificial Sequence: Synthetic oligonucleotide
  Target: ATXN2; (-) strand; PAM type: YTN; PAM sequence: CTT
tctcctcattgtgttcattc

SEQ ID NO: 58970 - DNA, 20 bp, Artificial Sequence
  Description of Artificial Sequence: Synthetic oligonucleotide
  Target: ATXN2; (-) strand; PAM type: YTN; PAM sequence: TTG
agccgaatctttctcctcat

SEQ ID NO: 58971 - DNA, 20 bp, Artificial Sequence
  Description of Artificial Sequence: Synthetic oligonucleotide
  Target: ATXN2; (-) strand; PAM type: YTN; PAM sequence: CTG
taatgttgagccgaatcttt

SEQ ID NO: 58972 - DNA, 20 bp, Artificial Sequence
  Description of Artificial Sequence: Synthetic oligonucleotide
  Target: ATXN2; (-) strand; PAM type: YTN; PAM sequence: TTG
tagcaataatactgtaatgt

SEQ ID NO: 58973 - DNA, 20 bp, Artificial Sequence
  Description of Artificial Sequence: Synthetic oligonucleotide
  Target: ATXN2; (-) strand; PAM type: YTN; PAM sequence: TTG
agacattgtagcaataatac

SEQ ID NO: 58974 - DNA, 20 bp, Artificial Sequence
  Description of Artificial Sequence: Synthetic oligonucleotide
  Target: ATXN2; (-) strand; PAM type: YTN; PAM sequence: TTT
gagacattgtagcaataata

SEQ ID NO: 58975 - DNA, 20 bp, Artificial Sequence
  Description of Artificial Sequence: Synthetic oligonucleotide
  Target: ATXN2; (-) strand; PAM type: YTN; PAM sequence: TTT
tgagacattgtagcaataat

SEQ ID NO: 58976 - DNA, 20 bp, Artificial Sequence
  Description of Artificial Sequence: Synthetic oligonucleotide
  Target: ATXN2; (-) strand; PAM type: YTN; PAM sequence: CTT
ttgagacattgtagcaataa

SEQ ID NO: 58977 - DNA, 20 bp, Artificial Sequence
  Description of Artificial Sequence: Synthetic oligonucleotide
  Target: ATXN2; (-) strand; PAM type: YTN; PAM sequence: TTG
tgtatgcatgcttttgagac

SEQ ID NO: 58978 - DNA, 20 bp, Artificial Sequence
  Description of Artificial Sequence: Synthetic oligonucleotide
  Target: ATXN2; (-) strand; PAM type: YTN; PAM sequence: TTT
gtgtatgcatgcttttgaga

SEQ ID NO: 58979 - DNA, 20 bp, Artificial Sequence
  Description of Artificial Sequence: Synthetic oligonucleotide
  Target: ATXN2; (-) strand; PAM type: YTN; PAM sequence: TTA
tttgtgtatgcatgcttttg

SEQ ID NO: 58980 - DNA, 20 bp, Artificial Sequence
  Description of Artificial Sequence: Synthetic oligonucleotide
  Target: ATXN2; (-) strand; PAM type: YTN; PAM sequence: TTG
gagagtagttatttgtgtat

SEQ ID NO: 58981 - DNA, 20 bp, Artificial Sequence
  Description of Artificial Sequence: Synthetic oligonucleotide
  Target: ATXN2; (-) strand; PAM type: YTN; PAM sequence: TTT
ggagagtagttatttgtgta

SEQ ID NO: 58982 - DNA, 20 bp, Artificial Sequence
  Description of Artificial Sequence: Synthetic oligonucleotide
  Target: ATXN2; (-) strand; PAM type: YTN; PAM sequence: TTG
catttggagagtagttattt

SEQ ID NO: 58983 - DNA, 20 bp, Artificial Sequence
  Description of Artificial Sequence: Synthetic oligonucleotide
  Target: ATXN2; (-) strand; PAM type: YTN; PAM sequence: TTC
cattgcatttggagagtagt

SEQ ID NO: 58984 - DNA, 20 bp, Artificial Sequence
  Description of Artificial Sequence: Synthetic oligonucleotide
  Target: ATXN2; (-) strand; PAM type: YTN; PAM sequence: TTT
ccattgcatttggagagtag

SEQ ID NO: 58985 - DNA, 20 bp, Artificial Sequence
  Description of Artificial Sequence: Synthetic oligonucleotide
  Target: ATXN2; (-) strand; PAM type: YTN; PAM sequence: CTA
aaatttccattgcatttgga

SEQ ID NO: 58986 - DNA, 20 bp, Artificial Sequence
  Description of Artificial Sequence: Synthetic oligonucleotide
  Target: ATXN2; (-) strand; PAM type: YTN; PAM sequence: TTA
agctaaaatttccattgcat

SEQ ID NO: 58987 - DNA, 20 bp, Artificial Sequence
  Description of Artificial Sequence: Synthetic oligonucleotide
  Target: ATXN2; (-) strand; PAM type: YTN; PAM sequence: TTT
aagctaaaatttccattgca

SEQ ID NO: 58988 - DNA, 20 bp, Artificial Sequence
  Description of Artificial Sequence: Synthetic oligonucleotide
  Target: ATXN2; (-) strand; PAM type: YTN; PAM sequence: TTT
taagctaaaatttccattgc

SEQ ID NO: 58989 - DNA, 20 bp, Artificial Sequence
  Description of Artificial Sequence: Synthetic oligonucleotide
  Target: ATXN2; (-) strand; PAM type: YTN; PAM sequence: CTT
ttaagctaaaatttccattg

SEQ ID NO: 58990 - DNA, 20 bp, Artificial Sequence
  Description of Artificial Sequence: Synthetic oligonucleotide
  Target: ATXN2; (-) strand; PAM type: YTN; PAM sequence: CTG
aaacttttaagctaaaattt

SEQ ID NO: 58991 - DNA, 20 bp, Artificial Sequence
  Description of Artificial Sequence: Synthetic oligonucleotide
  Target: ATXN2; (-) strand; PAM type: YTN; PAM sequence: TTG
gaatcagatctgaaactttt

SEQ ID NO: 58992 - DNA, 20 bp, Artificial Sequence
  Description of Artificial Sequence: Synthetic oligonucleotide
  Target: ATXN2; (-) strand; PAM type: YTN; PAM sequence: CTT
ggaatcagatctgaaacttt

SEQ ID NO: 58993 - DNA, 20 bp, Artificial Sequence
  Description of Artificial Sequence: Synthetic oligonucleotide
  Target: ATXN2; (-) strand; PAM type: YTN; PAM sequence: CTC
cccttggaatcagatctgaa

SEQ ID NO: 58994 - DNA, 20 bp, Artificial Sequence
  Description of Artificial Sequence: Synthetic oligonucleotide
  Target: ATXN2; (-) strand; PAM type: YTN; PAM sequence: CTG
gcatactccccttggaatca

SEQ ID NO: 58995 - DNA, 20 bp, Artificial Sequence
  Description of Artificial Sequence: Synthetic oligonucleotide
  Target: ATXN2; (-) strand; PAM type: YTN; PAM sequence: TTC
tggcatactccccttggaat

SEQ ID NO: 58996 - DNA, 20 bp, Artificial Sequence
  Description of Artificial Sequence: Synthetic oligonucleotide
  Target: ATXN2; (-) strand; PAM type: YTN; PAM sequence: TTT
ctggcatactccccttggaa

SEQ ID NO: 58997 - DNA, 20 bp, Artificial Sequence
  Description of Artificial Sequence: Synthetic oligonucleotide
  Target: ATXN2; (-) strand; PAM type: YTN; PAM sequence: TTT
tctggcatactccccttgga

SEQ ID NO: 58998 - DNA, 20 bp, Artificial Sequence
  Description of Artificial Sequence: Synthetic oligonucleotide
  Target: ATXN2; (-) strand; PAM type: YTN; PAM sequence: TTC
cattttctggcatactcccc

SEQ ID NO: 58999 - DNA, 20 bp, Artificial Sequence
  Description of Artificial Sequence: Synthetic oligonucleotide
  Target: ATXN2; (-) strand; PAM type: YTN; PAM sequence: CTT
ccattttctggcatactccc

SEQ ID NO: 59000 - DNA, 20 bp, Artificial Sequence
  Description of Artificial Sequence: Synthetic oligonucleotide
  Target: ATXN2; (-) strand; PAM type: YTN; PAM sequence: TTC
cttccattttctggcatact

SEQ ID NO: 59001 - DNA, 20 bp, Artificial Sequence
  Description of Artificial Sequence: Synthetic oligonucleotide
  Target: ATXN2; (-) strand; PAM type: YTN; PAM sequence: TTT
ccttccattttctggcatac

SEQ ID NO: 59002 - DNA, 20 bp, Artificial Sequence
  Description of Artificial Sequence: Synthetic oligonucleotide
  Target: ATXN2; (-) strand; PAM type: YTN; PAM sequence: CTT
tccttccattttctggcata

SEQ ID NO: 59003 - DNA, 20 bp, Artificial Sequence
  Description of Artificial Sequence: Synthetic oligonucleotide
  Target: ATXN2; (-) strand; PAM type: YTN; PAM sequence: CTC
tttccttccattttctggca

SEQ ID NO: 59004 - DNA, 20 bp, Artificial Sequence
  Description of Artificial Sequence: Synthetic oligonucleotide
  Target: ATXN2; (-) strand; PAM type: YTN; PAM sequence: TTA
acaagtggaaagaacatctc

SEQ ID NO: 59005 - DNA, 20 bp, Artificial Sequence
  Description of Artificial Sequence: Synthetic oligonucleotide
  Target: ATXN2; (-) strand; PAM type: YTN; PAM sequence: TTT
aacaagtggaaagaacatct

SEQ ID NO: 59006 - DNA, 20 bp, Artificial Sequence
  Description of Artificial Sequence: Synthetic oligonucleotide
  Target: ATXN2; (-) strand; PAM type: YTN; PAM sequence: CTG
gtgaatacatcatgatttaa

SEQ ID NO: 59007 - DNA, 20 bp, Artificial Sequence
  Description of Artificial Sequence: Synthetic oligonucleotide
  Target: ATXN2; (-) strand; PAM type: YTN; PAM sequence: TTC
tggtgaatacatcatgattt

SEQ ID NO: 59008 - DNA, 20 bp, Artificial Sequence
  Description of Artificial Sequence: Synthetic oligonucleotide
  Target: ATXN2; (-) strand; PAM type: YTN; PAM sequence: TTT
ctggtgaatacatcatgatt

SEQ ID NO: 59009 - DNA, 20 bp, Artificial Sequence
  Description of Artificial Sequence: Synthetic oligonucleotide
  Target: ATXN2; (-) strand; PAM type: YTN; PAM sequence: TTA
tacatttctggtgaatacat

SEQ ID NO: 59010 - DNA, 20 bp, Artificial Sequence
  Description of Artificial Sequence: Synthetic oligonucleotide
  Target: ATXN2; (-) strand; PAM type: YTN; PAM sequence: TTT
atacatttctggtgaataca

SEQ ID NO: 59011 - DNA, 20 bp, Artificial Sequence
  Description of Artificial Sequence: Synthetic oligonucleotide
  Target: ATXN2; (-) strand; PAM type: YTN; PAM sequence: TTG
tttatacatttctggtgaat

SEQ ID NO: 59012 - DNA, 20 bp, Artificial Sequence
  Description of Artificial Sequence: Synthetic oligonucleotide
  Target: ATXN2; (-) strand; PAM type: YTN; PAM sequence: TTA
tgattgtttatacatttctg

SEQ ID NO: 59013 - DNA, 20 bp, Artificial Sequence
  Description of Artificial Sequence: Synthetic oligonucleotide
  Target: ATXN2; (-) strand; PAM type: YTN; PAM sequence: TTC
attatgattgtttatacatt

SEQ ID NO: 59014 - DNA, 20 bp, Artificial Sequence
  Description of Artificial Sequence: Synthetic oligonucleotide
  Target: ATXN2; (-) strand; PAM type: YTN; PAM sequence: TTA
aaagttcattatgattgttt

SEQ ID NO: 59015 - DNA, 20 bp, Artificial Sequence
  Description of Artificial Sequence: Synthetic oligonucleotide
  Target: ATXN2; (-) strand; PAM type: YTN; PAM sequence: TTA
ggttaaaagttcattatgat

SEQ ID NO: 59016 - DNA, 20 bp, Artificial Sequence
  Description of Artificial Sequence: Synthetic oligonucleotide
  Target: ATXN2; (-) strand; PAM type: YTN; PAM sequence: CTT
aggttaaaagttcattatga

SEQ ID NO: 59017 - DNA, 20 bp, Artificial Sequence
  Description of Artificial Sequence: Synthetic oligonucleotide
  Target: ATXN2; (-) strand; PAM type: YTN; PAM sequence: CTA
aaggcttaggttaaaagttc

SEQ ID NO: 59018 - DNA, 20 bp, Artificial Sequence
  Description of Artificial Sequence: Synthetic oligonucleotide
  Target: ATXN2; (-) strand; PAM type: YTN; PAM sequence: TTG
ctaaaggcttaggttaaaag

SEQ ID NO: 59019 - DNA, 20 bp, Artificial Sequence
  Description of Artificial Sequence: Synthetic oligonucleotide
  Target: ATXN2; (-) strand; PAM type: YTN; PAM sequence: TTT
gctaaaggcttaggttaaaa

SEQ ID NO: 59020 - DNA, 20 bp, Artificial Sequence
  Description of Artificial Sequence: Synthetic oligonucleotide
  Target: ATXN2; (-) strand; PAM type: YTN; PAM sequence: CTG
tttgctaaaggcttaggtta

SEQ ID NO: 59021 - DNA, 20 bp, Artificial Sequence
  Description of Artificial Sequence: Synthetic oligonucleotide
  Target: ATXN2; (-) strand; PAM type: YTN; PAM sequence: TTC
ctgtttgctaaaggcttagg

SEQ ID NO: 59022 - DNA, 20 bp, Artificial Sequence
  Description of Artificial Sequence: Synthetic oligonucleotide
  Target: ATXN2; (-) strand; PAM type: YTN; PAM sequence: TTT
cctgtttgctaaaggcttag

SEQ ID NO: 59023 - DNA, 20 bp, Artificial Sequence
  Description of Artificial Sequence: Synthetic oligonucleotide
  Target: ATXN2; (-) strand; PAM type: YTN; PAM sequence: TTT
tcctgtttgctaaaggctta

SEQ ID NO: 59024 - DNA, 20 bp, Artificial Sequence
  Description of Artificial Sequence: Synthetic oligonucleotide
  Target: ATXN2; (-) strand; PAM type: YTN; PAM sequence: TTA
acaattttcctgtttgctaa

SEQ ID NO: 59025 - DNA, 20 bp, Artificial Sequence
  Description of Artificial Sequence: Synthetic oligonucleotide
  Target: ATXN2; (-) strand; PAM type: YTN; PAM sequence: TTT
aacaattttcctgtttgcta

SEQ ID NO: 59026 - DNA, 20 bp, Artificial Sequence
  Description of Artificial Sequence: Synthetic oligonucleotide
  Target: ATXN2; (-) strand; PAM type: YTN; PAM sequence: TTT
taacaattttcctgtttgct

SEQ ID NO: 59027 - DNA, 20 bp, Artificial Sequence
  Description of Artificial Sequence: Synthetic oligonucleotide
  Target: ATXN2; (-) strand; PAM type: YTN; PAM sequence: TTG
tatatattttaacaattttc

SEQ ID NO: 59028 - DNA, 20 bp, Artificial Sequence
  Description of Artificial Sequence: Synthetic oligonucleotide
  Target: ATXN2; (-) strand; PAM type: YTN; PAM sequence: CTT
gtatatattttaacaatttt

SEQ ID NO: 59029 - DNA, 20 bp, Artificial Sequence
  Description of Artificial Sequence: Synthetic oligonucleotide
  Target: ATXN2; (-) strand; PAM type: YTN; PAM sequence: TTA
tgcaacttgtatatatttta

SEQ ID NO: 59030 - DNA, 20 bp, Artificial Sequence
  Description of Artificial Sequence: Synthetic oligonucleotide
  Target: ATXN2; (-) strand; PAM type: YTN; PAM sequence: TTT
atgcaacttgtatatatttt

SEQ ID NO: 59031 - DNA, 20 bp, Artificial Sequence
  Description of Artificial Sequence: Synthetic oligonucleotide
  Target: ATXN2; (-) strand; PAM type: YTN; PAM sequence: TTT
tatgcaacttgtatatattt

SEQ ID NO: 59032 - DNA, 20 bp, Artificial Sequence
  Description of Artificial Sequence: Synthetic oligonucleotide
  Target: ATXN2; (-) strand; PAM type: YTN; PAM sequence: CTT
ttatgcaacttgtatatatt

SEQ ID NO: 59033 - DNA, 20 bp, Artificial Sequence
  Description of Artificial Sequence: Synthetic oligonucleotide
  Target: ATXN2; (-) strand; PAM type: YTN; PAM sequence: CTG
gcttttatgcaacttgtata

SEQ ID NO: 59034 - DNA, 20 bp, Artificial Sequence
  Description of Artificial Sequence: Synthetic oligonucleotide
  Target: ATXN2; (-) strand; PAM type: YTN; PAM sequence: TTA
tcatgctggcttttatgcaa

SEQ ID NO: 59035 - DNA, 20 bp, Artificial Sequence
  Description of Artificial Sequence: Synthetic oligonucleotide
  Target: ATXN2; (-) strand; PAM type: YTN; PAM sequence: TTT
atcatgctggcttttatgca

SEQ ID NO: 59036 - DNA, 20 bp, Artificial Sequence
  Description of Artificial Sequence: Synthetic oligonucleotide
  Target: ATXN2; (-) strand; PAM type: YTN; PAM sequence: TTG
atttatcatgctggctttta

SEQ ID NO: 59037 - DNA, 20 bp, Artificial Sequence
  Description of Artificial Sequence: Synthetic oligonucleotide
  Target: ATXN2; (-) strand; PAM type: YTN; PAM sequence: CTG
aatatgcgtgcaaaggcacg

SEQ ID NO: 59038 - DNA, 20 bp, Artificial Sequence
  Description of Artificial Sequence: Synthetic oligonucleotide
  Target: ATXN2; (-) strand; PAM type: YTN; PAM sequence: TTA
acggggactgaatatgcgtg

SEQ ID NO: 59039 - DNA, 20 bp, Artificial Sequence
  Description of Artificial Sequence: Synthetic oligonucleotide
  Target: ATXN2; (-) strand; PAM type: YTN; PAM sequence: CTT
aacggggactgaatatgcgt

SEQ ID NO: 59040 - DNA, 20 bp, Artificial Sequence
  Description of Artificial Sequence: Synthetic oligonucleotide
  Target: ATXN2; (-) strand; PAM type: YTN; PAM sequence: TTG
tcttaacggggactgaatat

SEQ ID NO: 59041 - DNA, 20 bp, Artificial Sequence
  Description of Artificial Sequence: Synthetic oligonucleotide
  Target: ATXN2; (-) strand; PAM type: YTN; PAM sequence: TTA
gttgtcttaacggggactga

SEQ ID NO: 59042 - DNA, 20 bp, Artificial Sequence
  Description of Artificial Sequence: Synthetic oligonucleotide
  Target: ATXN2; (-) strand; PAM type: YTN; PAM sequence: TTT
agttgtcttaacggggactg

SEQ ID NO: 59043 - DNA, 20 bp, Artificial Sequence
  Description of Artificial Sequence: Synthetic oligonucleotide
  Target: ATXN2; (-) strand; PAM type: YTN; PAM sequence: CTT
tagttgtcttaacggggact

SEQ ID NO: 59044 - DNA, 20 bp, Artificial Sequence
  Description of Artificial Sequence: Synthetic oligonucleotide
  Target: ATXN2; (-) strand; PAM type: YTN; PAM sequence: TTG
tctttagttgtcttaacggg

SEQ ID NO: 59045 - DNA, 20 bp, Artificial Sequence
  Description of Artificial Sequence: Synthetic oligonucleotide
  Target: ATXN2; (-) strand; PAM type: YTN; PAM sequence: CTT
gtctttagttgtcttaacgg

SEQ ID NO: 59046 - DNA, 20 bp, Artificial Sequence
  Description of Artificial Sequence: Synthetic oligonucleotide
  Target: ATXN2; (-) strand; PAM type: YTN; PAM sequence: TTG
acttgtctttagttgtctta

SEQ ID NO: 59047 - DNA, 20 bp, Artificial Sequence
  Description of Artificial Sequence: Synthetic oligonucleotide
  Target: ATXN2; (-) strand; PAM type: YTN; PAM sequence: TTT
gacttgtctttagttgtctt

SEQ ID NO: 59048 - DNA, 20 bp, Artificial Sequence
  Description of Artificial Sequence: Synthetic oligonucleotide
  Target: ATXN2; (-) strand; PAM type: YTN; PAM sequence: TTA
tgaccccgtcatttgacttg

SEQ ID NO: 59049 - DNA, 20 bp, Artificial Sequence
  Description of Artificial Sequence: Synthetic oligonucleotide
  Target: ATXN2; (-) strand; PAM type: YTN; PAM sequence: TTG
gttatgaccccgtcatttga

SEQ ID NO: 59050 - DNA, 20 bp, Artificial Sequence
  Description of Artificial Sequence: Synthetic oligonucleotide
  Target: ATXN2; (-) strand; PAM type: YTN; PAM sequence: TTT
ggttatgaccccgtcatttg

SEQ ID NO: 59051 - DNA, 20 bp, Artificial Sequence
  Description of Artificial Sequence: Synthetic oligonucleotide
  Target: ATXN2; (-) strand; PAM type: YTN; PAM sequence: TTT
tggttatgaccccgtcattt

SEQ ID NO: 59052 - DNA, 20 bp, Artificial Sequence
  Description of Artificial Sequence: Synthetic oligonucleotide
  Target: ATXN2; (-) strand; PAM type: YTN; PAM sequence: TTA
ttttggttatgaccccgtca

SEQ ID NO: 59053 - DNA, 20 bp, Artificial Sequence
  Description of Artificial Sequence: Synthetic oligonucleotide
  Target: ATXN2; (-) strand; PAM type: YTN; PAM sequence: TTA
ttattttggttatgaccccg

SEQ ID NO: 59054 - DNA, 20 bp, Artificial Sequence
  Description of Artificial Sequence: Synthetic oligonucleotide
  Target: ATXN2; (-) strand; PAM type: YTN; PAM sequence: TTT
attattttggttatgacccc

SEQ ID NO: 59055 - DNA, 20 bp, Artificial Sequence
  Description of Artificial Sequence: Synthetic oligonucleotide
  Target: ATXN2; (-) strand; PAM type: YTN; PAM sequence: TTG
gtttattattttggttatga

SEQ ID NO: 59056 - DNA, 20 bp, Artificial Sequence
  Description of Artificial Sequence: Synthetic oligonucleotide
  Target: ATXN2; (-) strand; PAM type: YTN; PAM sequence: CTT
ggtttattattttggttatg

SEQ ID NO: 59057 - DNA, 20 bp, Artificial Sequence
  Description of Artificial Sequence: Synthetic oligonucleotide
  Target: ATXN2; (-) strand; PAM type: YTN; PAM sequence: CTA
acttggtttattattttggt

SEQ ID NO: 59058 - DNA, 20 bp, Artificial Sequence
  Description of Artificial Sequence: Synthetic oligonucleotide
  Target: ATXN2; (-) strand; PAM type: YTN; PAM sequence: CTG
acaaactaacttggtttatt

SEQ ID NO: 59059 - DNA, 20 bp, Artificial Sequence
  Description of Artificial Sequence: Synthetic oligonucleotide
  Target: ATXN2; (-) strand; PAM type: YTN; PAM sequence: TTG
taaaagatactgacaaacta

SEQ ID NO: 59060 - DNA, 20 bp, Artificial Sequence
  Description of Artificial Sequence: Synthetic oligonucleotide
  Target: ATXN2; (-) strand; PAM type: YTN; PAM sequence: TTA
attgtaaaagatactgacaa

SEQ ID NO: 59061 - DNA, 20 bp, Artificial Sequence
  Description of Artificial Sequence: Synthetic oligonucleotide
  Target: ATXN2; (-) strand; PAM type: YTN; PAM sequence: TTT
aattgtaaaagatactgaca

SEQ ID NO: 59062 - DNA, 20 bp, Artificial Sequence
  Description of Artificial Sequence: Synthetic oligonucleotide
  Target: ATXN2; (-) strand; PAM type: YTN; PAM sequence: TTC
aagaggcccatccgtaattt

SEQ ID NO: 59063 - DNA, 20 bp, Artificial Sequence
  Description of Artificial Sequence: Synthetic oligonucleotide
  Target: ATXN2; (-) strand; PAM type: YTN; PAM sequence: TTT
caagaggcccatccgtaatt

SEQ ID NO: 59064 - DNA, 20 bp, Artificial Sequence
  Description of Artificial Sequence: Synthetic oligonucleotide
  Target: ATXN2; (-) strand; PAM type: YTN; PAM sequence: TTT
tcaagaggcccatccgtaat

SEQ ID NO: 59065 - DNA, 20 bp, Artificial Sequence
  Description of Artificial Sequence: Synthetic oligonucleotide
  Target: ATXN2; (-) strand; PAM type: YTN; PAM sequence: TTT
ttcaagaggcccatccgtaa

SEQ ID NO: 59066 - DNA, 20 bp, Artificial Sequence
  Description of Artificial Sequence: Synthetic oligonucleotide
  Target: ATXN2; (-) strand; PAM type: YTN; PAM sequence: TTT
tttcaagaggcccatccgta

SEQ ID NO: 59067 - DNA, 20 bp, Artificial Sequence
  Description of Artificial Sequence: Synthetic oligonucleotide
  Target: ATXN2; (-) strand; PAM type: YTN; PAM sequence: TTT
ttttcaagaggcccatccgt

SEQ ID NO: 59068 - DNA, 20 bp, Artificial Sequence
  Description of Artificial Sequence: Synthetic oligonucleotide
  Target: ATXN2; (-) strand; PAM type: YTN; PAM sequence: TTG
gaaaacatttttttcaagag

SEQ ID NO: 59069 - DNA, 20 bp, Artificial Sequence
  Description of Artificial Sequence: Synthetic oligonucleotide
  Target: ATXN2; (-) strand; PAM type: YTN; PAM sequence: TTT
ggaaaacatttttttcaaga

SEQ ID NO: 59070 - DNA, 20 bp, Artificial Sequence
  Description of Artificial Sequence: Synthetic oligonucleotide
  Target: ATXN2; (-) strand; PAM type: YTN; PAM sequence: TTT
tggaaaacatttttttcaag

SEQ ID NO: 59071 - DNA, 20 bp, Artificial Sequence
  Description of Artificial Sequence: Synthetic oligonucleotide
  Target: ATXN2; (-) strand; PAM type: YTN; PAM sequence: CTA
cattttggaaaacatttttt

SEQ ID NO: 59072 - DNA, 20 bp, Artificial Sequence
  Description of Artificial Sequence: Synthetic oligonucleotide
  Target: ATXN2; (-) strand; PAM type: YTN; PAM sequence: TTG
ctacattttggaaaacattt

SEQ ID NO: 59073 - DNA, 20 bp, Artificial Sequence
  Description of Artificial Sequence: Synthetic oligonucleotide
  Target: ATXN2; (-) strand; PAM type: YTN; PAM sequence: TTG
tgtgattgctacattttgga

SEQ ID NO: 59074 - DNA, 20 bp, Artificial Sequence
  Description of Artificial Sequence: Synthetic oligonucleotide
  Target: ATXN2; (-) strand; PAM type: YTN; PAM sequence: TTA
aataaaaaattgtgtgattg

SEQ ID NO: 59075 - DNA, 20 bp, Artificial Sequence
  Description of Artificial Sequence: Synthetic oligonucleotide
  Target: ATXN2; (-) strand; PAM type: YTN; PAM sequence: TTT
aaataaaaaattgtgtgatt

SEQ ID NO: 59076 - DNA, 20 bp, Artificial Sequence
  Description of Artificial Sequence: Synthetic oligonucleotide
  Target: ATXN2; (-) strand; PAM type: YTN; PAM sequence: TTT
taaataaaaaattgtgtgat

SEQ ID NO: 59077 - DNA, 20 bp, Artificial Sequence
  Description of Artificial Sequence: Synthetic oligonucleotide
  Target: ATXN2; (-) strand; PAM type: YTN; PAM sequence: TTA
cgcattttaaataaaaaatt

SEQ ID NO: 59078 - DNA, 20 bp, Artificial Sequence
  Description of Artificial Sequence: Synthetic oligonucleotide
  Target: ATXN2; (-) strand; PAM type: YTN; PAM sequence: TTG
tggattacgcattttaaata

SEQ ID NO: 59079 - DNA, 20 bp, Artificial Sequence
  Description of Artificial Sequence: Synthetic oligonucleotide
  Target: ATXN2; (-) strand; PAM type: YTN; PAM sequence: TTG
tattgtggattacgcatttt

SEQ ID NO: 59080 - DNA, 20 bp, Artificial Sequence
  Description of Artificial Sequence: Synthetic oligonucleotide
  Target: ATXN2; (-) strand; PAM type: YTN; PAM sequence: TTT
gtattgtggattacgcattt

SEQ ID NO: 59081 - DNA, 20 bp, Artificial Sequence
  Description of Artificial Sequence: Synthetic oligonucleotide
  Target: ATXN2; (-) strand; PAM type: YTN; PAM sequence: TTT
tgtattgtggattacgcatt

SEQ ID NO: 59082 - DNA, 20 bp, Artificial Sequence
  Description of Artificial Sequence: Synthetic oligonucleotide
  Target: ATXN2; (-) strand; PAM type: YTN; PAM sequence: TTC
aattttgtattgtggattac

SEQ ID NO: 59083 - DNA, 20 bp, Artificial Sequence
  Description of Artificial Sequence: Synthetic oligonucleotide
  Target: ATXN2; (-) strand; PAM type: YTN; PAM sequence: TTT
caattttgtattgtggatta

SEQ ID NO: 59084 - DNA, 20 bp, Artificial Sequence
  Description of Artificial Sequence: Synthetic oligonucleotide
  Target: ATXN2; (-) strand; PAM type: YTN; PAM sequence: CTT
tcaattttgtattgtggatt

SEQ ID NO: 59085 - DNA, 20 bp, Artificial Sequence
  Description of Artificial Sequence: Synthetic oligonucleotide
  Target: ATXN2; (-) strand; PAM type: YTN; PAM sequence: TTA
tcactttcaattttgtattg

SEQ ID NO: 59086 - DNA, 20 bp, Artificial Sequence
  Description of Artificial Sequence: Synthetic oligonucleotide
  Target: ATXN2; (-) strand; PAM type: YTN; PAM sequence: TTC
cacattatcactttcaattt

SEQ ID NO: 59087 - DNA, 20 bp, Artificial Sequence
  Description of Artificial Sequence: Synthetic oligonucleotide
  Target: ATXN2; (-) strand; PAM type: YTN; PAM sequence: TTT
ccacattatcactttcaatt

SEQ ID NO: 59088 - DNA, 20 bp, Artificial Sequence
  Description of Artificial Sequence: Synthetic oligonucleotide
  Target: ATXN2; (-) strand; PAM type: YTN; PAM sequence: TTT
tccacattatcactttcaat

SEQ ID NO: 59089 - DNA, 20 bp, Artificial Sequence
  Description of Artificial Sequence: Synthetic oligonucleotide
  Target: ATXN2; (-) strand; PAM type: YTN; PAM sequence: TTA
attttccacattatcacttt

SEQ ID NO: 59090 - DNA, 20 bp, Artificial Sequence
  Description of Artificial Sequence: Synthetic oligonucleotide
  Target: ATXN2; (-) strand; PAM type: YTN; PAM sequence: CTT
aattttccacattatcactt

SEQ ID NO: 59091 - DNA, 20 bp, Artificial Sequence
  Description of Artificial Sequence: Synthetic oligonucleotide
  Target: ATXN2; (-) strand; PAM type: YTN; PAM sequence: TTA
agtccagtcttaattttcca

SEQ ID NO: 59092 - DNA, 20 bp, Artificial Sequence
  Description of Artificial Sequence: Synthetic oligonucleotide
  Target: ATXN2; (-) strand; PAM type: YTN; PAM sequence: TTA
taaaacagttaagtccagtc

SEQ ID NO: 59093 - DNA, 20 bp, Artificial Sequence
  Description of Artificial Sequence: Synthetic oligonucleotide
  Target: ATXN2; (-) strand; PAM type: YTN; PAM sequence: TTT
ataaaacagttaagtccagt

SEQ ID NO: 59094 - DNA, 20 bp, Artificial Sequence
  Description of Artificial Sequence: Synthetic oligonucleotide
  Target: ATXN2; (-) strand; PAM type: YTN; PAM sequence: TTT
tataaaacagttaagtccag

SEQ ID NO: 59095 - DNA, 20 bp, Artificial Sequence
  Description of Artificial Sequence: Synthetic oligonucleotide
  Target: ATXN2; (-) strand; PAM type: YTN; PAM sequence: TTA
gttttataaaacagttaagt

SEQ ID NO: 59096 - DNA, 20 bp, Artificial Sequence
  Description of Artificial Sequence: Synthetic oligonucleotide
  Target: ATXN2; (-) strand; PAM type: YTN; PAM sequence: TTT
agttttataaaacagttaag

SEQ ID NO: 59097 - DNA, 20 bp, Artificial Sequence
  Description of Artificial Sequence: Synthetic oligonucleotide
  Target: ATXN2; (-) strand; PAM type: YTN; PAM sequence: TTG
tatatgatcaaaggtgttta

SEQ ID NO: 59098 - DNA, 20 bp, Artificial Sequence
  Description of Artificial Sequence: Synthetic oligonucleotide
  Target: ATXN2; (-) strand; PAM type: YTN; PAM sequence: TTT
gtatatgatcaaaggtgttt

SEQ ID NO: 59099 - DNA, 20 bp, Artificial Sequence
  Description of Artificial Sequence: Synthetic oligonucleotide
  Target: ATXN2; (-) strand; PAM type: YTN; PAM sequence: CTG
ataggaatttgtatatgatc

SEQ ID NO: 59100 - DNA, 20 bp, Artificial Sequence
  Description of Artificial Sequence: Synthetic oligonucleotide
  Target: ATXN2; (-) strand; PAM type: YTN; PAM sequence: CTG
ctgataggaatttgtatatg

SEQ ID NO: 59101 - DNA, 20 bp, Artificial Sequence
  Description of Artificial Sequence: Synthetic oligonucleotide
  Target: ATXN2; (-) strand; PAM type: YTN; PAM sequence: CTC
actgctgataggaatttgta

SEQ ID NO: 59102 - DNA, 20 bp, Artificial Sequence
  Description of Artificial Sequence: Synthetic oligonucleotide
  Target: ATXN2; (-) strand; PAM type: YTN; PAM sequence: CTG
ccacaaaggctcactgctga

SEQ ID NO: 59103 - DNA, 20 bp, Artificial Sequence
  Description of Artificial Sequence: Synthetic oligonucleotide
  Target: ATXN2; (-) strand; PAM type: YTN; PAM sequence: TTG
tctgccacaaaggctcactg

SEQ ID NO: 59104 - DNA, 20 bp, Artificial Sequence
  Description of Artificial Sequence: Synthetic oligonucleotide
  Target: ATXN2; (-) strand; PAM type: YTN; PAM sequence: CTT
gtctgccacaaaggctcact

SEQ ID NO: 59105 - DNA, 20 bp, Artificial Sequence
  Description of Artificial Sequence: Synthetic oligonucleotide
  Target: ATXN2; (-) strand; PAM type: YTN; PAM sequence: TTC
ttgtctgccacaaaggctca

SEQ ID NO: 59106 - DNA, 20 bp, Artificial Sequence
  Description of Artificial Sequence: Synthetic oligonucleotide
  Target: ATXN2; (-) strand; PAM type: YTN; PAM sequence: CTG
gaggttcttgtctgccacaa

SEQ ID NO: 59107 - DNA, 20 bp, Artificial Sequence
  Description of Artificial Sequence: Synthetic oligonucleotide
  Target: ATXN2; (-) strand; PAM type: YTN; PAM sequence: TTC
ctggaggttcttgtctgcca

SEQ ID NO: 59108 - DNA, 20 bp, Artificial Sequence
  Description of Artificial Sequence: Synthetic oligonucleotide
  Target: ATXN2; (-) strand; PAM type: YTN; PAM sequence: CTT
cctggaggttcttgtctgcc

SEQ ID NO: 59109 - DNA, 20 bp, Artificial Sequence
  Description of Artificial Sequence: Synthetic oligonucleotide
  Target: ATXN2; (-) strand; PAM type: YTN; PAM sequence: TTC
ttcctggaggttcttgtctg

SEQ ID NO: 59110 - DNA, 20 bp, Artificial Sequence
  Description of Artificial Sequence: Synthetic oligonucleotide
  Target: ATXN2; (-) strand; PAM type: YTN; PAM sequence: TTT
cttcctggaggttcttgtct

SEQ ID NO: 59111 - DNA, 20 bp, Artificial Sequence
  Description of Artificial Sequence: Synthetic oligonucleotide
  Target: ATXN2; (-) strand; PAM type: YTN; PAM sequence: CTT
tcttcctggaggttcttgtc

SEQ ID NO: 59112 - DNA, 20 bp, Artificial Sequence
  Description of Artificial Sequence: Synthetic oligonucleotide
  Target: ATXN2; (-) strand; PAM type: YTN; PAM sequence: TTA
tgctttcttcctggaggttc

SEQ ID NO: 59113 - DNA, 20 bp, Artificial Sequence
  Description of Artificial Sequence: Synthetic oligonucleotide
  Target: ATXN2; (-) strand; PAM type: YTN; PAM sequence: CTT
atgctttcttcctggaggtt

SEQ ID NO: 59114 - DNA, 20 bp, Artificial Sequence
  Description of Artificial Sequence: Synthetic oligonucleotide
  Target: ATXN2; (-) strand; PAM type: YTN; PAM sequence: CTG
taacccacagcttatgcttt

SEQ ID NO: 59115 - DNA, 20 bp, Artificial Sequence
  Description of Artificial Sequence: Synthetic oligonucleotide
  Target: ATXN2; (-) strand; PAM type: YTN; PAM sequence: CTG
tcacctgtaacccacagctt

SEQ ID NO: 59116 - DNA, 20 bp, Artificial Sequence
  Description of Artificial Sequence: Synthetic oligonucleotide
  Target: ATXN2; (-) strand; PAM type: YTN; PAM sequence: TTC
ctgtcacctgtaacccacag

SEQ ID NO: 59117 - DNA, 20 bp, Artificial Sequence
  Description of Artificial Sequence: Synthetic oligonucleotide
  Target: ATXN2; (-) strand; PAM type: YTN; PAM sequence: CTT
cctgtcacctgtaacccaca

SEQ ID NO: 59118 - DNA, 20 bp, Artificial Sequence
  Description of Artificial Sequence: Synthetic oligonucleotide
  Target: ATXN2; (-) strand; PAM type: YTN; PAM sequence: TTG
ggcagcagcaatcatccttc

SEQ ID NO: 59119 - DNA, 20 bp, Artificial Sequence
  Description of Artificial Sequence: Synthetic oligonucleotide
  Target: ATXN2; (-) strand; PAM type: YTN; PAM sequence: CTT
gggcagcagcaatcatcctt

SEQ ID NO: 59120 - DNA, 20 bp, Artificial Sequence
  Description of Artificial Sequence: Synthetic oligonucleotide
  Target: ATXN2; (-) strand; PAM type: YTN; PAM sequence: TTA
atgagaataggacttgggca

SEQ ID NO: 59121 - DNA, 20 bp, Artificial Sequence
  Description of Artificial Sequence: Synthetic oligonucleotide
  Target: ATXN2; (-) strand; PAM type: YTN; PAM sequence: TTC
cgtaggttaatgagaatagg

SEQ ID NO: 59122 - DNA, 20 bp, Artificial Sequence
  Description of Artificial Sequence: Synthetic oligonucleotide
  Target: ATXN2; (-) strand; PAM type: YTN; PAM sequence: TTA
acattccgtaggttaatgag

SEQ ID NO: 59123 - DNA, 20 bp, Artificial Sequence
  Description of Artificial Sequence: Synthetic oligonucleotide
  Target: ATXN2; (-) strand; PAM type: YTN; PAM sequence: TTT
aacattccgtaggttaatga

SEQ ID NO: 59124 - DNA, 20 bp, Artificial Sequence
  Description of Artificial Sequence: Synthetic oligonucleotide
  Target: ATXN2; (-) strand; PAM type: YTN; PAM sequence: TTT
taacattccgtaggttaatg

SEQ ID NO: 59125 - DNA, 20 bp, Artificial Sequence
  Description of Artificial Sequence: Synthetic oligonucleotide
  Target: ATXN2; (-) strand; PAM type: YTN; PAM sequence: TTG
aagaataaaagttttaacat

SEQ ID NO: 59126 - DNA, 20 bp, Artificial Sequence
  Description of Artificial Sequence: Synthetic oligonucleotide
  Target: ATXN2; (-) strand; PAM type: YTN; PAM sequence: TTT
gaagaataaaagttttaaca

SEQ ID NO: 59127 - DNA, 20 bp, Artificial Sequence
  Description of Artificial Sequence: Synthetic oligonucleotide
  Target: ATXN2; (-) strand; PAM type: YTN; PAM sequence: TTT
tgaagaataaaagttttaac

SEQ ID NO: 59128 - DNA, 20 bp, Artificial Sequence
  Description of Artificial Sequence: Synthetic oligonucleotide
  Target: ATXN2; (-) strand; PAM type: YTN; PAM sequence: TTT
ttgaagaataaaagttttaa

SEQ ID NO: 59129 - DNA, 20 bp, Artificial Sequence
  Description of Artificial Sequence: Synthetic oligonucleotide
  Target: ATXN2; (-) strand; PAM type: YTN; PAM sequence: CTT
tttgaagaataaaagtttta

SEQ ID NO: 59130 - DNA, 20 bp, Artificial Sequence
  Description of Artificial Sequence: Synthetic oligonucleotide
  Target: ATXN2; (-) strand; PAM type: YTN; PAM sequence: CTG
tcctttttgaagaataaaag

SEQ ID NO: 59131 - DNA, 20 bp, Artificial Sequence
  Description of Artificial Sequence: Synthetic oligonucleotide
  Target: ATXN2; (-) strand; PAM type: YTN; PAM sequence: CTC
tgtcctttttgaagaataaa

SEQ ID NO: 59132 - DNA, 20 bp, Artificial Sequence
  Description of Artificial Sequence: Synthetic oligonucleotide
  Target: ATXN2; (-) strand; PAM type: YTN; PAM sequence: TTC
ataccacctctgtccttttt

SEQ ID NO: 59133 - DNA, 20 bp, Artificial Sequence
  Description of Artificial Sequence: Synthetic oligonucleotide
  Target: ATXN2; (-) strand; PAM type: YTN; PAM sequence: TTT
cataccacctctgtcctttt

SEQ ID NO: 59134 - DNA, 20 bp, Artificial Sequence
  Description of Artificial Sequence: Synthetic oligonucleotide
  Target: ATXN2; (-) strand; PAM type: YTN; PAM sequence: TTT
tcataccacctctgtccttt

SEQ ID NO: 59135 - DNA, 20 bp, Artificial Sequence
  Description of Artificial Sequence: Synthetic oligonucleotide
  Target: ATXN2; (-) strand; PAM type: YTN; PAM sequence: CTT
ttcataccacctctgtcctt

SEQ ID NO: 59136 - DNA, 20 bp, Artificial Sequence
  Description of Artificial Sequence: Synthetic oligonucleotide
  Target: ATXN2; (-) strand; PAM type: YTN; PAM sequence: CTA
cttttcataccacctctgtc

SEQ ID NO: 59137 - DNA, 20 bp, Artificial Sequence
  Description of Artificial Sequence: Synthetic oligonucleotide
  Target: ATXN2; (-) strand; PAM type: YTN; PAM sequence: TTA
ctacttttcataccacctct

SEQ ID NO: 59138 - DNA, 20 bp, Artificial Sequence
  Description of Artificial Sequence: Synthetic oligonucleotide
  Target: ATXN2; (-) strand; PAM type: YTN; PAM sequence: TTG
agacattactacttttcata

SEQ ID NO: 59139 - DNA, 20 bp, Artificial Sequence
  Description of Artificial Sequence: Synthetic oligonucleotide
  Target: ATXN2; (-) strand; PAM type: YTN; PAM sequence: CTT
gagacattactacttttcat

SEQ ID NO: 59140 - DNA, 20 bp, Artificial Sequence
  Description of Artificial Sequence: Synthetic oligonucleotide
  Target: ATXN2; (-) strand; PAM type: YTN; PAM sequence: TTC
ttgagacattactacttttc

SEQ ID NO: 59141 - DNA, 20 bp, Artificial Sequence
  Description of Artificial Sequence: Synthetic oligonucleotide
  Target: ATXN2; (-) strand; PAM type: YTN; PAM sequence: CTT
cttgagacattactactttt

SEQ ID NO: 59142 - DNA, 20 bp, Artificial Sequence
  Description of Artificial Sequence: Synthetic oligonucleotide
  Target: ATXN2; (-) strand; PAM type: YTN; PAM sequence: TTC
ttcttgagacattactactt

SEQ ID NO: 59143 - DNA, 20 bp, Artificial Sequence
  Description of Artificial Sequence: Synthetic oligonucleotide
  Target: ATXN2; (-) strand; PAM type: YTN; PAM sequence: CTT
cttcttgagacattactact

SEQ ID NO: 59144 - DNA, 20 bp, Artificial Sequence
  Description of Artificial Sequence: Synthetic oligonucleotide
  Target: ATXN2; (-) strand; PAM type: YTN; PAM sequence: CTG
gcaaaccttcttcttgagac

SEQ ID NO: 59145 - DNA, 20 bp, Artificial Sequence
  Description of Artificial Sequence: Synthetic oligonucleotide
  Target: ATXN2; (-) strand; PAM type: YTN; PAM sequence: TTC
tggcaaaccttcttcttgag

SEQ ID NO: 59146 - DNA, 20 bp, Artificial Sequence
  Description of Artificial Sequence: Synthetic oligonucleotide
  Target: ATXN2; (-) strand; PAM type: YTN; PAM sequence: TTT
ctggcaaaccttcttcttga

SEQ ID NO: 59147 - DNA, 20 bp, Artificial Sequence
  Description of Artificial Sequence: Synthetic oligonucleotide
  Target: ATXN2; (-) strand; PAM type: YTN; PAM sequence: TTA
cagatttctggcaaaccttc

SEQ ID NO: 59148 - DNA, 20 bp, Artificial Sequence
  Description of Artificial Sequence: Synthetic oligonucleotide
  Target: ATXN2; (-) strand; PAM type: YTN; PAM sequence: TTT
acagatttctggcaaacctt

SEQ ID NO: 59149 - DNA, 20 bp, Artificial Sequence
  Description of Artificial Sequence: Synthetic oligonucleotide
  Target: ATXN2; (-) strand; PAM type: YTN; PAM sequence: CTC
caaaaaaaaaaaaaaaaaaa

SEQ ID NO: 59150 - DNA, 20 bp, Artificial Sequence
  Description of Artificial Sequence: Synthetic oligonucleotide
  Target: ATXN2; (-) strand; PAM type: YTN; PAM sequence: CTC
catctccaaaaaaaaaaaaa

SEQ ID NO: 59151 - DNA, 20 bp, Artificial Sequence
  Description of Artificial Sequence: Synthetic oligonucleotide
  Target: ATXN2; (-) strand; PAM type: YTN; PAM sequence: CTG
agcgacagagtgagactcca

SEQ ID NO: 59152 - DNA, 20 bp, Artificial Sequence
  Description of Artificial Sequence: Synthetic oligonucleotide
  Target: ATXN2; (-) strand; PAM type: YTN; PAM sequence: CTA
gcctgagcgacagagtgaga

SEQ ID NO: 59153 - DNA, 20 bp, Artificial Sequence
  Description of Artificial Sequence: Synthetic oligonucleotide
  Target: ATXN2; (-) strand; PAM type: YTN; PAM sequence: CTC
tagcctgagcgacagagtga

SEQ ID NO: 59154 - DNA, 20 bp, Artificial Sequence
  Description of Artificial Sequence: Synthetic oligonucleotide
  Target: ATXN2; (-) strand; PAM type: YTN; PAM sequence: CTA
cactctagcctgagcgacag

SEQ ID NO: 59155 - DNA, 20 bp, Artificial Sequence
  Description of Artificial Sequence: Synthetic oligonucleotide
  Target: ATXN2; (-) strand; PAM type: YTN; PAM sequence: TTG
cagtgagccgagatcgcgcc

SEQ ID NO: 59156 - DNA, 20 bp, Artificial Sequence
  Description of Artificial Sequence: Synthetic oligonucleotide
  Target: ATXN2; (-) strand; PAM type: YTN; PAM sequence: TTG
aacccgggaggcagaggttg

SEQ ID NO: 59157 - DNA, 20 bp, Artificial Sequence
  Description of Artificial Sequence: Synthetic oligonucleotide
  Target: ATXN2; (-) strand; PAM type: YTN; PAM sequence: CTT
gaacccgggaggcagaggtt

SEQ ID NO: 59158 - DNA, 20 bp, Artificial Sequence
  Description of Artificial Sequence: Synthetic oligonucleotide
  Target: ATXN2; (-) strand; PAM type: YTN; PAM sequence: TTG
cttgaacccgggaggcagag

SEQ ID NO: 59159 - DNA, 20 bp, Artificial Sequence
  Description of Artificial Sequence: Synthetic oligonucleotide
  Target: ATXN2; (-) strand; PAM type: YTN; PAM sequence: CTG
aggcaacagaattgcttgaa

SEQ ID NO: 59160 - DNA, 20 bp, Artificial Sequence
  Description of Artificial Sequence: Synthetic oligonucleotide
  Target: ATXN2; (-) strand; PAM type: YTN; PAM sequence: TTC
ggaggctgaggcaacagaat

SEQ ID NO: 59161 - DNA, 20 bp, Artificial Sequence
  Description of Artificial Sequence: Synthetic oligonucleotide
  Target: ATXN2; (-) strand; PAM type: YTN; PAM sequence: CTT
cggaggctgaggcaacagaa

SEQ ID NO: 59162 - DNA, 20 bp, Artificial Sequence
  Description of Artificial Sequence: Synthetic oligonucleotide
  Target: ATXN2; (-) strand; PAM type: YTN; PAM sequence: CTA
cttcggaggctgaggcaaca

SEQ ID NO: 59163 - DNA, 20 bp, Artificial Sequence
  Description of Artificial Sequence: Synthetic oligonucleotide
  Target: ATXN2; (-) strand; PAM type: YTN; PAM sequence: CTG
tagtcccggctacttcggag

SEQ ID NO: 59164 - DNA, 20 bp, Artificial Sequence
  Description of Artificial Sequence: Synthetic oligonucleotide
  Target: ATXN2; (-) strand; PAM type: YTN; PAM sequence: TTG
gccgggtgtggtggcatgtg

SEQ ID NO: 59165 - DNA, 20 bp, Artificial Sequence
  Description of Artificial Sequence: Synthetic oligonucleotide
  Target: ATXN2; (-) strand; PAM type: YTN; PAM sequence: CTA
aaaatccaaaaaattggccg

SEQ ID NO: 59166 - DNA, 20 bp, Artificial Sequence
  Description of Artificial Sequence: Synthetic oligonucleotide
  Target: ATXN2; (-) strand; PAM type: YTN; PAM sequence: CTA
ctaaaaatccaaaaaattgg

SEQ ID NO: 59167 - DNA, 20 bp, Artificial Sequence
  Description of Artificial Sequence: Synthetic oligonucleotide
  Target: ATXN2; (-) strand; PAM type: YTN; PAM sequence: CTC
tactaaaaatccaaaaaatt

SEQ ID NO: 59168 - DNA, 20 bp, Artificial Sequence
  Description of Artificial Sequence: Synthetic oligonucleotide
  Target: ATXN2; (-) strand; PAM type: YTN; PAM sequence: CTG
gccaacatggtgaaacccca

SEQ ID NO: 59169 - DNA, 20 bp, Artificial Sequence
  Description of Artificial Sequence: Synthetic oligonucleotide
  Target: ATXN2; (-) strand; PAM type: YTN; PAM sequence: CTG
gcggatcatgaggtcaggag

SEQ ID NO: 59170 - DNA, 20 bp, Artificial Sequence
  Description of Artificial Sequence: Synthetic oligonucleotide
  Target: ATXN2; (-) strand; PAM type: YTN; PAM sequence: TTG
ggaggccaaggctggcggat

SEQ ID NO: 59171 - DNA, 20 bp, Artificial Sequence
  Description of Artificial Sequence: Synthetic oligonucleotide
  Target: ATXN2; (-) strand; PAM type: YTN; PAM sequence: TTT
gggaggccaaggctggcgga

SEQ ID NO: 59172 - DNA, 20 bp, Artificial Sequence
  Description of Artificial Sequence: Synthetic oligonucleotide
  Target: ATXN2; (-) strand; PAM type: YTN; PAM sequence: CTT
tgggaggccaaggctggcgg

SEQ ID NO: 59173 - DNA, 20 bp, Artificial Sequence
  Description of Artificial Sequence: Synthetic oligonucleotide
  Target: ATXN2; (-) strand; PAM type: YTN; PAM sequence: CTG
taatcccagcactttgggag

SEQ ID NO: 59174 - DNA, 20 bp, Artificial Sequence
  Description of Artificial Sequence: Synthetic oligonucleotide
  Target: ATXN2; (-) strand; PAM type: YTN; PAM sequence: CTC
acgcctgtaatcccagcact

SEQ ID NO: 59175 - DNA, 20 bp, Artificial Sequence
  Description of Artificial Sequence: Synthetic oligonucleotide
  Target: ATXN2; (-) strand; PAM type: YTN; PAM sequence: CTG
ggcgcagtggctcacgcctg

SEQ ID NO: 59176 - DNA, 20 bp, Artificial Sequence
  Description of Artificial Sequence: Synthetic oligonucleotide
  Target: ATXN2; (-) strand; PAM type: YTN; PAM sequence: TTA
taggctgggcgcagtggctc

SEQ ID NO: 59177 - DNA, 20 bp, Artificial Sequence
  Description of Artificial Sequence: Synthetic oligonucleotide
  Target: ATXN2; (-) strand; PAM type: YTN; PAM sequence: TTT
ataggctgggcgcagtggct

SEQ ID NO: 59178 - DNA, 20 bp, Artificial Sequence
  Description of Artificial Sequence: Synthetic oligonucleotide
  Target: ATXN2; (-) strand; PAM type: YTN; PAM sequence: TTA
agaatttataggctgggcgc

SEQ ID NO: 59179 - DNA, 20 bp, Artificial Sequence
  Description of Artificial Sequence: Synthetic oligonucleotide
  Target: ATXN2; (-) strand; PAM type: YTN; PAM sequence: TTT
aagaatttataggctgggcg

SEQ ID NO: 59180 - DNA, 20 bp, Artificial Sequence
  Description of Artificial Sequence: Synthetic oligonucleotide
  Target: ATXN2; (-) strand; PAM type: YTN; PAM sequence: TTA
tttaagaatttataggctgg

SEQ ID NO: 59181 - DNA, 20 bp, Artificial Sequence
  Description of Artificial Sequence: Synthetic oligonucleotide
  Target: ATXN2; (-) strand; PAM type: YTN; PAM sequence: TTG
agttatttaagaatttatag

SEQ ID NO: 59182 - DNA, 20 bp, Artificial Sequence
  Description of Artificial Sequence: Synthetic oligonucleotide
  Target: ATXN2; (-) strand; PAM type: YTN; PAM sequence: TTA
ggcaaaattgagttatttaa

SEQ ID NO: 59183 - DNA, 20 bp, Artificial Sequence
  Description of Artificial Sequence: Synthetic oligonucleotide
  Target: ATXN2; (-) strand; PAM type: YTN; PAM sequence: TTT
aggcaaaattgagttattta

SEQ ID NO: 59184 - DNA, 20 bp, Artificial Sequence
  Description of Artificial Sequence: Synthetic oligonucleotide
  Target: ATXN2; (-) strand; PAM type: YTN; PAM sequence: CTG
aacgagtatgtttaggcaaa

SEQ ID NO: 59185 - DNA, 20 bp, Artificial Sequence
  Description of Artificial Sequence: Synthetic oligonucleotide
  Target: ATXN2; (-) strand; PAM type: YTN; PAM sequence: TTA
gatgtcctgaacgagtatgt

SEQ ID NO: 59186 - DNA, 20 bp, Artificial Sequence
  Description of Artificial Sequence: Synthetic oligonucleotide
  Target: ATXN2; (-) strand; PAM type: YTN; PAM sequence: TTT
agatgtcctgaacgagtatg

SEQ ID NO: 59187 - DNA, 20 bp, Artificial Sequence
  Description of Artificial Sequence: Synthetic oligonucleotide
  Target: ATXN2; (-) strand; PAM type: YTN; PAM sequence: TTA
agtttagatgtcctgaacga

SEQ ID NO: 59188 - DNA, 20 bp, Artificial Sequence
  Description of Artificial Sequence: Synthetic oligonucleotide
  Target: ATXN2; (-) strand; PAM type: YTN; PAM sequence: TTT
aagtttagatgtcctgaacg

SEQ ID NO: 59189 - DNA, 20 bp, Artificial Sequence
  Description of Artificial Sequence: Synthetic oligonucleotide
  Target: ATXN2; (-) strand; PAM type: YTN; PAM sequence: TTT
taagtttagatgtcctgaac

SEQ ID NO: 59190 - DNA, 20 bp, Artificial Sequence
  Description of Artificial Sequence: Synthetic oligonucleotide
  Target: ATXN2; (-) strand; PAM type: YTN; PAM sequence: TTT
ttaagtttagatgtcctgaa

SEQ ID NO: 59191 - DNA, 20 bp, Artificial Sequence
  Description of Artificial Sequence: Synthetic oligonucleotide
  Target: ATXN2; (-) strand; PAM type: YTN; PAM sequence: TTT
tttaagtttagatgtcctga

SEQ ID NO: 59192 - DNA, 20 bp, Artificial Sequence
  Description of Artificial Sequence: Synthetic oligonucleotide
  Target: ATXN2; (-) strand; PAM type: YTN; PAM sequence: TTA
ttttttaagtttagatgtcc

SEQ ID NO: 59193 - DNA, 20 bp, Artificial Sequence
  Description of Artificial Sequence: Synthetic oligonucleotide
  Target: ATXN2; (-) strand; PAM type: YTN; PAM sequence: TTT
attttttaagtttagatgtc

SEQ ID NO: 59194 - DNA, 20 bp, Artificial Sequence
  Description of Artificial Sequence: Synthetic oligonucleotide
  Target: ATXN2; (-) strand; PAM type: YTN; PAM sequence: TTT
tattttttaagtttagatgt

SEQ ID NO: 59195 - DNA, 20 bp, Artificial Sequence
  Description of Artificial Sequence: Synthetic oligonucleotide
  Target: ATXN2; (-) strand; PAM type: YTN; PAM sequence: TTT
ttattttttaagtttagatg

SEQ ID NO: 59196 - DNA, 20 bp, Artificial Sequence
  Description of Artificial Sequence: Synthetic oligonucleotide
  Target: ATXN2; (-) strand; PAM type: YTN; PAM sequence: CTA
agaatataaaatttttattt

SEQ ID NO: 59197 - DNA, 20 bp, Artificial Sequence
  Description of Artificial Sequence: Synthetic oligonucleotide
  Target: ATXN2; (-) strand; PAM type: YTN; PAM sequence: TTG
aaatactaagaatataaaat

SEQ ID NO: 59198 - DNA, 20 bp, Artificial Sequence
  Description of Artificial Sequence: Synthetic oligonucleotide
  Target: ATXN2; (-) strand; PAM type: YTN; PAM sequence: TTT
gaaatactaagaatataaaa

SEQ ID NO: 59199 - DNA, 20 bp, Artificial Sequence
  Description of Artificial Sequence: Synthetic oligonucleotide
  Target: ATXN2; (-) strand; PAM type: YTN; PAM sequence: TTT
tgaaatactaagaatataaa

SEQ ID NO: 59200 - DNA, 20 bp, Artificial Sequence
  Description of Artificial Sequence: Synthetic oligonucleotide
  Target: ATXN2; (-) strand; PAM type: YTN; PAM sequence: TTT
ttgaaatactaagaatataa

SEQ ID NO: 59201 - DNA, 20 bp, Artificial Sequence
  Description of Artificial Sequence: Synthetic oligonucleotide
  Target: ATXN2; (-) strand; PAM type: YTN; PAM sequence: CTT
tttgaaatactaagaatata

SEQ ID NO: 59202 - DNA, 20 bp, Artificial Sequence
  Description of Artificial Sequence: Synthetic oligonucleotide
  Target: ATXN2; (-) strand; PAM type: YTN; PAM sequence: TTG
aactttttgaaatactaaga

SEQ ID NO: 59203 - DNA, 20 bp, Artificial Sequence
  Description of Artificial Sequence: Synthetic oligonucleotide
  Target: ATXN2; (-) strand; PAM type: YTN; PAM sequence: TTT
gaactttttgaaatactaag

SEQ ID NO: 59204 - DNA, 20 bp, Artificial Sequence
  Description of Artificial Sequence: Synthetic oligonucleotide
  Target: ATXN2; (-) strand; PAM type: YTN; PAM sequence: CTT
tgaactttttgaaatactaa

SEQ ID NO: 59205 - DNA, 20 bp, Artificial Sequence
  Description of Artificial Sequence: Synthetic oligonucleotide
  Target: ATXN2; (-) strand; PAM type: YTN; PAM sequence: CTC
tttgaactttttgaaatact

SEQ ID NO: 59206 - DNA, 20 bp, Artificial Sequence
  Description of Artificial Sequence: Synthetic oligonucleotide
  Target: ATXN2; (-) strand; PAM type: YTN; PAM sequence: TTA
aagcctctttgaactttttg

SEQ ID NO: 59207 - DNA, 20 bp, Artificial Sequence
  Description of Artificial Sequence: Synthetic oligonucleotide
  Target: ATXN2; (-) strand; PAM type: YTN; PAM sequence: TTT
aaagcctctttgaacttttt

SEQ ID NO: 59208 - DNA, 20 bp, Artificial Sequence
  Description of Artificial Sequence: Synthetic oligonucleotide
  Target: ATXN2; (-) strand; PAM type: YTN; PAM sequence: TTT
taaagcctctttgaactttt

SEQ ID NO: 59209 - DNA, 20 bp, Artificial Sequence
  Description of Artificial Sequence: Synthetic oligonucleotide
  Target: ATXN2; (-) strand; PAM type: YTN; PAM sequence: TTT
ttaaagcctctttgaacttt

SEQ ID NO: 59210 - DNA, 20 bp, Artificial Sequence
  Description of Artificial Sequence: Synthetic oligonucleotide
  Target: ATXN2; (-) strand; PAM type: YTN; PAM sequence: TTC
atttttaaagcctctttgaa

SEQ ID NO: 59211 - DNA, 20 bp, Artificial Sequence
  Description of Artificial Sequence: Synthetic oligonucleotide
  Target: ATXN2; (-) strand; PAM type: YTN; PAM sequence: TTT
catttttaaagcctctttga

SEQ ID NO: 59212 - DNA, 20 bp, Artificial Sequence
  Description of Artificial Sequence: Synthetic oligonucleotide
  Target: ATXN2; (-) strand; PAM type: YTN; PAM sequence: CTA
catgggcatttcatttttaa

SEQ ID NO: 59213 - DNA, 20 bp, Artificial Sequence
  Description of Artificial Sequence: Synthetic oligonucleotide
  Target: ATXN2; (-) strand; PAM type: YTN; PAM sequence: TTA
catgtaactacatgggcatt

SEQ ID NO: 59214 - DNA, 20 bp, Artificial Sequence
  Description of Artificial Sequence: Synthetic oligonucleotide
  Target: ATXN2; (-) strand; PAM type: YTN; PAM sequence: TTA
tggttacatgtaactacatg

SEQ ID NO: 59215 - DNA, 20 bp, Artificial Sequence
  Description of Artificial Sequence: Synthetic oligonucleotide
  Target: ATXN2; (-) strand; PAM type: YTN; PAM sequence: CTA
tgagaatgagattatggtta

SEQ ID NO: 59216 - DNA, 20 bp, Artificial Sequence
  Description of Artificial Sequence: Synthetic oligonucleotide
  Target: ATXN2; (-) strand; PAM type: YTN; PAM sequence: CTG
ctatgagaatgagattatgg

SEQ ID NO: 59217 - DNA, 20 bp, Artificial Sequence
  Description of Artificial Sequence: Synthetic oligonucleotide
  Target: ATXN2; (-) strand; PAM type: YTN; PAM sequence: TTG
aaaagtgtactgctatgaga

SEQ ID NO: 59218 - DNA, 20 bp, Artificial Sequence
  Description of Artificial Sequence: Synthetic oligonucleotide
  Target: ATXN2; (-) strand; PAM type: YTN; PAM sequence: TTC
atacagttgaaaagtgtact

SEQ ID NO: 59219 - DNA, 20 bp, Artificial Sequence
  Description of Artificial Sequence: Synthetic oligonucleotide
  Target: ATXN2; (-) strand; PAM type: YTN; PAM sequence: TTA
ttcatacagttgaaaagtgt

SEQ ID NO: 59220 - DNA, 20 bp, Artificial Sequence
  Description of Artificial Sequence: Synthetic oligonucleotide
  Target: ATXN2; (-) strand; PAM type: YTN; PAM sequence: TTT
attcatacagttgaaaagtg

SEQ ID NO: 59221 - DNA, 20 bp, Artificial Sequence
  Description of Artificial Sequence: Synthetic oligonucleotide
  Target: ATXN2; (-) strand; PAM type: YTN; PAM sequence: TTG
gtttattcatacagttgaaa

SEQ ID NO: 59222 - DNA, 20 bp, Artificial Sequence
  Description of Artificial Sequence: Synthetic oligonucleotide
  Target: ATXN2; (-) strand; PAM type: YTN; PAM sequence: TTT
ggtttattcatacagttgaa

SEQ ID NO: 59223 - DNA, 20 bp, Artificial Sequence
  Description of Artificial Sequence: Synthetic oligonucleotide
  Target: ATXN2; (-) strand; PAM type: YTN; PAM sequence: TTT
tggtttattcatacagttga

SEQ ID NO: 59224 - DNA, 20 bp, Artificial Sequence
  Description of Artificial Sequence: Synthetic oligonucleotide
  Target: ATXN2; (-) strand; PAM type: YTN; PAM sequence: TTG
gagtaggggataattttggt

SEQ ID NO: 59225 - DNA, 20 bp, Artificial Sequence
  Description of Artificial Sequence: Synthetic oligonucleotide
  Target: ATXN2; (-) strand; PAM type: YTN; PAM sequence: TTT
ggagtaggggataattttgg

SEQ ID NO: 59226 - DNA, 20 bp, Artificial Sequence
  Description of Artificial Sequence: Synthetic oligonucleotide
  Target: ATXN2; (-) strand; PAM type: YTN; PAM sequence: TTG
tttggagtaggggataattt

SEQ ID NO: 59227 - DNA, 20 bp, Artificial Sequence
  Description of Artificial Sequence: Synthetic oligonucleotide
  Target: ATXN2; (-) strand; PAM type: YTN; PAM sequence: TTG
gttgtttggagtaggggata

SEQ ID NO: 59228 - DNA, 20 bp, Artificial Sequence
  Description of Artificial Sequence: Synthetic oligonucleotide
  Target: ATXN2; (-) strand; PAM type: YTN; PAM sequence: TTT
ggttgtttggagtaggggat

SEQ ID NO: 59229 - DNA, 20 bp, Artificial Sequence
  Description of Artificial Sequence: Synthetic oligonucleotide
  Target: ATXN2; (-) strand; PAM type: YTN; PAM sequence: TTT
tggttgtttggagtagggga

SEQ ID NO: 59230 - DNA, 20 bp, Artificial Sequence
  Description of Artificial Sequence: Synthetic oligonucleotide
  Target: ATXN2; (-) strand; PAM type: YTN; PAM sequence: TTT
ttggttgtttggagtagggg

SEQ ID NO: 59231 - DNA, 20 bp, Artificial Sequence
  Description of Artificial Sequence: Synthetic oligonucleotide
  Target: ATXN2; (-) strand; PAM type: YTN; PAM sequence: TTG
cgtttttggttgtttggagt

SEQ ID NO: 59232 - DNA, 20 bp, Artificial Sequence
  Description of Artificial Sequence: Synthetic oligonucleotide
  Target: ATXN2; (-) strand; PAM type: YTN; PAM sequence: TTT
gcgtttttggttgtttggag

SEQ ID NO: 59233 - DNA, 20 bp, Artificial Sequence
  Description of Artificial Sequence: Synthetic oligonucleotide
  Target: ATXN2; (-) strand; PAM type: YTN; PAM sequence: CTA
tttgcgtttttggttgtttg

SEQ ID NO: 59234 - DNA, 20 bp, Artificial Sequence
  Description of Artificial Sequence: Synthetic oligonucleotide
  Target: ATXN2; (-) strand; PAM type: YTN; PAM sequence: TTC
ctatttgcgtttttggttgt

SEQ ID NO: 59235 - DNA, 20 bp, Artificial Sequence
  Description of Artificial Sequence: Synthetic oligonucleotide
  Target: ATXN2; (-) strand; PAM type: YTN; PAM sequence: TTT
cctatttgcgtttttggttg

SEQ ID NO: 59236 - DNA, 20 bp, Artificial Sequence
  Description of Artificial Sequence: Synthetic oligonucleotide
  Target: ATXN2; (-) strand; PAM type: YTN; PAM sequence: TTT
tcctatttgcgtttttggtt

SEQ ID NO: 59237 - DNA, 20 bp, Artificial Sequence
  Description of Artificial Sequence: Synthetic oligonucleotide
  Target: ATXN2; (-) strand; PAM type: YTN; PAM sequence: TTA
gttttcctatttgcgttttt

SEQ ID NO: 59238 - DNA, 20 bp, Artificial Sequence
  Description of Artificial Sequence: Synthetic oligonucleotide
  Target: ATXN2; (-) strand; PAM type: YTN; PAM sequence: TTT
agttttcctatttgcgtttt

SEQ ID NO: 59239 - DNA, 20 bp, Artificial Sequence
  Description of Artificial Sequence: Synthetic oligonucleotide
  Target: ATXN2; (-) strand; PAM type: YTN; PAM sequence: CTA
ccgtagtgtcgtttagtttt

SEQ ID NO: 59240 - DNA, 20 bp, Artificial Sequence
  Description of Artificial Sequence: Synthetic oligonucleotide
  Target: ATXN2; (-) strand; PAM type: YTN; PAM sequence: CTG
agaactaccgtagtgtcgtt

SEQ ID NO: 59241 - DNA, 20 bp, Artificial Sequence
  Description of Artificial Sequence: Synthetic oligonucleotide
  Target: ATXN2; (-) strand; PAM type: YTN; PAM sequence: TTC
tgagaactaccgtagtgtcg

SEQ ID NO: 59242 - DNA, 20 bp, Artificial Sequence
  Description of Artificial Sequence: Synthetic oligonucleotide
  Target: ATXN2; (-) strand; PAM type: YTN; PAM sequence: TTT
ctgagaactaccgtagtgtc

SEQ ID NO: 59243 - DNA, 20 bp, Artificial Sequence
  Description of Artificial Sequence: Synthetic oligonucleotide
  Target: ATXN2; (-) strand; PAM type: YTN; PAM sequence: CTG
aatatttctgagaactaccg

SEQ ID NO: 59244 - DNA, 20 bp, Artificial Sequence
  Description of Artificial Sequence: Synthetic oligonucleotide
  Target: ATXN2; (-) strand; PAM type: YTN; PAM sequence: TTC
tgaatatttctgagaactac

SEQ ID NO: 59245 - DNA, 20 bp, Artificial Sequence
  Description of Artificial Sequence: Synthetic oligonucleotide
  Target: ATXN2; (-) strand; PAM type: YTN; PAM sequence: TTG
ttctgaatatttctgagaac

SEQ ID NO: 59246 - DNA, 20 bp, Artificial Sequence
  Description of Artificial Sequence: Synthetic oligonucleotide
  Target: ATXN2; (-) strand; PAM type: YTN; PAM sequence: TTT
gttctgaatatttctgagaa

SEQ ID NO: 59247 - DNA, 20 bp, Artificial Sequence
  Description of Artificial Sequence: Synthetic oligonucleotide
  Target: ATXN2; (-) strand; PAM type: YTN; PAM sequence: TTT
tgttctgaatatttctgaga

SEQ ID NO: 59248 - DNA, 20 bp, Artificial Sequence
  Description of Artificial Sequence: Synthetic oligonucleotide
  Target: ATXN2; (-) strand; PAM type: YTN; PAM sequence: TTA
agatgttttgttctgaatat

SEQ ID NO: 59249 - DNA, 20 bp, Artificial Sequence
  Description of Artificial Sequence: Synthetic oligonucleotide
  Target: ATXN2; (-) strand; PAM type: YTN; PAM sequence: TTC
attaagatgttttgttctga

SEQ ID NO: 59250 - DNA, 20 bp, Artificial Sequence
  Description of Artificial Sequence: Synthetic oligonucleotide
  Target: ATXN2; (-) strand; PAM type: YTN; PAM sequence: TTT
cattaagatgttttgttctg

SEQ ID NO: 59251 - DNA, 20 bp, Artificial Sequence
  Description of Artificial Sequence: Synthetic oligonucleotide
  Target: ATXN2; (-) strand; PAM type: YTN; PAM sequence: CTG
atttcattaagatgttttgt

SEQ ID NO: 59252 - DNA, 20 bp, Artificial Sequence
  Description of Artificial Sequence: Synthetic oligonucleotide
  Target: ATXN2; (-) strand; PAM type: YTN; PAM sequence: TTA
aatagtactgatttcattaa

SEQ ID NO: 59253 - DNA, 20 bp, Artificial Sequence
  Description of Artificial Sequence: Synthetic oligonucleotide
  Target: ATXN2; (-) strand; PAM type: YTN; PAM sequence: TTT
aaatagtactgatttcatta

SEQ ID NO: 59254 - DNA, 20 bp, Artificial Sequence
  Description of Artificial Sequence: Synthetic oligonucleotide
  Target: ATXN2; (-) strand; PAM type: YTN; PAM sequence: TTT
taaatagtactgatttcatt

SEQ ID NO: 59255 - DNA, 20 bp, Artificial Sequence
  Description of Artificial Sequence: Synthetic oligonucleotide
  Target: ATXN2; (-) strand; PAM type: YTN; PAM sequence: TTT
ttaaatagtactgatttcat

SEQ ID NO: 59256 - DNA, 20 bp, Artificial Sequence
  Description of Artificial Sequence: Synthetic oligonucleotide
  Target: ATXN2; (-) strand; PAM type: YTN; PAM sequence: TTC
agaatatgtttttaaatagt

SEQ ID NO: 59257 - DNA, 20 bp, Artificial Sequence
  Description of Artificial Sequence: Synthetic oligonucleotide
  Target: ATXN2; (-) strand; PAM type: YTN; PAM sequence: TTT
cagaatatgtttttaaatag

SEQ ID NO: 59258 - DNA, 20 bp, Artificial Sequence
  Description of Artificial Sequence: Synthetic oligonucleotide
  Target: ATXN2; (-) strand; PAM type: YTN; PAM sequence: TTT
tcagaatatgtttttaaata

SEQ ID NO: 59259 - DNA, 20 bp, Artificial Sequence
  Description of Artificial Sequence: Synthetic oligonucleotide
  Target: ATXN2; (-) strand; PAM type: YTN; PAM sequence: TTT
ttcagaatatgtttttaaat

SEQ ID NO: 59260 - DNA, 20 bp, Artificial Sequence
  Description of Artificial Sequence: Synthetic oligonucleotide
  Target: ATXN2; (-) strand; PAM type: YTN; PAM sequence: TTC
aaatgtttttcagaatatgt

SEQ ID NO: 59261 - DNA, 20 bp, Artificial Sequence
  Description of Artificial Sequence: Synthetic oligonucleotide
  Target: ATXN2; (-) strand; PAM type: YTN; PAM sequence: CTT
caaatgtttttcagaatatg

SEQ ID NO: 59262 - DNA, 20 bp, Artificial Sequence
  Description of Artificial Sequence: Synthetic oligonucleotide
  Target: ATXN2; (-) strand; PAM type: YTN; PAM sequence: TTG
cttcaaatgtttttcagaat

SEQ ID NO: 59263 - DNA, 20 bp, Artificial Sequence
  Description of Artificial Sequence: Synthetic oligonucleotide
  Target: ATXN2; (-) strand; PAM type: YTN; PAM sequence: TTA
atggattgcttcaaatgttt

SEQ ID NO: 59264 - DNA, 20 bp, Artificial Sequence
  Description of Artificial Sequence: Synthetic oligonucleotide
  Target: ATXN2; (-) strand; PAM type: YTN; PAM sequence: TTA
tgatacagaattaatggatt

SEQ ID NO: 59265 - DNA, 20 bp, Artificial Sequence
  Description of Artificial Sequence: Synthetic oligonucleotide
  Target: ATXN2; (-) strand; PAM type: YTN; PAM sequence: CTT
atgatacagaattaatggat

SEQ ID NO: 59266 - DNA, 20 bp, Artificial Sequence
  Description of Artificial Sequence: Synthetic oligonucleotide
  Target: ATXN2; (-) strand; PAM type: YTN; PAM sequence: TTG
tatatcttatgatacagaat

SEQ ID NO: 59267 - DNA, 20 bp, Artificial Sequence
  Description of Artificial Sequence: Synthetic oligonucleotide
  Target: ATXN2; (-) strand; PAM type: YTN; PAM sequence: TTT
gtatatcttatgatacagaa

SEQ ID NO: 59268 - DNA, 20 bp, Artificial Sequence
  Description of Artificial Sequence: Synthetic oligonucleotide
  Target: ATXN2; (-) strand; PAM type: YTN; PAM sequence: TTA
aaataaaatgtccatttgta

SEQ ID NO: 59269 - DNA, 20 bp, Artificial Sequence
  Description of Artificial Sequence: Synthetic oligonucleotide
  Target: ATXN2; (-) strand; PAM type: YTN; PAM sequence: TTT
aaaataaaatgtccatttgt

SEQ ID NO: 59270 - DNA, 20 bp, Artificial Sequence
  Description of Artificial Sequence: Synthetic oligonucleotide
  Target: ATXN2; (-) strand; PAM type: YTN; PAM sequence: TTG
ataatttaaaataaaatgtc

SEQ ID NO: 59271 - DNA, 20 bp, Artificial Sequence
  Description of Artificial Sequence: Synthetic oligonucleotide
  Target: ATXN2; (-) strand; PAM type: YTN; PAM sequence: CTG
ttgataatttaaaataaaat

SEQ ID NO: 59272 - DNA, 20 bp, Artificial Sequence
  Description of Artificial Sequence: Synthetic oligonucleotide
  Target: ATXN2; (-) strand; PAM type: YTN; PAM sequence: TTC
actgttgataatttaaaata

SEQ ID NO: 59273 - DNA, 20 bp, Artificial Sequence
  Description of Artificial Sequence: Synthetic oligonucleotide
  Target: ATXN2; (-) strand; PAM type: YTN; PAM sequence: TTT
cactgttgataatttaaaat

SEQ ID NO: 59274 - DNA, 20 bp, Artificial Sequence
  Description of Artificial Sequence: Synthetic oligonucleotide
  Target: ATXN2; (-) strand; PAM type: YTN; PAM sequence: TTT
tcactgttgataatttaaaa

SEQ ID NO: 59275 - DNA, 20 bp, Artificial Sequence
  Description of Artificial Sequence: Synthetic oligonucleotide
  Target: ATXN2; (-) strand; PAM type: YTN; PAM sequence: TTT
ttcactgttgataatttaaa

SEQ ID NO: 59276 - DNA, 20 bp, Artificial Sequence
  Description of Artificial Sequence: Synthetic oligonucleotide
  Target: ATXN2; (-) strand; PAM type: YTN; PAM sequence: CTA
aagtaccaaaataatagatt

SEQ ID NO: 59277 - DNA, 20 bp, Artificial Sequence
  Description of Artificial Sequence: Synthetic oligonucleotide
  Target: ATXN2; (-) strand; PAM type: YTN; PAM sequence: CTG
tctaaagtaccaaaataata

SEQ ID NO: 59278 - DNA, 20 bp, Artificial Sequence
  Description of Artificial Sequence: Synthetic oligonucleotide
  Target: ATXN2; (-) strand; PAM type: YTN; PAM sequence: TTA
gcagctgtctaaagtaccaa

SEQ ID NO: 59279 - DNA, 20 bp, Artificial Sequence
  Description of Artificial Sequence: Synthetic oligonucleotide
  Target: ATXN2; (-) strand; PAM type: YTN; PAM sequence: CTT
agcagctgtctaaagtacca

SEQ ID NO: 59280 - DNA, 20 bp, Artificial Sequence
  Description of Artificial Sequence: Synthetic oligonucleotide
  Target: ATXN2; (-) strand; PAM type: YTN; PAM sequence: TTG
tgtagatcaacttagcagct

SEQ ID NO: 59281 - DNA, 20 bp, Artificial Sequence
  Description of Artificial Sequence: Synthetic oligonucleotide
  Target: ATXN2; (-) strand; PAM type: YTN; PAM sequence: TTT
gtgtagatcaacttagcagc

SEQ ID NO: 59282 - DNA, 20 bp, Artificial Sequence
  Description of Artificial Sequence: Synthetic oligonucleotide
  Target: ATXN2; (-) strand; PAM type: YTN; PAM sequence: CTA
aacagagaaatttgtgtaga

SEQ ID NO: 59283 - DNA, 20 bp, Artificial Sequence
  Description of Artificial Sequence: Synthetic oligonucleotide
  Target: ATXN2; (-) strand; PAM type: YTN; PAM sequence: TTG
tgactaaacagagaaatttg

SEQ ID NO: 59284 - DNA, 20 bp, Artificial Sequence
  Description of Artificial Sequence: Synthetic oligonucleotide
  Target: ATXN2; (-) strand; PAM type: YTN; PAM sequence: TTT
gtgactaaacagagaaattt

SEQ ID NO: 59285 - DNA, 20 bp, Artificial Sequence
  Description of Artificial Sequence: Synthetic oligonucleotide
  Target: ATXN2; (-) strand; PAM type: YTN; PAM sequence: TTT
tgtgactaaacagagaaatt

SEQ ID NO: 59286 - DNA, 20 bp, Artificial Sequence
  Description of Artificial Sequence: Synthetic oligonucleotide
  Target: ATXN2; (-) strand; PAM type: YTN; PAM sequence: TTC
gttttgtgactaaacagaga

SEQ ID NO: 59287 - DNA, 20 bp, Artificial Sequence
  Description of Artificial Sequence: Synthetic oligonucleotide
  Target: ATXN2; (-) strand; PAM type: YTN; PAM sequence: CTT
cgttttgtgactaaacagag

SEQ ID NO: 59288 - DNA, 20 bp, Artificial Sequence
  Description of Artificial Sequence: Synthetic oligonucleotide
  Target: ATXN2; (-) strand; PAM type: YTN; PAM sequence: TTA
tatgtgagaataataagcaa

SEQ ID NO: 59289 - DNA, 20 bp, Artificial Sequence
  Description of Artificial Sequence: Synthetic oligonucleotide
  Target: ATXN2; (-) strand; PAM type: YTN; PAM sequence: TTT
atatgtgagaataataagca

SEQ ID NO: 59290 - DNA, 20 bp, Artificial Sequence
  Description of Artificial Sequence: Synthetic oligonucleotide
  Target: ATXN2; (-) strand; PAM type: YTN; PAM sequence: CTA
agcagtatttatatgtgaga

SEQ ID NO: 59291 - DNA, 20 bp, Artificial Sequence
  Description of Artificial Sequence: Synthetic oligonucleotide
  Target: ATXN2; (-) strand; PAM type: YTN; PAM sequence: TTA
tgtaaaactaagcagtattt

SEQ ID NO: 59292 - DNA, 20 bp, Artificial Sequence
  Description of Artificial Sequence: Synthetic oligonucleotide
  Target: ATXN2; (-) strand; PAM type: YTN; PAM sequence: TTT
atgtaaaactaagcagtatt

SEQ ID NO: 59293 - DNA, 20 bp, Artificial Sequence
  Description of Artificial Sequence: Synthetic oligonucleotide
  Target: ATXN2; (-) strand; PAM type: YTN; PAM sequence: TTT
tatgtaaaactaagcagtat

SEQ ID NO: 59294 - DNA, 20 bp, Artificial Sequence
  Description of Artificial Sequence: Synthetic oligonucleotide
  Target: ATXN2; (-) strand; PAM type: YTN; PAM sequence: CTG
aaatgaaaatgagaagtatt

SEQ ID NO: 59295 - DNA, 20 bp, Artificial Sequence
  Description of Artificial Sequence: Synthetic oligonucleotide
  Target: ATXN2; (-) strand; PAM type: YTN; PAM sequence: TTA
aatataaccaatgtgaacag

SEQ ID NO: 59296 - DNA, 20 bp, Artificial Sequence
  Description of Artificial Sequence: Synthetic oligonucleotide
  Target: ATXN2; (-) strand; PAM type: YTN; PAM sequence: TTT
aaatataaccaatgtgaaca

SEQ ID NO: 59297 - DNA, 20 bp, Artificial Sequence
  Description of Artificial Sequence: Synthetic oligonucleotide
  Target: ATXN2; (-) strand; PAM type: YTN; PAM sequence: CTT
taaatataaccaatgtgaac

SEQ ID NO: 59298 - DNA, 20 bp, Artificial Sequence
  Description of Artificial Sequence: Synthetic oligonucleotide
  Target: ATXN2; (-) strand; PAM type: YTN; PAM sequence: TTA
gacatgagtcacactttaaa

SEQ ID NO: 59299 - DNA, 20 bp, Artificial Sequence
  Description of Artificial Sequence: Synthetic oligonucleotide
  Target: ATXN2; (-) strand; PAM type: YTN; PAM sequence: TTT
agacatgagtcacactttaa

SEQ ID NO: 59300 - DNA, 20 bp, Artificial Sequence
  Description of Artificial Sequence: Synthetic oligonucleotide
  Target: ATXN2; (-) strand; PAM type: YTN; PAM sequence: TTT
tagacatgagtcacacttta

SEQ ID NO: 59301 - DNA, 20 bp, Artificial Sequence
  Description of Artificial Sequence: Synthetic oligonucleotide
  Target: ATXN2; (-) strand; PAM type: YTN; PAM sequence: TTA
gatatattttagacatgagt

SEQ ID NO: 59302 - DNA, 20 bp, Artificial Sequence
  Description of Artificial Sequence: Synthetic oligonucleotide
  Target: ATXN2; (-) strand; PAM type: YTN; PAM sequence: TTA
tgtcatattagatatatttt

SEQ ID NO: 59303 - DNA, 20 bp, Artificial Sequence
  Description of Artificial Sequence: Synthetic oligonucleotide
  Target: ATXN2; (-) strand; PAM type: YTN; PAM sequence: TTG
aatattatgtcatattagat

SEQ ID NO: 59304 - DNA, 20 bp, Artificial Sequence
  Description of Artificial Sequence: Synthetic oligonucleotide
  Target: ATXN2; (-) strand; PAM type: YTN; PAM sequence: TTA
atggttgaatattatgtcat

SEQ ID NO: 59305 - DNA, 20 bp, Artificial Sequence
  Description of Artificial Sequence: Synthetic oligonucleotide
  Target: ATXN2; (-) strand; PAM type: YTN; PAM sequence: TTT
aatggttgaatattatgtca

SEQ ID NO: 59306 - DNA, 20 bp, Artificial Sequence
  Description of Artificial Sequence: Synthetic oligonucleotide
  Target: ATXN2; (-) strand; PAM type: YTN; PAM sequence: TTT
taatggttgaatattatgtc

SEQ ID NO: 59307 - DNA, 20 bp, Artificial Sequence
  Description of Artificial Sequence: Synthetic oligonucleotide
  Target: ATXN2; (-) strand; PAM type: YTN; PAM sequence: CTG
tattttaatggttgaatatt

SEQ ID NO: 59308 - DNA, 20 bp, Artificial Sequence
  Description of Artificial Sequence: Synthetic oligonucleotide
  Target: ATXN2; (-) strand; PAM type: YTN; PAM sequence: CTA
catcatgctgtattttaatg

SEQ ID NO: 59309 - DNA, 20 bp, Artificial Sequence
  Description of Artificial Sequence: Synthetic oligonucleotide
  Target: ATXN2; (-) strand; PAM type: YTN; PAM sequence: TTC
tacatcatgctgtattttaa

SEQ ID NO: 59310 - DNA, 20 bp, Artificial Sequence
  Description of Artificial Sequence: Synthetic oligonucleotide
  Target: ATXN2; (-) strand; PAM type: YTN; PAM sequence: TTT
ctacatcatgctgtatttta

SEQ ID NO: 59311 - DNA, 20 bp, Artificial Sequence
  Description of Artificial Sequence: Synthetic oligonucleotide
  Target: ATXN2; (-) strand; PAM type: YTN; PAM sequence: CTA
tgtttctacatcatgctgta

SEQ ID NO: 59312 - DNA, 20 bp, Artificial Sequence
  Description of Artificial Sequence: Synthetic oligonucleotide
  Target: ATXN2; (-) strand; PAM type: YTN; PAM sequence: TTA
taatgataatactatgtttc

SEQ ID NO: 59313 - DNA, 20 bp, Artificial Sequence
  Description of Artificial Sequence: Synthetic oligonucleotide
  Target: ATXN2; (-) strand; PAM type: YTN; PAM sequence: TTG
ttataatgataatactatgt

SEQ ID NO: 59314 - DNA, 20 bp, Artificial Sequence
  Description of Artificial Sequence: Synthetic oligonucleotide
  Target: ATXN2; (-) strand; PAM type: YTN; PAM sequence: TTT
gttataatgataatactatg

SEQ ID NO: 59315 - DNA, 20 bp, Artificial Sequence
  Description of Artificial Sequence: Synthetic oligonucleotide
  Target: ATXN2; (-) strand; PAM type: YTN; PAM sequence: CTG
tttgttataatgataatact

SEQ ID NO: 59316 - DNA, 20 bp, Artificial Sequence
  Description of Artificial Sequence: Synthetic oligonucleotide
  Target: ATXN2; (-) strand; PAM type: YTN; PAM sequence: TTG
ctgtttgttataatgataat

SEQ ID NO: 59317 - DNA, 20 bp, Artificial Sequence
  Description of Artificial Sequence: Synthetic oligonucleotide
  Target: ATXN2; (-) strand; PAM type: YTN; PAM sequence: TTT
gctgtttgttataatgataa

SEQ ID NO: 59318 - DNA, 20 bp, Artificial Sequence
  Description of Artificial Sequence: Synthetic oligonucleotide
  Target: ATXN2; (-) strand; PAM type: YTN; PAM sequence: TTT
tgctgtttgttataatgata

SEQ ID NO: 59319 - DNA, 20 bp, Artificial Sequence
  Description of Artificial Sequence: Synthetic oligonucleotide
  Target: ATXN2; (-) strand; PAM type: YTN; PAM sequence: TTT
ttgctgtttgttataatgat

SEQ ID NO: 59320 - DNA, 20 bp, Artificial Sequence
  Description of Artificial Sequence: Synthetic oligonucleotide
  Target: ATXN2; (-) strand; PAM type: YTN; PAM sequence: TTT
tttgctgtttgttataatga

SEQ ID NO: 59321 - DNA, 20 bp, Artificial Sequence
  Description of Artificial Sequence: Synthetic oligonucleotide
  Target: ATXN2; (-) strand; PAM type: YTN; PAM sequence: TTT
ttttgctgtttgttataatg

SEQ ID NO: 59322 - DNA, 20 bp, Artificial Sequence
  Description of Artificial Sequence: Synthetic oligonucleotide
  Target: ATXN2; (-) strand; PAM type: YTN; PAM sequence: TTT
tttttgctgtttgttataat

SEQ ID NO: 59323 - DNA, 20 bp, Artificial Sequence
  Description of Artificial Sequence: Synthetic oligonucleotide
  Target: ATXN2; (-) strand; PAM type: YTN; PAM sequence: TTA
catattttttttgctgtttg

SEQ ID NO: 59324 - DNA, 20 bp, Artificial Sequence
  Description of Artificial Sequence: Synthetic oligonucleotide
  Target: ATXN2; (-) strand; PAM type: YTN; PAM sequence: CTG
gcattacatattttttttgc

SEQ ID NO: 59325 - DNA, 20 bp, Artificial Sequence
  Description of Artificial Sequence: Synthetic oligonucleotide
  Target: ATXN2; (-) strand; PAM type: YTN; PAM sequence: CTG
agggtcactggcattacata

SEQ ID NO: 59326 - DNA, 20 bp, Artificial Sequence
  Description of Artificial Sequence: Synthetic oligonucleotide
  Target: ATXN2; (-) strand; PAM type: YTN; PAM sequence: TTG
atctgagggtcactggcatt

SEQ ID NO: 59327 - DNA, 20 bp, Artificial Sequence
  Description of Artificial Sequence: Synthetic oligonucleotide
  Target: ATXN2; (-) strand; PAM type: YTN; PAM sequence: CTT
gatctgagggtcactggcat

SEQ ID NO: 59328 - DNA, 20 bp, Artificial Sequence
  Description of Artificial Sequence: Synthetic oligonucleotide
  Target: ATXN2; (-) strand; PAM type: YTN; PAM sequence: CTA
cttgatctgagggtcactgg

SEQ ID NO: 59329 - DNA, 20 bp, Artificial Sequence
  Description of Artificial Sequence: Synthetic oligonucleotide
  Target: ATXN2; (-) strand; PAM type: YTN; PAM sequence: TTC
actacttgatctgagggtca

SEQ ID NO: 59330 - DNA, 20 bp, Artificial Sequence
  Description of Artificial Sequence: Synthetic oligonucleotide
  Target: ATXN2; (-) strand; PAM type: YTN; PAM sequence: CTT
cactacttgatctgagggtc

SEQ ID NO: 59331 - DNA, 20 bp, Artificial Sequence
  Description of Artificial Sequence: Synthetic oligonucleotide
  Target: ATXN2; (-) strand; PAM type: YTN; PAM sequence: TTG
cttcactacttgatctgagg

SEQ ID NO: 59332 - DNA, 20 bp, Artificial Sequence
  Description of Artificial Sequence: Synthetic oligonucleotide
  Target: ATXN2; (-) strand; PAM type: YTN; PAM sequence: TTT
gcttcactacttgatctgag

SEQ ID NO: 59333 - DNA, 20 bp, Artificial Sequence
  Description of Artificial Sequence: Synthetic oligonucleotide
  Target: ATXN2; (-) strand; PAM type: YTN; PAM sequence: TTT
tgcttcactacttgatctga

SEQ ID NO: 59334 - DNA, 20 bp, Artificial Sequence
  Description of Artificial Sequence: Synthetic oligonucleotide
  Target: ATXN2; (-) strand; PAM type: YTN; PAM sequence: CTC
cagcatgaaaacattttgct

SEQ ID NO: 59335 - DNA, 20 bp, Artificial Sequence
  Description of Artificial Sequence: Synthetic oligonucleotide
  Target: ATXN2; (-) strand; PAM type: YTN; PAM sequence: TTC
tccagcatgaaaacattttg

SEQ ID NO: 59336 - DNA, 20 bp, Artificial Sequence
  Description of Artificial Sequence: Synthetic oligonucleotide
  Target: ATXN2; (-) strand; PAM type: YTN; PAM sequence: TTA
taataataaaagcataaagg

SEQ ID NO: 59337 - DNA, 20 bp, Artificial Sequence
  Description of Artificial Sequence: Synthetic oligonucleotide
  Target: ATXN2; (-) strand; PAM type: YTN; PAM sequence: TTT
ataataataaaagcataaag

SEQ ID NO: 59338 - DNA, 20 bp, Artificial Sequence
  Description of Artificial Sequence: Synthetic oligonucleotide
  Target: ATXN2; (-) strand; PAM type: YTN; PAM sequence: TTT
tataataataaaagcataaa

SEQ ID NO: 59339 - DNA, 20 bp, Artificial Sequence
  Description of Artificial Sequence: Synthetic oligonucleotide
  Target: ATXN2; (-) strand; PAM type: YTN; PAM sequence: CTA
cgacatgcaagagaatttta

SEQ ID NO: 59340 - DNA, 20 bp, Artificial Sequence
  Description of Artificial Sequence: Synthetic oligonucleotide
  Target: ATXN2; (-) strand; PAM type: YTN; PAM sequence: CTG
cctacgacatgcaagagaat

SEQ ID NO: 59341 - DNA, 20 bp, Artificial Sequence
  Description of Artificial Sequence: Synthetic oligonucleotide
  Target: ATXN2; (-) strand; PAM type: YTN; PAM sequence: TTG
gtatatcctgcctacgacat

SEQ ID NO: 59342 - DNA, 20 bp, Artificial Sequence
  Description of Artificial Sequence: Synthetic oligonucleotide
  Target: ATXN2; (-) strand; PAM type: YTN; PAM sequence: TTT
ggtatatcctgcctacgaca

SEQ ID NO: 59343 - DNA, 20 bp, Artificial Sequence
  Description of Artificial Sequence: Synthetic oligonucleotide
  Target: ATXN2; (-) strand; PAM type: YTN; PAM sequence: CTT
tggtatatcctgcctacgac

SEQ ID NO: 59344 - DNA, 20 bp, Artificial Sequence
  Description of Artificial Sequence: Synthetic oligonucleotide
  Target: ATXN2; (-) strand; PAM type: YTN; PAM sequence: TTA
tgctttggtatatcctgcct

SEQ ID NO: 59345 - DNA, 20 bp, Artificial Sequence
  Description of Artificial Sequence: Synthetic oligonucleotide
  Target: ATXN2; (-) strand; PAM type: YTN; PAM sequence: CTC
atcaatattatgctttggta

SEQ ID NO: 59346 - DNA, 20 bp, Artificial Sequence
  Description of Artificial Sequence: Synthetic oligonucleotide
  Target: ATXN2; (-) strand; PAM type: YTN; PAM sequence: TTC
ctcatcaatattatgctttg

SEQ ID NO: 59347 - DNA, 20 bp, Artificial Sequence
  Description of Artificial Sequence: Synthetic oligonucleotide
  Target: ATXN2; (-) strand; PAM type: YTN; PAM sequence: CTT
cctcatcaatattatgcttt

SEQ ID NO: 59348 - DNA, 20 bp, Artificial Sequence
  Description of Artificial Sequence: Synthetic oligonucleotide
  Target: ATXN2; (-) strand; PAM type: YTN; PAM sequence: CTC
ttcctcatcaatattatgct

SEQ ID NO: 59349 - DNA, 20 bp, Artificial Sequence
  Description of Artificial Sequence: Synthetic oligonucleotide
  Target: ATXN2; (-) strand; PAM type: YTN; PAM sequence: CTC
ctcttcctcatcaatattat

SEQ ID NO: 59350 - DNA, 20 bp, Artificial Sequence
  Description of Artificial Sequence: Synthetic oligonucleotide
  Target: ATXN2; (-) strand; PAM type: YTN; PAM sequence: TTC
tcctcttcctcatcaatatt

SEQ ID NO: 59351 - DNA, 20 bp, Artificial Sequence
  Description of Artificial Sequence: Synthetic oligonucleotide
  Target: ATXN2; (-) strand; PAM type: YTN; PAM sequence: TTT
ctcctcttcctcatcaatat

SEQ ID NO: 59352 - DNA, 20 bp, Artificial Sequence
  Description of Artificial Sequence: Synthetic oligonucleotide
  Target: ATXN2; (-) strand; PAM type: YTN; PAM sequence: CTT
tctcctcttcctcatcaata

SEQ ID NO: 59353 - DNA, 20 bp, Artificial Sequence
  Description of Artificial Sequence: Synthetic oligonucleotide
  Target: ATXN2; (-) strand; PAM type: YTN; PAM sequence: TTG
tggagaaaggtacctttctc

SEQ ID NO: 59354 - DNA, 20 bp, Artificial Sequence
  Description of Artificial Sequence: Synthetic oligonucleotide
  Target: ATXN2; (-) strand; PAM type: YTN; PAM sequence: TTT
gtggagaaaggtacctttct

SEQ ID NO: 59355 - DNA, 20 bp, Artificial Sequence
  Description of Artificial Sequence: Synthetic oligonucleotide
  Target: ATXN2; (-) strand; PAM type: YTN; PAM sequence: CTT
tgtggagaaaggtacctttc

SEQ ID NO: 59356 - DNA, 20 bp, Artificial Sequence
  Description of Artificial Sequence: Synthetic oligonucleotide
  Target: ATXN2; (-) strand; PAM type: YTN; PAM sequence: CTA
aaatgtaatgatgtatataa

SEQ ID NO: 59357 - DNA, 20 bp, Artificial Sequence
  Description of Artificial Sequence: Synthetic oligonucleotide
  Target: ATXN2; (-) strand; PAM type: YTN; PAM sequence: TTA
actaaaatgtaatgatgtat

SEQ ID NO: 59358 - DNA, 20 bp, Artificial Sequence
  Description of Artificial Sequence: Synthetic oligonucleotide
  Target: ATXN2; (-) strand; PAM type: YTN; PAM sequence: TTT
aactaaaatgtaatgatgta

SEQ ID NO: 59359 - DNA, 20 bp, Artificial Sequence
  Description of Artificial Sequence: Synthetic oligonucleotide
  Target: ATXN2; (-) strand; PAM type: YTN; PAM sequence: CTT
taactaaaatgtaatgatgt

SEQ ID NO: 59360 - DNA, 20 bp, Artificial Sequence
  Description of Artificial Sequence: Synthetic oligonucleotide
  Target: ATXN2; (-) strand; PAM type: YTN; PAM sequence: CTG
ctttaactaaaatgtaatga

SEQ ID NO: 59361 - DNA, 20 bp, Artificial Sequence
  Description of Artificial Sequence: Synthetic oligonucleotide
  Target: ATXN2; (-) strand; PAM type: YTN; PAM sequence: TTC
ctgctttaactaaaatgtaa

SEQ ID NO: 59362 - DNA, 20 bp, Artificial Sequence
  Description of Artificial Sequence: Synthetic oligonucleotide
  Target: ATXN2; (-) strand; PAM type: YTN; PAM sequence: TTT
cctgctttaactaaaatgta

SEQ ID NO: 59363 - DNA, 20 bp, Artificial Sequence
  Description of Artificial Sequence: Synthetic oligonucleotide
  Target: ATXN2; (-) strand; PAM type: YTN; PAM sequence: CTT
tcctgctttaactaaaatgt

SEQ ID NO: 59364 - DNA, 20 bp, Artificial Sequence
  Description of Artificial Sequence: Synthetic oligonucleotide
  Target: ATXN2; (-) strand; PAM type: YTN; PAM sequence: CTC
tttcctgctttaactaaaat

SEQ ID NO: 59365 - DNA, 20 bp, Artificial Sequence
  Description of Artificial Sequence: Synthetic oligonucleotide
  Target: ATXN2; (-) strand; PAM type: YTN; PAM sequence: TTC
agatctctttcctgctttaa

SEQ ID NO: 59366 - DNA, 20 bp, Artificial Sequence
  Description of Artificial Sequence: Synthetic oligonucleotide
  Target: ATXN2; (-) strand; PAM type: YTN; PAM sequence: CTT
cagatctctttcctgcttta

SEQ ID NO: 59367 - DNA, 20 bp, Artificial Sequence
  Description of Artificial Sequence: Synthetic oligonucleotide
  Target: ATXN2; (-) strand; PAM type: YTN; PAM sequence: CTG
gtcttcagatctctttcctg

SEQ ID NO: 59368 - DNA, 20 bp, Artificial Sequence
  Description of Artificial Sequence: Synthetic oligonucleotide
  Target: ATXN2; (-) strand; PAM type: YTN; PAM sequence: CTG
tacctggtcttcagatctct

SEQ ID NO: 59369 - DNA, 20 bp, Artificial Sequence
  Description of Artificial Sequence: Synthetic oligonucleotide
  Target: ATXN2; (-) strand; PAM type: YTN; PAM sequence: TTC
tgtacctggtcttcagatct

SEQ ID NO: 59370 - DNA, 20 bp, Artificial Sequence
  Description of Artificial Sequence: Synthetic oligonucleotide
  Target: ATXN2; (-) strand; PAM type: YTN; PAM sequence: CTT
ctgtacctggtcttcagatc

SEQ ID NO: 59371 - DNA, 20 bp, Artificial Sequence
  Description of Artificial Sequence: Synthetic oligonucleotide
  Target: ATXN2; (-) strand; PAM type: YTN; PAM sequence: CTA
cttctgtacctggtcttcag

SEQ ID NO: 59372 - DNA, 20 bp, Artificial Sequence
  Description of Artificial Sequence: Synthetic oligonucleotide
  Target: ATXN2; (-) strand; PAM type: YTN; PAM sequence: TTC
tacttctgtacctggtcttc

SEQ ID NO: 59373 - DNA, 20 bp, Artificial Sequence
  Description of Artificial Sequence: Synthetic oligonucleotide
  Target: ATXN2; (-) strand; PAM type: YTN; PAM sequence: TTT
ctacttctgtacctggtctt

SEQ ID NO: 59374 - DNA, 20 bp, Artificial Sequence
  Description of Artificial Sequence: Synthetic oligonucleotide
  Target: ATXN2; (-) strand; PAM type: YTN; PAM sequence: TTG
gcaaatagtttctacttctg

SEQ ID NO: 59375 - DNA, 20 bp, Artificial Sequence
  Description of Artificial Sequence: Synthetic oligonucleotide
  Target: ATXN2; (-) strand; PAM type: YTN; PAM sequence: TTT
ggcaaatagtttctacttct

SEQ ID NO: 59376 - DNA, 20 bp, Artificial Sequence
  Description of Artificial Sequence: Synthetic oligonucleotide
  Target: ATXN2; (-) strand; PAM type: YTN; PAM sequence: TTT
tggcaaatagtttctacttc

SEQ ID NO: 59377 - DNA, 20 bp, Artificial Sequence
  Description of Artificial Sequence: Synthetic oligonucleotide
  Target: ATXN2; (-) strand; PAM type: YTN; PAM sequence: CTT
ttggcaaatagtttctactt

SEQ ID NO: 59378 - DNA, 20 bp, Artificial Sequence
  Description of Artificial Sequence: Synthetic oligonucleotide
  Target: ATXN2; (-) strand; PAM type: YTN; PAM sequence: TTA
taacttttggcaaatagttt

SEQ ID NO: 59379 - DNA, 20 bp, Artificial Sequence
  Description of Artificial Sequence: Synthetic oligonucleotide
  Target: ATXN2; (-) strand; PAM type: YTN; PAM sequence: TTT
ataacttttggcaaatagtt

SEQ ID NO: 59380 - DNA, 20 bp, Artificial Sequence
  Description of Artificial Sequence: Synthetic oligonucleotide
  Target: ATXN2; (-) strand; PAM type: YTN; PAM sequence: CTT
tataacttttggcaaatagt

SEQ ID NO: 59381 - DNA, 20 bp, Artificial Sequence
  Description of Artificial Sequence: Synthetic oligonucleotide
  Target: ATXN2; (-) strand; PAM type: YTN; PAM sequence: TTG
ctttataacttttggcaaat

SEQ ID NO: 59382 - DNA, 20 bp, Artificial Sequence
  Description of Artificial Sequence: Synthetic oligonucleotide
  Target: ATXN2; (-) strand; PAM type: YTN; PAM sequence: CTT
gctttataacttttggcaaa

SEQ ID NO: 59383 - DNA, 20 bp, Artificial Sequence
  Description of Artificial Sequence: Synthetic oligonucleotide
  Target: ATXN2; (-) strand; PAM type: YTN; PAM sequence: CTG
acttgctttataacttttgg

SEQ ID NO: 59384 - DNA, 20 bp, Artificial Sequence
  Description of Artificial Sequence: Synthetic oligonucleotide
  Target: ATXN2; (-) strand; PAM type: YTN; PAM sequence: TTG
cctgacttgctttataactt

SEQ ID NO: 59385 - DNA, 20 bp, Artificial Sequence
  Description of Artificial Sequence: Synthetic oligonucleotide
  Target: ATXN2; (-) strand; PAM type: YTN; PAM sequence: TTT
gcctgacttgctttataact

SEQ ID NO: 59386 - DNA, 20 bp, Artificial Sequence
  Description of Artificial Sequence: Synthetic oligonucleotide
  Target: ATXN2; (-) strand; PAM type: YTN; PAM sequence: CTT
tgcctgacttgctttataac

SEQ ID NO: 59387 - DNA, 20 bp, Artificial Sequence
  Description of Artificial Sequence: Synthetic oligonucleotide
  Target: ATXN2; (-) strand; PAM type: YTN; PAM sequence: TTC
tttgcctgacttgctttata

SEQ ID NO: 59388 - DNA, 20 bp, Artificial Sequence
  Description of Artificial Sequence: Synthetic oligonucleotide
  Target: ATXN2; (-) strand; PAM type: YTN; PAM sequence: TTT
ctttgcctgacttgctttat

SEQ ID NO: 59389 - DNA, 20 bp, Artificial Sequence
  Description of Artificial Sequence: Synthetic oligonucleotide
  Target: ATXN2; (-) strand; PAM type: YTN; PAM sequence: CTG
aaggaaaagatgaacccatt

SEQ ID NO: 59390 - DNA, 20 bp, Artificial Sequence
  Description of Artificial Sequence: Synthetic oligonucleotide
  Target: ATXN2; (-) strand; PAM type: YTN; PAM sequence: TTG
agggtcaagaatctgaagga

SEQ ID NO: 59391 - DNA, 20 bp, Artificial Sequence
  Description of Artificial Sequence: Synthetic oligonucleotide
  Target: ATXN2; (-) strand; PAM type: YTN; PAM sequence: TTA
tgacattgagggtcaagaat

SEQ ID NO: 59392 - DNA, 20 bp, Artificial Sequence
  Description of Artificial Sequence: Synthetic oligonucleotide
  Target: ATXN2; (-) strand; PAM type: YTN; PAM sequence: TTT
atgacattgagggtcaagaa

SEQ ID NO: 59393 - DNA, 20 bp, Artificial Sequence
  Description of Artificial Sequence: Synthetic oligonucleotide
  Target: ATXN2; (-) strand; PAM type: YTN; PAM sequence: TTT
tatgacattgagggtcaaga

SEQ ID NO: 59394 - DNA, 20 bp, Artificial Sequence
  Description of Artificial Sequence: Synthetic oligonucleotide
  Target: ATXN2; (-) strand; PAM type: YTN; PAM sequence: CTT
ttatgacattgagggtcaag

SEQ ID NO: 59395 - DNA, 20 bp, Artificial Sequence
  Description of Artificial Sequence: Synthetic oligonucleotide
  Target: ATXN2; (-) strand; PAM type: YTN; PAM sequence: CTG
accttttatgacattgaggg

SEQ ID NO: 59396 - DNA, 20 bp, Artificial Sequence
  Description of Artificial Sequence: Synthetic oligonucleotide
  Target: ATXN2; (-) strand; PAM type: YTN; PAM sequence: CTA
agaataacctgaccttttat

SEQ ID NO: 59397 - DNA, 20 bp, Artificial Sequence
  Description of Artificial Sequence: Synthetic oligonucleotide
  Target: ATXN2; (-) strand; PAM type: YTN; PAM sequence: CTA
tctaagaataacctgacctt

SEQ ID NO: 59398 - DNA, 20 bp, Artificial Sequence
  Description of Artificial Sequence: Synthetic oligonucleotide
  Target: ATXN2; (-) strand; PAM type: YTN; PAM sequence: CTC
tatctaagaataacctgacc

SEQ ID NO: 59399 - DNA, 20 bp, Artificial Sequence
  Description of Artificial Sequence: Synthetic oligonucleotide
  Target: ATXN2; (-) strand; PAM type: YTN; PAM sequence: CTG
aaaacatactctatctaaga

SEQ ID NO: 59400 - DNA, 20 bp, Artificial Sequence
  Description of Artificial Sequence: Synthetic oligonucleotide
  Target: ATXN2; (-) strand; PAM type: YTN; PAM sequence: TTC
tgaaaacatactctatctaa

SEQ ID NO: 59401 - DNA, 20 bp, Artificial Sequence
  Description of Artificial Sequence: Synthetic oligonucleotide
  Target: ATXN2; (-) strand; PAM type: YTN; PAM sequence: TTT
ctgaaaacatactctatcta

SEQ ID NO: 59402 - DNA, 20 bp, Artificial Sequence
  Description of Artificial Sequence: Synthetic oligonucleotide
  Target: ATXN2; (-) strand; PAM type: YTN; PAM sequence: TTA
agtttctgaaaacatactct

SEQ ID NO: 59403 - DNA, 20 bp, Artificial Sequence
  Description of Artificial Sequence: Synthetic oligonucleotide
  Target: ATXN2; (-) strand; PAM type: YTN; PAM sequence: TTT
aagtttctgaaaacatactc

SEQ ID NO: 59404 - DNA, 20 bp, Artificial Sequence
  Description of Artificial Sequence: Synthetic oligonucleotide
  Target: ATXN2; (-) strand; PAM type: YTN; PAM sequence: TTA
atttaagtttctgaaaacat

SEQ ID NO: 59405 - DNA, 20 bp, Artificial Sequence
  Description of Artificial Sequence: Synthetic oligonucleotide
  Target: ATXN2; (-) strand; PAM type: YTN; PAM sequence: CTT
aatttaagtttctgaaaaca

SEQ ID NO: 59406 - DNA, 20 bp, Artificial Sequence
  Description of Artificial Sequence: Synthetic oligonucleotide
  Target: ATXN2; (-) strand; PAM type: YTN; PAM sequence: TTC
ttaatttaagtttctgaaaa

SEQ ID NO: 59407 - DNA, 20 bp, Artificial Sequence
  Description of Artificial Sequence: Synthetic oligonucleotide
  Target: ATXN2; (-) strand; PAM type: YTN; PAM sequence: CTT
cttaatttaagtttctgaaa

SEQ ID NO: 59408 - DNA, 20 bp, Artificial Sequence
  Description of Artificial Sequence: Synthetic oligonucleotide
  Target: ATXN2; (-) strand; PAM type: YTN; PAM sequence: CTC
ttcttaatttaagtttctga

SEQ ID NO: 59409 - DNA, 20 bp, Artificial Sequence
  Description of Artificial Sequence: Synthetic oligonucleotide
  Target: ATXN2; (-) strand; PAM type: YTN; PAM sequence: TTC
cagtgtgtgtgactcttctt

SEQ ID NO: 59410 - DNA, 20 bp, Artificial Sequence
  Description of Artificial Sequence: Synthetic oligonucleotide
  Target: ATXN2; (-) strand; PAM type: YTN; PAM sequence: CTT
ccagtgtgtgtgactcttct

SEQ ID NO: 59411 - DNA, 20 bp, Artificial Sequence
  Description of Artificial Sequence: Synthetic oligonucleotide
  Target: ATXN2; (-) strand; PAM type: YTN; PAM sequence: CTC
ttccagtgtgtgtgactctt

SEQ ID NO: 59412 - DNA, 20 bp, Artificial Sequence
  Description of Artificial Sequence: Synthetic oligonucleotide
  Target: ATXN2; (-) strand; PAM type: YTN; PAM sequence: TTG
tctcttccagtgtgtgtgac

SEQ ID NO: 59413 - DNA, 20 bp, Artificial Sequence
  Description of Artificial Sequence: Synthetic oligonucleotide
  Target: ATXN2; (-) strand; PAM type: YTN; PAM sequence: TTT
gtctcttccagtgtgtgtga

SEQ ID NO: 59414 - DNA, 20 bp, Artificial Sequence
  Description of Artificial Sequence: Synthetic oligonucleotide
  Target: ATXN2; (-) strand; PAM type: YTN; PAM sequence: TTG
tttgtctcttccagtgtgtg

SEQ ID NO: 59415 - DNA, 20 bp, Artificial Sequence
  Description of Artificial Sequence: Synthetic oligonucleotide
  Target: ATXN2; (-) strand; PAM type: YTN; PAM sequence: TTT
gtttgtctcttccagtgtgt

SEQ ID NO: 59416 - DNA, 20 bp, Artificial Sequence
  Description of Artificial Sequence: Synthetic oligonucleotide
  Target: ATXN2; (-) strand; PAM type: YTN; PAM sequence: CTT
tgtttgtctcttccagtgtg

SEQ ID NO: 59417 - DNA, 20 bp, Artificial Sequence
  Description of Artificial Sequence: Synthetic oligonucleotide
  Target: ATXN2; (-) strand; PAM type: YTN; PAM sequence: CTC
atgagcagacgcatgcgatg

SEQ ID NO: 59418 - DNA, 20 bp, Artificial Sequence
  Description of Artificial Sequence: Synthetic oligonucleotide
  Target: ATXN2; (-) strand; PAM type: YTN; PAM sequence: CTC
agtacggggctcatgagcag

SEQ ID NO: 59419 - DNA, 20 bp, Artificial Sequence
  Description of Artificial Sequence: Synthetic oligonucleotide
  Target: ATXN2; (-) strand; PAM type: YTN; PAM sequence: TTC
agcaactcagtacggggctc

SEQ ID NO: 59420 - DNA, 20 bp, Artificial Sequence
  Description of Artificial Sequence: Synthetic oligonucleotide
  Target: ATXN2; (-) strand; PAM type: YTN; PAM sequence: CTT
cagcaactcagtacggggct

SEQ ID NO: 59421 - DNA, 20 bp, Artificial Sequence
  Description of Artificial Sequence: Synthetic oligonucleotide
  Target: ATXN2; (-) strand; PAM type: YTN; PAM sequence: TTC
ttcagcaactcagtacgggg

SEQ ID NO: 59422 - DNA, 20 bp, Artificial Sequence
  Description of Artificial Sequence: Synthetic oligonucleotide
  Target: ATXN2; (-) strand; PAM type: YTN; PAM sequence: CTT
cttcagcaactcagtacggg

SEQ ID NO: 59423 - DNA, 20 bp, Artificial Sequence
  Description of Artificial Sequence: Synthetic oligonucleotide
  Target: ATXN2; (-) strand; PAM type: YTN; PAM sequence: TTA
gtatcttcttcagcaactca

SEQ ID NO: 59424 - DNA, 20 bp, Artificial Sequence
  Description of Artificial Sequence: Synthetic oligonucleotide
  Target: ATXN2; (-) strand; PAM type: YTN; PAM sequence: TTT
agtatcttcttcagcaactc

SEQ ID NO: 59425 - DNA, 20 bp, Artificial Sequence
  Description of Artificial Sequence: Synthetic oligonucleotide
  Target: ATXN2; (-) strand; PAM type: YTN; PAM sequence: CTG
gtttagtatcttcttcagca

SEQ ID NO: 59426 - DNA, 20 bp, Artificial Sequence
  Description of Artificial Sequence: Synthetic oligonucleotide
  Target: ATXN2; (-) strand; PAM type: YTN; PAM sequence: CTA
gaatgatggcaccaccaaca

SEQ ID NO: 59427 - DNA, 20 bp, Artificial Sequence
  Description of Artificial Sequence: Synthetic oligonucleotide
  Target: ATXN2; (-) strand; PAM type: YTN; PAM sequence: CTG
taatacagggtaatgctaga

SEQ ID NO: 59428 - DNA, 20 bp, Artificial Sequence
  Description of Artificial Sequence: Synthetic oligonucleotide
  Target: ATXN2; (-) strand; PAM type: YTN; PAM sequence: CTA
tagtcctgtaatacagggta

SEQ ID NO: 59429 - DNA, 20 bp, Artificial Sequence
  Description of Artificial Sequence: Synthetic oligonucleotide
  Target: ATXN2; (-) strand; PAM type: YTN; PAM sequence: CTC
atgtctatagtcctgtaata

SEQ ID NO: 59430 - DNA, 20 bp, Artificial Sequence
  Description of Artificial Sequence: Synthetic oligonucleotide
  Target: ATXN2; (-) strand; PAM type: YTN; PAM sequence: TTG
aacacagcatcctcatgtct

SEQ ID NO: 59431 - DNA, 20 bp, Artificial Sequence
  Description of Artificial Sequence: Synthetic oligonucleotide
  Target: ATXN2; (-) strand; PAM type: YTN; PAM sequence: TTT
gaacacagcatcctcatgtc

SEQ ID NO: 59432 - DNA, 20 bp, Artificial Sequence
  Description of Artificial Sequence: Synthetic oligonucleotide
  Target: ATXN2; (-) strand; PAM type: YTN; PAM sequence: TTG
tttgaacacagcatcctcat

SEQ ID NO: 59433 - DNA, 20 bp, Artificial Sequence
  Description of Artificial Sequence: Synthetic oligonucleotide
  Target: ATXN2; (-) strand; PAM type: YTN; PAM sequence: TTT
gtttgaacacagcatcctca

SEQ ID NO: 59434 - DNA, 20 bp, Artificial Sequence
  Description of Artificial Sequence: Synthetic oligonucleotide
  Target: ATXN2; (-) strand; PAM type: YTN; PAM sequence: TTT
tgtttgaacacagcatcctc

SEQ ID NO: 59435 - DNA, 20 bp, Artificial Sequence
  Description of Artificial Sequence: Synthetic oligonucleotide
  Target: ATXN2; (-) strand; PAM type: YTN; PAM sequence: TTT
ttgtttgaacacagcatcct

SEQ ID NO: 59436 - DNA, 20 bp, Artificial Sequence
  Description of Artificial Sequence: Synthetic oligonucleotide
  Target: ATXN2; (-) strand; PAM type: YTN; PAM sequence: TTT
tttgtttgaacacagcatcc

SEQ ID NO: 59437 - DNA, 20 bp, Artificial Sequence
  Description of Artificial Sequence: Synthetic oligonucleotide
  Target: ATXN2; (-) strand; PAM type: YTN; PAM sequence: TTA
ttttttgtttgaacacagca

SEQ ID NO: 59438 - DNA, 20 bp, Artificial Sequence
  Description of Artificial Sequence: Synthetic oligonucleotide
  Target: ATXN2; (-) strand; PAM type: YTN; PAM sequence: TTT
attttttgtttgaacacagc

SEQ ID NO: 59439 - DNA, 20 bp, Artificial Sequence
  Description of Artificial Sequence: Synthetic oligonucleotide
  Target: ATXN2; (-) strand; PAM type: YTN; PAM sequence: CTT
tattttttgtttgaacacag

SEQ ID NO: 59440 - DNA, 20 bp, Artificial Sequence
  Description of Artificial Sequence: Synthetic oligonucleotide
  Target: ATXN2; (-) strand; PAM type: YTN; PAM sequence: TTC
tttattttttgtttgaacac

SEQ ID NO: 59441 - DNA, 20 bp, Artificial Sequence
  Description of Artificial Sequence: Synthetic oligonucleotide
  Target: ATXN2; (-) strand; PAM type: YTN; PAM sequence: TTT
ctttattttttgtttgaaca

SEQ ID NO: 59442 - DNA, 20 bp, Artificial Sequence
  Description of Artificial Sequence: Synthetic oligonucleotide
  Target: ATXN2; (-) strand; PAM type: YTN; PAM sequence: CTT
tctttattttttgtttgaac

SEQ ID NO: 59443 - DNA, 20 bp, Artificial Sequence
  Description of Artificial Sequence: Synthetic oligonucleotide
  Target: ATXN2; (-) strand; PAM type: YTN; PAM sequence: TTA
atgtgctttctttatttttt

SEQ ID NO: 59444 - DNA, 20 bp, Artificial Sequence
  Description of Artificial Sequence: Synthetic oligonucleotide
  Target: ATXN2; (-) strand; PAM type: YTN; PAM sequence: TTG
cagtgttaatgtgctttctt

SEQ ID NO: 59445 - DNA, 20 bp, Artificial Sequence
  Description of Artificial Sequence: Synthetic oligonucleotide
  Target: ATXN2; (-) strand; PAM type: YTN; PAM sequence: TTT
gcagtgttaatgtgctttct

SEQ ID NO: 59446 - DNA, 20 bp, Artificial Sequence
  Description of Artificial Sequence: Synthetic oligonucleotide
  Target: ATXN2; (-) strand; PAM type: YTN; PAM sequence: CTA
tttgcagtgttaatgtgctt

SEQ ID NO: 59447 - DNA, 20 bp, Artificial Sequence
  Description of Artificial Sequence: Synthetic oligonucleotide
  Target: ATXN2; (-) strand; PAM type: YTN; PAM sequence: CTC
tatttgcagtgttaatgtgc

SEQ ID NO: 59448 - DNA, 20 bp, Artificial Sequence
  Description of Artificial Sequence: Synthetic oligonucleotide
  Target: ATXN2; (-) strand; PAM type: YTN; PAM sequence: TTG
gctctatttgcagtgttaat

SEQ ID NO: 59449 - DNA, 20 bp, Artificial Sequence
  Description of Artificial Sequence: Synthetic oligonucleotide
  Target: ATXN2; (-) strand; PAM type: YTN; PAM sequence: CTT
ggctctatttgcagtgttaa

SEQ ID NO: 59450 - DNA, 20 bp, Artificial Sequence
  Description of Artificial Sequence: Synthetic oligonucleotide
  Target: ATXN2; (-) strand; PAM type: YTN; PAM sequence: CTG
cttggctctatttgcagtgt

SEQ ID NO: 59451 - DNA, 20 bp, Artificial Sequence
  Description of Artificial Sequence: Synthetic oligonucleotide
  Target: ATXN2; (-) strand; PAM type: YTN; PAM sequence: CTA
aagtctgcttggctctattt

SEQ ID NO: 59452 - DNA, 20 bp, Artificial Sequence
  Description of Artificial Sequence: Synthetic oligonucleotide
  Target: ATXN2; (-) strand; PAM type: YTN; PAM sequence: TTA
actaaagtctgcttggctct

SEQ ID NO: 59453 - DNA, 20 bp, Artificial Sequence
  Description of Artificial Sequence: Synthetic oligonucleotide
  Target: ATXN2; (-) strand; PAM type: YTN; PAM sequence: CTT
aactaaagtctgcttggctc

SEQ ID NO: 59454 - DNA, 20 bp, Artificial Sequence
  Description of Artificial Sequence: Synthetic oligonucleotide
  Target: ATXN2; (-) strand; PAM type: YTN; PAM sequence: TTA
aaaatcttaactaaagtctg

SEQ ID NO: 59455 - DNA, 20 bp, Artificial Sequence
  Description of Artificial Sequence: Synthetic oligonucleotide
  Target: ATXN2; (-) strand; PAM type: YTN; PAM sequence: CTG
gaaaccatggagttaaaaat

SEQ ID NO: 59456 - DNA, 20 bp, Artificial Sequence
  Description of Artificial Sequence: Synthetic oligonucleotide
  Target: ATXN2; (-) strand; PAM type: YTN; PAM sequence: CTG
gaaatctggaaaccatggag

SEQ ID NO: 59457 - DNA, 20 bp, Artificial Sequence
  Description of Artificial Sequence: Synthetic oligonucleotide
  Target: ATXN2; (-) strand; PAM type: YTN; PAM sequence: TTC
tggaaatctggaaaccatgg

SEQ ID NO: 59458 - DNA, 20 bp, Artificial Sequence
  Description of Artificial Sequence: Synthetic oligonucleotide
  Target: ATXN2; (-) strand; PAM type: YTN; PAM sequence: TTT
ctggaaatctggaaaccatg

SEQ ID NO: 59459 - DNA, 20 bp, Artificial Sequence
  Description of Artificial Sequence: Synthetic oligonucleotide
  Target: ATXN2; (-) strand; PAM type: YTN; PAM sequence: CTG
tttctggaaatctggaaacc

SEQ ID NO: 59460 - DNA, 20 bp, Artificial Sequence
  Description of Artificial Sequence: Synthetic oligonucleotide
  Target: ATXN2; (-) strand; PAM type: YTN; PAM sequence: TTA
cagctgtttctggaaatctg

SEQ ID NO: 59461 - DNA, 20 bp, Artificial Sequence
  Description of Artificial Sequence: Synthetic oligonucleotide
  Target: ATXN2; (-) strand; PAM type: YTN; PAM sequence: TTT
acagctgtttctggaaatct

SEQ ID NO: 59462 - DNA, 20 bp, Artificial Sequence
  Description of Artificial Sequence: Synthetic oligonucleotide
  Target: ATXN2; (-) strand; PAM type: YTN; PAM sequence: TTG
agagtttacagctgtttctg

SEQ ID NO: 59463 - DNA, 20 bp, Artificial Sequence
  Description of Artificial Sequence: Synthetic oligonucleotide
  Target: ATXN2; (-) strand; PAM type: YTN; PAM sequence: TTT
gagagtttacagctgtttct

SEQ ID NO: 59464 - DNA, 20 bp, Artificial Sequence
  Description of Artificial Sequence: Synthetic oligonucleotide
  Target: ATXN2; (-) strand; PAM type: YTN; PAM sequence: TTC
agaggaaacagccaagaaag

SEQ ID NO: 59465 - DNA, 20 bp, Artificial Sequence
  Description of Artificial Sequence: Synthetic oligonucleotide
  Target: ATXN2; (-) strand; PAM type: YTN; PAM sequence: TTG
taagaggttcagaggaaaca

SEQ ID NO: 59466 - DNA, 20 bp, Artificial Sequence
  Description of Artificial Sequence: Synthetic oligonucleotide
  Target: ATXN2; (-) strand; PAM type: YTN; PAM sequence: CTG
atgattgtaagaggttcaga

SEQ ID NO: 59467 - DNA, 20 bp, Artificial Sequence
  Description of Artificial Sequence: Synthetic oligonucleotide
  Target: ATXN2; (-) strand; PAM type: YTN; PAM sequence: TTA
ctgatgattgtaagaggttc

SEQ ID NO: 59468 - DNA, 20 bp, Artificial Sequence
  Description of Artificial Sequence: Synthetic oligonucleotide
  Target: ATXN2; (-) strand; PAM type: YTN; PAM sequence: TTC
gaaggttactgatgattgta

SEQ ID NO: 59469 - DNA, 20 bp, Artificial Sequence
  Description of Artificial Sequence: Synthetic oligonucleotide
  Target: ATXN2; (-) strand; PAM type: YTN; PAM sequence: TTC
aatatatattcgaaggttac

SEQ ID NO: 59470 - DNA, 20 bp, Artificial Sequence
  Description of Artificial Sequence: Synthetic oligonucleotide
  Target: ATXN2; (-) strand; PAM type: YTN; PAM sequence: TTT
caatatatattcgaaggtta

SEQ ID NO: 59471 - DNA, 20 bp, Artificial Sequence
  Description of Artificial Sequence: Synthetic oligonucleotide
  Target: ATXN2; (-) strand; PAM type: YTN; PAM sequence: TTT
tcaatatatattcgaaggtt

SEQ ID NO: 59472 - DNA, 20 bp, Artificial Sequence
  Description of Artificial Sequence: Synthetic oligonucleotide
  Target: ATXN2; (-) strand; PAM type: YTN; PAM sequence: CTT
ttcaatatatattcgaaggt

SEQ ID NO: 59473 - DNA, 20 bp, Artificial Sequence
  Description of Artificial Sequence: Synthetic oligonucleotide
  Target: ATXN2; (-) strand; PAM type: YTN; PAM sequence: TTG
gggacccttttcaatatata

SEQ ID NO: 59474 - DNA, 20 bp, Artificial Sequence
  Description of Artificial Sequence: Synthetic oligonucleotide
  Target: ATXN2; (-) strand; PAM type: YTN; PAM sequence: CTT
ggggacccttttcaatatat

SEQ ID NO: 59475 - DNA, 20 bp, Artificial Sequence
  Description of Artificial Sequence: Synthetic oligonucleotide
  Target: ATXN2; (-) strand; PAM type: YTN; PAM sequence: CTA
aggacttggggacccttttc

SEQ ID NO: 59476 - DNA, 20 bp, Artificial Sequence
  Description of Artificial Sequence: Synthetic oligonucleotide
  Target: ATXN2; (-) strand; PAM type: YTN; PAM sequence: TTG
tgtgatggtagggtagatag

SEQ ID NO: 59477 - DNA, 20 bp, Artificial Sequence
  Description of Artificial Sequence: Synthetic oligonucleotide
  Target: ATXN2; (-) strand; PAM type: YTN; PAM sequence: TTT
gtgtgatggtagggtagata

SEQ ID NO: 59478 - DNA, 20 bp, Artificial Sequence
  Description of Artificial Sequence: Synthetic oligonucleotide
  Target: ATXN2; (-) strand; PAM type: YTN; PAM sequence: TTT
tgtgtgatggtagggtagat

SEQ ID NO: 59479 - DNA, 20 bp, Artificial Sequence
  Description of Artificial Sequence: Synthetic oligonucleotide
  Target: ATXN2; (-) strand; PAM type: YTN; PAM sequence: CTT
ttgtgtgatggtagggtaga

SEQ ID NO: 59480 - DNA, 20 bp, Artificial Sequence
  Description of Artificial Sequence: Synthetic oligonucleotide
  Target: ATXN2; (-) strand; PAM type: YTN; PAM sequence: TTG
cttttgtgtgatggtagggt

SEQ ID NO: 59481 - DNA, 20 bp, Artificial Sequence
  Description of Artificial Sequence: Synthetic oligonucleotide
  Target: ATXN2; (-) strand; PAM type: YTN; PAM sequence: TTT
gcttttgtgtgatggtaggg

SEQ ID NO: 59482 - DNA, 20 bp, Artificial Sequence
  Description of Artificial Sequence: Synthetic oligonucleotide
  Target: ATXN2; (-) strand; PAM type: YTN; PAM sequence: TTT
tgcttttgtgtgatggtagg

SEQ ID NO: 59483 - DNA, 20 bp, Artificial Sequence
  Description of Artificial Sequence: Synthetic oligonucleotide
  Target: ATXN2; (-) strand; PAM type: YTN; PAM sequence: TTT
ttgcttttgtgtgatggtag

SEQ ID NO: 59484 - DNA, 20 bp, Artificial Sequence
  Description of Artificial Sequence: Synthetic oligonucleotide
  Target: ATXN2; (-) strand; PAM type: YTN; PAM sequence: TTA
taatttttgcttttgtgtga

SEQ ID NO: 59485 - DNA, 20 bp, Artificial Sequence
  Description of Artificial Sequence: Synthetic oligonucleotide
  Target: ATXN2; (-) strand; PAM type: YTN; PAM sequence: TTT
ataatttttgcttttgtgtg

SEQ ID NO: 59486 - DNA, 20 bp, Artificial Sequence
  Description of Artificial Sequence: Synthetic oligonucleotide
  Target: ATXN2; (-) strand; PAM type: YTN; PAM sequence: CTT
tataatttttgcttttgtgt

SEQ ID NO: 59487 - DNA, 20 bp, Artificial Sequence
  Description of Artificial Sequence: Synthetic oligonucleotide
  Target: ATXN2; (-) strand; PAM type: YTN; PAM sequence: TTC
ctttataatttttgcttttg

SEQ ID NO: 59488 - DNA, 20 bp, Artificial Sequence
  Description of Artificial Sequence: Synthetic oligonucleotide
  Target: ATXN2; (-) strand; PAM type: YTN; PAM sequence: TTT
cctttataatttttgctttt

SEQ ID NO: 59489 - DNA, 20 bp, Artificial Sequence
  Description of Artificial Sequence: Synthetic oligonucleotide
  Target: ATXN2; (-) strand; PAM type: YTN; PAM sequence: TTT
tcctttataatttttgcttt

SEQ ID NO: 59490 - DNA, 20 bp, Artificial Sequence
  Description of Artificial Sequence: Synthetic oligonucleotide
  Target: ATXN2; (-) strand; PAM type: YTN; PAM sequence: TTA
atatggtaaagggattttcc

SEQ ID NO: 59491 - DNA, 20 bp, Artificial Sequence
  Description of Artificial Sequence: Synthetic oligonucleotide
  Target: ATXN2; (-) strand; PAM type: YTN; PAM sequence: TTT
aatatggtaaagggattttc

SEQ ID NO: 59492 - DNA, 20 bp, Artificial Sequence
  Description of Artificial Sequence: Synthetic oligonucleotide
  Target: ATXN2; (-) strand; PAM type: YTN; PAM sequence: TTT
taatatggtaaagggatttt

SEQ ID NO: 59493 - DNA, 20 bp, Artificial Sequence
  Description of Artificial Sequence: Synthetic oligonucleotide
  Target: ATXN2; (-) strand; PAM type: YTN; PAM sequence: CTT
ttaatatggtaaagggattt

SEQ ID NO: 59494 - DNA, 20 bp, Artificial Sequence
  Description of Artificial Sequence: Synthetic oligonucleotide
  Target: ATXN2; (-) strand; PAM type: YTN; PAM sequence: TTG
taccatataaaaaaactttt

SEQ ID NO: 59495 - DNA, 20 bp, Artificial Sequence
  Description of Artificial Sequence: Synthetic oligonucleotide
  Target: ATXN2; (-) strand; PAM type: YTN; PAM sequence: TTT
gtaccatataaaaaaacttt

SEQ ID NO: 59496 - DNA, 20 bp, Artificial Sequence
  Description of Artificial Sequence: Synthetic oligonucleotide
  Target: ATXN2; (-) strand; PAM type: YTN; PAM sequence: TTT
tgtaccatataaaaaaactt

SEQ ID NO: 59497 - DNA, 20 bp, Artificial Sequence
  Description of Artificial Sequence: Synthetic oligonucleotide
  Target: ATXN2; (-) strand; PAM type: YTN; PAM sequence: TTT
ttgtaccatataaaaaaact

SEQ ID NO: 59498 - DNA, 20 bp, Artificial Sequence
  Description of Artificial Sequence: Synthetic oligonucleotide
  Target: ATXN2; (-) strand; PAM type: YTN; PAM sequence: TTA
atttttgtaccatataaaaa

SEQ ID NO: 59499 - DNA, 20 bp, Artificial Sequence
  Description of Artificial Sequence: Synthetic oligonucleotide
  Target: ATXN2; (-) strand; PAM type: YTN; PAM sequence: CTT
aatttttgtaccatataaaa

SEQ ID NO: 59500 - DNA, 20 bp, Artificial Sequence
  Description of Artificial Sequence: Synthetic oligonucleotide
  Target: ATXN2; (-) strand; PAM type: YTN; PAM sequence: CTC
ttaatttttgtaccatataa

SEQ ID NO: 59501 - DNA, 20 bp, Artificial Sequence
  Description of Artificial Sequence: Synthetic oligonucleotide
  Target: ATXN2; (-) strand; PAM type: YTN; PAM sequence: CTA
actcttaatttttgtaccat

SEQ ID NO: 59502 - DNA, 20 bp, Artificial Sequence
  Description of Artificial Sequence: Synthetic oligonucleotide
  Target: ATXN2; (-) strand; PAM type: YTN; PAM sequence: CTG
gtaaggcctaactcttaatt

SEQ ID NO: 59503 - DNA, 20 bp, Artificial Sequence
  Description of Artificial Sequence: Synthetic oligonucleotide
  Target: ATXN2; (-) strand; PAM type: YTN; PAM sequence: CTC
aggtaaggctggtaaggcct

SEQ ID NO: 59504 - DNA, 20 bp, Artificial Sequence
  Description of Artificial Sequence: Synthetic oligonucleotide
  Target: ATXN2; (-) strand; PAM type: YTN; PAM sequence: TTA
tcagtctcaggtaaggctgg

SEQ ID NO: 59505 - DNA, 20 bp, Artificial Sequence
  Description of Artificial Sequence: Synthetic oligonucleotide
  Target: ATXN2; (-) strand; PAM type: YTN; PAM sequence: TTC
agcatgtgccacattatcag

SEQ ID NO: 59506 - DNA, 20 bp, Artificial Sequence
  Description of Artificial Sequence: Synthetic oligonucleotide
  Target: ATXN2; (-) strand; PAM type: YTN; PAM sequence: TTG
ttcagcatgtgccacattat

SEQ ID NO: 59507 - DNA, 20 bp, Artificial Sequence
  Description of Artificial Sequence: Synthetic oligonucleotide
  Target: ATXN2; (-) strand; PAM type: YTN; PAM sequence: CTT
gttcagcatgtgccacatta

SEQ ID NO: 59508 - DNA, 20 bp, Artificial Sequence
  Description of Artificial Sequence: Synthetic oligonucleotide
  Target: ATXN2; (-) strand; PAM type: YTN; PAM sequence: TTC
ccaaatcagccccttgttca

SEQ ID NO: 59509 - DNA, 20 bp, Artificial Sequence
  Description of Artificial Sequence: Synthetic oligonucleotide
  Target: ATXN2; (-) strand; PAM type: YTN; PAM sequence: CTC
agcagttcccaaatcagccc

SEQ ID NO: 59510 - DNA, 20 bp, Artificial Sequence
  Description of Artificial Sequence: Synthetic oligonucleotide
  Target: ATXN2; (-) strand; PAM type: YTN; PAM sequence: CTA
cagtcctcagcagttcccaa

SEQ ID NO: 59511 - DNA, 20 bp, Artificial Sequence
  Description of Artificial Sequence: Synthetic oligonucleotide
  Target: ATXN2; (-) strand; PAM type: YTN; PAM sequence: TTG
cctacagtcctcagcagttc

SEQ ID NO: 59512 - DNA, 20 bp, Artificial Sequence
  Description of Artificial Sequence: Synthetic oligonucleotide
  Target: ATXN2; (-) strand; PAM type: YTN; PAM sequence: CTC
cacgcaatatgttgcctaca

SEQ ID NO: 59513 - DNA, 20 bp, Artificial Sequence
  Description of Artificial Sequence: Synthetic oligonucleotide
  Target: ATXN2; (-) strand; PAM type: YTN; PAM sequence: TTA
ctccacgcaatatgttgcct

SEQ ID NO: 59514 - DNA, 20 bp, Artificial Sequence
  Description of Artificial Sequence: Synthetic oligonucleotide
  Target: ATXN2; (-) strand; PAM type: YTN; PAM sequence: CTT
actccacgcaatatgttgcc

SEQ ID NO: 59515 - DNA, 20 bp, Artificial Sequence
  Description of Artificial Sequence: Synthetic oligonucleotide
  Target: ATXN2; (-) strand; PAM type: YTN; PAM sequence: TTG
cagccaccccaccagcttac

SEQ ID NO: 59516 - DNA, 20 bp, Artificial Sequence
  Description of Artificial Sequence: Synthetic oligonucleotide
  Target: ATXN2; (-) strand; PAM type: YTN; PAM sequence: CTG
cagtaccaaatatgccccaa

SEQ ID NO: 59517 - DNA, 20 bp, Artificial Sequence
  Description of Artificial Sequence: Synthetic oligonucleotide
  Target: ATXN2; (-) strand; PAM type: YTN; PAM sequence: TTC
tgcagtaccaaatatgcccc

SEQ ID NO: 59518 - DNA, 20 bp, Artificial Sequence
  Description of Artificial Sequence: Synthetic oligonucleotide
  Target: ATXN2; (-) strand; PAM type: YTN; PAM sequence: TTT
ctgcagtaccaaatatgccc

SEQ ID NO: 59519 - DNA, 20 bp, Artificial Sequence
  Description of Artificial Sequence: Synthetic oligonucleotide
  Target: ATXN2; (-) strand; PAM type: YTN; PAM sequence: TTT
tctgcagtaccaaatatgcc

SEQ ID NO: 59520 - DNA, 20 bp, Artificial Sequence
  Description of Artificial Sequence: Synthetic oligonucleotide
  Target: ATXN2; (-) strand; PAM type: YTN; PAM sequence: TTT
ttctgcagtaccaaatatgc

SEQ ID NO: 59521 - DNA, 20 bp, Artificial Sequence
  Description of Artificial Sequence: Synthetic oligonucleotide
  Target: ATXN2; (-) strand; PAM type: YTN; PAM sequence: TTT
tttctgcagtaccaaatatg

SEQ ID NO: 59522 - DNA, 20 bp, Artificial Sequence
  Description of Artificial Sequence: Synthetic oligonucleotide
  Target: ATXN2; (-) strand; PAM type: YTN; PAM sequence: TTT
ttttctgcagtaccaaatat

SEQ ID NO: 59523 - DNA, 20 bp, Artificial Sequence
  Description of Artificial Sequence: Synthetic oligonucleotide
  Target: ATXN2; (-) strand; PAM type: YTN; PAM sequence: TTT
tttttctgcagtaccaaata

SEQ ID NO: 59524 - DNA, 20 bp, Artificial Sequence
  Description of Artificial Sequence: Synthetic oligonucleotide
  Target: ATXN2; (-) strand; PAM type: YTN; PAM sequence: CTT
ttttttctgcagtaccaaat

SEQ ID NO: 59525 - DNA, 20 bp, Artificial Sequence
  Description of Artificial Sequence: Synthetic oligonucleotide
  Target: ATXN2; (-) strand; PAM type: YTN; PAM sequence: CTG
cttttttttctgcagtacca

SEQ ID NO: 59526 - DNA, 20 bp, Artificial Sequence
  Description of Artificial Sequence: Synthetic oligonucleotide
  Target: ATXN2; (-) strand; PAM type: YTN; PAM sequence: TTA
ataggcagtctgcttttttt

SEQ ID NO: 59527 - DNA, 20 bp, Artificial Sequence
  Description of Artificial Sequence: Synthetic oligonucleotide
  Target: ATXN2; (-) strand; PAM type: YTN; PAM sequence: TTT
aataggcagtctgctttttt

SEQ ID NO: 59528 - DNA, 20 bp, Artificial Sequence
  Description of Artificial Sequence: Synthetic oligonucleotide
  Target: ATXN2; (-) strand; PAM type: YTN; PAM sequence: CTG
tttaataggcagtctgcttt

SEQ ID NO: 59529 - DNA, 20 bp, Artificial Sequence
  Description of Artificial Sequence: Synthetic oligonucleotide
  Target: ATXN2; (-) strand; PAM type: YTN; PAM sequence: CTG
tggagatactgtttaatagg

SEQ ID NO: 59530 - DNA, 20 bp, Artificial Sequence
  Description of Artificial Sequence: Synthetic oligonucleotide
  Target: ATXN2; (-) strand; PAM type: YTN; PAM sequence: TTA
tgctgtggagatactgttta

SEQ ID NO: 59531 - DNA, 20 bp, Artificial Sequence
  Description of Artificial Sequence: Synthetic oligonucleotide
  Target: ATXN2; (-) strand; PAM type: YTN; PAM sequence: CTA
gaccatgtgaacacatgtat

SEQ ID NO: 59532 - DNA, 20 bp, Artificial Sequence
  Description of Artificial Sequence: Synthetic oligonucleotide
  Target: ATXN2; (-) strand; PAM type: YTN; PAM sequence: CTC
ctagaccatgtgaacacatg

SEQ ID NO: 59533 - DNA, 20 bp, Artificial Sequence
  Description of Artificial Sequence: Synthetic oligonucleotide
  Target: ATXN2; (-) strand; PAM type: YTN; PAM sequence: TTC
agagcctcctagaccatgtg

SEQ ID NO: 59534 - DNA, 20 bp, Artificial Sequence
  Description of Artificial Sequence: Synthetic oligonucleotide
  Target: ATXN2; (-) strand; PAM type: YTN; PAM sequence: TTC
agggtcaaatcattcagagc

SEQ ID NO: 59535 - DNA, 20 bp, Artificial Sequence
  Description of Artificial Sequence: Synthetic oligonucleotide
  Target: ATXN2; (-) strand; PAM type: YTN; PAM sequence: CTA
gcatgcatgataggaaaata

SEQ ID NO: 59536 - DNA, 20 bp, Artificial Sequence
  Description of Artificial Sequence: Synthetic oligonucleotide
  Target: ATXN2; (-) strand; PAM type: YTN; PAM sequence: CTG
aggactagcatgcatgatag

SEQ ID NO: 59537 - DNA, 20 bp, Artificial Sequence
  Description of Artificial Sequence: Synthetic oligonucleotide
  Target: ATXN2; (-) strand; PAM type: YTN; PAM sequence: TTG
aggctgaggactagcatgca

SEQ ID NO: 59538 - DNA, 20 bp, Artificial Sequence
  Description of Artificial Sequence: Synthetic oligonucleotide
  Target: ATXN2; (-) strand; PAM type: YTN; PAM sequence: TTT
gaggctgaggactagcatgc

SEQ ID NO: 59539 - DNA, 20 bp, Artificial Sequence
  Description of Artificial Sequence: Synthetic oligonucleotide
  Target: ATXN2; (-) strand; PAM type: YTN; PAM sequence: CTG
gtgtttgaggctgaggacta

SEQ ID NO: 59540 - DNA, 20 bp, Artificial Sequence
  Description of Artificial Sequence: Synthetic oligonucleotide
  Target: ATXN2; (-) strand; PAM type: YTN; PAM sequence: TTG
ggaactggtgtttgaggctg

SEQ ID NO: 59541 - DNA, 20 bp, Artificial Sequence
  Description of Artificial Sequence: Synthetic oligonucleotide
  Target: ATXN2; (-) strand; PAM type: YTN; PAM sequence: TTT
gggaactggtgtttgaggct

SEQ ID NO: 59542 - DNA, 20 bp, Artificial Sequence
  Description of Artificial Sequence: Synthetic oligonucleotide
  Target: ATXN2; (-) strand; PAM type: YTN; PAM sequence: CTG
ggatttgggaactggtgttt

SEQ ID NO: 59543 - DNA, 20 bp, Artificial Sequence
  Description of Artificial Sequence: Synthetic oligonucleotide
  Target: ATXN2; (-) strand; PAM type: YTN; PAM sequence: TTA
tcccagctgggatttgggaa

SEQ ID NO: 59544 - DNA, 20 bp, Artificial Sequence
  Description of Artificial Sequence: Synthetic oligonucleotide
  Target: ATXN2; (-) strand; PAM type: YTN; PAM sequence: CTG
aaggatgaagcagaattatc

SEQ ID NO: 59545 - DNA, 20 bp, Artificial Sequence
  Description of Artificial Sequence: Synthetic oligonucleotide
  Target: ATXN2; (-) strand; PAM type: YTN; PAM sequence: CTG
acacctgaaggatgaagcag

SEQ ID NO: 59546 - DNA, 20 bp, Artificial Sequence
  Description of Artificial Sequence: Synthetic oligonucleotide
  Target: ATXN2; (-) strand; PAM type: YTN; PAM sequence: TTC
aagctgacacctgaaggatg

SEQ ID NO: 59547 - DNA, 20 bp, Artificial Sequence
  Description of Artificial Sequence: Synthetic oligonucleotide
  Target: ATXN2; (-) strand; PAM type: YTN; PAM sequence: TTT
caagctgacacctgaaggat

SEQ ID NO: 59548 - DNA, 20 bp, Artificial Sequence
  Description of Artificial Sequence: Synthetic oligonucleotide
  Target: ATXN2; (-) strand; PAM type: YTN; PAM sequence: CTT
tcaagctgacacctgaagga

SEQ ID NO: 59549 - DNA, 20 bp, Artificial Sequence
  Description of Artificial Sequence: Synthetic oligonucleotide
  Target: ATXN2; (-) strand; PAM type: YTN; PAM sequence: TTG
ctttcaagctgacacctgaa

SEQ ID NO: 59550 - DNA, 20 bp, Artificial Sequence
  Description of Artificial Sequence: Synthetic oligonucleotide
  Target: ATXN2; (-) strand; PAM type: YTN; PAM sequence: CTG
aggaagttgctttcaagctg

SEQ ID NO: 59551 - DNA, 20 bp, Artificial Sequence
  Description of Artificial Sequence: Synthetic oligonucleotide
  Target: ATXN2; (-) strand; PAM type: YTN; PAM sequence: CTC
tgaggaagttgctttcaagc

SEQ ID NO: 59552 - DNA, 20 bp, Artificial Sequence
  Description of Artificial Sequence: Synthetic oligonucleotide
  Target: ATXN2; (-) strand; PAM type: YTN; PAM sequence: CTG
agggccatgagagaaagtcc

SEQ ID NO: 59553 - DNA, 20 bp, Artificial Sequence
  Description of Artificial Sequence: Synthetic oligonucleotide
  Target: ATXN2; (-) strand; PAM type: YTN; PAM sequence: TTG
atcaagtctgagggccatga

SEQ ID NO: 59554 - DNA, 20 bp, Artificial Sequence
  Description of Artificial Sequence: Synthetic oligonucleotide
  Target: ATXN2; (-) strand; PAM type: YTN; PAM sequence: CTT
gatcaagtctgagggccatg

SEQ ID NO: 59555 - DNA, 20 bp, Artificial Sequence
  Description of Artificial Sequence: Synthetic oligonucleotide
  Target: ATXN2; (-) strand; PAM type: YTN; PAM sequence: TTA
cagggacttgatcaagtctg

SEQ ID NO: 59556 - DNA, 20 bp, Artificial Sequence
  Description of Artificial Sequence: Synthetic oligonucleotide
  Target: ATXN2; (-) strand; PAM type: YTN; PAM sequence: CTG
ttacagggacttgatcaagt

SEQ ID NO: 59557 - DNA, 20 bp, Artificial Sequence
  Description of Artificial Sequence: Synthetic oligonucleotide
  Target: ATXN2; (-) strand; PAM type: YTN; PAM sequence: CTG
tgagagtctgttacagggac

SEQ ID NO: 59558 - DNA, 20 bp, Artificial Sequence
  Description of Artificial Sequence: Synthetic oligonucleotide
  Target: ATXN2; (-) strand; PAM type: YTN; PAM sequence: TTC
ataatgctgtgagagtctgt

SEQ ID NO: 59559 - DNA, 20 bp, Artificial Sequence
  Description of Artificial Sequence: Synthetic oligonucleotide
  Target: ATXN2; (-) strand; PAM type: YTN; PAM sequence: TTT
cataatgctgtgagagtctg

SEQ ID NO: 59560 - DNA, 20 bp, Artificial Sequence
  Description of Artificial Sequence: Synthetic oligonucleotide
  Target: ATXN2; (-) strand; PAM type: YTN; PAM sequence: CTC
aaaatgaatgcagtgcccgt

SEQ ID NO: 59561 - DNA, 20 bp, Artificial Sequence
  Description of Artificial Sequence: Synthetic oligonucleotide
  Target: ATXN2; (-) strand; PAM type: YTN; PAM sequence: TTC
tcaaaatgaatgcagtgccc

SEQ ID NO: 59562 - DNA, 20 bp, Artificial Sequence
  Description of Artificial Sequence: Synthetic oligonucleotide
  Target: ATXN2; (-) strand; PAM type: YTN; PAM sequence: TTT
ctcaaaatgaatgcagtgcc

SEQ ID NO: 59563 - DNA, 20 bp, Artificial Sequence
  Description of Artificial Sequence: Synthetic oligonucleotide
  Target: ATXN2; (-) strand; PAM type: YTN; PAM sequence: TTT
tctcaaaatgaatgcagtgc

SEQ ID NO: 59564 - DNA, 20 bp, Artificial Sequence
  Description of Artificial Sequence: Synthetic oligonucleotide
  Target: ATXN2; (-) strand; PAM type: YTN; PAM sequence: TTT
ttctcaaaatgaatgcagtg

SEQ ID NO: 59565 - DNA, 20 bp, Artificial Sequence
  Description of Artificial Sequence: Synthetic oligonucleotide
  Target: ATXN2; (-) strand; PAM type: YTN; PAM sequence: TTG
tttttctcaaaatgaatgca

SEQ ID NO: 59566 - DNA, 20 bp, Artificial Sequence
  Description of Artificial Sequence: Synthetic oligonucleotide
  Target: ATXN2; (-) strand; PAM type: YTN; PAM sequence: TTT
gtttttctcaaaatgaatgc

SEQ ID NO: 59567 - DNA, 20 bp, Artificial Sequence
  Description of Artificial Sequence: Synthetic oligonucleotide
  Target: ATXN2; (-) strand; PAM type: YTN; PAM sequence: CTT
tgtttttctcaaaatgaatg

SEQ ID NO: 59568 - DNA, 20 bp, Artificial Sequence
  Description of Artificial Sequence: Synthetic oligonucleotide
  Target: ATXN2; (-) strand; PAM type: YTN; PAM sequence: TTG
gtcatgcctttgtttttctc

SEQ ID NO: 59569 - DNA, 20 bp, Artificial Sequence
  Description of Artificial Sequence: Synthetic oligonucleotide
  Target: ATXN2; (-) strand; PAM type: YTN; PAM sequence: TTT
ggtcatgcctttgtttttct

SEQ ID NO: 59570 - DNA, 20 bp, Artificial Sequence
  Description of Artificial Sequence: Synthetic oligonucleotide
  Target: ATXN2; (-) strand; PAM type: YTN; PAM sequence: CTT
tggtcatgcctttgtttttc

SEQ ID NO: 59571 - DNA, 20 bp, Artificial Sequence
  Description of Artificial Sequence: Synthetic oligonucleotide
  Target: ATXN2; (-) strand; PAM type: YTN; PAM sequence: CTC
tttggtcatgcctttgtttt

SEQ ID NO: 59572 - DNA, 20 bp, Artificial Sequence
  Description of Artificial Sequence: Synthetic oligonucleotide
  Target: ATXN2; (-) strand; PAM type: YTN; PAM sequence: TTG
gctctttggtcatgcctttg

SEQ ID NO: 59573 - DNA, 20 bp, Artificial Sequence
  Description of Artificial Sequence: Synthetic oligonucleotide
  Target: ATXN2; (-) strand; PAM type: YTN; PAM sequence: TTT
ggctctttggtcatgccttt

SEQ ID NO: 59574 - DNA, 20 bp, Artificial Sequence
  Description of Artificial Sequence: Synthetic oligonucleotide
  Target: ATXN2; (-) strand; PAM type: YTN; PAM sequence: TTT
tggctctttggtcatgcctt

SEQ ID NO: 59575 - DNA, 20 bp, Artificial Sequence
  Description of Artificial Sequence: Synthetic oligonucleotide
  Target: ATXN2; (-) strand; PAM type: YTN; PAM sequence: CTG
ttttggctctttggtcatgc

SEQ ID NO: 59576 - DNA, 20 bp, Artificial Sequence
  Description of Artificial Sequence: Synthetic oligonucleotide
  Target: ATXN2; (-) strand; PAM type: YTN; PAM sequence: TTG
gatctgttttggctctttgg

SEQ ID NO: 59577 - DNA, 20 bp, Artificial Sequence
  Description of Artificial Sequence: Synthetic oligonucleotide
  Target: ATXN2; (-) strand; PAM type: YTN; PAM sequence: TTA
gtgttggatctgttttggct

SEQ ID NO: 59578 - DNA, 20 bp, Artificial Sequence
  Description of Artificial Sequence: Synthetic oligonucleotide
  Target: ATXN2; (-) strand; PAM type: YTN; PAM sequence: TTA
aggaagatagaaagttagtg

SEQ ID NO: 59579 - DNA, 20 bp, Artificial Sequence
  Description of Artificial Sequence: Synthetic oligonucleotide
  Target: ATXN2; (-) strand; PAM type: YTN; PAM sequence: TTG
gaaattaaggaagatagaaa

SEQ ID NO: 59580 - DNA, 20 bp, Artificial Sequence
  Description of Artificial Sequence: Synthetic oligonucleotide
  Target: ATXN2; (-) strand; PAM type: YTN; PAM sequence: TTC
agtggttggaaattaaggaa

SEQ ID NO: 59581 - DNA, 20 bp, Artificial Sequence
  Description of Artificial Sequence: Synthetic oligonucleotide
  Target: ATXN2; (-) strand; PAM type: YTN; PAM sequence: TTA
caaggattcagtggttggaa

SEQ ID NO: 59582 - DNA, 20 bp, Artificial Sequence
  Description of Artificial Sequence: Synthetic oligonucleotide
  Target: ATXN2; (-) strand; PAM type: YTN; PAM sequence: TTG
agaaagaatgggaagtgtta

SEQ ID NO: 59583 - DNA, 20 bp, Artificial Sequence
  Description of Artificial Sequence: Synthetic oligonucleotide
  Target: ATXN2; (-) strand; PAM type: YTN; PAM sequence: TTT
gagaaagaatgggaagtgtt

SEQ ID NO: 59584 - DNA, 20 bp, Artificial Sequence
  Description of Artificial Sequence: Synthetic oligonucleotide
  Target: ATXN2; (-) strand; PAM type: YTN; PAM sequence: CTG
ggtttgagaaagaatgggaa

SEQ ID NO: 59585 - DNA, 20 bp, Artificial Sequence
  Description of Artificial Sequence: Synthetic oligonucleotide
  Target: ATXN2; (-) strand; PAM type: YTN; PAM sequence: TTA
tactgggtttgagaaagaat

SEQ ID NO: 59586 - DNA, 20 bp, Artificial Sequence
  Description of Artificial Sequence: Synthetic oligonucleotide
  Target: ATXN2; (-) strand; PAM type: YTN; PAM sequence: CTG
tgttatactgggtttgagaa

SEQ ID NO: 59587 - DNA, 20 bp, Artificial Sequence
  Description of Artificial Sequence: Synthetic oligonucleotide
  Target: ATXN2; (-) strand; PAM type: YTN; PAM sequence: CTA
catggtgctgtgttatactg

SEQ ID NO: 59588 - DNA, 20 bp, Artificial Sequence
  Description of Artificial Sequence: Synthetic oligonucleotide
  Target: ATXN2; (-) strand; PAM type: YTN; PAM sequence: CTG
gtatatgctacatggtgctg

SEQ ID NO: 59589 - DNA, 20 bp, Artificial Sequence
  Description of Artificial Sequence: Synthetic oligonucleotide
  Target: ATXN2; (-) strand; PAM type: YTN; PAM sequence: TTA
gaaacctggtatatgctaca

SEQ ID NO: 59590 - DNA, 20 bp, Artificial Sequence
  Description of Artificial Sequence: Synthetic oligonucleotide
  Target: ATXN2; (-) strand; PAM type: YTN; PAM sequence: TTT
agaaacctggtatatgctac

SEQ ID NO: 59591 - DNA, 20 bp, Artificial Sequence
  Description of Artificial Sequence: Synthetic oligonucleotide
  Target: ATXN2; (-) strand; PAM type: YTN; PAM sequence: TTA
tttagaaacctggtatatgc

SEQ ID NO: 59592 - DNA, 20 bp, Artificial Sequence
  Description of Artificial Sequence: Synthetic oligonucleotide
  Target: ATXN2; (-) strand; PAM type: YTN; PAM sequence: CTA
ttatttagaaacctggtata

SEQ ID NO: 59593 - DNA, 20 bp, Artificial Sequence
  Description of Artificial Sequence: Synthetic oligonucleotide
  Target: ATXN2; (-) strand; PAM type: YTN; PAM sequence: TTA
aaagaactattatttagaaa

SEQ ID NO: 59594 - DNA, 20 bp, Artificial Sequence
  Description of Artificial Sequence: Synthetic oligonucleotide
  Target: ATXN2; (-) strand; PAM type: YTN; PAM sequence: TTT
aaaagaactattatttagaa

SEQ ID NO: 59595 - DNA, 20 bp, Artificial Sequence
  Description of Artificial Sequence: Synthetic oligonucleotide
  Target: ATXN2; (-) strand; PAM type: YTN; PAM sequence: TTT
taaaagaactattatttaga

SEQ ID NO: 59596 - DNA, 20 bp, Artificial Sequence
  Description of Artificial Sequence: Synthetic oligonucleotide
  Target: ATXN2; (-) strand; PAM type: YTN; PAM sequence: CTT
ttaaaagaactattatttag

SEQ ID NO: 59597 - DNA, 20 bp, Artificial Sequence
  Description of Artificial Sequence: Synthetic oligonucleotide
  Target: ATXN2; (-) strand; PAM type: YTN; PAM sequence: TTA
agataagacataaagtaatc

SEQ ID NO: 59598 - DNA, 20 bp, Artificial Sequence
  Description of Artificial Sequence: Synthetic oligonucleotide
  Target: ATXN2; (-) strand; PAM type: YTN; PAM sequence: CTG
tgtggattaagataagacat

SEQ ID NO: 59599 - DNA, 20 bp, Artificial Sequence
  Description of Artificial Sequence: Synthetic oligonucleotide
  Target: ATXN2; (-) strand; PAM type: YTN; PAM sequence: TTA
catgcagaccacctgtgtgg

SEQ ID NO: 59600 - DNA, 20 bp, Artificial Sequence
  Description of Artificial Sequence: Synthetic oligonucleotide
  Target: ATXN2; (-) strand; PAM type: YTN; PAM sequence: CTT
acatgcagaccacctgtgtg

SEQ ID NO: 59601 - DNA, 20 bp, Artificial Sequence
  Description of Artificial Sequence: Synthetic oligonucleotide
  Target: ATXN2; (-) strand; PAM type: YTN; PAM sequence: TTG
taacagggcgaggcccttac

SEQ ID NO: 59602 - DNA, 20 bp, Artificial Sequence
  Description of Artificial Sequence: Synthetic oligonucleotide
  Target: ATXN2; (-) strand; PAM type: YTN; PAM sequence: CTA
gagttgtaacagggcgaggc

SEQ ID NO: 59603 - DNA, 20 bp, Artificial Sequence
  Description of Artificial Sequence: Synthetic oligonucleotide
  Target: ATXN2; (-) strand; PAM type: YTN; PAM sequence: TTA
actagagttgtaacagggcg

SEQ ID NO: 59604 - DNA, 20 bp, Artificial Sequence
  Description of Artificial Sequence: Synthetic oligonucleotide
  Target: ATXN2; (-) strand; PAM type: YTN; PAM sequence: CTT
aactagagttgtaacagggc

SEQ ID NO: 59605 - DNA, 20 bp, Artificial Sequence
  Description of Artificial Sequence: Synthetic oligonucleotide
  Target: ATXN2; (-) strand; PAM type: YTN; PAM sequence: TTC
ttaactagagttgtaacagg

SEQ ID NO: 59606 - DNA, 20 bp, Artificial Sequence
  Description of Artificial Sequence: Synthetic oligonucleotide
  Target: ATXN2; (-) strand; PAM type: YTN; PAM sequence: CTG
aattcttaactagagttgta

SEQ ID NO: 59607 - DNA, 20 bp, Artificial Sequence
  Description of Artificial Sequence: Synthetic oligonucleotide
  Target: ATXN2; (-) strand; PAM type: YTN; PAM sequence: TTG
agctgaattcttaactagag

SEQ ID NO: 59608 - DNA, 20 bp, Artificial Sequence
  Description of Artificial Sequence: Synthetic oligonucleotide
  Target: ATXN2; (-) strand; PAM type: YTN; PAM sequence: CTC
acatgggagatgacagttga

SEQ ID NO: 59609 - DNA, 20 bp, Artificial Sequence
  Description of Artificial Sequence: Synthetic oligonucleotide
  Target: ATXN2; (-) strand; PAM type: YTN; PAM sequence: CTG
gaaaaaaacctcacatggga

SEQ ID NO: 59610 - DNA, 20 bp, Artificial Sequence
  Description of Artificial Sequence: Synthetic oligonucleotide
  Target: ATXN2; (-) strand; PAM type: YTN; PAM sequence: CTG
gaggaactggaaaaaaacct

SEQ ID NO: 59611 - DNA, 20 bp, Artificial Sequence
  Description of Artificial Sequence: Synthetic oligonucleotide
  Target: ATXN2; (-) strand; PAM type: YTN; PAM sequence: CTC
gtgctggaggaactggaaaa

SEQ ID NO: 59612 - DNA, 20 bp, Artificial Sequence
  Description of Artificial Sequence: Synthetic oligonucleotide
  Target: ATXN2; (-) strand; PAM type: YTN; PAM sequence: CTA
gctcgtgctggaggaactgg

SEQ ID NO: 59613 - DNA, 20 bp, Artificial Sequence
  Description of Artificial Sequence: Synthetic oligonucleotide
  Target: ATXN2; (-) strand; PAM type: YTN; PAM sequence: CTG
taagaaatgtgtgaggaaag

SEQ ID NO: 59614 - DNA, 20 bp, Artificial Sequence
  Description of Artificial Sequence: Synthetic oligonucleotide
  Target: ATXN2; (-) strand; PAM type: YTN; PAM sequence: TTA
atgccacaccagaaacaggt

SEQ ID NO: 59615 - DNA, 20 bp, Artificial Sequence
  Description of Artificial Sequence: Synthetic oligonucleotide
  Target: ATXN2; (-) strand; PAM type: YTN; PAM sequence: TTG
gttaatgccacaccagaaac

SEQ ID NO: 59616 - DNA, 20 bp, Artificial Sequence
  Description of Artificial Sequence: Synthetic oligonucleotide
  Target: ATXN2; (-) strand; PAM type: YTN; PAM sequence: CTT
ggttaatgccacaccagaaa

SEQ ID NO: 59617 - DNA, 20 bp, Artificial Sequence
  Description of Artificial Sequence: Synthetic oligonucleotide
  Target: ATXN2; (-) strand; PAM type: YTN; PAM sequence: CTG
aagtggcttggttaatgcca

SEQ ID NO: 59618 - DNA, 20 bp, Artificial Sequence
  Description of Artificial Sequence: Synthetic oligonucleotide
  Target: ATXN2; (-) strand; PAM type: YTN; PAM sequence: TTC
ctgaagtggcttggttaatg

SEQ ID NO: 59619 - DNA, 20 bp, Artificial Sequence
  Description of Artificial Sequence: Synthetic oligonucleotide
  Target: ATXN2; (-) strand; PAM type: YTN; PAM sequence: TTT
cctgaagtggcttggttaat

SEQ ID NO: 59620 - DNA, 20 bp, Artificial Sequence
  Description of Artificial Sequence: Synthetic oligonucleotide
  Target: ATXN2; (-) strand; PAM type: YTN; PAM sequence: TTT
tcctgaagtggcttggttaa

SEQ ID NO: 59621 - DNA, 20 bp, Artificial Sequence
  Description of Artificial Sequence: Synthetic oligonucleotide
  Target: ATXN2; (-) strand; PAM type: YTN; PAM sequence: TTA
ttttcctgaagtggcttggt

SEQ ID NO: 59622 - DNA, 20 bp, Artificial Sequence
  Description of Artificial Sequence: Synthetic oligonucleotide
  Target: ATXN2; (-) strand; PAM type: YTN; PAM sequence: TTC
cacaattattttcctgaagt

SEQ ID NO: 59623 - DNA, 20 bp, Artificial Sequence
  Description of Artificial Sequence: Synthetic oligonucleotide
  Target: ATXN2; (-) strand; PAM type: YTN; PAM sequence: TTG
taagcagtcattccacaatt

SEQ ID NO: 59624 - DNA, 20 bp, Artificial Sequence
  Description of Artificial Sequence: Synthetic oligonucleotide
  Target: ATXN2; (-) strand; PAM type: YTN; PAM sequence: CTA
gttgtaagcagtcattccac

SEQ ID NO: 59625 - DNA, 20 bp, Artificial Sequence
  Description of Artificial Sequence: Synthetic oligonucleotide
  Target: ATXN2; (-) strand; PAM type: YTN; PAM sequence: TTA
tacctagttgtaagcagtca

SEQ ID NO: 59626 - DNA, 20 bp, Artificial Sequence
  Description of Artificial Sequence: Synthetic oligonucleotide
  Target: ATXN2; (-) strand; PAM type: YTN; PAM sequence: CTT
atacctagttgtaagcagtc

SEQ ID NO: 59627 - DNA, 20 bp, Artificial Sequence
  Description of Artificial Sequence: Synthetic oligonucleotide
  Target: ATXN2; (-) strand; PAM type: YTN; PAM sequence: TTG
tgccttatacctagttgtaa

SEQ ID NO: 59628 - DNA, 20 bp, Artificial Sequence
  Description of Artificial Sequence: Synthetic oligonucleotide
  Target: ATXN2; (-) strand; PAM type: YTN; PAM sequence: TTT
gtgccttatacctagttgta

SEQ ID NO: 59629 - DNA, 20 bp, Artificial Sequence
  Description of Artificial Sequence: Synthetic oligonucleotide
  Target: ATXN2; (-) strand; PAM type: YTN; PAM sequence: CTT
tgtgccttatacctagttgt

SEQ ID NO: 59630 - DNA, 20 bp, Artificial Sequence
  Description of Artificial Sequence: Synthetic oligonucleotide
  Target: ATXN2; (-) strand; PAM type: YTN; PAM sequence: TTC
tttgtgccttatacctagtt

SEQ ID NO: 59631 - DNA, 20 bp, Artificial Sequence
  Description of Artificial Sequence: Synthetic oligonucleotide
  Target: ATXN2; (-) strand; PAM type: YTN; PAM sequence: CTA
tattctttgtgccttatacc

SEQ ID NO: 59632 - DNA, 20 bp, Artificial Sequence
  Description of Artificial Sequence: Synthetic oligonucleotide
  Target: ATXN2; (-) strand; PAM type: YTN; PAM sequence: TTC
tatattctttgtgccttata

SEQ ID NO: 59633 - DNA, 20 bp, Artificial Sequence
  Description of Artificial Sequence: Synthetic oligonucleotide
  Target: ATXN2; (-) strand; PAM type: YTN; PAM sequence: TTA
tgaacaagttctatattctt

SEQ ID NO: 59634 - DNA, 20 bp, Artificial Sequence
  Description of Artificial Sequence: Synthetic oligonucleotide
  Target: ATXN2; (-) strand; PAM type: YTN; PAM sequence: TTT
atgaacaagttctatattct

SEQ ID NO: 59635 - DNA, 20 bp, Artificial Sequence
  Description of Artificial Sequence: Synthetic oligonucleotide
  Target: ATXN2; (-) strand; PAM type: YTN; PAM sequence: TTT
tatgaacaagttctatattc

SEQ ID NO: 59636 - DNA, 20 bp, Artificial Sequence
  Description of Artificial Sequence: Synthetic oligonucleotide
  Target: ATXN2; (-) strand; PAM type: YTN; PAM sequence: TTA
ggattttatgaacaagttct

SEQ ID NO: 59637 - DNA, 20 bp, Artificial Sequence
  Description of Artificial Sequence: Synthetic oligonucleotide
  Target: ATXN2; (-) strand; PAM type: YTN; PAM sequence: CTT
aggattttatgaacaagttc

SEQ ID NO: 59638 - DNA, 20 bp, Artificial Sequence
  Description of Artificial Sequence: Synthetic oligonucleotide
  Target: ATXN2; (-) strand; PAM type: YTN; PAM sequence: TTC
ttaggattttatgaacaagt

SEQ ID NO: 59639 - DNA, 20 bp, Artificial Sequence
  Description of Artificial Sequence: Synthetic oligonucleotide
  Target: ATXN2; (-) strand; PAM type: YTN; PAM sequence: TTA
tataatcagttcttaggatt

SEQ ID NO: 59640 - DNA, 20 bp, Artificial Sequence
  Description of Artificial Sequence: Synthetic oligonucleotide
  Target: ATXN2; (-) strand; PAM type: YTN; PAM sequence: TTA
attatataatcagttcttag

SEQ ID NO: 59641 - DNA, 20 bp, Artificial Sequence
  Description of Artificial Sequence: Synthetic oligonucleotide
  Target: ATXN2; (-) strand; PAM type: YTN; PAM sequence: TTG
cagttaattatataatcagt

SEQ ID NO: 59642 - DNA, 20 bp, Artificial Sequence
  Description of Artificial Sequence: Synthetic oligonucleotide
  Target: ATXN2; (-) strand; PAM type: YTN; PAM sequence: TTT
gcagttaattatataatcag

SEQ ID NO: 59643 - DNA, 20 bp, Artificial Sequence
  Description of Artificial Sequence: Synthetic oligonucleotide
  Target: ATXN2; (-) strand; PAM type: YTN; PAM sequence: TTA
gccacaaatttgcagttaat

SEQ ID NO: 59644 - DNA, 20 bp, Artificial Sequence
  Description of Artificial Sequence: Synthetic oligonucleotide
  Target: ATXN2; (-) strand; PAM type: YTN; PAM sequence: TTT
agccacaaatttgcagttaa

SEQ ID NO: 59645 - DNA, 20 bp, Artificial Sequence
  Description of Artificial Sequence: Synthetic oligonucleotide
  Target: ATXN2; (-) strand; PAM type: YTN; PAM sequence: TTA
gtgaatgtttagccacaaat

SEQ ID NO: 59646 - DNA, 20 bp, Artificial Sequence
  Description of Artificial Sequence: Synthetic oligonucleotide
  Target: ATXN2; (-) strand; PAM type: YTN; PAM sequence: TTC
agcaacagttagtgaatgtt

SEQ ID NO: 59647 - DNA, 20 bp, Artificial Sequence
  Description of Artificial Sequence: Synthetic oligonucleotide
  Target: ATXN2; (-) strand; PAM type: YTN; PAM sequence: TTT
cagcaacagttagtgaatgt

SEQ ID NO: 59648 - DNA, 20 bp, Artificial Sequence
  Description of Artificial Sequence: Synthetic oligonucleotide
  Target: ATXN2; (-) strand; PAM type: YTN; PAM sequence: CTC
ccaaatttcagcaacagtta

SEQ ID NO: 59649 - DNA, 20 bp, Artificial Sequence
  Description of Artificial Sequence: Synthetic oligonucleotide
  Target: ATXN2; (-) strand; PAM type: YTN; PAM sequence: CTC
tcccaaatttcagcaacagt

SEQ ID NO: 59650 - DNA, 20 bp, Artificial Sequence
  Description of Artificial Sequence: Synthetic oligonucleotide
  Target: ATXN2; (-) strand; PAM type: YTN; PAM sequence: CTA
gctctcccaaatttcagcaa

SEQ ID NO: 59651 - DNA, 20 bp, Artificial Sequence
  Description of Artificial Sequence: Synthetic oligonucleotide
  Target: ATXN2; (-) strand; PAM type: YTN; PAM sequence: CTA
catagataaaataatatgta

SEQ ID NO: 59652 - DNA, 20 bp, Artificial Sequence
  Description of Artificial Sequence: Synthetic oligonucleotide
  Target: ATXN2; (-) strand; PAM type: YTN; PAM sequence: TTC
ctacatagataaaataatat

SEQ ID NO: 59653 - DNA, 20 bp, Artificial Sequence
  Description of Artificial Sequence: Synthetic oligonucleotide
  Target: ATXN2; (-) strand; PAM type: YTN; PAM sequence: TTT
cctacatagataaaataata

SEQ ID NO: 59654 - DNA, 20 bp, Artificial Sequence
  Description of Artificial Sequence: Synthetic oligonucleotide
  Target: ATXN2; (-) strand; PAM type: YTN; PAM sequence: CTT
tcctacatagataaaataat

SEQ ID NO: 59655 - DNA, 20 bp, Artificial Sequence
  Description of Artificial Sequence: Synthetic oligonucleotide
  Target: ATXN2; (-) strand; PAM type: YTN; PAM sequence: TTG
ctttcctacatagataaaat

SEQ ID NO: 59656 - DNA, 20 bp, Artificial Sequence
  Description of Artificial Sequence: Synthetic oligonucleotide
  Target: ATXN2; (-) strand; PAM type: YTN; PAM sequence: TTT
gctttcctacatagataaaa

SEQ ID NO: 59657 - DNA, 20 bp, Artificial Sequence
  Description of Artificial Sequence: Synthetic oligonucleotide
  Target: ATXN2; (-) strand; PAM type: YTN; PAM sequence: TTC
aggtttgctttcctacatag

SEQ ID NO: 59658 - DNA, 20 bp, Artificial Sequence
  Description of Artificial Sequence: Synthetic oligonucleotide
  Target: ATXN2; (-) strand; PAM type: YTN; PAM sequence: TTA
aatacgtgcatccaagataa

SEQ ID NO: 59659 - DNA, 20 bp, Artificial Sequence
  Description of Artificial Sequence: Synthetic oligonucleotide
  Target: ATXN2; (-) strand; PAM type: YTN; PAM sequence: TTT
aaatacgtgcatccaagata

SEQ ID NO: 59660 - DNA, 20 bp, Artificial Sequence
  Description of Artificial Sequence: Synthetic oligonucleotide
  Target: ATXN2; (-) strand; PAM type: YTN; PAM sequence: TTT
taaatacgtgcatccaagat

SEQ ID NO: 59661 - DNA, 20 bp, Artificial Sequence
  Description of Artificial Sequence: Synthetic oligonucleotide
  Target: ATXN2; (-) strand; PAM type: YTN; PAM sequence: TTT
ttaaatacgtgcatccaaga

SEQ ID NO: 59662 - DNA, 20 bp, Artificial Sequence
  Description of Artificial Sequence: Synthetic oligonucleotide
  Target: ATXN2; (-) strand; PAM type: YTN; PAM sequence: TTA
ccagaaggaggtggttttta

SEQ ID NO: 59663 - DNA, 20 bp, Artificial Sequence
  Description of Artificial Sequence: Synthetic oligonucleotide
  Target: ATXN2; (-) strand; PAM type: YTN; PAM sequence: TTT
accagaaggaggtggttttt

SEQ ID NO: 59664 - DNA, 20 bp, Artificial Sequence
  Description of Artificial Sequence: Synthetic oligonucleotide
  Target: ATXN2; (-) strand; PAM type: YTN; PAM sequence: TTG
tttaccagaaggaggtggtt

SEQ ID NO: 59665 - DNA, 20 bp, Artificial Sequence
  Description of Artificial Sequence: Synthetic oligonucleotide
  Target: ATXN2; (-) strand; PAM type: YTN; PAM sequence: TTT
gtttaccagaaggaggtggt

SEQ ID NO: 59666 - DNA, 20 bp, Artificial Sequence
  Description of Artificial Sequence: Synthetic oligonucleotide
  Target: ATXN2; (-) strand; PAM type: YTN; PAM sequence: TTT
tgtttaccagaaggaggtgg

SEQ ID NO: 59667 - DNA, 20 bp, Artificial Sequence
  Description of Artificial Sequence: Synthetic oligonucleotide
  Target: ATXN2; (-) strand; PAM type: YTN; PAM sequence: TTT
ttgtttaccagaaggaggtg

SEQ ID NO: 59668 - DNA, 20 bp, Artificial Sequence
  Description of Artificial Sequence: Synthetic oligonucleotide
  Target: ATXN2; (-) strand; PAM type: YTN; PAM sequence: TTT
tttgtttaccagaaggaggt

SEQ ID NO: 59669 - DNA, 20 bp, Artificial Sequence
  Description of Artificial Sequence: Synthetic oligonucleotide
  Target: ATXN2; (-) strand; PAM type: YTN; PAM sequence: CTT
ttttgtttaccagaaggagg

SEQ ID NO: 59670 - DNA, 20 bp, Artificial Sequence
  Description of Artificial Sequence: Synthetic oligonucleotide
  Target: ATXN2; (-) strand; PAM type: YTN; PAM sequence: TTC
agtggcttttttgtttacca

SEQ ID NO: 59671 - DNA, 20 bp, Artificial Sequence
  Description of Artificial Sequence: Synthetic oligonucleotide
  Target: ATXN2; (-) strand; PAM type: YTN; PAM sequence: TTT
cagtggcttttttgtttacc

SEQ ID NO: 59672 - DNA, 20 bp, Artificial Sequence
  Description of Artificial Sequence: Synthetic oligonucleotide
  Target: ATXN2; (-) strand; PAM type: YTN; PAM sequence: TTT
tcagtggcttttttgtttac

SEQ ID NO: 59673 - DNA, 20 bp, Artificial Sequence
  Description of Artificial Sequence: Synthetic oligonucleotide
  Target: ATXN2; (-) strand; PAM type: YTN; PAM sequence: TTG
ataaaagtgataagtagttt

SEQ ID NO: 59674 - DNA, 20 bp, Artificial Sequence
  Description of Artificial Sequence: Synthetic oligonucleotide
  Target: ATXN2; (-) strand; PAM type: YTN; PAM sequence: TTT
gataaaagtgataagtagtt

SEQ ID NO: 59675 - DNA, 20 bp, Artificial Sequence
  Description of Artificial Sequence: Synthetic oligonucleotide
  Target: ATXN2; (-) strand; PAM type: YTN; PAM sequence: TTC
atttgataaaagtgataagt

SEQ ID NO: 59676 - DNA, 20 bp, Artificial Sequence
  Description of Artificial Sequence: Synthetic oligonucleotide
  Target: ATXN2; (-) strand; PAM type: YTN; PAM sequence: TTT
catttgataaaagtgataag

SEQ ID NO: 59677 - DNA, 20 bp, Artificial Sequence
  Description of Artificial Sequence: Synthetic oligonucleotide
  Target: ATXN2; (-) strand; PAM type: YTN; PAM sequence: CTT
tcatttgataaaagtgataa

SEQ ID NO: 59678 - DNA, 20 bp, Artificial Sequence
  Description of Artificial Sequence: Synthetic oligonucleotide
  Target: ATXN2; (-) strand; PAM type: YTN; PAM sequence: TTA
gcataatcgggcaaactttc

SEQ ID NO: 59679 - DNA, 20 bp, Artificial Sequence
  Description of Artificial Sequence: Synthetic oligonucleotide
  Target: ATXN2; (-) strand; PAM type: YTN; PAM sequence: CTC
agttagcataatcgggcaaa

SEQ ID NO: 59680 - DNA, 20 bp, Artificial Sequence
  Description of Artificial Sequence: Synthetic oligonucleotide
  Target: ATXN2; (-) strand; PAM type: YTN; PAM sequence: TTA
agctcagttagcataatcgg

SEQ ID NO: 59681 - DNA, 20 bp, Artificial Sequence
  Description of Artificial Sequence: Synthetic oligonucleotide
  Target: ATXN2; (-) strand; PAM type: YTN; PAM sequence: TTT
aagctcagttagcataatcg

SEQ ID NO: 59682 - DNA, 20 bp, Artificial Sequence
  Description of Artificial Sequence: Synthetic oligonucleotide
  Target: ATXN2; (-) strand; PAM type: YTN; PAM sequence: TTA
aatatacaggaaggtaataa

SEQ ID NO: 59683 - DNA, 20 bp, Artificial Sequence
  Description of Artificial Sequence: Synthetic oligonucleotide
  Target: ATXN2; (-) strand; PAM type: YTN; PAM sequence: TTT
aaatatacaggaaggtaata

SEQ ID NO: 59684 - DNA, 20 bp, Artificial Sequence
  Description of Artificial Sequence: Synthetic oligonucleotide
  Target: ATXN2; (-) strand; PAM type: YTN; PAM sequence: TTT
taaatatacaggaaggtaat

SEQ ID NO: 59685 - DNA, 20 bp, Artificial Sequence
  Description of Artificial Sequence: Synthetic oligonucleotide
  Target: ATXN2; (-) strand; PAM type: YTN; PAM sequence: TTT
ttaaatatacaggaaggtaa

SEQ ID NO: 59686 - DNA, 20 bp, Artificial Sequence
  Description of Artificial Sequence: Synthetic oligonucleotide
  Target: ATXN2; (-) strand; PAM type: YTN; PAM sequence: TTT
tttaaatatacaggaaggta

SEQ ID NO: 59687 - DNA, 20 bp, Artificial Sequence
  Description of Artificial Sequence: Synthetic oligonucleotide
  Target: ATXN2; (-) strand; PAM type: YTN; PAM sequence: TTA
ttttttaaatatacaggaag

SEQ ID NO: 59688 - DNA, 20 bp, Artificial Sequence
  Description of Artificial Sequence: Synthetic oligonucleotide
  Target: ATXN2; (-) strand; PAM type: YTN; PAM sequence: TTA
attattttttaaatatacag

SEQ ID NO: 59689 - DNA, 20 bp, Artificial Sequence
  Description of Artificial Sequence: Synthetic oligonucleotide
  Target: ATXN2; (-) strand; PAM type: YTN; PAM sequence: TTT
aattattttttaaatataca

SEQ ID NO: 59690 - DNA, 20 bp, Artificial Sequence
  Description of Artificial Sequence: Synthetic oligonucleotide
  Target: ATXN2; (-) strand; PAM type: YTN; PAM sequence: TTT
taattattttttaaatatac

SEQ ID NO: 59691 - DNA, 20 bp, Artificial Sequence
  Description of Artificial Sequence: Synthetic oligonucleotide
  Target: ATXN2; (-) strand; PAM type: YTN; PAM sequence: TTT
ttaattattttttaaatata

SEQ ID NO: 59692 - DNA, 20 bp, Artificial Sequence
  Description of Artificial Sequence: Synthetic oligonucleotide
  Target: ATXN2; (-) strand; PAM type: YTN; PAM sequence: CTT
tttaattattttttaaatat

SEQ ID NO: 59693 - DNA, 20 bp, Artificial Sequence
  Description of Artificial Sequence: Synthetic oligonucleotide
  Target: ATXN2; (-) strand; PAM type: YTN; PAM sequence: CTA
gctttttaattattttttaa

SEQ ID NO: 59694 - DNA, 20 bp, Artificial Sequence
  Description of Artificial Sequence: Synthetic oligonucleotide
  Target: ATXN2; (-) strand; PAM type: YTN; PAM sequence: TTG
actagctttttaattatttt

SEQ ID NO: 59695 - DNA, 20 bp, Artificial Sequence
  Description of Artificial Sequence: Synthetic oligonucleotide
  Target: ATXN2; (-) strand; PAM type: YTN; PAM sequence: CTT
gactagctttttaattattt

SEQ ID NO: 59696 - DNA, 20 bp, Artificial Sequence
  Description of Artificial Sequence: Synthetic oligonucleotide
  Target: ATXN2; (-) strand; PAM type: YTN; PAM sequence: CTA
aataatagcaccatagtata

SEQ ID NO: 59697 - DNA, 20 bp, Artificial Sequence
  Description of Artificial Sequence: Synthetic oligonucleotide
  Target: ATXN2; (-) strand; PAM type: YTN; PAM sequence: TTA
gtggagacaaacacatgata

SEQ ID NO: 59698 - DNA, 20 bp, Artificial Sequence
  Description of Artificial Sequence: Synthetic oligonucleotide
  Target: ATXN2; (-) strand; PAM type: YTN; PAM sequence: TTA
acatgagaattagtggagac

SEQ ID NO: 59699 - DNA, 20 bp, Artificial Sequence
  Description of Artificial Sequence: Synthetic oligonucleotide
  Target: ATXN2; (-) strand; PAM type: YTN; PAM sequence: TTT
aacatgagaattagtggaga

SEQ ID NO: 59700 - DNA, 20 bp, Artificial Sequence
  Description of Artificial Sequence: Synthetic oligonucleotide
  Target: ATXN2; (-) strand; PAM type: YTN; PAM sequence: TTT
taacatgagaattagtggag

SEQ ID NO: 59701 - DNA, 20 bp, Artificial Sequence
  Description of Artificial Sequence: Synthetic oligonucleotide
  Target: ATXN2; (-) strand; PAM type: YTN; PAM sequence: CTG
gggatcatgttttaacatga

SEQ ID NO: 59702 - DNA, 20 bp, Artificial Sequence
  Description of Artificial Sequence: Synthetic oligonucleotide
  Target: ATXN2; (-) strand; PAM type: YTN; PAM sequence: CTG
gcctggggatcatgttttaa

SEQ ID NO: 59703 - DNA, 20 bp, Artificial Sequence
  Description of Artificial Sequence: Synthetic oligonucleotide
  Target: ATXN2; (-) strand; PAM type: YTN; PAM sequence: CTG
cgcctggcctggggatcatg

SEQ ID NO: 59704 - DNA, 20 bp, Artificial Sequence
  Description of Artificial Sequence: Synthetic oligonucleotide
  Target: ATXN2; (-) strand; PAM type: YTN; PAM sequence: TTA
taagcgtgagccactgcgcc

SEQ ID NO: 59705 - DNA, 20 bp, Artificial Sequence
  Description of Artificial Sequence: Synthetic oligonucleotide
  Target: ATXN2; (-) strand; PAM type: YTN; PAM sequence: CTA
aagtgtagggattataagcg

SEQ ID NO: 59706 - DNA, 20 bp, Artificial Sequence
  Description of Artificial Sequence: Synthetic oligonucleotide
  Target: ATXN2; (-) strand; PAM type: YTN; PAM sequence: CTC
ctaaagtgtagggattataa

SEQ ID NO: 59707 - DNA, 20 bp, Artificial Sequence
  Description of Artificial Sequence: Synthetic oligonucleotide
  Target: ATXN2; (-) strand; PAM type: YTN; PAM sequence: CTG
gcctcctaaagtgtagggat

SEQ ID NO: 59708 - DNA, 20 bp, Artificial Sequence
  Description of Artificial Sequence: Synthetic oligonucleotide
  Target: ATXN2; (-) strand; PAM type: YTN; PAM sequence: CTC
gccctggcctcctaaagtgt

SEQ ID NO: 59709 - DNA, 20 bp, Artificial Sequence
  Description of Artificial Sequence: Synthetic oligonucleotide
  Target: ATXN2; (-) strand; PAM type: YTN; PAM sequence: CTC
aagcagtccgctcgccctgg

SEQ ID NO: 59710 - DNA, 20 bp, Artificial Sequence
  Description of Artificial Sequence: Synthetic oligonucleotide
  Target: ATXN2; (-) strand; PAM type: YTN; PAM sequence: CTC
atgagctcaagcagtccgct

SEQ ID NO: 59711 - DNA, 20 bp, Artificial Sequence
  Description of Artificial Sequence: Synthetic oligonucleotide
  Target: ATXN2; (-) strand; PAM type: YTN; PAM sequence: TTG
cccagggtggtcccaaactc

SEQ ID NO: 59712 - DNA, 20 bp, Artificial Sequence
  Description of Artificial Sequence: Synthetic oligonucleotide
  Target: ATXN2; (-) strand; PAM type: YTN; PAM sequence: CTC
cccatgttgcccagggtggt

SEQ ID NO: 59713 - DNA, 20 bp, Artificial Sequence
  Description of Artificial Sequence: Synthetic oligonucleotide
  Target: ATXN2; (-) strand; PAM type: YTN; PAM sequence: TTG
tggaggcagtgtctccccat

SEQ ID NO: 59714 - DNA, 20 bp, Artificial Sequence
  Description of Artificial Sequence: Synthetic oligonucleotide
  Target: ATXN2; (-) strand; PAM type: YTN; PAM sequence: TTT
gtggaggcagtgtctcccca

SEQ ID NO: 59715 - DNA, 20 bp, Artificial Sequence
  Description of Artificial Sequence: Synthetic oligonucleotide
  Target: ATXN2; (-) strand; PAM type: YTN; PAM sequence: TTT
tgtggaggcagtgtctcccc

SEQ ID NO: 59716 - DNA, 20 bp, Artificial Sequence
  Description of Artificial Sequence: Synthetic oligonucleotide
  Target: ATXN2; (-) strand; PAM type: YTN; PAM sequence: TTT
ttgtggaggcagtgtctccc

SEQ ID NO: 59717 - DNA, 20 bp, Artificial Sequence
  Description of Artificial Sequence: Synthetic oligonucleotide
  Target: ATXN2; (-) strand; PAM type: YTN; PAM sequence: TTT
tttgtggaggcagtgtctcc

SEQ ID NO: 59718 - DNA, 20 bp, Artificial Sequence
  Description of Artificial Sequence: Synthetic oligonucleotide
  Target: ATXN2; (-) strand; PAM type: YTN; PAM sequence: TTG
tattttttgtggaggcagtg

SEQ ID NO: 59719 - DNA, 20 bp, Artificial Sequence
  Description of Artificial Sequence: Synthetic oligonucleotide
  Target: ATXN2; (-) strand; PAM type: YTN; PAM sequence: TTT
gtattttttgtggaggcagt

SEQ ID NO: 59720 - DNA, 20 bp, Artificial Sequence
  Description of Artificial Sequence: Synthetic oligonucleotide
  Target: ATXN2; (-) strand; PAM type: YTN; PAM sequence: TTT
tgtattttttgtggaggcag

SEQ ID NO: 59721 - DNA, 20 bp, Artificial Sequence
  Description of Artificial Sequence: Synthetic oligonucleotide
  Target: ATXN2; (-) strand; PAM type: YTN; PAM sequence: TTT
ttgtattttttgtggaggca

SEQ ID NO: 59722 - DNA, 20 bp, Artificial Sequence
  Description of Artificial Sequence: Synthetic oligonucleotide
  Target: ATXN2; (-) strand; PAM type: YTN; PAM sequence: CTA
atatttttgtattttttgtg

SEQ ID NO: 59723 - DNA, 20 bp, Artificial Sequence
  Description of Artificial Sequence: Synthetic oligonucleotide
  Target: ATXN2; (-) strand; PAM type: YTN; PAM sequence: CTG
gctaatatttttgtattttt

SEQ ID NO: 59724 - DNA, 20 bp, Artificial Sequence
  Description of Artificial Sequence: Synthetic oligonucleotide
  Target: ATXN2; (-) strand; PAM type: YTN; PAM sequence: CTG
ggaccatagatgcacagcac

SEQ ID NO: 59725 - DNA, 20 bp, Artificial Sequence
  Description of Artificial Sequence: Synthetic oligonucleotide
  Target: ATXN2; (-) strand; PAM type: YTN; PAM sequence: CTG
agtagctgggaccatagatg

SEQ ID NO: 59726 - DNA, 20 bp, Artificial Sequence
  Description of Artificial Sequence: Synthetic oligonucleotide
  Target: ATXN2; (-) strand; PAM type: YTN; PAM sequence: CTC
ctgagtagctgggaccatag

SEQ ID NO: 59727 - DNA, 20 bp, Artificial Sequence
  Description of Artificial Sequence: Synthetic oligonucleotide
  Target: ATXN2; (-) strand; PAM type: YTN; PAM sequence: CTC
agcctcctgagtagctggga

SEQ ID NO: 59728 - DNA, 20 bp, Artificial Sequence
  Description of Artificial Sequence: Synthetic oligonucleotide
  Target: ATXN2; (-) strand; PAM type: YTN; PAM sequence: CTC
ccacctcagcctcctgagta

SEQ ID NO: 59729 - DNA, 20 bp, Artificial Sequence
  Description of Artificial Sequence: Synthetic oligonucleotide
  Target: ATXN2; (-) strand; PAM type: YTN; PAM sequence: TTC
ctcccacctcagcctcctga

SEQ ID NO: 59730 - DNA, 20 bp, Artificial Sequence
  Description of Artificial Sequence: Synthetic oligonucleotide
  Target: ATXN2; (-) strand; PAM type: YTN; PAM sequence: CTG
aaaagttcctcccacctcag

SEQ ID NO: 59731 - DNA, 20 bp, Artificial Sequence
  Description of Artificial Sequence: Synthetic oligonucleotide
  Target: ATXN2; (-) strand; PAM type: YTN; PAM sequence: CTG
gctgaaaagttcctcccacc

SEQ ID NO: 59732 - DNA, 20 bp, Artificial Sequence
  Description of Artificial Sequence: Synthetic oligonucleotide
  Target: ATXN2; (-) strand; PAM type: YTN; PAM sequence: CTC
cctggctgaaaagttcctcc

SEQ ID NO: 59733 - DNA, 20 bp, Artificial Sequence
  Description of Artificial Sequence: Synthetic oligonucleotide
  Target: ATXN2; (-) strand; PAM type: YTN; PAM sequence: CTG
cctccctggctgaaaagttc

SEQ ID NO: 59734 - DNA, 20 bp, Artificial Sequence
  Description of Artificial Sequence: Synthetic oligonucleotide
  Target: ATXN2; (-) strand; PAM type: YTN; PAM sequence: TTA
ccgcggcatctgcctccctg

SEQ ID NO: 59735 - DNA, 20 bp, Artificial Sequence
  Description of Artificial Sequence: Synthetic oligonucleotide
  Target: ATXN2; (-) strand; PAM type: YTN; PAM sequence: CTT
accgcggcatctgcctccct

SEQ ID NO: 59736 - DNA, 20 bp, Artificial Sequence
  Description of Artificial Sequence: Synthetic oligonucleotide
  Target: ATXN2; (-) strand; PAM type: YTN; PAM sequence: TTA
cggcttaccgcggcatctgc

SEQ ID NO: 59737 - DNA, 20 bp, Artificial Sequence
  Description of Artificial Sequence: Synthetic oligonucleotide
  Target: ATXN2; (-) strand; PAM type: YTN; PAM sequence: CTG
gagtgcagtggtgcagttac

SEQ ID NO: 59738 - DNA, 20 bp, Artificial Sequence
  Description of Artificial Sequence: Synthetic oligonucleotide
  Target: ATXN2; (-) strand; PAM type: YTN; PAM sequence: TTC
gccgaggctggagtgcagtg

SEQ ID NO: 59739 - DNA, 20 bp, Artificial Sequence
  Description of Artificial Sequence: Synthetic oligonucleotide
  Target: ATXN2; (-) strand; PAM type: YTN; PAM sequence: CTT
cgccgaggctggagtgcagt

SEQ ID NO: 59740 - DNA, 20 bp, Artificial Sequence
  Description of Artificial Sequence: Synthetic oligonucleotide
  Target: ATXN2; (-) strand; PAM type: YTN; PAM sequence: TTC
ttcgccgaggctggagtgca

SEQ ID NO: 59741 - DNA, 20 bp, Artificial Sequence
  Description of Artificial Sequence: Synthetic oligonucleotide
  Target: ATXN2; (-) strand; PAM type: YTN; PAM sequence: CTT
cttcgccgaggctggagtgc

SEQ ID NO: 59742 - DNA, 20 bp, Artificial Sequence
  Description of Artificial Sequence: Synthetic oligonucleotide
  Target: ATXN2; (-) strand; PAM type: YTN; PAM sequence: CTC
acttcttcgccgaggctgga

SEQ ID NO: 59743 - DNA, 20 bp, Artificial Sequence
  Description of Artificial Sequence: Synthetic oligonucleotide
  Target: ATXN2; (-) strand; PAM type: YTN; PAM sequence: TTG
agacagggtctcacttcttc

SEQ ID NO: 59744 - DNA, 20 bp, Artificial Sequence
  Description of Artificial Sequence: Synthetic oligonucleotide
  Target: ATXN2; (-) strand; PAM type: YTN; PAM sequence: TTT
gagacagggtctcacttctt

SEQ ID NO: 59745 - DNA, 20 bp, Artificial Sequence
  Description of Artificial Sequence: Synthetic oligonucleotide
  Target: ATXN2; (-) strand; PAM type: YTN; PAM sequence: TTT
tgagacagggtctcacttct

SEQ ID NO: 59746 - DNA, 20 bp, Artificial Sequence
  Description of Artificial Sequence: Synthetic oligonucleotide
  Target: ATXN2; (-) strand; PAM type: YTN; PAM sequence: TTT
ttgagacagggtctcacttc

SEQ ID NO: 59747 - DNA, 20 bp, Artificial Sequence
  Description of Artificial Sequence: Synthetic oligonucleotide
  Target: ATXN2; (-) strand; PAM type: YTN; PAM sequence: TTT
tttgagacagggtctcactt

SEQ ID NO: 59748 - DNA, 20 bp, Artificial Sequence
  Description of Artificial Sequence: Synthetic oligonucleotide
  Target: ATXN2; (-) strand; PAM type: YTN; PAM sequence: CTT
ttttgagacagggtctcact

SEQ ID NO: 59749 - DNA, 20 bp, Artificial Sequence
  Description of Artificial Sequence: Synthetic oligonucleotide
  Target: ATXN2; (-) strand; PAM type: YTN; PAM sequence: CTC
cccttttttgagacagggtc

SEQ ID NO: 59750 - DNA, 20 bp, Artificial Sequence
  Description of Artificial Sequence: Synthetic oligonucleotide
  Target: ATXN2; (-) strand; PAM type: YTN; PAM sequence: CTA
ccctccccttttttgagaca

SEQ ID NO: 59751 - DNA, 20 bp, Artificial Sequence
  Description of Artificial Sequence: Synthetic oligonucleotide
  Target: ATXN2; (-) strand; PAM type: YTN; PAM sequence: CTG
tcccctaccctccccttttt

SEQ ID NO: 59752 - DNA, 20 bp, Artificial Sequence
  Description of Artificial Sequence: Synthetic oligonucleotide
  Target: ATXN2; (-) strand; PAM type: YTN; PAM sequence: CTC
ctgtcccctaccctcccctt

SEQ ID NO: 59753 - DNA, 20 bp, Artificial Sequence
  Description of Artificial Sequence: Synthetic oligonucleotide
  Target: ATXN2; (-) strand; PAM type: YTN; PAM sequence: TTC
ccctcctgtcccctaccctc

SEQ ID NO: 59754 - DNA, 20 bp, Artificial Sequence
  Description of Artificial Sequence: Synthetic oligonucleotide
  Target: ATXN2; (-) strand; PAM type: YTN; PAM sequence: CTT
cccctcctgtcccctaccct

SEQ ID NO: 59755 - DNA, 20 bp, Artificial Sequence
  Description of Artificial Sequence: Synthetic oligonucleotide
  Target: ATXN2; (-) strand; PAM type: YTN; PAM sequence: TTC
ttcccctcctgtcccctacc

SEQ ID NO: 59756 - DNA, 20 bp, Artificial Sequence
  Description of Artificial Sequence: Synthetic oligonucleotide
  Target: ATXN2; (-) strand; PAM type: YTN; PAM sequence: TTT
cttcccctcctgtcccctac

SEQ ID NO: 59757 - DNA, 20 bp, Artificial Sequence
  Description of Artificial Sequence: Synthetic oligonucleotide
  Target: ATXN2; (-) strand; PAM type: YTN; PAM sequence: TTT
tcttcccctcctgtccccta

SEQ ID NO: 59758 - DNA, 20 bp, Artificial Sequence
  Description of Artificial Sequence: Synthetic oligonucleotide
  Target: ATXN2; (-) strand; PAM type: YTN; PAM sequence: CTT
ttcttcccctcctgtcccct

SEQ ID NO: 59759 - DNA, 20 bp, Artificial Sequence
  Description of Artificial Sequence: Synthetic oligonucleotide
  Target: ATXN2; (-) strand; PAM type: YTN; PAM sequence: TTC
ttttcttcccctcctgtccc

SEQ ID NO: 59760 - DNA, 20 bp, Artificial Sequence
  Description of Artificial Sequence: Synthetic oligonucleotide
  Target: ATXN2; (-) strand; PAM type: YTN; PAM sequence: TTT
cttttcttcccctcctgtcc

SEQ ID NO: 59761 - DNA, 20 bp, Artificial Sequence
  Description of Artificial Sequence: Synthetic oligonucleotide
  Target: ATXN2; (-) strand; PAM type: YTN; PAM sequence: TTG
gtttcttttcttcccctcct

SEQ ID NO: 59762 - DNA, 20 bp, Artificial Sequence
  Description of Artificial Sequence: Synthetic oligonucleotide
  Target: ATXN2; (-) strand; PAM type: YTN; PAM sequence: CTT
ggtttcttttcttcccctcc

SEQ ID NO: 59763 - DNA, 20 bp, Artificial Sequence
  Description of Artificial Sequence: Synthetic oligonucleotide
  Target: ATXN2; (-) strand; PAM type: YTN; PAM sequence: TTC
aaataacaggcagagtcaag

SEQ ID NO: 59764 - DNA, 20 bp, Artificial Sequence
  Description of Artificial Sequence: Synthetic oligonucleotide
  Target: ATXN2; (-) strand; PAM type: YTN; PAM sequence: TTT
caaataacaggcagagtcaa

SEQ ID NO: 59765 - DNA, 20 bp, Artificial Sequence
  Description of Artificial Sequence: Synthetic oligonucleotide
  Target: ATXN2; (-) strand; PAM type: YTN; PAM sequence: TTT
tcaaataacaggcagagtca

SEQ ID NO: 59766 - DNA, 20 bp, Artificial Sequence
  Description of Artificial Sequence: Synthetic oligonucleotide
  Target: ATXN2; (-) strand; PAM type: YTN; PAM sequence: TTT
ttcaaataacaggcagagtc

SEQ ID NO: 59767 - DNA, 20 bp, Artificial Sequence
  Description of Artificial Sequence: Synthetic oligonucleotide
  Target: ATXN2; (-) strand; PAM type: YTN; PAM sequence: TTA
gcatttttcaaataacaggc

SEQ ID NO: 59768 - DNA, 20 bp, Artificial Sequence
  Description of Artificial Sequence: Synthetic oligonucleotide
  Target: ATXN2; (-) strand; PAM type: YTN; PAM sequence: TTT
agcatttttcaaataacagg

SEQ ID NO: 59769 - DNA, 20 bp, Artificial Sequence
  Description of Artificial Sequence: Synthetic oligonucleotide
  Target: ATXN2; (-) strand; PAM type: YTN; PAM sequence: TTT
tagcatttttcaaataacag

SEQ ID NO: 59770 - DNA, 20 bp, Artificial Sequence
  Description of Artificial Sequence: Synthetic oligonucleotide
  Target: ATXN2; (-) strand; PAM type: YTN; PAM sequence: TTT
ttagcatttttcaaataaca

SEQ ID NO: 59771 - DNA, 20 bp, Artificial Sequence
  Description of Artificial Sequence: Synthetic oligonucleotide
  Target: ATXN2; (-) strand; PAM type: YTN; PAM sequence: TTG
gataaaaatatttttagcat

SEQ ID NO: 59772 - DNA, 20 bp, Artificial Sequence
  Description of Artificial Sequence: Synthetic oligonucleotide
  Target: ATXN2; (-) strand; PAM type: YTN; PAM sequence: TTG
aggtattggataaaaatatt

SEQ ID NO: 59773 - DNA, 20 bp, Artificial Sequence
  Description of Artificial Sequence: Synthetic oligonucleotide
  Target: ATXN2; (-) strand; PAM type: YTN; PAM sequence: TTT
gaggtattggataaaaatat

SEQ ID NO: 59774 - DNA, 20 bp, Artificial Sequence
  Description of Artificial Sequence: Synthetic oligonucleotide
  Target: ATXN2; (-) strand; PAM type: YTN; PAM sequence: CTT
tgaggtattggataaaaata

SEQ ID NO: 59775 - DNA, 20 bp, Artificial Sequence
  Description of Artificial Sequence: Synthetic oligonucleotide
  Target: ATXN2; (-) strand; PAM type: YTN; PAM sequence: TTC
caatcctttgaggtattgga

SEQ ID NO: 59776 - DNA, 20 bp, Artificial Sequence
  Description of Artificial Sequence: Synthetic oligonucleotide
  Target: ATXN2; (-) strand; PAM type: YTN; PAM sequence: CTA
aattccaatcctttgaggta

SEQ ID NO: 59777 - DNA, 20 bp, Artificial Sequence
  Description of Artificial Sequence: Synthetic oligonucleotide
  Target: ATXN2; (-) strand; PAM type: YTN; PAM sequence: TTA
ctaaattccaatcctttgag

SEQ ID NO: 59778 - DNA, 20 bp, Artificial Sequence
  Description of Artificial Sequence: Synthetic oligonucleotide
  Target: ATXN2; (-) strand; PAM type: YTN; PAM sequence: TTT
actaaattccaatcctttga

SEQ ID NO: 59779 - DNA, 20 bp, Artificial Sequence
  Description of Artificial Sequence: Synthetic oligonucleotide
  Target: ATXN2; (-) strand; PAM type: YTN; PAM sequence: CTT
tactaaattccaatcctttg

SEQ ID NO: 59780 - DNA, 20 bp, Artificial Sequence
  Description of Artificial Sequence: Synthetic oligonucleotide
  Target: ATXN2; (-) strand; PAM type: YTN; PAM sequence: CTC
ctttactaaattccaatcct

SEQ ID NO: 59781 - DNA, 20 bp, Artificial Sequence
  Description of Artificial Sequence: Synthetic oligonucleotide
  Target: ATXN2; (-) strand; PAM type: YTN; PAM sequence: CTG
ctcctttactaaattccaat

SEQ ID NO: 59782 - DNA, 20 bp, Artificial Sequence
  Description of Artificial Sequence: Synthetic oligonucleotide
  Target: ATXN2; (-) strand; PAM type: YTN; PAM sequence: TTA
ccctgctcctttactaaatt

SEQ ID NO: 59783 - DNA, 20 bp, Artificial Sequence
  Description of Artificial Sequence: Synthetic oligonucleotide
  Target: ATXN2; (-) strand; PAM type: YTN; PAM sequence: TTT
accctgctcctttactaaat

SEQ ID NO: 59784 - DNA, 20 bp, Artificial Sequence
  Description of Artificial Sequence: Synthetic oligonucleotide
  Target: ATXN2; (-) strand; PAM type: YTN; PAM sequence: TTT
taccctgctcctttactaaa

SEQ ID NO: 59785 - DNA, 20 bp, Artificial Sequence
  Description of Artificial Sequence: Synthetic oligonucleotide
  Target: ATXN2; (-) strand; PAM type: YTN; PAM sequence: TTT
ttaccctgctcctttactaa

SEQ ID NO: 59786 - DNA, 20 bp, Artificial Sequence
  Description of Artificial Sequence: Synthetic oligonucleotide
  Target: ATXN2; (-) strand; PAM type: YTN; PAM sequence: TTA
gtttttaccctgctccttta

SEQ ID NO: 59787 - DNA, 20 bp, Artificial Sequence
  Description of Artificial Sequence: Synthetic oligonucleotide
  Target: ATXN2; (-) strand; PAM type: YTN; PAM sequence: TTA
tatgttagtttttaccctgc

SEQ ID NO: 59788 - DNA, 20 bp, Artificial Sequence
  Description of Artificial Sequence: Synthetic oligonucleotide
  Target: ATXN2; (-) strand; PAM type: YTN; PAM sequence: TTT
atatgttagtttttaccctg

SEQ ID NO: 59789 - DNA, 20 bp, Artificial Sequence
  Description of Artificial Sequence: Synthetic oligonucleotide
  Target: ATXN2; (-) strand; PAM type: YTN; PAM sequence: CTG
tttatatgttagtttttacc

SEQ ID NO: 59790 - DNA, 20 bp, Artificial Sequence
  Description of Artificial Sequence: Synthetic oligonucleotide
  Target: ATXN2; (-) strand; PAM type: YTN; PAM sequence: TTG
ctgtttatatgttagttttt

SEQ ID NO: 59791 - DNA, 20 bp, Artificial Sequence
  Description of Artificial Sequence: Synthetic oligonucleotide
  Target: ATXN2; (-) strand; PAM type: YTN; PAM sequence: CTA
ttgctgtttatatgttagtt

SEQ ID NO: 59792 - DNA, 20 bp, Artificial Sequence
  Description of Artificial Sequence: Synthetic oligonucleotide
  Target: ATXN2; (-) strand; PAM type: YTN; PAM sequence: TTA
tgaagtaccatatatgaagg

SEQ ID NO: 59793 - DNA, 20 bp, Artificial Sequence
  Description of Artificial Sequence: Synthetic oligonucleotide
  Target: ATXN2; (-) strand; PAM type: YTN; PAM sequence: CTT
atgaagtaccatatatgaag

SEQ ID NO: 59794 - DNA, 20 bp, Artificial Sequence
  Description of Artificial Sequence: Synthetic oligonucleotide
  Target: ATXN2; (-) strand; PAM type: YTN; PAM sequence: TTA
cttatgaagtaccatatatg

SEQ ID NO: 59795 - DNA, 20 bp, Artificial Sequence
  Description of Artificial Sequence: Synthetic oligonucleotide
  Target: ATXN2; (-) strand; PAM type: YTN; PAM sequence: CTA
agtaattacttatgaagtac

SEQ ID NO: 59796 - DNA, 20 bp, Artificial Sequence
  Description of Artificial Sequence: Synthetic oligonucleotide
  Target: ATXN2; (-) strand; PAM type: YTN; PAM sequence: TTC
taagtaattacttatgaagt

SEQ ID NO: 59797 - DNA, 20 bp, Artificial Sequence
  Description of Artificial Sequence: Synthetic oligonucleotide
  Target: ATXN2; (-) strand; PAM type: YTN; PAM sequence: CTT
ctaagtaattacttatgaag

SEQ ID NO: 59798 - DNA, 20 bp, Artificial Sequence
  Description of Artificial Sequence: Synthetic oligonucleotide
  Target: ATXN2; (-) strand; PAM type: YTN; PAM sequence: TTG
catcttctaagtaattactt

SEQ ID NO: 59799 - DNA, 20 bp, Artificial Sequence
  Description of Artificial Sequence: Synthetic oligonucleotide
  Target: ATXN2; (-) strand; PAM type: YTN; PAM sequence: TTC
cattgcatcttctaagtaat

SEQ ID NO: 59800 - DNA, 20 bp, Artificial Sequence
  Description of Artificial Sequence: Synthetic oligonucleotide
  Target: ATXN2; (-) strand; PAM type: YTN; PAM sequence: CTT
ccattgcatcttctaagtaa

SEQ ID NO: 59801 - DNA, 20 bp, Artificial Sequence
  Description of Artificial Sequence: Synthetic oligonucleotide
  Target: ATXN2; (-) strand; PAM type: YTN; PAM sequence: CTC
ttccattgcatcttctaagt

SEQ ID NO: 59802 - DNA, 20 bp, Artificial Sequence
  Description of Artificial Sequence: Synthetic oligonucleotide
  Target: ATXN2; (-) strand; PAM type: YTN; PAM sequence: TTC
tcttccattgcatcttctaa

SEQ ID NO: 59803 - DNA, 20 bp, Artificial Sequence
  Description of Artificial Sequence: Synthetic oligonucleotide
  Target: ATXN2; (-) strand; PAM type: YTN; PAM sequence: CTT
ctcttccattgcatcttcta

SEQ ID NO: 59804 - DNA, 20 bp, Artificial Sequence
  Description of Artificial Sequence: Synthetic oligonucleotide
  Target: ATXN2; (-) strand; PAM type: YTN; PAM sequence: TTA
gtgtaacccagggacttctc

SEQ ID NO: 59805 - DNA, 20 bp, Artificial Sequence
  Description of Artificial Sequence: Synthetic oligonucleotide
  Target: ATXN2; (-) strand; PAM type: YTN; PAM sequence: TTA
atgttagtgtaacccaggga

SEQ ID NO: 59806 - DNA, 20 bp, Artificial Sequence
  Description of Artificial Sequence: Synthetic oligonucleotide
  Target: ATXN2; (-) strand; PAM type: YTN; PAM sequence: TTT
aatgttagtgtaacccaggg

SEQ ID NO: 59807 - DNA, 20 bp, Artificial Sequence
  Description of Artificial Sequence: Synthetic oligonucleotide
  Target: ATXN2; (-) strand; PAM type: YTN; PAM sequence: TTT
taatgttagtgtaacccagg

SEQ ID NO: 59808 - DNA, 20 bp, Artificial Sequence
  Description of Artificial Sequence: Synthetic oligonucleotide
  Target: ATXN2; (-) strand; PAM type: YTN; PAM sequence: TTT
ttaatgttagtgtaacccag

SEQ ID NO: 59809 - DNA, 20 bp, Artificial Sequence
  Description of Artificial Sequence: Synthetic oligonucleotide
  Target: ATXN2; (-) strand; PAM type: YTN; PAM sequence: TTT
tttaatgttagtgtaaccca

SEQ ID NO: 59810 - DNA, 20 bp, Artificial Sequence
  Description of Artificial Sequence: Synthetic oligonucleotide
  Target: ATXN2; (-) strand; PAM type: YTN; PAM sequence: CTT
ttttaatgttagtgtaaccc

SEQ ID NO: 59811 - DNA, 20 bp, Artificial Sequence
  Description of Artificial Sequence: Synthetic oligonucleotide
  Target: ATXN2; (-) strand; PAM type: YTN; PAM sequence: TTC
ttttttaatgttagtgtaac

SEQ ID NO: 59812 - DNA, 20 bp, Artificial Sequence
  Description of Artificial Sequence: Synthetic oligonucleotide
  Target: ATXN2; (-) strand; PAM type: YTN; PAM sequence: TTA
ggtaggttcttttttaatgt

SEQ ID NO: 59813 - DNA, 20 bp, Artificial Sequence
  Description of Artificial Sequence: Synthetic oligonucleotide
  Target: ATXN2; (-) strand; PAM type: YTN; PAM sequence: CTT
aggtaggttcttttttaatg

SEQ ID NO: 59814 - DNA, 20 bp, Artificial Sequence
  Description of Artificial Sequence: Synthetic oligonucleotide
  Target: ATXN2; (-) strand; PAM type: YTN; PAM sequence: TTC
agtgtatgccttaggtaggt

SEQ ID NO: 59815 - DNA, 20 bp, Artificial Sequence
  Description of Artificial Sequence: Synthetic oligonucleotide
  Target: ATXN2; (-) strand; PAM type: YTN; PAM sequence: TTT
cagtgtatgccttaggtagg

SEQ ID NO: 59816 - DNA, 20 bp, Artificial Sequence
  Description of Artificial Sequence: Synthetic oligonucleotide
  Target: ATXN2; (-) strand; PAM type: YTN; PAM sequence: TTT
tcagtgtatgccttaggtag

SEQ ID NO: 59817 - DNA, 20 bp, Artificial Sequence
  Description of Artificial Sequence: Synthetic oligonucleotide
  Target: ATXN2; (-) strand; PAM type: YTN; PAM sequence: TTT
ttcagtgtatgccttaggta

SEQ ID NO: 59818 - DNA, 20 bp, Artificial Sequence
  Description of Artificial Sequence: Synthetic oligonucleotide
  Target: ATXN2; (-) strand; PAM type: YTN; PAM sequence: TTT
tttcagtgtatgccttaggt

SEQ ID NO: 59819 - DNA, 20 bp, Artificial Sequence
  Description of Artificial Sequence: Synthetic oligonucleotide
  Target: ATXN2; (-) strand; PAM type: YTN; PAM sequence: TTT
ttttcagtgtatgccttagg

SEQ ID NO: 59820 - DNA, 20 bp, Artificial Sequence
  Description of Artificial Sequence: Synthetic oligonucleotide
  Target: ATXN2; (-) strand; PAM type: YTN; PAM sequence: TTG
tacatttttttcagtgtatg

SEQ ID NO: 59821 - DNA, 20 bp, Artificial Sequence
  Description of Artificial Sequence: Synthetic oligonucleotide
  Target: ATXN2; (-) strand; PAM type: YTN; PAM sequence: TTT
gtacatttttttcagtgtat

SEQ ID NO: 59822 - DNA, 20 bp, Artificial Sequence
  Description of Artificial Sequence: Synthetic oligonucleotide
  Target: ATXN2; (-) strand; PAM type: YTN; PAM sequence: TTT
tgtacatttttttcagtgta

SEQ ID NO: 59823 - DNA, 20 bp, Artificial Sequence
  Description of Artificial Sequence: Synthetic oligonucleotide
  Target: ATXN2; (-) strand; PAM type: YTN; PAM sequence: TTA
aggttttgtacatttttttc

SEQ ID NO: 59824 - DNA, 20 bp, Artificial Sequence
  Description of Artificial Sequence: Synthetic oligonucleotide
  Target: ATXN2; (-) strand; PAM type: YTN; PAM sequence: TTT
aaggttttgtacattttttt

SEQ ID NO: 59825 - DNA, 20 bp, Artificial Sequence
  Description of Artificial Sequence: Synthetic oligonucleotide
  Target: ATXN2; (-) strand; PAM type: YTN; PAM sequence: CTT
taaggttttgtacatttttt

SEQ ID NO: 59826 - DNA, 20 bp, Artificial Sequence
  Description of Artificial Sequence: Synthetic oligonucleotide
  Target: ATXN2; (-) strand; PAM type: YTN; PAM sequence: TTA
tctttaaggttttgtacatt

SEQ ID NO: 59827 - DNA, 20 bp, Artificial Sequence
  Description of Artificial Sequence: Synthetic oligonucleotide
  Target: ATXN2; (-) strand; PAM type: YTN; PAM sequence: TTT
atctttaaggttttgtacat

SEQ ID NO: 59828 - DNA, 20 bp, Artificial Sequence
  Description of Artificial Sequence: Synthetic oligonucleotide
  Target: ATXN2; (-) strand; PAM type: YTN; PAM sequence: CTC
aaagaaaataaataaataaa

SEQ ID NO: 59829 - DNA, 20 bp, Artificial Sequence
  Description of Artificial Sequence: Synthetic oligonucleotide
  Target: ATXN2; (-) strand; PAM type: YTN; PAM sequence: CTG
tctcaaagaaaataaataaa

SEQ ID NO: 59830 - DNA, 20 bp, Artificial Sequence
  Description of Artificial Sequence: Synthetic oligonucleotide
  Target: ATXN2; (-) strand; PAM type: YTN; PAM sequence: CTC
tgtctcaaagaaaataaata

SEQ ID NO: 59831 - DNA, 20 bp, Artificial Sequence
  Description of Artificial Sequence: Synthetic oligonucleotide
  Target: ATXN2; (-) strand; PAM type: YTN; PAM sequence: TTG
ggcaaccgagcgacactctg

SEQ ID NO: 59832 - DNA, 20 bp, Artificial Sequence
  Description of Artificial Sequence: Synthetic oligonucleotide
  Target: ATXN2; (-) strand; PAM type: YTN; PAM sequence: CTT
gggcaaccgagcgacactct

SEQ ID NO: 59833 - DNA, 20 bp, Artificial Sequence
  Description of Artificial Sequence: Synthetic oligonucleotide
  Target: ATXN2; (-) strand; PAM type: YTN; PAM sequence: CTC
cagcttgggcaaccgagcga

SEQ ID NO: 59834 - DNA, 20 bp, Artificial Sequence
  Description of Artificial Sequence: Synthetic oligonucleotide
  Target: ATXN2; (-) strand; PAM type: YTN; PAM sequence: CTG
cactccagcttgggcaaccg

SEQ ID NO: 59835 - DNA, 20 bp, Artificial Sequence
  Description of Artificial Sequence: Synthetic oligonucleotide
  Target: ATXN2; (-) strand; PAM type: YTN; PAM sequence: TTG
caccactgcactccagcttg

SEQ ID NO: 59836 - DNA, 20 bp, Artificial Sequence
  Description of Artificial Sequence: Synthetic oligonucleotide
  Target: ATXN2; (-) strand; PAM type: YTN; PAM sequence: TTG
aacccaggaggcagagagtg

SEQ ID NO: 59837 - DNA, 20 bp, Artificial Sequence
  Description of Artificial Sequence: Synthetic oligonucleotide
  Target: ATXN2; (-) strand; PAM type: YTN; PAM sequence: CTT
gaacccaggaggcagagagt

SEQ ID NO: 59838 - DNA, 20 bp, Artificial Sequence
  Description of Artificial Sequence: Synthetic oligonucleotide
  Target: ATXN2; (-) strand; PAM type: YTN; PAM sequence: CTG
aggtaggagaatcgcttgaa

SEQ ID NO: 59839 - DNA, 20 bp, Artificial Sequence
  Description of Artificial Sequence: Synthetic oligonucleotide
  Target: ATXN2; (-) strand; PAM type: YTN; PAM sequence: CTG
gaggctgaggtaggagaatc

SEQ ID NO: 59840 - DNA, 20 bp, Artificial Sequence
  Description of Artificial Sequence: Synthetic oligonucleotide
  Target: ATXN2; (-) strand; PAM type: YTN; PAM sequence: CTC
tggaggctgaggtaggagaa

SEQ ID NO: 59841 - DNA, 20 bp, Artificial Sequence
  Description of Artificial Sequence: Synthetic oligonucleotide
  Target: ATXN2; (-) strand; PAM type: YTN; PAM sequence: CTA
ctctggaggctgaggtagga

SEQ ID NO: 59842 - DNA, 20 bp, Artificial Sequence
  Description of Artificial Sequence: Synthetic oligonucleotide
  Target: ATXN2; (-) strand; PAM type: YTN; PAM sequence: CTG
tagtcccagctactctggag

SEQ ID NO: 59843 - DNA, 20 bp, Artificial Sequence
  Description of Artificial Sequence: Synthetic oligonucleotide
  Target: ATXN2; (-) strand; PAM type: YTN; PAM sequence: CTG
ggtgtggtgtgcacctgtag

SEQ ID NO: 59844 - DNA, 20 bp, Artificial Sequence
  Description of Artificial Sequence: Synthetic oligonucleotide
  Target: ATXN2; (-) strand; PAM type: YTN; PAM sequence: TTA
gctgggtgtggtgtgcacct

SEQ ID NO: 59845 - DNA, 20 bp, Artificial Sequence
  Description of Artificial Sequence: Synthetic oligonucleotide
  Target: ATXN2; (-) strand; PAM type: YTN; PAM sequence: TTA
aaaaaagtattagctgggtg

SEQ ID NO: 59846 - DNA, 20 bp, Artificial Sequence
  Description of Artificial Sequence: Synthetic oligonucleotide
  Target: ATXN2; (-) strand; PAM type: YTN; PAM sequence: TTT
aaaaaaagtattagctgggt

SEQ ID NO: 59847 - DNA, 20 bp, Artificial Sequence
  Description of Artificial Sequence: Synthetic oligonucleotide
  Target: ATXN2; (-) strand; PAM type: YTN; PAM sequence: TTT
taaaaaaagtattagctggg

SEQ ID NO: 59848 - DNA, 20 bp, Artificial Sequence
  Description of Artificial Sequence: Synthetic oligonucleotide
  Target: ATXN2; (-) strand; PAM type: YTN; PAM sequence: CTA
aaaatattttaaaaaaagta

SEQ ID NO: 59849 - DNA, 20 bp, Artificial Sequence
  Description of Artificial Sequence: Synthetic oligonucleotide
  Target: ATXN2; (-) strand; PAM type: YTN; PAM sequence: CTA
ctaaaaatattttaaaaaaa

SEQ ID NO: 59850 - DNA, 20 bp, Artificial Sequence
  Description of Artificial Sequence: Synthetic oligonucleotide
  Target: ATXN2; (-) strand; PAM type: YTN; PAM sequence: CTC
tactaaaaatattttaaaaa

SEQ ID NO: 59851 - DNA, 20 bp, Artificial Sequence
  Description of Artificial Sequence: Synthetic oligonucleotide
  Target: ATXN2; (-) strand; PAM type: YTN; PAM sequence: CTG
gccaacatggtgaaaccccg

SEQ ID NO: 59852 - DNA, 20 bp, Artificial Sequence
  Description of Artificial Sequence: Synthetic oligonucleotide
  Target: ATXN2; (-) strand; PAM type: YTN; PAM sequence: TTC
gagaccagcctggccaacat

SEQ ID NO: 59853 - DNA, 20 bp, Artificial Sequence
  Description of Artificial Sequence: Synthetic oligonucleotide
  Target: ATXN2; (-) strand; PAM type: YTN; PAM sequence: CTG
gagttcgagaccagcctggc

SEQ ID NO: 59854 - DNA, 20 bp, Artificial Sequence
  Description of Artificial Sequence: Synthetic oligonucleotide
  Target: ATXN2; (-) strand; PAM type: YTN; PAM sequence: CTG
aggtctggagttcgagacca

SEQ ID NO: 59855 - DNA, 20 bp, Artificial Sequence
  Description of Artificial Sequence: Synthetic oligonucleotide
  Target: ATXN2; (-) strand; PAM type: YTN; PAM sequence: TTG
ggaggcagaggtgggcagat

SEQ ID NO: 59856 - DNA, 20 bp, Artificial Sequence
  Description of Artificial Sequence: Synthetic oligonucleotide
  Target: ATXN2; (-) strand; PAM type: YTN; PAM sequence: TTT
gggaggcagaggtgggcaga

SEQ ID NO: 59857 - DNA, 20 bp, Artificial Sequence
  Description of Artificial Sequence: Synthetic oligonucleotide
  Target: ATXN2; (-) strand; PAM type: YTN; PAM sequence: CTT
tgggaggcagaggtgggcag

SEQ ID NO: 59858 - DNA, 20 bp, Artificial Sequence
  Description of Artificial Sequence: Synthetic oligonucleotide
  Target: ATXN2; (-) strand; PAM type: YTN; PAM sequence: CTC
tttgggaggcagaggtgggc

SEQ ID NO: 59859 - DNA, 20 bp, Artificial Sequence
  Description of Artificial Sequence: Synthetic oligonucleotide
  Target: ATXN2; (-) strand; PAM type: YTN; PAM sequence: CTG
taatcccacctctttgggag

SEQ ID NO: 59860 - DNA, 20 bp, Artificial Sequence
  Description of Artificial Sequence: Synthetic oligonucleotide
  Target: ATXN2; (-) strand; PAM type: YTN; PAM sequence: CTG
acgcctgtaatcccacctct

SEQ ID NO: 59861 - DNA, 20 bp, Artificial Sequence
  Description of Artificial Sequence: Synthetic oligonucleotide
  Target: ATXN2; (-) strand; PAM type: YTN; PAM sequence: CTG
gatgcagtggctgacgcctg

SEQ ID NO: 59862 - DNA, 20 bp, Artificial Sequence
  Description of Artificial Sequence: Synthetic oligonucleotide
  Target: ATXN2; (-) strand; PAM type: YTN; PAM sequence: TTG
gctggatgcagtggctgacg

SEQ ID NO: 59863 - DNA, 20 bp, Artificial Sequence
  Description of Artificial Sequence: Synthetic oligonucleotide
  Target: ATXN2; (-) strand; PAM type: YTN; PAM sequence: CTT
ggctggatgcagtggctgac

SEQ ID NO: 59864 - DNA, 20 bp, Artificial Sequence
  Description of Artificial Sequence: Synthetic oligonucleotide
  Target: ATXN2; (-) strand; PAM type: YTN; PAM sequence: TTA
tccttggctggatgcagtgg

SEQ ID NO: 59865 - DNA, 20 bp, Artificial Sequence
  Description of Artificial Sequence: Synthetic oligonucleotide
  Target: ATXN2; (-) strand; PAM type: YTN; PAM sequence: TTT
atccttggctggatgcagtg

SEQ ID NO: 59866 - DNA, 20 bp, Artificial Sequence
  Description of Artificial Sequence: Synthetic oligonucleotide
  Target: ATXN2; (-) strand; PAM type: YTN; PAM sequence: TTA
aagtttatccttggctggat

SEQ ID NO: 59867 - DNA, 20 bp, Artificial Sequence
  Description of Artificial Sequence: Synthetic oligonucleotide
  Target: ATXN2; (-) strand; PAM type: YTN; PAM sequence: TTC
aatagcatattaaagtttat

SEQ ID NO: 59868 - DNA, 20 bp, Artificial Sequence
  Description of Artificial Sequence: Synthetic oligonucleotide
  Target: ATXN2; (-) strand; PAM type: YTN; PAM sequence: CTT
caatagcatattaaagttta

SEQ ID NO: 59869 - DNA, 20 bp, Artificial Sequence
  Description of Artificial Sequence: Synthetic oligonucleotide
  Target: ATXN2; (-) strand; PAM type: YTN; PAM sequence: TTC
aagaacaaagtataccttca

SEQ ID NO: 59870 - DNA, 20 bp, Artificial Sequence
  Description of Artificial Sequence: Synthetic oligonucleotide
  Target: ATXN2; (-) strand; PAM type: YTN; PAM sequence: CTG
ttcaagaacaaagtatacct

SEQ ID NO: 59871 - DNA, 20 bp, Artificial Sequence
  Description of Artificial Sequence: Synthetic oligonucleotide
  Target: ATXN2; (-) strand; PAM type: YTN; PAM sequence: TTC
ctgttcaagaacaaagtata

SEQ ID NO: 59872 - DNA, 20 bp, Artificial Sequence
  Description of Artificial Sequence: Synthetic oligonucleotide
  Target: ATXN2; (-) strand; PAM type: YTN; PAM sequence: CTT
cctgttcaagaacaaagtat

SEQ ID NO: 59873 - DNA, 20 bp, Artificial Sequence
  Description of Artificial Sequence: Synthetic oligonucleotide
  Target: ATXN2; (-) strand; PAM type: YTN; PAM sequence: TTG
agtcttcctgttcaagaaca

SEQ ID NO: 59874 - DNA, 20 bp, Artificial Sequence
  Description of Artificial Sequence: Synthetic oligonucleotide
  Target: ATXN2; (-) strand; PAM type: YTN; PAM sequence: TTC
atgatgttgagtcttcctgt

SEQ ID NO: 59875 - DNA, 20 bp, Artificial Sequence
  Description of Artificial Sequence: Synthetic oligonucleotide
  Target: ATXN2; (-) strand; PAM type: YTN; PAM sequence: CTT
catgatgttgagtcttcctg

SEQ ID NO: 59876 - DNA, 20 bp, Artificial Sequence
  Description of Artificial Sequence: Synthetic oligonucleotide
  Target: ATXN2; (-) strand; PAM type: YTN; PAM sequence: TTG
atgtcttcatgatgttgagt

SEQ ID NO: 59877 - DNA, 20 bp, Artificial Sequence
  Description of Artificial Sequence: Synthetic oligonucleotide
  Target: ATXN2; (-) strand; PAM type: YTN; PAM sequence: TTG
agaagaaatgattgatgtct

SEQ ID NO: 59878 - DNA, 20 bp, Artificial Sequence
  Description of Artificial Sequence: Synthetic oligonucleotide
  Target: ATXN2; (-) strand; PAM type: YTN; PAM sequence: CTT
gagaagaaatgattgatgtc

SEQ ID NO: 59879 - DNA, 20 bp, Artificial Sequence
  Description of Artificial Sequence: Synthetic oligonucleotide
  Target: ATXN2; (-) strand; PAM type: YTN; PAM sequence: TTA
acttgagaagaaatgattga

SEQ ID NO: 59880 - DNA, 20 bp, Artificial Sequence
  Description of Artificial Sequence: Synthetic oligonucleotide
  Target: ATXN2; (-) strand; PAM type: YTN; PAM sequence: TTA
taaattaacttgagaagaaa

SEQ ID NO: 59881 - DNA, 20 bp, Artificial Sequence
  Description of Artificial Sequence: Synthetic oligonucleotide
  Target: ATXN2; (-) strand; PAM type: YTN; PAM sequence: CTT
ataaattaacttgagaagaa

SEQ ID NO: 59882 - DNA, 20 bp, Artificial Sequence
  Description of Artificial Sequence: Synthetic oligonucleotide
  Target: ATXN2; (-) strand; PAM type: YTN; PAM sequence: CTA
caggcatgagccaccatggc

SEQ ID NO: 59883 - DNA, 20 bp, Artificial Sequence
  Description of Artificial Sequence: Synthetic oligonucleotide
  Target: ATXN2; (-) strand; PAM type: YTN; PAM sequence: CTC
acaaagtggtgggactacag

SEQ ID NO: 59884 - DNA, 20 bp, Artificial Sequence
  Description of Artificial Sequence: Synthetic oligonucleotide
  Target: ATXN2; (-) strand; PAM type: YTN; PAM sequence: CTG
tgtcagcctcacaaagtggt

SEQ ID NO: 59885 - DNA, 20 bp, Artificial Sequence
  Description of Artificial Sequence: Synthetic oligonucleotide
  Target: ATXN2; (-) strand; PAM type: YTN; PAM sequence: CTG
cctgtgtcagcctcacaaag

SEQ ID NO: 59886 - DNA, 20 bp, Artificial Sequence
  Description of Artificial Sequence: Synthetic oligonucleotide
  Target: ATXN2; (-) strand; PAM type: YTN; PAM sequence: CTC
aagcagtctgcctgtgtcag

SEQ ID NO: 59887 - DNA, 20 bp, Artificial Sequence
  Description of Artificial Sequence: Synthetic oligonucleotide
  Target: ATXN2; (-) strand; PAM type: YTN; PAM sequence: CTG
agctcaagcagtctgcctgt

SEQ ID NO: 59888 - DNA, 20 bp, Artificial Sequence
  Description of Artificial Sequence: Synthetic oligonucleotide
  Target: ATXN2; (-) strand; PAM type: YTN; PAM sequence: CTC
ctgagctcaagcagtctgcc

SEQ ID NO: 59889 - DNA, 20 bp, Artificial Sequence
  Description of Artificial Sequence: Synthetic oligonucleotide
  Target: ATXN2; (-) strand; PAM type: YTN; PAM sequence: CTG
gtgtcgaactcctgagctca

SEQ ID NO: 59890 - DNA, 20 bp, Artificial Sequence
  Description of Artificial Sequence: Synthetic oligonucleotide
  Target: ATXN2; (-) strand; PAM type: YTN; PAM sequence: TTG
cccaggctggtgtcgaactc

SEQ ID NO: 59891 - DNA, 20 bp, Artificial Sequence
  Description of Artificial Sequence: Synthetic oligonucleotide
  Target: ATXN2; (-) strand; PAM type: YTN; PAM sequence: TTC
accatgttgcccaggctggt

SEQ ID NO: 59892 - DNA, 20 bp, Artificial Sequence
  Description of Artificial Sequence: Synthetic oligonucleotide
  Target: ATXN2; (-) strand; PAM type: YTN; PAM sequence: TTT
caccatgttgcccaggctgg

SEQ ID NO: 59893 - DNA, 20 bp, Artificial Sequence
  Description of Artificial Sequence: Synthetic oligonucleotide
  Target: ATXN2; (-) strand; PAM type: YTN; PAM sequence: TTG
cagagacagggtttcaccat

SEQ ID NO: 59894 - DNA, 20 bp, Artificial Sequence
  Description of Artificial Sequence: Synthetic oligonucleotide
  Target: ATXN2; (-) strand; PAM type: YTN; PAM sequence: TTT
gcagagacagggtttcacca

SEQ ID NO: 59895 - DNA, 20 bp, Artificial Sequence
  Description of Artificial Sequence: Synthetic oligonucleotide
  Target: ATXN2; (-) strand; PAM type: YTN; PAM sequence: TTT
tgcagagacagggtttcacc

SEQ ID NO: 59896 - DNA, 20 bp, Artificial Sequence
  Description of Artificial Sequence: Synthetic oligonucleotide
  Target: ATXN2; (-) strand; PAM type: YTN; PAM sequence: TTG
tatattttgcagagacaggg

SEQ ID NO: 59897 - DNA, 20 bp, Artificial Sequence
  Description of Artificial Sequence: Synthetic oligonucleotide
  Target: ATXN2; (-) strand; PAM type: YTN; PAM sequence: TTT
gtatattttgcagagacagg

SEQ ID NO: 59898 - DNA, 20 bp, Artificial Sequence
  Description of Artificial Sequence: Synthetic oligonucleotide
  Target: ATXN2; (-) strand; PAM type: YTN; PAM sequence: TTT
tgtatattttgcagagacag

SEQ ID NO: 59899 - DNA, 20 bp, Artificial Sequence
  Description of Artificial Sequence: Synthetic oligonucleotide
  Target: ATXN2; (-) strand; PAM type: YTN; PAM sequence: TTT
ttgtatattttgcagagaca

SEQ ID NO: 59900 - DNA, 20 bp, Artificial Sequence
  Description of Artificial Sequence: Synthetic oligonucleotide
  Target: ATXN2; (-) strand; PAM type: YTN; PAM sequence: TTA
atttttgtatattttgcaga

SEQ ID NO: 59901 - DNA, 20 bp, Artificial Sequence
  Description of Artificial Sequence: Synthetic oligonucleotide
  Target: ATXN2; (-) strand; PAM type: YTN; PAM sequence: CTT
aatttttgtatattttgcag

SEQ ID NO: 59902 - DNA, 20 bp, Artificial Sequence
  Description of Artificial Sequence: Synthetic oligonucleotide
  Target: ATXN2; (-) strand; PAM type: YTN; PAM sequence: CTG
gcttaatttttgtatatttt

SEQ ID NO: 59903 - DNA, 20 bp, Artificial Sequence
  Description of Artificial Sequence: Synthetic oligonucleotide
  Target: ATXN2; (-) strand; PAM type: YTN; PAM sequence: CTA
caggcaagcaccaccgtgcc

SEQ ID NO: 59904 - DNA, 20 bp, Artificial Sequence
  Description of Artificial Sequence: Synthetic oligonucleotide
  Target: ATXN2; (-) strand; PAM type: YTN; PAM sequence: CTG
ggactacaggcaagcaccac

SEQ ID NO: 59905 - DNA, 20 bp, Artificial Sequence
  Description of Artificial Sequence: Synthetic oligonucleotide
  Target: ATXN2; (-) strand; PAM type: YTN; PAM sequence: CTC
ccaagtagctgggactacag

SEQ ID NO: 59906 - DNA, 20 bp, Artificial Sequence
  Description of Artificial Sequence: Synthetic oligonucleotide
  Target: ATXN2; (-) strand; PAM type: YTN; PAM sequence: CTC
agcctcccaagtagctggga

SEQ ID NO: 59907 - DNA, 20 bp, Artificial Sequence
  Description of Artificial Sequence: Synthetic oligonucleotide
  Target: ATXN2; (-) strand; PAM type: YTN; PAM sequence: CTA
aggcaatccccccacctcag

SEQ ID NO: 59908 - DNA, 20 bp, Artificial Sequence
  Description of Artificial Sequence: Synthetic oligonucleotide
  Target: ATXN2; (-) strand; PAM type: YTN; PAM sequence: TTC
ccgagctaaggcaatccccc

SEQ ID NO: 59909 - DNA, 20 bp, Artificial Sequence
  Description of Artificial Sequence: Synthetic oligonucleotide
  Target: ATXN2; (-) strand; PAM type: YTN; PAM sequence: CTT
cccgagctaaggcaatcccc

SEQ ID NO: 59910 - DNA, 20 bp, Artificial Sequence
  Description of Artificial Sequence: Synthetic oligonucleotide
  Target: ATXN2; (-) strand; PAM type: YTN; PAM sequence: CTC
aacttcccgagctaaggcaa

SEQ ID NO: 59911 - DNA, 20 bp, Artificial Sequence
  Description of Artificial Sequence: Synthetic oligonucleotide
  Target: ATXN2; (-) strand; PAM type: YTN; PAM sequence: CTG
cagcctcaacttcccgagct

SEQ ID NO: 59912 - DNA, 20 bp, Artificial Sequence
  Description of Artificial Sequence: Synthetic oligonucleotide
  Target: ATXN2; (-) strand; PAM type: YTN; PAM sequence: CTG
ggcatactgcagcctcaact

SEQ ID NO: 59913 - DNA, 20 bp, Artificial Sequence
  Description of Artificial Sequence: Synthetic oligonucleotide
  Target: ATXN2; (-) strand; PAM type: YTN; PAM sequence: CTG
gagtgcagtgggatgatctg

SEQ ID NO: 59914 - DNA, 20 bp, Artificial Sequence
  Description of Artificial Sequence: Synthetic oligonucleotide
  Target: ATXN2; (-) strand; PAM type: YTN; PAM sequence: CTA
ggctggagtgcagtgggatg

SEQ ID NO: 59915 - DNA, 20 bp, Artificial Sequence
  Description of Artificial Sequence: Synthetic oligonucleotide
  Target: ATXN2; (-) strand; PAM type: YTN; PAM sequence: TTA
cctaggctggagtgcagtgg

SEQ ID NO: 59916 - DNA, 20 bp, Artificial Sequence
  Description of Artificial Sequence: Synthetic oligonucleotide
  Target: ATXN2; (-) strand; PAM type: YTN; PAM sequence: CTG
ttacctaggctggagtgcag

SEQ ID NO: 59917 - DNA, 20 bp, Artificial Sequence
  Description of Artificial Sequence: Synthetic oligonucleotide
  Target: ATXN2; (-) strand; PAM type: YTN; PAM sequence: CTC
tgttacctaggctggagtgc

SEQ ID NO: 59918 - DNA, 20 bp, Artificial Sequence
  Description of Artificial Sequence: Synthetic oligonucleotide
  Target: ATXN2; (-) strand; PAM type: YTN; PAM sequence: CTG
gctctgttacctaggctgga

SEQ ID NO: 59919 - DNA, 20 bp, Artificial Sequence
  Description of Artificial Sequence: Synthetic oligonucleotide
  Target: ATXN2; (-) strand; PAM type: YTN; PAM sequence: TTG
gagacaaggtctggctctgt

SEQ ID NO: 59920 - DNA, 20 bp, Artificial Sequence
  Description of Artificial Sequence: Synthetic oligonucleotide
  Target: ATXN2; (-) strand; PAM type: YTN; PAM sequence: TTT
ggagacaaggtctggctctg

SEQ ID NO: 59921 - DNA, 20 bp, Artificial Sequence
  Description of Artificial Sequence: Synthetic oligonucleotide
  Target: ATXN2; (-) strand; PAM type: YTN; PAM sequence: TTT
tggagacaaggtctggctct

SEQ ID NO: 59922 - DNA, 20 bp, Artificial Sequence
  Description of Artificial Sequence: Synthetic oligonucleotide
  Target: ATXN2; (-) strand; PAM type: YTN; PAM sequence: TTT
ttggagacaaggtctggctc

SEQ ID NO: 59923 - DNA, 20 bp, Artificial Sequence
  Description of Artificial Sequence: Synthetic oligonucleotide
  Target: ATXN2; (-) strand; PAM type: YTN; PAM sequence: TTT
tttggagacaaggtctggct

SEQ ID NO: 59924 - DNA, 20 bp, Artificial Sequence
  Description of Artificial Sequence: Synthetic oligonucleotide
  Target: ATXN2; (-) strand; PAM type: YTN; PAM sequence: TTA
attttttggagacaaggtct

SEQ ID NO: 59925 - DNA, 20 bp, Artificial Sequence
  Description of Artificial Sequence: Synthetic oligonucleotide
  Target: ATXN2; (-) strand; PAM type: YTN; PAM sequence: TTT
aattttttggagacaaggtc

SEQ ID NO: 59926 - DNA, 20 bp, Artificial Sequence
  Description of Artificial Sequence: Synthetic oligonucleotide
  Target: ATXN2; (-) strand; PAM type: YTN; PAM sequence: TTT
taattttttggagacaaggt

SEQ ID NO: 59927 - DNA, 20 bp, Artificial Sequence
  Description of Artificial Sequence: Synthetic oligonucleotide
  Target: ATXN2; (-) strand; PAM type: YTN; PAM sequence: TTT
ttaattttttggagacaagg

SEQ ID NO: 59928 - DNA, 20 bp, Artificial Sequence
  Description of Artificial Sequence: Synthetic oligonucleotide
  Target: ATXN2; (-) strand; PAM type: YTN; PAM sequence: TTT
tttaattttttggagacaag

SEQ ID NO: 59929 - DNA, 20 bp, Artificial Sequence
  Description of Artificial Sequence: Synthetic oligonucleotide
  Target: ATXN2; (-) strand; PAM type: YTN; PAM sequence: TTT
ttttaattttttggagacaa

SEQ ID NO: 59930 - DNA, 20 bp, Artificial Sequence
  Description of Artificial Sequence: Synthetic oligonucleotide
  Target: ATXN2; (-) strand; PAM type: YTN; PAM sequence: TTT
tttttaattttttggagaca

SEQ ID NO: 59931 - DNA, 20 bp, Artificial Sequence
  Description of Artificial Sequence: Synthetic oligonucleotide
  Target: ATXN2; (-) strand; PAM type: YTN; PAM sequence: TTT
ttttttaattttttggagac

SEQ ID NO: 59932 - DNA, 20 bp, Artificial Sequence
  Description of Artificial Sequence: Synthetic oligonucleotide
  Target: ATXN2; (-) strand; PAM type: YTN; PAM sequence: TTT
tttttttaattttttggaga

SEQ ID NO: 59933 - DNA, 20 bp, Artificial Sequence
  Description of Artificial Sequence: Synthetic oligonucleotide
  Target: ATXN2; (-) strand; PAM type: YTN; PAM sequence: TTT
ttttttttaattttttggag

SEQ ID NO: 59934 - DNA, 20 bp, Artificial Sequence
  Description of Artificial Sequence: Synthetic oligonucleotide
  Target: ATXN2; (-) strand; PAM type: YTN; PAM sequence: TTT
tttttttttaattttttgga

SEQ ID NO: 59935 - DNA, 20 bp, Artificial Sequence
  Description of Artificial Sequence: Synthetic oligonucleotide
  Target: ATXN2; (-) strand; PAM type: YTN; PAM sequence: TTT
ttttttttttaattttttgg

SEQ ID NO: 59936 - DNA, 20 bp, Artificial Sequence
  Description of Artificial Sequence: Synthetic oligonucleotide
  Target: ATXN2; (-) strand; PAM type: YTN; PAM sequence: TTT
tttttttttttaattttttg

SEQ ID NO: 59937 - DNA, 20 bp, Artificial Sequence
  Description of Artificial Sequence: Synthetic oligonucleotide
  Target: ATXN2; (-) strand; PAM type: YTN; PAM sequence: TTT
ttttttttttttaatttttt

SEQ ID NO: 59938 - DNA, 20 bp, Artificial Sequence
  Description of Artificial Sequence: Synthetic oligonucleotide
  Target: ATXN2; (-) strand; PAM type: YTN; PAM sequence: TTT
tttttttttttttaattttt

SEQ ID NO: 59939 - DNA, 20 bp, Artificial Sequence
  Description of Artificial Sequence: Synthetic oligonucleotide
  Target: ATXN2; (-) strand; PAM type: YTN; PAM sequence: CTG
gaatttttttttttttttta

SEQ ID NO: 59940 - DNA, 20 bp, Artificial Sequence
  Description of Artificial Sequence: Synthetic oligonucleotide
  Target: ATXN2; (-) strand; PAM type: YTN; PAM sequence: TTC
tggaattttttttttttttt

SEQ ID NO: 59941 - DNA, 20 bp, Artificial Sequence
  Description of Artificial Sequence: Synthetic oligonucleotide
  Target: ATXN2; (-) strand; PAM type: YTN; PAM sequence: CTT
ctggaatttttttttttttt

SEQ ID NO: 59942 - DNA, 20 bp, Artificial Sequence
  Description of Artificial Sequence: Synthetic oligonucleotide
  Target: ATXN2; (-) strand; PAM type: YTN; PAM sequence: CTA
tcagtataaacttctggaat

SEQ ID NO: 59943 - DNA, 20 bp, Artificial Sequence
  Description of Artificial Sequence: Synthetic oligonucleotide
  Target: ATXN2; (-) strand; PAM type: YTN; PAM sequence: TTA
ctatcagtataaacttctgg

SEQ ID NO: 59944 - DNA, 20 bp, Artificial Sequence
  Description of Artificial Sequence: Synthetic oligonucleotide
  Target: ATXN2; (-) strand; PAM type: YTN; PAM sequence: CTT
actatcagtataaacttctg

SEQ ID NO: 59945 - DNA, 20 bp, Artificial Sequence
  Description of Artificial Sequence: Synthetic oligonucleotide
  Target: ATXN2; (-) strand; PAM type: YTN; PAM sequence: TTC
ttactatcagtataaacttc

SEQ ID NO: 59946 - DNA, 20 bp, Artificial Sequence
  Description of Artificial Sequence: Synthetic oligonucleotide
  Target: ATXN2; (-) strand; PAM type: YTN; PAM sequence: TTG
gttcttactatcagtataaa

SEQ ID NO: 59947 - DNA, 20 bp, Artificial Sequence
  Description of Artificial Sequence: Synthetic oligonucleotide
  Target: ATXN2; (-) strand; PAM type: YTN; PAM sequence: TTG
tcgttggttcttactatcag

SEQ ID NO: 59948 - DNA, 20 bp, Artificial Sequence
  Description of Artificial Sequence: Synthetic oligonucleotide
  Target: ATXN2; (-) strand; PAM type: YTN; PAM sequence: TTT
gtcgttggttcttactatca

SEQ ID NO: 59949 - DNA, 20 bp, Artificial Sequence
  Description of Artificial Sequence: Synthetic oligonucleotide
  Target: ATXN2; (-) strand; PAM type: YTN; PAM sequence: TTT
tgtcgttggttcttactatc

SEQ ID NO: 59950 - DNA, 20 bp, Artificial Sequence
  Description of Artificial Sequence: Synthetic oligonucleotide
  Target: ATXN2; (-) strand; PAM type: YTN; PAM sequence: TTT
ttgtcgttggttcttactat

SEQ ID NO: 59951 - DNA, 20 bp, Artificial Sequence
  Description of Artificial Sequence: Synthetic oligonucleotide
  Target: ATXN2; (-) strand; PAM type: YTN; PAM sequence: TTT
tttgtcgttggttcttacta

SEQ ID NO: 59952 - DNA, 20 bp, Artificial Sequence
  Description of Artificial Sequence: Synthetic oligonucleotide
  Target: ATXN2; (-) strand; PAM type: YTN; PAM sequence: TTT
ttttgtcgttggttcttact

SEQ ID NO: 59953 - DNA, 20 bp, Artificial Sequence
  Description of Artificial Sequence: Synthetic oligonucleotide
  Target: ATXN2; (-) strand; PAM type: YTN; PAM sequence: CTC
caaaggtaaccagtgaggtg

SEQ ID NO: 59954 - DNA, 20 bp, Artificial Sequence
  Description of Artificial Sequence: Synthetic oligonucleotide
  Target: ATXN2; (-) strand; PAM type: YTN; PAM sequence: TTA
tcctccaaaggtaaccagtg

SEQ ID NO: 59955 - DNA, 20 bp, Artificial Sequence
  Description of Artificial Sequence: Synthetic oligonucleotide
  Target: ATXN2; (-) strand; PAM type: YTN; PAM sequence: CTG
ttatcctccaaaggtaacca

SEQ ID NO: 59956 - DNA, 20 bp, Artificial Sequence
  Description of Artificial Sequence: Synthetic oligonucleotide
  Target: ATXN2; (-) strand; PAM type: YTN; PAM sequence: TTC
tgttatcctccaaaggtaac

SEQ ID NO: 59957 - DNA, 20 bp, Artificial Sequence
  Description of Artificial Sequence: Synthetic oligonucleotide
  Target: ATXN2; (-) strand; PAM type: YTN; PAM sequence: TTT
ctgttatcctccaaaggtaa

SEQ ID NO: 59958 - DNA, 20 bp, Artificial Sequence
  Description of Artificial Sequence: Synthetic oligonucleotide
  Target: ATXN2; (-) strand; PAM type: YTN; PAM sequence: TTT
tctgttatcctccaaaggta

SEQ ID NO: 59959 - DNA, 20 bp, Artificial Sequence
  Description of Artificial Sequence: Synthetic oligonucleotide
  Target: ATXN2; (-) strand; PAM type: YTN; PAM sequence: TTG
gttttctgttatcctccaaa

SEQ ID NO: 59960 - DNA, 20 bp, Artificial Sequence
  Description of Artificial Sequence: Synthetic oligonucleotide
  Target: ATXN2; (-) strand; PAM type: YTN; PAM sequence: TTC
aaaataatgagttggttttc

SEQ ID NO: 59961 - DNA, 20 bp, Artificial Sequence
  Description of Artificial Sequence: Synthetic oligonucleotide
  Target: ATXN2; (-) strand; PAM type: YTN; PAM sequence: CTT
caaaataatgagttggtttt

SEQ ID NO: 59962 - DNA, 20 bp, Artificial Sequence
  Description of Artificial Sequence: Synthetic oligonucleotide
  Target: ATXN2; (-) strand; PAM type: YTN; PAM sequence: TTA
aggcagtcttcaaaataatg

SEQ ID NO: 59963 - DNA, 20 bp, Artificial Sequence
  Description of Artificial Sequence: Synthetic oligonucleotide
  Target: ATXN2; (-) strand; PAM type: YTN; PAM sequence: TTT
aaggcagtcttcaaaataat

SEQ ID NO: 59964 - DNA, 20 bp, Artificial Sequence
  Description of Artificial Sequence: Synthetic oligonucleotide
  Target: ATXN2; (-) strand; PAM type: YTN; PAM sequence: TTT
taaggcagtcttcaaaataa

SEQ ID NO: 59965 - DNA, 20 bp, Artificial Sequence
  Description of Artificial Sequence: Synthetic oligonucleotide
  Target: ATXN2; (-) strand; PAM type: YTN; PAM sequence: TTT
ttaaggcagtcttcaaaata

SEQ ID NO: 59966 - DNA, 20 bp, Artificial Sequence
  Description of Artificial Sequence: Synthetic oligonucleotide
  Target: ATXN2; (-) strand; PAM type: YTN; PAM sequence: CTT
tttaaggcagtcttcaaaat

SEQ ID NO: 59967 - DNA, 20 bp, Artificial Sequence
  Description of Artificial Sequence: Synthetic oligonucleotide
  Target: ATXN2; (-) strand; PAM type: YTN; PAM sequence: TTC
cctttttaaggcagtcttca

SEQ ID NO: 59968 - DNA, 20 bp, Artificial Sequence
  Description of Artificial Sequence: Synthetic oligonucleotide
  Target: ATXN2; (-) strand; PAM type: YTN; PAM sequence: TTT
ccctttttaaggcagtcttc

SEQ ID NO: 59969 - DNA, 20 bp, Artificial Sequence
  Description of Artificial Sequence: Synthetic oligonucleotide
  Target: ATXN2; (-) strand; PAM type: YTN; PAM sequence: TTA
atcatttccctttttaaggc

SEQ ID NO: 59970 - DNA, 20 bp, Artificial Sequence
  Description of Artificial Sequence: Synthetic oligonucleotide
  Target: ATXN2; (-) strand; PAM type: YTN; PAM sequence: TTA
aaatgttaatcatttccctt

SEQ ID NO: 59971 - DNA, 20 bp, Artificial Sequence
  Description of Artificial Sequence: Synthetic oligonucleotide
  Target: ATXN2; (-) strand; PAM type: YTN; PAM sequence: TTT
aaaatgttaatcatttccct

SEQ ID NO: 59972 - DNA, 20 bp, Artificial Sequence
  Description of Artificial Sequence: Synthetic oligonucleotide
  Target: ATXN2; (-) strand; PAM type: YTN; PAM sequence: TTA
ggaaaagtaatttaaaatgt

SEQ ID NO: 59973 - DNA, 20 bp, Artificial Sequence
  Description of Artificial Sequence: Synthetic oligonucleotide
  Target: ATXN2; (-) strand; PAM type: YTN; PAM sequence: CTT
aggaaaagtaatttaaaatg

SEQ ID NO: 59974 - DNA, 20 bp, Artificial Sequence
  Description of Artificial Sequence: Synthetic oligonucleotide
  Target: ATXN2; (-) strand; PAM type: YTN; PAM sequence: TTC
ttaggaaaagtaatttaaaa

SEQ ID NO: 59975 - DNA, 20 bp, Artificial Sequence
  Description of Artificial Sequence: Synthetic oligonucleotide
  Target: ATXN2; (-) strand; PAM type: YTN; PAM sequence: TTT
cttaggaaaagtaatttaaa

SEQ ID NO: 59976 - DNA, 20 bp, Artificial Sequence
  Description of Artificial Sequence: Synthetic oligonucleotide
  Target: ATXN2; (-) strand; PAM type: YTN; PAM sequence: CTT
tcttaggaaaagtaatttaa

SEQ ID NO: 59977 - DNA, 20 bp, Artificial Sequence
  Description of Artificial Sequence: Synthetic oligonucleotide
  Target: ATXN2; (-) strand; PAM type: YTN; PAM sequence: CTG
aggtatagctttcttaggaa

SEQ ID NO: 59978 - DNA, 20 bp, Artificial Sequence
  Description of Artificial Sequence: Synthetic oligonucleotide
  Target: ATXN2; (-) strand; PAM type: YTN; PAM sequence: TTA
ccctgaggtatagctttctt

SEQ ID NO: 59979 - DNA, 20 bp, Artificial Sequence
  Description of Artificial Sequence: Synthetic oligonucleotide
  Target: ATXN2; (-) strand; PAM type: YTN; PAM sequence: TTG
gttaccctgaggtatagctt

SEQ ID NO: 59980 - DNA, 20 bp, Artificial Sequence
  Description of Artificial Sequence: Synthetic oligonucleotide
  Target: ATXN2; (-) strand; PAM type: YTN; PAM sequence: TTT
ggttaccctgaggtatagct

SEQ ID NO: 59981 - DNA, 20 bp, Artificial Sequence
  Description of Artificial Sequence: Synthetic oligonucleotide
  Target: ATXN2; (-) strand; PAM type: YTN; PAM sequence: CTG
tttggttaccctgaggtata

SEQ ID NO: 59982 - DNA, 20 bp, Artificial Sequence
  Description of Artificial Sequence: Synthetic oligonucleotide
  Target: ATXN2; (-) strand; PAM type: YTN; PAM sequence: TTC
ccatatccagctgtttggtt

SEQ ID NO: 59983 - DNA, 20 bp, Artificial Sequence
  Description of Artificial Sequence: Synthetic oligonucleotide
  Target: ATXN2; (-) strand; PAM type: YTN; PAM sequence: TTT
cccatatccagctgtttggt

SEQ ID NO: 59984 - DNA, 20 bp, Artificial Sequence
  Description of Artificial Sequence: Synthetic oligonucleotide
  Target: ATXN2; (-) strand; PAM type: YTN; PAM sequence: CTT
tcccatatccagctgtttgg

SEQ ID NO: 59985 - DNA, 20 bp, Artificial Sequence
  Description of Artificial Sequence: Synthetic oligonucleotide
  Target: ATXN2; (-) strand; PAM type: YTN; PAM sequence: CTA
taaagaaaaactttcccata

SEQ ID NO: 59986 - DNA, 20 bp, Artificial Sequence
  Description of Artificial Sequence: Synthetic oligonucleotide
  Target: ATXN2; (-) strand; PAM type: YTN; PAM sequence: TTC
tataaagaaaaactttccca

SEQ ID NO: 59987 - DNA, 20 bp, Artificial Sequence
  Description of Artificial Sequence: Synthetic oligonucleotide
  Target: ATXN2; (-) strand; PAM type: YTN; PAM sequence: TTT
ctataaagaaaaactttccc

SEQ ID NO: 59988 - DNA, 20 bp, Artificial Sequence
  Description of Artificial Sequence: Synthetic oligonucleotide
  Target: ATXN2; (-) strand; PAM type: YTN; PAM sequence: CTG
gaatatttctataaagaaaa

SEQ ID NO: 59989 - DNA, 20 bp, Artificial Sequence
  Description of Artificial Sequence: Synthetic oligonucleotide
  Target: ATXN2; (-) strand; PAM type: YTN; PAM sequence: TTG
cctggaatatttctataaag

SEQ ID NO: 59990 - DNA, 20 bp, Artificial Sequence
  Description of Artificial Sequence: Synthetic oligonucleotide
  Target: ATXN2; (-) strand; PAM type: YTN; PAM sequence: TTA
ttgcctggaatatttctata

SEQ ID NO: 59991 - DNA, 20 bp, Artificial Sequence
  Description of Artificial Sequence: Synthetic oligonucleotide
  Target: ATXN2; (-) strand; PAM type: YTN; PAM sequence: TTC
aattattgcctggaatattt

SEQ ID NO: 59992 - DNA, 20 bp, Artificial Sequence
  Description of Artificial Sequence: Synthetic oligonucleotide
  Target: ATXN2; (-) strand; PAM type: YTN; PAM sequence: CTT
caattattgcctggaatatt

SEQ ID NO: 59993 - DNA, 20 bp, Artificial Sequence
  Description of Artificial Sequence: Synthetic oligonucleotide
  Target: ATXN2; (-) strand; PAM type: YTN; PAM sequence: TTC
ttcaattattgcctggaata

SEQ ID NO: 59994 - DNA, 20 bp, Artificial Sequence
  Description of Artificial Sequence: Synthetic oligonucleotide
  Target: ATXN2; (-) strand; PAM type: YTN; PAM sequence: CTT
cttcaattattgcctggaat

SEQ ID NO: 59995 - DNA, 20 bp, Artificial Sequence
  Description of Artificial Sequence: Synthetic oligonucleotide
  Target: ATXN2; (-) strand; PAM type: YTN; PAM sequence: TTC
atcccttcttcaattattgc

SEQ ID NO: 59996 - DNA, 20 bp, Artificial Sequence
  Description of Artificial Sequence: Synthetic oligonucleotide
  Target: ATXN2; (-) strand; PAM type: YTN; PAM sequence: TTT
catcccttcttcaattattg

SEQ ID NO: 59997 - DNA, 20 bp, Artificial Sequence
  Description of Artificial Sequence: Synthetic oligonucleotide
  Target: ATXN2; (-) strand; PAM type: YTN; PAM sequence: CTT
tcatcccttcttcaattatt

SEQ ID NO: 59998 - DNA, 20 bp, Artificial Sequence
  Description of Artificial Sequence: Synthetic oligonucleotide
  Target: ATXN2; (-) strand; PAM type: YTN; PAM sequence: TTC
ctttcatcccttcttcaatt

SEQ ID NO: 59999 - DNA, 20 bp, Artificial Sequence
  Description of Artificial Sequence: Synthetic oligonucleotide
  Target: ATXN2; (-) strand; PAM type: YTN; PAM sequence: TTT
cctttcatcccttcttcaat

SEQ ID NO: 60000 - DNA, 20 bp, Artificial Sequence
  Description of Artificial Sequence: Synthetic oligonucleotide
  Target: ATXN2; (-) strand; PAM type: YTN; PAM sequence: TTT
tcctttcatcccttcttcaa

SEQ ID NO: 60001 - DNA, 20 bp, Artificial Sequence
  Description of Artificial Sequence: Synthetic oligonucleotide
  Target: ATXN2; (-) strand; PAM type: YTN; PAM sequence: CTT
ttcctttcatcccttcttca

SEQ ID NO: 60002 - DNA, 20 bp, Artificial Sequence
  Description of Artificial Sequence: Synthetic oligonucleotide
  Target: ATXN2; (-) strand; PAM type: YTN; PAM sequence: TTC
ttttcctttcatcccttctt

SEQ ID NO: 60003 - DNA, 20 bp, Artificial Sequence
  Description of Artificial Sequence: Synthetic oligonucleotide
  Target: ATXN2; (-) strand; PAM type: YTN; PAM sequence: TTG
taaaatggtgacattctttt

SEQ ID NO: 60004 - DNA, 20 bp, Artificial Sequence
  Description of Artificial Sequence: Synthetic oligonucleotide
  Target: ATXN2; (-) strand; PAM type: YTN; PAM sequence: TTA
ggggttgtaaaatggtgaca

SEQ ID NO: 60005 - DNA, 20 bp, Artificial Sequence
  Description of Artificial Sequence: Synthetic oligonucleotide
  Target: ATXN2; (-) strand; PAM type: YTN; PAM sequence: CTT
aggggttgtaaaatggtgac

SEQ ID NO: 60006 - DNA, 20 bp, Artificial Sequence
  Description of Artificial Sequence: Synthetic oligonucleotide
  Target: ATXN2; (-) strand; PAM type: YTN; PAM sequence: TTC
cttaggggttgtaaaatggt

SEQ ID NO: 60007 - DNA, 20 bp, Artificial Sequence
  Description of Artificial Sequence: Synthetic oligonucleotide
  Target: ATXN2; (-) strand; PAM type: YTN; PAM sequence: TTT
ccttaggggttgtaaaatgg

SEQ ID NO: 60008 - DNA, 20 bp, Artificial Sequence
  Description of Artificial Sequence: Synthetic oligonucleotide
  Target: ATXN2; (-) strand; PAM type: YTN; PAM sequence: TTA
tttccttaggggttgtaaaa

SEQ ID NO: 60009 - DNA, 20 bp, Artificial Sequence
  Description of Artificial Sequence: Synthetic oligonucleotide
  Target: ATXN2; (-) strand; PAM type: YTN; PAM sequence: CTA
gcccaagatcagttatttcc

SEQ ID NO: 60010 - DNA, 20 bp, Artificial Sequence
  Description of Artificial Sequence: Synthetic oligonucleotide
  Target: ATXN2; (-) strand; PAM type: YTN; PAM sequence: TTG
tctagcccaagatcagttat

SEQ ID NO: 60011 - DNA, 20 bp, Artificial Sequence
  Description of Artificial Sequence: Synthetic oligonucleotide
  Target: ATXN2; (-) strand; PAM type: YTN; PAM sequence: TTG
atgataattgtctagcccaa

SEQ ID NO: 60012 - DNA, 20 bp, Artificial Sequence
  Description of Artificial Sequence: Synthetic oligonucleotide
  Target: ATXN2; (-) strand; PAM type: YTN; PAM sequence: TTA
gcagccattgatgataattg

SEQ ID NO: 60013 - DNA, 20 bp, Artificial Sequence
  Description of Artificial Sequence: Synthetic oligonucleotide
  Target: ATXN2; (-) strand; PAM type: YTN; PAM sequence: TTT
agcagccattgatgataatt

SEQ ID NO: 60014 - DNA, 20 bp, Artificial Sequence
  Description of Artificial Sequence: Synthetic oligonucleotide
  Target: ATXN2; (-) strand; PAM type: YTN; PAM sequence: TTT
tagcagccattgatgataat

SEQ ID NO: 60015 - DNA, 20 bp, Artificial Sequence
  Description of Artificial Sequence: Synthetic oligonucleotide
  Target: ATXN2; (-) strand; PAM type: YTN; PAM sequence: TTT
ttagcagccattgatgataa

SEQ ID NO: 60016 - DNA, 20 bp, Artificial Sequence
  Description of Artificial Sequence: Synthetic oligonucleotide
  Target: ATXN2; (-) strand; PAM type: YTN; PAM sequence: TTT
tttagcagccattgatgata

SEQ ID NO: 60017 - DNA, 20 bp, Artificial Sequence
  Description of Artificial Sequence: Synthetic oligonucleotide
  Target: ATXN2; (-) strand; PAM type: YTN; PAM sequence: TTG
gtgtgttttttagcagccat

SEQ ID NO: 60018 - DNA, 20 bp, Artificial Sequence
  Description of Artificial Sequence: Synthetic oligonucleotide
  Target: ATXN2; (-) strand; PAM type: YTN; PAM sequence: TTT
ggtgtgttttttagcagcca

SEQ ID NO: 60019 - DNA, 20 bp, Artificial Sequence
  Description of Artificial Sequence: Synthetic oligonucleotide
  Target: ATXN2; (-) strand; PAM type: YTN; PAM sequence: TTT
tggtgtgttttttagcagcc

SEQ ID NO: 60020 - DNA, 20 bp, Artificial Sequence
  Description of Artificial Sequence: Synthetic oligonucleotide
  Target: ATXN2; (-) strand; PAM type: YTN; PAM sequence: TTT
ttggtgtgttttttagcagc

SEQ ID NO: 60021 - DNA, 20 bp, Artificial Sequence
  Description of Artificial Sequence: Synthetic oligonucleotide
  Target: ATXN2; (-) strand; PAM type: YTN; PAM sequence: TTT
tttggtgtgttttttagcag

SEQ ID NO: 60022 - DNA, 20 bp, Artificial Sequence
  Description of Artificial Sequence: Synthetic oligonucleotide
  Target: ATXN2; (-) strand; PAM type: YTN; PAM sequence: TTT
ttttggtgtgttttttagca

SEQ ID NO: 60023 - DNA, 20 bp, Artificial Sequence
  Description of Artificial Sequence: Synthetic oligonucleotide
  Target: ATXN2; (-) strand; PAM type: YTN; PAM sequence: TTA
atttttttggtgtgtttttt

SEQ ID NO: 60024 - DNA, 20 bp, Artificial Sequence
  Description of Artificial Sequence: Synthetic oligonucleotide
  Target: ATXN2; (-) strand; PAM type: YTN; PAM sequence: CTT
aatttttttggtgtgttttt

SEQ ID NO: 60025 - DNA, 20 bp, Artificial Sequence
  Description of Artificial Sequence: Synthetic oligonucleotide
  Target: ATXN2; (-) strand; PAM type: YTN; PAM sequence: TTA
gcgccttaatttttttggtg

SEQ ID NO: 60026 - DNA, 20 bp, Artificial Sequence
  Description of Artificial Sequence: Synthetic oligonucleotide
  Target: ATXN2; (-) strand; PAM type: YTN; PAM sequence: TTT
agcgccttaatttttttggt

SEQ ID NO: 60027 - DNA, 20 bp, Artificial Sequence
  Description of Artificial Sequence: Synthetic oligonucleotide
  Target: ATXN2; (-) strand; PAM type: YTN; PAM sequence: CTT
tagcgccttaatttttttgg

SEQ ID NO: 60028 - DNA, 20 bp, Artificial Sequence
  Description of Artificial Sequence: Synthetic oligonucleotide
  Target: ATXN2; (-) strand; PAM type: YTN; PAM sequence: CTA
tccaggagataatatgtccc

SEQ ID NO: 60029 - DNA, 20 bp, Artificial Sequence
  Description of Artificial Sequence: Synthetic oligonucleotide
  Target: ATXN2; (-) strand; PAM type: YTN; PAM sequence: TTA
tctatccaggagataatatg

SEQ ID NO: 60030 - DNA, 20 bp, Artificial Sequence
  Description of Artificial Sequence: Synthetic oligonucleotide
  Target: ATXN2; (-) strand; PAM type: YTN; PAM sequence: TTT
atctatccaggagataatat

SEQ ID NO: 60031 - DNA, 20 bp, Artificial Sequence
  Description of Artificial Sequence: Synthetic oligonucleotide
  Target: ATXN2; (-) strand; PAM type: YTN; PAM sequence: TTT
tatctatccaggagataata

SEQ ID NO: 60032 - DNA, 20 bp, Artificial Sequence
  Description of Artificial Sequence: Synthetic oligonucleotide
  Target: ATXN2; (-) strand; PAM type: YTN; PAM sequence: CTA
gatgttttatctatccagga

SEQ ID NO: 60033 - DNA, 20 bp, Artificial Sequence
  Description of Artificial Sequence: Synthetic oligonucleotide
  Target: ATXN2; (-) strand; PAM type: YTN; PAM sequence: TTC
ctagatgttttatctatcca

SEQ ID NO: 60034 - DNA, 20 bp, Artificial Sequence
  Description of Artificial Sequence: Synthetic oligonucleotide
  Target: ATXN2; (-) strand; PAM type: YTN; PAM sequence: CTG
ataggagtagtcagtgagtt

SEQ ID NO: 60035 - DNA, 20 bp, Artificial Sequence
  Description of Artificial Sequence: Synthetic oligonucleotide
  Target: ATXN2; (-) strand; PAM type: YTN; PAM sequence: TTC
ctgataggagtagtcagtga

SEQ ID NO: 60036 - DNA, 20 bp, Artificial Sequence
  Description of Artificial Sequence: Synthetic oligonucleotide
  Target: ATXN2; (-) strand; PAM type: YTN; PAM sequence: TTT
cctgataggagtagtcagtg

SEQ ID NO: 60037 - DNA, 20 bp, Artificial Sequence
  Description of Artificial Sequence: Synthetic oligonucleotide
  Target: ATXN2; (-) strand; PAM type: YTN; PAM sequence: TTT
tcctgataggagtagtcagt

SEQ ID NO: 60038 - DNA, 20 bp, Artificial Sequence
  Description of Artificial Sequence: Synthetic oligonucleotide
  Target: ATXN2; (-) strand; PAM type: YTN; PAM sequence: TTT
ttcctgataggagtagtcag

SEQ ID NO: 60039 - DNA, 20 bp, Artificial Sequence
  Description of Artificial Sequence: Synthetic oligonucleotide
  Target: ATXN2; (-) strand; PAM type: YTN; PAM sequence: CTT
tttcctgataggagtagtca

SEQ ID NO: 60040 - DNA, 20 bp, Artificial Sequence
  Description of Artificial Sequence: Synthetic oligonucleotide
  Target: ATXN2; (-) strand; PAM type: YTN; PAM sequence: TTC
agtgaggagtcatgtaatca

SEQ ID NO: 60041 - DNA, 20 bp, Artificial Sequence
  Description of Artificial Sequence: Synthetic oligonucleotide
  Target: ATXN2; (-) strand; PAM type: YTN; PAM sequence: TTT
cagtgaggagtcatgtaatc

SEQ ID NO: 60042 - DNA, 20 bp, Artificial Sequence
  Description of Artificial Sequence: Synthetic oligonucleotide
  Target: ATXN2; (-) strand; PAM type: YTN; PAM sequence: CTT
tcagtgaggagtcatgtaat

SEQ ID NO: 60043 - DNA, 20 bp, Artificial Sequence
  Description of Artificial Sequence: Synthetic oligonucleotide
  Target: ATXN2; (-) strand; PAM type: YTN; PAM sequence: TTC
acagatgtgtgtactttcag

SEQ ID NO: 60044 - DNA, 20 bp, Artificial Sequence
  Description of Artificial Sequence: Synthetic oligonucleotide
  Target: ATXN2; (-) strand; PAM type: YTN; PAM sequence: TTT
cacagatgtgtgtactttca

SEQ ID NO: 60045 - DNA, 20 bp, Artificial Sequence
  Description of Artificial Sequence: Synthetic oligonucleotide
  Target: ATXN2; (-) strand; PAM type: YTN; PAM sequence: TTC
cccaatgtttcacagatgtg

SEQ ID NO: 60046 - DNA, 20 bp, Artificial Sequence
  Description of Artificial Sequence: Synthetic oligonucleotide
  Target: ATXN2; (-) strand; PAM type: YTN; PAM sequence: TTT
ccccaatgtttcacagatgt

SEQ ID NO: 60047 - DNA, 20 bp, Artificial Sequence
  Description of Artificial Sequence: Synthetic oligonucleotide
  Target: ATXN2; (-) strand; PAM type: YTN; PAM sequence: TTT
tccccaatgtttcacagatg

SEQ ID NO: 60048 - DNA, 20 bp, Artificial Sequence
  Description of Artificial Sequence: Synthetic oligonucleotide
  Target: ATXN2; (-) strand; PAM type: YTN; PAM sequence: TTT
ttccccaatgtttcacagat

SEQ ID NO: 60049 - DNA, 20 bp, Artificial Sequence
  Description of Artificial Sequence: Synthetic oligonucleotide
  Target: ATXN2; (-) strand; PAM type: YTN; PAM sequence: TTT
tttccccaatgtttcacaga

SEQ ID NO: 60050 - DNA, 20 bp, Artificial Sequence
  Description of Artificial Sequence: Synthetic oligonucleotide
  Target: ATXN2; (-) strand; PAM type: YTN; PAM sequence: TTT
ttttccccaatgtttcacag

SEQ ID NO: 60051 - DNA, 20 bp, Artificial Sequence
  Description of Artificial Sequence: Synthetic oligonucleotide
  Target: ATXN2; (-) strand; PAM type: YTN; PAM sequence: TTT
tttttccccaatgtttcaca

SEQ ID NO: 60052 - DNA, 20 bp, Artificial Sequence
  Description of Artificial Sequence: Synthetic oligonucleotide
  Target: ATXN2; (-) strand; PAM type: YTN; PAM sequence: TTT
ttttttccccaatgtttcac

SEQ ID NO: 60053 - DNA, 20 bp, Artificial Sequence
  Description of Artificial Sequence: Synthetic oligonucleotide
  Target: ATXN2; (-) strand; PAM type: YTN; PAM sequence: TTT
tttttttccccaatgtttca

SEQ ID NO: 60054 - DNA, 20 bp, Artificial Sequence
  Description of Artificial Sequence: Synthetic oligonucleotide
  Target: ATXN2; (-) strand; PAM type: YTN; PAM sequence: TTT
ttttttttccccaatgtttc

SEQ ID NO: 60055 - DNA, 20 bp, Artificial Sequence
  Description of Artificial Sequence: Synthetic oligonucleotide
  Target: ATXN2; (-) strand; PAM type: YTN; PAM sequence: TTT
tttttttttccccaatgttt

SEQ ID NO: 60056 - DNA, 20 bp, Artificial Sequence
  Description of Artificial Sequence: Synthetic oligonucleotide
  Target: ATXN2; (-) strand; PAM type: YTN; PAM sequence: TTT
ttttttttttccccaatgtt

SEQ ID NO: 60057 - DNA, 20 bp, Artificial Sequence
  Description of Artificial Sequence: Synthetic oligonucleotide
  Target: ATXN2; (-) strand; PAM type: YTN; PAM sequence: TTT
tttttttttttccccaatgt

SEQ ID NO: 60058 - DNA, 20 bp, Artificial Sequence
  Description of Artificial Sequence: Synthetic oligonucleotide
  Target: ATXN2; (-) strand; PAM type: YTN; PAM sequence: TTG
ggttttttttttttttcccc

SEQ ID NO: 60059 - DNA, 20 bp, Artificial Sequence
  Description of Artificial Sequence: Synthetic oligonucleotide
  Target: ATXN2; (-) strand; PAM type: YTN; PAM sequence: TTG
atcagattgggttttttttt

SEQ ID NO: 60060 - DNA, 20 bp, Artificial Sequence
  Description of Artificial Sequence: Synthetic oligonucleotide
  Target: ATXN2; (-) strand; PAM type: YTN; PAM sequence: CTT
gatcagattgggtttttttt

SEQ ID NO: 60061 - DNA, 20 bp, Artificial Sequence
  Description of Artificial Sequence: Synthetic oligonucleotide
  Target: ATXN2; (-) strand; PAM type: YTN; PAM sequence: CTG
atagtaaataatgaaggctt

SEQ ID NO: 60062 - DNA, 20 bp, Artificial Sequence
  Description of Artificial Sequence: Synthetic oligonucleotide
  Target: ATXN2; (-) strand; PAM type: YTN; PAM sequence: TTG
taaactgatagtaaataatg

SEQ ID NO: 60063 - DNA, 20 bp, Artificial Sequence
  Description of Artificial Sequence: Synthetic oligonucleotide
  Target: ATXN2; (-) strand; PAM type: YTN; PAM sequence: TTT
gtaaactgatagtaaataat

SEQ ID NO: 60064 - DNA, 20 bp, Artificial Sequence
  Description of Artificial Sequence: Synthetic oligonucleotide
  Target: ATXN2; (-) strand; PAM type: YTN; PAM sequence: CTT
tgtaaactgatagtaaataa

SEQ ID NO: 60065 - DNA, 20 bp, Artificial Sequence
  Description of Artificial Sequence: Synthetic oligonucleotide
  Target: ATXN2; (-) strand; PAM type: YTN; PAM sequence: CTG
taatctttgtaaactgatag

SEQ ID NO: 60066 - DNA, 20 bp, Artificial Sequence
  Description of Artificial Sequence: Synthetic oligonucleotide
  Target: ATXN2; (-) strand; PAM type: YTN; PAM sequence: CTG
tcccctgtaatctttgtaaa

SEQ ID NO: 60067 - DNA, 20 bp, Artificial Sequence
  Description of Artificial Sequence: Synthetic oligonucleotide
  Target: ATXN2; (-) strand; PAM type: YTN; PAM sequence: TTC
tgtcccctgtaatctttgta

SEQ ID NO: 60068 - DNA, 20 bp, Artificial Sequence
  Description of Artificial Sequence: Synthetic oligonucleotide
  Target: ATXN2; (-) strand; PAM type: YTN; PAM sequence: CTT
ctgtcccctgtaatctttgt

SEQ ID NO: 60069 - DNA, 20 bp, Artificial Sequence
  Description of Artificial Sequence: Synthetic oligonucleotide
  Target: ATXN2; (-) strand; PAM type: YTN; PAM sequence: TTA
aagtagacttctgtcccctg

SEQ ID NO: 60070 - DNA, 20 bp, Artificial Sequence
  Description of Artificial Sequence: Synthetic oligonucleotide
  Target: ATXN2; (-) strand; PAM type: YTN; PAM sequence: TTT
aaagtagacttctgtcccct

SEQ ID NO: 60071 - DNA, 20 bp, Artificial Sequence
  Description of Artificial Sequence: Synthetic oligonucleotide
  Target: ATXN2; (-) strand; PAM type: YTN; PAM sequence: TTG
atatttaaagtagacttctg

SEQ ID NO: 60072 - DNA, 20 bp, Artificial Sequence
  Description of Artificial Sequence: Synthetic oligonucleotide
  Target: ATXN2; (-) strand; PAM type: YTN; PAM sequence: CTG
tgttgatatttaaagtagac

SEQ ID NO: 60073 - DNA, 20 bp, Artificial Sequence
  Description of Artificial Sequence: Synthetic oligonucleotide
  Target: ATXN2; (-) strand; PAM type: YTN; PAM sequence: CTG
tatccctgtgttgatattta

SEQ ID NO: 60074 - DNA, 20 bp, Artificial Sequence
  Description of Artificial Sequence: Synthetic oligonucleotide
  Target: ATXN2; (-) strand; PAM type: YTN; PAM sequence: CTG
actgtatccctgtgttgata

SEQ ID NO: 60075 - DNA, 20 bp, Artificial Sequence
  Description of Artificial Sequence: Synthetic oligonucleotide
  Target: ATXN2; (-) strand; PAM type: YTN; PAM sequence: TTG
ctgactgtatccctgtgttg

SEQ ID NO: 60076 - DNA, 20 bp, Artificial Sequence
  Description of Artificial Sequence: Synthetic oligonucleotide
  Target: ATXN2; (-) strand; PAM type: YTN; PAM sequence: TTT
gctgactgtatccctgtgtt

SEQ ID NO: 60077 - DNA, 20 bp, Artificial Sequence
  Description of Artificial Sequence: Synthetic oligonucleotide
  Target: ATXN2; (-) strand; PAM type: YTN; PAM sequence: TTT
tgctgactgtatccctgtgt

SEQ ID NO: 60078 - DNA, 20 bp, Artificial Sequence
  Description of Artificial Sequence: Synthetic oligonucleotide
  Target: ATXN2; (-) strand; PAM type: YTN; PAM sequence: CTG
aattttgctgactgtatccc

SEQ ID NO: 60079 - DNA, 20 bp, Artificial Sequence
  Description of Artificial Sequence: Synthetic oligonucleotide
  Target: ATXN2; (-) strand; PAM type: YTN; PAM sequence: TTC
ccacgatctgaattttgctg

SEQ ID NO: 60080 - DNA, 20 bp, Artificial Sequence
  Description of Artificial Sequence: Synthetic oligonucleotide
  Target: ATXN2; (-) strand; PAM type: YTN; PAM sequence: TTT
cccacgatctgaattttgct

SEQ ID NO: 60081 - DNA, 20 bp, Artificial Sequence
  Description of Artificial Sequence: Synthetic oligonucleotide
  Target: ATXN2; (-) strand; PAM type: YTN; PAM sequence: TTT
tcccacgatctgaattttgc

SEQ ID NO: 60082 - DNA, 20 bp, Artificial Sequence
  Description of Artificial Sequence: Synthetic oligonucleotide
  Target: ATXN2; (-) strand; PAM type: YTN; PAM sequence: TTT
ttcccacgatctgaattttg

SEQ ID NO: 60083 - DNA, 20 bp, Artificial Sequence
  Description of Artificial Sequence: Synthetic oligonucleotide
  Target: ATXN2; (-) strand; PAM type: YTN; PAM sequence: TTT
tttcccacgatctgaatttt

SEQ ID NO: 60084 - DNA, 20 bp, Artificial Sequence
  Description of Artificial Sequence: Synthetic oligonucleotide
  Target: ATXN2; (-) strand; PAM type: YTN; PAM sequence: TTT
ttttcccacgatctgaattt

SEQ ID NO: 60085 - DNA, 20 bp, Artificial Sequence
  Description of Artificial Sequence: Synthetic oligonucleotide
  Target: ATXN2; (-) strand; PAM type: YTN; PAM sequence: TTG
tatttttttcccacgatctg

SEQ ID NO: 60086 - DNA, 20 bp, Artificial Sequence
  Description of Artificial Sequence: Synthetic oligonucleotide
  Target: ATXN2; (-) strand; PAM type: YTN; PAM sequence: CTT
gtatttttttcccacgatct

SEQ ID NO: 60087 - DNA, 20 bp, Artificial Sequence
  Description of Artificial Sequence: Synthetic oligonucleotide
  Target: ATXN2; (-) strand; PAM type: YTN; PAM sequence: TTG
tcttgtatttttttcccacg

SEQ ID NO: 60088 - DNA, 20 bp, Artificial Sequence
  Description of Artificial Sequence: Synthetic oligonucleotide
  Target: ATXN2; (-) strand; PAM type: YTN; PAM sequence: CTT
gtcttgtatttttttcccac

SEQ ID NO: 60089 - DNA, 20 bp, Artificial Sequence
  Description of Artificial Sequence: Synthetic oligonucleotide
  Target: ATXN2; (-) strand; PAM type: YTN; PAM sequence: TTC
atatccagcttgtcttgtat

SEQ ID NO: 60090 - DNA, 20 bp, Artificial Sequence
  Description of Artificial Sequence: Synthetic oligonucleotide
  Target: ATXN2; (-) strand; PAM type: YTN; PAM sequence: TTG
ttcatatccagcttgtcttg

SEQ ID NO: 60091 - DNA, 20 bp, Artificial Sequence
  Description of Artificial Sequence: Synthetic oligonucleotide
  Target: ATXN2; (-) strand; PAM type: YTN; PAM sequence: CTT
gttcatatccagcttgtctt

SEQ ID NO: 60092 - DNA, 20 bp, Artificial Sequence
  Description of Artificial Sequence: Synthetic oligonucleotide
  Target: ATXN2; (-) strand; PAM type: YTN; PAM sequence: TTG
tcttgttcatatccagcttg

SEQ ID NO: 60093 - DNA, 20 bp, Artificial Sequence
  Description of Artificial Sequence: Synthetic oligonucleotide
  Target: ATXN2; (-) strand; PAM type: YTN; PAM sequence: TTT
gtcttgttcatatccagctt

SEQ ID NO: 60094 - DNA, 20 bp, Artificial Sequence
  Description of Artificial Sequence: Synthetic oligonucleotide
  Target: ATXN2; (-) strand; PAM type: YTN; PAM sequence: TTT
tgtcttgttcatatccagct

SEQ ID NO: 60095 - DNA, 20 bp, Artificial Sequence
  Description of Artificial Sequence: Synthetic oligonucleotide
  Target: ATXN2; (-) strand; PAM type: YTN; PAM sequence: TTT
ttgtcttgttcatatccagc

SEQ ID NO: 60096 - DNA, 20 bp, Artificial Sequence
  Description of Artificial Sequence: Synthetic oligonucleotide
  Target: ATXN2; (-) strand; PAM type: YTN; PAM sequence: TTA
gtttttgtcttgttcatatc

SEQ ID NO: 60097 - DNA, 20 bp, Artificial Sequence
  Description of Artificial Sequence: Synthetic oligonucleotide
  Target: ATXN2; (-) strand; PAM type: YTN; PAM sequence: CTT
agtttttgtcttgttcatat

SEQ ID NO: 60098 - DNA, 20 bp, Artificial Sequence
  Description of Artificial Sequence: Synthetic oligonucleotide
  Target: ATXN2; (-) strand; PAM type: YTN; PAM sequence: TTC
ccttagtttttgtcttgttc

SEQ ID NO: 60099 - DNA, 20 bp, Artificial Sequence
  Description of Artificial Sequence: Synthetic oligonucleotide
  Target: ATXN2; (-) strand; PAM type: YTN; PAM sequence: TTT
cccttagtttttgtcttgtt

SEQ ID NO: 60100 - DNA, 20 bp, Artificial Sequence
  Description of Artificial Sequence: Synthetic oligonucleotide
  Target: ATXN2; (-) strand; PAM type: YTN; PAM sequence: TTT
tcccttagtttttgtcttgt

SEQ ID NO: 60101 - DNA, 20 bp, Artificial Sequence
  Description of Artificial Sequence: Synthetic oligonucleotide
  Target: ATXN2; (-) strand; PAM type: YTN; PAM sequence: TTT
ttcccttagtttttgtcttg

SEQ ID NO: 60102 - DNA, 20 bp, Artificial Sequence
  Description of Artificial Sequence: Synthetic oligonucleotide
  Target: ATXN2; (-) strand; PAM type: YTN; PAM sequence: TTA
cagtttttcccttagttttt

SEQ ID NO: 60103 - DNA, 20 bp, Artificial Sequence
  Description of Artificial Sequence: Synthetic oligonucleotide
  Target: ATXN2; (-) strand; PAM type: YTN; PAM sequence: TTA
attacagtttttcccttagt

SEQ ID NO: 60104 - DNA, 20 bp, Artificial Sequence
  Description of Artificial Sequence: Synthetic oligonucleotide
  Target: ATXN2; (-) strand; PAM type: YTN; PAM sequence: TTT
aattacagtttttcccttag

SEQ ID NO: 60105 - DNA, 20 bp, Artificial Sequence
  Description of Artificial Sequence: Synthetic oligonucleotide
  Target: ATXN2; (-) strand; PAM type: YTN; PAM sequence: TTT
taattacagtttttccctta

SEQ ID NO: 60106 - DNA, 20 bp, Artificial Sequence
  Description of Artificial Sequence: Synthetic oligonucleotide
  Target: ATXN2; (-) strand; PAM type: YTN; PAM sequence: CTC
acagttttaattacagtttt

SEQ ID NO: 60107 - DNA, 20 bp, Artificial Sequence
  Description of Artificial Sequence: Synthetic oligonucleotide
  Target: ATXN2; (-) strand; PAM type: YTN; PAM sequence: CTC
agccctcacagttttaatta

SEQ ID NO: 60108 - DNA, 20 bp, Artificial Sequence
  Description of Artificial Sequence: Synthetic oligonucleotide
  Target: ATXN2; (-) strand; PAM type: YTN; PAM sequence: CTG
cactcagccctcacagtttt

SEQ ID NO: 60109 - DNA, 20 bp, Artificial Sequence
  Description of Artificial Sequence: Synthetic oligonucleotide
  Target: ATXN2; (-) strand; PAM type: YTN; PAM sequence: TTA
caggcatgagccactgcact

SEQ ID NO: 60110 - DNA, 20 bp, Artificial Sequence
  Description of Artificial Sequence: Synthetic oligonucleotide
  Target: ATXN2; (-) strand; PAM type: YTN; PAM sequence: CTC
ccaaggtgccaggattacag

SEQ ID NO: 60111 - DNA, 20 bp, Artificial Sequence
  Description of Artificial Sequence: Synthetic oligonucleotide
  Target: ATXN2; (-) strand; PAM type: YTN; PAM sequence: TTG
actcccaaggtgccaggatt

SEQ ID NO: 60112 - DNA, 20 bp, Artificial Sequence
  Description of Artificial Sequence: Synthetic oligonucleotide
  Target: ATXN2; (-) strand; PAM type: YTN; PAM sequence: CTT
gactcccaaggtgccaggat

SEQ ID NO: 60113 - DNA, 20 bp, Artificial Sequence
  Description of Artificial Sequence: Synthetic oligonucleotide
  Target: ATXN2; (-) strand; PAM type: YTN; PAM sequence: CTG
ccttgactcccaaggtgcca

SEQ ID NO: 60114 - DNA, 20 bp, Artificial Sequence
  Description of Artificial Sequence: Synthetic oligonucleotide
  Target: ATXN2; (-) strand; PAM type: YTN; PAM sequence: CTG
cctgccttgactcccaaggt

SEQ ID NO: 60115 - DNA, 20 bp, Artificial Sequence
  Description of Artificial Sequence: Synthetic oligonucleotide
  Target: ATXN2; (-) strand; PAM type: YTN; PAM sequence: CTC
aagcagtctgcctgccttga

SEQ ID NO: 60116 - DNA, 20 bp, Artificial Sequence
  Description of Artificial Sequence: Synthetic oligonucleotide
  Target: ATXN2; (-) strand; PAM type: YTN; PAM sequence: CTG
agctcaagcagtctgcctgc

SEQ ID NO: 60117 - DNA, 20 bp, Artificial Sequence
  Description of Artificial Sequence: Synthetic oligonucleotide
  Target: ATXN2; (-) strand; PAM type: YTN; PAM sequence: TTC
ctgagctcaagcagtctgcc

SEQ ID NO: 60118 - DNA, 20 bp, Artificial Sequence
  Description of Artificial Sequence: Synthetic oligonucleotide
  Target: ATXN2; (-) strand; PAM type: YTN; PAM sequence: TTC
gaattcctgagctcaagcag

SEQ ID NO: 60119 - DNA, 20 bp, Artificial Sequence
  Description of Artificial Sequence: Synthetic oligonucleotide
  Target: ATXN2; (-) strand; PAM type: YTN; PAM sequence: TTT
cgaattcctgagctcaagca

SEQ ID NO: 60120 - DNA, 20 bp, Artificial Sequence
  Description of Artificial Sequence: Synthetic oligonucleotide
  Target: ATXN2; (-) strand; PAM type: YTN; PAM sequence: TTG
tagagacagggtttcgaatt

SEQ ID NO: 60121 - DNA, 20 bp, Artificial Sequence
  Description of Artificial Sequence: Synthetic oligonucleotide
  Target: ATXN2; (-) strand; PAM type: YTN; PAM sequence: TTT
gtagagacagggtttcgaat

SEQ ID NO: 60122 - DNA, 20 bp, Artificial Sequence
  Description of Artificial Sequence: Synthetic oligonucleotide
  Target: ATXN2; (-) strand; PAM type: YTN; PAM sequence: TTT
tgtagagacagggtttcgaa

SEQ ID NO: 60123 - DNA, 20 bp, Artificial Sequence
  Description of Artificial Sequence: Synthetic oligonucleotide
  Target: ATXN2; (-) strand; PAM type: YTN; PAM sequence: TTT
ttgtagagacagggtttcga

SEQ ID NO: 60124 - DNA, 20 bp, Artificial Sequence
  Description of Artificial Sequence: Synthetic oligonucleotide
  Target: ATXN2; (-) strand; PAM type: YTN; PAM sequence: TTT
tttgtagagacagggtttcg

SEQ ID NO: 60125 - DNA, 20 bp, Artificial Sequence
  Description of Artificial Sequence: Synthetic oligonucleotide
  Target: ATXN2; (-) strand; PAM type: YTN; PAM sequence: TTG
tattttttgtagagacaggg

SEQ ID NO: 60126 - DNA, 20 bp, Artificial Sequence
  Description of Artificial Sequence: Synthetic oligonucleotide
  Target: ATXN2; (-) strand; PAM type: YTN; PAM sequence: TTT
gtattttttgtagagacagg

SEQ ID NO: 60127 - DNA, 20 bp, Artificial Sequence
  Description of Artificial Sequence: Synthetic oligonucleotide
  Target: ATXN2; (-) strand; PAM type: YTN; PAM sequence: TTT
tgtattttttgtagagacag

SEQ ID NO: 60128 - DNA, 20 bp, Artificial Sequence
  Description of Artificial Sequence: Synthetic oligonucleotide
  Target: ATXN2; (-) strand; PAM type: YTN; PAM sequence: TTT
ttgtattttttgtagagaca

SEQ ID NO: 60129 - DNA, 20 bp, Artificial Sequence
  Description of Artificial Sequence: Synthetic oligonucleotide
  Target: ATXN2; (-) strand; PAM type: YTN; PAM sequence: CTA
atttttgtattttttgtaga

SEQ ID NO: 60130 - DNA, 20 bp, Artificial Sequence
  Description of Artificial Sequence: Synthetic oligonucleotide
  Target: ATXN2; (-) strand; PAM type: YTN; PAM sequence: CTG
gctaatttttgtattttttg

SEQ ID NO: 60131 - DNA, 20 bp, Artificial Sequence
  Description of Artificial Sequence: Synthetic oligonucleotide
  Target: ATXN2; (-) strand; PAM type: YTN; PAM sequence: CTA
aaggtgcgcgccaccatacc

SEQ ID NO: 60132 - DNA, 20 bp, Artificial Sequence
  Description of Artificial Sequence: Synthetic oligonucleotide
  Target: ATXN2; (-) strand; PAM type: YTN; PAM sequence: CTG
ggactaaaggtgcgcgccac

SEQ ID NO: 60133 - DNA, 20 bp, Artificial Sequence
  Description of Artificial Sequence: Synthetic oligonucleotide
  Target: ATXN2; (-) strand; PAM type: YTN; PAM sequence: CTC
ccaagtagctgggactaaag

SEQ ID NO: 60134 - DNA, 20 bp, Artificial Sequence
  Description of Artificial Sequence: Synthetic oligonucleotide
  Target: ATXN2; (-) strand; PAM type: YTN; PAM sequence: CTC
aacctcccaagtagctggga

SEQ ID NO: 60135 - DNA, 20 bp, Artificial Sequence
  Description of Artificial Sequence: Synthetic oligonucleotide
  Target: ATXN2; (-) strand; PAM type: YTN; PAM sequence: CTC
ccacctcaacctcccaagta

SEQ ID NO: 60136 - DNA, 20 bp, Artificial Sequence
  Description of Artificial Sequence: Synthetic oligonucleotide
  Target: ATXN2; (-) strand; PAM type: YTN; PAM sequence: TTA
ggtggtcctcccacctcaac

SEQ ID NO: 60137 - DNA, 20 bp, Artificial Sequence
  Description of Artificial Sequence: Synthetic oligonucleotide
  Target: ATXN2; (-) strand; PAM type: YTN; PAM sequence: CTT
aggtggtcctcccacctcaa

SEQ ID NO: 60138 - DNA, 20 bp, Artificial Sequence
  Description of Artificial Sequence: Synthetic oligonucleotide
  Target: ATXN2; (-) strand; PAM type: YTN; PAM sequence: TTG
ggcttaggtggtcctcccac

SEQ ID NO: 60139 - DNA, 20 bp, Artificial Sequence
  Description of Artificial Sequence: Synthetic oligonucleotide
  Target: ATXN2; (-) strand; PAM type: YTN; PAM sequence: CTA
ccaattgggcttaggtggtc

SEQ ID NO: 60140 - DNA, 20 bp, Artificial Sequence
  Description of Artificial Sequence: Synthetic oligonucleotide
  Target: ATXN2; (-) strand; PAM type: YTN; PAM sequence: CTC
taccaattgggcttaggtgg

SEQ ID NO: 60141 - DNA, 20 bp, Artificial Sequence
  Description of Artificial Sequence: Synthetic oligonucleotide
  Target: ATXN2; (-) strand; PAM type: YTN; PAM sequence: CTC
agtgcagtctctaccaattg

SEQ ID NO: 60142 - DNA, 20 bp, Artificial Sequence
  Description of Artificial Sequence: Synthetic oligonucleotide
  Target: ATXN2; (-) strand; PAM type: YTN; PAM sequence: TTC
agctcagtgcagtctctacc

SEQ ID NO: 60143 - DNA, 20 bp, Artificial Sequence
  Description of Artificial Sequence: Synthetic oligonucleotide
  Target: ATXN2; (-) strand; PAM type: YTN; PAM sequence: TTT
cagctcagtgcagtctctac

SEQ ID NO: 60144 - DNA, 20 bp, Artificial Sequence
  Description of Artificial Sequence: Synthetic oligonucleotide
  Target: ATXN2; (-) strand; PAM type: YTN; PAM sequence: CTG
gagtgcagtggcatgatttc

SEQ ID NO: 60145 - DNA, 20 bp, Artificial Sequence
  Description of Artificial Sequence: Synthetic oligonucleotide
  Target: ATXN2; (-) strand; PAM type: YTN; PAM sequence: CTG
tcacccaagctggagtgcag

SEQ ID NO: 60146 - DNA, 20 bp, Artificial Sequence
  Description of Artificial Sequence: Synthetic oligonucleotide
  Target: ATXN2; (-) strand; PAM type: YTN; PAM sequence: CTC
tgtcacccaagctggagtgc

SEQ ID NO: 60147 - DNA, 20 bp, Artificial Sequence
  Description of Artificial Sequence: Synthetic oligonucleotide
  Target: ATXN2; (-) strand; PAM type: YTN; PAM sequence: CTA
actctgtcacccaagctgga

SEQ ID NO: 60148 - DNA, 20 bp, Artificial Sequence
  Description of Artificial Sequence: Synthetic oligonucleotide
  Target: ATXN2; (-) strand; PAM type: YTN; PAM sequence: TTG
agacagtgtctaactctgtc

SEQ ID NO: 60149 - DNA, 20 bp, Artificial Sequence
  Description of Artificial Sequence: Synthetic oligonucleotide
  Target: ATXN2; (-) strand; PAM type: YTN; PAM sequence: TTT
gagacagtgtctaactctgt

SEQ ID NO: 60150 - DNA, 20 bp, Artificial Sequence
  Description of Artificial Sequence: Synthetic oligonucleotide
  Target: ATXN2; (-) strand; PAM type: YTN; PAM sequence: TTT
tgagacagtgtctaactctg

SEQ ID NO: 60151 - DNA, 20 bp, Artificial Sequence
  Description of Artificial Sequence: Synthetic oligonucleotide
  Target: ATXN2; (-) strand; PAM type: YTN; PAM sequence: TTT
ttgagacagtgtctaactct

SEQ ID NO: 60152 - DNA, 20 bp, Artificial Sequence
  Description of Artificial Sequence: Synthetic oligonucleotide
  Target: ATXN2; (-) strand; PAM type: YTN; PAM sequence: TTT
tttgagacagtgtctaactc

SEQ ID NO: 60153 - DNA, 20 bp, Artificial Sequence
  Description of Artificial Sequence: Synthetic oligonucleotide
  Target: ATXN2; (-) strand; PAM type: YTN; PAM sequence: TTG
ttttttgagacagtgtctaa

SEQ ID NO: 60154 - DNA, 20 bp, Artificial Sequence
  Description of Artificial Sequence: Synthetic oligonucleotide
  Target: ATXN2; (-) strand; PAM type: YTN; PAM sequence: TTT
gttttttgagacagtgtcta

SEQ ID NO: 60155 - DNA, 20 bp, Artificial Sequence
  Description of Artificial Sequence: Synthetic oligonucleotide
  Target: ATXN2; (-) strand; PAM type: YTN; PAM sequence: TTG
tttgttttttgagacagtgt

SEQ ID NO: 60156 - DNA, 20 bp, Artificial Sequence
  Description of Artificial Sequence: Synthetic oligonucleotide
  Target: ATXN2; (-) strand; PAM type: YTN; PAM sequence: TTT
gtttgttttttgagacagtg

SEQ ID NO: 60157 - DNA, 20 bp, Artificial Sequence
  Description of Artificial Sequence: Synthetic oligonucleotide
  Target: ATXN2; (-) strand; PAM type: YTN; PAM sequence: TTG
tttgtttgttttttgagaca

SEQ ID NO: 60158 - DNA, 20 bp, Artificial Sequence
  Description of Artificial Sequence: Synthetic oligonucleotide
  Target: ATXN2; (-) strand; PAM type: YTN; PAM sequence: TTT
gtttgtttgttttttgagac

SEQ ID NO: 60159 - DNA, 20 bp, Artificial Sequence
  Description of Artificial Sequence: Synthetic oligonucleotide
  Target: ATXN2; (-) strand; PAM type: YTN; PAM sequence: TTT
tgtttgtttgttttttgaga

SEQ ID NO: 60160 - DNA, 20 bp, Artificial Sequence
  Description of Artificial Sequence: Synthetic oligonucleotide
  Target: ATXN2; (-) strand; PAM type: YTN; PAM sequence: TTT
ttgtttgtttgttttttgag

SEQ ID NO: 60161 - DNA, 20 bp, Artificial Sequence
  Description of Artificial Sequence: Synthetic oligonucleotide
  Target: ATXN2; (-) strand; PAM type: YTN; PAM sequence: TTT
tttgtttgtttgttttttga

SEQ ID NO: 60162 - DNA, 20 bp, Artificial Sequence
  Description of Artificial Sequence: Synthetic oligonucleotide
  Target: ATXN2; (-) strand; PAM type: YTN; PAM sequence: TTT
ttttgtttgtttgttttttg

SEQ ID NO: 60163 - DNA, 20 bp, Artificial Sequence
  Description of Artificial Sequence: Synthetic oligonucleotide
  Target: ATXN2; (-) strand; PAM type: YTN; PAM sequence: CTG
gatgagccatcacacccagc

SEQ ID NO: 60164 - DNA, 20 bp, Artificial Sequence
  Description of Artificial Sequence: Synthetic oligonucleotide
  Target: ATXN2; (-) strand; PAM type: YTN; PAM sequence: TTA
ggaggtgctggatgagccat

SEQ ID NO: 60165 - DNA, 20 bp, Artificial Sequence
  Description of Artificial Sequence: Synthetic oligonucleotide
  Target: ATXN2; (-) strand; PAM type: YTN; PAM sequence: TTT
aggaggtgctggatgagcca

SEQ ID NO: 60166 - DNA, 20 bp, Artificial Sequence
  Description of Artificial Sequence: Synthetic oligonucleotide
  Target: ATXN2; (-) strand; PAM type: YTN; PAM sequence: CTT
taggaggtgctggatgagcc

SEQ ID NO: 60167 - DNA, 20 bp, Artificial Sequence
  Description of Artificial Sequence: Synthetic oligonucleotide
  Target: ATXN2; (-) strand; PAM type: YTN; PAM sequence: TTA
caggccagcactttaggagg

SEQ ID NO: 60168 - DNA, 20 bp, Artificial Sequence
  Description of Artificial Sequence: Synthetic oligonucleotide
  Target: ATXN2; (-) strand; PAM type: YTN; PAM sequence: CTA
ggattacaggccagcacttt

SEQ ID NO: 60169 - DNA, 20 bp, Artificial Sequence
  Description of Artificial Sequence: Synthetic oligonucleotide
  Target: ATXN2; (-) strand; PAM type: YTN; PAM sequence: CTA
aagtgctaggattacaggcc

SEQ ID NO: 60170 - DNA, 20 bp, Artificial Sequence
  Description of Artificial Sequence: Synthetic oligonucleotide
  Target: ATXN2; (-) strand; PAM type: YTN; PAM sequence: CTC
ctaaagtgctaggattacag

SEQ ID NO: 60171 - DNA, 20 bp, Artificial Sequence
  Description of Artificial Sequence: Synthetic oligonucleotide
  Target: ATXN2; (-) strand; PAM type: YTN; PAM sequence: CTC
agcctcctaaagtgctagga

SEQ ID NO: 60172 - DNA, 20 bp, Artificial Sequence
  Description of Artificial Sequence: Synthetic oligonucleotide
  Target: ATXN2; (-) strand; PAM type: YTN; PAM sequence: CTA
cctcagcctcctaaagtgct

SEQ ID NO: 60173 - DNA, 20 bp, Artificial Sequence
  Description of Artificial Sequence: Synthetic oligonucleotide
  Target: ATXN2; (-) strand; PAM type: YTN; PAM sequence: TTC
tacctcagcctcctaaagtg

SEQ ID NO: 60174 - DNA, 20 bp, Artificial Sequence
  Description of Artificial Sequence: Synthetic oligonucleotide
  Target: ATXN2; (-) strand; PAM type: YTN; PAM sequence: TTT
ctacctcagcctcctaaagt

SEQ ID NO: 60175 - DNA, 20 bp, Artificial Sequence
  Description of Artificial Sequence: Synthetic oligonucleotide
  Target: ATXN2; (-) strand; PAM type: YTN; PAM sequence: CTT
tctacctcagcctcctaaag

SEQ ID NO: 60176 - DNA, 20 bp, Artificial Sequence
  Description of Artificial Sequence: Synthetic oligonucleotide
  Target: ATXN2; (-) strand; PAM type: YTN; PAM sequence: TTA
tctttctacctcagcctcct

SEQ ID NO: 60177 - DNA, 20 bp, Artificial Sequence
  Description of Artificial Sequence: Synthetic oligonucleotide
  Target: ATXN2; (-) strand; PAM type: YTN; PAM sequence: TTA
agttatctttctacctcagc

SEQ ID NO: 60178 - DNA, 20 bp, Artificial Sequence
  Description of Artificial Sequence: Synthetic oligonucleotide
  Target: ATXN2; (-) strand; PAM type: YTN; PAM sequence: CTT
aagttatctttctacctcag

SEQ ID NO: 60179 - DNA, 20 bp, Artificial Sequence
  Description of Artificial Sequence: Synthetic oligonucleotide
  Target: ATXN2; (-) strand; PAM type: YTN; PAM sequence: TTC
cagggcttaagttatctttc

SEQ ID NO: 60180 - DNA, 20 bp, Artificial Sequence
  Description of Artificial Sequence: Synthetic oligonucleotide
  Target: ATXN2; (-) strand; PAM type: YTN; PAM sequence: CTA
aattccagggcttaagttat

SEQ ID NO: 60181 - DNA, 20 bp, Artificial Sequence
  Description of Artificial Sequence: Synthetic oligonucleotide
  Target: ATXN2; (-) strand; PAM type: YTN; PAM sequence: CTA
gtcctaaattccagggctta

SEQ ID NO: 60182 - DNA, 20 bp, Artificial Sequence
  Description of Artificial Sequence: Synthetic oligonucleotide
  Target: ATXN2; (-) strand; PAM type: YTN; PAM sequence: TTG
cccaggctagtcctaaattc

SEQ ID NO: 60183 - DNA, 20 bp, Artificial Sequence
  Description of Artificial Sequence: Synthetic oligonucleotide
  Target: ATXN2; (-) strand; PAM type: YTN; PAM sequence: CTT
gcccaggctagtcctaaatt

SEQ ID NO: 60184 - DNA, 20 bp, Artificial Sequence
  Description of Artificial Sequence: Synthetic oligonucleotide
  Target: ATXN2; (-) strand; PAM type: YTN; PAM sequence: CTA
tcttgcccaggctagtccta

SEQ ID NO: 60185 - DNA, 20 bp, Artificial Sequence
  Description of Artificial Sequence: Synthetic oligonucleotide
  Target: ATXN2; (-) strand; PAM type: YTN; PAM sequence: TTC
tatcttgcccaggctagtcc

SEQ ID NO: 60186 - DNA, 20 bp, Artificial Sequence
  Description of Artificial Sequence: Synthetic oligonucleotide
  Target: ATXN2; (-) strand; PAM type: YTN; PAM sequence: TTT
ctatcttgcccaggctagtc

SEQ ID NO: 60187 - DNA, 20 bp, Artificial Sequence
  Description of Artificial Sequence: Synthetic oligonucleotide
  Target: ATXN2; (-) strand; PAM type: YTN; PAM sequence: CTT
tctatcttgcccaggctagt

SEQ ID NO: 60188 - DNA, 20 bp, Artificial Sequence
  Description of Artificial Sequence: Synthetic oligonucleotide
  Target: ATXN2; (-) strand; PAM type: YTN; PAM sequence: CTC
accatctttctatcttgccc

SEQ ID NO: 60189 - DNA, 20 bp, Artificial Sequence
  Description of Artificial Sequence: Synthetic oligonucleotide
  Target: ATXN2; (-) strand; PAM type: YTN; PAM sequence: TTG
agacagagtctcaccatctt

SEQ ID NO: 60190 - DNA, 20 bp, Artificial Sequence
  Description of Artificial Sequence: Synthetic oligonucleotide
  Target: ATXN2; (-) strand; PAM type: YTN; PAM sequence: TTT
gagacagagtctcaccatct

SEQ ID NO: 60191 - DNA, 20 bp, Artificial Sequence
  Description of Artificial Sequence: Synthetic oligonucleotide
  Target: ATXN2; (-) strand; PAM type: YTN; PAM sequence: TTT
tgagacagagtctcaccatc

SEQ ID NO: 60192 - DNA, 20 bp, Artificial Sequence
  Description of Artificial Sequence: Synthetic oligonucleotide
  Target: ATXN2; (-) strand; PAM type: YTN; PAM sequence: TTT
ttgagacagagtctcaccat

SEQ ID NO: 60193 - DNA, 20 bp, Artificial Sequence
  Description of Artificial Sequence: Synthetic oligonucleotide
  Target: ATXN2; (-) strand; PAM type: YTN; PAM sequence: TTT
tttgagacagagtctcacca

SEQ ID NO: 60194 - DNA, 20 bp, Artificial Sequence
  Description of Artificial Sequence: Synthetic oligonucleotide
  Target: ATXN2; (-) strand; PAM type: YTN; PAM sequence: TTT
ttttgagacagagtctcacc

SEQ ID NO: 60195 - DNA, 20 bp, Artificial Sequence
  Description of Artificial Sequence: Synthetic oligonucleotide
  Target: ATXN2; (-) strand; PAM type: YTN; PAM sequence: TTT
tttttgagacagagtctcac

SEQ ID NO: 60196 - DNA, 20 bp, Artificial Sequence
  Description of Artificial Sequence: Synthetic oligonucleotide
  Target: ATXN2; (-) strand; PAM type: YTN; PAM sequence: TTT
ttttttgagacagagtctca

SEQ ID NO: 60197 - DNA, 20 bp, Artificial Sequence
  Description of Artificial Sequence: Synthetic oligonucleotide
  Target: ATXN2; (-) strand; PAM type: YTN; PAM sequence: TTG
tttttttttgagacagagtc

SEQ ID NO: 60198 - DNA, 20 bp, Artificial Sequence
  Description of Artificial Sequence: Synthetic oligonucleotide
  Target: ATXN2; (-) strand; PAM type: YTN; PAM sequence: TTT
gtttttttttgagacagagt

SEQ ID NO: 60199 - DNA, 20 bp, Artificial Sequence
  Description of Artificial Sequence: Synthetic oligonucleotide
  Target: ATXN2; (-) strand; PAM type: YTN; PAM sequence: TTT
tgtttttttttgagacagag

SEQ ID NO: 60200 - DNA, 20 bp, Artificial Sequence
  Description of Artificial Sequence: Synthetic oligonucleotide
  Target: ATXN2; (-) strand; PAM type: YTN; PAM sequence: TTT
ttgtttttttttgagacaga

SEQ ID NO: 60201 - DNA, 20 bp, Artificial Sequence
  Description of Artificial Sequence: Synthetic oligonucleotide
  Target: ATXN2; (-) strand; PAM type: YTN; PAM sequence: TTT
tttgtttttttttgagacag

SEQ ID NO: 60202 - DNA, 20 bp, Artificial Sequence
  Description of Artificial Sequence: Synthetic oligonucleotide
  Target: ATXN2; (-) strand; PAM type: YTN; PAM sequence: TTG
ttttttgtttttttttgaga

SEQ ID NO: 60203 - DNA, 20 bp, Artificial Sequence
  Description of Artificial Sequence: Synthetic oligonucleotide
  Target: ATXN2; (-) strand; PAM type: YTN; PAM sequence: TTT
gttttttgtttttttttgag

SEQ ID NO: 60204 - DNA, 20 bp, Artificial Sequence
  Description of Artificial Sequence: Synthetic oligonucleotide
  Target: ATXN2; (-) strand; PAM type: YTN; PAM sequence: TTG
tttgttttttgttttttttt

SEQ ID NO: 60205 - DNA, 20 bp, Artificial Sequence
  Description of Artificial Sequence: Synthetic oligonucleotide
  Target: ATXN2; (-) strand; PAM type: YTN; PAM sequence: TTT
gtttgttttttgtttttttt

SEQ ID NO: 60206 - DNA, 20 bp, Artificial Sequence
  Description of Artificial Sequence: Synthetic oligonucleotide
  Target: ATXN2; (-) strand; PAM type: YTN; PAM sequence: TTT
tgtttgttttttgttttttt

SEQ ID NO: 60207 - DNA, 20 bp, Artificial Sequence
  Description of Artificial Sequence: Synthetic oligonucleotide
  Target: ATXN2; (-) strand; PAM type: YTN; PAM sequence: TTT
ttgtttgttttttgtttttt

SEQ ID NO: 60208 - DNA, 20 bp, Artificial Sequence
  Description of Artificial Sequence: Synthetic oligonucleotide
  Target: ATXN2; (-) strand; PAM type: YTN; PAM sequence: TTT
tttgtttgttttttgttttt

SEQ ID NO: 60209 - DNA, 20 bp, Artificial Sequence
  Description of Artificial Sequence: Synthetic oligonucleotide
  Target: ATXN2; (-) strand; PAM type: YTN; PAM sequence: TTT
ttttgtttgttttttgtttt

SEQ ID NO: 60210 - DNA, 20 bp, Artificial Sequence
  Description of Artificial Sequence: Synthetic oligonucleotide
  Target: ATXN2; (-) strand; PAM type: YTN; PAM sequence: TTG
tttttttgtttgttttttgt

SEQ ID NO: 60211 - DNA, 20 bp, Artificial Sequence
  Description of Artificial Sequence: Synthetic oligonucleotide
  Target: ATXN2; (-) strand; PAM type: YTN; PAM sequence: TTT
gtttttttgtttgttttttg

SEQ ID NO: 60212 - DNA, 20 bp, Artificial Sequence
  Description of Artificial Sequence: Synthetic oligonucleotide
  Target: ATXN2; (-) strand; PAM type: YTN; PAM sequence: CTT
tgtttttttgtttgtttttt

SEQ ID NO: 60213 - DNA, 20 bp, Artificial Sequence
  Description of Artificial Sequence: Synthetic oligonucleotide
  Target: ATXN2; (-) strand; PAM type: YTN; PAM sequence: TTC
tttgtttttttgtttgtttt

SEQ ID NO: 60214 - DNA, 20 bp, Artificial Sequence
  Description of Artificial Sequence: Synthetic oligonucleotide
  Target: ATXN2; (-) strand; PAM type: YTN; PAM sequence: CTT
ctttgtttttttgtttgttt

SEQ ID NO: 60215 - DNA, 20 bp, Artificial Sequence
  Description of Artificial Sequence: Synthetic oligonucleotide
  Target: ATXN2; (-) strand; PAM type: YTN; PAM sequence: TTC
ttctttgtttttttgtttgt

SEQ ID NO: 60216 - DNA, 20 bp, Artificial Sequence
  Description of Artificial Sequence: Synthetic oligonucleotide
  Target: ATXN2; (-) strand; PAM type: YTN; PAM sequence: CTT
cttctttgtttttttgtttg

SEQ ID NO: 60217 - DNA, 20 bp, Artificial Sequence
  Description of Artificial Sequence: Synthetic oligonucleotide
  Target: ATXN2; (-) strand; PAM type: YTN; PAM sequence: TTC
ttcttctttgtttttttgtt

SEQ ID NO: 60218 - DNA, 20 bp, Artificial Sequence
  Description of Artificial Sequence: Synthetic oligonucleotide
  Target: ATXN2; (-) strand; PAM type: YTN; PAM sequence: TTT
cttcttctttgtttttttgt

SEQ ID NO: 60219 - DNA, 20 bp, Artificial Sequence
  Description of Artificial Sequence: Synthetic oligonucleotide
  Target: ATXN2; (-) strand; PAM type: YTN; PAM sequence: CTT
tcttcttctttgtttttttg

SEQ ID NO: 60220 - DNA, 20 bp, Artificial Sequence
  Description of Artificial Sequence: Synthetic oligonucleotide
  Target: ATXN2; (-) strand; PAM type: YTN; PAM sequence: TTG
tctttcttcttctttgtttt

SEQ ID NO: 60221 - DNA, 20 bp, Artificial Sequence
  Description of Artificial Sequence: Synthetic oligonucleotide
  Target: ATXN2; (-) strand; PAM type: YTN; PAM sequence: CTT
gtctttcttcttctttgttt

SEQ ID NO: 60222 - DNA, 20 bp, Artificial Sequence
  Description of Artificial Sequence: Synthetic oligonucleotide
  Target: ATXN2; (-) strand; PAM type: YTN; PAM sequence: TTG
tcttgtctttcttcttcttt

SEQ ID NO: 60223 - DNA, 20 bp, Artificial Sequence
  Description of Artificial Sequence: Synthetic oligonucleotide
  Target: ATXN2; (-) strand; PAM type: YTN; PAM sequence: CTT
gtcttgtctttcttcttctt

SEQ ID NO: 60224 - DNA, 20 bp, Artificial Sequence
  Description of Artificial Sequence: Synthetic oligonucleotide
  Target: ATXN2; (-) strand; PAM type: YTN; PAM sequence: TTC
ttgtcttgtctttcttcttc

SEQ ID NO: 60225 - DNA, 20 bp, Artificial Sequence
  Description of Artificial Sequence: Synthetic oligonucleotide
  Target: ATXN2; (-) strand; PAM type: YTN; PAM sequence: TTT
cttgtcttgtctttcttctt

SEQ ID NO: 60226 - DNA, 20 bp, Artificial Sequence
  Description of Artificial Sequence: Synthetic oligonucleotide
  Target: ATXN2; (-) strand; PAM type: YTN; PAM sequence: TTT
tcttgtcttgtctttcttct

SEQ ID NO: 60227 - DNA, 20 bp, Artificial Sequence
  Description of Artificial Sequence: Synthetic oligonucleotide
  Target: ATXN2; (-) strand; PAM type: YTN; PAM sequence: CTT
ttcttgtcttgtctttcttc

SEQ ID NO: 60228 - DNA, 20 bp, Artificial Sequence
  Description of Artificial Sequence: Synthetic oligonucleotide
  Target: ATXN2; (-) strand; PAM type: YTN; PAM sequence: TTC
ttttcttgtcttgtctttct

SEQ ID NO: 60229 - DNA, 20 bp, Artificial Sequence
  Description of Artificial Sequence: Synthetic oligonucleotide
  Target: ATXN2; (-) strand; PAM type: YTN; PAM sequence: TTT
cttttcttgtcttgtctttc

SEQ ID NO: 60230 - DNA, 20 bp, Artificial Sequence
  Description of Artificial Sequence: Synthetic oligonucleotide
  Target: ATXN2; (-) strand; PAM type: YTN; PAM sequence: TTT
tcttttcttgtcttgtcttt

SEQ ID NO: 60231 - DNA, 20 bp, Artificial Sequence
  Description of Artificial Sequence: Synthetic oligonucleotide
  Target: ATXN2; (-) strand; PAM type: YTN; PAM sequence: CTT
ttcttttcttgtcttgtctt

SEQ ID NO: 60232 - DNA, 20 bp, Artificial Sequence
  Description of Artificial Sequence: Synthetic oligonucleotide
  Target: ATXN2; (-) strand; PAM type: YTN; PAM sequence: TTG
ccagcttttcttttcttgtc

SEQ ID NO: 60233 - DNA, 20 bp, Artificial Sequence
  Description of Artificial Sequence: Synthetic oligonucleotide
  Target: ATXN2; (-) strand; PAM type: YTN; PAM sequence: CTT
gccagcttttcttttcttgt

SEQ ID NO: 60234 - DNA, 20 bp, Artificial Sequence
  Description of Artificial Sequence: Synthetic oligonucleotide
  Target: ATXN2; (-) strand; PAM type: YTN; PAM sequence: CTA
caggcacatgccaccttgcc

SEQ ID NO: 60235 - DNA, 20 bp, Artificial Sequence
  Description of Artificial Sequence: Synthetic oligonucleotide
  Target: ATXN2; (-) strand; PAM type: YTN; PAM sequence: CTG
tgactacaggcacatgccac

SEQ ID NO: 60236 - DNA, 20 bp, Artificial Sequence
  Description of Artificial Sequence: Synthetic oligonucleotide
  Target: ATXN2; (-) strand; PAM type: YTN; PAM sequence: CTC
aagtaactgtgactacaggc

SEQ ID NO: 60237 - DNA, 20 bp, Artificial Sequence
  Description of Artificial Sequence: Synthetic oligonucleotide
  Target: ATXN2; (-) strand; PAM type: YTN; PAM sequence: CTC
tcaagtaactgtgactacag

SEQ ID NO: 60238 - DNA, 20 bp, Artificial Sequence
  Description of Artificial Sequence: Synthetic oligonucleotide
  Target: ATXN2; (-) strand; PAM type: YTN; PAM sequence: CTC
agcctctcaagtaactgtga

SEQ ID NO: 60239 - DNA, 20 bp, Artificial Sequence
  Description of Artificial Sequence: Synthetic oligonucleotide
  Target: ATXN2; (-) strand; PAM type: YTN; PAM sequence: CTC
ctcagcctctcaagtaactg

SEQ ID NO: 60240 - DNA, 20 bp, Artificial Sequence
  Description of Artificial Sequence: Synthetic oligonucleotide
  Target: ATXN2; (-) strand; PAM type: YTN; PAM sequence: CTC
cctcctcagcctctcaagta

SEQ ID NO: 60241 - DNA, 20 bp, Artificial Sequence
  Description of Artificial Sequence: Synthetic oligonucleotide
  Target: ATXN2; (-) strand; PAM type: YTN; PAM sequence: CTC
aaaggatcctccctcctcag

SEQ ID NO: 60242 - DNA, 20 bp, Artificial Sequence
  Description of Artificial Sequence: Synthetic oligonucleotide
  Target: ATXN2; (-) strand; PAM type: YTN; PAM sequence: CTG
gtctcaaaggatcctccctc

SEQ ID NO: 60243 - DNA, 20 bp, Artificial Sequence
  Description of Artificial Sequence: Synthetic oligonucleotide
  Target: ATXN2; (-) strand; PAM type: YTN; PAM sequence: TTC
ctggtctcaaaggatcctcc

SEQ ID NO: 60244 - DNA, 20 bp, Artificial Sequence
  Description of Artificial Sequence: Synthetic oligonucleotide
  Target: ATXN2; (-) strand; PAM type: YTN; PAM sequence: CTG
cgaattcctggtctcaaagg

SEQ ID NO: 60245 - DNA, 20 bp, Artificial Sequence
  Description of Artificial Sequence: Synthetic oligonucleotide
  Target: ATXN2; (-) strand; PAM type: YTN; PAM sequence: CTG
ctgcgaattcctggtctcaa

SEQ ID NO: 60246 - DNA, 20 bp, Artificial Sequence
  Description of Artificial Sequence: Synthetic oligonucleotide
  Target: ATXN2; (-) strand; PAM type: YTN; PAM sequence: CTG
ctgctgcgaattcctggtct

SEQ ID NO: 60247 - DNA, 20 bp, Artificial Sequence
  Description of Artificial Sequence: Synthetic oligonucleotide
  Target: ATXN2; (-) strand; PAM type: YTN; PAM sequence: CTC
actgctgctgcgaattcctg

SEQ ID NO: 60248 - DNA, 20 bp, Artificial Sequence
  Description of Artificial Sequence: Synthetic oligonucleotide
  Target: ATXN2; (-) strand; PAM type: YTN; PAM sequence: TTG
gagtgcagtagtgcaatcat

SEQ ID NO: 60249 - DNA, 20 bp, Artificial Sequence
  Description of Artificial Sequence: Synthetic oligonucleotide
  Target: ATXN2; (-) strand; PAM type: YTN; PAM sequence: CTT
ggagtgcagtagtgcaatca

SEQ ID NO: 60250 - DNA, 20 bp, Artificial Sequence
  Description of Artificial Sequence: Synthetic oligonucleotide
  Target: ATXN2; (-) strand; PAM type: YTN; PAM sequence: TTG
cccaggcttggagtgcagta

SEQ ID NO: 60251 - DNA, 20 bp, Artificial Sequence
  Description of Artificial Sequence: Synthetic oligonucleotide
  Target: ATXN2; (-) strand; PAM type: YTN; PAM sequence: TTG
ttgcccaggcttggagtgca

SEQ ID NO: 60252 - DNA, 20 bp, Artificial Sequence
  Description of Artificial Sequence: Synthetic oligonucleotide
  Target: ATXN2; (-) strand; PAM type: YTN; PAM sequence: TTT
gttgcccaggcttggagtgc

SEQ ID NO: 60253 - DNA, 20 bp, Artificial Sequence
  Description of Artificial Sequence: Synthetic oligonucleotide
  Target: ATXN2; (-) strand; PAM type: YTN; PAM sequence: CTT
tgttgcccaggcttggagtg

SEQ ID NO: 60254 - DNA, 20 bp, Artificial Sequence
  Description of Artificial Sequence: Synthetic oligonucleotide
  Target: ATXN2; (-) strand; PAM type: YTN; PAM sequence: CTG
gctttgttgcccaggcttgg

SEQ ID NO: 60255 - DNA, 20 bp, Artificial Sequence
  Description of Artificial Sequence: Synthetic oligonucleotide
  Target: ATXN2; (-) strand; PAM type: YTN; PAM sequence: TTG
agatggggtctggctttgtt

SEQ ID NO: 60256 - DNA, 20 bp, Artificial Sequence
  Description of Artificial Sequence: Synthetic oligonucleotide
  Target: ATXN2; (-) strand; PAM type: YTN; PAM sequence: TTT
gagatggggtctggctttgt

SEQ ID NO: 60257 - DNA, 20 bp, Artificial Sequence
  Description of Artificial Sequence: Synthetic oligonucleotide
  Target: ATXN2; (-) strand; PAM type: YTN; PAM sequence: TTT
tgagatggggtctggctttg

SEQ ID NO: 60258 - DNA, 20 bp, Artificial Sequence
  Description of Artificial Sequence: Synthetic oligonucleotide
  Target: ATXN2; (-) strand; PAM type: YTN; PAM sequence: TTT
ttgagatggggtctggcttt

SEQ ID NO: 60259 - DNA, 20 bp, Artificial Sequence
  Description of Artificial Sequence: Synthetic oligonucleotide
  Target: ATXN2; (-) strand; PAM type: YTN; PAM sequence: TTG
tttttgagatggggtctggc

SEQ ID NO: 60260 - DNA, 20 bp, Artificial Sequence
  Description of Artificial Sequence: Synthetic oligonucleotide
  Target: ATXN2; (-) strand; PAM type: YTN; PAM sequence: TTT
gtttttgagatggggtctgg

SEQ ID NO: 60261 - DNA, 20 bp, Artificial Sequence
  Description of Artificial Sequence: Synthetic oligonucleotide
  Target: ATXN2; (-) strand; PAM type: YTN; PAM sequence: TTT
tgtttttgagatggggtctg

SEQ ID NO: 60262 - DNA, 20 bp, Artificial Sequence
  Description of Artificial Sequence: Synthetic oligonucleotide
  Target: ATXN2; (-) strand; PAM type: YTN; PAM sequence: TTT
ttgtttttgagatggggtct

SEQ ID NO: 60263 - DNA, 20 bp, Artificial Sequence
  Description of Artificial Sequence: Synthetic oligonucleotide
  Target: ATXN2; (-) strand; PAM type: YTN; PAM sequence: TTT
tttgtttttgagatggggtc

SEQ ID NO: 60264 - DNA, 20 bp, Artificial Sequence
  Description of Artificial Sequence: Synthetic oligonucleotide
  Target: ATXN2; (-) strand; PAM type: YTN; PAM sequence: TTG
ttttttgtttttgagatggg

SEQ ID NO: 60265 - DNA, 20 bp, Artificial Sequence
  Description of Artificial Sequence: Synthetic oligonucleotide
  Target: ATXN2; (-) strand; PAM type: YTN; PAM sequence: TTT
gttttttgtttttgagatgg

SEQ ID NO: 60266 - DNA, 20 bp, Artificial Sequence
  Description of Artificial Sequence: Synthetic oligonucleotide
  Target: ATXN2; (-) strand; PAM type: YTN; PAM sequence: TTT
tgttttttgtttttgagatg

SEQ ID NO: 60267 - DNA, 20 bp, Artificial Sequence
  Description of Artificial Sequence: Synthetic oligonucleotide
  Target: ATXN2; (-) strand; PAM type: YTN; PAM sequence: TTG
gttttgttttttgtttttga

SEQ ID NO: 60268 - DNA, 20 bp, Artificial Sequence
  Description of Artificial Sequence: Synthetic oligonucleotide
  Target: ATXN2; (-) strand; PAM type: YTN; PAM sequence: TTT
ggttttgttttttgtttttg

SEQ ID NO: 60269 - DNA, 20 bp, Artificial Sequence
  Description of Artificial Sequence: Synthetic oligonucleotide
  Target: ATXN2; (-) strand; PAM type: YTN; PAM sequence: TTT
tggttttgttttttgttttt

SEQ ID NO: 60270 - DNA, 20 bp, Artificial Sequence
  Description of Artificial Sequence: Synthetic oligonucleotide
  Target: ATXN2; (-) strand; PAM type: YTN; PAM sequence: TTG
gttttggttttgttttttgt

SEQ ID NO: 60271 - DNA, 20 bp, Artificial Sequence
  Description of Artificial Sequence: Synthetic oligonucleotide
  Target: ATXN2; (-) strand; PAM type: YTN; PAM sequence: TTA
agttggttttggttttgttt

SEQ ID NO: 60272 - DNA, 20 bp, Artificial Sequence
  Description of Artificial Sequence: Synthetic oligonucleotide
  Target: ATXN2; (-) strand; PAM type: YTN; PAM sequence: TTT
aagttggttttggttttgtt

SEQ ID NO: 60273 - DNA, 20 bp, Artificial Sequence
  Description of Artificial Sequence: Synthetic oligonucleotide
  Target: ATXN2; (-) strand; PAM type: YTN; PAM sequence: CTT
taagttggttttggttttgt

SEQ ID NO: 60274 - DNA, 20 bp, Artificial Sequence
  Description of Artificial Sequence: Synthetic oligonucleotide
  Target: ATXN2; (-) strand; PAM type: YTN; PAM sequence: TTA
gtgtgtatctttaagttggt

SEQ ID NO: 60275 - DNA, 20 bp, Artificial Sequence
  Description of Artificial Sequence: Synthetic oligonucleotide
  Target: ATXN2; (-) strand; PAM type: YTN; PAM sequence: TTT
agtgtgtatctttaagttgg

SEQ ID NO: 60276 - DNA, 20 bp, Artificial Sequence
  Description of Artificial Sequence: Synthetic oligonucleotide
  Target: ATXN2; (-) strand; PAM type: YTN; PAM sequence: TTT
tagtgtgtatctttaagttg

SEQ ID NO: 60277 - DNA, 20 bp, Artificial Sequence
  Description of Artificial Sequence: Synthetic oligonucleotide
  Target: ATXN2; (-) strand; PAM type: YTN; PAM sequence: TTA
tccaccaacattttagtgtg

SEQ ID NO: 60278 - DNA, 20 bp, Artificial Sequence
  Description of Artificial Sequence: Synthetic oligonucleotide
  Target: ATXN2; (-) strand; PAM type: YTN; PAM sequence: TTT
atccaccaacattttagtgt

SEQ ID NO: 60279 - DNA, 20 bp, Artificial Sequence
  Description of Artificial Sequence: Synthetic oligonucleotide
  Target: ATXN2; (-) strand; PAM type: YTN; PAM sequence: TTG
catcagtttatccaccaaca

SEQ ID NO: 60280 - DNA, 20 bp, Artificial Sequence
  Description of Artificial Sequence: Synthetic oligonucleotide
  Target: ATXN2; (-) strand; PAM type: YTN; PAM sequence: CTA
gacattgcatcagtttatcc

SEQ ID NO: 60281 - DNA, 20 bp, Artificial Sequence
  Description of Artificial Sequence: Synthetic oligonucleotide
  Target: ATXN2; (-) strand; PAM type: YTN; PAM sequence: TTC
tagacattgcatcagtttat

SEQ ID NO: 60282 - DNA, 20 bp, Artificial Sequence
  Description of Artificial Sequence: Synthetic oligonucleotide
  Target: ATXN2; (-) strand; PAM type: YTN; PAM sequence: CTG
aagcaaattctagacattgc

SEQ ID NO: 60283 - DNA, 20 bp, Artificial Sequence
  Description of Artificial Sequence: Synthetic oligonucleotide
  Target: ATXN2; (-) strand; PAM type: YTN; PAM sequence: TTC
tgaagcaaattctagacatt

SEQ ID NO: 60284 - DNA, 20 bp, Artificial Sequence
  Description of Artificial Sequence: Synthetic oligonucleotide
  Target: ATXN2; (-) strand; PAM type: YTN; PAM sequence: TTA
ttctgaagcaaattctagac

SEQ ID NO: 60285 - DNA, 20 bp, Artificial Sequence
  Description of Artificial Sequence: Synthetic oligonucleotide
  Target: ATXN2; (-) strand; PAM type: YTN; PAM sequence: CTG
gattattctgaagcaaattc

SEQ ID NO: 60286 - DNA, 20 bp, Artificial Sequence
  Description of Artificial Sequence: Synthetic oligonucleotide
  Target: ATXN2; (-) strand; PAM type: YTN; PAM sequence: TTG
agtccactggattattctga

SEQ ID NO: 60287 - DNA, 20 bp, Artificial Sequence
  Description of Artificial Sequence: Synthetic oligonucleotide
  Target: ATXN2; (-) strand; PAM type: YTN; PAM sequence: TTT
gagtccactggattattctg

SEQ ID NO: 60288 - DNA, 20 bp, Artificial Sequence
  Description of Artificial Sequence: Synthetic oligonucleotide
  Target: ATXN2; (-) strand; PAM type: YTN; PAM sequence: CTT
tgagtccactggattattct

SEQ ID NO: 60289 - DNA, 20 bp, Artificial Sequence
  Description of Artificial Sequence: Synthetic oligonucleotide
  Target: ATXN2; (-) strand; PAM type: YTN; PAM sequence: TTA
aaagctttgagtccactgga

SEQ ID NO: 60290 - DNA, 20 bp, Artificial Sequence
  Description of Artificial Sequence: Synthetic oligonucleotide
  Target: ATXN2; (-) strand; PAM type: YTN; PAM sequence: CTT
aaaagctttgagtccactgg

SEQ ID NO: 60291 - DNA, 20 bp, Artificial Sequence
  Description of Artificial Sequence: Synthetic oligonucleotide
  Target: ATXN2; (-) strand; PAM type: YTN; PAM sequence: CTC
ttaaaagctttgagtccact

SEQ ID NO: 60292 - DNA, 20 bp, Artificial Sequence
  Description of Artificial Sequence: Synthetic oligonucleotide
  Target: ATXN2; (-) strand; PAM type: YTN; PAM sequence: TTG
tctcttaaaagctttgagtc

SEQ ID NO: 60293 - DNA, 20 bp, Artificial Sequence
  Description of Artificial Sequence: Synthetic oligonucleotide
  Target: ATXN2; (-) strand; PAM type: YTN; PAM sequence: CTA
cccattgtctcttaaaagct

SEQ ID NO: 60294 - DNA, 20 bp, Artificial Sequence
  Description of Artificial Sequence: Synthetic oligonucleotide
  Target: ATXN2; (-) strand; PAM type: YTN; PAM sequence: TTC
atccctacccattgtctctt

SEQ ID NO: 60295 - DNA, 20 bp, Artificial Sequence
  Description of Artificial Sequence: Synthetic oligonucleotide
  Target: ATXN2; (-) strand; PAM type: YTN; PAM sequence: TTT
catccctacccattgtctct

SEQ ID NO: 60296 - DNA, 20 bp, Artificial Sequence
  Description of Artificial Sequence: Synthetic oligonucleotide
  Target: ATXN2; (-) strand; PAM type: YTN; PAM sequence: CTA
ggccagtcatgtttcatccc

SEQ ID NO: 60297 - DNA, 20 bp, Artificial Sequence
  Description of Artificial Sequence: Synthetic oligonucleotide
  Target: ATXN2; (-) strand; PAM type: YTN; PAM sequence: TTA
ataacctaggccagtcatgt

SEQ ID NO: 60298 - DNA, 20 bp, Artificial Sequence
  Description of Artificial Sequence: Synthetic oligonucleotide
  Target: ATXN2; (-) strand; PAM type: YTN; PAM sequence: TTG
agacattaataacctaggcc

SEQ ID NO: 60299 - DNA, 20 bp, Artificial Sequence
  Description of Artificial Sequence: Synthetic oligonucleotide
  Target: ATXN2; (-) strand; PAM type: YTN; PAM sequence: TTA
cgaatgtattgagacattaa

SEQ ID NO: 60300 - DNA, 20 bp, Artificial Sequence
  Description of Artificial Sequence: Synthetic oligonucleotide
  Target: ATXN2; (-) strand; PAM type: YTN; PAM sequence: TTA
ttacgaatgtattgagacat

SEQ ID NO: 60301 - DNA, 20 bp, Artificial Sequence
  Description of Artificial Sequence: Synthetic oligonucleotide
  Target: ATXN2; (-) strand; PAM type: YTN; PAM sequence: TTT
attacgaatgtattgagaca

SEQ ID NO: 60302 - DNA, 20 bp, Artificial Sequence
  Description of Artificial Sequence: Synthetic oligonucleotide
  Target: ATXN2; (-) strand; PAM type: YTN; PAM sequence: TTT
tattacgaatgtattgagac

SEQ ID NO: 60303 - DNA, 20 bp, Artificial Sequence
  Description of Artificial Sequence: Synthetic oligonucleotide
  Target: ATXN2; (-) strand; PAM type: YTN; PAM sequence: TTT
ttattacgaatgtattgaga

SEQ ID NO: 60304 - DNA, 20 bp, Artificial Sequence
  Description of Artificial Sequence: Synthetic oligonucleotide
  Target: ATXN2; (-) strand; PAM type: YTN; PAM sequence: CTT
tttattacgaatgtattgag

SEQ ID NO: 60305 - DNA, 20 bp, Artificial Sequence
  Description of Artificial Sequence: Synthetic oligonucleotide
  Target: ATXN2; (-) strand; PAM type: YTN; PAM sequence: TTG
cggtaactttttattacgaa

SEQ ID NO: 60306 - DNA, 20 bp, Artificial Sequence
  Description of Artificial Sequence: Synthetic oligonucleotide
  Target: ATXN2; (-) strand; PAM type: YTN; PAM sequence: CTT
gcggtaactttttattacga

SEQ ID NO: 60307 - DNA, 20 bp, Artificial Sequence
  Description of Artificial Sequence: Synthetic oligonucleotide
  Target: ATXN2; (-) strand; PAM type: YTN; PAM sequence: CTC
agccttgcggtaacttttta

SEQ ID NO: 60308 - DNA, 20 bp, Artificial Sequence
  Description of Artificial Sequence: Synthetic oligonucleotide
  Target: ATXN2; (-) strand; PAM type: YTN; PAM sequence: CTC
tcagccttgcggtaactttt

SEQ ID NO: 60309 - DNA, 20 bp, Artificial Sequence
  Description of Artificial Sequence: Synthetic oligonucleotide
  Target: ATXN2; (-) strand; PAM type: YTN; PAM sequence: TTA
caggtgtgagccatcgctct

SEQ ID NO: 60310 - DNA, 20 bp, Artificial Sequence
  Description of Artificial Sequence: Synthetic oligonucleotide
  Target: ATXN2; (-) strand; PAM type: YTN; PAM sequence: CTG
ggattacaggtgtgagccat

SEQ ID NO: 60311 - DNA, 20 bp, Artificial Sequence
  Description of Artificial Sequence: Synthetic oligonucleotide
  Target: ATXN2; (-) strand; PAM type: YTN; PAM sequence: CTC
ccaaagtgctgggattacag

SEQ ID NO: 60312 - DNA, 20 bp, Artificial Sequence
  Description of Artificial Sequence: Synthetic oligonucleotide
  Target: ATXN2; (-) strand; PAM type: YTN; PAM sequence: CTC
ggcctcccaaagtgctggga

SEQ ID NO: 60313 - DNA, 20 bp, Artificial Sequence
  Description of Artificial Sequence: Synthetic oligonucleotide
  Target: ATXN2; (-) strand; PAM type: YTN; PAM sequence: CTC
aaatgatccacccgcctcgg

SEQ ID NO: 60314 - DNA, 20 bp, Artificial Sequence
  Description of Artificial Sequence: Synthetic oligonucleotide
  Target: ATXN2; (-) strand; PAM type: YTN; PAM sequence: CTG
acctcaaatgatccacccgc

SEQ ID NO: 60315 - DNA, 20 bp, Artificial Sequence
  Description of Artificial Sequence: Synthetic oligonucleotide
  Target: ATXN2; (-) strand; PAM type: YTN; PAM sequence: CTC
ctgacctcaaatgatccacc

SEQ ID NO: 60316 - DNA, 20 bp, Artificial Sequence
  Description of Artificial Sequence: Synthetic oligonucleotide
  Target: ATXN2; (-) strand; PAM type: YTN; PAM sequence: TTG
aactcctgacctcaaatgat

SEQ ID NO: 60317 - DNA, 20 bp, Artificial Sequence
  Description of Artificial Sequence: Synthetic oligonucleotide
  Target: ATXN2; (-) strand; PAM type: YTN; PAM sequence: CTT
gaactcctgacctcaaatga

SEQ ID NO: 60318 - DNA, 20 bp, Artificial Sequence
  Description of Artificial Sequence: Synthetic oligonucleotide
  Target: ATXN2; (-) strand; PAM type: YTN; PAM sequence: TTG
gccagcccggtcttgaactc

SEQ ID NO: 60319 - DNA, 20 bp, Artificial Sequence
  Description of Artificial Sequence: Synthetic oligonucleotide
  Target: ATXN2; (-) strand; PAM type: YTN; PAM sequence: TTC
accatgttggccagcccggt

SEQ ID NO: 60320 - DNA, 20 bp, Artificial Sequence
  Description of Artificial Sequence: Synthetic oligonucleotide
  Target: ATXN2; (-) strand; PAM type: YTN; PAM sequence: TTT
caccatgttggccagcccgg

SEQ ID NO: 60321 - DNA, 20 bp, Artificial Sequence
  Description of Artificial Sequence: Synthetic oligonucleotide
  Target: ATXN2; (-) strand; PAM type: YTN; PAM sequence: TTA
atagagatggggtttcacca

SEQ ID NO: 60322 - DNA, 20 bp, Artificial Sequence
  Description of Artificial Sequence: Synthetic oligonucleotide
  Target: ATXN2; (-) strand; PAM type: YTN; PAM sequence: TTT
aatagagatggggtttcacc

SEQ ID NO: 60323 - DNA, 20 bp, Artificial Sequence
  Description of Artificial Sequence: Synthetic oligonucleotide
  Target: ATXN2; (-) strand; PAM type: YTN; PAM sequence: TTT
taatagagatggggtttcac

SEQ ID NO: 60324 - DNA, 20 bp, Artificial Sequence
  Description of Artificial Sequence: Synthetic oligonucleotide
  Target: ATXN2; (-) strand; PAM type: YTN; PAM sequence: TTT
ttaatagagatggggtttca

SEQ ID NO: 60325 - DNA, 20 bp, Artificial Sequence
  Description of Artificial Sequence: Synthetic oligonucleotide
  Target: ATXN2; (-) strand; PAM type: YTN; PAM sequence: TTG
tatttttaatagagatgggg

SEQ ID NO: 60326 - DNA, 20 bp, Artificial Sequence
  Description of Artificial Sequence: Synthetic oligonucleotide
  Target: ATXN2; (-) strand; PAM type: YTN; PAM sequence: CTT
gtatttttaatagagatggg

SEQ ID NO: 60327 - DNA, 20 bp, Artificial Sequence
  Description of Artificial Sequence: Synthetic oligonucleotide
  Target: ATXN2; (-) strand; PAM type: YTN; PAM sequence: CTG
cgcccggccttgtattttta

SEQ ID NO: 60328 - DNA, 20 bp, Artificial Sequence
  Description of Artificial Sequence: Synthetic oligonucleotide
  Target: ATXN2; (-) strand; PAM type: YTN; PAM sequence: TTA
caggtgtgagccactgcgcc

SEQ ID NO: 60329 - DNA, 20 bp, Artificial Sequence
  Description of Artificial Sequence: Synthetic oligonucleotide
  Target: ATXN2; (-) strand; PAM type: YTN; PAM sequence: CTG
ggattacaggtgtgagccac

SEQ ID NO: 60330 - DNA, 20 bp, Artificial Sequence
  Description of Artificial Sequence: Synthetic oligonucleotide
  Target: ATXN2; (-) strand; PAM type: YTN; PAM sequence: CTC
ccaaagtgctgggattacag

SEQ ID NO: 60331 - DNA, 20 bp, Artificial Sequence
  Description of Artificial Sequence: Synthetic oligonucleotide
  Target: ATXN2; (-) strand; PAM type: YTN; PAM sequence: CTC
ggcctcccaaagtgctggga

SEQ ID NO: 60332 - DNA, 20 bp, Artificial Sequence
  Description of Artificial Sequence: Synthetic oligonucleotide
  Target: ATXN2; (-) strand; PAM type: YTN; PAM sequence: CTC
gtgatccgcccgcctcggcc

SEQ ID NO: 60333 - DNA, 20 bp, Artificial Sequence
  Description of Artificial Sequence: Synthetic oligonucleotide
  Target: ATXN2; (-) strand; PAM type: YTN; PAM sequence: CTG
acctcgtgatccgcccgcct

SEQ ID NO: 60334 - DNA, 20 bp, Artificial Sequence
  Description of Artificial Sequence: Synthetic oligonucleotide
  Target: ATXN2; (-) strand; PAM type: YTN; PAM sequence: CTC
ctgacctcgtgatccgcccg

SEQ ID NO: 60335 - DNA, 20 bp, Artificial Sequence
  Description of Artificial Sequence: Synthetic oligonucleotide
  Target: ATXN2; (-) strand; PAM type: YTN; PAM sequence: TTA
gccaggatggtatcgatctc

SEQ ID NO: 60336 - DNA, 20 bp, Artificial Sequence
  Description of Artificial Sequence: Synthetic oligonucleotide
  Target: ATXN2; (-) strand; PAM type: YTN; PAM sequence: TTC
accgtgttagccaggatggt

SEQ ID NO: 60337 - DNA, 20 bp, Artificial Sequence
  Description of Artificial Sequence: Synthetic oligonucleotide
  Target: ATXN2; (-) strand; PAM type: YTN; PAM sequence: TTT
caccgtgttagccaggatgg

SEQ ID NO: 60338 - DNA, 20 bp, Artificial Sequence
  Description of Artificial Sequence: Synthetic oligonucleotide
  Target: ATXN2; (-) strand; PAM type: YTN; PAM sequence: TTA
gtagagacagggtttcaccg

SEQ ID NO: 60339 - DNA, 20 bp, Artificial Sequence
  Description of Artificial Sequence: Synthetic oligonucleotide
  Target: ATXN2; (-) strand; PAM type: YTN; PAM sequence: TTT
agtagagacagggtttcacc

SEQ ID NO: 60340 - DNA, 20 bp, Artificial Sequence
  Description of Artificial Sequence: Synthetic oligonucleotide
  Target: ATXN2; (-) strand; PAM type: YTN; PAM sequence: TTT
tagtagagacagggtttcac

SEQ ID NO: 60341 - DNA, 20 bp, Artificial Sequence
  Description of Artificial Sequence: Synthetic oligonucleotide
  Target: ATXN2; (-) strand; PAM type: YTN; PAM sequence: TTT
ttagtagagacagggtttca

SEQ ID NO: 60342 - DNA, 20 bp, Artificial Sequence
  Description of Artificial Sequence: Synthetic oligonucleotide
  Target: ATXN2; (-) strand; PAM type: YTN; PAM sequence: TTG
tatttttagtagagacaggg

SEQ ID NO: 60343 - DNA, 20 bp, Artificial Sequence
  Description of Artificial Sequence: Synthetic oligonucleotide
  Target: ATXN2; (-) strand; PAM type: YTN; PAM sequence: TTT
gtatttttagtagagacagg

SEQ ID NO: 60344 - DNA, 20 bp, Artificial Sequence
  Description of Artificial Sequence: Synthetic oligonucleotide
  Target: ATXN2; (-) strand; PAM type: YTN; PAM sequence: TTT
tgtatttttagtagagacag

SEQ ID NO: 60345 - DNA, 20 bp, Artificial Sequence
  Description of Artificial Sequence: Synthetic oligonucleotide
  Target: ATXN2; (-) strand; PAM type: YTN; PAM sequence: TTT
ttgtatttttagtagagaca

SEQ ID NO: 60346 - DNA, 20 bp, Artificial Sequence
  Description of Artificial Sequence: Synthetic oligonucleotide
  Target: ATXN2; (-) strand; PAM type: YTN; PAM sequence: TTT
tttgtatttttagtagagac

SEQ ID NO: 60347 - DNA, 20 bp, Artificial Sequence
  Description of Artificial Sequence: Synthetic oligonucleotide
  Target: ATXN2; (-) strand; PAM type: YTN; PAM sequence: TTT
ttttgtatttttagtagaga

SEQ ID NO: 60348 - DNA, 20 bp, Artificial Sequence
  Description of Artificial Sequence: Synthetic oligonucleotide
  Target: ATXN2; (-) strand; PAM type: YTN; PAM sequence: CTA
atttttttgtatttttagta

SEQ ID NO: 60349 - DNA, 20 bp, Artificial Sequence
  Description of Artificial Sequence: Synthetic oligonucleotide
  Target: ATXN2; (-) strand; PAM type: YTN; PAM sequence: TTC
gcccgccaccacacccggct

SEQ ID NO: 60350 - DNA, 20 bp, Artificial Sequence
  Description of Artificial Sequence: Synthetic oligonucleotide
  Target: ATXN2; (-) strand; PAM type: YTN; PAM sequence: CTA
cattcgcccgccaccacacc

SEQ ID NO: 60351 - DNA, 20 bp, Artificial Sequence
  Description of Artificial Sequence: Synthetic oligonucleotide
  Target: ATXN2; (-) strand; PAM type: YTN; PAM sequence: CTG
ggactacattcgcccgccac

SEQ ID NO: 60352 - DNA, 20 bp, Artificial Sequence
  Description of Artificial Sequence: Synthetic oligonucleotide
  Target: ATXN2; (-) strand; PAM type: YTN; PAM sequence: CTG
agtagctgggactacattcg

SEQ ID NO: 60353 - DNA, 20 bp, Artificial Sequence
  Description of Artificial Sequence: Synthetic oligonucleotide
  Target: ATXN2; (-) strand; PAM type: YTN; PAM sequence: CTC
ctgagtagctgggactacat

SEQ ID NO: 60354 - DNA, 20 bp, Artificial Sequence
  Description of Artificial Sequence: Synthetic oligonucleotide
  Target: ATXN2; (-) strand; PAM type: YTN; PAM sequence: CTC
agcctcctgagtagctggga

SEQ ID NO: 60355 - DNA, 20 bp, Artificial Sequence
  Description of Artificial Sequence: Synthetic oligonucleotide
  Target: ATXN2; (-) strand; PAM type: YTN; PAM sequence: CTG
cctcagcctcctgagtagct

SEQ ID NO: 60356 - DNA, 20 bp, Artificial Sequence
  Description of Artificial Sequence: Synthetic oligonucleotide
  Target: ATXN2; (-) strand; PAM type: YTN; PAM sequence: CTC
ctgcctcagcctcctgagta

SEQ ID NO: 60357 - DNA, 20 bp, Artificial Sequence
  Description of Artificial Sequence: Synthetic oligonucleotide
  Target: ATXN2; (-) strand; PAM type: YTN; PAM sequence: TTC
tcctgcctcagcctcctgag

SEQ ID NO: 60358 - DNA, 20 bp, Artificial Sequence
  Description of Artificial Sequence: Synthetic oligonucleotide
  Target: ATXN2; (-) strand; PAM type: YTN; PAM sequence: TTC
atgccattctcctgcctcag

SEQ ID NO: 60359 - DNA, 20 bp, Artificial Sequence
  Description of Artificial Sequence: Synthetic oligonucleotide
  Target: ATXN2; (-) strand; PAM type: YTN; PAM sequence: TTG
ggttcatgccattctcctgc

SEQ ID NO: 60360 - DNA, 20 bp, Artificial Sequence
  Description of Artificial Sequence: Synthetic oligonucleotide
  Target: ATXN2; (-) strand; PAM type: YTN; PAM sequence: CTT
gggttcatgccattctcctg

SEQ ID NO: 60361 - DNA, 20 bp, Artificial Sequence
  Description of Artificial Sequence: Synthetic oligonucleotide
  Target: ATXN2; (-) strand; PAM type: YTN; PAM sequence: CTC
ttgggttcatgccattctcc

SEQ ID NO: 60362 - DNA, 20 bp, Artificial Sequence
  Description of Artificial Sequence: Synthetic oligonucleotide
  Target: ATXN2; (-) strand; PAM type: YTN; PAM sequence: CTC
cgcctcttgggttcatgcca

SEQ ID NO: 60363 - DNA, 20 bp, Artificial Sequence
  Description of Artificial Sequence: Synthetic oligonucleotide
  Target: ATXN2; (-) strand; PAM type: YTN; PAM sequence: CTG
caagctccgcctcttgggtt

SEQ ID NO: 60364 - DNA, 20 bp, Artificial Sequence
  Description of Artificial Sequence: Synthetic oligonucleotide
  Target: ATXN2; (-) strand; PAM type: YTN; PAM sequence: CTC
actgcaagctccgcctcttg

SEQ ID NO: 60365 - DNA, 20 bp, Artificial Sequence
  Description of Artificial Sequence: Synthetic oligonucleotide
  Target: ATXN2; (-) strand; PAM type: YTN; PAM sequence: CTC
ggctcactgcaagctccgcc

SEQ ID NO: 60366 - DNA, 20 bp, Artificial Sequence
  Description of Artificial Sequence: Synthetic oligonucleotide
  Target: ATXN2; (-) strand; PAM type: YTN; PAM sequence: CTG
gagtgcagtgatgcgatctc

SEQ ID NO: 60367 - DNA, 20 bp, Artificial Sequence
  Description of Artificial Sequence: Synthetic oligonucleotide
  Target: ATXN2; (-) strand; PAM type: YTN; PAM sequence: TTG
cccaggctggagtgcagtga

SEQ ID NO: 60368 - DNA, 20 bp, Artificial Sequence
  Description of Artificial Sequence: Synthetic oligonucleotide
  Target: ATXN2; (-) strand; PAM type: YTN; PAM sequence: CTG
ttgcccaggctggagtgcag

SEQ ID NO: 60369 - DNA, 20 bp, Artificial Sequence
  Description of Artificial Sequence: Synthetic oligonucleotide
  Target: ATXN2; (-) strand; PAM type: YTN; PAM sequence: CTC
tgttgcccaggctggagtgc

SEQ ID NO: 60370 - DNA, 20 bp, Artificial Sequence
  Description of Artificial Sequence: Synthetic oligonucleotide
  Target: ATXN2; (-) strand; PAM type: YTN; PAM sequence: CTC
gctctgttgcccaggctgga

SEQ ID NO: 60371 - DNA, 20 bp, Artificial Sequence
  Description of Artificial Sequence: Synthetic oligonucleotide
  Target: ATXN2; (-) strand; PAM type: YTN; PAM sequence: TTG
agacagagtctcgctctgtt

SEQ ID NO: 60372 - DNA, 20 bp, Artificial Sequence
  Description of Artificial Sequence: Synthetic oligonucleotide
  Target: ATXN2; (-) strand; PAM type: YTN; PAM sequence: TTT
gagacagagtctcgctctgt

SEQ ID NO: 60373 - DNA, 20 bp, Artificial Sequence
  Description of Artificial Sequence: Synthetic oligonucleotide
  Target: ATXN2; (-) strand; PAM type: YTN; PAM sequence: TTT
tgagacagagtctcgctctg

SEQ ID NO: 60374 - DNA, 20 bp, Artificial Sequence
  Description of Artificial Sequence: Synthetic oligonucleotide
  Target: ATXN2; (-) strand; PAM type: YTN; PAM sequence: TTT
ttgagacagagtctcgctct

SEQ ID NO: 60375 - DNA, 20 bp, Artificial Sequence
  Description of Artificial Sequence: Synthetic oligonucleotide
  Target: ATXN2; (-) strand; PAM type: YTN; PAM sequence: TTT
tttgagacagagtctcgctc

SEQ ID NO: 60376 - DNA, 20 bp, Artificial Sequence
  Description of Artificial Sequence: Synthetic oligonucleotide
  Target: ATXN2; (-) strand; PAM type: YTN; PAM sequence: TTT
ttttgagacagagtctcgct

SEQ ID NO: 60377 - DNA, 20 bp, Artificial Sequence
  Description of Artificial Sequence: Synthetic oligonucleotide
  Target: ATXN2; (-) strand; PAM type: YTN; PAM sequence: TTT
tttttgagacagagtctcgc

SEQ ID NO: 60378 - DNA, 20 bp, Artificial Sequence
  Description of Artificial Sequence: Synthetic oligonucleotide
  Target: ATXN2; (-) strand; PAM type: YTN; PAM sequence: TTT
ttttttgagacagagtctcg

SEQ ID NO: 60379 - DNA, 20 bp, Artificial Sequence
  Description of Artificial Sequence: Synthetic oligonucleotide
  Target: ATXN2; (-) strand; PAM type: YTN; PAM sequence: TTT
tttttttgagacagagtctc

SEQ ID NO: 60380 - DNA, 20 bp, Artificial Sequence
  Description of Artificial Sequence: Synthetic oligonucleotide
  Target: ATXN2; (-) strand; PAM type: YTN; PAM sequence: CTT
ttttttttgagacagagtct

SEQ ID NO: 60381 - DNA, 20 bp, Artificial Sequence
  Description of Artificial Sequence: Synthetic oligonucleotide
  Target: ATXN2; (-) strand; PAM type: YTN; PAM sequence: CTC
ccaagtagcccagccttttt

SEQ ID NO: 60382 - DNA, 20 bp, Artificial Sequence
  Description of Artificial Sequence: Synthetic oligonucleotide
  Target: ATXN2; (-) strand; PAM type: YTN; PAM sequence: CTC
agcctcccaagtagcccagc

SEQ ID NO: 60383 - DNA, 20 bp, Artificial Sequence
  Description of Artificial Sequence: Synthetic oligonucleotide
  Target: ATXN2; (-) strand; PAM type: YTN; PAM sequence: CTG
cctcagcctcccaagtagcc

SEQ ID NO: 60384 - DNA, 20 bp, Artificial Sequence
  Description of Artificial Sequence: Synthetic oligonucleotide
  Target: ATXN2; (-) strand; PAM type: YTN; PAM sequence: CTC
ctgcctcagcctcccaagta

SEQ ID NO: 60385 - DNA, 20 bp, Artificial Sequence
  Description of Artificial Sequence: Synthetic oligonucleotide
  Target: ATXN2; (-) strand; PAM type: YTN; PAM sequence: TTC
tcctgcctcagcctcccaag

SEQ ID NO: 60386 - DNA, 20 bp, Artificial Sequence
  Description of Artificial Sequence: Synthetic oligonucleotide
  Target: ATXN2; (-) strand; PAM type: YTN; PAM sequence: TTC
aagcaattctcctgcctcag

SEQ ID NO: 60387 - DNA, 20 bp, Artificial Sequence
  Description of Artificial Sequence: Synthetic oligonucleotide
  Target: ATXN2; (-) strand; PAM type: YTN; PAM sequence: CTG
gggttcaagcaattctcctg

SEQ ID NO: 60388 - DNA, 20 bp, Artificial Sequence
  Description of Artificial Sequence: Synthetic oligonucleotide
  Target: ATXN2; (-) strand; PAM type: YTN; PAM sequence: CTC
tggggttcaagcaattctcc

SEQ ID NO: 60389 - DNA, 20 bp, Artificial Sequence
  Description of Artificial Sequence: Synthetic oligonucleotide
  Target: ATXN2; (-) strand; PAM type: YTN; PAM sequence: CTC
cccctctggggttcaagcaa

SEQ ID NO: 60390 - DNA, 20 bp, Artificial Sequence
  Description of Artificial Sequence: Synthetic oligonucleotide
  Target: ATXN2; (-) strand; PAM type: YTN; PAM sequence: CTG
caacctccccctctggggtt

SEQ ID NO: 60391 - DNA, 20 bp, Artificial Sequence
  Description of Artificial Sequence: Synthetic oligonucleotide
  Target: ATXN2; (-) strand; PAM type: YTN; PAM sequence: CTC
actgcaacctccccctctgg

SEQ ID NO: 60392 - DNA, 20 bp, Artificial Sequence
  Description of Artificial Sequence: Synthetic oligonucleotide
  Target: ATXN2; (-) strand; PAM type: YTN; PAM sequence: CTC
aactcactgcaacctccccc

SEQ ID NO: 60393 - DNA, 20 bp, Artificial Sequence
  Description of Artificial Sequence: Synthetic oligonucleotide
  Target: ATXN2; (-) strand; PAM type: YTN; PAM sequence: CTG
gagtacagtggcacaatctc

SEQ ID NO: 60394 - DNA, 20 bp, Artificial Sequence
  Description of Artificial Sequence: Synthetic oligonucleotide
  Target: ATXN2; (-) strand; PAM type: YTN; PAM sequence: CTA
ggctggagtacagtggcaca

SEQ ID NO: 60395 - DNA, 20 bp, Artificial Sequence
  Description of Artificial Sequence: Synthetic oligonucleotide
  Target: ATXN2; (-) strand; PAM type: YTN; PAM sequence: CTG
tcacctaggctggagtacag

SEQ ID NO: 60396 - DNA, 20 bp, Artificial Sequence
  Description of Artificial Sequence: Synthetic oligonucleotide
  Target: ATXN2; (-) strand; PAM type: YTN; PAM sequence: CTC
tgtcacctaggctggagtac

SEQ ID NO: 60397 - DNA, 20 bp, Artificial Sequence
  Description of Artificial Sequence: Synthetic oligonucleotide
  Target: ATXN2; (-) strand; PAM type: YTN; PAM sequence: TTG
gctctgtcacctaggctgga

SEQ ID NO: 60398 - DNA, 20 bp, Artificial Sequence
  Description of Artificial Sequence: Synthetic oligonucleotide
  Target: ATXN2; (-) strand; PAM type: YTN; PAM sequence: CTT
ggctctgtcacctaggctgg

SEQ ID NO: 60399 - DNA, 20 bp, Artificial Sequence
  Description of Artificial Sequence: Synthetic oligonucleotide
  Target: ATXN2; (-) strand; PAM type: YTN; PAM sequence: TTG
agatggaatcttggctctgt

SEQ ID NO: 60400 - DNA, 20 bp, Artificial Sequence
  Description of Artificial Sequence: Synthetic oligonucleotide
  Target: ATXN2; (-) strand; PAM type: YTN; PAM sequence: TTT
gagatggaatcttggctctg

SEQ ID NO: 60401 - DNA, 20 bp, Artificial Sequence
  Description of Artificial Sequence: Synthetic oligonucleotide
  Target: ATXN2; (-) strand; PAM type: YTN; PAM sequence: TTT
tgagatggaatcttggctct

SEQ ID NO: 60402 - DNA, 20 bp, Artificial Sequence
  Description of Artificial Sequence: Synthetic oligonucleotide
  Target: ATXN2; (-) strand; PAM type: YTN; PAM sequence: TTT
ttgagatggaatcttggctc

SEQ ID NO: 60403 - DNA, 20 bp, Artificial Sequence
  Description of Artificial Sequence: Synthetic oligonucleotide
  Target: ATXN2; (-) strand; PAM type: YTN; PAM sequence: TTT
tttgagatggaatcttggct

SEQ ID NO: 60404 - DNA, 20 bp, Artificial Sequence
  Description of Artificial Sequence: Synthetic oligonucleotide
  Target: ATXN2; (-) strand; PAM type: YTN; PAM sequence: TTT
ttttgagatggaatcttggc

SEQ ID NO: 60405 - DNA, 20 bp, Artificial Sequence
  Description of Artificial Sequence: Synthetic oligonucleotide
  Target: ATXN2; (-) strand; PAM type: YTN; PAM sequence: TTT
tttttgagatggaatcttgg

SEQ ID NO: 60406 - DNA, 20 bp, Artificial Sequence
  Description of Artificial Sequence: Synthetic oligonucleotide
  Target: ATXN2; (-) strand; PAM type: YTN; PAM sequence: TTT
ttttttgagatggaatcttg

SEQ ID NO: 60407 - DNA, 20 bp, Artificial Sequence
  Description of Artificial Sequence: Synthetic oligonucleotide
  Target: ATXN2; (-) strand; PAM type: YTN; PAM sequence: TTT
tttttttgagatggaatctt

SEQ ID NO: 60408 - DNA, 20 bp, Artificial Sequence
  Description of Artificial Sequence: Synthetic oligonucleotide
  Target: ATXN2; (-) strand; PAM type: YTN; PAM sequence: TTT
ttttttttgagatggaatct

SEQ ID NO: 60409 - DNA, 20 bp, Artificial Sequence
  Description of Artificial Sequence: Synthetic oligonucleotide
  Target: ATXN2; (-) strand; PAM type: YTN; PAM sequence: TTT
tttttttttgagatggaatc

SEQ ID NO: 60410 - DNA, 20 bp, Artificial Sequence
  Description of Artificial Sequence: Synthetic oligonucleotide
  Target: ATXN2; (-) strand; PAM type: YTN; PAM sequence: TTT
ttttttttttgagatggaat

SEQ ID NO: 60411 - DNA, 20 bp, Artificial Sequence
  Description of Artificial Sequence: Synthetic oligonucleotide
  Target: ATXN2; (-) strand; PAM type: YTN; PAM sequence: TTT
tttttttttttgagatggaa

SEQ ID NO: 60412 - DNA, 20 bp, Artificial Sequence
  Description of Artificial Sequence: Synthetic oligonucleotide
  Target: ATXN2; (-) strand; PAM type: YTN; PAM sequence: TTT
ttttttttttttgagatgga

SEQ ID NO: 60413 - DNA, 20 bp, Artificial Sequence
  Description of Artificial Sequence: Synthetic oligonucleotide
  Target: ATXN2; (-) strand; PAM type: YTN; PAM sequence: TTT
tttttttttttttgagatgg

SEQ ID NO: 60414 - DNA, 20 bp, Artificial Sequence
  Description of Artificial Sequence: Synthetic oligonucleotide
  Target: ATXN2; (-) strand; PAM type: YTN; PAM sequence: TTT
ttttttttttttttgagatg

SEQ ID NO: 60415 - DNA, 20 bp, Artificial Sequence
  Description of Artificial Sequence: Synthetic oligonucleotide
  Target: ATXN2; (-) strand; PAM type: YTN; PAM sequence: CTT
tttttttttttttttgagat

SEQ ID NO: 60416 - DNA, 20 bp, Artificial Sequence
  Description of Artificial Sequence: Synthetic oligonucleotide
  Target: ATXN2; (-) strand; PAM type: YTN; PAM sequence: TTG
tggtaacttttttttttttt

SEQ ID NO: 60417 - DNA, 20 bp, Artificial Sequence
  Description of Artificial Sequence: Synthetic oligonucleotide
  Target: ATXN2; (-) strand; PAM type: YTN; PAM sequence: TTC
atattgtggtaacttttttt

SEQ ID NO: 60418 - DNA, 20 bp, Artificial Sequence
  Description of Artificial Sequence: Synthetic oligonucleotide
  Target: ATXN2; (-) strand; PAM type: YTN; PAM sequence: TTT
catattgtggtaactttttt

SEQ ID NO: 60419 - DNA, 20 bp, Artificial Sequence
  Description of Artificial Sequence: Synthetic oligonucleotide
  Target: ATXN2; (-) strand; PAM type: YTN; PAM sequence: TTG
tttcatattgtggtaacttt

SEQ ID NO: 60420 - DNA, 20 bp, Artificial Sequence
  Description of Artificial Sequence: Synthetic oligonucleotide
  Target: ATXN2; (-) strand; PAM type: YTN; PAM sequence: TTA
attgtttcatattgtggtaa

SEQ ID NO: 60421 - DNA, 20 bp, Artificial Sequence
  Description of Artificial Sequence: Synthetic oligonucleotide
  Target: ATXN2; (-) strand; PAM type: YTN; PAM sequence: TTT
aattgtttcatattgtggta

SEQ ID NO: 60422 - DNA, 20 bp, Artificial Sequence
  Description of Artificial Sequence: Synthetic oligonucleotide
  Target: ATXN2; (-) strand; PAM type: YTN; PAM sequence: TTT
taattgtttcatattgtggt

SEQ ID NO: 60423 - DNA, 20 bp, Artificial Sequence
  Description of Artificial Sequence: Synthetic oligonucleotide
  Target: ATXN2; (-) strand; PAM type: YTN; PAM sequence: TTT
ttaattgtttcatattgtgg

SEQ ID NO: 60424 - DNA, 20 bp, Artificial Sequence
  Description of Artificial Sequence: Synthetic oligonucleotide
  Target: ATXN2; (-) strand; PAM type: YTN; PAM sequence: TTT
tttaattgtttcatattgtg

SEQ ID NO: 60425 - DNA, 20 bp, Artificial Sequence
  Description of Artificial Sequence: Synthetic oligonucleotide
  Target: ATXN2; (-) strand; PAM type: YTN; PAM sequence: TTT
ttttaattgtttcatattgt

SEQ ID NO: 60426 - DNA, 20 bp, Artificial Sequence
  Description of Artificial Sequence: Synthetic oligonucleotide
  Target: ATXN2; (-) strand; PAM type: YTN; PAM sequence: TTT
tttttaattgtttcatattg

SEQ ID NO: 60427 - DNA, 20 bp, Artificial Sequence
  Description of Artificial Sequence: Synthetic oligonucleotide
  Target: ATXN2; (-) strand; PAM type: YTN; PAM sequence: TTT
ttttttaattgtttcatatt

SEQ ID NO: 60428 - DNA, 20 bp, Artificial Sequence
  Description of Artificial Sequence: Synthetic oligonucleotide
  Target: ATXN2; (-) strand; PAM type: YTN; PAM sequence: TTT
tttttttaattgtttcatat

SEQ ID NO: 60429 - DNA, 20 bp, Artificial Sequence
  Description of Artificial Sequence: Synthetic oligonucleotide
  Target: ATXN2; (-) strand; PAM type: YTN; PAM sequence: TTT
ttttttttaattgtttcata

SEQ ID NO: 60430 - DNA, 20 bp, Artificial Sequence
  Description of Artificial Sequence: Synthetic oligonucleotide
  Target: ATXN2; (-) strand; PAM type: YTN; PAM sequence: TTT
tttttttttaattgtttcat

SEQ ID NO: 60431 - DNA, 20 bp, Artificial Sequence
  Description of Artificial Sequence: Synthetic oligonucleotide
  Target: ATXN2; (-) strand; PAM type: YTN; PAM sequence: TTT
ttttttttttaattgtttca

SEQ ID NO: 60432 - DNA, 20 bp, Artificial Sequence
  Description of Artificial Sequence: Synthetic oligonucleotide
  Target: ATXN2; (-) strand; PAM type: YTN; PAM sequence: CTT
tttttttttttaattgtttc

SEQ ID NO: 60433 - DNA, 20 bp, Artificial Sequence
  Description of Artificial Sequence: Synthetic oligonucleotide
  Target: ATXN2; (-) strand; PAM type: YTN; PAM sequence: TTG
aagtctttttttttttttaa

SEQ ID NO: 60434 - DNA, 20 bp, Artificial Sequence
  Description of Artificial Sequence: Synthetic oligonucleotide
  Target: ATXN2; (-) strand; PAM type: YTN; PAM sequence: TTA
tatgttgaagtctttttttt

SEQ ID NO: 60435 - DNA, 20 bp, Artificial Sequence
  Description of Artificial Sequence: Synthetic oligonucleotide
  Target: ATXN2; (-) strand; PAM type: YTN; PAM sequence: TTT
atatgttgaagtcttttttt

SEQ ID NO: 60436 - DNA, 20 bp, Artificial Sequence
  Description of Artificial Sequence: Synthetic oligonucleotide
  Target: ATXN2; (-) strand; PAM type: YTN; PAM sequence: TTG
tttatatgttgaagtctttt

SEQ ID NO: 60437 - DNA, 20 bp, Artificial Sequence
  Description of Artificial Sequence: Synthetic oligonucleotide
  Target: ATXN2; (-) strand; PAM type: YTN; PAM sequence: TTT
gtttatatgttgaagtcttt

SEQ ID NO: 60438 - DNA, 20 bp, Artificial Sequence
  Description of Artificial Sequence: Synthetic oligonucleotide
  Target: ATXN2; (-) strand; PAM type: YTN; PAM sequence: TTG
gatttgtttatatgttgaag

SEQ ID NO: 60439 - DNA, 20 bp, Artificial Sequence
  Description of Artificial Sequence: Synthetic oligonucleotide
  Target: ATXN2; (-) strand; PAM type: YTN; PAM sequence: TTT
ggatttgtttatatgttgaa

SEQ ID NO: 60440 - DNA, 20 bp, Artificial Sequence
  Description of Artificial Sequence: Synthetic oligonucleotide
  Target: ATXN2; (-) strand; PAM type: YTN; PAM sequence: TTG
caatttggatttgtttatat

SEQ ID NO: 60441 - DNA, 20 bp, Artificial Sequence
  Description of Artificial Sequence: Synthetic oligonucleotide
  Target: ATXN2; (-) strand; PAM type: YTN; PAM sequence: CTT
gcaatttggatttgtttata

SEQ ID NO: 60442 - DNA, 20 bp, Artificial Sequence
  Description of Artificial Sequence: Synthetic oligonucleotide
  Target: ATXN2; (-) strand; PAM type: YTN; PAM sequence: TTA
gggtccaagtcaggcttgca

SEQ ID NO: 60443 - DNA, 20 bp, Artificial Sequence
  Description of Artificial Sequence: Synthetic oligonucleotide
  Target: ATXN2; (-) strand; PAM type: YTN; PAM sequence: TTC
caattagggtccaagtcagg

SEQ ID NO: 60444 - DNA, 20 bp, Artificial Sequence
  Description of Artificial Sequence: Synthetic oligonucleotide
  Target: ATXN2; (-) strand; PAM type: YTN; PAM sequence: TTG
ttccaattagggtccaagtc

SEQ ID NO: 60445 - DNA, 20 bp, Artificial Sequence
  Description of Artificial Sequence: Synthetic oligonucleotide
  Target: ATXN2; (-) strand; PAM type: YTN; PAM sequence: TTT
gttccaattagggtccaagt

SEQ ID NO: 60446 - DNA, 20 bp, Artificial Sequence
  Description of Artificial Sequence: Synthetic oligonucleotide
  Target: ATXN2; (-) strand; PAM type: YTN; PAM sequence: TTA
caataatttgttccaattag

SEQ ID NO: 60447 - DNA, 20 bp, Artificial Sequence
  Description of Artificial Sequence: Synthetic oligonucleotide
  Target: ATXN2; (-) strand; PAM type: YTN; PAM sequence: TTT
acaataatttgttccaatta

SEQ ID NO: 60448 - DNA, 20 bp, Artificial Sequence
  Description of Artificial Sequence: Synthetic oligonucleotide
  Target: ATXN2; (-) strand; PAM type: YTN; PAM sequence: TTT
tacaataatttgttccaatt

SEQ ID NO: 60449 - DNA, 20 bp, Artificial Sequence
  Description of Artificial Sequence: Synthetic oligonucleotide
  Target: ATXN2; (-) strand; PAM type: YTN; PAM sequence: TTT
ttacaataatttgttccaat

SEQ ID NO: 60450 - DNA, 20 bp, Artificial Sequence
  Description of Artificial Sequence: Synthetic oligonucleotide
  Target: ATXN2; (-) strand; PAM type: YTN; PAM sequence: CTT
tttacaataatttgttccaa

SEQ ID NO: 60451 - DNA, 20 bp, Artificial Sequence
  Description of Artificial Sequence: Synthetic oligonucleotide
  Target: ATXN2; (-) strand; PAM type: YTN; PAM sequence: TTA
aaaaaaaaaaaaaaaaaaag

SEQ ID NO: 60452 - DNA, 20 bp, Artificial Sequence
  Description of Artificial Sequence: Synthetic oligonucleotide
  Target: ATXN2; (-) strand; PAM type: YTN; PAM sequence: CTT
aaaaaaaaaaaaaaaaaaaa

SEQ ID NO: 60453 - DNA, 20 bp, Artificial Sequence
  Description of Artificial Sequence: Synthetic oligonucleotide
  Target: ATXN2; (-) strand; PAM type: YTN; PAM sequence: CTC
ttaaaaaaaaaaaaaaaaaa

SEQ ID NO: 60454 - DNA, 20 bp, Artificial Sequence
  Description of Artificial Sequence: Synthetic oligonucleotide
  Target: ATXN2; (-) strand; PAM type: YTN; PAM sequence: TTC
cctcttaaaaaaaaaaaaaa

SEQ ID NO: 60455 - DNA, 20 bp, Artificial Sequence
  Description of Artificial Sequence: Synthetic oligonucleotide
  Target: ATXN2; (-) strand; PAM type: YTN; PAM sequence: CTG
ggtgacagagcaagattccc

SEQ ID NO: 60456 - DNA, 20 bp, Artificial Sequence
  Description of Artificial Sequence: Synthetic oligonucleotide
  Target: ATXN2; (-) strand; PAM type: YTN; PAM sequence: CTC
cagcctgggtgacagagcaa

SEQ ID NO: 60457 - DNA, 20 bp, Artificial Sequence
  Description of Artificial Sequence: Synthetic oligonucleotide
  Target: ATXN2; (-) strand; PAM type: YTN; PAM sequence: CTG
tactccagcctgggtgacag

SEQ ID NO: 60458 - DNA, 20 bp, Artificial Sequence
  Description of Artificial Sequence: Synthetic oligonucleotide
  Target: ATXN2; (-) strand; PAM type: YTN; PAM sequence: TTG
cgcacctgtactccagcctg

SEQ ID NO: 60459 - DNA, 20 bp, Artificial Sequence
  Description of Artificial Sequence: Synthetic oligonucleotide
  Target: ATXN2; (-) strand; PAM type: YTN; PAM sequence: TTG
agattgcgcacctgtactcc

SEQ ID NO: 60460 - DNA, 20 bp, Artificial Sequence
  Description of Artificial Sequence: Synthetic oligonucleotide
  Target: ATXN2; (-) strand; PAM type: YTN; PAM sequence: TTG
agttgagattgcgcacctgt

SEQ ID NO: 60461 - DNA, 20 bp, Artificial Sequence
  Description of Artificial Sequence: Synthetic oligonucleotide
  Target: ATXN2; (-) strand; PAM type: YTN; PAM sequence: TTG
tagttgagttgagattgcgc

SEQ ID NO: 60462 - DNA, 20 bp, Artificial Sequence
  Description of Artificial Sequence: Synthetic oligonucleotide
  Target: ATXN2; (-) strand; PAM type: YTN; PAM sequence: TTG
aacccaggaggcggaagttg

SEQ ID NO: 60463 - DNA, 20 bp, Artificial Sequence
  Description of Artificial Sequence: Synthetic oligonucleotide
  Target: ATXN2; (-) strand; PAM type: YTN; PAM sequence: CTT
gaacccaggaggcggaagtt

SEQ ID NO: 60464 - DNA, 20 bp, Artificial Sequence
  Description of Artificial Sequence: Synthetic oligonucleotide
  Target: ATXN2; (-) strand; PAM type: YTN; PAM sequence: TTG
cttgaacccaggaggcggaa

SEQ ID NO: 60465 - DNA, 20 bp, Artificial Sequence
  Description of Artificial Sequence: Synthetic oligonucleotide
  Target: ATXN2; (-) strand; PAM type: YTN; PAM sequence: CTG
aggcagaagaattgcttgaa

SEQ ID NO: 60466 - DNA, 20 bp, Artificial Sequence
  Description of Artificial Sequence: Synthetic oligonucleotide
  Target: ATXN2; (-) strand; PAM type: YTN; PAM sequence: TTG
ggagactgaggcagaagaat

SEQ ID NO: 60467 - DNA, 20 bp, Artificial Sequence
  Description of Artificial Sequence: Synthetic oligonucleotide
  Target: ATXN2; (-) strand; PAM type: YTN; PAM sequence: CTT
gggagactgaggcagaagaa

SEQ ID NO: 60468 - DNA, 20 bp, Artificial Sequence
  Description of Artificial Sequence: Synthetic oligonucleotide
  Target: ATXN2; (-) strand; PAM type: YTN; PAM sequence: CTA
cttgggagactgaggcagaa

SEQ ID NO: 60469 - DNA, 20 bp, Artificial Sequence
  Description of Artificial Sequence: Synthetic oligonucleotide
  Target: ATXN2; (-) strand; PAM type: YTN; PAM sequence: CTA
gctacttgggagactgaggc

SEQ ID NO: 60470 - DNA, 20 bp, Artificial Sequence
  Description of Artificial Sequence: Synthetic oligonucleotide
  Target: ATXN2; (-) strand; PAM type: YTN; PAM sequence: TTC
tagctacttgggagactgag

SEQ ID NO: 60471 - DNA, 20 bp, Artificial Sequence
  Description of Artificial Sequence: Synthetic oligonucleotide
  Target: ATXN2; (-) strand; PAM type: YTN; PAM sequence: CTG
taattctagctacttgggag

SEQ ID NO: 60472 - DNA, 20 bp, Artificial Sequence
  Description of Artificial Sequence: Synthetic oligonucleotide
  Target: ATXN2; (-) strand; PAM type: YTN; PAM sequence: CTG
ggcccggtggcaggcacctg

SEQ ID NO: 60473 - DNA, 20 bp, Artificial Sequence
  Description of Artificial Sequence: Synthetic oligonucleotide
  Target: ATXN2; (-) strand; PAM type: YTN; PAM sequence: TTG
gctgggcccggtggcaggca

SEQ ID NO: 60474 - DNA, 20 bp, Artificial Sequence
  Description of Artificial Sequence: Synthetic oligonucleotide
  Target: ATXN2; (-) strand; PAM type: YTN; PAM sequence: CTT
ggctgggcccggtggcaggc

SEQ ID NO: 60475 - DNA, 20 bp, Artificial Sequence
  Description of Artificial Sequence: Synthetic oligonucleotide
  Target: ATXN2; (-) strand; PAM type: YTN; PAM sequence: TTA
aaatatatcttggctgggcc

SEQ ID NO: 60476 - DNA, 20 bp, Artificial Sequence
  Description of Artificial Sequence: Synthetic oligonucleotide
  Target: ATXN2; (-) strand; PAM type: YTN; PAM sequence: TTT
aaaatatatcttggctgggc

SEQ ID NO: 60477 - DNA, 20 bp, Artificial Sequence
  Description of Artificial Sequence: Synthetic oligonucleotide
  Target: ATXN2; (-) strand; PAM type: YTN; PAM sequence: CTT
taaaatatatcttggctggg

SEQ ID NO: 60478 - DNA, 20 bp, Artificial Sequence
  Description of Artificial Sequence: Synthetic oligonucleotide
  Target: ATXN2; (-) strand; PAM type: YTN; PAM sequence: CTG
atctttaaaatatatcttgg

SEQ ID NO: 60479 - DNA, 20 bp, Artificial Sequence
  Description of Artificial Sequence: Synthetic oligonucleotide
  Target: ATXN2; (-) strand; PAM type: YTN; PAM sequence: TTA
aaaccaactgatctttaaaa

SEQ ID NO: 60480 - DNA, 20 bp, Artificial Sequence
  Description of Artificial Sequence: Synthetic oligonucleotide
  Target: ATXN2; (-) strand; PAM type: YTN; PAM sequence: TTT
aaaaccaactgatctttaaa

SEQ ID NO: 60481 - DNA, 20 bp, Artificial Sequence
  Description of Artificial Sequence: Synthetic oligonucleotide
  Target: ATXN2; (-) strand; PAM type: YTN; PAM sequence: TTT
taaaaccaactgatctttaa

SEQ ID NO: 60482 - DNA, 20 bp, Artificial Sequence
  Description of Artificial Sequence: Synthetic oligonucleotide
  Target: ATXN2; (-) strand; PAM type: YTN; PAM sequence: TTT
ttaaaaccaactgatcttta

SEQ ID NO: 60483 - DNA, 20 bp, Artificial Sequence
  Description of Artificial Sequence: Synthetic oligonucleotide
  Target: ATXN2; (-) strand; PAM type: YTN; PAM sequence: CTT
tttaaaaccaactgatcttt

SEQ ID NO: 60484 - DNA, 20 bp, Artificial Sequence
  Description of Artificial Sequence: Synthetic oligonucleotide
  Target: ATXN2; (-) strand; PAM type: YTN; PAM sequence: TTG
cctttttaaaaccaactgat

SEQ ID NO: 60485 - DNA, 20 bp, Artificial Sequence
  Description of Artificial Sequence: Synthetic oligonucleotide
  Target: ATXN2; (-) strand; PAM type: YTN; PAM sequence: CTA
aaaaaatcagttgccttttt

SEQ ID NO: 60486 - DNA, 20 bp, Artificial Sequence
  Description of Artificial Sequence: Synthetic oligonucleotide
  Target: ATXN2; (-) strand; PAM type: YTN; PAM sequence: CTA
ctaaaaaaatcagttgcctt

SEQ ID NO: 60487 - DNA, 20 bp, Artificial Sequence
  Description of Artificial Sequence: Synthetic oligonucleotide
  Target: ATXN2; (-) strand; PAM type: YTN; PAM sequence: TTA
ctactaaaaaaatcagttgc

SEQ ID NO: 60488 - DNA, 20 bp, Artificial Sequence
  Description of Artificial Sequence: Synthetic oligonucleotide
  Target: ATXN2; (-) strand; PAM type: YTN; PAM sequence: CTT
actactaaaaaaatcagttg

SEQ ID NO: 60489 - DNA, 20 bp, Artificial Sequence
  Description of Artificial Sequence: Synthetic oligonucleotide
  Target: ATXN2; (-) strand; PAM type: YTN; PAM sequence: TTA
acttactactaaaaaaatca

SEQ ID NO: 60490 - DNA, 20 bp, Artificial Sequence
  Description of Artificial Sequence: Synthetic oligonucleotide
  Target: ATXN2; (-) strand; PAM type: YTN; PAM sequence: CTA
taattaacttactactaaaa

SEQ ID NO: 60491 - DNA, 20 bp, Artificial Sequence
  Description of Artificial Sequence: Synthetic oligonucleotide
  Target: ATXN2; (-) strand; PAM type: YTN; PAM sequence: CTC
tataattaacttactactaa

SEQ ID NO: 60492 - DNA, 20 bp, Artificial Sequence
  Description of Artificial Sequence: Synthetic oligonucleotide
  Target: ATXN2; (-) strand; PAM type: YTN; PAM sequence: TTC
catatgaactctataattaa

SEQ ID NO: 60493 - DNA, 20 bp, Artificial Sequence
  Description of Artificial Sequence: Synthetic oligonucleotide
  Target: ATXN2; (-) strand; PAM type: YTN; PAM sequence: TTT
ccatatgaactctataatta

SEQ ID NO: 60494 - DNA, 20 bp, Artificial Sequence
  Description of Artificial Sequence: Synthetic oligonucleotide
  Target: ATXN2; (-) strand; PAM type: YTN; PAM sequence: TTT
tccatatgaactctataatt

SEQ ID NO: 60495 - DNA, 20 bp, Artificial Sequence
  Description of Artificial Sequence: Synthetic oligonucleotide
  Target: ATXN2; (-) strand; PAM type: YTN; PAM sequence: TTT
ttccatatgaactctataat

SEQ ID NO: 60496 - DNA, 20 bp, Artificial Sequence
  Description of Artificial Sequence: Synthetic oligonucleotide
  Target: ATXN2; (-) strand; PAM type: YTN; PAM sequence: TTA
tttttccatatgaactctat

SEQ ID NO: 60497 - DNA, 20 bp, Artificial Sequence
  Description of Artificial Sequence: Synthetic oligonucleotide
  Target: ATXN2; (-) strand; PAM type: YTN; PAM sequence: TTT
atttttccatatgaactcta

SEQ ID NO: 60498 - DNA, 20 bp, Artificial Sequence
  Description of Artificial Sequence: Synthetic oligonucleotide
  Target: ATXN2; (-) strand; PAM type: YTN; PAM sequence: CTG
tttatttttccatatgaact

SEQ ID NO: 60499 - DNA, 20 bp, Artificial Sequence
  Description of Artificial Sequence: Synthetic oligonucleotide
  Target: ATXN2; (-) strand; PAM type: YTN; PAM sequence: TTC
tgtttatttttccatatgaa

SEQ ID NO: 60500 - DNA, 20 bp, Artificial Sequence
  Description of Artificial Sequence: Synthetic oligonucleotide
  Target: ATXN2; (-) strand; PAM type: YTN; PAM sequence: TTT
ctgtttatttttccatatga

SEQ ID NO: 60501 - DNA, 20 bp, Artificial Sequence
  Description of Artificial Sequence: Synthetic oligonucleotide
  Target: ATXN2; (-) strand; PAM type: YTN; PAM sequence: TTT
tctgtttatttttccatatg

SEQ ID NO: 60502 - DNA, 20 bp, Artificial Sequence
  Description of Artificial Sequence: Synthetic oligonucleotide
  Target: ATXN2; (-) strand; PAM type: YTN; PAM sequence: TTG
aattttctgtttatttttcc

SEQ ID NO: 60503 - DNA, 20 bp, Artificial Sequence
  Description of Artificial Sequence: Synthetic oligonucleotide
  Target: ATXN2; (-) strand; PAM type: YTN; PAM sequence: CTT
gaattttctgtttatttttc

SEQ ID NO: 60504 - DNA, 20 bp, Artificial Sequence
  Description of Artificial Sequence: Synthetic oligonucleotide
  Target: ATXN2; (-) strand; PAM type: YTN; PAM sequence: TTA
ccttgaattttctgtttatt

SEQ ID NO: 60505 - DNA, 20 bp, Artificial Sequence
  Description of Artificial Sequence: Synthetic oligonucleotide
  Target: ATXN2; (-) strand; PAM type: YTN; PAM sequence: TTC
agattaccttgaattttctg

SEQ ID NO: 60506 - DNA, 20 bp, Artificial Sequence
  Description of Artificial Sequence: Synthetic oligonucleotide
  Target: ATXN2; (-) strand; PAM type: YTN; PAM sequence: TTT
cagattaccttgaattttct

SEQ ID NO: 60507 - DNA, 20 bp, Artificial Sequence
  Description of Artificial Sequence: Synthetic oligonucleotide
  Target: ATXN2; (-) strand; PAM type: YTN; PAM sequence: TTT
tcagattaccttgaattttc

SEQ ID NO: 60508 - DNA, 20 bp, Artificial Sequence
  Description of Artificial Sequence: Synthetic oligonucleotide
  Target: ATXN2; (-) strand; PAM type: YTN; PAM sequence: TTT
ttcagattaccttgaatttt

SEQ ID NO: 60509 - DNA, 20 bp, Artificial Sequence
  Description of Artificial Sequence: Synthetic oligonucleotide
  Target: ATXN2; (-) strand; PAM type: YTN; PAM sequence: TTT
tttcagattaccttgaattt

SEQ ID NO: 60510 - DNA, 20 bp, Artificial Sequence
  Description of Artificial Sequence: Synthetic oligonucleotide
  Target: ATXN2; (-) strand; PAM type: YTN; PAM sequence: TTT
ttttcagattaccttgaatt

SEQ ID NO: 60511 - DNA, 20 bp, Artificial Sequence
  Description of Artificial Sequence: Synthetic oligonucleotide
  Target: ATXN2; (-) strand; PAM type: YTN; PAM sequence: TTT
tttttcagattaccttgaat

SEQ ID NO: 60512 - DNA, 20 bp, Artificial Sequence
  Description of Artificial Sequence: Synthetic oligonucleotide
  Target: ATXN2; (-) strand; PAM type: YTN; PAM sequence: TTT
ttttttcagattaccttgaa

SEQ ID NO: 60513 - DNA, 20 bp, Artificial Sequence
  Description of Artificial Sequence: Synthetic oligonucleotide
  Target: ATXN2; (-) strand; PAM type: YTN; PAM sequence: TTT
tttttttcagattaccttga

SEQ ID NO: 60514 - DNA, 20 bp, Artificial Sequence
  Description of Artificial Sequence: Synthetic oligonucleotide
  Target: ATXN2; (-) strand; PAM type: YTN; PAM sequence: TTG
attttttttttcagattacc

SEQ ID NO: 60515 - DNA, 20 bp, Artificial Sequence
  Description of Artificial Sequence: Synthetic oligonucleotide
  Target: ATXN2; (-) strand; PAM type: YTN; PAM sequence: CTG
ccaacattgatttttttttt

SEQ ID NO: 60516 - DNA, 20 bp, Artificial Sequence
  Description of Artificial Sequence: Synthetic oligonucleotide
  Target: ATXN2; (-) strand; PAM type: YTN; PAM sequence: CTC
actgccaacattgatttttt

SEQ ID NO: 60517 - DNA, 20 bp, Artificial Sequence
  Description of Artificial Sequence: Synthetic oligonucleotide
  Target: ATXN2; (-) strand; PAM type: YTN; PAM sequence: CTC
atccactcactgccaacatt

SEQ ID NO: 60518 - DNA, 20 bp, Artificial Sequence
  Description of Artificial Sequence: Synthetic oligonucleotide
  Target: ATXN2; (-) strand; PAM type: YTN; PAM sequence: TTC
tcatccactcactgccaaca

SEQ ID NO: 60519 - DNA, 20 bp, Artificial Sequence
  Description of Artificial Sequence: Synthetic oligonucleotide
  Target: ATXN2; (-) strand; PAM type: YTN; PAM sequence: CTT
ctcatccactcactgccaac

SEQ ID NO: 60520 - DNA, 20 bp, Artificial Sequence
  Description of Artificial Sequence: Synthetic oligonucleotide
  Target: ATXN2; (-) strand; PAM type: YTN; PAM sequence: CTA
ccttctcatccactcactgc

SEQ ID NO: 60521 - DNA, 20 bp, Artificial Sequence
  Description of Artificial Sequence: Synthetic oligonucleotide
  Target: ATXN2; (-) strand; PAM type: YTN; PAM sequence: CTA
ataggactaccttctcatcc

SEQ ID NO: 60522 - DNA, 20 bp, Artificial Sequence
  Description of Artificial Sequence: Synthetic oligonucleotide
  Target: ATXN2; (-) strand; PAM type: YTN; PAM sequence: CTA
atctaataggactaccttct

SEQ ID NO: 60523 - DNA, 20 bp, Artificial Sequence
  Description of Artificial Sequence: Synthetic oligonucleotide
  Target: ATXN2; (-) strand; PAM type: YTN; PAM sequence: TTC
actaatctaataggactacc

SEQ ID NO: 60524 - DNA, 20 bp, Artificial Sequence
  Description of Artificial Sequence: Synthetic oligonucleotide
  Target: ATXN2; (-) strand; PAM type: YTN; PAM sequence: CTT
cactaatctaataggactac

SEQ ID NO: 60525 - DNA, 20 bp, Artificial Sequence
  Description of Artificial Sequence: Synthetic oligonucleotide
  Target: ATXN2; (-) strand; PAM type: YTN; PAM sequence: CTG
cttcactaatctaataggac

SEQ ID NO: 60526 - DNA, 20 bp, Artificial Sequence
  Description of Artificial Sequence: Synthetic oligonucleotide
  Target: ATXN2; (-) strand; PAM type: YTN; PAM sequence: CTC
tgcttcactaatctaatagg

SEQ ID NO: 60527 - DNA, 20 bp, Artificial Sequence
  Description of Artificial Sequence: Synthetic oligonucleotide
  Target: ATXN2; (-) strand; PAM type: YTN; PAM sequence: TTC
actctgcttcactaatctaa

SEQ ID NO: 60528 - DNA, 20 bp, Artificial Sequence
  Description of Artificial Sequence: Synthetic oligonucleotide
  Target: ATXN2; (-) strand; PAM type: YTN; PAM sequence: TTT
cactctgcttcactaatcta

SEQ ID NO: 60529 - DNA, 20 bp, Artificial Sequence
  Description of Artificial Sequence: Synthetic oligonucleotide
  Target: ATXN2; (-) strand; PAM type: YTN; PAM sequence: TTT
tcactctgcttcactaatct

SEQ ID NO: 60530 - DNA, 20 bp, Artificial Sequence
  Description of Artificial Sequence: Synthetic oligonucleotide
  Target: ATXN2; (-) strand; PAM type: YTN; PAM sequence: TTT
ttcactctgcttcactaatc

SEQ ID NO: 60531 - DNA, 20 bp, Artificial Sequence
  Description of Artificial Sequence: Synthetic oligonucleotide
  Target: ATXN2; (-) strand; PAM type: YTN; PAM sequence: CTG
gatttttcactctgcttcac

SEQ ID NO: 60532 - DNA, 20 bp, Artificial Sequence
  Description of Artificial Sequence: Synthetic oligonucleotide
  Target: ATXN2; (-) strand; PAM type: YTN; PAM sequence: TTC
tggatttttcactctgcttc

SEQ ID NO: 60533 - DNA, 20 bp, Artificial Sequence
  Description of Artificial Sequence: Synthetic oligonucleotide
  Target: ATXN2; (-) strand; PAM type: YTN; PAM sequence: TTT
ctggatttttcactctgctt

SEQ ID NO: 60534 - DNA, 20 bp, Artificial Sequence
  Description of Artificial Sequence: Synthetic oligonucleotide
  Target: ATXN2; (-) strand; PAM type: YTN; PAM sequence: TTG
tttctggatttttcactctg

SEQ ID NO: 60535 - DNA, 20 bp, Artificial Sequence
  Description of Artificial Sequence: Synthetic oligonucleotide
  Target: ATXN2; (-) strand; PAM type: YTN; PAM sequence: TTT
gtttctggatttttcactct

SEQ ID NO: 60536 - DNA, 20 bp, Artificial Sequence
  Description of Artificial Sequence: Synthetic oligonucleotide
  Target: ATXN2; (-) strand; PAM type: YTN; PAM sequence: TTG
aatttgtttctggatttttc

SEQ ID NO: 60537 - DNA, 20 bp, Artificial Sequence
  Description of Artificial Sequence: Synthetic oligonucleotide
  Target: ATXN2; (-) strand; PAM type: YTN; PAM sequence: TTG
tggttgaatttgtttctgga

SEQ ID NO: 60538 - DNA, 20 bp, Artificial Sequence
  Description of Artificial Sequence: Synthetic oligonucleotide
  Target: ATXN2; (-) strand; PAM type: YTN; PAM sequence: TTT
gtggttgaatttgtttctgg

SEQ ID NO: 60539 - DNA, 20 bp, Artificial Sequence
  Description of Artificial Sequence: Synthetic oligonucleotide
  Target: ATXN2; (-) strand; PAM type: YTN; PAM sequence: TTT
tgtggttgaatttgtttctg

SEQ ID NO: 60540 - DNA, 20 bp, Artificial Sequence
  Description of Artificial Sequence: Synthetic oligonucleotide
  Target: ATXN2; (-) strand; PAM type: YTN; PAM sequence: TTT
ttgtggttgaatttgtttct

SEQ ID NO: 60541 - DNA, 20 bp, Artificial Sequence
  Description of Artificial Sequence: Synthetic oligonucleotide
  Target: ATXN2; (-) strand; PAM type: YTN; PAM sequence: CTT
tttgtggttgaatttgtttc

SEQ ID NO: 60542 - DNA, 20 bp, Artificial Sequence
  Description of Artificial Sequence: Synthetic oligonucleotide
  Target: ATXN2; (-) strand; PAM type: YTN; PAM sequence: TTA
tcatataacaagtgtctttt

SEQ ID NO: 60543 - DNA, 20 bp, Artificial Sequence
  Description of Artificial Sequence: Synthetic oligonucleotide
  Target: ATXN2; (-) strand; PAM type: YTN; PAM sequence: TTT
atcatataacaagtgtcttt

SEQ ID NO: 60544 - DNA, 20 bp, Artificial Sequence
  Description of Artificial Sequence: Synthetic oligonucleotide
  Target: ATXN2; (-) strand; PAM type: YTN; PAM sequence: TTT
tatcatataacaagtgtctt

SEQ ID NO: 60545 - DNA, 20 bp, Artificial Sequence
  Description of Artificial Sequence: Synthetic oligonucleotide
  Target: ATXN2; (-) strand; PAM type: YTN; PAM sequence: CTG
atatgaaatgccattttatc

SEQ ID NO: 60546 - DNA, 20 bp, Artificial Sequence
  Description of Artificial Sequence: Synthetic oligonucleotide
  Target: ATXN2; (-) strand; PAM type: YTN; PAM sequence: TTA
tggtcatacaaactgatatg

SEQ ID NO: 60547 - DNA, 20 bp, Artificial Sequence
  Description of Artificial Sequence: Synthetic oligonucleotide
  Target: ATXN2; (-) strand; PAM type: YTN; PAM sequence: TTC
cattatggtcatacaaactg

SEQ ID NO: 60548 - DNA, 20 bp, Artificial Sequence
  Description of Artificial Sequence: Synthetic oligonucleotide
  Target: ATXN2; (-) strand; PAM type: YTN; PAM sequence: TTA
aagtgtgtgtgtatgcgtgc

SEQ ID NO: 60549 - DNA, 20 bp, Artificial Sequence
  Description of Artificial Sequence: Synthetic oligonucleotide
  Target: ATXN2; (-) strand; PAM type: YTN; PAM sequence: TTT
aaagtgtgtgtgtatgcgtg

SEQ ID NO: 60550 - DNA, 20 bp, Artificial Sequence
  Description of Artificial Sequence: Synthetic oligonucleotide
  Target: ATXN2; (-) strand; PAM type: YTN; PAM sequence: CTG
tatttaaagtgtgtgtgtat

SEQ ID NO: 60551 - DNA, 20 bp, Artificial Sequence
  Description of Artificial Sequence: Synthetic oligonucleotide
  Target: ATXN2; (-) strand; PAM type: YTN; PAM sequence: CTG
ggtgacagaaggagaccctg

SEQ ID NO: 60552 - DNA, 20 bp, Artificial Sequence
  Description of Artificial Sequence: Synthetic oligonucleotide
  Target: ATXN2; (-) strand; PAM type: YTN; PAM sequence: CTC
cagcctgggtgacagaagga

SEQ ID NO: 60553 - DNA, 20 bp, Artificial Sequence
  Description of Artificial Sequence: Synthetic oligonucleotide
  Target: ATXN2; (-) strand; PAM type: YTN; PAM sequence: CTG
tactccagcctgggtgacag

SEQ ID NO: 60554 - DNA, 20 bp, Artificial Sequence
  Description of Artificial Sequence: Synthetic oligonucleotide
  Target: ATXN2; (-) strand; PAM type: YTN; PAM sequence: TTG
taccactgtactccagcctg

SEQ ID NO: 60555 - DNA, 20 bp, Artificial Sequence
  Description of Artificial Sequence: Synthetic oligonucleotide
  Target: ATXN2; (-) strand; PAM type: YTN; PAM sequence: CTG
tgattgtaccactgtactcc

SEQ ID NO: 60556 - DNA, 20 bp, Artificial Sequence
  Description of Artificial Sequence: Synthetic oligonucleotide
  Target: ATXN2; (-) strand; PAM type: YTN; PAM sequence: TTA
aagcagcagtgagctgtgat

SEQ ID NO: 60557 - DNA, 20 bp, Artificial Sequence
  Description of Artificial Sequence: Synthetic oligonucleotide
  Target: ATXN2; (-) strand; PAM type: YTN; PAM sequence: TTT
aaagcagcagtgagctgtga

SEQ ID NO: 60558 - DNA, 20 bp, Artificial Sequence
  Description of Artificial Sequence: Synthetic oligonucleotide
  Target: ATXN2; (-) strand; PAM type: YTN; PAM sequence: TTG
agcccagtagtttaaagcag

SEQ ID NO: 60559 - DNA, 20 bp, Artificial Sequence
  Description of Artificial Sequence: Synthetic oligonucleotide
  Target: ATXN2; (-) strand; PAM type: YTN; PAM sequence: CTT
gagcccagtagtttaaagca

SEQ ID NO: 60560 - DNA, 20 bp, Artificial Sequence
  Description of Artificial Sequence: Synthetic oligonucleotide
  Target: ATXN2; (-) strand; PAM type: YTN; PAM sequence: TTG
cttgagcccagtagtttaaa

SEQ ID NO: 60561 - DNA, 20 bp, Artificial Sequence
  Description of Artificial Sequence: Synthetic oligonucleotide
  Target: ATXN2; (-) strand; PAM type: YTN; PAM sequence: CTG
aggaaggagaattgcttgag

SEQ ID NO: 60562 - DNA, 20 bp, Artificial Sequence
  Description of Artificial Sequence: Synthetic oligonucleotide
  Target: ATXN2; (-) strand; PAM type: YTN; PAM sequence: TTG
agaggctgaggaaggagaat

SEQ ID NO: 60563 - DNA, 20 bp, Artificial Sequence
  Description of Artificial Sequence: Synthetic oligonucleotide
  Target: ATXN2; (-) strand; PAM type: YTN; PAM sequence: CTT
gagaggctgaggaaggagaa

SEQ ID NO: 60564 - DNA, 20 bp, Artificial Sequence
  Description of Artificial Sequence: Synthetic oligonucleotide
  Target: ATXN2; (-) strand; PAM type: YTN; PAM sequence: CTA
cttgagaggctgaggaagga

SEQ ID NO: 60565 - DNA, 20 bp, Artificial Sequence
  Description of Artificial Sequence: Synthetic oligonucleotide
  Target: ATXN2; (-) strand; PAM type: YTN; PAM sequence: CTA
actacttgagaggctgagga

SEQ ID NO: 60566 - DNA, 20 bp, Artificial Sequence
  Description of Artificial Sequence: Synthetic oligonucleotide
  Target: ATXN2; (-) strand; PAM type: YTN; PAM sequence: CTG
tagtcctaactacttgagag

SEQ ID NO: 60567 - DNA, 20 bp, Artificial Sequence
  Description of Artificial Sequence: Synthetic oligonucleotide
  Target: ATXN2; (-) strand; PAM type: YTN; PAM sequence: CTG
ggtgtggtggcacacacctg

SEQ ID NO: 60568 - DNA, 20 bp, Artificial Sequence
  Description of Artificial Sequence: Synthetic oligonucleotide
  Target: ATXN2; (-) strand; PAM type: YTN; PAM sequence: TTG
ctgggtgtggtggcacacac

SEQ ID NO: 60569 - DNA, 20 bp, Artificial Sequence
  Description of Artificial Sequence: Synthetic oligonucleotide
  Target: ATXN2; (-) strand; PAM type: YTN; PAM sequence: TTT
gctgggtgtggtggcacaca

SEQ ID NO: 60570 - DNA, 20 bp, Artificial Sequence
  Description of Artificial Sequence: Synthetic oligonucleotide
  Target: ATXN2; (-) strand; PAM type: YTN; PAM sequence: TTA
aaaatttgctgggtgtggtg

SEQ ID NO: 60571 - DNA, 20 bp, Artificial Sequence
  Description of Artificial Sequence: Synthetic oligonucleotide
  Target: ATXN2; (-) strand; PAM type: YTN; PAM sequence: TTT
aaaaatttgctgggtgtggt

SEQ ID NO: 60572 - DNA, 20 bp, Artificial Sequence
  Description of Artificial Sequence: Synthetic oligonucleotide
  Target: ATXN2; (-) strand; PAM type: YTN; PAM sequence: CTA
caaaacaatttaaaaatttg

SEQ ID NO: 60573 - DNA, 20 bp, Artificial Sequence
  Description of Artificial Sequence: Synthetic oligonucleotide
  Target: ATXN2; (-) strand; PAM type: YTN; PAM sequence: CTG
ggtgatgtaggaaaacccca

SEQ ID NO: 60574 - DNA, 20 bp, Artificial Sequence
  Description of Artificial Sequence: Synthetic oligonucleotide
  Target: ATXN2; (-) strand; PAM type: YTN; PAM sequence: TTC
aagaccaacctgggtgatgt

SEQ ID NO: 60575 - DNA, 20 bp, Artificial Sequence
  Description of Artificial Sequence: Synthetic oligonucleotide
  Target: ATXN2; (-) strand; PAM type: YTN; PAM sequence: TTG
aggccaggagttcaagacca

SEQ ID NO: 60576 - DNA, 20 bp, Artificial Sequence
  Description of Artificial Sequence: Synthetic oligonucleotide
  Target: ATXN2; (-) strand; PAM type: YTN; PAM sequence: CTT
gaggccaggagttcaagacc

SEQ ID NO: 60577 - DNA, 20 bp, Artificial Sequence
  Description of Artificial Sequence: Synthetic oligonucleotide
  Target: ATXN2; (-) strand; PAM type: YTN; PAM sequence: TTG
ggaggccaaggcaggaggat

SEQ ID NO: 60578 - DNA, 20 bp, Artificial Sequence
  Description of Artificial Sequence: Synthetic oligonucleotide
  Target: ATXN2; (-) strand; PAM type: YTN; PAM sequence: TTT
gggaggccaaggcaggagga

SEQ ID NO: 60579 - DNA, 20 bp, Artificial Sequence
  Description of Artificial Sequence: Synthetic oligonucleotide
  Target: ATXN2; (-) strand; PAM type: YTN; PAM sequence: CTT
tgggaggccaaggcaggagg

SEQ ID NO: 60580 - DNA, 20 bp, Artificial Sequence
  Description of Artificial Sequence: Synthetic oligonucleotide
  Target: ATXN2; (-) strand; PAM type: YTN; PAM sequence: CTC
agagctttgggaggccaagg

SEQ ID NO: 60581 - DNA, 20 bp, Artificial Sequence
  Description of Artificial Sequence: Synthetic oligonucleotide
  Target: ATXN2; (-) strand; PAM type: YTN; PAM sequence: CTG
taacctcagagctttgggag

SEQ ID NO: 60582 - DNA, 20 bp, Artificial Sequence
  Description of Artificial Sequence: Synthetic oligonucleotide
  Target: ATXN2; (-) strand; PAM type: YTN; PAM sequence: CTC
atacctgtaacctcagagct

SEQ ID NO: 60583 - DNA, 20 bp, Artificial Sequence
  Description of Artificial Sequence: Synthetic oligonucleotide
  Target: ATXN2; (-) strand; PAM type: YTN; PAM sequence: TTG
accaggaacagtggctcata

SEQ ID NO: 60584 - DNA, 20 bp, Artificial Sequence
  Description of Artificial Sequence: Synthetic oligonucleotide
  Target: ATXN2; (-) strand; PAM type: YTN; PAM sequence: CTA
agtatatcatattgaccagg

SEQ ID NO: 60585 - DNA, 20 bp, Artificial Sequence
  Description of Artificial Sequence: Synthetic oligonucleotide
  Target: ATXN2; (-) strand; PAM type: YTN; PAM sequence: CTA
ctaagtatatcatattgacc

SEQ ID NO: 60586 - DNA, 20 bp, Artificial Sequence
  Description of Artificial Sequence: Synthetic oligonucleotide
  Target: ATXN2; (-) strand; PAM type: YTN; PAM sequence: TTA
tcatctactaagtatatcat

SEQ ID NO: 60587 - DNA, 20 bp, Artificial Sequence
  Description of Artificial Sequence: Synthetic oligonucleotide
  Target: ATXN2; (-) strand; PAM type: YTN; PAM sequence: CTT
atcatctactaagtatatca

SEQ ID NO: 60588 - DNA, 20 bp, Artificial Sequence
  Description of Artificial Sequence: Synthetic oligonucleotide
  Target: ATXN2; (-) strand; PAM type: YTN; PAM sequence: TTC
aaatacttatcatctactaa

SEQ ID NO: 60589 - DNA, 20 bp, Artificial Sequence
  Description of Artificial Sequence: Synthetic oligonucleotide
  Target: ATXN2; (-) strand; PAM type: YTN; PAM sequence: TTA
tgttcaaatacttatcatct

SEQ ID NO: 60590 - DNA, 20 bp, Artificial Sequence
  Description of Artificial Sequence: Synthetic oligonucleotide
  Target: ATXN2; (-) strand; PAM type: YTN; PAM sequence: TTG
gattatgttcaaatacttat

SEQ ID NO: 60591 - DNA, 20 bp, Artificial Sequence
  Description of Artificial Sequence: Synthetic oligonucleotide
  Target: ATXN2; (-) strand; PAM type: YTN; PAM sequence: TTG
ttggattatgttcaaatact

SEQ ID NO: 60592 - DNA, 20 bp, Artificial Sequence
  Description of Artificial Sequence: Synthetic oligonucleotide
  Target: ATXN2; (-) strand; PAM type: YTN; PAM sequence: TTA
atcatgaatggttgttggat

SEQ ID NO: 60593 - DNA, 20 bp, Artificial Sequence
  Description of Artificial Sequence: Synthetic oligonucleotide
  Target: ATXN2; (-) strand; PAM type: YTN; PAM sequence: TTT
aatcatgaatggttgttgga

SEQ ID NO: 60594 - DNA, 20 bp, Artificial Sequence
  Description of Artificial Sequence: Synthetic oligonucleotide
  Target: ATXN2; (-) strand; PAM type: YTN; PAM sequence: TTT
taatcatgaatggttgttgg

SEQ ID NO: 60595 - DNA, 20 bp, Artificial Sequence
  Description of Artificial Sequence: Synthetic oligonucleotide
  Target: ATXN2; (-) strand; PAM type: YTN; PAM sequence: TTT
ttaatcatgaatggttgttg

SEQ ID NO: 60596 - DNA, 20 bp, Artificial Sequence
  Description of Artificial Sequence: Synthetic oligonucleotide
  Target: ATXN2; (-) strand; PAM type: YTN; PAM sequence: CTT
tttaatcatgaatggttgtt

SEQ ID NO: 60597 - DNA, 20 bp, Artificial Sequence
  Description of Artificial Sequence: Synthetic oligonucleotide
  Target: ATXN2; (-) strand; PAM type: YTN; PAM sequence: TTC
tttttaatcatgaatggttg

SEQ ID NO: 60598 - DNA, 20 bp, Artificial Sequence
  Description of Artificial Sequence: Synthetic oligonucleotide
  Target: ATXN2; (-) strand; PAM type: YTN; PAM sequence: TTT
ctttttaatcatgaatggtt

SEQ ID NO: 60599 - DNA, 20 bp, Artificial Sequence
  Description of Artificial Sequence: Synthetic oligonucleotide
  Target: ATXN2; (-) strand; PAM type: YTN; PAM sequence: TTT
tctttttaatcatgaatggt

SEQ ID NO: 60600 - DNA, 20 bp, Artificial Sequence
  Description of Artificial Sequence: Synthetic oligonucleotide
  Target: ATXN2; (-) strand; PAM type: YTN; PAM sequence: TTG
ttttctttttaatcatgaat

SEQ ID NO: 60601 - DNA, 20 bp, Artificial Sequence
  Description of Artificial Sequence: Synthetic oligonucleotide
  Target: ATXN2; (-) strand; PAM type: YTN; PAM sequence: TTT
gttttctttttaatcatgaa

SEQ ID NO: 60602 - DNA, 20 bp, Artificial Sequence
  Description of Artificial Sequence: Synthetic oligonucleotide
  Target: ATXN2; (-) strand; PAM type: YTN; PAM sequence: TTG
cagaggtgggtttgttttct

SEQ ID NO: 60603 - DNA, 20 bp, Artificial Sequence
  Description of Artificial Sequence: Synthetic oligonucleotide
  Target: ATXN2; (-) strand; PAM type: YTN; PAM sequence: TTT
gcagaggtgggtttgttttc

SEQ ID NO: 60604 - DNA, 20 bp, Artificial Sequence
  Description of Artificial Sequence: Synthetic oligonucleotide
  Target: ATXN2; (-) strand; PAM type: YTN; PAM sequence: CTA
atttgcagaggtgggtttgt

SEQ ID NO: 60605 - DNA, 20 bp, Artificial Sequence
  Description of Artificial Sequence: Synthetic oligonucleotide
  Target: ATXN2; (-) strand; PAM type: YTN; PAM sequence: TTC
ctaatttgcagaggtgggtt

SEQ ID NO: 60606 - DNA, 20 bp, Artificial Sequence
  Description of Artificial Sequence: Synthetic oligonucleotide
  Target: ATXN2; (-) strand; PAM type: YTN; PAM sequence: TTC
agttcctaatttgcagaggt

SEQ ID NO: 60607 - DNA, 20 bp, Artificial Sequence
  Description of Artificial Sequence: Synthetic oligonucleotide
  Target: ATXN2; (-) strand; PAM type: YTN; PAM sequence: CTT
cagttcctaatttgcagagg

SEQ ID NO: 60608 - DNA, 20 bp, Artificial Sequence
  Description of Artificial Sequence: Synthetic oligonucleotide
  Target: ATXN2; (-) strand; PAM type: YTN; PAM sequence: TTA
cttcagttcctaatttgcag

SEQ ID NO: 60609 - DNA, 20 bp, Artificial Sequence
  Description of Artificial Sequence: Synthetic oligonucleotide
  Target: ATXN2; (-) strand; PAM type: YTN; PAM sequence: TTA
ggtgttacttcagttcctaa

SEQ ID NO: 60610 - DNA, 20 bp, Artificial Sequence
  Description of Artificial Sequence: Synthetic oligonucleotide
  Target: ATXN2; (-) strand; PAM type: YTN; PAM sequence: TTA
agcatacagttaggtgttac

SEQ ID NO: 60611 - DNA, 20 bp, Artificial Sequence
  Description of Artificial Sequence: Synthetic oligonucleotide
  Target: ATXN2; (-) strand; PAM type: YTN; PAM sequence: CTA
ttaagcatacagttaggtgt

SEQ ID NO: 60612 - DNA, 20 bp, Artificial Sequence
  Description of Artificial Sequence: Synthetic oligonucleotide
  Target: ATXN2; (-) strand; PAM type: YTN; PAM sequence: TTC
actattaagcatacagttag

SEQ ID NO: 60613 - DNA, 20 bp, Artificial Sequence
  Description of Artificial Sequence: Synthetic oligonucleotide
  Target: ATXN2; (-) strand; PAM type: YTN; PAM sequence: TTT
cactattaagcatacagtta

SEQ ID NO: 60614 - DNA, 20 bp, Artificial Sequence
  Description of Artificial Sequence: Synthetic oligonucleotide
  Target: ATXN2; (-) strand; PAM type: YTN; PAM sequence: CTT
tcactattaagcatacagtt

SEQ ID NO: 60615 - DNA, 20 bp, Artificial Sequence
  Description of Artificial Sequence: Synthetic oligonucleotide
  Target: ATXN2; (-) strand; PAM type: YTN; PAM sequence: TTG
tctttcactattaagcatac

SEQ ID NO: 60616 - DNA, 20 bp, Artificial Sequence
  Description of Artificial Sequence: Synthetic oligonucleotide
  Target: ATXN2; (-) strand; PAM type: YTN; PAM sequence: TTA
ggggtgagacattgtctttc

SEQ ID NO: 60617 - DNA, 20 bp, Artificial Sequence
  Description of Artificial Sequence: Synthetic oligonucleotide
  Target: ATXN2; (-) strand; PAM type: YTN; PAM sequence: TTT
aggggtgagacattgtcttt

SEQ ID NO: 60618 - DNA, 20 bp, Artificial Sequence
  Description of Artificial Sequence: Synthetic oligonucleotide
  Target: ATXN2; (-) strand; PAM type: YTN; PAM sequence: TTT
taggggtgagacattgtctt

SEQ ID NO: 60619 - DNA, 20 bp, Artificial Sequence
  Description of Artificial Sequence: Synthetic oligonucleotide
  Target: ATXN2; (-) strand; PAM type: YTN; PAM sequence: TTT
ttaggggtgagacattgtct

SEQ ID NO: 60620 - DNA, 20 bp, Artificial Sequence
  Description of Artificial Sequence: Synthetic oligonucleotide
  Target: ATXN2; (-) strand; PAM type: YTN; PAM sequence: CTC
ccatttttaggggtgagaca

SEQ ID NO: 60621 - DNA, 20 bp, Artificial Sequence
  Description of Artificial Sequence: Synthetic oligonucleotide
  Target: ATXN2; (-) strand; PAM type: YTN; PAM sequence: TTG
ccatgctcccatttttaggg

SEQ ID NO: 60622 - DNA, 20 bp, Artificial Sequence
  Description of Artificial Sequence: Synthetic oligonucleotide
  Target: ATXN2; (-) strand; PAM type: YTN; PAM sequence: TTT
gccatgctcccatttttagg

SEQ ID NO: 60623 - DNA, 20 bp, Artificial Sequence
  Description of Artificial Sequence: Synthetic oligonucleotide
  Target: ATXN2; (-) strand; PAM type: YTN; PAM sequence: TTT
tgccatgctcccatttttag

SEQ ID NO: 60624 - DNA, 20 bp, Artificial Sequence
  Description of Artificial Sequence: Synthetic oligonucleotide
  Target: ATXN2; (-) strand; PAM type: YTN; PAM sequence: CTG
aaaaaggcatgagattttgc

SEQ ID NO: 60625 - DNA, 20 bp, Artificial Sequence
  Description of Artificial Sequence: Synthetic oligonucleotide
  Target: ATXN2; (-) strand; PAM type: YTN; PAM sequence: TTA
ctgaaaaaggcatgagattt

SEQ ID NO: 60626 - DNA, 20 bp, Artificial Sequence
  Description of Artificial Sequence: Synthetic oligonucleotide
  Target: ATXN2; (-) strand; PAM type: YTN; PAM sequence: CTG
gtgcattactgaaaaaggca

SEQ ID NO: 60627 - DNA, 20 bp, Artificial Sequence
  Description of Artificial Sequence: Synthetic oligonucleotide
  Target: ATXN2; (-) strand; PAM type: YTN; PAM sequence: TTG
tactggtgcattactgaaaa

SEQ ID NO: 60628 - DNA, 20 bp, Artificial Sequence
  Description of Artificial Sequence: Synthetic oligonucleotide
  Target: ATXN2; (-) strand; PAM type: YTN; PAM sequence: TTA
ttgtactggtgcattactga

SEQ ID NO: 60629 - DNA, 20 bp, Artificial Sequence
  Description of Artificial Sequence: Synthetic oligonucleotide
  Target: ATXN2; (-) strand; PAM type: YTN; PAM sequence: CTT
attgtactggtgcattactg

SEQ ID NO: 60630 - DNA, 20 bp, Artificial Sequence
  Description of Artificial Sequence: Synthetic oligonucleotide
  Target: ATXN2; (-) strand; PAM type: YTN; PAM sequence: TTG
tcttattgtactggtgcatt

SEQ ID NO: 60631 - DNA, 20 bp, Artificial Sequence
  Description of Artificial Sequence: Synthetic oligonucleotide
  Target: ATXN2; (-) strand; PAM type: YTN; PAM sequence: TTT
gtcttattgtactggtgcat

SEQ ID NO: 60632 - DNA, 20 bp, Artificial Sequence
  Description of Artificial Sequence: Synthetic oligonucleotide
  Target: ATXN2; (-) strand; PAM type: YTN; PAM sequence: TTT
tgtcttattgtactggtgca

SEQ ID NO: 60633 - DNA, 20 bp, Artificial Sequence
  Description of Artificial Sequence: Synthetic oligonucleotide
  Target: ATXN2; (-) strand; PAM type: YTN; PAM sequence: TTT
ttgtcttattgtactggtgc

SEQ ID NO: 60634 - DNA, 20 bp, Artificial Sequence
  Description of Artificial Sequence: Synthetic oligonucleotide
  Target: ATXN2; (-) strand; PAM type: YTN; PAM sequence: TTT
tttgtcttattgtactggtg

SEQ ID NO: 60635 - DNA, 20 bp, Artificial Sequence
  Description of Artificial Sequence: Synthetic oligonucleotide
  Target: ATXN2; (-) strand; PAM type: YTN; PAM sequence: TTT
ttttgtcttattgtactggt

SEQ ID NO: 60636 - DNA, 20 bp, Artificial Sequence
  Description of Artificial Sequence: Synthetic oligonucleotide
  Target: ATXN2; (-) strand; PAM type: YTN; PAM sequence: TTT
tttttgtcttattgtactgg

SEQ ID NO: 60637 - DNA, 20 bp, Artificial Sequence
  Description of Artificial Sequence: Synthetic oligonucleotide
  Target: ATXN2; (-) strand; PAM type: YTN; PAM sequence: TTT
ttttttgtcttattgtactg

SEQ ID NO: 60638 - DNA, 20 bp, Artificial Sequence
  Description of Artificial Sequence: Synthetic oligonucleotide
  Target: ATXN2; (-) strand; PAM type: YTN; PAM sequence: TTT
tttttttgtcttattgtact

SEQ ID NO: 60639 - DNA, 20 bp, Artificial Sequence
  Description of Artificial Sequence: Synthetic oligonucleotide
  Target: ATXN2; (-) strand; PAM type: YTN; PAM sequence: TTT
ttttttttgtcttattgtac

SEQ ID NO: 60640 - DNA, 20 bp, Artificial Sequence
  Description of Artificial Sequence: Synthetic oligonucleotide
  Target: ATXN2; (-) strand; PAM type: YTN; PAM sequence: TTT
tttttttttgtcttattgta

SEQ ID NO: 60641 - DNA, 20 bp, Artificial Sequence
  Description of Artificial Sequence: Synthetic oligonucleotide
  Target: ATXN2; (-) strand; PAM type: YTN; PAM sequence: TTG
ggttttttttttttgtctta

SEQ ID NO: 60642 - DNA, 20 bp, Artificial Sequence
  Description of Artificial Sequence: Synthetic oligonucleotide
  Target: ATXN2; (-) strand; PAM type: YTN; PAM sequence: TTT
gggttttttttttttgtctt

SEQ ID NO: 60643 - DNA, 20 bp, Artificial Sequence
  Description of Artificial Sequence: Synthetic oligonucleotide
  Target: ATXN2; (-) strand; PAM type: YTN; PAM sequence: TTT
tgggttttttttttttgtct

SEQ ID NO: 60644 - DNA, 20 bp, Artificial Sequence
  Description of Artificial Sequence: Synthetic oligonucleotide
  Target: ATXN2; (-) strand; PAM type: YTN; PAM sequence: TTT
ttgggttttttttttttgtc

SEQ ID NO: 60645 - DNA, 20 bp, Artificial Sequence
  Description of Artificial Sequence: Synthetic oligonucleotide
  Target: ATXN2; (-) strand; PAM type: YTN; PAM sequence: TTG
gtgtttttgggttttttttt

SEQ ID NO: 60646 - DNA, 20 bp, Artificial Sequence
  Description of Artificial Sequence: Synthetic oligonucleotide
  Target: ATXN2; (-) strand; PAM type: YTN; PAM sequence: CTA
atcaccatgttggtgttttt

SEQ ID NO: 60647 - DNA, 20 bp, Artificial Sequence
  Description of Artificial Sequence: Synthetic oligonucleotide
  Target: ATXN2; (-) strand; PAM type: YTN; PAM sequence: TTA
aacatacaatcatgatctaa

SEQ ID NO: 60648 - DNA, 20 bp, Artificial Sequence
  Description of Artificial Sequence: Synthetic oligonucleotide
  Target: ATXN2; (-) strand; PAM type: YTN; PAM sequence: CTT
aaacatacaatcatgatcta

SEQ ID NO: 60649 - DNA, 20 bp, Artificial Sequence
  Description of Artificial Sequence: Synthetic oligonucleotide
  Target: ATXN2; (-) strand; PAM type: YTN; PAM sequence: TTA
agacttaaacatacaatcat

SEQ ID NO: 60650 - DNA, 20 bp, Artificial Sequence
  Description of Artificial Sequence: Synthetic oligonucleotide
  Target: ATXN2; (-) strand; PAM type: YTN; PAM sequence: TTT
aagacttaaacatacaatca

SEQ ID NO: 60651 - DNA, 20 bp, Artificial Sequence
  Description of Artificial Sequence: Synthetic oligonucleotide
  Target: ATXN2; (-) strand; PAM type: YTN; PAM sequence: CTT
taagacttaaacatacaatc

SEQ ID NO: 60652 - DNA, 20 bp, Artificial Sequence
  Description of Artificial Sequence: Synthetic oligonucleotide
  Target: ATXN2; (-) strand; PAM type: YTN; PAM sequence: CTG
gcagccctttaagacttaaa

SEQ ID NO: 60653 - DNA, 20 bp, Artificial Sequence
  Description of Artificial Sequence: Synthetic oligonucleotide
  Target: ATXN2; (-) strand; PAM type: YTN; PAM sequence: TTC
tggcagccctttaagactta

SEQ ID NO: 60654 - DNA, 20 bp, Artificial Sequence
  Description of Artificial Sequence: Synthetic oligonucleotide
  Target: ATXN2; (-) strand; PAM type: YTN; PAM sequence: TTT
ctggcagccctttaagactt

SEQ ID NO: 60655 - DNA, 20 bp, Artificial Sequence
  Description of Artificial Sequence: Synthetic oligonucleotide
  Target: ATXN2; (-) strand; PAM type: YTN; PAM sequence: CTG
tttctggcagccctttaaga

SEQ ID NO: 60656 - DNA, 20 bp, Artificial Sequence
  Description of Artificial Sequence: Synthetic oligonucleotide
  Target: ATXN2; (-) strand; PAM type: YTN; PAM sequence: TTG
gtaaacccactgtttctggc

SEQ ID NO: 60657 - DNA, 20 bp, Artificial Sequence
  Description of Artificial Sequence: Synthetic oligonucleotide
  Target: ATXN2; (-) strand; PAM type: YTN; PAM sequence: TTG
atgtgttggtaaacccactg

SEQ ID NO: 60658 - DNA, 20 bp, Artificial Sequence
  Description of Artificial Sequence: Synthetic oligonucleotide
  Target: ATXN2; (-) strand; PAM type: YTN; PAM sequence: CTT
gatgtgttggtaaacccact

SEQ ID NO: 60659 - DNA, 20 bp, Artificial Sequence
  Description of Artificial Sequence: Synthetic oligonucleotide
  Target: ATXN2; (-) strand; PAM type: YTN; PAM sequence: TTG
tgtcttgatgtgttggtaaa

SEQ ID NO: 60660 - DNA, 20 bp, Artificial Sequence
  Description of Artificial Sequence: Synthetic oligonucleotide
  Target: ATXN2; (-) strand; PAM type: YTN; PAM sequence: CTT
gtgtcttgatgtgttggtaa

SEQ ID NO: 60661 - DNA, 20 bp, Artificial Sequence
  Description of Artificial Sequence: Synthetic oligonucleotide
  Target: ATXN2; (-) strand; PAM type: YTN; PAM sequence: TTG
accttgtgtcttgatgtgtt

SEQ ID NO: 60662 - DNA, 20 bp, Artificial Sequence
  Description of Artificial Sequence: Synthetic oligonucleotide
  Target: ATXN2; (-) strand; PAM type: YTN; PAM sequence: TTG
aatattgaccttgtgtcttg

SEQ ID NO: 60663 - DNA, 20 bp, Artificial Sequence
  Description of Artificial Sequence: Synthetic oligonucleotide
  Target: ATXN2; (-) strand; PAM type: YTN; PAM sequence: TTT
gaatattgaccttgtgtctt

SEQ ID NO: 60664 - DNA, 20 bp, Artificial Sequence
  Description of Artificial Sequence: Synthetic oligonucleotide
  Target: ATXN2; (-) strand; PAM type: YTN; PAM sequence: TTT
tgaatattgaccttgtgtct

SEQ ID NO: 60665 - DNA, 20 bp, Artificial Sequence
  Description of Artificial Sequence: Synthetic oligonucleotide
  Target: ATXN2; (-) strand; PAM type: YTN; PAM sequence: TTT
ttgaatattgaccttgtgtc

SEQ ID NO: 60666 - DNA, 20 bp, Artificial Sequence
  Description of Artificial Sequence: Synthetic oligonucleotide
  Target: ATXN2; (-) strand; PAM type: YTN; PAM sequence: TTG
atttttgaatattgaccttg

SEQ ID NO: 60667 - DNA, 20 bp, Artificial Sequence
  Description of Artificial Sequence: Synthetic oligonucleotide
  Target: ATXN2; (-) strand; PAM type: YTN; PAM sequence: CTT
gatttttgaatattgacctt

SEQ ID NO: 60668 - DNA, 20 bp, Artificial Sequence
  Description of Artificial Sequence: Synthetic oligonucleotide
  Target: ATXN2; (-) strand; PAM type: YTN; PAM sequence: TTC
gtaaatagagatgcacttga

SEQ ID NO: 60669 - DNA, 20 bp, Artificial Sequence
  Description of Artificial Sequence: Synthetic oligonucleotide
  Target: ATXN2; (-) strand; PAM type: YTN; PAM sequence: TTA
ttcgtaaatagagatgcact

SEQ ID NO: 60670 - DNA, 20 bp, Artificial Sequence
  Description of Artificial Sequence: Synthetic oligonucleotide
  Target: ATXN2; (-) strand; PAM type: YTN; PAM sequence: TTT
attcgtaaatagagatgcac

SEQ ID NO: 60671 - DNA, 20 bp, Artificial Sequence
  Description of Artificial Sequence: Synthetic oligonucleotide
  Target: ATXN2; (-) strand; PAM type: YTN; PAM sequence: TTG
tttattcgtaaatagagatg

SEQ ID NO: 60672 - DNA, 20 bp, Artificial Sequence
  Description of Artificial Sequence: Synthetic oligonucleotide
  Target: ATXN2; (-) strand; PAM type: YTN; PAM sequence: TTT
gtttattcgtaaatagagat

SEQ ID NO: 60673 - DNA, 20 bp, Artificial Sequence
  Description of Artificial Sequence: Synthetic oligonucleotide
  Target: ATXN2; (-) strand; PAM type: YTN; PAM sequence: TTC
aacgtttgtttattcgtaaa

SEQ ID NO: 60674 - DNA, 20 bp, Artificial Sequence
  Description of Artificial Sequence: Synthetic oligonucleotide
  Target: ATXN2; (-) strand; PAM type: YTN; PAM sequence: TTT
caacgtttgtttattcgtaa

SEQ ID NO: 60675 - DNA, 20 bp, Artificial Sequence
  Description of Artificial Sequence: Synthetic oligonucleotide
  Target: ATXN2; (-) strand; PAM type: YTN; PAM sequence: CTT
tcaacgtttgtttattcgta

SEQ ID NO: 60676 - DNA, 20 bp, Artificial Sequence
  Description of Artificial Sequence: Synthetic oligonucleotide
  Target: ATXN2; (-) strand; PAM type: YTN; PAM sequence: TTA
aaaactttcaacgtttgttt

SEQ ID NO: 60677 - DNA, 20 bp, Artificial Sequence
  Description of Artificial Sequence: Synthetic oligonucleotide
  Target: ATXN2; (-) strand; PAM type: YTN; PAM sequence: TTT
aaaaactttcaacgtttgtt

SEQ ID NO: 60678 - DNA, 20 bp, Artificial Sequence
  Description of Artificial Sequence: Synthetic oligonucleotide
  Target: ATXN2; (-) strand; PAM type: YTN; PAM sequence: TTT
taaaaactttcaacgtttgt

SEQ ID NO: 60679 - DNA, 20 bp, Artificial Sequence
  Description of Artificial Sequence: Synthetic oligonucleotide
  Target: ATXN2; (-) strand; PAM type: YTN; PAM sequence: TTA
tattttaaaaactttcaacg

SEQ ID NO: 60680 - DNA, 20 bp, Artificial Sequence
  Description of Artificial Sequence: Synthetic oligonucleotide
  Target: ATXN2; (-) strand; PAM type: YTN; PAM sequence: TTG
tgagttatattttaaaaact

SEQ ID NO: 60681 - DNA, 20 bp, Artificial Sequence
  Description of Artificial Sequence: Synthetic oligonucleotide
  Target: ATXN2; (-) strand; PAM type: YTN; PAM sequence: CTG
ttgtgagttatattttaaaa

SEQ ID NO: 60682 - DNA, 20 bp, Artificial Sequence
  Description of Artificial Sequence: Synthetic oligonucleotide
  Target: ATXN2; (-) strand; PAM type: YTN; PAM sequence: TTG
tgctgttgtgagttatattt

SEQ ID NO: 60683 - DNA, 20 bp, Artificial Sequence
  Description of Artificial Sequence: Synthetic oligonucleotide
  Target: ATXN2; (-) strand; PAM type: YTN; PAM sequence: TTT
gtgctgttgtgagttatatt

SEQ ID NO: 60684 - DNA, 20 bp, Artificial Sequence
  Description of Artificial Sequence: Synthetic oligonucleotide
  Target: ATXN2; (-) strand; PAM type: YTN; PAM sequence: TTT
tgtgctgttgtgagttatat

SEQ ID NO: 60685 - DNA, 20 bp, Artificial Sequence
  Description of Artificial Sequence: Synthetic oligonucleotide
  Target: ATXN2; (-) strand; PAM type: YTN; PAM sequence: CTG
ttttgtgctgttgtgagtta

SEQ ID NO: 60686 - DNA, 20 bp, Artificial Sequence
  Description of Artificial Sequence: Synthetic oligonucleotide
  Target: ATXN2; (-) strand; PAM type: YTN; PAM sequence: TTC
atctgttttgtgctgttgtg

SEQ ID NO: 60687 - DNA, 20 bp, Artificial Sequence
  Description of Artificial Sequence: Synthetic oligonucleotide
  Target: ATXN2; (-) strand; PAM type: YTN; PAM sequence: TTT
catctgttttgtgctgttgt

SEQ ID NO: 60688 - DNA, 20 bp, Artificial Sequence
  Description of Artificial Sequence: Synthetic oligonucleotide
  Target: ATXN2; (-) strand; PAM type: YTN; PAM sequence: TTA
atatttcatctgttttgtgc

SEQ ID NO: 60689 - DNA, 20 bp, Artificial Sequence
  Description of Artificial Sequence: Synthetic oligonucleotide
  Target: ATXN2; (-) strand; PAM type: YTN; PAM sequence: CTT
aatatttcatctgttttgtg

SEQ ID NO: 60690 - DNA, 20 bp, Artificial Sequence
  Description of Artificial Sequence: Synthetic oligonucleotide
  Target: ATXN2; (-) strand; PAM type: YTN; PAM sequence: TTA
tcccttaatatttcatctgt

SEQ ID NO: 60691 - DNA, 20 bp, Artificial Sequence
  Description of Artificial Sequence: Synthetic oligonucleotide
  Target: ATXN2; (-) strand; PAM type: YTN; PAM sequence: TTT
atcccttaatatttcatctg

SEQ ID NO: 60692 - DNA, 20 bp, Artificial Sequence
  Description of Artificial Sequence: Synthetic oligonucleotide
  Target: ATXN2; (-) strand; PAM type: YTN; PAM sequence: TTA
aatttatcccttaatatttc

SEQ ID NO: 60693 - DNA, 20 bp, Artificial Sequence
  Description of Artificial Sequence: Synthetic oligonucleotide
  Target: ATXN2; (-) strand; PAM type: YTN; PAM sequence: CTT
aaatttatcccttaatattt

SEQ ID NO: 60694 - DNA, 20 bp, Artificial Sequence
  Description of Artificial Sequence: Synthetic oligonucleotide
  Target: ATXN2; (-) strand; PAM type: YTN; PAM sequence: TTC
ttaaatttatcccttaatat

SEQ ID NO: 60695 - DNA, 20 bp, Artificial Sequence
  Description of Artificial Sequence: Synthetic oligonucleotide
  Target: ATXN2; (-) strand; PAM type: YTN; PAM sequence: TTT
cttaaatttatcccttaata

SEQ ID NO: 60696 - DNA, 20 bp, Artificial Sequence
  Description of Artificial Sequence: Synthetic oligonucleotide
  Target: ATXN2; (-) strand; PAM type: YTN; PAM sequence: CTT
tcttaaatttatcccttaat

SEQ ID NO: 60697 - DNA, 20 bp, Artificial Sequence
  Description of Artificial Sequence: Synthetic oligonucleotide
  Target: ATXN2; (-) strand; PAM type: YTN; PAM sequence: CTG
ctttcttaaatttatccctt

SEQ ID NO: 60698 - DNA, 20 bp, Artificial Sequence
  Description of Artificial Sequence: Synthetic oligonucleotide
  Target: ATXN2; (-) strand; PAM type: YTN; PAM sequence: TTG
tgcctgctttcttaaattta

SEQ ID NO: 60699 - DNA, 20 bp, Artificial Sequence
  Description of Artificial Sequence: Synthetic oligonucleotide
  Target: ATXN2; (-) strand; PAM type: YTN; PAM sequence: TTT
gtgcctgctttcttaaattt

SEQ ID NO: 60700 - DNA, 20 bp, Artificial Sequence
  Description of Artificial Sequence: Synthetic oligonucleotide
  Target: ATXN2; (-) strand; PAM type: YTN; PAM sequence: TTT
tgtgcctgctttcttaaatt

SEQ ID NO: 60701 - DNA, 20 bp, Artificial Sequence
  Description of Artificial Sequence: Synthetic oligonucleotide
  Target: ATXN2; (-) strand; PAM type: YTN; PAM sequence: TTG
tatcagttttgtgcctgctt

SEQ ID NO: 60702 - DNA, 20 bp, Artificial Sequence
  Description of Artificial Sequence: Synthetic oligonucleotide
  Target: ATXN2; (-) strand; PAM type: YTN; PAM sequence: TTT
gtatcagttttgtgcctgct

SEQ ID NO: 60703 - DNA, 20 bp, Artificial Sequence
  Description of Artificial Sequence: Synthetic oligonucleotide
  Target: ATXN2; (-) strand; PAM type: YTN; PAM sequence: CTT
tgtatcagttttgtgcctgc

SEQ ID NO: 60704 - DNA, 20 bp, Artificial Sequence
  Description of Artificial Sequence: Synthetic oligonucleotide
  Target: ATXN2; (-) strand; PAM type: YTN; PAM sequence: TTC
tttgtatcagttttgtgcct

SEQ ID NO: 60705 - DNA, 20 bp, Artificial Sequence
  Description of Artificial Sequence: Synthetic oligonucleotide
  Target: ATXN2; (-) strand; PAM type: YTN; PAM sequence: TTT
ctttgtatcagttttgtgcc

SEQ ID NO: 60706 - DNA, 20 bp, Artificial Sequence
  Description of Artificial Sequence: Synthetic oligonucleotide
  Target: ATXN2; (-) strand; PAM type: YTN; PAM sequence: TTT
tctttgtatcagttttgtgc

SEQ ID NO: 60707 - DNA, 20 bp, Artificial Sequence
  Description of Artificial Sequence: Synthetic oligonucleotide
  Target: ATXN2; (-) strand; PAM type: YTN; PAM sequence: CTA
gttttctttgtatcagtttt

SEQ ID NO: 60708 - DNA, 20 bp, Artificial Sequence
  Description of Artificial Sequence: Synthetic oligonucleotide
  Target: ATXN2; (-) strand; PAM type: YTN; PAM sequence: TTC
tagttttctttgtatcagtt

SEQ ID NO: 60709 - DNA, 20 bp, Artificial Sequence
  Description of Artificial Sequence: Synthetic oligonucleotide
  Target: ATXN2; (-) strand; PAM type: YTN; PAM sequence: TTT
ctagttttctttgtatcagt

SEQ ID NO: 60710 - DNA, 20 bp, Artificial Sequence
  Description of Artificial Sequence: Synthetic oligonucleotide
  Target: ATXN2; (-) strand; PAM type: YTN; PAM sequence: TTT
tctagttttctttgtatcag

SEQ ID NO: 60711 - DNA, 20 bp, Artificial Sequence
  Description of Artificial Sequence: Synthetic oligonucleotide
  Target: ATXN2; (-) strand; PAM type: YTN; PAM sequence: TTC
accagtgttttctagttttc

SEQ ID NO: 60712 - DNA, 20 bp, Artificial Sequence
  Description of Artificial Sequence: Synthetic oligonucleotide
  Target: ATXN2; (-) strand; PAM type: YTN; PAM sequence: TTT
caccagtgttttctagtttt

SEQ ID NO: 60713 - DNA, 20 bp, Artificial Sequence
  Description of Artificial Sequence: Synthetic oligonucleotide
  Target: ATXN2; (-) strand; PAM type: YTN; PAM sequence: TTA
agtttcaccagtgttttcta

SEQ ID NO: 60714 - DNA, 20 bp, Artificial Sequence
  Description of Artificial Sequence: Synthetic oligonucleotide
  Target: ATXN2; (-) strand; PAM type: YTN; PAM sequence: CTT
aagtttcaccagtgttttct

SEQ ID NO: 60715 - DNA, 20 bp, Artificial Sequence
  Description of Artificial Sequence: Synthetic oligonucleotide
  Target: ATXN2; (-) strand; PAM type: YTN; PAM sequence: TTA
agtcttaagtttcaccagtg

SEQ ID NO: 60716 - DNA, 20 bp, Artificial Sequence
  Description of Artificial Sequence: Synthetic oligonucleotide
  Target: ATXN2; (-) strand; PAM type: YTN; PAM sequence: TTT
aagtcttaagtttcaccagt

SEQ ID NO: 60717 - DNA, 20 bp, Artificial Sequence
  Description of Artificial Sequence: Synthetic oligonucleotide
  Target: ATXN2; (-) strand; PAM type: YTN; PAM sequence: TTA
tttaagtcttaagtttcacc

SEQ ID NO: 60718 - DNA, 20 bp, Artificial Sequence
  Description of Artificial Sequence: Synthetic oligonucleotide
  Target: ATXN2; (-) strand; PAM type: YTN; PAM sequence: TTT
atttaagtcttaagtttcac

SEQ ID NO: 60719 - DNA, 20 bp, Artificial Sequence
  Description of Artificial Sequence: Synthetic oligonucleotide
  Target: ATXN2; (-) strand; PAM type: YTN; PAM sequence: CTC
catttatttaagtcttaagt

SEQ ID NO: 60720 - DNA, 20 bp, Artificial Sequence
  Description of Artificial Sequence: Synthetic oligonucleotide
  Target: ATXN2; (-) strand; PAM type: YTN; PAM sequence: CTG
ctccatttatttaagtctta

SEQ ID NO: 60721 - DNA, 20 bp, Artificial Sequence
  Description of Artificial Sequence: Synthetic oligonucleotide
  Target: ATXN2; (-) strand; PAM type: YTN; PAM sequence: TTG
aggtcatcatatactgctcc

SEQ ID NO: 60722 - DNA, 20 bp, Artificial Sequence
  Description of Artificial Sequence: Synthetic oligonucleotide
  Target: ATXN2; (-) strand; PAM type: YTN; PAM sequence: TTC
attgaggtcatcatatactg

SEQ ID NO: 60723 - DNA, 20 bp, Artificial Sequence
  Description of Artificial Sequence: Synthetic oligonucleotide
  Target: ATXN2; (-) strand; PAM type: YTN; PAM sequence: CTT
cattgaggtcatcatatact

SEQ ID NO: 60724 - DNA, 20 bp, Artificial Sequence
  Description of Artificial Sequence: Synthetic oligonucleotide
  Target: ATXN2; (-) strand; PAM type: YTN; PAM sequence: TTA
acaatatggaatcttcattg

SEQ ID NO: 60725 - DNA, 20 bp, Artificial Sequence
  Description of Artificial Sequence: Synthetic oligonucleotide
  Target: ATXN2; (-) strand; PAM type: YTN; PAM sequence: CTT
aacaatatggaatcttcatt

SEQ ID NO: 60726 - DNA, 20 bp, Artificial Sequence
  Description of Artificial Sequence: Synthetic oligonucleotide
  Target: ATXN2; (-) strand; PAM type: YTN; PAM sequence: CTG
ggagaaatatcttaacaata

SEQ ID NO: 60727 - DNA, 20 bp, Artificial Sequence
  Description of Artificial Sequence: Synthetic oligonucleotide
  Target: ATXN2; (-) strand; PAM type: YTN; PAM sequence: TTC
tgggagaaatatcttaacaa

SEQ ID NO: 60728 - DNA, 20 bp, Artificial Sequence
  Description of Artificial Sequence: Synthetic oligonucleotide
  Target: ATXN2; (-) strand; PAM type: YTN; PAM sequence: TTA
tatcagttctgggagaaata

SEQ ID NO: 60729 - DNA, 20 bp, Artificial Sequence
  Description of Artificial Sequence: Synthetic oligonucleotide
  Target: ATXN2; (-) strand; PAM type: YTN; PAM sequence: TTT
atatcagttctgggagaaat

SEQ ID NO: 60730 - DNA, 20 bp, Artificial Sequence
  Description of Artificial Sequence: Synthetic oligonucleotide
  Target: ATXN2; (-) strand; PAM type: YTN; PAM sequence: CTT
tatatcagttctgggagaaa

SEQ ID NO: 60731 - DNA, 20 bp, Artificial Sequence
  Description of Artificial Sequence: Synthetic oligonucleotide
  Target: ATXN2; (-) strand; PAM type: YTN; PAM sequence: CTG
aatctttatatcagttctgg

SEQ ID NO: 60732 - DNA, 20 bp, Artificial Sequence
  Description of Artificial Sequence: Synthetic oligonucleotide
  Target: ATXN2; (-) strand; PAM type: YTN; PAM sequence: TTG
tgcactgaatctttatatca

SEQ ID NO: 60733 - DNA, 20 bp, Artificial Sequence
  Description of Artificial Sequence: Synthetic oligonucleotide
  Target: ATXN2; (-) strand; PAM type: YTN; PAM sequence: TTG
ggattgtgcactgaatcttt

SEQ ID NO: 60734 - DNA, 20 bp, Artificial Sequence
  Description of Artificial Sequence: Synthetic oligonucleotide
  Target: ATXN2; (-) strand; PAM type: YTN; PAM sequence: CTT
gggattgtgcactgaatctt

SEQ ID NO: 60735 - DNA, 20 bp, Artificial Sequence
  Description of Artificial Sequence: Synthetic oligonucleotide
  Target: ATXN2; (-) strand; PAM type: YTN; PAM sequence: TTA
gaatcagcttgggattgtgc

SEQ ID NO: 60736 - DNA, 20 bp, Artificial Sequence
  Description of Artificial Sequence: Synthetic oligonucleotide
  Target: ATXN2; (-) strand; PAM type: YTN; PAM sequence: TTT
agaatcagcttgggattgtg

SEQ ID NO: 60737 - DNA, 20 bp, Artificial Sequence
  Description of Artificial Sequence: Synthetic oligonucleotide
  Target: ATXN2; (-) strand; PAM type: YTN; PAM sequence: TTT
tagaatcagcttgggattgt

SEQ ID NO: 60738 - DNA, 20 bp, Artificial Sequence
  Description of Artificial Sequence: Synthetic oligonucleotide
  Target: ATXN2; (-) strand; PAM type: YTN; PAM sequence: TTG
caaataaattttagaatcag

SEQ ID NO: 60739 - DNA, 20 bp, Artificial Sequence
  Description of Artificial Sequence: Synthetic oligonucleotide
  Target: ATXN2; (-) strand; PAM type: YTN; PAM sequence: TTT
gcaaataaattttagaatca

SEQ ID NO: 60740 - DNA, 20 bp, Artificial Sequence
  Description of Artificial Sequence: Synthetic oligonucleotide
  Target: ATXN2; (-) strand; PAM type: YTN; PAM sequence: TTG
aatttgcaaataaattttag

SEQ ID NO: 60741 - DNA, 20 bp, Artificial Sequence
  Description of Artificial Sequence: Synthetic oligonucleotide
  Target: ATXN2; (-) strand; PAM type: YTN; PAM sequence: TTT
gaatttgcaaataaatttta

SEQ ID NO: 60742 - DNA, 20 bp, Artificial Sequence
  Description of Artificial Sequence: Synthetic oligonucleotide
  Target: ATXN2; (-) strand; PAM type: YTN; PAM sequence: CTT
tgaatttgcaaataaatttt

SEQ ID NO: 60743 - DNA, 20 bp, Artificial Sequence
  Description of Artificial Sequence: Synthetic oligonucleotide
  Target: ATXN2; (-) strand; PAM type: YTN; PAM sequence: TTC
tttgaatttgcaaataaatt

SEQ ID NO: 60744 - DNA, 20 bp, Artificial Sequence
  Description of Artificial Sequence: Synthetic oligonucleotide
  Target: ATXN2; (-) strand; PAM type: YTN; PAM sequence: CTG
cgttctttgaatttgcaaat

SEQ ID NO: 60745 - DNA, 20 bp, Artificial Sequence
  Description of Artificial Sequence: Synthetic oligonucleotide
  Target: ATXN2; (-) strand; PAM type: YTN; PAM sequence: TTC
tgcgttctttgaatttgcaa

SEQ ID NO: 60746 - DNA, 20 bp, Artificial Sequence
  Description of Artificial Sequence: Synthetic oligonucleotide
  Target: ATXN2; (-) strand; PAM type: YTN; PAM sequence: TTA
ttctgcgttctttgaatttg

SEQ ID NO: 60747 - DNA, 20 bp, Artificial Sequence
  Description of Artificial Sequence: Synthetic oligonucleotide
  Target: ATXN2; (-) strand; PAM type: YTN; PAM sequence: CTT
attctgcgttctttgaattt

SEQ ID NO: 60748 - DNA, 20 bp, Artificial Sequence
  Description of Artificial Sequence: Synthetic oligonucleotide
  Target: ATXN2; (-) strand; PAM type: YTN; PAM sequence: CTC
ttattctgcgttctttgaat

SEQ ID NO: 60749 - DNA, 20 bp, Artificial Sequence
  Description of Artificial Sequence: Synthetic oligonucleotide
  Target: ATXN2; (-) strand; PAM type: YTN; PAM sequence: TTA
ctcttattctgcgttctttg

SEQ ID NO: 60750 - DNA, 20 bp, Artificial Sequence
  Description of Artificial Sequence: Synthetic oligonucleotide
  Target: ATXN2; (-) strand; PAM type: YTN; PAM sequence: CTC
gtcaaaattactcttattct

SEQ ID NO: 60751 - DNA, 20 bp, Artificial Sequence
  Description of Artificial Sequence: Synthetic oligonucleotide
  Target: ATXN2; (-) strand; PAM type: YTN; PAM sequence: TTC
tcgtcaaaattactcttatt

SEQ ID NO: 60752 - DNA, 20 bp, Artificial Sequence
  Description of Artificial Sequence: Synthetic oligonucleotide
  Target: ATXN2; (-) strand; PAM type: YTN; PAM sequence: TTA
ttctcgtcaaaattactctt

SEQ ID NO: 60753 - DNA, 20 bp, Artificial Sequence
  Description of Artificial Sequence: Synthetic oligonucleotide
  Target: ATXN2; (-) strand; PAM type: YTN; PAM sequence: TTT
attctcgtcaaaattactct

SEQ ID NO: 60754 - DNA, 20 bp, Artificial Sequence
  Description of Artificial Sequence: Synthetic oligonucleotide
  Target: ATXN2; (-) strand; PAM type: YTN; PAM sequence: TTT
tattctcgtcaaaattactc

SEQ ID NO: 60755 - DNA, 20 bp, Artificial Sequence
  Description of Artificial Sequence: Synthetic oligonucleotide
  Target: ATXN2; (-) strand; PAM type: YTN; PAM sequence: CTC
ccagttttattctcgtcaaa

SEQ ID NO: 60756 - DNA, 20 bp, Artificial Sequence
  Description of Artificial Sequence: Synthetic oligonucleotide
  Target: ATXN2; (-) strand; PAM type: YTN; PAM sequence: TTC
atatgagtctcccagtttta

SEQ ID NO: 60757 - DNA, 20 bp, Artificial Sequence
  Description of Artificial Sequence: Synthetic oligonucleotide
  Target: ATXN2; (-) strand; PAM type: YTN; PAM sequence: TTA
agttcatatgagtctcccag

SEQ ID NO: 60758 - DNA, 20 bp, Artificial Sequence
  Description of Artificial Sequence: Synthetic oligonucleotide
  Target: ATXN2; (-) strand; PAM type: YTN; PAM sequence: TTT
aagttcatatgagtctccca

SEQ ID NO: 60759 - DNA, 20 bp, Artificial Sequence
  Description of Artificial Sequence: Synthetic oligonucleotide
  Target: ATXN2; (-) strand; PAM type: YTN; PAM sequence: CTT
taagttcatatgagtctccc

SEQ ID NO: 60760 - DNA, 20 bp, Artificial Sequence
  Description of Artificial Sequence: Synthetic oligonucleotide
  Target: ATXN2; (-) strand; PAM type: YTN; PAM sequence: TTG
taaccaacctttaagttcat

SEQ ID NO: 60761 - DNA, 20 bp, Artificial Sequence
  Description of Artificial Sequence: Synthetic oligonucleotide
  Target: ATXN2; (-) strand; PAM type: YTN; PAM sequence: TTT
gtaaccaacctttaagttca

SEQ ID NO: 60762 - DNA, 20 bp, Artificial Sequence
  Description of Artificial Sequence: Synthetic oligonucleotide
  Target: ATXN2; (-) strand; PAM type: YTN; PAM sequence: CTT
tgtaaccaacctttaagttc

SEQ ID NO: 60763 - DNA, 20 bp, Artificial Sequence
  Description of Artificial Sequence: Synthetic oligonucleotide
  Target: ATXN2; (-) strand; PAM type: YTN; PAM sequence: TTA
ctttgtaaccaacctttaag

SEQ ID NO: 60764 - DNA, 20 bp, Artificial Sequence
  Description of Artificial Sequence: Synthetic oligonucleotide
  Target: ATXN2; (-) strand; PAM type: YTN; PAM sequence: CTG
ttactttgtaaccaaccttt

SEQ ID NO: 60765 - DNA, 20 bp, Artificial Sequence
  Description of Artificial Sequence: Synthetic oligonucleotide
  Target: ATXN2; (-) strand; PAM type: YTN; PAM sequence: TTG
ctgttactttgtaaccaacc

SEQ ID NO: 60766 - DNA, 20 bp, Artificial Sequence
  Description of Artificial Sequence: Synthetic oligonucleotide
  Target: ATXN2; (-) strand; PAM type: YTN; PAM sequence: TTA
ttgctgttactttgtaacca

SEQ ID NO: 60767 - DNA, 20 bp, Artificial Sequence
  Description of Artificial Sequence: Synthetic oligonucleotide
  Target: ATXN2; (-) strand; PAM type: YTN; PAM sequence: TTT
attgctgttactttgtaacc

SEQ ID NO: 60768 - DNA, 20 bp, Artificial Sequence
  Description of Artificial Sequence: Synthetic oligonucleotide
  Target: ATXN2; (-) strand; PAM type: YTN; PAM sequence: CTT
tattgctgttactttgtaac

SEQ ID NO: 60769 - DNA, 20 bp, Artificial Sequence
  Description of Artificial Sequence: Synthetic oligonucleotide
  Target: ATXN2; (-) strand; PAM type: YTN; PAM sequence: CTC
tttattgctgttactttgta

SEQ ID NO: 60770 - DNA, 20 bp, Artificial Sequence
  Description of Artificial Sequence: Synthetic oligonucleotide
  Target: ATXN2; (-) strand; PAM type: YTN; PAM sequence: CTC
tctttattgctgttactttg

SEQ ID NO: 60771 - DNA, 20 bp, Artificial Sequence
  Description of Artificial Sequence: Synthetic oligonucleotide
  Target: ATXN2; (-) strand; PAM type: YTN; PAM sequence: TTC
tctctttattgctgttactt

SEQ ID NO: 60772 - DNA, 20 bp, Artificial Sequence
  Description of Artificial Sequence: Synthetic oligonucleotide
  Target: ATXN2; (-) strand; PAM type: YTN; PAM sequence: TTA
tgccaattctctctttattg

SEQ ID NO: 60773 - DNA, 20 bp, Artificial Sequence
  Description of Artificial Sequence: Synthetic oligonucleotide
  Target: ATXN2; (-) strand; PAM type: YTN; PAM sequence: CTT
atgccaattctctctttatt

SEQ ID NO: 60774 - DNA, 20 bp, Artificial Sequence
  Description of Artificial Sequence: Synthetic oligonucleotide
  Target: ATXN2; (-) strand; PAM type: YTN; PAM sequence: TTG
tatatatccttatgccaatt

SEQ ID NO: 60775 - DNA, 20 bp, Artificial Sequence
  Description of Artificial Sequence: Synthetic oligonucleotide
  Target: ATXN2; (-) strand; PAM type: YTN; PAM sequence: TTT
gtatatatccttatgccaat

SEQ ID NO: 60776 - DNA, 20 bp, Artificial Sequence
  Description of Artificial Sequence: Synthetic oligonucleotide
  Target: ATXN2; (-) strand; PAM type: YTN; PAM sequence: CTT
tgtatatatccttatgccaa

SEQ ID NO: 60777 - DNA, 20 bp, Artificial Sequence
  Description of Artificial Sequence: Synthetic oligonucleotide
  Target: ATXN2; (-) strand; PAM type: YTN; PAM sequence: TTG
atctttgtatatatccttat

SEQ ID NO: 60778 - DNA, 20 bp, Artificial Sequence
  Description of Artificial Sequence: Synthetic oligonucleotide
  Target: ATXN2; (-) strand; PAM type: YTN; PAM sequence: TTG
tattgatctttgtatatatc

SEQ ID NO: 60779 - DNA, 20 bp, Artificial Sequence
  Description of Artificial Sequence: Synthetic oligonucleotide
  Target: ATXN2; (-) strand; PAM type: YTN; PAM sequence: TTG
ttgtattgatctttgtatat

SEQ ID NO: 60780 - DNA, 20 bp, Artificial Sequence
  Description of Artificial Sequence: Synthetic oligonucleotide
  Target: ATXN2; (-) strand; PAM type: YTN; PAM sequence: TTT
gttgtattgatctttgtata

SEQ ID NO: 60781 - DNA, 20 bp, Artificial Sequence
  Description of Artificial Sequence: Synthetic oligonucleotide
  Target: ATXN2; (-) strand; PAM type: YTN; PAM sequence: TTT
tgttgtattgatctttgtat

SEQ ID NO: 60782 - DNA, 20 bp, Artificial Sequence
  Description of Artificial Sequence: Synthetic oligonucleotide
  Target: ATXN2; (-) strand; PAM type: YTN; PAM sequence: CTG
ttttgttgtattgatctttg

SEQ ID NO: 60783 - DNA, 20 bp, Artificial Sequence
  Description of Artificial Sequence: Synthetic oligonucleotide
  Target: ATXN2; (-) strand; PAM type: YTN; PAM sequence: TTG
tgaactgttttgttgtattg

SEQ ID NO: 60784 - DNA, 20 bp, Artificial Sequence
  Description of Artificial Sequence: Synthetic oligonucleotide
  Target: ATXN2; (-) strand; PAM type: YTN; PAM sequence: TTT
gtgaactgttttgttgtatt

SEQ ID NO: 60785 - DNA, 20 bp, Artificial Sequence
  Description of Artificial Sequence: Synthetic oligonucleotide
  Target: ATXN2; (-) strand; PAM type: YTN; PAM sequence: CTA
tttgtgaactgttttgttgt

SEQ ID NO: 60786 - DNA, 20 bp, Artificial Sequence
  Description of Artificial Sequence: Synthetic oligonucleotide
  Target: ATXN2; (-) strand; PAM type: YTN; PAM sequence: TTG
tatgtgtgtctatttgtgaa

SEQ ID NO: 60787 - DNA, 20 bp, Artificial Sequence
  Description of Artificial Sequence: Synthetic oligonucleotide
  Target: ATXN2; (-) strand; PAM type: YTN; PAM sequence: CTG
tattgtatgtgtgtctattt

SEQ ID NO: 60788 - DNA, 20 bp, Artificial Sequence
  Description of Artificial Sequence: Synthetic oligonucleotide
  Target: ATXN2; (-) strand; PAM type: YTN; PAM sequence: TTG
actgtattgtatgtgtgtct

SEQ ID NO: 60789 - DNA, 20 bp, Artificial Sequence
  Description of Artificial Sequence: Synthetic oligonucleotide
  Target: ATXN2; (-) strand; PAM type: YTN; PAM sequence: TTC
agttgactgtattgtatgtg

SEQ ID NO: 60790 - DNA, 20 bp, Artificial Sequence
  Description of Artificial Sequence: Synthetic oligonucleotide
  Target: ATXN2; (-) strand; PAM type: YTN; PAM sequence: TTG
aattcagttgactgtattgt

SEQ ID NO: 60791 - DNA, 20 bp, Artificial Sequence
  Description of Artificial Sequence: Synthetic oligonucleotide
  Target: ATXN2; (-) strand; PAM type: YTN; PAM sequence: TTA
ttgaattcagttgactgtat

SEQ ID NO: 60792 - DNA, 20 bp, Artificial Sequence
  Description of Artificial Sequence: Synthetic oligonucleotide
  Target: ATXN2; (-) strand; PAM type: YTN; PAM sequence: TTT
attgaattcagttgactgta

SEQ ID NO: 60793 - DNA, 20 bp, Artificial Sequence
  Description of Artificial Sequence: Synthetic oligonucleotide
  Target: ATXN2; (-) strand; PAM type: YTN; PAM sequence: CTT
tattgaattcagttgactgt

SEQ ID NO: 60794 - DNA, 20 bp, Artificial Sequence
  Description of Artificial Sequence: Synthetic oligonucleotide
  Target: ATXN2; (-) strand; PAM type: YTN; PAM sequence: CTG
cgcccagccatagtagcttt

SEQ ID NO: 60795 - DNA, 20 bp, Artificial Sequence
  Description of Artificial Sequence: Synthetic oligonucleotide
  Target: ATXN2; (-) strand; PAM type: YTN; PAM sequence: TTA
caggcatgagccactgcgcc

SEQ ID NO: 60796 - DNA, 20 bp, Artificial Sequence
  Description of Artificial Sequence: Synthetic oligonucleotide
  Target: ATXN2; (-) strand; PAM type: YTN; PAM sequence: CTG
ggattacaggcatgagccac

SEQ ID NO: 60797 - DNA, 20 bp, Artificial Sequence
  Description of Artificial Sequence: Synthetic oligonucleotide
  Target: ATXN2; (-) strand; PAM type: YTN; PAM sequence: TTC
tgggattacaggcatgagcc

SEQ ID NO: 60798 - DNA, 20 bp, Artificial Sequence
  Description of Artificial Sequence: Synthetic oligonucleotide
  Target: ATXN2; (-) strand; PAM type: YTN; PAM sequence: CTC
ccaaagttctgggattacag

SEQ ID NO: 60799 - DNA, 20 bp, Artificial Sequence
  Description of Artificial Sequence: Synthetic oligonucleotide
  Target: ATXN2; (-) strand; PAM type: YTN; PAM sequence: CTC
agcctcccaaagttctggga

SEQ ID NO: 60800 - DNA, 20 bp, Artificial Sequence
  Description of Artificial Sequence: Synthetic oligonucleotide
  Target: ATXN2; (-) strand; PAM type: YTN; PAM sequence: CTC
atctcagcctcccaaagttc

SEQ ID NO: 60801 - DNA, 20 bp, Artificial Sequence
  Description of Artificial Sequence: Synthetic oligonucleotide
  Target: ATXN2; (-) strand; PAM type: YTN; PAM sequence: CTG
ctcatctcagcctcccaaag

SEQ ID NO: 60802 - DNA, 20 bp, Artificial Sequence
  Description of Artificial Sequence: Synthetic oligonucleotide
  Target: ATXN2; (-) strand; PAM type: YTN; PAM sequence: CTC
aggtgatctgctcatctcag

SEQ ID NO: 60803 - DNA, 20 bp, Artificial Sequence
  Description of Artificial Sequence: Synthetic oligonucleotide
  Target: ATXN2; (-) strand; PAM type: YTN; PAM sequence: CTG
acctcaggtgatctgctcat

SEQ ID NO: 60804 - DNA, 20 bp, Artificial Sequence
  Description of Artificial Sequence: Synthetic oligonucleotide
  Target: ATXN2; (-) strand; PAM type: YTN; PAM sequence: CTC
ctgacctcaggtgatctgct

SEQ ID NO: 60805 - DNA, 20 bp, Artificial Sequence
  Description of Artificial Sequence: Synthetic oligonucleotide
  Target: ATXN2; (-) strand; PAM type: YTN; PAM sequence: CTC
gaactcctgacctcaggtga

SEQ ID NO: 60806 - DNA, 20 bp, Artificial Sequence
  Description of Artificial Sequence: Synthetic oligonucleotide
  Target: ATXN2; (-) strand; PAM type: YTN; PAM sequence: CTA
gtctcgaactcctgacctca

SEQ ID NO: 60807 - DNA, 20 bp, Artificial Sequence
  Description of Artificial Sequence: Synthetic oligonucleotide
  Target: ATXN2; (-) strand; PAM type: YTN; PAM sequence: TTG
gccaggctagtctcgaactc

SEQ ID NO: 60808 - DNA, 20 bp, Artificial Sequence
  Description of Artificial Sequence: Synthetic oligonucleotide
  Target: ATXN2; (-) strand; PAM type: YTN; PAM sequence: CTC
accatgttggccaggctagt

SEQ ID NO: 60809 - DNA, 20 bp, Artificial Sequence
  Description of Artificial Sequence: Synthetic oligonucleotide
  Target: ATXN2; (-) strand; PAM type: YTN; PAM sequence: TTA
gtagagacagggtctcacca

SEQ ID NO: 60810 - DNA, 20 bp, Artificial Sequence
  Description of Artificial Sequence: Synthetic oligonucleotide
  Target: ATXN2; (-) strand; PAM type: YTN; PAM sequence: TTT
agtagagacagggtctcacc

SEQ ID NO: 60811 - DNA, 20 bp, Artificial Sequence
  Description of Artificial Sequence: Synthetic oligonucleotide
  Target: ATXN2; (-) strand; PAM type: YTN; PAM sequence: TTT
tagtagagacagggtctcac

SEQ ID NO: 60812 - DNA, 20 bp, Artificial Sequence
  Description of Artificial Sequence: Synthetic oligonucleotide
  Target: ATXN2; (-) strand; PAM type: YTN; PAM sequence: TTT
ttagtagagacagggtctca

SEQ ID NO: 60813 - DNA, 20 bp, Artificial Sequence
  Description of Artificial Sequence: Synthetic oligonucleotide
  Target: ATXN2; (-) strand; PAM type: YTN; PAM sequence: TTT
tttagtagagacagggtctc

SEQ ID NO: 60814 - DNA, 20 bp, Artificial Sequence
  Description of Artificial Sequence: Synthetic oligonucleotide
  Target: ATXN2; (-) strand; PAM type: YTN; PAM sequence: TTT
ttttagtagagacagggtct

SEQ ID NO: 60815 - DNA, 20 bp, Artificial Sequence
  Description of Artificial Sequence: Synthetic oligonucleotide
  Target: ATXN2; (-) strand; PAM type: YTN; PAM sequence: TTT
tttttagtagagacagggtc

SEQ ID NO: 60816 - DNA, 20 bp, Artificial Sequence
  Description of Artificial Sequence: Synthetic oligonucleotide
  Target: ATXN2; (-) strand; PAM type: YTN; PAM sequence: TTT
ttttttagtagagacagggt

SEQ ID NO: 60817 - DNA, 20 bp, Artificial Sequence
  Description of Artificial Sequence: Synthetic oligonucleotide
  Target: ATXN2; (-) strand; PAM type: YTN; PAM sequence: TTT
tttttttagtagagacaggg

SEQ ID NO: 60818 - DNA, 20 bp, Artificial Sequence
  Description of Artificial Sequence: Synthetic oligonucleotide
  Target: ATXN2; (-) strand; PAM type: YTN; PAM sequence: TTT
ttttttttagtagagacagg

SEQ ID NO: 60819 - DNA, 20 bp, Artificial Sequence
  Description of Artificial Sequence: Synthetic oligonucleotide
  Target: ATXN2; (-) strand; PAM type: YTN; PAM sequence: TTT
tttttttttagtagagacag

SEQ ID NO: 60820 - DNA, 20 bp, Artificial Sequence
  Description of Artificial Sequence: Synthetic oligonucleotide
  Target: ATXN2; (-) strand; PAM type: YTN; PAM sequence: TTT
ttttttttttagtagagaca

SEQ ID NO: 60821 - DNA, 20 bp, Artificial Sequence
  Description of Artificial Sequence: Synthetic oligonucleotide
  Target: ATXN2; (-) strand; PAM type: YTN; PAM sequence: TTT
tttttttttttagtagagac

SEQ ID NO: 60822 - DNA, 20 bp, Artificial Sequence
  Description of Artificial Sequence: Synthetic oligonucleotide
  Target: ATXN2; (-) strand; PAM type: YTN; PAM sequence: TTT
ttttttttttttagtagaga

SEQ ID NO: 60823 - DNA, 20 bp, Artificial Sequence
  Description of Artificial Sequence: Synthetic oligonucleotide
  Target: ATXN2; (-) strand; PAM type: YTN; PAM sequence: TTT
tttttttttttttagtagag

SEQ ID NO: 60824 - DNA, 20 bp, Artificial Sequence
  Description of Artificial Sequence: Synthetic oligonucleotide
  Target: ATXN2; (-) strand; PAM type: YTN; PAM sequence: TTT
ttttttttttttttagtaga

SEQ ID NO: 60825 - DNA, 20 bp, Artificial Sequence
  Description of Artificial Sequence: Synthetic oligonucleotide
  Target: ATXN2; (-) strand; PAM type: YTN; PAM sequence: TTT
tttttttttttttttagtag

SEQ ID NO: 60826 - DNA, 20 bp, Artificial Sequence
  Description of Artificial Sequence: Synthetic oligonucleotide
  Target: ATXN2; (-) strand; PAM type: YTN; PAM sequence: TTT
ttttttttttttttttagta

SEQ ID NO: 60827 - DNA, 20 bp, Artificial Sequence
  Description of Artificial Sequence: Synthetic oligonucleotide
  Target: ATXN2; (-) strand; PAM type: YTN; PAM sequence: TTT
tttttttttttttttttagt

SEQ ID NO: 60828 - DNA, 20 bp, Artificial Sequence
  Description of Artificial Sequence: Synthetic oligonucleotide
  Target: ATXN2; (-) strand; PAM type: YTN; PAM sequence: TTG
tatttttttttttttttttt

SEQ ID NO: 60829 - DNA, 20 bp, Artificial Sequence
  Description of Artificial Sequence: Synthetic oligonucleotide
  Target: ATXN2; (-) strand; PAM type: YTN; PAM sequence: TTT
gtattttttttttttttttt

SEQ ID NO: 60830 - DNA, 20 bp, Artificial Sequence
  Description of Artificial Sequence: Synthetic oligonucleotide
  Target: ATXN2; (-) strand; PAM type: YTN; PAM sequence: CTA
atttgtattttttttttttt

SEQ ID NO: 60831 - DNA, 20 bp, Artificial Sequence
  Description of Artificial Sequence: Synthetic oligonucleotide
  Target: ATXN2; (-) strand; PAM type: YTN; PAM sequence: CTA
cacccagctaatttgtattt

SEQ ID NO: 60832 - DNA, 20 bp, Artificial Sequence
  Description of Artificial Sequence: Synthetic oligonucleotide
  Target: ATXN2; (-) strand; PAM type: YTN; PAM sequence: TTA
caggtgcccgccactacacc

SEQ ID NO: 60833 - DNA, 20 bp, Artificial Sequence
  Description of Artificial Sequence: Synthetic oligonucleotide
  Target: ATXN2; (-) strand; PAM type: YTN; PAM sequence: CTA
ggattacaggtgcccgccac

SEQ ID NO: 60834 - DNA, 20 bp, Artificial Sequence
  Description of Artificial Sequence: Synthetic oligonucleotide
  Target: ATXN2; (-) strand; PAM type: YTN; PAM sequence: CTC
gagtagctaggattacaggt

SEQ ID NO: 60835 - DNA, 20 bp, Artificial Sequence
  Description of Artificial Sequence: Synthetic oligonucleotide
  Target: ATXN2; (-) strand; PAM type: YTN; PAM sequence: CTC
tcgagtagctaggattacag

SEQ ID NO: 60836 - DNA, 20 bp, Artificial Sequence
  Description of Artificial Sequence: Synthetic oligonucleotide
  Target: ATXN2; (-) strand; PAM type: YTN; PAM sequence: CTC
agcctctcgagtagctagga

SEQ ID NO: 60837 - DNA, 20 bp, Artificial Sequence
  Description of Artificial Sequence: Synthetic oligonucleotide
  Target: ATXN2; (-) strand; PAM type: YTN; PAM sequence: CTG
cctcagcctctcgagtagct

SEQ ID NO: 60838 - DNA, 20 bp, Artificial Sequence
  Description of Artificial Sequence: Synthetic oligonucleotide
  Target: ATXN2; (-) strand; PAM type: YTN; PAM sequence: TTC
tgcctcagcctctcgagtag

SEQ ID NO: 60839 - DNA, 20 bp, Artificial Sequence
  Description of Artificial Sequence: Synthetic oligonucleotide
  Target: ATXN2; (-) strand; PAM type: YTN; PAM sequence: TTC
ccagggtcaagcgattctgc

SEQ ID NO: 60840 - DNA, 20 bp, Artificial Sequence
  Description of Artificial Sequence: Synthetic oligonucleotide
  Target: ATXN2; (-) strand; PAM type: YTN; PAM sequence: CTT
cccagggtcaagcgattctg

SEQ ID NO: 60841 - DNA, 20 bp, Artificial Sequence
  Description of Artificial Sequence: Synthetic oligonucleotide
  Target: ATXN2; (-) strand; PAM type: YTN; PAM sequence: CTC
cacttcccagggtcaagcga

SEQ ID NO: 60842 - DNA, 20 bp, Artificial Sequence
  Description of Artificial Sequence: Synthetic oligonucleotide
  Target: ATXN2; (-) strand; PAM type: YTN; PAM sequence: CTG
caacctccacttcccagggt

SEQ ID NO: 60843 - DNA, 20 bp, Artificial Sequence
  Description of Artificial Sequence: Synthetic oligonucleotide
  Target: ATXN2; (-) strand; PAM type: YTN; PAM sequence: CTC
actgcaacctccacttccca

SEQ ID NO: 60844 - DNA, 20 bp, Artificial Sequence
  Description of Artificial Sequence: Synthetic oligonucleotide
  Target: ATXN2; (-) strand; PAM type: YTN; PAM sequence: TTG
gctcactgcaacctccactt

SEQ ID NO: 60845 - DNA, 20 bp, Artificial Sequence
  Description of Artificial Sequence: Synthetic oligonucleotide
  Target: ATXN2; (-) strand; PAM type: YTN; PAM sequence: CTT
ggctcactgcaacctccact

SEQ ID NO: 60846 - DNA, 20 bp, Artificial Sequence
  Description of Artificial Sequence: Synthetic oligonucleotide
  Target: ATXN2; (-) strand; PAM type: YTN; PAM sequence: CTG
gagtgcagtagtgtgacctt

SEQ ID NO: 60847 - DNA, 20 bp, Artificial Sequence
  Description of Artificial Sequence: Synthetic oligonucleotide
  Target: ATXN2; (-) strand; PAM type: YTN; PAM sequence: TTA
cccaggctggagtgcagtag

SEQ ID NO: 60848 - DNA, 20 bp, Artificial Sequence
  Description of Artificial Sequence: Synthetic oligonucleotide
  Target: ATXN2; (-) strand; PAM type: YTN; PAM sequence: TTG
ttacccaggctggagtgcag

SEQ ID NO: 60849 - DNA, 20 bp, Artificial Sequence
  Description of Artificial Sequence: Synthetic oligonucleotide
  Target: ATXN2; (-) strand; PAM type: YTN; PAM sequence: CTT
gttacccaggctggagtgca

SEQ ID NO: 60850 - DNA, 20 bp, Artificial Sequence
  Description of Artificial Sequence: Synthetic oligonucleotide
  Target: ATXN2; (-) strand; PAM type: YTN; PAM sequence: CTC
gatcttgttacccaggctgg

SEQ ID NO: 60851 - DNA, 20 bp, Artificial Sequence
  Description of Artificial Sequence: Synthetic oligonucleotide
  Target: ATXN2; (-) strand; PAM type: YTN; PAM sequence: TTG
aaacaagagtctcgatcttg

SEQ ID NO: 60852 - DNA, 20 bp, Artificial Sequence
  Description of Artificial Sequence: Synthetic oligonucleotide
  Target: ATXN2; (-) strand; PAM type: YTN; PAM sequence: CTT
gaaacaagagtctcgatctt

SEQ ID NO: 60853 - DNA, 20 bp, Artificial Sequence
  Description of Artificial Sequence: Synthetic oligonucleotide
  Target: ATXN2; (-) strand; PAM type: YTN; PAM sequence: TTC
ttgaaacaagagtctcgatc

SEQ ID NO: 60854 - DNA, 20 bp, Artificial Sequence
  Description of Artificial Sequence: Synthetic oligonucleotide
  Target: ATXN2; (-) strand; PAM type: YTN; PAM sequence: CTG
ttcttgaaacaagagtctcg

SEQ ID NO: 60855 - DNA, 20 bp, Artificial Sequence
  Description of Artificial Sequence: Synthetic oligonucleotide
  Target: ATXN2; (-) strand; PAM type: YTN; PAM sequence: TTC
tgttcttgaaacaagagtct

SEQ ID NO: 60856 - DNA, 20 bp, Artificial Sequence
  Description of Artificial Sequence: Synthetic oligonucleotide
  Target: ATXN2; (-) strand; PAM type: YTN; PAM sequence: TTT
ctgttcttgaaacaagagtc

SEQ ID NO: 60857 - DNA, 20 bp, Artificial Sequence
  Description of Artificial Sequence: Synthetic oligonucleotide
  Target: ATXN2; (-) strand; PAM type: YTN; PAM sequence: TTT
tctgttcttgaaacaagagt

SEQ ID NO: 60858 - DNA, 20 bp, Artificial Sequence
  Description of Artificial Sequence: Synthetic oligonucleotide
  Target: ATXN2; (-) strand; PAM type: YTN; PAM sequence: TTT
ttctgttcttgaaacaagag

SEQ ID NO: 60859 - DNA, 20 bp, Artificial Sequence
  Description of Artificial Sequence: Synthetic oligonucleotide
  Target: ATXN2; (-) strand; PAM type: YTN; PAM sequence: TTT
tttctgttcttgaaacaaga

SEQ ID NO: 60860 - DNA, 20 bp, Artificial Sequence
  Description of Artificial Sequence: Synthetic oligonucleotide
  Target: ATXN2; (-) strand; PAM type: YTN; PAM sequence: TTT
ttttctgttcttgaaacaag

SEQ ID NO: 60861 - DNA, 20 bp, Artificial Sequence
  Description of Artificial Sequence: Synthetic oligonucleotide
  Target: ATXN2; (-) strand; PAM type: YTN; PAM sequence: TTT
tttttctgttcttgaaacaa

SEQ ID NO: 60862 - DNA, 20 bp, Artificial Sequence
  Description of Artificial Sequence: Synthetic oligonucleotide
  Target: ATXN2; (-) strand; PAM type: YTN; PAM sequence: TTA
ttttttttctgttcttgaaa

SEQ ID NO: 60863 - DNA, 20 bp, Artificial Sequence
  Description of Artificial Sequence: Synthetic oligonucleotide
  Target: ATXN2; (-) strand; PAM type: YTN; PAM sequence: TTT
attttttttctgttcttgaa

SEQ ID NO: 60864 - DNA, 20 bp, Artificial Sequence
  Description of Artificial Sequence: Synthetic oligonucleotide
  Target: ATXN2; (-) strand; PAM type: YTN; PAM sequence: CTT
tattttttttctgttcttga

SEQ ID NO: 60865 - DNA, 20 bp, Artificial Sequence
  Description of Artificial Sequence: Synthetic oligonucleotide
  Target: ATXN2; (-) strand; PAM type: YTN; PAM sequence: TTG
gtggctttattttttttctg

SEQ ID NO: 60866 - DNA, 20 bp, Artificial Sequence
  Description of Artificial Sequence: Synthetic oligonucleotide
  Target: ATXN2; (-) strand; PAM type: YTN; PAM sequence: TTC
cattggtggctttatttttt

SEQ ID NO: 60867 - DNA, 20 bp, Artificial Sequence
  Description of Artificial Sequence: Synthetic oligonucleotide
  Target: ATXN2; (-) strand; PAM type: YTN; PAM sequence: TTT
ccattggtggctttattttt

SEQ ID NO: 60868 - DNA, 20 bp, Artificial Sequence
  Description of Artificial Sequence: Synthetic oligonucleotide
  Target: ATXN2; (-) strand; PAM type: YTN; PAM sequence: TTT
tccattggtggctttatttt

SEQ ID NO: 60869 - DNA, 20 bp, Artificial Sequence
  Description of Artificial Sequence: Synthetic oligonucleotide
  Target: ATXN2; (-) strand; PAM type: YTN; PAM sequence: CTG
ttttccattggtggctttat

SEQ ID NO: 60870 - DNA, 20 bp, Artificial Sequence
  Description of Artificial Sequence: Synthetic oligonucleotide
  Target: ATXN2; (-) strand; PAM type: YTN; PAM sequence: CTC
tgttttccattggtggcttt

SEQ ID NO: 60871 - DNA, 20 bp, Artificial Sequence
  Description of Artificial Sequence: Synthetic oligonucleotide
  Target: ATXN2; (-) strand; PAM type: YTN; PAM sequence: CTG
gcaccagcctctgttttcca

SEQ ID NO: 60872 - DNA, 20 bp, Artificial Sequence
  Description of Artificial Sequence: Synthetic oligonucleotide
  Target: ATXN2; (-) strand; PAM type: YTN; PAM sequence: CTC
tggcaccagcctctgttttc

SEQ ID NO: 60873 - DNA, 20 bp, Artificial Sequence
  Description of Artificial Sequence: Synthetic oligonucleotide
  Target: ATXN2; (-) strand; PAM type: YTN; PAM sequence: TTC
tctggcaccagcctctgttt

SEQ ID NO: 60874 - DNA, 20 bp, Artificial Sequence
  Description of Artificial Sequence: Synthetic oligonucleotide
  Target: ATXN2; (-) strand; PAM type: YTN; PAM sequence: TTT
ctctggcaccagcctctgtt

SEQ ID NO: 60875 - DNA, 20 bp, Artificial Sequence
  Description of Artificial Sequence: Synthetic oligonucleotide
  Target: ATXN2; (-) strand; PAM type: YTN; PAM sequence: CTC
ggtttctctggcaccagcct

SEQ ID NO: 60876 - DNA, 20 bp, Artificial Sequence
  Description of Artificial Sequence: Synthetic oligonucleotide
  Target: ATXN2; (-) strand; PAM type: YTN; PAM sequence: TTA
ctcggtttctctggcaccag

SEQ ID NO: 60877 - DNA, 20 bp, Artificial Sequence
  Description of Artificial Sequence: Synthetic oligonucleotide
  Target: ATXN2; (-) strand; PAM type: YTN; PAM sequence: TTT
actcggtttctctggcacca

SEQ ID NO: 60878 - DNA, 20 bp, Artificial Sequence
  Description of Artificial Sequence: Synthetic oligonucleotide
  Target: ATXN2; (-) strand; PAM type: YTN; PAM sequence: CTC
caccataaatatttactcgg

SEQ ID NO: 60879 - DNA, 20 bp, Artificial Sequence
  Description of Artificial Sequence: Synthetic oligonucleotide
  Target: ATXN2; (-) strand; PAM type: YTN; PAM sequence: TTC
tccaccataaatatttactc

SEQ ID NO: 60880 - DNA, 20 bp, Artificial Sequence
  Description of Artificial Sequence: Synthetic oligonucleotide
  Target: ATXN2; (-) strand; PAM type: YTN; PAM sequence: TTT
ctccaccataaatatttact

SEQ ID NO: 60881 - DNA, 20 bp, Artificial Sequence
  Description of Artificial Sequence: Synthetic oligonucleotide
  Target: ATXN2; (-) strand; PAM type: YTN; PAM sequence: TTT
tctccaccataaatatttac

SEQ ID NO: 60882 - DNA, 20 bp, Artificial Sequence
  Description of Artificial Sequence: Synthetic oligonucleotide
  Target: ATXN2; (-) strand; PAM type: YTN; PAM sequence: TTC
attttctccaccataaatat

SEQ ID NO: 60883 - DNA, 20 bp, Artificial Sequence
  Description of Artificial Sequence: Synthetic oligonucleotide
  Target: ATXN2; (-) strand; PAM type: YTN; PAM sequence: CTT
cattttctccaccataaata

SEQ ID NO: 60884 - DNA, 20 bp, Artificial Sequence
  Description of Artificial Sequence: Synthetic oligonucleotide
  Target: ATXN2; (-) strand; PAM type: YTN; PAM sequence: CTA
gcttcattttctccaccata

SEQ ID NO: 60885 - DNA, 20 bp, Artificial Sequence
  Description of Artificial Sequence: Synthetic oligonucleotide
  Target: ATXN2; (-) strand; PAM type: YTN; PAM sequence: TTG
tgtagggtgtgatgtaaagg

SEQ ID NO: 60886 - DNA, 20 bp, Artificial Sequence
  Description of Artificial Sequence: Synthetic oligonucleotide
  Target: ATXN2; (-) strand; PAM type: YTN; PAM sequence: TTT
gtgtagggtgtgatgtaaag

SEQ ID NO: 60887 - DNA, 20 bp, Artificial Sequence
  Description of Artificial Sequence: Synthetic oligonucleotide
  Target: ATXN2; (-) strand; PAM type: YTN; PAM sequence: TTT
tgtgtagggtgtgatgtaaa

SEQ ID NO: 60888 - DNA, 20 bp, Artificial Sequence
  Description of Artificial Sequence: Synthetic oligonucleotide
  Target: ATXN2; (-) strand; PAM type: YTN; PAM sequence: TTA
ggttttgtgtagggtgtgat

SEQ ID NO: 60889 - DNA, 20 bp, Artificial Sequence
  Description of Artificial Sequence: Synthetic oligonucleotide
  Target: ATXN2; (-) strand; PAM type: YTN; PAM sequence: TTC
aggttaggttttgtgtaggg

SEQ ID NO: 60890 - DNA, 20 bp, Artificial Sequence
  Description of Artificial Sequence: Synthetic oligonucleotide
  Target: ATXN2; (-) strand; PAM type: YTN; PAM sequence: TTT
caggttaggttttgtgtagg

SEQ ID NO: 60891 - DNA, 20 bp, Artificial Sequence
  Description of Artificial Sequence: Synthetic oligonucleotide
  Target: ATXN2; (-) strand; PAM type: YTN; PAM sequence: TTG
atttcaggttaggttttgtg

SEQ ID NO: 60892 - DNA, 20 bp, Artificial Sequence
  Description of Artificial Sequence: Synthetic oligonucleotide
  Target: ATXN2; (-) strand; PAM type: YTN; PAM sequence: TTA
ggtatatggttgatttcagg

SEQ ID NO: 60893 - DNA, 20 bp, Artificial Sequence
  Description of Artificial Sequence: Synthetic oligonucleotide
  Target: ATXN2; (-) strand; PAM type: YTN; PAM sequence: TTA
tggttaggtatatggttgat

SEQ ID NO: 60894 - DNA, 20 bp, Artificial Sequence
  Description of Artificial Sequence: Synthetic oligonucleotide
  Target: ATXN2; (-) strand; PAM type: YTN; PAM sequence: TTT
atggttaggtatatggttga

SEQ ID NO: 60895 - DNA, 20 bp, Artificial Sequence
  Description of Artificial Sequence: Synthetic oligonucleotide
  Target: ATXN2; (-) strand; PAM type: YTN; PAM sequence: TTT
tatggttaggtatatggttg

SEQ ID NO: 60896 - DNA, 20 bp, Artificial Sequence
  Description of Artificial Sequence: Synthetic oligonucleotide
  Target: ATXN2; (-) strand; PAM type: YTN; PAM sequence: TTT
ttatggttaggtatatggtt

SEQ ID NO: 60897 - DNA, 20 bp, Artificial Sequence
  Description of Artificial Sequence: Synthetic oligonucleotide
  Target: ATXN2; (-) strand; PAM type: YTN; PAM sequence: TTA
tgaatgtttttatggttagg

SEQ ID NO: 60898 - DNA, 20 bp, Artificial Sequence
  Description of Artificial Sequence: Synthetic oligonucleotide
  Target: ATXN2; (-) strand; PAM type: YTN; PAM sequence: CTA
ggttatgaatgtttttatgg

SEQ ID NO: 60899 - DNA, 20 bp, Artificial Sequence
  Description of Artificial Sequence: Synthetic oligonucleotide
  Target: ATXN2; (-) strand; PAM type: YTN; PAM sequence: TTA
cgtaccctaggttatgaatg

SEQ ID NO: 60900 - DNA, 20 bp, Artificial Sequence
  Description of Artificial Sequence: Synthetic oligonucleotide
  Target: ATXN2; (-) strand; PAM type: YTN; PAM sequence: TTT
acgtaccctaggttatgaat

SEQ ID NO: 60901 - DNA, 20 bp, Artificial Sequence
  Description of Artificial Sequence: Synthetic oligonucleotide
  Target: ATXN2; (-) strand; PAM type: YTN; PAM sequence: TTT
tacgtaccctaggttatgaa

SEQ ID NO: 60902 - DNA, 20 bp, Artificial Sequence
  Description of Artificial Sequence: Synthetic oligonucleotide
  Target: ATXN2; (-) strand; PAM type: YTN; PAM sequence: CTT
ttacgtaccctaggttatga

SEQ ID NO: 60903 - DNA, 20 bp, Artificial Sequence
  Description of Artificial Sequence: Synthetic oligonucleotide
  Target: ATXN2; (-) strand; PAM type: YTN; PAM sequence: TTG
tatcataataagaaatcttt

SEQ ID NO: 60904 - DNA, 20 bp, Artificial Sequence
  Description of Artificial Sequence: Synthetic oligonucleotide
  Target: ATXN2; (-) strand; PAM type: YTN; PAM sequence: TTT
gtatcataataagaaatctt

SEQ ID NO: 60905 - DNA, 20 bp, Artificial Sequence
  Description of Artificial Sequence: Synthetic oligonucleotide
  Target: ATXN2; (-) strand; PAM type: YTN; PAM sequence: TTT
tgtatcataataagaaatct

SEQ ID NO: 60906 - DNA, 20 bp, Artificial Sequence
  Description of Artificial Sequence: Synthetic oligonucleotide
  Target: ATXN2; (-) strand; PAM type: YTN; PAM sequence: TTT
ttgtatcataataagaaatc

SEQ ID NO: 60907 - DNA, 20 bp, Artificial Sequence
  Description of Artificial Sequence: Synthetic oligonucleotide
  Target: ATXN2; (-) strand; PAM type: YTN; PAM sequence: TTT
tttgtatcataataagaaat

SEQ ID NO: 60908 - DNA, 20 bp, Artificial Sequence
  Description of Artificial Sequence: Synthetic oligonucleotide
  Target: ATXN2; (-) strand; PAM type: YTN; PAM sequence: CTT
ttttgtatcataataagaaa

SEQ ID NO: 60909 - DNA, 20 bp, Artificial Sequence
  Description of Artificial Sequence: Synthetic oligonucleotide
  Target: ATXN2; (-) strand; PAM type: YTN; PAM sequence: TTC
atgcttttttgtatcataat

SEQ ID NO: 60910 - DNA, 20 bp, Artificial Sequence
  Description of Artificial Sequence: Synthetic oligonucleotide
  Target: ATXN2; (-) strand; PAM type: YTN; PAM sequence: TTA
aggttcatgcttttttgtat

SEQ ID NO: 60911 - DNA, 20 bp, Artificial Sequence
  Description of Artificial Sequence: Synthetic oligonucleotide
  Target: ATXN2; (-) strand; PAM type: YTN; PAM sequence: CTT
aaggttcatgcttttttgta

SEQ ID NO: 60912 - DNA, 20 bp, Artificial Sequence
  Description of Artificial Sequence: Synthetic oligonucleotide
  Target: ATXN2; (-) strand; PAM type: YTN; PAM sequence: CTC
ttaaggttcatgcttttttg

SEQ ID NO: 60913 - DNA, 20 bp, Artificial Sequence
  Description of Artificial Sequence: Synthetic oligonucleotide
  Target: ATXN2; (-) strand; PAM type: YTN; PAM sequence: TTC
tcttaaggttcatgcttttt

SEQ ID NO: 60914 - DNA, 20 bp, Artificial Sequence
  Description of Artificial Sequence: Synthetic oligonucleotide
  Target: ATXN2; (-) strand; PAM type: YTN; PAM sequence: TTT
ctcttaaggttcatgctttt

SEQ ID NO: 60915 - DNA, 20 bp, Artificial Sequence
  Description of Artificial Sequence: Synthetic oligonucleotide
  Target: ATXN2; (-) strand; PAM type: YTN; PAM sequence: TTT
tctcttaaggttcatgcttt

SEQ ID NO: 60916 - DNA, 20 bp, Artificial Sequence
  Description of Artificial Sequence: Synthetic oligonucleotide
  Target: ATXN2; (-) strand; PAM type: YTN; PAM sequence: CTT
ttctcttaaggttcatgctt

SEQ ID NO: 60917 - DNA, 20 bp, Artificial Sequence
  Description of Artificial Sequence: Synthetic oligonucleotide
  Target: ATXN2; (-) strand; PAM type: YTN; PAM sequence: TTA
tcaagcttttctcttaaggt

SEQ ID NO: 60918 - DNA, 20 bp, Artificial Sequence
  Description of Artificial Sequence: Synthetic oligonucleotide
  Target: ATXN2; (-) strand; PAM type: YTN; PAM sequence: TTT
atcaagcttttctcttaagg

SEQ ID NO: 60919 - DNA, 20 bp, Artificial Sequence
  Description of Artificial Sequence: Synthetic oligonucleotide
  Target: ATXN2; (-) strand; PAM type: YTN; PAM sequence: TTA
tttatcaagcttttctctta

SEQ ID NO: 60920 - DNA, 20 bp, Artificial Sequence
  Description of Artificial Sequence: Synthetic oligonucleotide
  Target: ATXN2; (-) strand; PAM type: YTN; PAM sequence: CTT
atttatcaagcttttctctt

SEQ ID NO: 60921 - DNA, 20 bp, Artificial Sequence
  Description of Artificial Sequence: Synthetic oligonucleotide
  Target: ATXN2; (-) strand; PAM type: YTN; PAM sequence: TTA
atgaagccttatttatcaag

SEQ ID NO: 60922 - DNA, 20 bp, Artificial Sequence
  Description of Artificial Sequence: Synthetic oligonucleotide
  Target: ATXN2; (-) strand; PAM type: YTN; PAM sequence: TTT
aatgaagccttatttatcaa

SEQ ID NO: 60923 - DNA, 20 bp, Artificial Sequence
  Description of Artificial Sequence: Synthetic oligonucleotide
  Target: ATXN2; (-) strand; PAM type: YTN; PAM sequence: TTT
taatgaagccttatttatca

SEQ ID NO: 60924 - DNA, 20 bp, Artificial Sequence
  Description of Artificial Sequence: Synthetic oligonucleotide
  Target: ATXN2; (-) strand; PAM type: YTN; PAM sequence: TTA
attttaatgaagccttattt

SEQ ID NO: 60925 - DNA, 20 bp, Artificial Sequence
  Description of Artificial Sequence: Synthetic oligonucleotide
  Target: ATXN2; (-) strand; PAM type: YTN; PAM sequence: TTG
ttaattttaatgaagcctta

SEQ ID NO: 60926 - DNA, 20 bp, Artificial Sequence
  Description of Artificial Sequence: Synthetic oligonucleotide
  Target: ATXN2; (-) strand; PAM type: YTN; PAM sequence: TTG
aagagccagtattgttaatt

SEQ ID NO: 60927 - DNA, 20 bp, Artificial Sequence
  Description of Artificial Sequence: Synthetic oligonucleotide
  Target: ATXN2; (-) strand; PAM type: YTN; PAM sequence: TTT
gaagagccagtattgttaat

SEQ ID NO: 60928 - DNA, 20 bp, Artificial Sequence
  Description of Artificial Sequence: Synthetic oligonucleotide
  Target: ATXN2; (-) strand; PAM type: YTN; PAM sequence: TTT
tgaagagccagtattgttaa

SEQ ID NO: 60929 - DNA, 20 bp, Artificial Sequence
  Description of Artificial Sequence: Synthetic oligonucleotide
  Target: ATXN2; (-) strand; PAM type: YTN; PAM sequence: TTT
ttgaagagccagtattgtta

SEQ ID NO: 60930 - DNA, 20 bp, Artificial Sequence
  Description of Artificial Sequence: Synthetic oligonucleotide
  Target: ATXN2; (-) strand; PAM type: YTN; PAM sequence: TTT
tttgaagagccagtattgtt

SEQ ID NO: 60931 - DNA, 20 bp, Artificial Sequence
  Description of Artificial Sequence: Synthetic oligonucleotide
  Target: ATXN2; (-) strand; PAM type: YTN; PAM sequence: TTT
ttttgaagagccagtattgt

SEQ ID NO: 60932 - DNA, 20 bp, Artificial Sequence
  Description of Artificial Sequence: Synthetic oligonucleotide
  Target: ATXN2; (-) strand; PAM type: YTN; PAM sequence: TTT
tttttgaagagccagtattg

SEQ ID NO: 60933 - DNA, 20 bp, Artificial Sequence
  Description of Artificial Sequence: Synthetic oligonucleotide
  Target: ATXN2; (-) strand; PAM type: YTN; PAM sequence: CTG
cggttttttttgaagagcca

SEQ ID NO: 60934 - DNA, 20 bp, Artificial Sequence
  Description of Artificial Sequence: Synthetic oligonucleotide
  Target: ATXN2; (-) strand; PAM type: YTN; PAM sequence: CTC
ccagtctgcggttttttttg

SEQ ID NO: 60935 - DNA, 20 bp, Artificial Sequence
  Description of Artificial Sequence: Synthetic oligonucleotide
  Target: ATXN2; (-) strand; PAM type: YTN; PAM sequence: TTC
tcccagtctgcggttttttt

SEQ ID NO: 60936 - DNA, 20 bp, Artificial Sequence
  Description of Artificial Sequence: Synthetic oligonucleotide
  Target: ATXN2; (-) strand; PAM type: YTN; PAM sequence: TTT
ctcccagtctgcggtttttt

SEQ ID NO: 60937 - DNA, 20 bp, Artificial Sequence
  Description of Artificial Sequence: Synthetic oligonucleotide
  Target: ATXN2; (-) strand; PAM type: YTN; PAM sequence: TTT
tctcccagtctgcggttttt

SEQ ID NO: 60938 - DNA, 20 bp, Artificial Sequence
  Description of Artificial Sequence: Synthetic oligonucleotide
  Target: ATXN2; (-) strand; PAM type: YTN; PAM sequence: TTG
tgaatattttctcccagtct

SEQ ID NO: 60939 - DNA, 20 bp, Artificial Sequence
  Description of Artificial Sequence: Synthetic oligonucleotide
  Target: ATXN2; (-) strand; PAM type: YTN; PAM sequence: CTC
agaatattgtgaatattttc

SEQ ID NO: 60940 - DNA, 20 bp, Artificial Sequence
  Description of Artificial Sequence: Synthetic oligonucleotide
  Target: ATXN2; (-) strand; PAM type: YTN; PAM sequence: TTC
tcagaatattgtgaatattt

SEQ ID NO: 60941 - DNA, 20 bp, Artificial Sequence
  Description of Artificial Sequence: Synthetic oligonucleotide
  Target: ATXN2; (-) strand; PAM type: YTN; PAM sequence: TTT
ctcagaatattgtgaatatt

SEQ ID NO: 60942 - DNA, 20 bp, Artificial Sequence
  Description of Artificial Sequence: Synthetic oligonucleotide
  Target: ATXN2; (-) strand; PAM type: YTN; PAM sequence: CTT
tctcagaatattgtgaatat

SEQ ID NO: 60943 - DNA, 20 bp, Artificial Sequence
  Description of Artificial Sequence: Synthetic oligonucleotide
  Target: ATXN2; (-) strand; PAM type: YTN; PAM sequence: TTA
caagtcctttctcagaatat

SEQ ID NO: 60944 - DNA, 20 bp, Artificial Sequence
  Description of Artificial Sequence: Synthetic oligonucleotide
  Target: ATXN2; (-) strand; PAM type: YTN; PAM sequence: CTG
gttacaagtcctttctcaga

SEQ ID NO: 60945 - DNA, 20 bp, Artificial Sequence
  Description of Artificial Sequence: Synthetic oligonucleotide
  Target: ATXN2; (-) strand; PAM type: YTN; PAM sequence: TTC
tggttacaagtcctttctca

SEQ ID NO: 60946 - DNA, 20 bp, Artificial Sequence
  Description of Artificial Sequence: Synthetic oligonucleotide
  Target: ATXN2; (-) strand; PAM type: YTN; PAM sequence: TTA
tatattctggttacaagtcc

SEQ ID NO: 60947 - DNA, 20 bp, Artificial Sequence
  Description of Artificial Sequence: Synthetic oligonucleotide
  Target: ATXN2; (-) strand; PAM type: YTN; PAM sequence: TTT
atatattctggttacaagtc

SEQ ID NO: 60948 - DNA, 20 bp, Artificial Sequence
  Description of Artificial Sequence: Synthetic oligonucleotide
  Target: ATXN2; (-) strand; PAM type: YTN; PAM sequence: TTA
tttatatattctggttacaa

SEQ ID NO: 60949 - DNA, 20 bp, Artificial Sequence
  Description of Artificial Sequence: Synthetic oligonucleotide
  Target: ATXN2; (-) strand; PAM type: YTN; PAM sequence: TTA
agttatttatatattctggt

SEQ ID NO: 60950 - DNA, 20 bp, Artificial Sequence
  Description of Artificial Sequence: Synthetic oligonucleotide
  Target: ATXN2; (-) strand; PAM type: YTN; PAM sequence: TTT
aagttatttatatattctgg

SEQ ID NO: 60951 - DNA, 20 bp, Artificial Sequence
  Description of Artificial Sequence: Synthetic oligonucleotide
  Target: ATXN2; (-) strand; PAM type: YTN; PAM sequence: TTT
taagttatttatatattctg

SEQ ID NO: 60952 - DNA, 20 bp, Artificial Sequence
  Description of Artificial Sequence: Synthetic oligonucleotide
  Target: ATXN2; (-) strand; PAM type: YTN; PAM sequence: TTA
ttttaagttatttatatatt

SEQ ID NO: 60953 - DNA, 20 bp, Artificial Sequence
  Description of Artificial Sequence: Synthetic oligonucleotide
  Target: ATXN2; (-) strand; PAM type: YTN; PAM sequence: TTA
gtaaattattttaagttatt

SEQ ID NO: 60954 - DNA, 20 bp, Artificial Sequence
  Description of Artificial Sequence: Synthetic oligonucleotide
  Target: ATXN2; (-) strand; PAM type: YTN; PAM sequence: TTT
agtaaattattttaagttat

SEQ ID NO: 60955 - DNA, 20 bp, Artificial Sequence
  Description of Artificial Sequence: Synthetic oligonucleotide
  Target: ATXN2; (-) strand; PAM type: YTN; PAM sequence: TTT
tagtaaattattttaagtta

SEQ ID NO: 60956 - DNA, 20 bp, Artificial Sequence
  Description of Artificial Sequence: Synthetic oligonucleotide
  Target: ATXN2; (-) strand; PAM type: YTN; PAM sequence: CTT
ttagtaaattattttaagtt

SEQ ID NO: 60957 - DNA, 20 bp, Artificial Sequence
  Description of Artificial Sequence: Synthetic oligonucleotide
  Target: ATXN2; (-) strand; PAM type: YTN; PAM sequence: CTA
cttttagtaaattattttaa

SEQ ID NO: 60958 - DNA, 20 bp, Artificial Sequence
  Description of Artificial Sequence: Synthetic oligonucleotide
  Target: ATXN2; (-) strand; PAM type: YTN; PAM sequence: TTA
ctacttttagtaaattattt

SEQ ID NO: 60959 - DNA, 20 bp, Artificial Sequence
  Description of Artificial Sequence: Synthetic oligonucleotide
  Target: ATXN2; (-) strand; PAM type: YTN; PAM sequence: CTG
tgaaaataaagttactactt

SEQ ID NO: 60960 - DNA, 20 bp, Artificial Sequence
  Description of Artificial Sequence: Synthetic oligonucleotide
  Target: ATXN2; (-) strand; PAM type: YTN; PAM sequence: TTA
ctgtgaaaataaagttacta

SEQ ID NO: 60961 - DNA, 20 bp, Artificial Sequence
  Description of Artificial Sequence: Synthetic oligonucleotide
  Target: ATXN2; (-) strand; PAM type: YTN; PAM sequence: CTT
actgtgaaaataaagttact

SEQ ID NO: 60962 - DNA, 20 bp, Artificial Sequence
  Description of Artificial Sequence: Synthetic oligonucleotide
  Target: ATXN2; (-) strand; PAM type: YTN; PAM sequence: TTC
ttactgtgaaaataaagtta

SEQ ID NO: 60963 - DNA, 20 bp, Artificial Sequence
  Description of Artificial Sequence: Synthetic oligonucleotide
  Target: ATXN2; (-) strand; PAM type: YTN; PAM sequence: TTT
cttactgtgaaaataaagtt

SEQ ID NO: 60964 - DNA, 20 bp, Artificial Sequence
  Description of Artificial Sequence: Synthetic oligonucleotide
  Target: ATXN2; (-) strand; PAM type: YTN; PAM sequence: TTT
tcttactgtgaaaataaagt

SEQ ID NO: 60965 - DNA, 20 bp, Artificial Sequence
  Description of Artificial Sequence: Synthetic oligonucleotide
  Target: ATXN2; (-) strand; PAM type: YTN; PAM sequence: CTT
ttcttactgtgaaaataaag

SEQ ID NO: 60966 - DNA, 20 bp, Artificial Sequence
  Description of Artificial Sequence: Synthetic oligonucleotide
  Target: ATXN2; (-) strand; PAM type: YTN; PAM sequence: TTC
ttttcttactgtgaaaataa

SEQ ID NO: 60967 - DNA, 20 bp, Artificial Sequence
  Description of Artificial Sequence: Synthetic oligonucleotide
  Target: ATXN2; (-) strand; PAM type: YTN; PAM sequence: TTT
cttttcttactgtgaaaata

SEQ ID NO: 60968 - DNA, 20 bp, Artificial Sequence
  Description of Artificial Sequence: Synthetic oligonucleotide
  Target: ATXN2; (-) strand; PAM type: YTN; PAM sequence: CTC
acaaaaaaaagaaaaaaaag

SEQ ID NO: 60969 - DNA, 20 bp, Artificial Sequence
  Description of Artificial Sequence: Synthetic oligonucleotide
  Target: ATXN2; (-) strand; PAM type: YTN; PAM sequence: CTG
tctcacaaaaaaaagaaaaa

SEQ ID NO: 60970 - DNA, 20 bp, Artificial Sequence
  Description of Artificial Sequence: Synthetic oligonucleotide
  Target: ATXN2; (-) strand; PAM type: YTN; PAM sequence: CTG
ggcaatagagccagaccctg

SEQ ID NO: 60971 - DNA, 20 bp, Artificial Sequence
  Description of Artificial Sequence: Synthetic oligonucleotide
  Target: ATXN2; (-) strand; PAM type: YTN; PAM sequence: CTC
cagcctgggcaatagagcca

SEQ ID NO: 60972 - DNA, 20 bp, Artificial Sequence
  Description of Artificial Sequence: Synthetic oligonucleotide
  Target: ATXN2; (-) strand; PAM type: YTN; PAM sequence: CTG
cactccagcctgggcaatag

SEQ ID NO: 60973 - DNA, 20 bp, Artificial Sequence
  Description of Artificial Sequence: Synthetic oligonucleotide
  Target: ATXN2; (-) strand; PAM type: YTN; PAM sequence: CTA
ctgcactccagcctgggcaa

SEQ ID NO: 60974 - DNA, 20 bp, Artificial Sequence
  Description of Artificial Sequence: Synthetic oligonucleotide
  Target: ATXN2; (-) strand; PAM type: YTN; PAM sequence: TTG
cactactgcactccagcctg

SEQ ID NO: 60975 - DNA, 20 bp, Artificial Sequence
  Description of Artificial Sequence: Synthetic oligonucleotide
  Target: ATXN2; (-) strand; PAM type: YTN; PAM sequence: CTG
agattgcactactgcactcc

SEQ ID NO: 60976 - DNA, 20 bp, Artificial Sequence
  Description of Artificial Sequence: Synthetic oligonucleotide
  Target: ATXN2; (-) strand; PAM type: YTN; PAM sequence: TTG
cagtgagctgagattgcact

SEQ ID NO: 60977 - DNA, 20 bp, Artificial Sequence
  Description of Artificial Sequence: Synthetic oligonucleotide
  Target: ATXN2; (-) strand; PAM type: YTN; PAM sequence: TTG
gagggcgatggaggggtgat

SEQ ID NO: 60978 - DNA, 20 bp, Artificial Sequence
  Description of Artificial Sequence: Synthetic oligonucleotide
  Target: ATXN2; (-) strand; PAM type: YTN; PAM sequence: TTT
ggagggcgatggaggggtga

SEQ ID NO: 60979 - DNA, 20 bp, Artificial Sequence
  Description of Artificial Sequence: Synthetic oligonucleotide
  Target: ATXN2; (-) strand; PAM type: YTN; PAM sequence: TTG
cgggggtttggagggcgatg

SEQ ID NO: 60980 - DNA, 20 bp, Artificial Sequence
  Description of Artificial Sequence: Synthetic oligonucleotide
  Target: ATXN2; (-) strand; PAM type: YTN; PAM sequence: TTG
agcgaggttgcgggggtttg

SEQ ID NO: 60981 - DNA, 20 bp, Artificial Sequence
  Description of Artificial Sequence: Synthetic oligonucleotide
  Target: ATXN2; (-) strand; PAM type: YTN; PAM sequence: CTT
gagcgaggttgcgggggttt

SEQ ID NO: 60982 - DNA, 20 bp, Artificial Sequence
  Description of Artificial Sequence: Synthetic oligonucleotide
  Target: ATXN2; (-) strand; PAM type: YTN; PAM sequence: CTG
aggtgggacaatcgcttgag

SEQ ID NO: 60983 - DNA, 20 bp, Artificial Sequence
  Description of Artificial Sequence: Synthetic oligonucleotide
  Target: ATXN2; (-) strand; PAM type: YTN; PAM sequence: TTG
gggggctgaggtgggacaat

SEQ ID NO: 60984 - DNA, 20 bp, Artificial Sequence
  Description of Artificial Sequence: Synthetic oligonucleotide
  Target: ATXN2; (-) strand; PAM type: YTN; PAM sequence: CTT
ggggggctgaggtgggacaa

SEQ ID NO: 60985 - DNA, 20 bp, Artificial Sequence
  Description of Artificial Sequence: Synthetic oligonucleotide
  Target: ATXN2; (-) strand; PAM type: YTN; PAM sequence: CTA
cttggggggctgaggtggga

SEQ ID NO: 60986 - DNA, 20 bp, Artificial Sequence
  Description of Artificial Sequence: Synthetic oligonucleotide
  Target: ATXN2; (-) strand; PAM type: YTN; PAM sequence: CTA
tggtcccagctacttggggg

SEQ ID NO: 60987 - DNA, 20 bp, Artificial Sequence
  Description of Artificial Sequence: Synthetic oligonucleotide
  Target: ATXN2; (-) strand; PAM type: YTN; PAM sequence: TTC
ctatggtcccagctacttgg

SEQ ID NO: 60988 - DNA, 20 bp, Artificial Sequence
  Description of Artificial Sequence: Synthetic oligonucleotide
  Target: ATXN2; (-) strand; PAM type: YTN; PAM sequence: TTA
gccaggcacagaagcgcatt

SEQ ID NO: 60989 - DNA, 20 bp, Artificial Sequence
  Description of Artificial Sequence: Synthetic oligonucleotide
  Target: ATXN2; (-) strand; PAM type: YTN; PAM sequence: TTG
caaaaaaaaaaaagaaaaaa

SEQ ID NO: 60990 - DNA, 20 bp, Artificial Sequence
  Description of Artificial Sequence: Synthetic oligonucleotide
  Target: ATXN2; (-) strand; PAM type: YTN; PAM sequence: TTT
gcaaaaaaaaaaaagaaaaa

SEQ ID NO: 60991 - DNA, 20 bp, Artificial Sequence
  Description of Artificial Sequence: Synthetic oligonucleotide
  Target: ATXN2; (-) strand; PAM type: YTN; PAM sequence: CTT
tgcaaaaaaaaaaaagaaaa

SEQ ID NO: 60992 - DNA, 20 bp, Artificial Sequence
  Description of Artificial Sequence: Synthetic oligonucleotide
  Target: ATXN2; (-) strand; PAM type: YTN; PAM sequence: CTG
tctttgcaaaaaaaaaaaag

SEQ ID NO: 60993 - DNA, 20 bp, Artificial Sequence
  Description of Artificial Sequence: Synthetic oligonucleotide
  Target: ATXN2; (-) strand; PAM type: YTN; PAM sequence: CTG
aggaacatgacaaaaccctg

SEQ ID NO: 60994 - DNA, 20 bp, Artificial Sequence
  Description of Artificial Sequence: Synthetic oligonucleotide
  Target: ATXN2; (-) strand; PAM type: YTN; PAM sequence: TTG
agaccagcctgaggaacatg

SEQ ID NO: 60995 - DNA, 20 bp, Artificial Sequence
  Description of Artificial Sequence: Synthetic oligonucleotide
  Target: ATXN2; (-) strand; PAM type: YTN; PAM sequence: TTT
gagaccagcctgaggaacat

SEQ ID NO: 60996 - DNA, 20 bp, Artificial Sequence
  Description of Artificial Sequence: Synthetic oligonucleotide
  Target: ATXN2; (-) strand; PAM type: YTN; PAM sequence: TTG
agccaacagtttgagaccag

SEQ ID NO: 60997 - DNA, 20 bp, Artificial Sequence
  Description of Artificial Sequence: Synthetic oligonucleotide
  Target: ATXN2; (-) strand; PAM type: YTN; PAM sequence: TTT
gagccaacagtttgagacca

SEQ ID NO: 60998 - DNA, 20 bp, Artificial Sequence
  Description of Artificial Sequence: Synthetic oligonucleotide
  Target: ATXN2; (-) strand; PAM type: YTN; PAM sequence: CTG
gatggatcatttgagccaac

SEQ ID NO: 60999 - DNA, 20 bp, Artificial Sequence
  Description of Artificial Sequence: Synthetic oligonucleotide
  Target: ATXN2; (-) strand; PAM type: YTN; PAM sequence: TTG
ggaggccaacctggatggat

SEQ ID NO: 61000 - DNA, 20 bp, Artificial Sequence
  Description of Artificial Sequence: Synthetic oligonucleotide
  Target: ATXN2; (-) strand; PAM type: YTN; PAM sequence: TTT
gggaggccaacctggatgga

SEQ ID NO: 61001 - DNA, 20 bp, Artificial Sequence
  Description of Artificial Sequence: Synthetic oligonucleotide
  Target: ATXN2; (-) strand; PAM type: YTN; PAM sequence: CTT
tgggaggccaacctggatgg

SEQ ID NO: 61002 - DNA, 20 bp, Artificial Sequence
  Description of Artificial Sequence: Synthetic oligonucleotide
  Target: ATXN2; (-) strand; PAM type: YTN; PAM sequence: TTC
cagcactttgggaggccaac

SEQ ID NO: 61003 - DNA, 20 bp, Artificial Sequence
  Description of Artificial Sequence: Synthetic oligonucleotide
  Target: ATXN2; (-) strand; PAM type: YTN; PAM sequence: CTG
taattccagcactttgggag

SEQ ID NO: 61004 - DNA, 20 bp, Artificial Sequence
  Description of Artificial Sequence: Synthetic oligonucleotide
  Target: ATXN2; (-) strand; PAM type: YTN; PAM sequence: CTC
acgcctgtaattccagcact

SEQ ID NO: 61005 - DNA, 20 bp, Artificial Sequence
  Description of Artificial Sequence: Synthetic oligonucleotide
  Target: ATXN2; (-) strand; PAM type: YTN; PAM sequence: CTG
gctcacgcctgtaattccag

SEQ ID NO: 61006 - DNA, 20 bp, Artificial Sequence
  Description of Artificial Sequence: Synthetic oligonucleotide
  Target: ATXN2; (-) strand; PAM type: YTN; PAM sequence: CTG
ggtgcactggctcacgcctg

SEQ ID NO: 61007 - DNA, 20 bp, Artificial Sequence
  Description of Artificial Sequence: Synthetic oligonucleotide
  Target: ATXN2; (-) strand; PAM type: YTN; PAM sequence: CTG
cctgggtgcactggctcacg

SEQ ID NO: 61008 - DNA, 20 bp, Artificial Sequence
  Description of Artificial Sequence: Synthetic oligonucleotide
  Target: ATXN2; (-) strand; PAM type: YTN; PAM sequence: TTC
tgcctgggtgcactggctca

SEQ ID NO: 61009 - DNA, 20 bp, Artificial Sequence
  Description of Artificial Sequence: Synthetic oligonucleotide
  Target: ATXN2; (-) strand; PAM type: YTN; PAM sequence: TTT
ctgcctgggtgcactggctc

SEQ ID NO: 61010 - DNA, 20 bp, Artificial Sequence
  Description of Artificial Sequence: Synthetic oligonucleotide
  Target: ATXN2; (-) strand; PAM type: YTN; PAM sequence: CTC
aatgtttctgcctgggtgca

SEQ ID NO: 61011 - DNA, 20 bp, Artificial Sequence
  Description of Artificial Sequence: Synthetic oligonucleotide
  Target: ATXN2; (-) strand; PAM type: YTN; PAM sequence: TTG
tctcaatgtttctgcctggg

SEQ ID NO: 61012 - DNA, 20 bp, Artificial Sequence
  Description of Artificial Sequence: Synthetic oligonucleotide
  Target: ATXN2; (-) strand; PAM type: YTN; PAM sequence: TTT
gtctcaatgtttctgcctgg

SEQ ID NO: 61013 - DNA, 20 bp, Artificial Sequence
  Description of Artificial Sequence: Synthetic oligonucleotide
  Target: ATXN2; (-) strand; PAM type: YTN; PAM sequence: TTT
tgtctcaatgtttctgcctg

SEQ ID NO: 61014 - DNA, 20 bp, Artificial Sequence
  Description of Artificial Sequence: Synthetic oligonucleotide
  Target: ATXN2; (-) strand; PAM type: YTN; PAM sequence: TTT
ttgtctcaatgtttctgcct

SEQ ID NO: 61015 - DNA, 20 bp, Artificial Sequence
  Description of Artificial Sequence: Synthetic oligonucleotide
  Target: ATXN2; (-) strand; PAM type: YTN; PAM sequence: CTT
tttgtctcaatgtttctgcc

SEQ ID NO: 61016 - DNA, 20 bp, Artificial Sequence
  Description of Artificial Sequence: Synthetic oligonucleotide
  Target: ATXN2; (-) strand; PAM type: YTN; PAM sequence: TTC
tttttgtctcaatgtttctg

SEQ ID NO: 61017 - DNA, 20 bp, Artificial Sequence
  Description of Artificial Sequence: Synthetic oligonucleotide
  Target: ATXN2; (-) strand; PAM type: YTN; PAM sequence: TTT
ctttttgtctcaatgtttct

SEQ ID NO: 61018 - DNA, 20 bp, Artificial Sequence
  Description of Artificial Sequence: Synthetic oligonucleotide
  Target: ATXN2; (-) strand; PAM type: YTN; PAM sequence: CTA
ataatttctttttgtctcaa

SEQ ID NO: 61019 - DNA, 20 bp, Artificial Sequence
  Description of Artificial Sequence: Synthetic oligonucleotide
  Target: ATXN2; (-) strand; PAM type: YTN; PAM sequence: CTG
tcctaataatttctttttgt

SEQ ID NO: 61020 - DNA, 20 bp, Artificial Sequence
  Description of Artificial Sequence: Synthetic oligonucleotide
  Target: ATXN2; (-) strand; PAM type: YTN; PAM sequence: CTG
cgcctgtcctaataatttct

SEQ ID NO: 61021 - DNA, 20 bp, Artificial Sequence
  Description of Artificial Sequence: Synthetic oligonucleotide
  Target: ATXN2; (-) strand; PAM type: YTN; PAM sequence: TTA
caggtgtgagccactgcgcc

SEQ ID NO: 61022 - DNA, 20 bp, Artificial Sequence
  Description of Artificial Sequence: Synthetic oligonucleotide
  Target: ATXN2; (-) strand; PAM type: YTN; PAM sequence: CTG
agattacaggtgtgagccac

SEQ ID NO: 61023 - DNA, 20 bp, Artificial Sequence
  Description of Artificial Sequence: Synthetic oligonucleotide
  Target: ATXN2; (-) strand; PAM type: YTN; PAM sequence: CTC
ccaaagtgctgagattacag

SEQ ID NO: 61024 - DNA, 20 bp, Artificial Sequence
  Description of Artificial Sequence: Synthetic oligonucleotide
  Target: ATXN2; (-) strand; PAM type: YTN; PAM sequence: CTC
ggcctcccaaagtgctgaga

SEQ ID NO: 61025 - DNA, 20 bp, Artificial Sequence
  Description of Artificial Sequence: Synthetic oligonucleotide
  Target: ATXN2; (-) strand; PAM type: YTN; PAM sequence: CTG
cctcggcctcccaaagtgct

SEQ ID NO: 61026 - DNA, 20 bp, Artificial Sequence
  Description of Artificial Sequence: Synthetic oligonucleotide
  Target: ATXN2; (-) strand; PAM type: YTN; PAM sequence: CTA
cctgcctcggcctcccaaag

SEQ ID NO: 61027 - DNA, 20 bp, Artificial Sequence
  Description of Artificial Sequence: Synthetic oligonucleotide
  Target: ATXN2; (-) strand; PAM type: YTN; PAM sequence: CTC
aggtgatctacctgcctcgg

SEQ ID NO: 61028 - DNA, 20 bp, Artificial Sequence
  Description of Artificial Sequence: Synthetic oligonucleotide
  Target: ATXN2; (-) strand; PAM type: YTN; PAM sequence: CTG
acctcaggtgatctacctgc

SEQ ID NO: 61029 - DNA, 20 bp, Artificial Sequence
  Description of Artificial Sequence: Synthetic oligonucleotide
  Target: ATXN2; (-) strand; PAM type: YTN; PAM sequence: CTC
ctgacctcaggtgatctacc

SEQ ID NO: 61030 - DNA, 20 bp, Artificial Sequence
  Description of Artificial Sequence: Synthetic oligonucleotide
  Target: ATXN2; (-) strand; PAM type: YTN; PAM sequence: CTA
actcctgacctcaggtgatc

SEQ ID NO: 61031 - DNA, 20 bp, Artificial Sequence
  Description of Artificial Sequence: Synthetic oligonucleotide
  Target: ATXN2; (-) strand; PAM type: YTN; PAM sequence: CTC
taactcctgacctcaggtga

SEQ ID NO: 61032 - DNA, 20 bp, Artificial Sequence
  Description of Artificial Sequence: Synthetic oligonucleotide
  Target: ATXN2; (-) strand; PAM type: YTN; PAM sequence: CTG
gtctctaactcctgacctca

SEQ ID NO: 61033 - DNA, 20 bp, Artificial Sequence
  Description of Artificial Sequence: Synthetic oligonucleotide
  Target: ATXN2; (-) strand; PAM type: YTN; PAM sequence: TTG
gtcatgctggtctctaactc

SEQ ID NO: 61034 - DNA, 20 bp, Artificial Sequence
  Description of Artificial Sequence: Synthetic oligonucleotide
  Target: ATXN2; (-) strand; PAM type: YTN; PAM sequence: TTC
accatgttggtcatgctggt

SEQ ID NO: 61035 - DNA, 20 bp, Artificial Sequence
  Description of Artificial Sequence: Synthetic oligonucleotide
  Target: ATXN2; (-) strand; PAM type: YTN; PAM sequence: TTT
caccatgttggtcatgctgg

SEQ ID NO: 61036 - DNA, 20 bp, Artificial Sequence
  Description of Artificial Sequence: Synthetic oligonucleotide
  Target: ATXN2; (-) strand; PAM type: YTN; PAM sequence: TTA
gtgtaggtggggtttcacca

SEQ ID NO: 61037 - DNA, 20 bp, Artificial Sequence
  Description of Artificial Sequence: Synthetic oligonucleotide
  Target: ATXN2; (-) strand; PAM type: YTN; PAM sequence: TTT
agtgtaggtggggtttcacc

SEQ ID NO: 61038 - DNA, 20 bp, Artificial Sequence
  Description of Artificial Sequence: Synthetic oligonucleotide
  Target: ATXN2; (-) strand; PAM type: YTN; PAM sequence: TTT
tagtgtaggtggggtttcac

SEQ ID NO: 61039 - DNA, 20 bp, Artificial Sequence
  Description of Artificial Sequence: Synthetic oligonucleotide
  Target: ATXN2; (-) strand; PAM type: YTN; PAM sequence: TTT
ttagtgtaggtggggtttca

SEQ ID NO: 61040 - DNA, 20 bp, Artificial Sequence
  Description of Artificial Sequence: Synthetic oligonucleotide
  Target: ATXN2; (-) strand; PAM type: YTN; PAM sequence: TTG
tatttttagtgtaggtgggg

SEQ ID NO: 61041 - DNA, 20 bp, Artificial Sequence
  Description of Artificial Sequence: Synthetic oligonucleotide
  Target: ATXN2; (-) strand; PAM type: YTN; PAM sequence: TTT
gtatttttagtgtaggtggg

SEQ ID NO: 61042 - DNA, 20 bp, Artificial Sequence
  Description of Artificial Sequence: Synthetic oligonucleotide
  Target: ATXN2; (-) strand; PAM type: YTN; PAM sequence: TTT
tgtatttttagtgtaggtgg

SEQ ID NO: 61043 - DNA, 20 bp, Artificial Sequence
  Description of Artificial Sequence: Synthetic oligonucleotide
  Target: ATXN2; (-) strand; PAM type: YTN; PAM sequence: CTA
attttgtatttttagtgtag

SEQ ID NO: 61044 - DNA, 20 bp, Artificial Sequence
  Description of Artificial Sequence: Synthetic oligonucleotide
  Target: ATXN2; (-) strand; PAM type: YTN; PAM sequence: CTG
gctaattttgtatttttagt

SEQ ID NO: 61045 - DNA, 20 bp, Artificial Sequence
  Description of Artificial Sequence: Synthetic oligonucleotide
  Target: ATXN2; (-) strand; PAM type: YTN; PAM sequence: TTA
caggcatgcgccaccatgcc

SEQ ID NO: 61046 - DNA, 20 bp, Artificial Sequence
  Description of Artificial Sequence: Synthetic oligonucleotide
  Target: ATXN2; (-) strand; PAM type: YTN; PAM sequence: CTG
ggattacaggcatgcgccac

SEQ ID NO: 61047 - DNA, 20 bp, Artificial Sequence
  Description of Artificial Sequence: Synthetic oligonucleotide
  Target: ATXN2; (-) strand; PAM type: YTN; PAM sequence: CTC
ccaagtagctgggattacag

SEQ ID NO: 61048 - DNA, 20 bp, Artificial Sequence
  Description of Artificial Sequence: Synthetic oligonucleotide
  Target: ATXN2; (-) strand; PAM type: YTN; PAM sequence: TTA
gcctcccaagtagctgggat

SEQ ID NO: 61049 - DNA, 20 bp, Artificial Sequence
  Description of Artificial Sequence: Synthetic oligonucleotide
  Target: ATXN2; (-) strand; PAM type: YTN; PAM sequence: CTT
agcctcccaagtagctggga

SEQ ID NO: 61050 - DNA, 20 bp, Artificial Sequence
  Description of Artificial Sequence: Synthetic oligonucleotide
  Target: ATXN2; (-) strand; PAM type: YTN; PAM sequence: TTA
cgccttagcctcccaagtag

SEQ ID NO: 61051 - DNA, 20 bp, Artificial Sequence
  Description of Artificial Sequence: Synthetic oligonucleotide
  Target: ATXN2; (-) strand; PAM type: YTN; PAM sequence: CTT
acgccttagcctcccaagta

SEQ ID NO: 61052 - DNA, 20 bp, Artificial Sequence
  Description of Artificial Sequence: Synthetic oligonucleotide
  Target: ATXN2; (-) strand; PAM type: YTN; PAM sequence: TTC
ttacgccttagcctcccaag

SEQ ID NO: 61053 - DNA, 20 bp, Artificial Sequence
  Description of Artificial Sequence: Synthetic oligonucleotide
  Target: ATXN2; (-) strand; PAM type: YTN; PAM sequence: TTC
aagcaattcttacgccttag

SEQ ID NO: 61054 - DNA, 20 bp, Artificial Sequence
  Description of Artificial Sequence: Synthetic oligonucleotide
  Target: ATXN2; (-) strand; PAM type: YTN; PAM sequence: CTC
ccaggttcaagcaattctta

SEQ ID NO: 61055 - DNA, 20 bp, Artificial Sequence
  Description of Artificial Sequence: Synthetic oligonucleotide
  Target: ATXN2; (-) strand; PAM type: YTN; PAM sequence: CTC
cgcctcccaggttcaagcaa

SEQ ID NO: 61056 - DNA, 20 bp, Artificial Sequence
  Description of Artificial Sequence: Synthetic oligonucleotide
  Target: ATXN2; (-) strand; PAM type: YTN; PAM sequence: CTG
caacctccgcctcccaggtt

SEQ ID NO: 61057 - DNA, 20 bp, Artificial Sequence
  Description of Artificial Sequence: Synthetic oligonucleotide
  Target: ATXN2; (-) strand; PAM type: YTN; PAM sequence: CTC
actgcaacctccgcctccca

SEQ ID NO: 61058 - DNA, 20 bp, Artificial Sequence
  Description of Artificial Sequence: Synthetic oligonucleotide
  Target: ATXN2; (-) strand; PAM type: YTN; PAM sequence: TTG
gctcactgcaacctccgcct

SEQ ID NO: 61059 - DNA, 20 bp, Artificial Sequence
  Description of Artificial Sequence: Synthetic oligonucleotide
  Target: ATXN2; (-) strand; PAM type: YTN; PAM sequence: CTT
ggctcactgcaacctccgcc

SEQ ID NO: 61060 - DNA, 20 bp, Artificial Sequence
  Description of Artificial Sequence: Synthetic oligonucleotide
  Target: ATXN2; (-) strand; PAM type: YTN; PAM sequence: CTG
gaacgcagtggtgccatctt

SEQ ID NO: 61061 - DNA, 20 bp, Artificial Sequence
  Description of Artificial Sequence: Synthetic oligonucleotide
  Target: ATXN2; (-) strand; PAM type: YTN; PAM sequence: TTG
cccaggctggaacgcagtgg

SEQ ID NO: 61062 - DNA, 20 bp, Artificial Sequence
  Description of Artificial Sequence: Synthetic oligonucleotide
  Target: ATXN2; (-) strand; PAM type: YTN; PAM sequence: CTA
ttgcccaggctggaacgcag

SEQ ID NO: 61063 - DNA, 20 bp, Artificial Sequence
  Description of Artificial Sequence: Synthetic oligonucleotide
  Target: ATXN2; (-) strand; PAM type: YTN; PAM sequence: CTC
tattgcccaggctggaacgc

SEQ ID NO: 61064 - DNA, 20 bp, Artificial Sequence
  Description of Artificial Sequence: Synthetic oligonucleotide
  Target: ATXN2; (-) strand; PAM type: YTN; PAM sequence: CTC
actctattgcccaggctgga

SEQ ID NO: 61065 - DNA, 20 bp, Artificial Sequence
  Description of Artificial Sequence: Synthetic oligonucleotide
  Target: ATXN2; (-) strand; PAM type: YTN; PAM sequence: TTG
atggaatctcactctattgc

SEQ ID NO: 61066 - DNA, 20 bp, Artificial Sequence
  Description of Artificial Sequence: Synthetic oligonucleotide
  Target: ATXN2; (-) strand; PAM type: YTN; PAM sequence: TTT
gatggaatctcactctattg

SEQ ID NO: 61067 - DNA, 20 bp, Artificial Sequence
  Description of Artificial Sequence: Synthetic oligonucleotide
  Target: ATXN2; (-) strand; PAM type: YTN; PAM sequence: TTA
tttgatggaatctcactcta

SEQ ID NO: 61068 - DNA, 20 bp, Artificial Sequence
  Description of Artificial Sequence: Synthetic oligonucleotide
  Target: ATXN2; (-) strand; PAM type: YTN; PAM sequence: TTT
atttgatggaatctcactct

SEQ ID NO: 61069 - DNA, 20 bp, Artificial Sequence
  Description of Artificial Sequence: Synthetic oligonucleotide
  Target: ATXN2; (-) strand; PAM type: YTN; PAM sequence: TTA
tttatttgatggaatctcac

SEQ ID NO: 61070 - DNA, 20 bp, Artificial Sequence
  Description of Artificial Sequence: Synthetic oligonucleotide
  Target: ATXN2; (-) strand; PAM type: YTN; PAM sequence: TTT
atttatttgatggaatctca

SEQ ID NO: 61071 - DNA, 20 bp, Artificial Sequence
  Description of Artificial Sequence: Synthetic oligonucleotide
  Target: ATXN2; (-) strand; PAM type: YTN; PAM sequence: TTA
tttatttatttgatggaatc

SEQ ID NO: 61072 - DNA, 20 bp, Artificial Sequence
  Description of Artificial Sequence: Synthetic oligonucleotide
  Target: ATXN2; (-) strand; PAM type: YTN; PAM sequence: TTT
atttatttatttgatggaat

SEQ ID NO: 61073 - DNA, 20 bp, Artificial Sequence
  Description of Artificial Sequence: Synthetic oligonucleotide
  Target: ATXN2; (-) strand; PAM type: YTN; PAM sequence: TTA
tttatttatttatttgatgg

SEQ ID NO: 61074 - DNA, 20 bp, Artificial Sequence
  Description of Artificial Sequence: Synthetic oligonucleotide
  Target: ATXN2; (-) strand; PAM type: YTN; PAM sequence: TTT
atttatttatttatttgatg

SEQ ID NO: 61075 - DNA, 20 bp, Artificial Sequence
  Description of Artificial Sequence: Synthetic oligonucleotide
  Target: ATXN2; (-) strand; PAM type: YTN; PAM sequence: TTA
tttatttatttatttatttg

SEQ ID NO: 61076 - DNA, 20 bp, Artificial Sequence
  Description of Artificial Sequence: Synthetic oligonucleotide
  Target: ATXN2; (-) strand; PAM type: YTN; PAM sequence: TTT
atttatttatttatttattt

SEQ ID NO: 61077 - DNA, 20 bp, Artificial Sequence
  Description of Artificial Sequence: Synthetic oligonucleotide
  Target: ATXN2; (-) strand; PAM type: YTN; PAM sequence: TTT
tatttatttatttatttatt

SEQ ID NO: 61078 - DNA, 20 bp, Artificial Sequence
  Description of Artificial Sequence: Synthetic oligonucleotide
  Target: ATXN2; (-) strand; PAM type: YTN; PAM sequence: TTC
cattttatttatttatttat

SEQ ID NO: 61079 - DNA, 20 bp, Artificial Sequence
  Description of Artificial Sequence: Synthetic oligonucleotide
  Target: ATXN2; (-) strand; PAM type: YTN; PAM sequence: TTT
ccattttatttatttattta

SEQ ID NO: 61080 - DNA, 20 bp, Artificial Sequence
  Description of Artificial Sequence: Synthetic oligonucleotide
  Target: ATXN2; (-) strand; PAM type: YTN; PAM sequence: TTT
tccattttatttatttattt

SEQ ID NO: 61081 - DNA, 20 bp, Artificial Sequence
  Description of Artificial Sequence: Synthetic oligonucleotide
  Target: ATXN2; (-) strand; PAM type: YTN; PAM sequence: TTT
ttccattttatttatttatt

SEQ ID NO: 61082 - DNA, 20 bp, Artificial Sequence
  Description of Artificial Sequence: Synthetic oligonucleotide
  Target: ATXN2; (-) strand; PAM type: YTN; PAM sequence: TTT
tttccattttatttatttat

SEQ ID NO: 61083 - DNA, 20 bp, Artificial Sequence
  Description of Artificial Sequence: Synthetic oligonucleotide
  Target: ATXN2; (-) strand; PAM type: YTN; PAM sequence: CTT
ttttccattttatttattta

SEQ ID NO: 61084 - DNA, 20 bp, Artificial Sequence
  Description of Artificial Sequence: Synthetic oligonucleotide
  Target: ATXN2; (-) strand; PAM type: YTN; PAM sequence: TTC
aaatcttttttccattttat

SEQ ID NO: 61085 - DNA, 20 bp, Artificial Sequence
  Description of Artificial Sequence: Synthetic oligonucleotide
  Target: ATXN2; (-) strand; PAM type: YTN; PAM sequence: TTA
gtaaatggttcaaatctttt

SEQ ID NO: 61086 - DNA, 20 bp, Artificial Sequence
  Description of Artificial Sequence: Synthetic oligonucleotide
  Target: ATXN2; (-) strand; PAM type: YTN; PAM sequence: TTT
agtaaatggttcaaatcttt

SEQ ID NO: 61087 - DNA, 20 bp, Artificial Sequence
  Description of Artificial Sequence: Synthetic oligonucleotide
  Target: ATXN2; (-) strand; PAM type: YTN; PAM sequence: TTT
tagtaaatggttcaaatctt

SEQ ID NO: 61088 - DNA, 20 bp, Artificial Sequence
  Description of Artificial Sequence: Synthetic oligonucleotide
  Target: ATXN2; (-) strand; PAM type: YTN; PAM sequence: TTT
ttagtaaatggttcaaatct

SEQ ID NO: 61089 - DNA, 20 bp, Artificial Sequence
  Description of Artificial Sequence: Synthetic oligonucleotide
  Target: ATXN2; (-) strand; PAM type: YTN; PAM sequence: TTT
tttagtaaatggttcaaatc

SEQ ID NO: 61090 - DNA, 20 bp, Artificial Sequence
  Description of Artificial Sequence: Synthetic oligonucleotide
  Target: ATXN2; (-) strand; PAM type: YTN; PAM sequence: TTT
ttttagtaaatggttcaaat

SEQ ID NO: 61091 - DNA, 20 bp, Artificial Sequence
  Description of Artificial Sequence: Synthetic oligonucleotide
  Target: ATXN2; (-) strand; PAM type: YTN; PAM sequence: CTT
tttttagtaaatggttcaaa

SEQ ID NO: 61092 - DNA, 20 bp, Artificial Sequence
  Description of Artificial Sequence: Synthetic oligonucleotide
  Target: ATXN2; (-) strand; PAM type: YTN; PAM sequence: CTG
tcaacctttttttagtaaat

SEQ ID NO: 61093 - DNA, 20 bp, Artificial Sequence
  Description of Artificial Sequence: Synthetic oligonucleotide
  Target: ATXN2; (-) strand; PAM type: YTN; PAM sequence: TTC
agctgtcaacctttttttag

SEQ ID NO: 61094 - DNA, 20 bp, Artificial Sequence
  Description of Artificial Sequence: Synthetic oligonucleotide
  Target: ATXN2; (-) strand; PAM type: YTN; PAM sequence: TTT
cagctgtcaaccttttttta

SEQ ID NO: 61095 - DNA, 20 bp, Artificial Sequence
  Description of Artificial Sequence: Synthetic oligonucleotide
  Target: ATXN2; (-) strand; PAM type: YTN; PAM sequence: TTT
tcagctgtcaaccttttttt

SEQ ID NO: 61096 - DNA, 20 bp, Artificial Sequence
  Description of Artificial Sequence: Synthetic oligonucleotide
  Target: ATXN2; (-) strand; PAM type: YTN; PAM sequence: TTG
ttttcagctgtcaacctttt

SEQ ID NO: 61097 - DNA, 20 bp, Artificial Sequence
  Description of Artificial Sequence: Synthetic oligonucleotide
  Target: ATXN2; (-) strand; PAM type: YTN; PAM sequence: TTT
gttttcagctgtcaaccttt

SEQ ID NO: 61098 - DNA, 20 bp, Artificial Sequence
  Description of Artificial Sequence: Synthetic oligonucleotide
  Target: ATXN2; (-) strand; PAM type: YTN; PAM sequence: CTC
atcatgtgtgtgtttgtttt

SEQ ID NO: 61099 - DNA, 20 bp, Artificial Sequence
  Description of Artificial Sequence: Synthetic oligonucleotide
  Target: ATXN2; (-) strand; PAM type: YTN; PAM sequence: CTG
atccaggagcacctcatcat

SEQ ID NO: 61100 - DNA, 20 bp, Artificial Sequence
  Description of Artificial Sequence: Synthetic oligonucleotide
  Target: ATXN2; (-) strand; PAM type: YTN; PAM sequence: CTG
atgatgactgatccaggagc

SEQ ID NO: 61101 - DNA, 20 bp, Artificial Sequence
  Description of Artificial Sequence: Synthetic oligonucleotide
  Target: ATXN2; (-) strand; PAM type: YTN; PAM sequence: CTC
tgatgatgactgatccagga

SEQ ID NO: 61102 - DNA, 20 bp, Artificial Sequence
  Description of Artificial Sequence: Synthetic oligonucleotide
  Target: ATXN2; (-) strand; PAM type: YTN; PAM sequence: TTC
tctgatgatgactgatccag

SEQ ID NO: 61103 - DNA, 20 bp, Artificial Sequence
  Description of Artificial Sequence: Synthetic oligonucleotide
  Target: ATXN2; (-) strand; PAM type: YTN; PAM sequence: TTT
ctctgatgatgactgatcca

SEQ ID NO: 61104 - DNA, 20 bp, Artificial Sequence
  Description of Artificial Sequence: Synthetic oligonucleotide
  Target: ATXN2; (-) strand; PAM type: YTN; PAM sequence: TTA
aatgtacatttctctgatga

SEQ ID NO: 61105 - DNA, 20 bp, Artificial Sequence
  Description of Artificial Sequence: Synthetic oligonucleotide
  Target: ATXN2; (-) strand; PAM type: YTN; PAM sequence: CTT
aaatgtacatttctctgatg

SEQ ID NO: 61106 - DNA, 20 bp, Artificial Sequence
  Description of Artificial Sequence: Synthetic oligonucleotide
  Target: ATXN2; (-) strand; PAM type: YTN; PAM sequence: TTG
tgatcttaaatgtacatttc

SEQ ID NO: 61107 - DNA, 20 bp, Artificial Sequence
  Description of Artificial Sequence: Synthetic oligonucleotide
  Target: ATXN2; (-) strand; PAM type: YTN; PAM sequence: CTC
attgtgatcttaaatgtaca

SEQ ID NO: 61108 - DNA, 20 bp, Artificial Sequence
  Description of Artificial Sequence: Synthetic oligonucleotide
  Target: ATXN2; (-) strand; PAM type: YTN; PAM sequence: TTA
tggtatctcattgtgatctt

SEQ ID NO: 61109 - DNA, 20 bp, Artificial Sequence
  Description of Artificial Sequence: Synthetic oligonucleotide
  Target: ATXN2; (-) strand; PAM type: YTN; PAM sequence: CTT
atggtatctcattgtgatct

SEQ ID NO: 61110 - DNA, 20 bp, Artificial Sequence
  Description of Artificial Sequence: Synthetic oligonucleotide
  Target: ATXN2; (-) strand; PAM type: YTN; PAM sequence: CTA
atgggtgtcttatggtatct

SEQ ID NO: 61111 - DNA, 20 bp, Artificial Sequence
  Description of Artificial Sequence: Synthetic oligonucleotide
  Target: ATXN2; (-) strand; PAM type: YTN; PAM sequence: TTC
aacaggtctaatgggtgtct

SEQ ID NO: 61112 - DNA, 20 bp, Artificial Sequence
  Description of Artificial Sequence: Synthetic oligonucleotide
  Target: ATXN2; (-) strand; PAM type: YTN; PAM sequence: TTT
caacaggtctaatgggtgtc

SEQ ID NO: 61113 - DNA, 20 bp, Artificial Sequence
  Description of Artificial Sequence: Synthetic oligonucleotide
  Target: ATXN2; (-) strand; PAM type: YTN; PAM sequence: TTA
atttcaacaggtctaatggg

SEQ ID NO: 61114 - DNA, 20 bp, Artificial Sequence
  Description of Artificial Sequence: Synthetic oligonucleotide
  Target: ATXN2; (-) strand; PAM type: YTN; PAM sequence: TTT
aatttcaacaggtctaatgg

SEQ ID NO: 61115 - DNA, 20 bp, Artificial Sequence
  Description of Artificial Sequence: Synthetic oligonucleotide
  Target: ATXN2; (-) strand; PAM type: YTN; PAM sequence: TTT
taatttcaacaggtctaatg

SEQ ID NO: 61116 - DNA, 20 bp, Artificial Sequence
  Description of Artificial Sequence: Synthetic oligonucleotide
  Target: ATXN2; (-) strand; PAM type: YTN; PAM sequence: TTT
ttaatttcaacaggtctaat

SEQ ID NO: 61117 - DNA, 20 bp, Artificial Sequence
  Description of Artificial Sequence: Synthetic oligonucleotide
  Target: ATXN2; (-) strand; PAM type: YTN; PAM sequence: CTT
tttaatttcaacaggtctaa

SEQ ID NO: 61118 - DNA, 20 bp, Artificial Sequence
  Description of Artificial Sequence: Synthetic oligonucleotide
  Target: ATXN2; (-) strand; PAM type: YTN; PAM sequence: TTA
tctttttaatttcaacaggt

SEQ ID NO: 61119 - DNA, 20 bp, Artificial Sequence
  Description of Artificial Sequence: Synthetic oligonucleotide
  Target: ATXN2; (-) strand; PAM type: YTN; PAM sequence: TTG
tgttatctttttaatttcaa

SEQ ID NO: 61120 - DNA, 20 bp, Artificial Sequence
  Description of Artificial Sequence: Synthetic oligonucleotide
  Target: ATXN2; (-) strand; PAM type: YTN; PAM sequence: TTG
gtattgtgttatctttttaa

SEQ ID NO: 61121 - DNA, 20 bp, Artificial Sequence
  Description of Artificial Sequence: Synthetic oligonucleotide
  Target: ATXN2; (-) strand; PAM type: YTN; PAM sequence: CTT
ggtattgtgttatcttttta

SEQ ID NO: 61122 - DNA, 20 bp, Artificial Sequence
  Description of Artificial Sequence: Synthetic oligonucleotide
  Target: ATXN2; (-) strand; PAM type: YTN; PAM sequence: TTG
ccaacacttggtattgtgtt

SEQ ID NO: 61123 - DNA, 20 bp, Artificial Sequence
  Description of Artificial Sequence: Synthetic oligonucleotide
  Target: ATXN2; (-) strand; PAM type: YTN; PAM sequence: CTT
gccaacacttggtattgtgt

SEQ ID NO: 61124 - DNA, 20 bp, Artificial Sequence
  Description of Artificial Sequence: Synthetic oligonucleotide
  Target: ATXN2; (-) strand; PAM type: YTN; PAM sequence: CTG
catccttgccaacacttggt

SEQ ID NO: 61125 - DNA, 20 bp, Artificial Sequence
  Description of Artificial Sequence: Synthetic oligonucleotide
  Target: ATXN2; (-) strand; PAM type: YTN; PAM sequence: TTC
tgcatccttgccaacacttg

SEQ ID NO: 61126 - DNA, 20 bp, Artificial Sequence
  Description of Artificial Sequence: Synthetic oligonucleotide
  Target: ATXN2; (-) strand; PAM type: YTN; PAM sequence: TTC
catgtgttctgcatccttgc

SEQ ID NO: 61127 - DNA, 20 bp, Artificial Sequence
  Description of Artificial Sequence: Synthetic oligonucleotide
  Target: ATXN2; (-) strand; PAM type: YTN; PAM sequence: CTG
atcaggtacatgtgtaggtt

SEQ ID NO: 61128 - DNA, 20 bp, Artificial Sequence
  Description of Artificial Sequence: Synthetic oligonucleotide
  Target: ATXN2; (-) strand; PAM type: YTN; PAM sequence: TTC
caactgatcaggtacatgtg

SEQ ID NO: 61129 - DNA, 20 bp, Artificial Sequence
  Description of Artificial Sequence: Synthetic oligonucleotide
  Target: ATXN2; (-) strand; PAM type: YTN; PAM sequence: TTA
cattccaactgatcaggtac

SEQ ID NO: 61130 - DNA, 20 bp, Artificial Sequence
  Description of Artificial Sequence: Synthetic oligonucleotide
  Target: ATXN2; (-) strand; PAM type: YTN; PAM sequence: TTT
acattccaactgatcaggta

SEQ ID NO: 61131 - DNA, 20 bp, Artificial Sequence
  Description of Artificial Sequence: Synthetic oligonucleotide
  Target: ATXN2; (-) strand; PAM type: YTN; PAM sequence: TTT
tacattccaactgatcaggt

SEQ ID NO: 61132 - DNA, 20 bp, Artificial Sequence
  Description of Artificial Sequence: Synthetic oligonucleotide
  Target: ATXN2; (-) strand; PAM type: YTN; PAM sequence: TTG
tgtcattttacattccaact

SEQ ID NO: 61133 - DNA, 20 bp, Artificial Sequence
  Description of Artificial Sequence: Synthetic oligonucleotide
  Target: ATXN2; (-) strand; PAM type: YTN; PAM sequence: CTA
aagtgattgtgtcattttac

SEQ ID NO: 61134 - DNA, 20 bp, Artificial Sequence
  Description of Artificial Sequence: Synthetic oligonucleotide
  Target: ATXN2; (-) strand; PAM type: YTN; PAM sequence: TTC
taaagtgattgtgtcatttt

SEQ ID NO: 61135 - DNA, 20 bp, Artificial Sequence
  Description of Artificial Sequence: Synthetic oligonucleotide
  Target: ATXN2; (-) strand; PAM type: YTN; PAM sequence: CTT
ctaaagtgattgtgtcattt

SEQ ID NO: 61136 - DNA, 20 bp, Artificial Sequence
  Description of Artificial Sequence: Synthetic oligonucleotide
  Target: ATXN2; (-) strand; PAM type: YTN; PAM sequence: CTA
gcaatcttctaaagtgattg

SEQ ID NO: 61137 - DNA, 20 bp, Artificial Sequence
  Description of Artificial Sequence: Synthetic oligonucleotide
  Target: ATXN2; (-) strand; PAM type: YTN; PAM sequence: TTA
ataagaaactagcaatcttc

SEQ ID NO: 61138 - DNA, 20 bp, Artificial Sequence
  Description of Artificial Sequence: Synthetic oligonucleotide
  Target: ATXN2; (-) strand; PAM type: YTN; PAM sequence: TTC
aattaataagaaactagcaa

SEQ ID NO: 61139 - DNA, 20 bp, Artificial Sequence
  Description of Artificial Sequence: Synthetic oligonucleotide
  Target: ATXN2; (-) strand; PAM type: YTN; PAM sequence: TTT
caattaataagaaactagca

SEQ ID NO: 61140 - DNA, 20 bp, Artificial Sequence
  Description of Artificial Sequence: Synthetic oligonucleotide
  Target: ATXN2; (-) strand; PAM type: YTN; PAM sequence: CTG
gtaaatacatatttcaatta

SEQ ID NO: 61141 - DNA, 20 bp, Artificial Sequence
  Description of Artificial Sequence: Synthetic oligonucleotide
  Target: ATXN2; (-) strand; PAM type: YTN; PAM sequence: CTG
cctggtaaatacatatttca

SEQ ID NO: 61142 - DNA, 20 bp, Artificial Sequence
  Description of Artificial Sequence: Synthetic oligonucleotide
  Target: ATXN2; (-) strand; PAM type: YTN; PAM sequence: TTA
cagatgtgagccaccacaca

SEQ ID NO: 61143 - DNA, 20 bp, Artificial Sequence
  Description of Artificial Sequence: Synthetic oligonucleotide
  Target: ATXN2; (-) strand; PAM type: YTN; PAM sequence: TTG
ggattacagatgtgagccac

SEQ ID NO: 61144 - DNA, 20 bp, Artificial Sequence
  Description of Artificial Sequence: Synthetic oligonucleotide
  Target: ATXN2; (-) strand; PAM type: YTN; PAM sequence: CTC
ccaaagtgttgggattacag

SEQ ID NO: 61145 - DNA, 20 bp, Artificial Sequence
  Description of Artificial Sequence: Synthetic oligonucleotide
  Target: ATXN2; (-) strand; PAM type: YTN; PAM sequence: CTG
accacaagtgatccacccgc

SEQ ID NO: 61146 - DNA, 20 bp, Artificial Sequence
  Description of Artificial Sequence: Synthetic oligonucleotide
  Target: ATXN2; (-) strand; PAM type: YTN; PAM sequence: CTC
ctgaccacaagtgatccacc

SEQ ID NO: 61147 - DNA, 20 bp, Artificial Sequence
  Description of Artificial Sequence: Synthetic oligonucleotide
  Target: ATXN2; (-) strand; PAM type: YTN; PAM sequence: CTC
gaactcctgaccacaagtga

SEQ ID NO: 61148 - DNA, 20 bp, Artificial Sequence
  Description of Artificial Sequence: Synthetic oligonucleotide
  Target: ATXN2; (-) strand; PAM type: YTN; PAM sequence: CTG
gtctcgaactcctgaccaca

SEQ ID NO: 61149 - DNA, 20 bp, Artificial Sequence
  Description of Artificial Sequence: Synthetic oligonucleotide
  Target: ATXN2; (-) strand; PAM type: YTN; PAM sequence: TTG
gccaggctggtctcgaactc

SEQ ID NO: 61150 - DNA, 20 bp, Artificial Sequence
  Description of Artificial Sequence: Synthetic oligonucleotide
  Target: ATXN2; (-) strand; PAM type: YTN; PAM sequence: TTC
accacgttggccaggctggt

SEQ ID NO: 61151 - DNA, 20 bp, Artificial Sequence
  Description of Artificial Sequence: Synthetic oligonucleotide
  Target: ATXN2; (-) strand; PAM type: YTN; PAM sequence: TTT
caccacgttggccaggctgg

SEQ ID NO: 61152 - DNA, 20 bp, Artificial Sequence
  Description of Artificial Sequence: Synthetic oligonucleotide
  Target: ATXN2; (-) strand; PAM type: YTN; PAM sequence: TTA
gtagagacggggtttcacca

SEQ ID NO: 61153 - DNA, 20 bp, Artificial Sequence
  Description of Artificial Sequence: Synthetic oligonucleotide
  Target: ATXN2; (-) strand; PAM type: YTN; PAM sequence: TTT
agtagagacggggtttcacc

SEQ ID NO: 61154 - DNA, 20 bp, Artificial Sequence
  Description of Artificial Sequence: Synthetic oligonucleotide
  Target: ATXN2; (-) strand; PAM type: YTN; PAM sequence: TTT
tagtagagacggggtttcac

SEQ ID NO: 61155 - DNA, 20 bp, Artificial Sequence
  Description of Artificial Sequence: Synthetic oligonucleotide
  Target: ATXN2; (-) strand; PAM type: YTN; PAM sequence: TTT
ttagtagagacggggtttca

SEQ ID NO: 61156 - DNA, 20 bp, Artificial Sequence
  Description of Artificial Sequence: Synthetic oligonucleotide
  Target: ATXN2; (-) strand; PAM type: YTN; PAM sequence: TTG
tatttttagtagagacgggg

SEQ ID NO: 61157 - DNA, 20 bp, Artificial Sequence
  Description of Artificial Sequence: Synthetic oligonucleotide
  Target: ATXN2; (-) strand; PAM type: YTN; PAM sequence: TTT
gtatttttagtagagacggg

SEQ ID NO: 61158 - DNA, 20 bp, Artificial Sequence
  Description of Artificial Sequence: Synthetic oligonucleotide
  Target: ATXN2; (-) strand; PAM type: YTN; PAM sequence: TTT
tgtatttttagtagagacgg

SEQ ID NO: 61159 - DNA, 20 bp, Artificial Sequence
  Description of Artificial Sequence: Synthetic oligonucleotide
  Target: ATXN2; (-) strand; PAM type: YTN; PAM sequence: TTT
ttgtatttttagtagagacg

SEQ ID NO: 61160 - DNA, 20 bp, Artificial Sequence
  Description of Artificial Sequence: Synthetic oligonucleotide
  Target: ATXN2; (-) strand; PAM type: YTN; PAM sequence: TTT
tttgtatttttagtagagac

SEQ ID NO: 61161 - DNA, 20 bp, Artificial Sequence
  Description of Artificial Sequence: Synthetic oligonucleotide
  Target: ATXN2; (-) strand; PAM type: YTN; PAM sequence: TTT
ttttgtatttttagtagaga

SEQ ID NO: 61162 - DNA, 20 bp, Artificial Sequence
  Description of Artificial Sequence: Synthetic oligonucleotide
  Target: ATXN2; (-) strand; PAM type: YTN; PAM sequence: CTA
atttttttgtatttttagta

SEQ ID NO: 61163 - DNA, 20 bp, Artificial Sequence
  Description of Artificial Sequence: Synthetic oligonucleotide
  Target: ATXN2; (-) strand; PAM type: YTN; PAM sequence: CTG
gctaatttttttgtattttt

SEQ ID NO: 61164 - DNA, 20 bp, Artificial Sequence
  Description of Artificial Sequence: Synthetic oligonucleotide
  Target: ATXN2; (-) strand; PAM type: YTN; PAM sequence: TTA
caggcgcgcaccaccatgcc

SEQ ID NO: 61165 - DNA, 20 bp, Artificial Sequence
  Description of Artificial Sequence: Synthetic oligonucleotide
  Target: ATXN2; (-) strand; PAM type: YTN; PAM sequence: CTG
ggattacaggcgcgcaccac

SEQ ID NO: 61166 - DNA, 20 bp, Artificial Sequence
  Description of Artificial Sequence: Synthetic oligonucleotide
  Target: ATXN2; (-) strand; PAM type: YTN; PAM sequence: CTC
ccaagtagctgggattacag

SEQ ID NO: 61167 - DNA, 20 bp, Artificial Sequence
  Description of Artificial Sequence: Synthetic oligonucleotide
  Target: ATXN2; (-) strand; PAM type: YTN; PAM sequence: CTC
agcctcccaagtagctggga

SEQ ID NO: 61168 - DNA, 20 bp, Artificial Sequence
  Description of Artificial Sequence: Synthetic oligonucleotide
  Target: ATXN2; (-) strand; PAM type: YTN; PAM sequence: CTC
ccgcctcagcctcccaagta

SEQ ID NO: 61169 - DNA, 20 bp, Artificial Sequence
  Description of Artificial Sequence: Synthetic oligonucleotide
  Target: ATXN2; (-) strand; PAM type: YTN; PAM sequence: TTC
tcccgcctcagcctcccaag

SEQ ID NO: 61170 - DNA, 20 bp, Artificial Sequence
  Description of Artificial Sequence: Synthetic oligonucleotide
  Target: ATXN2; (-) strand; PAM type: YTN; PAM sequence: TTC
aagcaattctcccgcctcag

SEQ ID NO: 61171 - DNA, 20 bp, Artificial Sequence
  Description of Artificial Sequence: Synthetic oligonucleotide
  Target: ATXN2; (-) strand; PAM type: YTN; PAM sequence: CTG
tcccgggttcaagcaattct

SEQ ID NO: 61172 - DNA, 20 bp, Artificial Sequence
  Description of Artificial Sequence: Synthetic oligonucleotide
  Target: ATXN2; (-) strand; PAM type: YTN; PAM sequence: CTC
cctgtcccgggttcaagcaa

SEQ ID NO: 61173 - DNA, 20 bp, Artificial Sequence
  Description of Artificial Sequence: Synthetic oligonucleotide
  Target: ATXN2; (-) strand; PAM type: YTN; PAM sequence: CTC
atggcaacctccctgtcccg

SEQ ID NO: 61174 - DNA, 20 bp, Artificial Sequence
  Description of Artificial Sequence: Synthetic oligonucleotide
  Target: ATXN2; (-) strand; PAM type: YTN; PAM sequence: TTC
agctcatggcaacctccctg

SEQ ID NO: 61175 - DNA, 20 bp, Artificial Sequence
  Description of Artificial Sequence: Synthetic oligonucleotide
  Target: ATXN2; (-) strand; PAM type: YTN; PAM sequence: TTT
cagctcatggcaacctccct

SEQ ID NO: 61176 - DNA, 20 bp, Artificial Sequence
  Description of Artificial Sequence: Synthetic oligonucleotide
  Target: ATXN2; (-) strand; PAM type: YTN; PAM sequence: TTC
agtggcgtgatttcagctca

SEQ ID NO: 61177 - DNA, 20 bp, Artificial Sequence
  Description of Artificial Sequence: Synthetic oligonucleotide
  Target: ATXN2; (-) strand; PAM type: YTN; PAM sequence: CTG
gagttcagtggcgtgatttc

SEQ ID NO: 61178 - DNA, 20 bp, Artificial Sequence
  Description of Artificial Sequence: Synthetic oligonucleotide
  Target: ATXN2; (-) strand; PAM type: YTN; PAM sequence: TTG
cccaggctggagttcagtgg

SEQ ID NO: 61179 - DNA, 20 bp, Artificial Sequence
  Description of Artificial Sequence: Synthetic oligonucleotide
  Target: ATXN2; (-) strand; PAM type: YTN; PAM sequence: CTG
ttgcccaggctggagttcag

SEQ ID NO: 61180 - DNA, 20 bp, Artificial Sequence
  Description of Artificial Sequence: Synthetic oligonucleotide
  Target: ATXN2; (-) strand; PAM type: YTN; PAM sequence: CTC
tgttgcccaggctggagttc

SEQ ID NO: 61181 - DNA, 20 bp, Artificial Sequence
  Description of Artificial Sequence: Synthetic oligonucleotide
  Target: ATXN2; (-) strand; PAM type: YTN; PAM sequence: CTC
actctgttgcccaggctgga

SEQ ID NO: 61182 - DNA, 20 bp, Artificial Sequence
  Description of Artificial Sequence: Synthetic oligonucleotide
  Target: ATXN2; (-) strand; PAM type: YTN; PAM sequence: TTG
agatgaagtctcactctgtt

SEQ ID NO: 61183 - DNA, 20 bp, Artificial Sequence
  Description of Artificial Sequence: Synthetic oligonucleotide
  Target: ATXN2; (-) strand; PAM type: YTN; PAM sequence: TTT
gagatgaagtctcactctgt

SEQ ID NO: 61184 - DNA, 20 bp, Artificial Sequence
  Description of Artificial Sequence: Synthetic oligonucleotide
  Target: ATXN2; (-) strand; PAM type: YTN; PAM sequence: TTT
tgagatgaagtctcactctg

SEQ ID NO: 61185 - DNA, 20 bp, Artificial Sequence
  Description of Artificial Sequence: Synthetic oligonucleotide
  Target: ATXN2; (-) strand; PAM type: YTN; PAM sequence: TTT
ttgagatgaagtctcactct

SEQ ID NO: 61186 - DNA, 20 bp, Artificial Sequence
  Description of Artificial Sequence: Synthetic oligonucleotide
  Target: ATXN2; (-) strand; PAM type: YTN; PAM sequence: TTT
tttgagatgaagtctcactc

SEQ ID NO: 61187 - DNA, 20 bp, Artificial Sequence
  Description of Artificial Sequence: Synthetic oligonucleotide
  Target: ATXN2; (-) strand; PAM type: YTN; PAM sequence: TTT
ttttgagatgaagtctcact

SEQ ID NO: 61188 - DNA, 20 bp, Artificial Sequence
  Description of Artificial Sequence: Synthetic oligonucleotide
  Target: ATXN2; (-) strand; PAM type: YTN; PAM sequence: TTT
tttttgagatgaagtctcac

SEQ ID NO: 61189 - DNA, 20 bp, Artificial Sequence
  Description of Artificial Sequence: Synthetic oligonucleotide
  Target: ATXN2; (-) strand; PAM type: YTN; PAM sequence: TTA
ttttttttgagatgaagtct

SEQ ID NO: 61190 - DNA, 20 bp, Artificial Sequence
  Description of Artificial Sequence: Synthetic oligonucleotide
  Target: ATXN2; (-) strand; PAM type: YTN; PAM sequence: TTT
attttttttgagatgaagtc

SEQ ID NO: 61191 - DNA, 20 bp, Artificial Sequence
  Description of Artificial Sequence: Synthetic oligonucleotide
  Target: ATXN2; (-) strand; PAM type: YTN; PAM sequence: TTA
tttattttttttgagatgaa

SEQ ID NO: 61192 - DNA, 20 bp, Artificial Sequence
  Description of Artificial Sequence: Synthetic oligonucleotide
  Target: ATXN2; (-) strand; PAM type: YTN; PAM sequence: TTT
atttattttttttgagatga

SEQ ID NO: 61193 - DNA, 20 bp, Artificial Sequence
  Description of Artificial Sequence: Synthetic oligonucleotide
  Target: ATXN2; (-) strand; PAM type: YTN; PAM sequence: TTA
tttatttattttttttgaga

SEQ ID NO: 61194 - DNA, 20 bp, Artificial Sequence
  Description of Artificial Sequence: Synthetic oligonucleotide
  Target: ATXN2; (-) strand; PAM type: YTN; PAM sequence: TTT
atttatttattttttttgag

SEQ ID NO: 61195 - DNA, 20 bp, Artificial Sequence
  Description of Artificial Sequence: Synthetic oligonucleotide
  Target: ATXN2; (-) strand; PAM type: YTN; PAM sequence: TTT
tatttatttattttttttga

SEQ ID NO: 61196 - DNA, 20 bp, Artificial Sequence
  Description of Artificial Sequence: Synthetic oligonucleotide
  Target: ATXN2; (-) strand; PAM type: YTN; PAM sequence: TTT
ttatttatttattttttttg

SEQ ID NO: 61197 - DNA, 20 bp, Artificial Sequence
  Description of Artificial Sequence: Synthetic oligonucleotide
  Target: ATXN2; (-) strand; PAM type: YTN; PAM sequence: TTT
tttatttatttatttttttt

SEQ ID NO: 61198 - DNA, 20 bp, Artificial Sequence
  Description of Artificial Sequence: Synthetic oligonucleotide
  Target: ATXN2; (-) strand; PAM type: YTN; PAM sequence: TTA
ttttttatttatttattttt

SEQ ID NO: 61199 - DNA, 20 bp, Artificial Sequence
  Description of Artificial Sequence: Synthetic oligonucleotide
  Target: ATXN2; (-) strand; PAM type: YTN; PAM sequence: TTT
attttttatttatttatttt

SEQ ID NO: 61200 - DNA, 20 bp, Artificial Sequence
  Description of Artificial Sequence: Synthetic oligonucleotide
  Target: ATXN2; (-) strand; PAM type: YTN; PAM sequence: TTT
tattttttatttatttattt

SEQ ID NO: 61201 - DNA, 20 bp, Artificial Sequence
  Description of Artificial Sequence: Synthetic oligonucleotide
  Target: ATXN2; (-) strand; PAM type: YTN; PAM sequence: TTA
ttttattttttatttattta

SEQ ID NO: 61202 - DNA, 20 bp, Artificial Sequence
  Description of Artificial Sequence: Synthetic oligonucleotide
  Target: ATXN2; (-) strand; PAM type: YTN; PAM sequence: TTT
attttattttttatttattt

SEQ ID NO: 61203 - DNA, 20 bp, Artificial Sequence
  Description of Artificial Sequence: Synthetic oligonucleotide
  Target: ATXN2; (-) strand; PAM type: YTN; PAM sequence: TTA
aaaaatttattttatttttt

SEQ ID NO: 61204 - DNA, 20 bp, Artificial Sequence
  Description of Artificial Sequence: Synthetic oligonucleotide
  Target: ATXN2; (-) strand; PAM type: YTN; PAM sequence: TTT
aaaaaatttattttattttt

SEQ ID NO: 61205 - DNA, 20 bp, Artificial Sequence
  Description of Artificial Sequence: Synthetic oligonucleotide
  Target: ATXN2; (-) strand; PAM type: YTN; PAM sequence: TTT
taaaaaatttattttatttt

SEQ ID NO: 61206 - DNA, 20 bp, Artificial Sequence
  Description of Artificial Sequence: Synthetic oligonucleotide
  Target: ATXN2; (-) strand; PAM type: YTN; PAM sequence: TTT
ttaaaaaatttattttattt

SEQ ID NO: 61207 - DNA, 20 bp, Artificial Sequence
  Description of Artificial Sequence: Synthetic oligonucleotide
  Target: ATXN2; (-) strand; PAM type: YTN; PAM sequence: TTT
tttaaaaaatttattttatt

SEQ ID NO: 61208 - DNA, 20 bp, Artificial Sequence
  Description of Artificial Sequence: Synthetic oligonucleotide
  Target: ATXN2; (-) strand; PAM type: YTN; PAM sequence: TTT
ttttaaaaaatttattttat

SEQ ID NO: 61209 - DNA, 20 bp, Artificial Sequence
  Description of Artificial Sequence: Synthetic oligonucleotide
  Target: ATXN2; (-) strand; PAM type: YTN; PAM sequence: TTC
atttttttaaaaaatttatt

SEQ ID NO: 61210 - DNA, 20 bp, Artificial Sequence
  Description of Artificial Sequence: Synthetic oligonucleotide
  Target: ATXN2; (-) strand; PAM type: YTN; PAM sequence: TTT
catttttttaaaaaatttat

SEQ ID NO: 61211 - DNA, 20 bp, Artificial Sequence
  Description of Artificial Sequence: Synthetic oligonucleotide
  Target: ATXN2; (-) strand; PAM type: YTN; PAM sequence: CTG
aggtatggtaagtgcatatt

SEQ ID NO: 61212 - DNA, 20 bp, Artificial Sequence
  Description of Artificial Sequence: Synthetic oligonucleotide
  Target: ATXN2; (-) strand; PAM type: YTN; PAM sequence: TTG
ctgaggtatggtaagtgcat

SEQ ID NO: 61213 - DNA, 20 bp, Artificial Sequence
  Description of Artificial Sequence: Synthetic oligonucleotide
  Target: ATXN2; (-) strand; PAM type: YTN; PAM sequence: TTG
gaattgctgaggtatggtaa

SEQ ID NO: 61214 - DNA, 20 bp, Artificial Sequence
  Description of Artificial Sequence: Synthetic oligonucleotide
  Target: ATXN2; (-) strand; PAM type: YTN; PAM sequence: CTA
gaattggaattgctgaggta

SEQ ID NO: 61215 - DNA, 20 bp, Artificial Sequence
  Description of Artificial Sequence: Synthetic oligonucleotide
  Target: ATXN2; (-) strand; PAM type: YTN; PAM sequence: TTA
aatacctagaattggaattg

SEQ ID NO: 61216 - DNA, 20 bp, Artificial Sequence
  Description of Artificial Sequence: Synthetic oligonucleotide
  Target: ATXN2; (-) strand; PAM type: YTN; PAM sequence: TTA
gttaaatacctagaattgga

SEQ ID NO: 61217 - DNA, 20 bp, Artificial Sequence
  Description of Artificial Sequence: Synthetic oligonucleotide
  Target: ATXN2; (-) strand; PAM type: YTN; PAM sequence: TTT
agttaaatacctagaattgg

SEQ ID NO: 61218 - DNA, 20 bp, Artificial Sequence
  Description of Artificial Sequence: Synthetic oligonucleotide
  Target: ATXN2; (-) strand; PAM type: YTN; PAM sequence: TTT
tagttaaatacctagaattg

SEQ ID NO: 61219 - DNA, 20 bp, Artificial Sequence
  Description of Artificial Sequence: Synthetic oligonucleotide
  Target: ATXN2; (-) strand; PAM type: YTN; PAM sequence: CTT
ttagttaaatacctagaatt

SEQ ID NO: 61220 - DNA, 20 bp, Artificial Sequence
  Description of Artificial Sequence: Synthetic oligonucleotide
  Target: ATXN2; (-) strand; PAM type: YTN; PAM sequence: TTC
ttttagttaaatacctagaa

SEQ ID NO: 61221 - DNA, 20 bp, Artificial Sequence
  Description of Artificial Sequence: Synthetic oligonucleotide
  Target: ATXN2; (-) strand; PAM type: YTN; PAM sequence: TTT
cttttagttaaatacctaga

SEQ ID NO: 61222 - DNA, 20 bp, Artificial Sequence
  Description of Artificial Sequence: Synthetic oligonucleotide
  Target: ATXN2; (-) strand; PAM type: YTN; PAM sequence: TTA
tttcttttagttaaatacct

SEQ ID NO: 61223 - DNA, 20 bp, Artificial Sequence
  Description of Artificial Sequence: Synthetic oligonucleotide
  Target: ATXN2; (-) strand; PAM type: YTN; PAM sequence: TTT
atttcttttagttaaatacc

SEQ ID NO: 61224 - DNA, 20 bp, Artificial Sequence
  Description of Artificial Sequence: Synthetic oligonucleotide
  Target: ATXN2; (-) strand; PAM type: YTN; PAM sequence: TTT
tatttcttttagttaaatac

SEQ ID NO: 61225 - DNA, 20 bp, Artificial Sequence
  Description of Artificial Sequence: Synthetic oligonucleotide
  Target: ATXN2; (-) strand; PAM type: YTN; PAM sequence: TTT
ttatttcttttagttaaata

SEQ ID NO: 61226 - DNA, 20 bp, Artificial Sequence
  Description of Artificial Sequence: Synthetic oligonucleotide
  Target: ATXN2; (-) strand; PAM type: YTN; PAM sequence: TTG
tgtttttatttcttttagtt

SEQ ID NO: 61227 - DNA, 20 bp, Artificial Sequence
  Description of Artificial Sequence: Synthetic oligonucleotide
  Target: ATXN2; (-) strand; PAM type: YTN; PAM sequence: TTT
gtgtttttatttcttttagt

SEQ ID NO: 61228 - DNA, 20 bp, Artificial Sequence
  Description of Artificial Sequence: Synthetic oligonucleotide
  Target: ATXN2; (-) strand; PAM type: YTN; PAM sequence: TTG
tgtacaagtgtttgtgtttt

SEQ ID NO: 61229 - DNA, 20 bp, Artificial Sequence
  Description of Artificial Sequence: Synthetic oligonucleotide
  Target: ATXN2; (-) strand; PAM type: YTN; PAM sequence: TTT
gtgtacaagtgtttgtgttt

SEQ ID NO: 61230 - DNA, 20 bp, Artificial Sequence
  Description of Artificial Sequence: Synthetic oligonucleotide
  Target: ATXN2; (-) strand; PAM type: YTN; PAM sequence: CTG
tgagcatttgtgtacaagtg

SEQ ID NO: 61231 - DNA, 20 bp, Artificial Sequence
  Description of Artificial Sequence: Synthetic oligonucleotide
  Target: ATXN2; (-) strand; PAM type: YTN; PAM sequence: CTG
ctgtgagcatttgtgtacaa

SEQ ID NO: 61232 - DNA, 20 bp, Artificial Sequence
  Description of Artificial Sequence: Synthetic oligonucleotide
  Target: ATXN2; (-) strand; PAM type: YTN; PAM sequence: TTA
tgaatgaagctgctgtgagc

SEQ ID NO: 61233 - DNA, 20 bp, Artificial Sequence
  Description of Artificial Sequence: Synthetic oligonucleotide
  Target: ATXN2; (-) strand; PAM type: YTN; PAM sequence: CTA
ttatgaatgaagctgctgtg

SEQ ID NO: 61234 - DNA, 20 bp, Artificial Sequence
  Description of Artificial Sequence: Synthetic oligonucleotide
  Target: ATXN2; (-) strand; PAM type: YTN; PAM sequence: TTG
gctattatgaatgaagctgc

SEQ ID NO: 61235 - DNA, 20 bp, Artificial Sequence
  Description of Artificial Sequence: Synthetic oligonucleotide
  Target: ATXN2; (-) strand; PAM type: YTN; PAM sequence: TTT
ggctattatgaatgaagctg

SEQ ID NO: 61236 - DNA, 20 bp, Artificial Sequence
  Description of Artificial Sequence: Synthetic oligonucleotide
  Target: ATXN2; (-) strand; PAM type: YTN; PAM sequence: TTT
tggctattatgaatgaagct

SEQ ID NO: 61237 - DNA, 20 bp, Artificial Sequence
  Description of Artificial Sequence: Synthetic oligonucleotide
  Target: ATXN2; (-) strand; PAM type: YTN; PAM sequence: CTT
ttggctattatgaatgaagc

SEQ ID NO: 61238 - DNA, 20 bp, Artificial Sequence
  Description of Artificial Sequence: Synthetic oligonucleotide
  Target: ATXN2; (-) strand; PAM type: YTN; PAM sequence: TTG
ccagcttttggctattatga

SEQ ID NO: 61239 - DNA, 20 bp, Artificial Sequence
  Description of Artificial Sequence: Synthetic oligonucleotide
  Target: ATXN2; (-) strand; PAM type: YTN; PAM sequence: TTA
ttgccagcttttggctatta

SEQ ID NO: 61240 - DNA, 20 bp, Artificial Sequence
  Description of Artificial Sequence: Synthetic oligonucleotide
  Target: ATXN2; (-) strand; PAM type: YTN; PAM sequence: TTG
agttattgccagcttttggc

SEQ ID NO: 61241 - DNA, 20 bp, Artificial Sequence
  Description of Artificial Sequence: Synthetic oligonucleotide
  Target: ATXN2; (-) strand; PAM type: YTN; PAM sequence: TTT
gagttattgccagcttttgg

SEQ ID NO: 61242 - DNA, 20 bp, Artificial Sequence
  Description of Artificial Sequence: Synthetic oligonucleotide
  Target: ATXN2; (-) strand; PAM type: YTN; PAM sequence: CTA
gtcgatgggcatttgagtta

SEQ ID NO: 61243 - DNA, 20 bp, Artificial Sequence
  Description of Artificial Sequence: Synthetic oligonucleotide
  Target: ATXN2; (-) strand; PAM type: YTN; PAM sequence: TTA
ctagtcgatgggcatttgag

SEQ ID NO: 61244 - DNA, 20 bp, Artificial Sequence
  Description of Artificial Sequence: Synthetic oligonucleotide
  Target: ATXN2; (-) strand; PAM type: YTN; PAM sequence: TTA
cccattactagtcgatgggc

SEQ ID NO: 61245 - DNA, 20 bp, Artificial Sequence
  Description of Artificial Sequence: Synthetic oligonucleotide
  Target: ATXN2; (-) strand; PAM type: YTN; PAM sequence: TTT
acccattactagtcgatggg

SEQ ID NO: 61246 - DNA, 20 bp, Artificial Sequence
  Description of Artificial Sequence: Synthetic oligonucleotide
  Target: ATXN2; (-) strand; PAM type: YTN; PAM sequence: TTA
atttacccattactagtcga

SEQ ID NO: 61247 - DNA, 20 bp, Artificial Sequence
  Description of Artificial Sequence: Synthetic oligonucleotide
  Target: ATXN2; (-) strand; PAM type: YTN; PAM sequence: TTA
taccacagttaatttaccca

SEQ ID NO: 61248 - DNA, 20 bp, Artificial Sequence
  Description of Artificial Sequence: Synthetic oligonucleotide
  Target: ATXN2; (-) strand; PAM type: YTN; PAM sequence: TTA
tgattataccacagttaatt

SEQ ID NO: 61249 - DNA, 20 bp, Artificial Sequence
  Description of Artificial Sequence: Synthetic oligonucleotide
  Target: ATXN2; (-) strand; PAM type: YTN; PAM sequence: TTT
atgattataccacagttaat

SEQ ID NO: 61250 - DNA, 20 bp, Artificial Sequence
  Description of Artificial Sequence: Synthetic oligonucleotide
  Target: ATXN2; (-) strand; PAM type: YTN; PAM sequence: TTT
tatgattataccacagttaa

SEQ ID NO: 61251 - DNA, 20 bp, Artificial Sequence
  Description of Artificial Sequence: Synthetic oligonucleotide
  Target: ATXN2; (-) strand; PAM type: YTN; PAM sequence: TTC
attttatgattataccacag

SEQ ID NO: 61252 - DNA, 20 bp, Artificial Sequence
  Description of Artificial Sequence: Synthetic oligonucleotide
  Target: ATXN2; (-) strand; PAM type: YTN; PAM sequence: TTT
cattttatgattataccaca

SEQ ID NO: 61253 - DNA, 20 bp, Artificial Sequence
  Description of Artificial Sequence: Synthetic oligonucleotide
  Target: ATXN2; (-) strand; PAM type: YTN; PAM sequence: CTG
ggtagcatttcattttatga

SEQ ID NO: 61254 - DNA, 20 bp, Artificial Sequence
  Description of Artificial Sequence: Synthetic oligonucleotide
  Target: ATXN2; (-) strand; PAM type: YTN; PAM sequence: TTG
ctgggtagcatttcatttta

SEQ ID NO: 61255 - DNA, 20 bp, Artificial Sequence
  Description of Artificial Sequence: Synthetic oligonucleotide
  Target: ATXN2; (-) strand; PAM type: YTN; PAM sequence: TTA
ttgctgggtagcatttcatt

SEQ ID NO: 61256 - DNA, 20 bp, Artificial Sequence
  Description of Artificial Sequence: Synthetic oligonucleotide
  Target: ATXN2; (-) strand; PAM type: YTN; PAM sequence: TTT
attgctgggtagcatttcat

SEQ ID NO: 61257 - DNA, 20 bp, Artificial Sequence
  Description of Artificial Sequence: Synthetic oligonucleotide
  Target: ATXN2; (-) strand; PAM type: YTN; PAM sequence: TTT
tattgctgggtagcatttca

SEQ ID NO: 61258 - DNA, 20 bp, Artificial Sequence
  Description of Artificial Sequence: Synthetic oligonucleotide
  Target: ATXN2; (-) strand; PAM type: YTN; PAM sequence: TTT
ttattgctgggtagcatttc

SEQ ID NO: 61259 - DNA, 20 bp, Artificial Sequence
  Description of Artificial Sequence: Synthetic oligonucleotide
  Target: ATXN2; (-) strand; PAM type: YTN; PAM sequence: CTT
tttattgctgggtagcattt

SEQ ID NO: 61260 - DNA, 20 bp, Artificial Sequence
  Description of Artificial Sequence: Synthetic oligonucleotide
  Target: ATXN2; (-) strand; PAM type: YTN; PAM sequence: TTC
ctttttattgctgggtagca

SEQ ID NO: 61261 - DNA, 20 bp, Artificial Sequence
  Description of Artificial Sequence: Synthetic oligonucleotide
  Target: ATXN2; (-) strand; PAM type: YTN; PAM sequence: TTA
ttcctttttattgctgggta

SEQ ID NO: 61262 - DNA, 20 bp, Artificial Sequence
  Description of Artificial Sequence: Synthetic oligonucleotide
  Target: ATXN2; (-) strand; PAM type: YTN; PAM sequence: CTT
attcctttttattgctgggt

SEQ ID NO: 61263 - DNA, 20 bp, Artificial Sequence
  Description of Artificial Sequence: Synthetic oligonucleotide
  Target: ATXN2; (-) strand; PAM type: YTN; PAM sequence: TTA
caggtgtgagtcaccgtgcc

SEQ ID NO: 61264 - DNA, 20 bp, Artificial Sequence
  Description of Artificial Sequence: Synthetic oligonucleotide
  Target: ATXN2; (-) strand; PAM type: YTN; PAM sequence: CTG
ggattacaggtgtgagtcac

SEQ ID NO: 61265 - DNA, 20 bp, Artificial Sequence
  Description of Artificial Sequence: Synthetic oligonucleotide
  Target: ATXN2; (-) strand; PAM type: YTN; PAM sequence: CTC
ccaaagtgctgggattacag

SEQ ID NO: 61266 - DNA, 20 bp, Artificial Sequence
  Description of Artificial Sequence: Synthetic oligonucleotide
  Target: ATXN2; (-) strand; PAM type: YTN; PAM sequence: TTG
gcctcccaaagtgctgggat

SEQ ID NO: 61267 - DNA, 20 bp, Artificial Sequence
  Description of Artificial Sequence: Synthetic oligonucleotide
  Target: ATXN2; (-) strand; PAM type: YTN; PAM sequence: CTT
ggcctcccaaagtgctggga

SEQ ID NO: 61268 - DNA, 20 bp, Artificial Sequence
  Description of Artificial Sequence: Synthetic oligonucleotide
  Target: ATXN2; (-) strand; PAM type: YTN; PAM sequence: CTG
ccttggcctcccaaagtgct

SEQ ID NO: 61269 - DNA, 20 bp, Artificial Sequence
  Description of Artificial Sequence: Synthetic oligonucleotide
  Target: ATXN2; (-) strand; PAM type: YTN; PAM sequence: CTG
accccaaatgatccacctgc

SEQ ID NO: 61270 - DNA, 20 bp, Artificial Sequence
  Description of Artificial Sequence: Synthetic oligonucleotide
  Target: ATXN2; (-) strand; PAM type: YTN; PAM sequence: CTC
ctgaccccaaatgatccacc

SEQ ID NO: 61271 - DNA, 20 bp, Artificial Sequence
  Description of Artificial Sequence: Synthetic oligonucleotide
  Target: ATXN2; (-) strand; PAM type: YTN; PAM sequence: CTC
aaactcctgaccccaaatga

SEQ ID NO: 61272 - DNA, 20 bp, Artificial Sequence
  Description of Artificial Sequence: Synthetic oligonucleotide
  Target: ATXN2; (-) strand; PAM type: YTN; PAM sequence: CTG
gtctcaaactcctgacccca

SEQ ID NO: 61273 - DNA, 20 bp, Artificial Sequence
  Description of Artificial Sequence: Synthetic oligonucleotide
  Target: ATXN2; (-) strand; PAM type: YTN; PAM sequence: TTG
gccaggctggtctcaaactc

SEQ ID NO: 61274 - DNA, 20 bp, Artificial Sequence
  Description of Artificial Sequence: Synthetic oligonucleotide
  Target: ATXN2; (-) strand; PAM type: YTN; PAM sequence: TTC
accatgttggccaggctggt

SEQ ID NO: 61275 - DNA, 20 bp, Artificial Sequence
  Description of Artificial Sequence: Synthetic oligonucleotide
  Target: ATXN2; (-) strand; PAM type: YTN; PAM sequence: TTT
caccatgttggccaggctgg

SEQ ID NO: 61276 - DNA, 20 bp, Artificial Sequence
  Description of Artificial Sequence: Synthetic oligonucleotide
  Target: ATXN2; (-) strand; PAM type: YTN; PAM sequence: TTA
gcagagacgggatttcacca

SEQ ID NO: 61277 - DNA, 20 bp, Artificial Sequence
  Description of Artificial Sequence: Synthetic oligonucleotide
  Target: ATXN2; (-) strand; PAM type: YTN; PAM sequence: TTT
agcagagacgggatttcacc

SEQ ID NO: 61278 - DNA, 20 bp, Artificial Sequence
  Description of Artificial Sequence: Synthetic oligonucleotide
  Target: ATXN2; (-) strand; PAM type: YTN; PAM sequence: TTT
tagcagagacgggatttcac

SEQ ID NO: 61279 - DNA, 20 bp, Artificial Sequence
  Description of Artificial Sequence: Synthetic oligonucleotide
  Target: ATXN2; (-) strand; PAM type: YTN; PAM sequence: TTT
ttagcagagacgggatttca

SEQ ID NO: 61280 - DNA, 20 bp, Artificial Sequence
  Description of Artificial Sequence: Synthetic oligonucleotide
  Target: ATXN2; (-) strand; PAM type: YTN; PAM sequence: TTT
tttagcagagacgggatttc

SEQ ID NO: 61281 - DNA, 20 bp, Artificial Sequence
  Description of Artificial Sequence: Synthetic oligonucleotide
  Target: ATXN2; (-) strand; PAM type: YTN; PAM sequence: TTT
ttttagcagagacgggattt

SEQ ID NO: 61282 - DNA, 20 bp, Artificial Sequence
  Description of Artificial Sequence: Synthetic oligonucleotide
  Target: ATXN2; (-) strand; PAM type: YTN; PAM sequence: TTT
tttttagcagagacgggatt

SEQ ID NO: 61283 - DNA, 20 bp, Artificial Sequence
  Description of Artificial Sequence: Synthetic oligonucleotide
  Target: ATXN2; (-) strand; PAM type: YTN; PAM sequence: TTT
ttttttagcagagacgggat

SEQ ID NO: 61284 - DNA, 20 bp, Artificial Sequence
  Description of Artificial Sequence: Synthetic oligonucleotide
  Target: ATXN2; (-) strand; PAM type: YTN; PAM sequence: TTT
tttttttagcagagacggga

SEQ ID NO: 61285 - DNA, 20 bp, Artificial Sequence
  Description of Artificial Sequence: Synthetic oligonucleotide
  Target: ATXN2; (-) strand; PAM type: YTN; PAM sequence: TTT
ttttttttagcagagacggg

SEQ ID NO: 61286 - DNA, 20 bp, Artificial Sequence
  Description of Artificial Sequence: Synthetic oligonucleotide
  Target: ATXN2; (-) strand; PAM type: YTN; PAM sequence: TTT
tttttttttagcagagacgg

SEQ ID NO: 61287 - DNA, 20 bp, Artificial Sequence
  Description of Artificial Sequence: Synthetic oligonucleotide
  Target: ATXN2; (-) strand; PAM type: YTN; PAM sequence: TTT
ttttttttttagcagagacg

SEQ ID NO: 61288 - DNA, 20 bp, Artificial Sequence
  Description of Artificial Sequence: Synthetic oligonucleotide
  Target: ATXN2; (-) strand; PAM type: YTN; PAM sequence: TTT
tttttttttttagcagagac

SEQ ID NO: 61289 - DNA, 20 bp, Artificial Sequence
  Description of Artificial Sequence: Synthetic oligonucleotide
  Target: ATXN2; (-) strand; PAM type: YTN; PAM sequence: TTT
ttttttttttttagcagaga

SEQ ID NO: 61290 - DNA, 20 bp, Artificial Sequence
  Description of Artificial Sequence: Synthetic oligonucleotide
  Target: ATXN2; (-) strand; PAM type: YTN; PAM sequence: TTT
tttttttttttttagcagag

SEQ ID NO: 61291 - DNA, 20 bp, Artificial Sequence
  Description of Artificial Sequence: Synthetic oligonucleotide
  Target: ATXN2; (-) strand; PAM type: YTN; PAM sequence: TTT
ttttttttttttttagcaga

SEQ ID NO: 61292 - DNA, 20 bp, Artificial Sequence
  Description of Artificial Sequence: Synthetic oligonucleotide
  Target: ATXN2; (-) strand; PAM type: YTN; PAM sequence: TTT
tttttttttttttttagcag

SEQ ID NO: 61293 - DNA, 20 bp, Artificial Sequence
  Description of Artificial Sequence: Synthetic oligonucleotide
  Target: ATXN2; (-) strand; PAM type: YTN; PAM sequence: TTT
ttttttttttttttttagca

SEQ ID NO: 61294 - DNA, 20 bp, Artificial Sequence
  Description of Artificial Sequence: Synthetic oligonucleotide
  Target: ATXN2; (-) strand; PAM type: YTN; PAM sequence: TTT
tttttttttttttttttagc

SEQ ID NO: 61295 - DNA, 20 bp, Artificial Sequence
  Description of Artificial Sequence: Synthetic oligonucleotide
  Target: ATXN2; (-) strand; PAM type: YTN; PAM sequence: TTT
ttttttttttttttttttag

SEQ ID NO: 61296 - DNA, 20 bp, Artificial Sequence
  Description of Artificial Sequence: Synthetic oligonucleotide
  Target: ATXN2; (-) strand; PAM type: YTN; PAM sequence: TTT
ttttttttttttttttttta

SEQ ID NO: 61297 - DNA, 20 bp, Artificial Sequence
  Description of Artificial Sequence: Synthetic oligonucleotide
  Target: ATXN2; (-) strand; PAM type: YTN; PAM sequence: TTT
tttttttttttttttttttt

SEQ ID NO: 61298 - DNA, 20 bp, Artificial Sequence
  Description of Artificial Sequence: Synthetic oligonucleotide
  Target: ATXN2; (-) strand; PAM type: YTN; PAM sequence: TTT
tttttttttttttttttttt

SEQ ID NO: 61299 - DNA, 20 bp, Artificial Sequence
  Description of Artificial Sequence: Synthetic oligonucleotide
  Target: ATXN2; (-) strand; PAM type: YTN; PAM sequence: TTT
tttttttttttttttttttt

SEQ ID NO: 61300 - DNA, 20 bp, Artificial Sequence
  Description of Artificial Sequence: Synthetic oligonucleotide
  Target: ATXN2; (-) strand; PAM type: YTN; PAM sequence: TTT
tttttttttttttttttttt

SEQ ID NO: 61301 - DNA, 20 bp, Artificial Sequence
  Description of Artificial Sequence: Synthetic oligonucleotide
  Target: ATXN2; (-) strand; PAM type: YTN; PAM sequence: CTT
tttttttttttttttttttt

SEQ ID NO: 61302 - DNA, 20 bp, Artificial Sequence
  Description of Artificial Sequence: Synthetic oligonucleotide
  Target: ATXN2; (-) strand; PAM type: YTN; PAM sequence: CTC
tttttttttttttttttttt

SEQ ID NO: 61303 - DNA, 20 bp, Artificial Sequence
  Description of Artificial Sequence: Synthetic oligonucleotide
  Target: ATXN2; (-) strand; PAM type: YTN; PAM sequence: CTC
tctttttttttttttttttt

SEQ ID NO: 61304 - DNA, 20 bp, Artificial Sequence
  Description of Artificial Sequence: Synthetic oligonucleotide
  Target: ATXN2; (-) strand; PAM type: YTN; PAM sequence: CTC
tctctttttttttttttttt

SEQ ID NO: 61305 - DNA, 20 bp, Artificial Sequence
  Description of Artificial Sequence: Synthetic oligonucleotide
  Target: ATXN2; (-) strand; PAM type: YTN; PAM sequence: CTC
tctctctttttttttttttt

SEQ ID NO: 61306 - DNA, 20 bp, Artificial Sequence
  Description of Artificial Sequence: Synthetic oligonucleotide
  Target: ATXN2; (-) strand; PAM type: YTN; PAM sequence: TTG
tctctctctctttttttttt

SEQ ID NO: 61307 - DNA, 20 bp, Artificial Sequence
  Description of Artificial Sequence: Synthetic oligonucleotide
  Target: ATXN2; (-) strand; PAM type: YTN; PAM sequence: TTT
gtctctctctcttttttttt

SEQ ID NO: 61308 - DNA, 20 bp, Artificial Sequence
  Description of Artificial Sequence: Synthetic oligonucleotide
  Target: ATXN2; (-) strand; PAM type: YTN; PAM sequence: TTT
tgtctctctctctttttttt

SEQ ID NO: 61309 - DNA, 20 bp, Artificial Sequence
  Description of Artificial Sequence: Synthetic oligonucleotide
  Target: ATXN2; (-) strand; PAM type: YTN; PAM sequence: TTT
ttgtctctctctcttttttt

SEQ ID NO: 61310 - DNA, 20 bp, Artificial Sequence
  Description of Artificial Sequence: Synthetic oligonucleotide
  Target: ATXN2; (-) strand; PAM type: YTN; PAM sequence: CTA
atttttgtctctctctcttt

SEQ ID NO: 61311 - DNA, 20 bp, Artificial Sequence
  Description of Artificial Sequence: Synthetic oligonucleotide
  Target: ATXN2; (-) strand; PAM type: YTN; PAM sequence: CTG
gctaatttttgtctctctct

SEQ ID NO: 61312 - DNA, 20 bp, Artificial Sequence
  Description of Artificial Sequence: Synthetic oligonucleotide
  Target: ATXN2; (-) strand; PAM type: YTN; PAM sequence: TTA
caggcacgtgccaccacacc

SEQ ID NO: 61313 - DNA, 20 bp, Artificial Sequence
  Description of Artificial Sequence: Synthetic oligonucleotide
  Target: ATXN2; (-) strand; PAM type: YTN; PAM sequence: CTG
ggattacaggcacgtgccac

SEQ ID NO: 61314 - DNA, 20 bp, Artificial Sequence
  Description of Artificial Sequence: Synthetic oligonucleotide
  Target: ATXN2; (-) strand; PAM type: YTN; PAM sequence: CTC
ccaagtagctgggattacag

SEQ ID NO: 61315 - DNA, 20 bp, Artificial Sequence
  Description of Artificial Sequence: Synthetic oligonucleotide
  Target: ATXN2; (-) strand; PAM type: YTN; PAM sequence: CTC
agcctcccaagtagctggga

SEQ ID NO: 61316 - DNA, 20 bp, Artificial Sequence
  Description of Artificial Sequence: Synthetic oligonucleotide
  Target: ATXN2; (-) strand; PAM type: YTN; PAM sequence: CTG
cctcagcctcccaagtagct

SEQ ID NO: 61317 - DNA, 20 bp, Artificial Sequence
  Description of Artificial Sequence: Synthetic oligonucleotide
  Target: ATXN2; (-) strand; PAM type: YTN; PAM sequence: TTC
cactgcctcagcctcccaag

SEQ ID NO: 61318 - DNA, 20 bp, Artificial Sequence
  Description of Artificial Sequence: Synthetic oligonucleotide
  Target: ATXN2; (-) strand; PAM type: YTN; PAM sequence: CTG
caattccactgcctcagcct

SEQ ID NO: 61319 - DNA, 20 bp, Artificial Sequence
  Description of Artificial Sequence: Synthetic oligonucleotide
  Target: ATXN2; (-) strand; PAM type: YTN; PAM sequence: TTG
gtctgcaattccactgcctc

SEQ ID NO: 61320 - DNA, 20 bp, Artificial Sequence
  Description of Artificial Sequence: Synthetic oligonucleotide
  Target: ATXN2; (-) strand; PAM type: YTN; PAM sequence: CTG
tgtcccagaattggtctgca

SEQ ID NO: 61321 - DNA, 20 bp, Artificial Sequence
  Description of Artificial Sequence: Synthetic oligonucleotide
  Target: ATXN2; (-) strand; PAM type: YTN; PAM sequence: TTC
tgtgtcccagaattggtctg

SEQ ID NO: 61322 - DNA, 20 bp, Artificial Sequence
  Description of Artificial Sequence: Synthetic oligonucleotide
  Target: ATXN2; (-) strand; PAM type: YTN; PAM sequence: TTG
ttctgtgtcccagaattggt

SEQ ID NO: 61323 - DNA, 20 bp, Artificial Sequence
  Description of Artificial Sequence: Synthetic oligonucleotide
  Target: ATXN2; (-) strand; PAM type: YTN; PAM sequence: CTT
gttctgtgtcccagaattgg

SEQ ID NO: 61324 - DNA, 20 bp, Artificial Sequence
  Description of Artificial Sequence: Synthetic oligonucleotide
  Target: ATXN2; (-) strand; PAM type: YTN; PAM sequence: TTG
agatggagtcttgttctgtg

SEQ ID NO: 61325 - DNA, 20 bp, Artificial Sequence
  Description of Artificial Sequence: Synthetic oligonucleotide
  Target: ATXN2; (-) strand; PAM type: YTN; PAM sequence: TTT
gagatggagtcttgttctgt

SEQ ID NO: 61326 - DNA, 20 bp, Artificial Sequence
  Description of Artificial Sequence: Synthetic oligonucleotide
  Target: ATXN2; (-) strand; PAM type: YTN; PAM sequence: TTT
tgagatggagtcttgttctg

SEQ ID NO: 61327 - DNA, 20 bp, Artificial Sequence
  Description of Artificial Sequence: Synthetic oligonucleotide
  Target: ATXN2; (-) strand; PAM type: YTN; PAM sequence: TTT
ttgagatggagtcttgttct

SEQ ID NO: 61328 - DNA, 20 bp, Artificial Sequence
  Description of Artificial Sequence: Synthetic oligonucleotide
  Target: ATXN2; (-) strand; PAM type: YTN; PAM sequence: TTG
tttttgagatggagtcttgt

SEQ ID NO: 61329 - DNA, 20 bp, Artificial Sequence
  Description of Artificial Sequence: Synthetic oligonucleotide
  Target: ATXN2; (-) strand; PAM type: YTN; PAM sequence: TTT
gtttttgagatggagtcttg

SEQ ID NO: 61330 - DNA, 20 bp, Artificial Sequence
  Description of Artificial Sequence: Synthetic oligonucleotide
  Target: ATXN2; (-) strand; PAM type: YTN; PAM sequence: TTG
tttgtttttgagatggagtc

SEQ ID NO: 61331 - DNA, 20 bp, Artificial Sequence
  Description of Artificial Sequence: Synthetic oligonucleotide
  Target: ATXN2; (-) strand; PAM type: YTN; PAM sequence: TTT
gtttgtttttgagatggagt

SEQ ID NO: 61332 - DNA, 20 bp, Artificial Sequence
  Description of Artificial Sequence: Synthetic oligonucleotide
  Target: ATXN2; (-) strand; PAM type: YTN; PAM sequence: TTG
tttgtttgtttttgagatgg

SEQ ID NO: 61333 - DNA, 20 bp, Artificial Sequence
  Description of Artificial Sequence: Synthetic oligonucleotide
  Target: ATXN2; (-) strand; PAM type: YTN; PAM sequence: TTT
gtttgtttgtttttgagatg

SEQ ID NO: 61334 - DNA, 20 bp, Artificial Sequence
  Description of Artificial Sequence: Synthetic oligonucleotide
  Target: ATXN2; (-) strand; PAM type: YTN; PAM sequence: TTG
tttgtttgtttgtttttgag

SEQ ID NO: 61335 - DNA, 20 bp, Artificial Sequence
  Description of Artificial Sequence: Synthetic oligonucleotide
  Target: ATXN2; (-) strand; PAM type: YTN; PAM sequence: TTT
gtttgtttgtttgtttttga

SEQ ID NO: 61336 - DNA, 20 bp, Artificial Sequence
  Description of Artificial Sequence: Synthetic oligonucleotide
  Target: ATXN2; (-) strand; PAM type: YTN; PAM sequence: TTT
tgtttgtttgtttgtttttg

SEQ ID NO: 61337 - DNA, 20 bp, Artificial Sequence
  Description of Artificial Sequence: Synthetic oligonucleotide
  Target: ATXN2; (-) strand; PAM type: YTN; PAM sequence: TTT
ttgtttgtttgtttgttttt

SEQ ID NO: 61338 - DNA, 20 bp, Artificial Sequence
  Description of Artificial Sequence: Synthetic oligonucleotide
  Target: ATXN2; (-) strand; PAM type: YTN; PAM sequence: CTT
tttgtttgtttgtttgtttt

SEQ ID NO: 61339 - DNA, 20 bp, Artificial Sequence
  Description of Artificial Sequence: Synthetic oligonucleotide
  Target: ATXN2; (-) strand; PAM type: YTN; PAM sequence: TTC
ctttttgtttgtttgtttgt

SEQ ID NO: 61340 - DNA, 20 bp, Artificial Sequence
  Description of Artificial Sequence: Synthetic oligonucleotide
  Target: ATXN2; (-) strand; PAM type: YTN; PAM sequence: TTA
ttcctttttgtttgtttgtt

SEQ ID NO: 61341 - DNA, 20 bp, Artificial Sequence
  Description of Artificial Sequence: Synthetic oligonucleotide
  Target: ATXN2; (-) strand; PAM type: YTN; PAM sequence: CTT
attcctttttgtttgtttgt

SEQ ID NO: 61342 - DNA, 20 bp, Artificial Sequence
  Description of Artificial Sequence: Synthetic oligonucleotide
  Target: ATXN2; (-) strand; PAM type: YTN; PAM sequence: TTA
gtatcagcttattccttttt

SEQ ID NO: 61343 - DNA, 20 bp, Artificial Sequence
  Description of Artificial Sequence: Synthetic oligonucleotide
  Target: ATXN2; (-) strand; PAM type: YTN; PAM sequence: TTC
atgttagtatcagcttattc

SEQ ID NO: 61344 - DNA, 20 bp, Artificial Sequence
  Description of Artificial Sequence: Synthetic oligonucleotide
  Target: ATXN2; (-) strand; PAM type: YTN; PAM sequence: TTT
catgttagtatcagcttatt

SEQ ID NO: 61345 - DNA, 20 bp, Artificial Sequence
  Description of Artificial Sequence: Synthetic oligonucleotide
  Target: ATXN2; (-) strand; PAM type: YTN; PAM sequence: TTG
aatttcatgttagtatcagc

SEQ ID NO: 61346 - DNA, 20 bp, Artificial Sequence
  Description of Artificial Sequence: Synthetic oligonucleotide
  Target: ATXN2; (-) strand; PAM type: YTN; PAM sequence: TTT
gaatttcatgttagtatcag

SEQ ID NO: 61347 - DNA, 20 bp, Artificial Sequence
  Description of Artificial Sequence: Synthetic oligonucleotide
  Target: ATXN2; (-) strand; PAM type: YTN; PAM sequence: CTA
aacagtgtagtaatttgaat

SEQ ID NO: 61348 - DNA, 20 bp, Artificial Sequence
  Description of Artificial Sequence: Synthetic oligonucleotide
  Target: ATXN2; (-) strand; PAM type: YTN; PAM sequence: TTC
atatgtgtgtcctaaacagt

SEQ ID NO: 61349 - DNA, 20 bp, Artificial Sequence
  Description of Artificial Sequence: Synthetic oligonucleotide
  Target: ATXN2; (-) strand; PAM type: YTN; PAM sequence: TTT
catatgtgtgtcctaaacag

SEQ ID NO: 61350 - DNA, 20 bp, Artificial Sequence
  Description of Artificial Sequence: Synthetic oligonucleotide
  Target: ATXN2; (-) strand; PAM type: YTN; PAM sequence: TTG
gtatataatttcatatgtgt

SEQ ID NO: 61351 - DNA, 20 bp, Artificial Sequence
  Description of Artificial Sequence: Synthetic oligonucleotide
  Target: ATXN2; (-) strand; PAM type: YTN; PAM sequence: CTT
ggtatataatttcatatgtg

SEQ ID NO: 61352 - DNA, 20 bp, Artificial Sequence
  Description of Artificial Sequence: Synthetic oligonucleotide
  Target: ATXN2; (-) strand; PAM type: YTN; PAM sequence: TTG
gacaagcttggtatataatt

SEQ ID NO: 61353 - DNA, 20 bp, Artificial Sequence
  Description of Artificial Sequence: Synthetic oligonucleotide
  Target: ATXN2; (-) strand; PAM type: YTN; PAM sequence: TTC
aaagccgtcccaggacgcaa

SEQ ID NO: 61354 - DNA, 20 bp, Artificial Sequence
  Description of Artificial Sequence: Synthetic oligonucleotide
  Target: ATXN2; (-) strand; PAM type: YTN; PAM sequence: TTG
ggccacattcaaagccgtcc

SEQ ID NO: 61355 - DNA, 20 bp, Artificial Sequence
  Description of Artificial Sequence: Synthetic oligonucleotide
  Target: ATXN2; (-) strand; PAM type: YTN; PAM sequence: TTG
tgttgggccacattcaaagc

SEQ ID NO: 61356 - DNA, 20 bp, Artificial Sequence
  Description of Artificial Sequence: Synthetic oligonucleotide
  Target: ATXN2; (-) strand; PAM type: YTN; PAM sequence: TTT
gtgttgggccacattcaaag

SEQ ID NO: 61357 - DNA, 20 bp, Artificial Sequence
  Description of Artificial Sequence: Synthetic oligonucleotide
  Target: ATXN2; (-) strand; PAM type: YTN; PAM sequence: TTA
tgaatttgtgttgggccaca

SEQ ID NO: 61358 - DNA, 20 bp, Artificial Sequence
  Description of Artificial Sequence: Synthetic oligonucleotide
  Target: ATXN2; (-) strand; PAM type: YTN; PAM sequence: TTT
atgaatttgtgttgggccac

SEQ ID NO: 61359 - DNA, 20 bp, Artificial Sequence
  Description of Artificial Sequence: Synthetic oligonucleotide
  Target: ATXN2; (-) strand; PAM type: YTN; PAM sequence: TTA
agaaagtttatgaatttgtg

SEQ ID NO: 61360 - DNA, 20 bp, Artificial Sequence
  Description of Artificial Sequence: Synthetic oligonucleotide
  Target: ATXN2; (-) strand; PAM type: YTN; PAM sequence: TTT
aagaaagtttatgaatttgt

SEQ ID NO: 61361 - DNA, 20 bp, Artificial Sequence
  Description of Artificial Sequence: Synthetic oligonucleotide
  Target: ATXN2; (-) strand; PAM type: YTN; PAM sequence: TTT
taagaaagtttatgaatttg

SEQ ID NO: 61362 - DNA, 20 bp, Artificial Sequence
  Description of Artificial Sequence: Synthetic oligonucleotide
  Target: ATXN2; (-) strand; PAM type: YTN; PAM sequence: TTA
taatgttttaagaaagttta

SEQ ID NO: 61363 - DNA, 20 bp, Artificial Sequence
  Description of Artificial Sequence: Synthetic oligonucleotide
  Target: ATXN2; (-) strand; PAM type: YTN; PAM sequence: CTT
ataatgttttaagaaagttt

SEQ ID NO: 61364 - DNA, 20 bp, Artificial Sequence
  Description of Artificial Sequence: Synthetic oligonucleotide
  Target: ATXN2; (-) strand; PAM type: YTN; PAM sequence: CTG
atgaacaaaacaaaaaaaaa

SEQ ID NO: 61365 - DNA, 20 bp, Artificial Sequence
  Description of Artificial Sequence: Synthetic oligonucleotide
  Target: ATXN2; (-) strand; PAM type: YTN; PAM sequence: CTA
atgatagctgatgaacaaaa

SEQ ID NO: 61366 - DNA, 20 bp, Artificial Sequence
  Description of Artificial Sequence: Synthetic oligonucleotide
  Target: ATXN2; (-) strand; PAM type: YTN; PAM sequence: TTG
ggccacacataaaatacagt

SEQ ID NO: 61367 - DNA, 20 bp, Artificial Sequence
  Description of Artificial Sequence: Synthetic oligonucleotide
  Target: ATXN2; (-) strand; PAM type: YTN; PAM sequence: TTG
tgttgggccacacataaaat

SEQ ID NO: 61368 - DNA, 20 bp, Artificial Sequence
  Description of Artificial Sequence: Synthetic oligonucleotide
  Target: ATXN2; (-) strand; PAM type: YTN; PAM sequence: TTG
gaagaagaattgtgttgggc

SEQ ID NO: 61369 - DNA, 20 bp, Artificial Sequence
  Description of Artificial Sequence: Synthetic oligonucleotide
  Target: ATXN2; (-) strand; PAM type: YTN; PAM sequence: CTG
ggtcatattggaagaagaat

SEQ ID NO: 61370 - DNA, 20 bp, Artificial Sequence
  Description of Artificial Sequence: Synthetic oligonucleotide
  Target: ATXN2; (-) strand; PAM type: YTN; PAM sequence: TTC
cctgggtcatattggaagaa

SEQ ID NO: 61371 - DNA, 20 bp, Artificial Sequence
  Description of Artificial Sequence: Synthetic oligonucleotide
  Target: ATXN2; (-) strand; PAM type: YTN; PAM sequence: CTT
ccctgggtcatattggaaga

SEQ ID NO: 61372 - DNA, 20 bp, Artificial Sequence
  Description of Artificial Sequence: Synthetic oligonucleotide
  Target: ATXN2; (-) strand; PAM type: YTN; PAM sequence: TTG
gcttccctgggtcatattgg

SEQ ID NO: 61373 - DNA, 20 bp, Artificial Sequence
  Description of Artificial Sequence: Synthetic oligonucleotide
  Target: ATXN2; (-) strand; PAM type: YTN; PAM sequence: TTT
ggcttccctgggtcatattg

SEQ ID NO: 61374 - DNA, 20 bp, Artificial Sequence
  Description of Artificial Sequence: Synthetic oligonucleotide
  Target: ATXN2; (-) strand; PAM type: YTN; PAM sequence: TTT
tggcttccctgggtcatatt

SEQ ID NO: 61375 - DNA, 20 bp, Artificial Sequence
  Description of Artificial Sequence: Synthetic oligonucleotide
  Target: ATXN2; (-) strand; PAM type: YTN; PAM sequence: CTT
ttggcttccctgggtcatat

SEQ ID NO: 61376 - DNA, 20 bp, Artificial Sequence
  Description of Artificial Sequence: Synthetic oligonucleotide
  Target: ATXN2; (-) strand; PAM type: YTN; PAM sequence: TTC
aatcttttggcttccctggg

SEQ ID NO: 61377 - DNA, 20 bp, Artificial Sequence
  Description of Artificial Sequence: Synthetic oligonucleotide
  Target: ATXN2; (-) strand; PAM type: YTN; PAM sequence: TTA
ataaatggaatcaaacagcg

SEQ ID NO: 61378 - DNA, 20 bp, Artificial Sequence
  Description of Artificial Sequence: Synthetic oligonucleotide
  Target: ATXN2; (-) strand; PAM type: YTN; PAM sequence: TTT
aataaatggaatcaaacagc

SEQ ID NO: 61379 - DNA, 20 bp, Artificial Sequence
  Description of Artificial Sequence: Synthetic oligonucleotide
  Target: ATXN2; (-) strand; PAM type: YTN; PAM sequence: TTT
taataaatggaatcaaacag

SEQ ID NO: 61380 - DNA, 20 bp, Artificial Sequence
  Description of Artificial Sequence: Synthetic oligonucleotide
  Target: ATXN2; (-) strand; PAM type: YTN; PAM sequence: TTT
ttaataaatggaatcaaaca

SEQ ID NO: 61381 - DNA, 20 bp, Artificial Sequence
  Description of Artificial Sequence: Synthetic oligonucleotide
  Target: ATXN2; (-) strand; PAM type: YTN; PAM sequence: TTT
tttaataaatggaatcaaac

SEQ ID NO: 61382 - DNA, 20 bp, Artificial Sequence
  Description of Artificial Sequence: Synthetic oligonucleotide
  Target: ATXN2; (-) strand; PAM type: YTN; PAM sequence: TTT
ttttaataaatggaatcaaa

SEQ ID NO: 61383 - DNA, 20 bp, Artificial Sequence
  Description of Artificial Sequence: Synthetic oligonucleotide
  Target: ATXN2; (-) strand; PAM type: YTN; PAM sequence: TTT
tttttaataaatggaatcaa

SEQ ID NO: 61384 - DNA, 20 bp, Artificial Sequence
  Description of Artificial Sequence: Synthetic oligonucleotide
  Target: ATXN2; (-) strand; PAM type: YTN; PAM sequence: TTT
ttttttaataaatggaatca

SEQ ID NO: 61385 - DNA, 20 bp, Artificial Sequence
  Description of Artificial Sequence: Synthetic oligonucleotide
  Target: ATXN2; (-) strand; PAM type: YTN; PAM sequence: TTT
tttttttaataaatggaatc

SEQ ID NO: 61386 - DNA, 20 bp, Artificial Sequence
  Description of Artificial Sequence: Synthetic oligonucleotide
  Target: ATXN2; (-) strand; PAM type: YTN; PAM sequence: TTT
ttttttttaataaatggaat

SEQ ID NO: 61387 - DNA, 20 bp, Artificial Sequence
  Description of Artificial Sequence: Synthetic oligonucleotide
  Target: ATXN2; (-) strand; PAM type: YTN; PAM sequence: TTT
tttttttttaataaatggaa

SEQ ID NO: 61388 - DNA, 20 bp, Artificial Sequence
  Description of Artificial Sequence: Synthetic oligonucleotide
  Target: ATXN2; (-) strand; PAM type: YTN; PAM sequence: TTT
ttttttttttaataaatgga

SEQ ID NO: 61389 - DNA, 20 bp, Artificial Sequence
  Description of Artificial Sequence: Synthetic oligonucleotide
  Target: ATXN2; (-) strand; PAM type: YTN; PAM sequence: TTT
tttttttttttaataaatgg

SEQ ID NO: 61390 - DNA, 20 bp, Artificial Sequence
  Description of Artificial Sequence: Synthetic oligonucleotide
  Target: ATXN2; (-) strand; PAM type: YTN; PAM sequence: TTT
ttttttttttttaataaatg

SEQ ID NO: 61391 - DNA, 20 bp, Artificial Sequence
  Description of Artificial Sequence: Synthetic oligonucleotide
  Target: ATXN2; (-) strand; PAM type: YTN; PAM sequence: TTT
tttttttttttttaataaat

SEQ ID NO: 61392 - DNA, 20 bp, Artificial Sequence
  Description of Artificial Sequence: Synthetic oligonucleotide
  Target: ATXN2; (-) strand; PAM type: YTN; PAM sequence: CTA
gattttttttttttttttaa

SEQ ID NO: 61393 - DNA, 20 bp, Artificial Sequence
  Description of Artificial Sequence: Synthetic oligonucleotide
  Target: ATXN2; (-) strand; PAM type: YTN; PAM sequence: CTC
agccagcccctagatttttt

SEQ ID NO: 61394 - DNA, 20 bp, Artificial Sequence
  Description of Artificial Sequence: Synthetic oligonucleotide
  Target: ATXN2; (-) strand; PAM type: YTN; PAM sequence: TTA
cagatgtgagccacctcagc

SEQ ID NO: 61395 - DNA, 20 bp, Artificial Sequence
  Description of Artificial Sequence: Synthetic oligonucleotide
  Target: ATXN2; (-) strand; PAM type: YTN; PAM sequence: CTA
ggattacagatgtgagccac

SEQ ID NO: 61396 - DNA, 20 bp, Artificial Sequence
  Description of Artificial Sequence: Synthetic oligonucleotide
  Target: ATXN2; (-) strand; PAM type: YTN; PAM sequence: CTC
ccagagtgctaggattacag

SEQ ID NO: 61397 - DNA, 20 bp, Artificial Sequence
  Description of Artificial Sequence: Synthetic oligonucleotide
  Target: ATXN2; (-) strand; PAM type: YTN; PAM sequence: CTC
agcctcccagagtgctagga

SEQ ID NO: 61398 - DNA, 20 bp, Artificial Sequence
  Description of Artificial Sequence: Synthetic oligonucleotide
  Target: ATXN2; (-) strand; PAM type: YTN; PAM sequence: CTC
acctcagcctcccagagtgc

SEQ ID NO: 61399 - DNA, 20 bp, Artificial Sequence
  Description of Artificial Sequence: Synthetic oligonucleotide
  Target: ATXN2; (-) strand; PAM type: YTN; PAM sequence: TTG
agctcacctcagcctcccag

SEQ ID NO: 61400 - DNA, 20 bp, Artificial Sequence
  Description of Artificial Sequence: Synthetic oligonucleotide
  Target: ATXN2; (-) strand; PAM type: YTN; PAM sequence: CTT
gagctcacctcagcctccca

SEQ ID NO: 61401 - DNA, 20 bp, Artificial Sequence
  Description of Artificial Sequence: Synthetic oligonucleotide
  Target: ATXN2; (-) strand; PAM type: YTN; PAM sequence: CTC
ttgagctcacctcagcctcc

SEQ ID NO: 61402 - DNA, 20 bp, Artificial Sequence
  Description of Artificial Sequence: Synthetic oligonucleotide
  Target: ATXN2; (-) strand; PAM type: YTN; PAM sequence: CTC
gaactcttgagctcacctca

SEQ ID NO: 61403 - DNA, 20 bp, Artificial Sequence
  Description of Artificial Sequence: Synthetic oligonucleotide
  Target: ATXN2; (-) strand; PAM type: YTN; PAM sequence: TTG
gtctcgaactcttgagctca

SEQ ID NO: 61404 - DNA, 20 bp, Artificial Sequence
  Description of Artificial Sequence: Synthetic oligonucleotide
  Target: ATXN2; (-) strand; PAM type: YTN; PAM sequence: TTG
cccaggttggtctcgaactc

SEQ ID NO: 61405 - DNA, 20 bp, Artificial Sequence
  Description of Artificial Sequence: Synthetic oligonucleotide
  Target: ATXN2; (-) strand; PAM type: YTN; PAM sequence: TTA
tattgcccaggttggtctcg

SEQ ID NO: 61406 - DNA, 20 bp, Artificial Sequence
  Description of Artificial Sequence: Synthetic oligonucleotide
  Target: ATXN2; (-) strand; PAM type: YTN; PAM sequence: CTC
attatattgcccaggttggt

SEQ ID NO: 61407 - DNA, 20 bp, Artificial Sequence
  Description of Artificial Sequence: Synthetic oligonucleotide
  Target: ATXN2; (-) strand; PAM type: YTN; PAM sequence: TTG
gagacgtctcattatattgc

SEQ ID NO: 61408 - DNA, 20 bp, Artificial Sequence
  Description of Artificial Sequence: Synthetic oligonucleotide
  Target: ATXN2; (-) strand; PAM type: YTN; PAM sequence: TTT
ggagacgtctcattatattg

SEQ ID NO: 61409 - DNA, 20 bp, Artificial Sequence
  Description of Artificial Sequence: Synthetic oligonucleotide
  Target: ATXN2; (-) strand; PAM type: YTN; PAM sequence: TTT
tggagacgtctcattatatt

SEQ ID NO: 61410 - DNA, 20 bp, Artificial Sequence
  Description of Artificial Sequence: Synthetic oligonucleotide
  Target: ATXN2; (-) strand; PAM type: YTN; PAM sequence: TTT
ttggagacgtctcattatat

SEQ ID NO: 61411 - DNA, 20 bp, Artificial Sequence
  Description of Artificial Sequence: Synthetic oligonucleotide
  Target: ATXN2; (-) strand; PAM type: YTN; PAM sequence: TTT
tttggagacgtctcattata

SEQ ID NO: 61412 - DNA, 20 bp, Artificial Sequence
  Description of Artificial Sequence: Synthetic oligonucleotide
  Target: ATXN2; (-) strand; PAM type: YTN; PAM sequence: TTT
ttttggagacgtctcattat

SEQ ID NO: 61413 - DNA, 20 bp, Artificial Sequence
  Description of Artificial Sequence: Synthetic oligonucleotide
  Target: ATXN2; (-) strand; PAM type: YTN; PAM sequence: CTT
tttttggagacgtctcatta

SEQ ID NO: 61414 - DNA, 20 bp, Artificial Sequence
  Description of Artificial Sequence: Synthetic oligonucleotide
  Target: ATXN2; (-) strand; PAM type: YTN; PAM sequence: TTA
cgtaaaaaaatctttttttg

SEQ ID NO: 61415 - DNA, 20 bp, Artificial Sequence
  Description of Artificial Sequence: Synthetic oligonucleotide
  Target: ATXN2; (-) strand; PAM type: YTN; PAM sequence: TTT
acgtaaaaaaatcttttttt

SEQ ID NO: 61416 - DNA, 20 bp, Artificial Sequence
  Description of Artificial Sequence: Synthetic oligonucleotide
  Target: ATXN2; (-) strand; PAM type: YTN; PAM sequence: TTT
tacgtaaaaaaatctttttt

SEQ ID NO: 61417 - DNA, 20 bp, Artificial Sequence
  Description of Artificial Sequence: Synthetic oligonucleotide
  Target: ATXN2; (-) strand; PAM type: YTN; PAM sequence: TTT
ttacgtaaaaaaatcttttt

SEQ ID NO: 61418 - DNA, 20 bp, Artificial Sequence
  Description of Artificial Sequence: Synthetic oligonucleotide
  Target: ATXN2; (-) strand; PAM type: YTN; PAM sequence: TTT
tttacgtaaaaaaatctttt

SEQ ID NO: 61419 - DNA, 20 bp, Artificial Sequence
  Description of Artificial Sequence: Synthetic oligonucleotide
  Target: ATXN2; (-) strand; PAM type: YTN; PAM sequence: TTT
ttttacgtaaaaaaatcttt

SEQ ID NO: 61420 - DNA, 20 bp, Artificial Sequence
  Description of Artificial Sequence: Synthetic oligonucleotide
  Target: ATXN2; (-) strand; PAM type: YTN; PAM sequence: CTT
tttttacgtaaaaaaatctt

SEQ ID NO: 61421 - DNA, 20 bp, Artificial Sequence
  Description of Artificial Sequence: Synthetic oligonucleotide
  Target: ATXN2; (-) strand; PAM type: YTN; PAM sequence: TTC
tttttttacgtaaaaaaatc

SEQ ID NO: 61422 - DNA, 20 bp, Artificial Sequence
  Description of Artificial Sequence: Synthetic oligonucleotide
  Target: ATXN2; (-) strand; PAM type: YTN; PAM sequence: TTT
ctttttttacgtaaaaaaat

SEQ ID NO: 61423 - DNA, 20 bp, Artificial Sequence
  Description of Artificial Sequence: Synthetic oligonucleotide
  Target: ATXN2; (-) strand; PAM type: YTN; PAM sequence: TTT
tctttttttacgtaaaaaaa

SEQ ID NO: 61424 - DNA, 20 bp, Artificial Sequence
  Description of Artificial Sequence: Synthetic oligonucleotide
  Target: ATXN2; (-) strand; PAM type: YTN; PAM sequence: TTT
ttctttttttacgtaaaaaa

SEQ ID NO: 61425 - DNA, 20 bp, Artificial Sequence
  Description of Artificial Sequence: Synthetic oligonucleotide
  Target: ATXN2; (-) strand; PAM type: YTN; PAM sequence: TTT
tttctttttttacgtaaaaa

SEQ ID NO: 61426 - DNA, 20 bp, Artificial Sequence
  Description of Artificial Sequence: Synthetic oligonucleotide
  Target: ATXN2; (-) strand; PAM type: YTN; PAM sequence: TTT
ttttctttttttacgtaaaa

SEQ ID NO: 61427 - DNA, 20 bp, Artificial Sequence
  Description of Artificial Sequence: Synthetic oligonucleotide
  Target: ATXN2; (-) strand; PAM type: YTN; PAM sequence: TTT
tttttctttttttacgtaaa

SEQ ID NO: 61428 - DNA, 20 bp, Artificial Sequence
  Description of Artificial Sequence: Synthetic oligonucleotide
  Target: ATXN2; (-) strand; PAM type: YTN; PAM sequence: TTT
ttttttctttttttacgtaa

SEQ ID NO: 61429 - DNA, 20 bp, Artificial Sequence
  Description of Artificial Sequence: Synthetic oligonucleotide
  Target: ATXN2; (-) strand; PAM type: YTN; PAM sequence: TTT
tttttttctttttttacgta

SEQ ID NO: 61430 - DNA, 20 bp, Artificial Sequence
  Description of Artificial Sequence: Synthetic oligonucleotide
  Target: ATXN2; (-) strand; PAM type: YTN; PAM sequence: TTT
ttttttttctttttttacgt

SEQ ID NO: 61431 - DNA, 20 bp, Artificial Sequence
  Description of Artificial Sequence: Synthetic oligonucleotide
  Target: ATXN2; (-) strand; PAM type: YTN; PAM sequence: TTA
ggtttttttttttctttttt

SEQ ID NO: 61432 - DNA, 20 bp, Artificial Sequence
  Description of Artificial Sequence: Synthetic oligonucleotide
  Target: ATXN2; (-) strand; PAM type: YTN; PAM sequence: TTG
attaggtttttttttttctt

SEQ ID NO: 61433 - DNA, 20 bp, Artificial Sequence
  Description of Artificial Sequence: Synthetic oligonucleotide
  Target: ATXN2; (-) strand; PAM type: YTN; PAM sequence: TTT
gattaggtttttttttttct

SEQ ID NO: 61434 - DNA, 20 bp, Artificial Sequence
  Description of Artificial Sequence: Synthetic oligonucleotide
  Target: ATXN2; (-) strand; PAM type: YTN; PAM sequence: TTT
tgattaggtttttttttttc

SEQ ID NO: 61435 - DNA, 20 bp, Artificial Sequence
  Description of Artificial Sequence: Synthetic oligonucleotide
  Target: ATXN2; (-) strand; PAM type: YTN; PAM sequence: TTT
ttgattaggttttttttttt

SEQ ID NO: 61436 - DNA, 20 bp, Artificial Sequence
  Description of Artificial Sequence: Synthetic oligonucleotide
  Target: ATXN2; (-) strand; PAM type: YTN; PAM sequence: TTT
tttgattaggtttttttttt

SEQ ID NO: 61437 - DNA, 20 bp, Artificial Sequence
  Description of Artificial Sequence: Synthetic oligonucleotide
  Target: ATXN2; (-) strand; PAM type: YTN; PAM sequence: TTT
ttttgattaggttttttttt

SEQ ID NO: 61438 - DNA, 20 bp, Artificial Sequence
  Description of Artificial Sequence: Synthetic oligonucleotide
  Target: ATXN2; (-) strand; PAM type: YTN; PAM sequence: TTT
tttttgattaggtttttttt

SEQ ID NO: 61439 - DNA, 20 bp, Artificial Sequence
  Description of Artificial Sequence: Synthetic oligonucleotide
  Target: ATXN2; (-) strand; PAM type: YTN; PAM sequence: TTT
ttttttgattaggttttttt

SEQ ID NO: 61440 - DNA, 20 bp, Artificial Sequence
  Description of Artificial Sequence: Synthetic oligonucleotide
  Target: ATXN2; (-) strand; PAM type: YTN; PAM sequence: TTT
tttttttgattaggtttttt

SEQ ID NO: 61441 - DNA, 20 bp, Artificial Sequence
  Description of Artificial Sequence: Synthetic oligonucleotide
  Target: ATXN2; (-) strand; PAM type: YTN; PAM sequence: TTT
ttttttttgattaggttttt

SEQ ID NO: 61442 - DNA, 20 bp, Artificial Sequence
  Description of Artificial Sequence: Synthetic oligonucleotide
  Target: ATXN2; (-) strand; PAM type: YTN; PAM sequence: TTT
tttttttttgattaggtttt

SEQ ID NO: 61443 - DNA, 20 bp, Artificial Sequence
  Description of Artificial Sequence: Synthetic oligonucleotide
  Target: ATXN2; (-) strand; PAM type: YTN; PAM sequence: TTT
ttttttttttgattaggttt

SEQ ID NO: 61444 - DNA, 20 bp, Artificial Sequence
  Description of Artificial Sequence: Synthetic oligonucleotide
  Target: ATXN2; (-) strand; PAM type: YTN; PAM sequence: CTT
tttttttttttgattaggtt

SEQ ID NO: 61445 - DNA, 20 bp, Artificial Sequence
  Description of Artificial Sequence: Synthetic oligonucleotide
  Target: ATXN2; (-) strand; PAM type: YTN; PAM sequence: TTC
tttttttttttttgattagg

SEQ ID NO: 61446 - DNA, 20 bp, Artificial Sequence
  Description of Artificial Sequence: Synthetic oligonucleotide
  Target: ATXN2; (-) strand; PAM type: YTN; PAM sequence: TTT
ctttttttttttttgattag

SEQ ID NO: 61447 - DNA, 20 bp, Artificial Sequence
  Description of Artificial Sequence: Synthetic oligonucleotide
  Target: ATXN2; (-) strand; PAM type: YTN; PAM sequence: TTT
tctttttttttttttgatta

SEQ ID NO: 61448 - DNA, 20 bp, Artificial Sequence
  Description of Artificial Sequence: Synthetic oligonucleotide
  Target: ATXN2; (-) strand; PAM type: YTN; PAM sequence: TTT
ttctttttttttttttgatt

SEQ ID NO: 61449 - DNA, 20 bp, Artificial Sequence
  Description of Artificial Sequence: Synthetic oligonucleotide
  Target: ATXN2; (-) strand; PAM type: YTN; PAM sequence: CTT
tttctttttttttttttgat

SEQ ID NO: 61450 - DNA, 20 bp, Artificial Sequence
  Description of Artificial Sequence: Synthetic oligonucleotide
  Target: ATXN2; (-) strand; PAM type: YTN; PAM sequence: TTC
tttttctttttttttttttg

SEQ ID NO: 61451 - DNA, 20 bp, Artificial Sequence
  Description of Artificial Sequence: Synthetic oligonucleotide
  Target: ATXN2; (-) strand; PAM type: YTN; PAM sequence: TTT
ctttttcttttttttttttt

SEQ ID NO: 61452 - DNA, 20 bp, Artificial Sequence
  Description of Artificial Sequence: Synthetic oligonucleotide
  Target: ATXN2; (-) strand; PAM type: YTN; PAM sequence: TTA
gatttctttttctttttttt

SEQ ID NO: 61453 - DNA, 20 bp, Artificial Sequence
  Description of Artificial Sequence: Synthetic oligonucleotide
  Target: ATXN2; (-) strand; PAM type: YTN; PAM sequence: TTT
agatttctttttcttttttt

SEQ ID NO: 61454 - DNA, 20 bp, Artificial Sequence
  Description of Artificial Sequence: Synthetic oligonucleotide
  Target: ATXN2; (-) strand; PAM type: YTN; PAM sequence: CTT
tagatttctttttctttttt

SEQ ID NO: 61455 - DNA, 20 bp, Artificial Sequence
  Description of Artificial Sequence: Synthetic oligonucleotide
  Target: ATXN2; (-) strand; PAM type: YTN; PAM sequence: CTC
tttagatttctttttctttt

SEQ ID NO: 61456 - DNA, 20 bp, Artificial Sequence
  Description of Artificial Sequence: Synthetic oligonucleotide
  Target: ATXN2; (-) strand; PAM type: YTN; PAM sequence: TTA
tcctctttagatttcttttt

SEQ ID NO: 61457 - DNA, 20 bp, Artificial Sequence
  Description of Artificial Sequence: Synthetic oligonucleotide
  Target: ATXN2; (-) strand; PAM type: YTN; PAM sequence: TTT
atcctctttagatttctttt

SEQ ID NO: 61458 - DNA, 20 bp, Artificial Sequence
  Description of Artificial Sequence: Synthetic oligonucleotide
  Target: ATXN2; (-) strand; PAM type: YTN; PAM sequence: TTA
gatttatcctctttagattt

SEQ ID NO: 61459 - DNA, 20 bp, Artificial Sequence
  Description of Artificial Sequence: Synthetic oligonucleotide
  Target: ATXN2; (-) strand; PAM type: YTN; PAM sequence: CTA
tagattagatttatcctctt

SEQ ID NO: 61460 - DNA, 20 bp, Artificial Sequence
  Description of Artificial Sequence: Synthetic oligonucleotide
  Target: ATXN2; (-) strand; PAM type: YTN; PAM sequence: TTA
ctatagattagatttatcct

SEQ ID NO: 61461 - DNA, 20 bp, Artificial Sequence
  Description of Artificial Sequence: Synthetic oligonucleotide
  Target: ATXN2; (-) strand; PAM type: YTN; PAM sequence: TTT
actatagattagatttatcc

SEQ ID NO: 61462 - DNA, 20 bp, Artificial Sequence
  Description of Artificial Sequence: Synthetic oligonucleotide
  Target: ATXN2; (-) strand; PAM type: YTN; PAM sequence: TTT
tactatagattagatttatc

SEQ ID NO: 61463 - DNA, 20 bp, Artificial Sequence
  Description of Artificial Sequence: Synthetic oligonucleotide
  Target: ATXN2; (-) strand; PAM type: YTN; PAM sequence: CTT
ttactatagattagatttat

SEQ ID NO: 61464 - DNA, 20 bp, Artificial Sequence
  Description of Artificial Sequence: Synthetic oligonucleotide
  Target: ATXN2; (-) strand; PAM type: YTN; PAM sequence: TTC
ttttactatagattagattt

SEQ ID NO: 61465 - DNA, 20 bp, Artificial Sequence
  Description of Artificial Sequence: Synthetic oligonucleotide
  Target: ATXN2; (-) strand; PAM type: YTN; PAM sequence: CTT
cttttactatagattagatt

SEQ ID NO: 61466 - DNA, 20 bp, Artificial Sequence
  Description of Artificial Sequence: Synthetic oligonucleotide
  Target: ATXN2; (-) strand; PAM type: YTN; PAM sequence: CTG
ccttcttttactatagatta

SEQ ID NO: 61467 - DNA, 20 bp, Artificial Sequence
  Description of Artificial Sequence: Synthetic oligonucleotide
  Target: ATXN2; (-) strand; PAM type: YTN; PAM sequence: TTA
accagtaatctgccttcttt

SEQ ID NO: 61468 - DNA, 20 bp, Artificial Sequence
  Description of Artificial Sequence: Synthetic oligonucleotide
  Target: ATXN2; (-) strand; PAM type: YTN; PAM sequence: CTC
cagttaaccagtaatctgcc

SEQ ID NO: 61469 - DNA, 20 bp, Artificial Sequence
  Description of Artificial Sequence: Synthetic oligonucleotide
  Target: ATXN2; (-) strand; PAM type: YTN; PAM sequence: CTA
gctccagttaaccagtaatc

SEQ ID NO: 61470 - DNA, 20 bp, Artificial Sequence
  Description of Artificial Sequence: Synthetic oligonucleotide
  Target: ATXN2; (-) strand; PAM type: YTN; PAM sequence: TTA
ccactagctccagttaacca

SEQ ID NO: 61471 - DNA, 20 bp, Artificial Sequence
  Description of Artificial Sequence: Synthetic oligonucleotide
  Target: ATXN2; (-) strand; PAM type: YTN; PAM sequence: TTA
ttaccactagctccagttaa

SEQ ID NO: 61472 - DNA, 20 bp, Artificial Sequence
  Description of Artificial Sequence: Synthetic oligonucleotide
  Target: ATXN2; (-) strand; PAM type: YTN; PAM sequence: TTT
attaccactagctccagtta

SEQ ID NO: 61473 - DNA, 20 bp, Artificial Sequence
  Description of Artificial Sequence: Synthetic oligonucleotide
  Target: ATXN2; (-) strand; PAM type: YTN; PAM sequence: CTT
tattaccactagctccagtt

SEQ ID NO: 61474 - DNA, 20 bp, Artificial Sequence
  Description of Artificial Sequence: Synthetic oligonucleotide
  Target: ATXN2; (-) strand; PAM type: YTN; PAM sequence: CTG
tactttattaccactagctc

SEQ ID NO: 61475 - DNA, 20 bp, Artificial Sequence
  Description of Artificial Sequence: Synthetic oligonucleotide
  Target: ATXN2; (-) strand; PAM type: YTN; PAM sequence: CTG
tccaactgtactttattacc

SEQ ID NO: 61476 - DNA, 20 bp, Artificial Sequence
  Description of Artificial Sequence: Synthetic oligonucleotide
  Target: ATXN2; (-) strand; PAM type: YTN; PAM sequence: CTC
tgtccaactgtactttatta

SEQ ID NO: 61477 - DNA, 20 bp, Artificial Sequence
  Description of Artificial Sequence: Synthetic oligonucleotide
  Target: ATXN2; (-) strand; PAM type: YTN; PAM sequence: TTC
tctgtccaactgtactttat

SEQ ID NO: 61478 - DNA, 20 bp, Artificial Sequence
  Description of Artificial Sequence: Synthetic oligonucleotide
  Target: ATXN2; (-) strand; PAM type: YTN; PAM sequence: CTT
ctctgtccaactgtacttta

SEQ ID NO: 61479 - DNA, 20 bp, Artificial Sequence
  Description of Artificial Sequence: Synthetic oligonucleotide
  Target: ATXN2; (-) strand; PAM type: YTN; PAM sequence: CTC
ttctctgtccaactgtactt

SEQ ID NO: 61480 - DNA, 20 bp, Artificial Sequence
  Description of Artificial Sequence: Synthetic oligonucleotide
  Target: ATXN2; (-) strand; PAM type: YTN; PAM sequence: TTC
ctcttctctgtccaactgta

SEQ ID NO: 61481 - DNA, 20 bp, Artificial Sequence
  Description of Artificial Sequence: Synthetic oligonucleotide
  Target: ATXN2; (-) strand; PAM type: YTN; PAM sequence: CTG
ttcctcttctctgtccaact

SEQ ID NO: 61482 - DNA, 20 bp, Artificial Sequence
  Description of Artificial Sequence: Synthetic oligonucleotide
  Target: ATXN2; (-) strand; PAM type: YTN; PAM sequence: TTG
tgcctgttcctcttctctgt

SEQ ID NO: 61483 - DNA, 20 bp, Artificial Sequence
  Description of Artificial Sequence: Synthetic oligonucleotide
  Target: ATXN2; (-) strand; PAM type: YTN; PAM sequence: TTC
atcagtgaagatggaaaaca

SEQ ID NO: 61484 - DNA, 20 bp, Artificial Sequence
  Description of Artificial Sequence: Synthetic oligonucleotide
  Target: ATXN2; (-) strand; PAM type: YTN; PAM sequence: CTT
catcagtgaagatggaaaac

SEQ ID NO: 61485 - DNA, 20 bp, Artificial Sequence
  Description of Artificial Sequence: Synthetic oligonucleotide
  Target: ATXN2; (-) strand; PAM type: YTN; PAM sequence: TTG
cttcatcagtgaagatggaa

SEQ ID NO: 61486 - DNA, 20 bp, Artificial Sequence
  Description of Artificial Sequence: Synthetic oligonucleotide
  Target: ATXN2; (-) strand; PAM type: YTN; PAM sequence: CTT
gcttcatcagtgaagatgga

SEQ ID NO: 61487 - DNA, 20 bp, Artificial Sequence
  Description of Artificial Sequence: Synthetic oligonucleotide
  Target: ATXN2; (-) strand; PAM type: YTN; PAM sequence: CTA
cttgcttcatcagtgaagat

SEQ ID NO: 61488 - DNA, 20 bp, Artificial Sequence
  Description of Artificial Sequence: Synthetic oligonucleotide
  Target: ATXN2; (-) strand; PAM type: YTN; PAM sequence: CTC
atgtaactacttgcttcatc

SEQ ID NO: 61489 - DNA, 20 bp, Artificial Sequence
  Description of Artificial Sequence: Synthetic oligonucleotide
  Target: ATXN2; (-) strand; PAM type: YTN; PAM sequence: TTG
ctcatgtaactacttgcttc

SEQ ID NO: 61490 - DNA, 20 bp, Artificial Sequence
  Description of Artificial Sequence: Synthetic oligonucleotide
  Target: ATXN2; (-) strand; PAM type: YTN; PAM sequence: TTT
gctcatgtaactacttgctt

SEQ ID NO: 61491 - DNA, 20 bp, Artificial Sequence
  Description of Artificial Sequence: Synthetic oligonucleotide
  Target: ATXN2; (-) strand; PAM type: YTN; PAM sequence: TTG
acaaatatatttgctcatgt

SEQ ID NO: 61492 - DNA, 20 bp, Artificial Sequence
  Description of Artificial Sequence: Synthetic oligonucleotide
  Target: ATXN2; (-) strand; PAM type: YTN; PAM sequence: TTT
gacaaatatatttgctcatg

SEQ ID NO: 61493 - DNA, 20 bp, Artificial Sequence
  Description of Artificial Sequence: Synthetic oligonucleotide
  Target: ATXN2; (-) strand; PAM type: YTN; PAM sequence: TTT
tgacaaatatatttgctcat

SEQ ID NO: 61494 - DNA, 20 bp, Artificial Sequence
  Description of Artificial Sequence: Synthetic oligonucleotide
  Target: ATXN2; (-) strand; PAM type: YTN; PAM sequence: TTA
atgagttttgacaaatatat

SEQ ID NO: 61495 - DNA, 20 bp, Artificial Sequence
  Description of Artificial Sequence: Synthetic oligonucleotide
  Target: ATXN2; (-) strand; PAM type: YTN; PAM sequence: TTT
aatgagttttgacaaatata

SEQ ID NO: 61496 - DNA, 20 bp, Artificial Sequence
  Description of Artificial Sequence: Synthetic oligonucleotide
  Target: ATXN2; (-) strand; PAM type: YTN; PAM sequence: TTT
taatgagttttgacaaatat

SEQ ID NO: 61497 - DNA, 20 bp, Artificial Sequence
  Description of Artificial Sequence: Synthetic oligonucleotide
  Target: ATXN2; (-) strand; PAM type: YTN; PAM sequence: TTA
cattttaatgagttttgaca

SEQ ID NO: 61498 - DNA, 20 bp, Artificial Sequence
  Description of Artificial Sequence: Synthetic oligonucleotide
  Target: ATXN2; (-) strand; PAM type: YTN; PAM sequence: TTT
acattttaatgagttttgac

SEQ ID NO: 61499 - DNA, 20 bp, Artificial Sequence
  Description of Artificial Sequence: Synthetic oligonucleotide
  Target: ATXN2; (-) strand; PAM type: YTN; PAM sequence: TTA
tgtttacattttaatgagtt

SEQ ID NO: 61500 - DNA, 20 bp, Artificial Sequence
  Description of Artificial Sequence: Synthetic oligonucleotide
  Target: ATXN2; (-) strand; PAM type: YTN; PAM sequence: TTT
atgtttacattttaatgagt

SEQ ID NO: 61501 - DNA, 20 bp, Artificial Sequence
  Description of Artificial Sequence: Synthetic oligonucleotide
  Target: ATXN2; (-) strand; PAM type: YTN; PAM sequence: TTT
tatgtttacattttaatgag

SEQ ID NO: 61502 - DNA, 20 bp, Artificial Sequence
  Description of Artificial Sequence: Synthetic oligonucleotide
  Target: ATXN2; (-) strand; PAM type: YTN; PAM sequence: TTT
ttatgtttacattttaatga

SEQ ID NO: 61503 - DNA, 20 bp, Artificial Sequence
  Description of Artificial Sequence: Synthetic oligonucleotide
  Target: ATXN2; (-) strand; PAM type: YTN; PAM sequence: CTT
tttatgtttacattttaatg

SEQ ID NO: 61504 - DNA, 20 bp, Artificial Sequence
  Description of Artificial Sequence: Synthetic oligonucleotide
  Target: ATXN2; (-) strand; PAM type: YTN; PAM sequence: CTC
atctttttatgtttacattt

SEQ ID NO: 61505 - DNA, 20 bp, Artificial Sequence
  Description of Artificial Sequence: Synthetic oligonucleotide
  Target: ATXN2; (-) strand; PAM type: YTN; PAM sequence: TTA
catacaagaaaatgctcatc

SEQ ID NO: 61506 - DNA, 20 bp, Artificial Sequence
  Description of Artificial Sequence: Synthetic oligonucleotide
  Target: ATXN2; (-) strand; PAM type: YTN; PAM sequence: TTT
acatacaagaaaatgctcat

SEQ ID NO: 61507 - DNA, 20 bp, Artificial Sequence
  Description of Artificial Sequence: Synthetic oligonucleotide
  Target: ATXN2; (-) strand; PAM type: YTN; PAM sequence: CTG
taatttacatacaagaaaat

SEQ ID NO: 61508 - DNA, 20 bp, Artificial Sequence
  Description of Artificial Sequence: Synthetic oligonucleotide
  Target: ATXN2; (-) strand; PAM type: YTN; PAM sequence: TTA
gtctgtaatttacatacaag

SEQ ID NO: 61509 - DNA, 20 bp, Artificial Sequence
  Description of Artificial Sequence: Synthetic oligonucleotide
  Target: ATXN2; (-) strand; PAM type: YTN; PAM sequence: TTA
ttagtctgtaatttacatac

SEQ ID NO: 61510 - DNA, 20 bp, Artificial Sequence
  Description of Artificial Sequence: Synthetic oligonucleotide
  Target: ATXN2; (-) strand; PAM type: YTN; PAM sequence: TTT
attagtctgtaatttacata

SEQ ID NO: 61511 - DNA, 20 bp, Artificial Sequence
  Description of Artificial Sequence: Synthetic oligonucleotide
  Target: ATXN2; (-) strand; PAM type: YTN; PAM sequence: TTT
tattagtctgtaatttacat

SEQ ID NO: 61512 - DNA, 20 bp, Artificial Sequence
  Description of Artificial Sequence: Synthetic oligonucleotide
  Target: ATXN2; (-) strand; PAM type: YTN; PAM sequence: TTA
accagttttattagtctgta

SEQ ID NO: 61513 - DNA, 20 bp, Artificial Sequence
  Description of Artificial Sequence: Synthetic oligonucleotide
  Target: ATXN2; (-) strand; PAM type: YTN; PAM sequence: TTT
aaccagttttattagtctgt

SEQ ID NO: 61514 - DNA, 20 bp, Artificial Sequence
  Description of Artificial Sequence: Synthetic oligonucleotide
  Target: ATXN2; (-) strand; PAM type: YTN; PAM sequence: TTT
taaccagttttattagtctg

SEQ ID NO: 61515 - DNA, 20 bp, Artificial Sequence
  Description of Artificial Sequence: Synthetic oligonucleotide
  Target: ATXN2; (-) strand; PAM type: YTN; PAM sequence: CTA
tccaaaatgttttaaccagt

SEQ ID NO: 61516 - DNA, 20 bp, Artificial Sequence
  Description of Artificial Sequence: Synthetic oligonucleotide
  Target: ATXN2; (-) strand; PAM type: YTN; PAM sequence: CTA
aatgactatccaaaatgttt

SEQ ID NO: 61517 - DNA, 20 bp, Artificial Sequence
  Description of Artificial Sequence: Synthetic oligonucleotide
  Target: ATXN2; (-) strand; PAM type: YTN; PAM sequence: TTC
taaatgactatccaaaatgt

SEQ ID NO: 61518 - DNA, 20 bp, Artificial Sequence
  Description of Artificial Sequence: Synthetic oligonucleotide
  Target: ATXN2; (-) strand; PAM type: YTN; PAM sequence: TTG
ttctaaatgactatccaaaa

SEQ ID NO: 61519 - DNA, 20 bp, Artificial Sequence
  Description of Artificial Sequence: Synthetic oligonucleotide
  Target: ATXN2; (-) strand; PAM type: YTN; PAM sequence: CTT
gttctaaatgactatccaaa

SEQ ID NO: 61520 - DNA, 20 bp, Artificial Sequence
  Description of Artificial Sequence: Synthetic oligonucleotide
  Target: ATXN2; (-) strand; PAM type: YTN; PAM sequence: TTA
tcttgttctaaatgactatc

SEQ ID NO: 61521 - DNA, 20 bp, Artificial Sequence
  Description of Artificial Sequence: Synthetic oligonucleotide
  Target: ATXN2; (-) strand; PAM type: YTN; PAM sequence: TTT
atcttgttctaaatgactat

SEQ ID NO: 61522 - DNA, 20 bp, Artificial Sequence
  Description of Artificial Sequence: Synthetic oligonucleotide
  Target: ATXN2; (-) strand; PAM type: YTN; PAM sequence: TTA
aagtataaaatgtgaatcca

SEQ ID NO: 61523 - DNA, 20 bp, Artificial Sequence
  Description of Artificial Sequence: Synthetic oligonucleotide
  Target: ATXN2; (-) strand; PAM type: YTN; PAM sequence: CTT
aaagtataaaatgtgaatcc

SEQ ID NO: 61524 - DNA, 20 bp, Artificial Sequence
  Description of Artificial Sequence: Synthetic oligonucleotide
  Target: ATXN2; (-) strand; PAM type: YTN; PAM sequence: TTA
tcttaaagtataaaatgtga

SEQ ID NO: 61525 - DNA, 20 bp, Artificial Sequence
  Description of Artificial Sequence: Synthetic oligonucleotide
  Target: ATXN2; (-) strand; PAM type: YTN; PAM sequence: TTT
atcttaaagtataaaatgtg

SEQ ID NO: 61526 - DNA, 20 bp, Artificial Sequence
  Description of Artificial Sequence: Synthetic oligonucleotide
  Target: ATXN2; (-) strand; PAM type: YTN; PAM sequence: TTA
gaatttatcttaaagtataa

SEQ ID NO: 61527 - DNA, 20 bp, Artificial Sequence
  Description of Artificial Sequence: Synthetic oligonucleotide
  Target: ATXN2; (-) strand; PAM type: YTN; PAM sequence: TTT
agaatttatcttaaagtata

SEQ ID NO: 61528 - DNA, 20 bp, Artificial Sequence
  Description of Artificial Sequence: Synthetic oligonucleotide
  Target: ATXN2; (-) strand; PAM type: YTN; PAM sequence: TTT
tagaatttatcttaaagtat

SEQ ID NO: 61529 - DNA, 20 bp, Artificial Sequence
  Description of Artificial Sequence: Synthetic oligonucleotide
  Target: ATXN2; (-) strand; PAM type: YTN; PAM sequence: CTA
attttagaatttatcttaaa

SEQ ID NO: 61530 - DNA, 20 bp, Artificial Sequence
  Description of Artificial Sequence: Synthetic oligonucleotide
  Target: ATXN2; (-) strand; PAM type: YTN; PAM sequence: CTG
gctaattttagaatttatct

SEQ ID NO: 61531 - DNA, 20 bp, Artificial Sequence
  Description of Artificial Sequence: Synthetic oligonucleotide
  Target: ATXN2; (-) strand; PAM type: YTN; PAM sequence: TTA
tgcctggctaattttagaat

SEQ ID NO: 61532 - DNA, 20 bp, Artificial Sequence
  Description of Artificial Sequence: Synthetic oligonucleotide
  Target: ATXN2; (-) strand; PAM type: YTN; PAM sequence: CTG
taccattatgcctggctaat

SEQ ID NO: 61533 - DNA, 20 bp, Artificial Sequence
  Description of Artificial Sequence: Synthetic oligonucleotide
  Target: ATXN2; (-) strand; PAM type: YTN; PAM sequence: TTG
agaccagcctgtaccattat

SEQ ID NO: 61534 - DNA, 20 bp, Artificial Sequence
  Description of Artificial Sequence: Synthetic oligonucleotide
  Target: ATXN2; (-) strand; PAM type: YTN; PAM sequence: TTT
gagaccagcctgtaccatta

SEQ ID NO: 61535 - DNA, 20 bp, Artificial Sequence
  Description of Artificial Sequence: Synthetic oligonucleotide
  Target: ATXN2; (-) strand; PAM type: YTN; PAM sequence: CTC
aggagtttgagaccagcctg

SEQ ID NO: 61536 - DNA, 20 bp, Artificial Sequence
  Description of Artificial Sequence: Synthetic oligonucleotide
  Target: ATXN2; (-) strand; PAM type: YTN; PAM sequence: TTG
agctcaggagtttgagacca

SEQ ID NO: 61537 - DNA, 20 bp, Artificial Sequence
  Description of Artificial Sequence: Synthetic oligonucleotide
  Target: ATXN2; (-) strand; PAM type: YTN; PAM sequence: CTT
gagctcaggagtttgagacc

SEQ ID NO: 61538 - DNA, 20 bp, Artificial Sequence
  Description of Artificial Sequence: Synthetic oligonucleotide
  Target: ATXN2; (-) strand; PAM type: YTN; PAM sequence: CTG
aggtgggaggatcacttgag

SEQ ID NO: 61539 - DNA, 20 bp, Artificial Sequence
  Description of Artificial Sequence: Synthetic oligonucleotide
  Target: ATXN2; (-) strand; PAM type: YTN; PAM sequence: CTG
agaggctgaggtgggaggat

SEQ ID NO: 61540 - DNA, 20 bp, Artificial Sequence
  Description of Artificial Sequence: Synthetic oligonucleotide
  Target: ATXN2; (-) strand; PAM type: YTN; PAM sequence: CTG
ggaggctgagaggctgaggt

SEQ ID NO: 61541 - DNA, 20 bp, Artificial Sequence
  Description of Artificial Sequence: Synthetic oligonucleotide
  Target: ATXN2; (-) strand; PAM type: YTN; PAM sequence: CTG
gcaccctgggaggctgagag

SEQ ID NO: 61542 - DNA, 20 bp, Artificial Sequence
  Description of Artificial Sequence: Synthetic oligonucleotide
  Target: ATXN2; (-) strand; PAM type: YTN; PAM sequence: CTC
ctggcaccctgggaggctga

SEQ ID NO: 61543 - DNA, 20 bp, Artificial Sequence
  Description of Artificial Sequence: Synthetic oligonucleotide
  Target: ATXN2; (-) strand; PAM type: YTN; PAM sequence: CTG
tctcctggcaccctgggagg

SEQ ID NO: 61544 - DNA, 20 bp, Artificial Sequence
  Description of Artificial Sequence: Synthetic oligonucleotide
  Target: ATXN2; (-) strand; PAM type: YTN; PAM sequence: CTG
cctgtctcctggcaccctgg

SEQ ID NO: 61545 - DNA, 20 bp, Artificial Sequence
  Description of Artificial Sequence: Synthetic oligonucleotide
  Target: ATXN2; (-) strand; PAM type: YTN; PAM sequence: CTC
gtgatctgcctgtctcctgg

SEQ ID NO: 61546 - DNA, 20 bp, Artificial Sequence
  Description of Artificial Sequence: Synthetic oligonucleotide
  Target: ATXN2; (-) strand; PAM type: YTN; PAM sequence: CTG
atctcgtgatctgcctgtct

SEQ ID NO: 61547 - DNA, 20 bp, Artificial Sequence
  Description of Artificial Sequence: Synthetic oligonucleotide
  Target: ATXN2; (-) strand; PAM type: YTN; PAM sequence: CTC
ctgatctcgtgatctgcctg

SEQ ID NO: 61548 - DNA, 20 bp, Artificial Sequence
  Description of Artificial Sequence: Synthetic oligonucleotide
  Target: ATXN2; (-) strand; PAM type: YTN; PAM sequence: CTC
gaactcctgatctcgtgatc

SEQ ID NO: 61549 - DNA, 20 bp, Artificial Sequence
  Description of Artificial Sequence: Synthetic oligonucleotide
  Target: ATXN2; (-) strand; PAM type: YTN; PAM sequence: CTG
gtctcgaactcctgatctcg

SEQ ID NO: 61550 - DNA, 20 bp, Artificial Sequence
  Description of Artificial Sequence: Synthetic oligonucleotide
  Target: ATXN2; (-) strand; PAM type: YTN; PAM sequence: TTG
gtcaggctggtctcgaactc

SEQ ID NO: 61551 - DNA, 20 bp, Artificial Sequence
  Description of Artificial Sequence: Synthetic oligonucleotide
  Target: ATXN2; (-) strand; PAM type: YTN; PAM sequence: TTA
ccgtgttggtcaggctggtc

SEQ ID NO: 61552 - DNA, 20 bp, Artificial Sequence
  Description of Artificial Sequence: Synthetic oligonucleotide
  Target: ATXN2; (-) strand; PAM type: YTN; PAM sequence: TTT
accgtgttggtcaggctggt

SEQ ID NO: 61553 - DNA, 20 bp, Artificial Sequence
  Description of Artificial Sequence: Synthetic oligonucleotide
  Target: ATXN2; (-) strand; PAM type: YTN; PAM sequence: TTT
taccgtgttggtcaggctgg

SEQ ID NO: 61554 - DNA, 20 bp, Artificial Sequence
  Description of Artificial Sequence: Synthetic oligonucleotide
  Target: ATXN2; (-) strand; PAM type: YTN; PAM sequence: TTA
gtagagacggggttttaccg

SEQ ID NO: 61555 - DNA, 20 bp, Artificial Sequence
  Description of Artificial Sequence: Synthetic oligonucleotide
  Target: ATXN2; (-) strand; PAM type: YTN; PAM sequence: TTT
agtagagacggggttttacc

SEQ ID NO: 61556 - DNA, 20 bp, Artificial Sequence
  Description of Artificial Sequence: Synthetic oligonucleotide
  Target: ATXN2; (-) strand; PAM type: YTN; PAM sequence: TTT
tagtagagacggggttttac

SEQ ID NO: 61557 - DNA, 20 bp, Artificial Sequence
  Description of Artificial Sequence: Synthetic oligonucleotide
  Target: ATXN2; (-) strand; PAM type: YTN; PAM sequence: TTT
ttagtagagacggggtttta

SEQ ID NO: 61558 - DNA, 20 bp, Artificial Sequence
  Description of Artificial Sequence: Synthetic oligonucleotide
  Target: ATXN2; (-) strand; PAM type: YTN; PAM sequence: TTG
tatttttagtagagacgggg

SEQ ID NO: 61559 - DNA, 20 bp, Artificial Sequence
  Description of Artificial Sequence: Synthetic oligonucleotide
  Target: ATXN2; (-) strand; PAM type: YTN; PAM sequence: TTT
gtatttttagtagagacggg

SEQ ID NO: 61560 - DNA, 20 bp, Artificial Sequence
  Description of Artificial Sequence: Synthetic oligonucleotide
  Target: ATXN2; (-) strand; PAM type: YTN; PAM sequence: TTT
tgtatttttagtagagacgg

SEQ ID NO: 61561 - DNA, 20 bp, Artificial Sequence
  Description of Artificial Sequence: Synthetic oligonucleotide
  Target: ATXN2; (-) strand; PAM type: YTN; PAM sequence: TTT
ttgtatttttagtagagacg

SEQ ID NO: 61562 - DNA, 20 bp, Artificial Sequence
  Description of Artificial Sequence: Synthetic oligonucleotide
  Target: ATXN2; (-) strand; PAM type: YTN; PAM sequence: CTA
atttttgtatttttagtaga

SEQ ID NO: 61563 - DNA, 20 bp, Artificial Sequence
  Description of Artificial Sequence: Synthetic oligonucleotide
  Target: ATXN2; (-) strand; PAM type: YTN; PAM sequence: TTA
caggggtgcgccaccacacc

SEQ ID NO: 61564 - DNA, 20 bp, Artificial Sequence
  Description of Artificial Sequence: Synthetic oligonucleotide
  Target: ATXN2; (-) strand; PAM type: YTN; PAM sequence: CTG
gaattacaggggtgcgccac

SEQ ID NO: 61565 - DNA, 20 bp, Artificial Sequence
  Description of Artificial Sequence: Synthetic oligonucleotide
  Target: ATXN2; (-) strand; PAM type: YTN; PAM sequence: CTG
agtagctggaattacagggg

SEQ ID NO: 61566 - DNA, 20 bp, Artificial Sequence
  Description of Artificial Sequence: Synthetic oligonucleotide
  Target: ATXN2; (-) strand; PAM type: YTN; PAM sequence: CTC
ctgagtagctggaattacag

SEQ ID NO: 61567 - DNA, 20 bp, Artificial Sequence
  Description of Artificial Sequence: Synthetic oligonucleotide
  Target: ATXN2; (-) strand; PAM type: YTN; PAM sequence: CTC
agcctcctgagtagctggaa

SEQ ID NO: 61568 - DNA, 20 bp, Artificial Sequence
  Description of Artificial Sequence: Synthetic oligonucleotide
  Target: ATXN2; (-) strand; PAM type: YTN; PAM sequence: CTG
cctcagcctcctgagtagct

SEQ ID NO: 61569 - DNA, 20 bp, Artificial Sequence
  Description of Artificial Sequence: Synthetic oligonucleotide
  Target: ATXN2; (-) strand; PAM type: YTN; PAM sequence: TTC
ccctgcctcagcctcctgag

SEQ ID NO: 61570 - DNA, 20 bp, Artificial Sequence
  Description of Artificial Sequence: Synthetic oligonucleotide
  Target: ATXN2; (-) strand; PAM type: YTN; PAM sequence: TTC
aagcgattcccctgcctcag

SEQ ID NO: 61571 - DNA, 20 bp, Artificial Sequence
  Description of Artificial Sequence: Synthetic oligonucleotide
  Target: ATXN2; (-) strand; PAM type: YTN; PAM sequence: CTC
agattcaagcgattcccctg

SEQ ID NO: 61572 - DNA, 20 bp, Artificial Sequence
  Description of Artificial Sequence: Synthetic oligonucleotide
  Target: ATXN2; (-) strand; PAM type: YTN; PAM sequence: CTC
tcagattcaagcgattcccc

SEQ ID NO: 61573 - DNA, 20 bp, Artificial Sequence
  Description of Artificial Sequence: Synthetic oligonucleotide
  Target: ATXN2; (-) strand; PAM type: YTN; PAM sequence: CTC
cgcctctcagattcaagcga

SEQ ID NO: 61574 - DNA, 20 bp, Artificial Sequence
  Description of Artificial Sequence: Synthetic oligonucleotide
  Target: ATXN2; (-) strand; PAM type: YTN; PAM sequence: CTG
caacctccgcctctcagatt

SEQ ID NO: 61575 - DNA, 20 bp, Artificial Sequence
  Description of Artificial Sequence: Synthetic oligonucleotide
  Target: ATXN2; (-) strand; PAM type: YTN; PAM sequence: TTC
actgcaacctccgcctctca

SEQ ID NO: 61576 - DNA, 20 bp, Artificial Sequence
  Description of Artificial Sequence: Synthetic oligonucleotide
  Target: ATXN2; (-) strand; PAM type: YTN; PAM sequence: CTT
cactgcaacctccgcctctc

SEQ ID NO: 61577 - DNA, 20 bp, Artificial Sequence
  Description of Artificial Sequence: Synthetic oligonucleotide
  Target: ATXN2; (-) strand; PAM type: YTN; PAM sequence: TTA
gcttcactgcaacctccgcc

SEQ ID NO: 61578 - DNA, 20 bp, Artificial Sequence
  Description of Artificial Sequence: Synthetic oligonucleotide
  Target: ATXN2; (-) strand; PAM type: YTN; PAM sequence: CTT
agcttcactgcaacctccgc

SEQ ID NO: 61579 - DNA, 20 bp, Artificial Sequence
  Description of Artificial Sequence: Synthetic oligonucleotide
  Target: ATXN2; (-) strand; PAM type: YTN; PAM sequence: CTA
acttagcttcactgcaacct

SEQ ID NO: 61580 - DNA, 20 bp, Artificial Sequence
  Description of Artificial Sequence: Synthetic oligonucleotide
  Target: ATXN2; (-) strand; PAM type: YTN; PAM sequence: CTG
atggagtggcgctaacttag

SEQ ID NO: 61581 - DNA, 20 bp, Artificial Sequence
  Description of Artificial Sequence: Synthetic oligonucleotide
  Target: ATXN2; (-) strand; PAM type: YTN; PAM sequence: CTC
tgatggagtggcgctaactt

SEQ ID NO: 61582 - DNA, 20 bp, Artificial Sequence
  Description of Artificial Sequence: Synthetic oligonucleotide
  Target: ATXN2; (-) strand; PAM type: YTN; PAM sequence: TTG
agatggagtgtcgctctgat

SEQ ID NO: 61583 - DNA, 20 bp, Artificial Sequence
  Description of Artificial Sequence: Synthetic oligonucleotide
  Target: ATXN2; (-) strand; PAM type: YTN; PAM sequence: TTT
gagatggagtgtcgctctga

SEQ ID NO: 61584 - DNA, 20 bp, Artificial Sequence
  Description of Artificial Sequence: Synthetic oligonucleotide
  Target: ATXN2; (-) strand; PAM type: YTN; PAM sequence: TTT
tgagatggagtgtcgctctg

SEQ ID NO: 61585 - DNA, 20 bp, Artificial Sequence
  Description of Artificial Sequence: Synthetic oligonucleotide
  Target: ATXN2; (-) strand; PAM type: YTN; PAM sequence: TTT
ttgagatggagtgtcgctct

SEQ ID NO: 61586 - DNA, 20 bp, Artificial Sequence
  Description of Artificial Sequence: Synthetic oligonucleotide
  Target: ATXN2; (-) strand; PAM type: YTN; PAM sequence: TTA
tttttgagatggagtgtcgc

SEQ ID NO: 61587 - DNA, 20 bp, Artificial Sequence
  Description of Artificial Sequence: Synthetic oligonucleotide
  Target: ATXN2; (-) strand; PAM type: YTN; PAM sequence: TTT
atttttgagatggagtgtcg

SEQ ID NO: 61588 - DNA, 20 bp, Artificial Sequence
  Description of Artificial Sequence: Synthetic oligonucleotide
  Target: ATXN2; (-) strand; PAM type: YTN; PAM sequence: TTA
tttatttttgagatggagtg

SEQ ID NO: 61589 - DNA, 20 bp, Artificial Sequence
  Description of Artificial Sequence: Synthetic oligonucleotide
  Target: ATXN2; (-) strand; PAM type: YTN; PAM sequence: TTT
atttatttttgagatggagt

SEQ ID NO: 61590 - DNA, 20 bp, Artificial Sequence
  Description of Artificial Sequence: Synthetic oligonucleotide
  Target: ATXN2; (-) strand; PAM type: YTN; PAM sequence: TTG
tttatttatttttgagatgg

SEQ ID NO: 61591 - DNA, 20 bp, Artificial Sequence
  Description of Artificial Sequence: Synthetic oligonucleotide
  Target: ATXN2; (-) strand; PAM type: YTN; PAM sequence: TTT
gtttatttatttttgagatg

SEQ ID NO: 61592 - DNA, 20 bp, Artificial Sequence
  Description of Artificial Sequence: Synthetic oligonucleotide
  Target: ATXN2; (-) strand; PAM type: YTN; PAM sequence: TTG
tttgtttatttatttttgag

SEQ ID NO: 61593 - DNA, 20 bp, Artificial Sequence
  Description of Artificial Sequence: Synthetic oligonucleotide
  Target: ATXN2; (-) strand; PAM type: YTN; PAM sequence: TTT
gtttgtttatttatttttga

SEQ ID NO: 61594 - DNA, 20 bp, Artificial Sequence
  Description of Artificial Sequence: Synthetic oligonucleotide
  Target: ATXN2; (-) strand; PAM type: YTN; PAM sequence: TTG
tttgtttgtttatttatttt

SEQ ID NO: 61595 - DNA, 20 bp, Artificial Sequence
  Description of Artificial Sequence: Synthetic oligonucleotide
  Target: ATXN2; (-) strand; PAM type: YTN; PAM sequence: TTA
aattgtttgtttgtttattt

SEQ ID NO: 61596 - DNA, 20 bp, Artificial Sequence
  Description of Artificial Sequence: Synthetic oligonucleotide
  Target: ATXN2; (-) strand; PAM type: YTN; PAM sequence: CTT
aaattgtttgtttgtttatt

SEQ ID NO: 61597 - DNA, 20 bp, Artificial Sequence
  Description of Artificial Sequence: Synthetic oligonucleotide
  Target: ATXN2; (-) strand; PAM type: YTN; PAM sequence: CTC
ttaaattgtttgtttgttta

SEQ ID NO: 61598 - DNA, 20 bp, Artificial Sequence
  Description of Artificial Sequence: Synthetic oligonucleotide
  Target: ATXN2; (-) strand; PAM type: YTN; PAM sequence: TTC
ctcttaaattgtttgtttgt

SEQ ID NO: 61599 - DNA, 20 bp, Artificial Sequence
  Description of Artificial Sequence: Synthetic oligonucleotide
  Target: ATXN2; (-) strand; PAM type: YTN; PAM sequence: TTT
cctcttaaattgtttgtttg

SEQ ID NO: 61600 - DNA, 20 bp, Artificial Sequence
  Description of Artificial Sequence: Synthetic oligonucleotide
  Target: ATXN2; (-) strand; PAM type: YTN; PAM sequence: CTT
tcctcttaaattgtttgttt

SEQ ID NO: 61601 - DNA, 20 bp, Artificial Sequence
  Description of Artificial Sequence: Synthetic oligonucleotide
  Target: ATXN2; (-) strand; PAM type: YTN; PAM sequence: TTC
tttcctcttaaattgtttgt

SEQ ID NO: 61602 - DNA, 20 bp, Artificial Sequence
  Description of Artificial Sequence: Synthetic oligonucleotide
  Target: ATXN2; (-) strand; PAM type: YTN; PAM sequence: CTA
ttctttcctcttaaattgtt

SEQ ID NO: 61603 - DNA, 20 bp, Artificial Sequence
  Description of Artificial Sequence: Synthetic oligonucleotide
  Target: ATXN2; (-) strand; PAM type: YTN; PAM sequence: TTG
aaaagactattctttcctct

SEQ ID NO: 61604 - DNA, 20 bp, Artificial Sequence
  Description of Artificial Sequence: Synthetic oligonucleotide
  Target: ATXN2; (-) strand; PAM type: YTN; PAM sequence: TTG
ttgaaaagactattctttcc

SEQ ID NO: 61605 - DNA, 20 bp, Artificial Sequence
  Description of Artificial Sequence: Synthetic oligonucleotide
  Target: ATXN2; (-) strand; PAM type: YTN; PAM sequence: TTT
gttgaaaagactattctttc

SEQ ID NO: 61606 - DNA, 20 bp, Artificial Sequence
  Description of Artificial Sequence: Synthetic oligonucleotide
  Target: ATXN2; (-) strand; PAM type: YTN; PAM sequence: CTC
atttgttgaaaagactattc

SEQ ID NO: 61607 - DNA, 20 bp, Artificial Sequence
  Description of Artificial Sequence: Synthetic oligonucleotide
  Target: ATXN2; (-) strand; PAM type: YTN; PAM sequence: TTG
tccccacctcatttgttgaa

SEQ ID NO: 61608 - DNA, 20 bp, Artificial Sequence
  Description of Artificial Sequence: Synthetic oligonucleotide
  Target: ATXN2; (-) strand; PAM type: YTN; PAM sequence: TTG
tggatatccgttgtccccac

SEQ ID NO: 61609 - DNA, 20 bp, Artificial Sequence
  Description of Artificial Sequence: Synthetic oligonucleotide
  Target: ATXN2; (-) strand; PAM type: YTN; PAM sequence: CTT
gtggatatccgttgtcccca

SEQ ID NO: 61610 - DNA, 20 bp, Artificial Sequence
  Description of Artificial Sequence: Synthetic oligonucleotide
  Target: ATXN2; (-) strand; PAM type: YTN; PAM sequence: TTG
cttgtggatatccgttgtcc

SEQ ID NO: 61611 - DNA, 20 bp, Artificial Sequence
  Description of Artificial Sequence: Synthetic oligonucleotide
  Target: ATXN2; (-) strand; PAM type: YTN; PAM sequence: TTT
gcttgtggatatccgttgtc

SEQ ID NO: 61612 - DNA, 20 bp, Artificial Sequence
  Description of Artificial Sequence: Synthetic oligonucleotide
  Target: ATXN2; (-) strand; PAM type: YTN; PAM sequence: TTT
tgcttgtggatatccgttgt

SEQ ID NO: 61613 - DNA, 20 bp, Artificial Sequence
  Description of Artificial Sequence: Synthetic oligonucleotide
  Target: ATXN2; (-) strand; PAM type: YTN; PAM sequence: CTT
ttgcttgtggatatccgttg

SEQ ID NO: 61614 - DNA, 20 bp, Artificial Sequence
  Description of Artificial Sequence: Synthetic oligonucleotide
  Target: ATXN2; (-) strand; PAM type: YTN; PAM sequence: TTC
cttttgcttgtggatatccg

SEQ ID NO: 61615 - DNA, 20 bp, Artificial Sequence
  Description of Artificial Sequence: Synthetic oligonucleotide
  Target: ATXN2; (-) strand; PAM type: YTN; PAM sequence: TTT
ccttttgcttgtggatatcc

SEQ ID NO: 61616 - DNA, 20 bp, Artificial Sequence
  Description of Artificial Sequence: Synthetic oligonucleotide
  Target: ATXN2; (-) strand; PAM type: YTN; PAM sequence: TTT
tccttttgcttgtggatatc

SEQ ID NO: 61617 - DNA, 20 bp, Artificial Sequence
  Description of Artificial Sequence: Synthetic oligonucleotide
  Target: ATXN2; (-) strand; PAM type: YTN; PAM sequence: TTT
ttccttttgcttgtggatat

SEQ ID NO: 61618 - DNA, 20 bp, Artificial Sequence
  Description of Artificial Sequence: Synthetic oligonucleotide
  Target: ATXN2; (-) strand; PAM type: YTN; PAM sequence: TTG
tgtatgagatgagagtagtg

SEQ ID NO: 61619 - DNA, 20 bp, Artificial Sequence
  Description of Artificial Sequence: Synthetic oligonucleotide
  Target: ATXN2; (-) strand; PAM type: YTN; PAM sequence: TTT
gtgtatgagatgagagtagt

SEQ ID NO: 61620 - DNA, 20 bp, Artificial Sequence
  Description of Artificial Sequence: Synthetic oligonucleotide
  Target: ATXN2; (-) strand; PAM type: YTN; PAM sequence: TTT
tgtgtatgagatgagagtag

SEQ ID NO: 61621 - DNA, 20 bp, Artificial Sequence
  Description of Artificial Sequence: Synthetic oligonucleotide
  Target: ATXN2; (-) strand; PAM type: YTN; PAM sequence: TTT
ttgtgtatgagatgagagta

SEQ ID NO: 61622 - DNA, 20 bp, Artificial Sequence
  Description of Artificial Sequence: Synthetic oligonucleotide
  Target: ATXN2; (-) strand; PAM type: YTN; PAM sequence: TTA
atttttgtgtatgagatgag

SEQ ID NO: 61623 - DNA, 20 bp, Artificial Sequence
  Description of Artificial Sequence: Synthetic oligonucleotide
  Target: ATXN2; (-) strand; PAM type: YTN; PAM sequence: TTG
agttaatttttgtgtatgag

SEQ ID NO: 61624 - DNA, 20 bp, Artificial Sequence
  Description of Artificial Sequence: Synthetic oligonucleotide
  Target: ATXN2; (-) strand; PAM type: YTN; PAM sequence: TTT
gagttaatttttgtgtatga

SEQ ID NO: 61625 - DNA, 20 bp, Artificial Sequence
  Description of Artificial Sequence: Synthetic oligonucleotide
  Target: ATXN2; (-) strand; PAM type: YTN; PAM sequence: TTT
tgagttaatttttgtgtatg

SEQ ID NO: 61626 - DNA, 20 bp, Artificial Sequence
  Description of Artificial Sequence: Synthetic oligonucleotide
  Target: ATXN2; (-) strand; PAM type: YTN; PAM sequence: CTT
ttgagttaatttttgtgtat

SEQ ID NO: 61627 - DNA, 20 bp, Artificial Sequence
  Description of Artificial Sequence: Synthetic oligonucleotide
  Target: ATXN2; (-) strand; PAM type: YTN; PAM sequence: CTC
ttttgagttaatttttgtgt

SEQ ID NO: 61628 - DNA, 20 bp, Artificial Sequence
  Description of Artificial Sequence: Synthetic oligonucleotide
  Target: ATXN2; (-) strand; PAM type: YTN; PAM sequence: CTA
caatctcttttgagttaatt

SEQ ID NO: 61629 - DNA, 20 bp, Artificial Sequence
  Description of Artificial Sequence: Synthetic oligonucleotide
  Target: ATXN2; (-) strand; PAM type: YTN; PAM sequence: TTA
agtctacaatctcttttgag

SEQ ID NO: 61630 - DNA, 20 bp, Artificial Sequence
  Description of Artificial Sequence: Synthetic oligonucleotide
  Target: ATXN2; (-) strand; PAM type: YTN; PAM sequence: TTT
aagtctacaatctcttttga

SEQ ID NO: 61631 - DNA, 20 bp, Artificial Sequence
  Description of Artificial Sequence: Synthetic oligonucleotide
  Target: ATXN2; (-) strand; PAM type: YTN; PAM sequence: TTA
acatttaagtctacaatctc

SEQ ID NO: 61632 - DNA, 20 bp, Artificial Sequence
  Description of Artificial Sequence: Synthetic oligonucleotide
  Target: ATXN2; (-) strand; PAM type: YTN; PAM sequence: CTT
aacatttaagtctacaatct

SEQ ID NO: 61633 - DNA, 20 bp, Artificial Sequence
  Description of Artificial Sequence: Synthetic oligonucleotide
  Target: ATXN2; (-) strand; PAM type: YTN; PAM sequence: CTC
ttaacatttaagtctacaat

SEQ ID NO: 61634 - DNA, 20 bp, Artificial Sequence
  Description of Artificial Sequence: Synthetic oligonucleotide
  Target: ATXN2; (-) strand; PAM type: YTN; PAM sequence: TTA
gctcttaacatttaagtcta

SEQ ID NO: 61635 - DNA, 20 bp, Artificial Sequence
  Description of Artificial Sequence: Synthetic oligonucleotide
  Target: ATXN2; (-) strand; PAM type: YTN; PAM sequence: TTT
agctcttaacatttaagtct

SEQ ID NO: 61636 - DNA, 20 bp, Artificial Sequence
  Description of Artificial Sequence: Synthetic oligonucleotide
  Target: ATXN2; (-) strand; PAM type: YTN; PAM sequence: TTA
tagtttagctcttaacattt

SEQ ID NO: 61637 - DNA, 20 bp, Artificial Sequence
  Description of Artificial Sequence: Synthetic oligonucleotide
  Target: ATXN2; (-) strand; PAM type: YTN; PAM sequence: TTT
atagtttagctcttaacatt

SEQ ID NO: 61638 - DNA, 20 bp, Artificial Sequence
  Description of Artificial Sequence: Synthetic oligonucleotide
  Target: ATXN2; (-) strand; PAM type: YTN; PAM sequence: TTT
tatagtttagctcttaacat

SEQ ID NO: 61639 - DNA, 20 bp, Artificial Sequence
  Description of Artificial Sequence: Synthetic oligonucleotide
  Target: ATXN2; (-) strand; PAM type: YTN; PAM sequence: TTT
ttatagtttagctcttaaca

SEQ ID NO: 61640 - DNA, 20 bp, Artificial Sequence
  Description of Artificial Sequence: Synthetic oligonucleotide
  Target: ATXN2; (-) strand; PAM type: YTN; PAM sequence: CTA
tgatttttatagtttagctc

SEQ ID NO: 61641 - DNA, 20 bp, Artificial Sequence
  Description of Artificial Sequence: Synthetic oligonucleotide
  Target: ATXN2; (-) strand; PAM type: YTN; PAM sequence: CTC
ctatgatttttatagtttag

SEQ ID NO: 61642 - DNA, 20 bp, Artificial Sequence
  Description of Artificial Sequence: Synthetic oligonucleotide
  Target: ATXN2; (-) strand; PAM type: YTN; PAM sequence: CTA
taaaactcctatgattttta

SEQ ID NO: 61643 - DNA, 20 bp, Artificial Sequence
  Description of Artificial Sequence: Synthetic oligonucleotide
  Target: ATXN2; (-) strand; PAM type: YTN; PAM sequence: CTA
tgaaacgcctataaaactcc

SEQ ID NO: 61644 - DNA, 20 bp, Artificial Sequence
  Description of Artificial Sequence: Synthetic oligonucleotide
  Target: ATXN2; (-) strand; PAM type: YTN; PAM sequence: CTC
ctatgaaacgcctataaaac

SEQ ID NO: 61645 - DNA, 20 bp, Artificial Sequence
  Description of Artificial Sequence: Synthetic oligonucleotide
  Target: ATXN2; (-) strand; PAM type: YTN; PAM sequence: TTA
ctcctatgaaacgcctataa

SEQ ID NO: 61646 - DNA, 20 bp, Artificial Sequence
  Description of Artificial Sequence: Synthetic oligonucleotide
  Target: ATXN2; (-) strand; PAM type: YTN; PAM sequence: TTT
actcctatgaaacgcctata

SEQ ID NO: 61647 - DNA, 20 bp, Artificial Sequence
  Description of Artificial Sequence: Synthetic oligonucleotide
  Target: ATXN2; (-) strand; PAM type: YTN; PAM sequence: CTC
aaggccacagagatttactc

SEQ ID NO: 61648 - DNA, 20 bp, Artificial Sequence
  Description of Artificial Sequence: Synthetic oligonucleotide
  Target: ATXN2; (-) strand; PAM type: YTN; PAM sequence: CTA
actcaaggccacagagattt

SEQ ID NO: 61649 - DNA, 20 bp, Artificial Sequence
  Description of Artificial Sequence: Synthetic oligonucleotide
  Target: ATXN2; (-) strand; PAM type: YTN; PAM sequence: TTG
cctaactcaaggccacagag

SEQ ID NO: 61650 - DNA, 20 bp, Artificial Sequence
  Description of Artificial Sequence: Synthetic oligonucleotide
  Target: ATXN2; (-) strand; PAM type: YTN; PAM sequence: CTG
atgtcatatcagacaaagca

SEQ ID NO: 61651 - DNA, 20 bp, Artificial Sequence
  Description of Artificial Sequence: Synthetic oligonucleotide
  Target: ATXN2; (-) strand; PAM type: YTN; PAM sequence: CTC
ctgatgtcatatcagacaaa

SEQ ID NO: 61652 - DNA, 20 bp, Artificial Sequence
  Description of Artificial Sequence: Synthetic oligonucleotide
  Target: ATXN2; (-) strand; PAM type: YTN; PAM sequence: TTG
ctcctgatgtcatatcagac

SEQ ID NO: 61653 - DNA, 20 bp, Artificial Sequence
  Description of Artificial Sequence: Synthetic oligonucleotide
  Target: ATXN2; (-) strand; PAM type: YTN; PAM sequence: CTG
ttgctcctgatgtcatatca

SEQ ID NO: 61654 - DNA, 20 bp, Artificial Sequence
  Description of Artificial Sequence: Synthetic oligonucleotide
  Target: ATXN2; (-) strand; PAM type: YTN; PAM sequence: TTG
ctgttgctcctgatgtcata

SEQ ID NO: 61655 - DNA, 20 bp, Artificial Sequence
  Description of Artificial Sequence: Synthetic oligonucleotide
  Target: ATXN2; (-) strand; PAM type: YTN; PAM sequence: TTG
ttgctgttgctcctgatgtc

SEQ ID NO: 61656 - DNA, 20 bp, Artificial Sequence
  Description of Artificial Sequence: Synthetic oligonucleotide
  Target: ATXN2; (-) strand; PAM type: YTN; PAM sequence: TTT
gttgctgttgctcctgatgt

SEQ ID NO: 61657 - DNA, 20 bp, Artificial Sequence
  Description of Artificial Sequence: Synthetic oligonucleotide
  Target: ATXN2; (-) strand; PAM type: YTN; PAM sequence: TTT
tgttgctgttgctcctgatg

SEQ ID NO: 61658 - DNA, 20 bp, Artificial Sequence
  Description of Artificial Sequence: Synthetic oligonucleotide
  Target: ATXN2; (-) strand; PAM type: YTN; PAM sequence: CTT
ttgttgctgttgctcctgat

SEQ ID NO: 61659 - DNA, 20 bp, Artificial Sequence
  Description of Artificial Sequence: Synthetic oligonucleotide
  Target: ATXN2; (-) strand; PAM type: YTN; PAM sequence: TTC
ttttgttgctgttgctcctg

SEQ ID NO: 61660 - DNA, 20 bp, Artificial Sequence
  Description of Artificial Sequence: Synthetic oligonucleotide
  Target: ATXN2; (-) strand; PAM type: YTN; PAM sequence: TTT
cttttgttgctgttgctcct

SEQ ID NO: 61661 - DNA, 20 bp, Artificial Sequence
  Description of Artificial Sequence: Synthetic oligonucleotide
  Target: ATXN2; (-) strand; PAM type: YTN; PAM sequence: TTT
tcttttgttgctgttgctcc

SEQ ID NO: 61662 - DNA, 20 bp, Artificial Sequence
  Description of Artificial Sequence: Synthetic oligonucleotide
  Target: ATXN2; (-) strand; PAM type: YTN; PAM sequence: TTT
ttcttttgttgctgttgctc

SEQ ID NO: 61663 - DNA, 20 bp, Artificial Sequence
  Description of Artificial Sequence: Synthetic oligonucleotide
  Target: ATXN2; (-) strand; PAM type: YTN; PAM sequence: TTT
tttcttttgttgctgttgct

SEQ ID NO: 61664 - DNA, 20 bp, Artificial Sequence
  Description of Artificial Sequence: Synthetic oligonucleotide
  Target: ATXN2; (-) strand; PAM type: YTN; PAM sequence: TTG
ttttttcttttgttgctgtt

SEQ ID NO: 61665 - DNA, 20 bp, Artificial Sequence
  Description of Artificial Sequence: Synthetic oligonucleotide
  Target: ATXN2; (-) strand; PAM type: YTN; PAM sequence: TTT
gttttttcttttgttgctgt

SEQ ID NO: 61666 - DNA, 20 bp, Artificial Sequence
  Description of Artificial Sequence: Synthetic oligonucleotide
  Target: ATXN2; (-) strand; PAM type: YTN; PAM sequence: CTG
tttgttttttcttttgttgc

SEQ ID NO: 61667 - DNA, 20 bp, Artificial Sequence
  Description of Artificial Sequence: Synthetic oligonucleotide
  Target: ATXN2; (-) strand; PAM type: YTN; PAM sequence: TTA
tctgtttgttttttcttttg

SEQ ID NO: 61668 - DNA, 20 bp, Artificial Sequence
  Description of Artificial Sequence: Synthetic oligonucleotide
  Target: ATXN2; (-) strand; PAM type: YTN; PAM sequence: TTT
atctgtttgttttttctttt

SEQ ID NO: 61669 - DNA, 20 bp, Artificial Sequence
  Description of Artificial Sequence: Synthetic oligonucleotide
  Target: ATXN2; (-) strand; PAM type: YTN; PAM sequence: TTC
aatttatctgtttgtttttt

SEQ ID NO: 61670 - DNA, 20 bp, Artificial Sequence
  Description of Artificial Sequence: Synthetic oligonucleotide
  Target: ATXN2; (-) strand; PAM type: YTN; PAM sequence: TTG
atgaagttcaatttatctgt

SEQ ID NO: 61671 - DNA, 20 bp, Artificial Sequence
  Description of Artificial Sequence: Synthetic oligonucleotide
  Target: ATXN2; (-) strand; PAM type: YTN; PAM sequence: TTT
gatgaagttcaatttatctg

SEQ ID NO: 61672 - DNA, 20 bp, Artificial Sequence
  Description of Artificial Sequence: Synthetic oligonucleotide
  Target: ATXN2; (-) strand; PAM type: YTN; PAM sequence: TTT
tgatgaagttcaatttatct

SEQ ID NO: 61673 - DNA, 20 bp, Artificial Sequence
  Description of Artificial Sequence: Synthetic oligonucleotide
  Target: ATXN2; (-) strand; PAM type: YTN; PAM sequence: TTA
attttgatgaagttcaattt

SEQ ID NO: 61674 - DNA, 20 bp, Artificial Sequence
  Description of Artificial Sequence: Synthetic oligonucleotide
  Target: ATXN2; (-) strand; PAM type: YTN; PAM sequence: TTT
aattttgatgaagttcaatt

SEQ ID NO: 61675 - DNA, 20 bp, Artificial Sequence
  Description of Artificial Sequence: Synthetic oligonucleotide
  Target: ATXN2; (-) strand; PAM type: YTN; PAM sequence: TTT
taattttgatgaagttcaat

SEQ ID NO: 61676 - DNA, 20 bp, Artificial Sequence
  Description of Artificial Sequence: Synthetic oligonucleotide
  Target: ATXN2; (-) strand; PAM type: YTN; PAM sequence: TTT
ttaattttgatgaagttcaa

SEQ ID NO: 61677 - DNA, 20 bp, Artificial Sequence
  Description of Artificial Sequence: Synthetic oligonucleotide
  Target: ATXN2; (-) strand; PAM type: YTN; PAM sequence: TTG
taacacagtttttaattttg

SEQ ID NO: 61678 - DNA, 20 bp, Artificial Sequence
  Description of Artificial Sequence: Synthetic oligonucleotide
  Target: ATXN2; (-) strand; PAM type: YTN; PAM sequence: TTT
gtaacacagtttttaatttt

SEQ ID NO: 61679 - DNA, 20 bp, Artificial Sequence
  Description of Artificial Sequence: Synthetic oligonucleotide
  Target: ATXN2; (-) strand; PAM type: YTN; PAM sequence: CTT
tgtaacacagtttttaattt

SEQ ID NO: 61680 - DNA, 20 bp, Artificial Sequence
  Description of Artificial Sequence: Synthetic oligonucleotide
  Target: ATXN2; (-) strand; PAM type: YTN; PAM sequence: TTC
tttgtaacacagtttttaat

SEQ ID NO: 61681 - DNA, 20 bp, Artificial Sequence
  Description of Artificial Sequence: Synthetic oligonucleotide
  Target: ATXN2; (-) strand; PAM type: YTN; PAM sequence: TTG
atggtgttctttgtaacaca

SEQ ID NO: 61682 - DNA, 20 bp, Artificial Sequence
  Description of Artificial Sequence: Synthetic oligonucleotide
  Target: ATXN2; (-) strand; PAM type: YTN; PAM sequence: CTT
gatggtgttctttgtaacac

SEQ ID NO: 61683 - DNA, 20 bp, Artificial Sequence
  Description of Artificial Sequence: Synthetic oligonucleotide
  Target: ATXN2; (-) strand; PAM type: YTN; PAM sequence: TTG
cttgatggtgttctttgtaa

SEQ ID NO: 61684 - DNA, 20 bp, Artificial Sequence
  Description of Artificial Sequence: Synthetic oligonucleotide
  Target: ATXN2; (-) strand; PAM type: YTN; PAM sequence: CTT
gcttgatggtgttctttgta

SEQ ID NO: 61685 - DNA, 20 bp, Artificial Sequence
  Description of Artificial Sequence: Synthetic oligonucleotide
  Target: ATXN2; (-) strand; PAM type: YTN; PAM sequence: TTA
cttgcttgatggtgttcttt

SEQ ID NO: 61686 - DNA, 20 bp, Artificial Sequence
  Description of Artificial Sequence: Synthetic oligonucleotide
  Target: ATXN2; (-) strand; PAM type: YTN; PAM sequence: TTT
acttgcttgatggtgttctt

SEQ ID NO: 61687 - DNA, 20 bp, Artificial Sequence
  Description of Artificial Sequence: Synthetic oligonucleotide
  Target: ATXN2; (-) strand; PAM type: YTN; PAM sequence: TTT
tacttgcttgatggtgttct

SEQ ID NO: 61688 - DNA, 20 bp, Artificial Sequence
  Description of Artificial Sequence: Synthetic oligonucleotide
  Target: ATXN2; (-) strand; PAM type: YTN; PAM sequence: TTT
ttacttgcttgatggtgttc

SEQ ID NO: 61689 - DNA, 20 bp, Artificial Sequence
  Description of Artificial Sequence: Synthetic oligonucleotide
  Target: ATXN2; (-) strand; PAM type: YTN; PAM sequence: CTT
tttacttgcttgatggtgtt

SEQ ID NO: 61690 - DNA, 20 bp, Artificial Sequence
  Description of Artificial Sequence: Synthetic oligonucleotide
  Target: ATXN2; (-) strand; PAM type: YTN; PAM sequence: TTA
tctttttacttgcttgatgg

SEQ ID NO: 61691 - DNA, 20 bp, Artificial Sequence
  Description of Artificial Sequence: Synthetic oligonucleotide
  Target: ATXN2; (-) strand; PAM type: YTN; PAM sequence: CTA
taggttatctttttacttgc

SEQ ID NO: 61692 - DNA, 20 bp, Artificial Sequence
  Description of Artificial Sequence: Synthetic oligonucleotide
  Target: ATXN2; (-) strand; PAM type: YTN; PAM sequence: CTG
actataggttatctttttac

SEQ ID NO: 61693 - DNA, 20 bp, Artificial Sequence
  Description of Artificial Sequence: Synthetic oligonucleotide
  Target: ATXN2; (-) strand; PAM type: YTN; PAM sequence: TTA
gacgcgaaccaccatgccct

SEQ ID NO: 61694 - DNA, 20 bp, Artificial Sequence
  Description of Artificial Sequence: Synthetic oligonucleotide
  Target: ATXN2; (-) strand; PAM type: YTN; PAM sequence: TTT
agacgcgaaccaccatgccc

SEQ ID NO: 61695 - DNA, 20 bp, Artificial Sequence
  Description of Artificial Sequence: Synthetic oligonucleotide
  Target: ATXN2; (-) strand; PAM type: YTN; PAM sequence: TTT
tagacgcgaaccaccatgcc

SEQ ID NO: 61696 - DNA, 20 bp, Artificial Sequence
  Description of Artificial Sequence: Synthetic oligonucleotide
  Target: ATXN2; (-) strand; PAM type: YTN; PAM sequence: CTG
agattttagacgcgaaccac

SEQ ID NO: 61697 - DNA, 20 bp, Artificial Sequence
  Description of Artificial Sequence: Synthetic oligonucleotide
  Target: ATXN2; (-) strand; PAM type: YTN; PAM sequence: TTC
ccaaagtgctgagattttag

SEQ ID NO: 61698 - DNA, 20 bp, Artificial Sequence
  Description of Artificial Sequence: Synthetic oligonucleotide
  Target: ATXN2; (-) strand; PAM type: YTN; PAM sequence: CTT
cccaaagtgctgagatttta

SEQ ID NO: 61699 - DNA, 20 bp, Artificial Sequence
  Description of Artificial Sequence: Synthetic oligonucleotide
  Target: ATXN2; (-) strand; PAM type: YTN; PAM sequence: CTC
accttcccaaagtgctgaga

SEQ ID NO: 61700 - DNA, 20 bp, Artificial Sequence
  Description of Artificial Sequence: Synthetic oligonucleotide
  Target: ATXN2; (-) strand; PAM type: YTN; PAM sequence: CTG
cctcaccttcccaaagtgct

SEQ ID NO: 61701 - DNA, 20 bp, Artificial Sequence
  Description of Artificial Sequence: Synthetic oligonucleotide
  Target: ATXN2; (-) strand; PAM type: YTN; PAM sequence: CTC
aaatgatccgcctgcctcac

SEQ ID NO: 61702 - DNA, 20 bp, Artificial Sequence
  Description of Artificial Sequence: Synthetic oligonucleotide
  Target: ATXN2; (-) strand; PAM type: YTN; PAM sequence: CTG
acctcaaatgatccgcctgc

SEQ ID NO: 61703 - DNA, 20 bp, Artificial Sequence
  Description of Artificial Sequence: Synthetic oligonucleotide
  Target: ATXN2; (-) strand; PAM type: YTN; PAM sequence: CTC
ctgacctcaaatgatccgcc

SEQ ID NO: 61704 - DNA, 20 bp, Artificial Sequence
  Description of Artificial Sequence: Synthetic oligonucleotide
  Target: ATXN2; (-) strand; PAM type: YTN; PAM sequence: TTG
aactcctgacctcaaatgat

SEQ ID NO: 61705 - DNA, 20 bp, Artificial Sequence
  Description of Artificial Sequence: Synthetic oligonucleotide
  Target: ATXN2; (-) strand; PAM type: YTN; PAM sequence: CTT
gaactcctgacctcaaatga

SEQ ID NO: 61706 - DNA, 20 bp, Artificial Sequence
  Description of Artificial Sequence: Synthetic oligonucleotide
  Target: ATXN2; (-) strand; PAM type: YTN; PAM sequence: CTG
gtcttgaactcctgacctca

SEQ ID NO: 61707 - DNA, 20 bp, Artificial Sequence
  Description of Artificial Sequence: Synthetic oligonucleotide
  Target: ATXN2; (-) strand; PAM type: YTN; PAM sequence: TTG
gccaggctggtcttgaactc

SEQ ID NO: 61708 - DNA, 20 bp, Artificial Sequence
  Description of Artificial Sequence: Synthetic oligonucleotide
  Target: ATXN2; (-) strand; PAM type: YTN; PAM sequence: TTC
accatgttggccaggctggt

SEQ ID NO: 61709 - DNA, 20 bp, Artificial Sequence
  Description of Artificial Sequence: Synthetic oligonucleotide
  Target: ATXN2; (-) strand; PAM type: YTN; PAM sequence: TTT
caccatgttggccaggctgg

SEQ ID NO: 61710 - DNA, 20 bp, Artificial Sequence
  Description of Artificial Sequence: Synthetic oligonucleotide
  Target: ATXN2; (-) strand; PAM type: YTN; PAM sequence: TTA
gtagagatggaatttcacca

SEQ ID NO: 61711 - DNA, 20 bp, Artificial Sequence
  Description of Artificial Sequence: Synthetic oligonucleotide
  Target: ATXN2; (-) strand; PAM type: YTN; PAM sequence: TTT
agtagagatggaatttcacc

SEQ ID NO: 61712 - DNA, 20 bp, Artificial Sequence
  Description of Artificial Sequence: Synthetic oligonucleotide
  Target: ATXN2; (-) strand; PAM type: YTN; PAM sequence: TTT
tagtagagatggaatttcac

SEQ ID NO: 61713 - DNA, 20 bp, Artificial Sequence
  Description of Artificial Sequence: Synthetic oligonucleotide
  Target: ATXN2; (-) strand; PAM type: YTN; PAM sequence: TTT
ttagtagagatggaatttca

SEQ ID NO: 61714 - DNA, 20 bp, Artificial Sequence
  Description of Artificial Sequence: Synthetic oligonucleotide
  Target: ATXN2; (-) strand; PAM type: YTN; PAM sequence: TTG
tatttttagtagagatggaa

SEQ ID NO: 61715 - DNA, 20 bp, Artificial Sequence
  Description of Artificial Sequence: Synthetic oligonucleotide
  Target: ATXN2; (-) strand; PAM type: YTN; PAM sequence: TTT
gtatttttagtagagatgga

SEQ ID NO: 61716 - DNA, 20 bp, Artificial Sequence
  Description of Artificial Sequence: Synthetic oligonucleotide
  Target: ATXN2; (-) strand; PAM type: YTN; PAM sequence: TTT
tgtatttttagtagagatgg

SEQ ID NO: 61717 - DNA, 20 bp, Artificial Sequence
  Description of Artificial Sequence: Synthetic oligonucleotide
  Target: ATXN2; (-) strand; PAM type: YTN; PAM sequence: TTT
ttgtatttttagtagagatg

SEQ ID NO: 61718 - DNA, 20 bp, Artificial Sequence
  Description of Artificial Sequence: Synthetic oligonucleotide
  Target: ATXN2; (-) strand; PAM type: YTN; PAM sequence: CTC
ggcccatttttgtattttta

SEQ ID NO: 61719 - DNA, 20 bp, Artificial Sequence
  Description of Artificial Sequence: Synthetic oligonucleotide
  Target: ATXN2; (-) strand; PAM type: YTN; PAM sequence: TTA
taggcgtgcaccaccgcgct

SEQ ID NO: 61720 - DNA, 20 bp, Artificial Sequence
  Description of Artificial Sequence: Synthetic oligonucleotide
  Target: ATXN2; (-) strand; PAM type: YTN; PAM sequence: CTG
gggttataggcgtgcaccac

SEQ ID NO: 61721 - DNA, 20 bp, Artificial Sequence
  Description of Artificial Sequence: Synthetic oligonucleotide
  Target: ATXN2; (-) strand; PAM type: YTN; PAM sequence: CTC
cagagtagctggggttatag

SEQ ID NO: 61722 - DNA, 20 bp, Artificial Sequence
  Description of Artificial Sequence: Synthetic oligonucleotide
  Target: ATXN2; (-) strand; PAM type: YTN; PAM sequence: CTG
cgtcagcctccagagtagct

SEQ ID NO: 61723 - DNA, 20 bp, Artificial Sequence
  Description of Artificial Sequence: Synthetic oligonucleotide
  Target: ATXN2; (-) strand; PAM type: YTN; PAM sequence: CTC
aagcgatccccctgcgtcag

SEQ ID NO: 61724 - DNA, 20 bp, Artificial Sequence
  Description of Artificial Sequence: Synthetic oligonucleotide
  Target: ATXN2; (-) strand; PAM type: YTN; PAM sequence: CTG
agctcaagcgatccccctgc

SEQ ID NO: 61725 - DNA, 20 bp, Artificial Sequence
  Description of Artificial Sequence: Synthetic oligonucleotide
  Target: ATXN2; (-) strand; PAM type: YTN; PAM sequence: TTC
ctgagctcaagcgatccccc

SEQ ID NO: 61726 - DNA, 20 bp, Artificial Sequence
  Description of Artificial Sequence: Synthetic oligonucleotide
  Target: ATXN2; (-) strand; PAM type: YTN; PAM sequence: CTC
gaattcctgagctcaagcga

SEQ ID NO: 61727 - DNA, 20 bp, Artificial Sequence
  Description of Artificial Sequence: Synthetic oligonucleotide
  Target: ATXN2; (-) strand; PAM type: YTN; PAM sequence: CTG
gtctcgaattcctgagctca

SEQ ID NO: 61728 - DNA, 20 bp, Artificial Sequence
  Description of Artificial Sequence: Synthetic oligonucleotide
  Target: ATXN2; (-) strand; PAM type: YTN; PAM sequence: TTC
ccaggctggtctcgaattcc

SEQ ID NO: 61729 - DNA, 20 bp, Artificial Sequence
  Description of Artificial Sequence: Synthetic oligonucleotide
  Target: ATXN2; (-) strand; PAM type: YTN; PAM sequence: CTT
cccaggctggtctcgaattc

SEQ ID NO: 61730 - DNA, 20 bp, Artificial Sequence
  Description of Artificial Sequence: Synthetic oligonucleotide
  Target: ATXN2; (-) strand; PAM type: YTN; PAM sequence: CTC
cgtgcttcccaggctggtct

SEQ ID NO: 61731 - DNA, 20 bp, Artificial Sequence
  Description of Artificial Sequence: Synthetic oligonucleotide
  Target: ATXN2; (-) strand; PAM type: YTN; PAM sequence: TTC
tccgtgcttcccaggctggt

SEQ ID NO: 61732 - DNA, 20 bp, Artificial Sequence
  Description of Artificial Sequence: Synthetic oligonucleotide
  Target: ATXN2; (-) strand; PAM type: YTN; PAM sequence: CTT
ctccgtgcttcccaggctgg

SEQ ID NO: 61733 - DNA, 20 bp, Artificial Sequence
  Description of Artificial Sequence: Synthetic oligonucleotide
  Target: ATXN2; (-) strand; PAM type: YTN; PAM sequence: TTG
tagagatggagcttctccgt

SEQ ID NO: 61734 - DNA, 20 bp, Artificial Sequence
  Description of Artificial Sequence: Synthetic oligonucleotide
  Target: ATXN2; (-) strand; PAM type: YTN; PAM sequence: TTT
gtagagatggagcttctccg

SEQ ID NO: 61735 - DNA, 20 bp, Artificial Sequence
  Description of Artificial Sequence: Synthetic oligonucleotide
  Target: ATXN2; (-) strand; PAM type: YTN; PAM sequence: TTT
tgtagagatggagcttctcc

SEQ ID NO: 61736 - DNA, 20 bp, Artificial Sequence
  Description of Artificial Sequence: Synthetic oligonucleotide
  Target: ATXN2; (-) strand; PAM type: YTN; PAM sequence: TTT
ttgtagagatggagcttctc

SEQ ID NO: 61737 - DNA, 20 bp, Artificial Sequence
  Description of Artificial Sequence: Synthetic oligonucleotide
  Target: ATXN2; (-) strand; PAM type: YTN; PAM sequence: TTT
tttgtagagatggagcttct

SEQ ID NO: 61738 - DNA, 20 bp, Artificial Sequence
  Description of Artificial Sequence: Synthetic oligonucleotide
  Target: ATXN2; (-) strand; PAM type: YTN; PAM sequence: TTA
tattttttgtagagatggag

SEQ ID NO: 61739 - DNA, 20 bp, Artificial Sequence
  Description of Artificial Sequence: Synthetic oligonucleotide
  Target: ATXN2; (-) strand; PAM type: YTN; PAM sequence: TTT
atattttttgtagagatgga

SEQ ID NO: 61740 - DNA, 20 bp, Artificial Sequence
  Description of Artificial Sequence: Synthetic oligonucleotide
  Target: ATXN2; (-) strand; PAM type: YTN; PAM sequence: TTT
tatattttttgtagagatgg

SEQ ID NO: 61741 - DNA, 20 bp, Artificial Sequence
  Description of Artificial Sequence: Synthetic oligonucleotide
  Target: ATXN2; (-) strand; PAM type: YTN; PAM sequence: TTT
ttatattttttgtagagatg

SEQ ID NO: 61742 - DNA, 20 bp, Artificial Sequence
  Description of Artificial Sequence: Synthetic oligonucleotide
  Target: ATXN2; (-) strand; PAM type: YTN; PAM sequence: CTA
atttttatattttttgtaga

SEQ ID NO: 61743 - DNA, 20 bp, Artificial Sequence
  Description of Artificial Sequence: Synthetic oligonucleotide
  Target: ATXN2; (-) strand; PAM type: YTN; PAM sequence: CTG
caggcatacgccaccacacc

SEQ ID NO: 61744 - DNA, 20 bp, Artificial Sequence
  Description of Artificial Sequence: Synthetic oligonucleotide
  Target: ATXN2; (-) strand; PAM type: YTN; PAM sequence: CTG
gggctgcaggcatacgccac

SEQ ID NO: 61745 - DNA, 20 bp, Artificial Sequence
  Description of Artificial Sequence: Synthetic oligonucleotide
  Target: ATXN2; (-) strand; PAM type: YTN; PAM sequence: CTC
ccagatagctggggctgcag

SEQ ID NO: 61746 - DNA, 20 bp, Artificial Sequence
  Description of Artificial Sequence: Synthetic oligonucleotide
  Target: ATXN2; (-) strand; PAM type: YTN; PAM sequence: CTC
accctcccagatagctgggg

SEQ ID NO: 61747 - DNA, 20 bp, Artificial Sequence
  Description of Artificial Sequence: Synthetic oligonucleotide
  Target: ATXN2; (-) strand; PAM type: YTN; PAM sequence: CTG
cctcaccctcccagatagct

SEQ ID NO: 61748 - DNA, 20 bp, Artificial Sequence
  Description of Artificial Sequence: Synthetic oligonucleotide
  Target: ATXN2; (-) strand; PAM type: YTN; PAM sequence: CTC
ctgcctcaccctcccagata

SEQ ID NO: 61749 - DNA, 20 bp, Artificial Sequence
  Description of Artificial Sequence: Synthetic oligonucleotide
  Target: ATXN2; (-) strand; PAM type: YTN; PAM sequence: TTC
tcctgcctcaccctcccaga

SEQ ID NO: 61750 - DNA, 20 bp, Artificial Sequence
  Description of Artificial Sequence: Synthetic oligonucleotide
  Target: ATXN2; (-) strand; PAM type: YTN; PAM sequence: TTC
aagcaattctcctgcctcac

SEQ ID NO: 61751 - DNA, 20 bp, Artificial Sequence
  Description of Artificial Sequence: Synthetic oligonucleotide
  Target: ATXN2; (-) strand; PAM type: YTN; PAM sequence: CTG
ggttcaagcaattctcctgc

SEQ ID NO: 61752 - DNA, 20 bp, Artificial Sequence
  Description of Artificial Sequence: Synthetic oligonucleotide
  Target: ATXN2; (-) strand; PAM type: YTN; PAM sequence: TTC
ctgggttcaagcaattctcc

SEQ ID NO: 61753 - DNA, 20 bp, Artificial Sequence
  Description of Artificial Sequence: Synthetic oligonucleotide
  Target: ATXN2; (-) strand; PAM type: YTN; PAM sequence: CTT
cctgggttcaagcaattctc

SEQ ID NO: 61754 - DNA, 20 bp, Artificial Sequence
  Description of Artificial Sequence: Synthetic oligonucleotide
  Target: ATXN2; (-) strand; PAM type: YTN; PAM sequence: TTC
gcttcctgggttcaagcaat

SEQ ID NO: 61755 - DNA, 20 bp, Artificial Sequence
  Description of Artificial Sequence: Synthetic oligonucleotide
  Target: ATXN2; (-) strand; PAM type: YTN; PAM sequence: CTT
cgcttcctgggttcaagcaa

SEQ ID NO: 61756 - DNA, 20 bp, Artificial Sequence
  Description of Artificial Sequence: Synthetic oligonucleotide
  Target: ATXN2; (-) strand; PAM type: YTN; PAM sequence: CTG
cagccttcgcttcctgggtt

SEQ ID NO: 61757 - DNA, 20 bp, Artificial Sequence
  Description of Artificial Sequence: Synthetic oligonucleotide
  Target: ATXN2; (-) strand; PAM type: YTN; PAM sequence: CTC
actgcagccttcgcttcctg

SEQ ID NO: 61758 - DNA, 20 bp, Artificial Sequence
  Description of Artificial Sequence: Synthetic oligonucleotide
  Target: ATXN2; (-) strand; PAM type: YTN; PAM sequence: CTC
ggctcactgcagccttcgct

SEQ ID NO: 61759 - DNA, 20 bp, Artificial Sequence
  Description of Artificial Sequence: Synthetic oligonucleotide
  Target: ATXN2; (-) strand; PAM type: YTN; PAM sequence: CTG
gagcacagtggcacaatctc

SEQ ID NO: 61760 - DNA, 20 bp, Artificial Sequence
  Description of Artificial Sequence: Synthetic oligonucleotide
  Target: ATXN2; (-) strand; PAM type: YTN; PAM sequence: TTG
agatcgtgcccaggctggag

SEQ ID NO: 61761 - DNA, 20 bp, Artificial Sequence
  Description of Artificial Sequence: Synthetic oligonucleotide
  Target: ATXN2; (-) strand; PAM type: YTN; PAM sequence: TTT
gagatcgtgcccaggctgga

SEQ ID NO: 61762 - DNA, 20 bp, Artificial Sequence
  Description of Artificial Sequence: Synthetic oligonucleotide
  Target: ATXN2; (-) strand; PAM type: YTN; PAM sequence: TTT
tgagatcgtgcccaggctgg

SEQ ID NO: 61763 - DNA, 20 bp, Artificial Sequence
  Description of Artificial Sequence: Synthetic oligonucleotide
  Target: ATXN2; (-) strand; PAM type: YTN; PAM sequence: TTG
ttttgagatcgtgcccaggc

SEQ ID NO: 61764 - DNA, 20 bp, Artificial Sequence
  Description of Artificial Sequence: Synthetic oligonucleotide
  Target: ATXN2; (-) strand; PAM type: YTN; PAM sequence: TTG
tattgttttgagatcgtgcc

SEQ ID NO: 61765 - DNA, 20 bp, Artificial Sequence
  Description of Artificial Sequence: Synthetic oligonucleotide
  Target: ATXN2; (-) strand; PAM type: YTN; PAM sequence: TTT
gtattgttttgagatcgtgc

SEQ ID NO: 61766 - DNA, 20 bp, Artificial Sequence
  Description of Artificial Sequence: Synthetic oligonucleotide
  Target: ATXN2; (-) strand; PAM type: YTN; PAM sequence: TTT
tgtattgttttgagatcgtg

SEQ ID NO: 61767 - DNA, 20 bp, Artificial Sequence
  Description of Artificial Sequence: Synthetic oligonucleotide
  Target: ATXN2; (-) strand; PAM type: YTN; PAM sequence: TTT
ttgtattgttttgagatcgt

SEQ ID NO: 61768 - DNA, 20 bp, Artificial Sequence
  Description of Artificial Sequence: Synthetic oligonucleotide
  Target: ATXN2; (-) strand; PAM type: YTN; PAM sequence: TTT
tttgtattgttttgagatcg

SEQ ID NO: 61769 - DNA, 20 bp, Artificial Sequence
  Description of Artificial Sequence: Synthetic oligonucleotide
  Target: ATXN2; (-) strand; PAM type: YTN; PAM sequence: TTT
ttttgtattgttttgagatc

SEQ ID NO: 61770 - DNA, 20 bp, Artificial Sequence
  Description of Artificial Sequence: Synthetic oligonucleotide
  Target: ATXN2; (-) strand; PAM type: YTN; PAM sequence: TTG
tttttttgtattgttttgag

SEQ ID NO: 61771 - DNA, 20 bp, Artificial Sequence
  Description of Artificial Sequence: Synthetic oligonucleotide
  Target: ATXN2; (-) strand; PAM type: YTN; PAM sequence: TTT
gtttttttgtattgttttga

SEQ ID NO: 61772 - DNA, 20 bp, Artificial Sequence
  Description of Artificial Sequence: Synthetic oligonucleotide
  Target: ATXN2; (-) strand; PAM type: YTN; PAM sequence: TTT
tgtttttttgtattgttttg

SEQ ID NO: 61773 - DNA, 20 bp, Artificial Sequence
  Description of Artificial Sequence: Synthetic oligonucleotide
  Target: ATXN2; (-) strand; PAM type: YTN; PAM sequence: TTT
ttgtttttttgtattgtttt

SEQ ID NO: 61774 - DNA, 20 bp, Artificial Sequence
  Description of Artificial Sequence: Synthetic oligonucleotide
  Target: ATXN2; (-) strand; PAM type: YTN; PAM sequence: TTT
tttgtttttttgtattgttt

SEQ ID NO: 61775 - DNA, 20 bp, Artificial Sequence
  Description of Artificial Sequence: Synthetic oligonucleotide
  Target: ATXN2; (-) strand; PAM type: YTN; PAM sequence: TTG
tggttttttgtttttttgta

SEQ ID NO: 61776 - DNA, 20 bp, Artificial Sequence
  Description of Artificial Sequence: Synthetic oligonucleotide
  Target: ATXN2; (-) strand; PAM type: YTN; PAM sequence: TTA
tgaagtgtcattgtggtttt

SEQ ID NO: 61777 - DNA, 20 bp, Artificial Sequence
  Description of Artificial Sequence: Synthetic oligonucleotide
  Target: ATXN2; (-) strand; PAM type: YTN; PAM sequence: CTA
gtggttatgaagtgtcattg

SEQ ID NO: 61778 - DNA, 20 bp, Artificial Sequence
  Description of Artificial Sequence: Synthetic oligonucleotide
  Target: ATXN2; (-) strand; PAM type: YTN; PAM sequence: TTC
tagtggttatgaagtgtcat

SEQ ID NO: 61779 - DNA, 20 bp, Artificial Sequence
  Description of Artificial Sequence: Synthetic oligonucleotide
  Target: ATXN2; (-) strand; PAM type: YTN; PAM sequence: TTA
tgtccattctagtggttatg

SEQ ID NO: 61780 - DNA, 20 bp, Artificial Sequence
  Description of Artificial Sequence: Synthetic oligonucleotide
  Target: ATXN2; (-) strand; PAM type: YTN; PAM sequence: TTG
ggttatgtccattctagtgg

SEQ ID NO: 61781 - DNA, 20 bp, Artificial Sequence
  Description of Artificial Sequence: Synthetic oligonucleotide
  Target: ATXN2; (-) strand; PAM type: YTN; PAM sequence: TTT
gggttatgtccattctagtg

SEQ ID NO: 61782 - DNA, 20 bp, Artificial Sequence
  Description of Artificial Sequence: Synthetic oligonucleotide
  Target: ATXN2; (-) strand; PAM type: YTN; PAM sequence: TTG
gtttgggttatgtccattct

SEQ ID NO: 61783 - DNA, 20 bp, Artificial Sequence
  Description of Artificial Sequence: Synthetic oligonucleotide
  Target: ATXN2; (-) strand; PAM type: YTN; PAM sequence: TTT
ggtttgggttatgtccattc

SEQ ID NO: 61784 - DNA, 20 bp, Artificial Sequence
  Description of Artificial Sequence: Synthetic oligonucleotide
  Target: ATXN2; (-) strand; PAM type: YTN; PAM sequence: CTT
tggtttgggttatgtccatt

SEQ ID NO: 61785 - DNA, 20 bp, Artificial Sequence
  Description of Artificial Sequence: Synthetic oligonucleotide
  Target: ATXN2; (-) strand; PAM type: YTN; PAM sequence: CTC
ataaataaccgatatgtctt

SEQ ID NO: 61786 - DNA, 20 bp, Artificial Sequence
  Description of Artificial Sequence: Synthetic oligonucleotide
  Target: ATXN2; (-) strand; PAM type: YTN; PAM sequence: CTC
cacatcctcataaataaccg

SEQ ID NO: 61787 - DNA, 20 bp, Artificial Sequence
  Description of Artificial Sequence: Synthetic oligonucleotide
  Target: ATXN2; (-) strand; PAM type: YTN; PAM sequence: TTC
tccacatcctcataaataac

SEQ ID NO: 61788 - DNA, 20 bp, Artificial Sequence
  Description of Artificial Sequence: Synthetic oligonucleotide
  Target: ATXN2; (-) strand; PAM type: YTN; PAM sequence: TTT
ctccacatcctcataaataa

SEQ ID NO: 61789 - DNA, 20 bp, Artificial Sequence
  Description of Artificial Sequence: Synthetic oligonucleotide
  Target: ATXN2; (-) strand; PAM type: YTN; PAM sequence: TTC
cagtttctccacatcctcat

SEQ ID NO: 61790 - DNA, 20 bp, Artificial Sequence
  Description of Artificial Sequence: Synthetic oligonucleotide
  Target: ATXN2; (-) strand; PAM type: YTN; PAM sequence: CTA
ccagtaatgtacaagtgttc

SEQ ID NO: 61791 - DNA, 20 bp, Artificial Sequence
  Description of Artificial Sequence: Synthetic oligonucleotide
  Target: ATXN2; (-) strand; PAM type: YTN; PAM sequence: TTC
taccagtaatgtacaagtgt

SEQ ID NO: 61792 - DNA, 20 bp, Artificial Sequence
  Description of Artificial Sequence: Synthetic oligonucleotide
  Target: ATXN2; (-) strand; PAM type: YTN; PAM sequence: TTT
ctaccagtaatgtacaagtg

SEQ ID NO: 61793 - DNA, 20 bp, Artificial Sequence
  Description of Artificial Sequence: Synthetic oligonucleotide
  Target: ATXN2; (-) strand; PAM type: YTN; PAM sequence: TTG
tatttctaccagtaatgtac

SEQ ID NO: 61794 - DNA, 20 bp, Artificial Sequence
  Description of Artificial Sequence: Synthetic oligonucleotide
  Target: ATXN2; (-) strand; PAM type: YTN; PAM sequence: TTT
gtatttctaccagtaatgta

SEQ ID NO: 61795 - DNA, 20 bp, Artificial Sequence
  Description of Artificial Sequence: Synthetic oligonucleotide
  Target: ATXN2; (-) strand; PAM type: YTN; PAM sequence: TTT
tgtatttctaccagtaatgt

SEQ ID NO: 61796 - DNA, 20 bp, Artificial Sequence
  Description of Artificial Sequence: Synthetic oligonucleotide
  Target: ATXN2; (-) strand; PAM type: YTN; PAM sequence: CTG
catcattttgtatttctacc

SEQ ID NO: 61797 - DNA, 20 bp, Artificial Sequence
  Description of Artificial Sequence: Synthetic oligonucleotide
  Target: ATXN2; (-) strand; PAM type: YTN; PAM sequence: TTC
caaagcagctgcatcatttt

SEQ ID NO: 61798 - DNA, 20 bp, Artificial Sequence
  Description of Artificial Sequence: Synthetic oligonucleotide
  Target: ATXN2; (-) strand; PAM type: YTN; PAM sequence: TTT
ccaaagcagctgcatcattt

SEQ ID NO: 61799 - DNA, 20 bp, Artificial Sequence
  Description of Artificial Sequence: Synthetic oligonucleotide
  Target: ATXN2; (-) strand; PAM type: YTN; PAM sequence: TTT
tccaaagcagctgcatcatt

SEQ ID NO: 61800 - DNA, 20 bp, Artificial Sequence
  Description of Artificial Sequence: Synthetic oligonucleotide
  Target: ATXN2; (-) strand; PAM type: YTN; PAM sequence: CTT
ttccaaagcagctgcatcat

SEQ ID NO: 61801 - DNA, 20 bp, Artificial Sequence
  Description of Artificial Sequence: Synthetic oligonucleotide
  Target: ATXN2; (-) strand; PAM type: YTN; PAM sequence: CTG
ccaaacttttccaaagcagc

SEQ ID NO: 61802 - DNA, 20 bp, Artificial Sequence
  Description of Artificial Sequence: Synthetic oligonucleotide
  Target: ATXN2; (-) strand; PAM type: YTN; PAM sequence: CTG
tgatggaactgccaaacttt

SEQ ID NO: 61803 - DNA, 20 bp, Artificial Sequence
  Description of Artificial Sequence: Synthetic oligonucleotide
  Target: ATXN2; (-) strand; PAM type: YTN; PAM sequence: CTA
aagtagaaatgctgtgatgg

SEQ ID NO: 61804 - DNA, 20 bp, Artificial Sequence
  Description of Artificial Sequence: Synthetic oligonucleotide
  Target: ATXN2; (-) strand; PAM type: YTN; PAM sequence: CTC
ctaaagtagaaatgctgtga

SEQ ID NO: 61805 - DNA, 20 bp, Artificial Sequence
  Description of Artificial Sequence: Synthetic oligonucleotide
  Target: ATXN2; (-) strand; PAM type: YTN; PAM sequence: TTC
tcctaaagtagaaatgctgt

SEQ ID NO: 61806 - DNA, 20 bp, Artificial Sequence
  Description of Artificial Sequence: Synthetic oligonucleotide
  Target: ATXN2; (-) strand; PAM type: YTN; PAM sequence: TTT
ctcctaaagtagaaatgctg

SEQ ID NO: 61807 - DNA, 20 bp, Artificial Sequence
  Description of Artificial Sequence: Synthetic oligonucleotide
  Target: ATXN2; (-) strand; PAM type: YTN; PAM sequence: TTC
atttctcctaaagtagaaat

SEQ ID NO: 61808 - DNA, 20 bp, Artificial Sequence
  Description of Artificial Sequence: Synthetic oligonucleotide
  Target: ATXN2; (-) strand; PAM type: YTN; PAM sequence: TTT
catttctcctaaagtagaaa

SEQ ID NO: 61809 - DNA, 20 bp, Artificial Sequence
  Description of Artificial Sequence: Synthetic oligonucleotide
  Target: ATXN2; (-) strand; PAM type: YTN; PAM sequence: TTT
tcatttctcctaaagtagaa

SEQ ID NO: 61810 - DNA, 20 bp, Artificial Sequence
  Description of Artificial Sequence: Synthetic oligonucleotide
  Target: ATXN2; (-) strand; PAM type: YTN; PAM sequence: TTA
gattttcatttctcctaaag

SEQ ID NO: 61811 - DNA, 20 bp, Artificial Sequence
  Description of Artificial Sequence: Synthetic oligonucleotide
  Target: ATXN2; (-) strand; PAM type: YTN; PAM sequence: CTT
agattttcatttctcctaaa

SEQ ID NO: 61812 - DNA, 20 bp, Artificial Sequence
  Description of Artificial Sequence: Synthetic oligonucleotide
  Target: ATXN2; (-) strand; PAM type: YTN; PAM sequence: TTC
atgtggccttagattttcat

SEQ ID NO: 61813 - DNA, 20 bp, Artificial Sequence
  Description of Artificial Sequence: Synthetic oligonucleotide
  Target: ATXN2; (-) strand; PAM type: YTN; PAM sequence: TTT
catgtggccttagattttca

SEQ ID NO: 61814 - DNA, 20 bp, Artificial Sequence
  Description of Artificial Sequence: Synthetic oligonucleotide
  Target: ATXN2; (-) strand; PAM type: YTN; PAM sequence: TTT
tcatgtggccttagattttc

SEQ ID NO: 61815 - DNA, 20 bp, Artificial Sequence
  Description of Artificial Sequence: Synthetic oligonucleotide
  Target: ATXN2; (-) strand; PAM type: YTN; PAM sequence: TTT
ttcatgtggccttagatttt

SEQ ID NO: 61816 - DNA, 20 bp, Artificial Sequence
  Description of Artificial Sequence: Synthetic oligonucleotide
  Target: ATXN2; (-) strand; PAM type: YTN; PAM sequence: TTT
tttcatgtggccttagattt

SEQ ID NO: 61817 - DNA, 20 bp, Artificial Sequence
  Description of Artificial Sequence: Synthetic oligonucleotide
  Target: ATXN2; (-) strand; PAM type: YTN; PAM sequence: TTT
ttttcatgtggccttagatt

SEQ ID NO: 61818 - DNA, 20 bp, Artificial Sequence
  Description of Artificial Sequence: Synthetic oligonucleotide
  Target: ATXN2; (-) strand; PAM type: YTN; PAM sequence: TTT
tttttcatgtggccttagat

SEQ ID NO: 61819 - DNA, 20 bp, Artificial Sequence
  Description of Artificial Sequence: Synthetic oligonucleotide
  Target: ATXN2; (-) strand; PAM type: YTN; PAM sequence: CTC
aaaaaataaaaaataaaatt

SEQ ID NO: 61820 - DNA, 20 bp, Artificial Sequence
  Description of Artificial Sequence: Synthetic oligonucleotide
  Target: ATXN2; (-) strand; PAM type: YTN; PAM sequence: CTG
agtgaaagagtgagtctcaa

SEQ ID NO: 61821 - DNA, 20 bp, Artificial Sequence
  Description of Artificial Sequence: Synthetic oligonucleotide
  Target: ATXN2; (-) strand; PAM type: YTN; PAM sequence: CTG
caccccagcctgagtgaaag

SEQ ID NO: 61822 - DNA, 20 bp, Artificial Sequence
  Description of Artificial Sequence: Synthetic oligonucleotide
  Target: ATXN2; (-) strand; PAM type: YTN; PAM sequence: CTG
agatcacaccactgcacccc

SEQ ID NO: 61823 - DNA, 20 bp, Artificial Sequence
  Description of Artificial Sequence: Synthetic oligonucleotide
  Target: ATXN2; (-) strand; PAM type: YTN; PAM sequence: CTG
cagtgagctgagatcacacc

SEQ ID NO: 61824 - DNA, 20 bp, Artificial Sequence
  Description of Artificial Sequence: Synthetic oligonucleotide
  Target: ATXN2; (-) strand; PAM type: YTN; PAM sequence: CTG
ggaggcggaggctgcagtga

SEQ ID NO: 61825 - DNA, 20 bp, Artificial Sequence
  Description of Artificial Sequence: Synthetic oligonucleotide
  Target: ATXN2; (-) strand; PAM type: YTN; PAM sequence: TTG
aacctgggaggcggaggctg

SEQ ID NO: 61826 - DNA, 20 bp, Artificial Sequence
  Description of Artificial Sequence: Synthetic oligonucleotide
  Target: ATXN2; (-) strand; PAM type: YTN; PAM sequence: CTT
gaacctgggaggcggaggct

SEQ ID NO: 61827 - DNA, 20 bp, Artificial Sequence
  Description of Artificial Sequence: Synthetic oligonucleotide
  Target: ATXN2; (-) strand; PAM type: YTN; PAM sequence: CTG
aggcaggagcatcagaatcg

SEQ ID NO: 61828 - DNA, 20 bp, Artificial Sequence
  Description of Artificial Sequence: Synthetic oligonucleotide
  Target: ATXN2; (-) strand; PAM type: YTN; PAM sequence: TTC
aggaggctgaggcaggagca

SEQ ID NO: 61829 - DNA, 20 bp, Artificial Sequence
  Description of Artificial Sequence: Synthetic oligonucleotide
  Target: ATXN2; (-) strand; PAM type: YTN; PAM sequence: CTA
ttcaggaggctgaggcagga

SEQ ID NO: 61830 - DNA, 20 bp, Artificial Sequence
  Description of Artificial Sequence: Synthetic oligonucleotide
  Target: ATXN2; (-) strand; PAM type: YTN; PAM sequence: CTA
taatcccagctattcaggag

SEQ ID NO: 61831 - DNA, 20 bp, Artificial Sequence
  Description of Artificial Sequence: Synthetic oligonucleotide
  Target: ATXN2; (-) strand; PAM type: YTN; PAM sequence: CTG
gcatggtagcgtgcacctat

SEQ ID NO: 61832 - DNA, 20 bp, Artificial Sequence
  Description of Artificial Sequence: Synthetic oligonucleotide
  Target: ATXN2; (-) strand; PAM type: YTN; PAM sequence: TTA
cactggcatggtagcgtgca

SEQ ID NO: 61833 - DNA, 20 bp, Artificial Sequence
  Description of Artificial Sequence: Synthetic oligonucleotide
  Target: ATXN2; (-) strand; PAM type: YTN; PAM sequence: CTA
aaaatacaaaaattacactg

SEQ ID NO: 61834 - DNA, 20 bp, Artificial Sequence
  Description of Artificial Sequence: Synthetic oligonucleotide
  Target: ATXN2; (-) strand; PAM type: YTN; PAM sequence: CTA
ctaaaaatacaaaaattaca

SEQ ID NO: 61835 - DNA, 20 bp, Artificial Sequence
  Description of Artificial Sequence: Synthetic oligonucleotide
  Target: ATXN2; (-) strand; PAM type: YTN; PAM sequence: CTC
tactaaaaatacaaaaatta

SEQ ID NO: 61836 - DNA, 20 bp, Artificial Sequence
  Description of Artificial Sequence: Synthetic oligonucleotide
  Target: ATXN2; (-) strand; PAM type: YTN; PAM sequence: CTG
gccaacatggtgaaatccca

SEQ ID NO: 61837 - DNA, 20 bp, Artificial Sequence
  Description of Artificial Sequence: Synthetic oligonucleotide
  Target: ATXN2; (-) strand; PAM type: YTN; PAM sequence: TTG
agaccagcctggccaacatg

SEQ ID NO: 61838 - DNA, 20 bp, Artificial Sequence
  Description of Artificial Sequence: Synthetic oligonucleotide
  Target: ATXN2; (-) strand; PAM type: YTN; PAM sequence: TTT
gagaccagcctggccaacat

SEQ ID NO: 61839 - DNA, 20 bp, Artificial Sequence
  Description of Artificial Sequence: Synthetic oligonucleotide
  Target: ATXN2; (-) strand; PAM type: YTN; PAM sequence: TTG
aggtcaggagtttgagacca

SEQ ID NO: 61840 - DNA, 20 bp, Artificial Sequence
  Description of Artificial Sequence: Synthetic oligonucleotide
  Target: ATXN2; (-) strand; PAM type: YTN; PAM sequence: CTT
gaggtcaggagtttgagacc

SEQ ID NO: 61841 - DNA, 20 bp, Artificial Sequence
  Description of Artificial Sequence: Synthetic oligonucleotide
  Target: ATXN2; (-) strand; PAM type: YTN; PAM sequence: CTG
aggtgggcagatgacttgag

SEQ ID NO: 61842 - DNA, 20 bp, Artificial Sequence
  Description of Artificial Sequence: Synthetic oligonucleotide
  Target: ATXN2; (-) strand; PAM type: YTN; PAM sequence: CTG
ggaggctgaggtgggcagat

SEQ ID NO: 61843 - DNA, 20 bp, Artificial Sequence
  Description of Artificial Sequence: Synthetic oligonucleotide
  Target: ATXN2; (-) strand; PAM type: YTN; PAM sequence: CTA
taatcccagcagtctgggag

SEQ ID NO: 61844 - DNA, 20 bp, Artificial Sequence
  Description of Artificial Sequence: Synthetic oligonucleotide
  Target: ATXN2; (-) strand; PAM type: YTN; PAM sequence: CTC
atgcctataatcccagcagt

SEQ ID NO: 61845 - DNA, 20 bp, Artificial Sequence
  Description of Artificial Sequence: Synthetic oligonucleotide
  Target: ATXN2; (-) strand; PAM type: YTN; PAM sequence: CTG
ggagcagtggctcatgccta

SEQ ID NO: 61846 - DNA, 20 bp, Artificial Sequence
  Description of Artificial Sequence: Synthetic oligonucleotide
  Target: ATXN2; (-) strand; PAM type: YTN; PAM sequence: TTC
atatgaggctgggagcagtg

SEQ ID NO: 61847 - DNA, 20 bp, Artificial Sequence
  Description of Artificial Sequence: Synthetic oligonucleotide
  Target: ATXN2; (-) strand; PAM type: YTN; PAM sequence: TTT
catatgaggctgggagcagt

SEQ ID NO: 61848 - DNA, 20 bp, Artificial Sequence
  Description of Artificial Sequence: Synthetic oligonucleotide
  Target: ATXN2; (-) strand; PAM type: YTN; PAM sequence: TTT
tcatatgaggctgggagcag

SEQ ID NO: 61849 - DNA, 20 bp, Artificial Sequence
  Description of Artificial Sequence: Synthetic oligonucleotide
  Target: ATXN2; (-) strand; PAM type: YTN; PAM sequence: TTC
atgtacaaattttcatatga

SEQ ID NO: 61850 - DNA, 20 bp, Artificial Sequence
  Description of Artificial Sequence: Synthetic oligonucleotide
  Target: ATXN2; (-) strand; PAM type: YTN; PAM sequence: TTT
catgtacaaattttcatatg

SEQ ID NO: 61851 - DNA, 20 bp, Artificial Sequence
  Description of Artificial Sequence: Synthetic oligonucleotide
  Target: ATXN2; (-) strand; PAM type: YTN; PAM sequence: TTT
tcatgtacaaattttcatat

SEQ ID NO: 61852 - DNA, 20 bp, Artificial Sequence
  Description of Artificial Sequence: Synthetic oligonucleotide
  Target: ATXN2; (-) strand; PAM type: YTN; PAM sequence: TTG
tggattttcatgtacaaatt

SEQ ID NO: 61853 - DNA, 20 bp, Artificial Sequence
  Description of Artificial Sequence: Synthetic oligonucleotide
  Target: ATXN2; (-) strand; PAM type: YTN; PAM sequence: TTT
gtggattttcatgtacaaat

SEQ ID NO: 61854 - DNA, 20 bp, Artificial Sequence
  Description of Artificial Sequence: Synthetic oligonucleotide
  Target: ATXN2; (-) strand; PAM type: YTN; PAM sequence: TTT
tgtggattttcatgtacaaa

SEQ ID NO: 61855 - DNA, 20 bp, Artificial Sequence
  Description of Artificial Sequence: Synthetic oligonucleotide
  Target: ATXN2; (-) strand; PAM type: YTN; PAM sequence: CTT
ttgtggattttcatgtacaa

SEQ ID NO: 61856 - DNA, 20 bp, Artificial Sequence
  Description of Artificial Sequence: Synthetic oligonucleotide
  Target: ATXN2; (-) strand; PAM type: YTN; PAM sequence: CTG
gcaatgagtaatgcttttgt

SEQ ID NO: 61857 - DNA, 20 bp, Artificial Sequence
  Description of Artificial Sequence: Synthetic oligonucleotide
  Target: ATXN2; (-) strand; PAM type: YTN; PAM sequence: TTC
tggcaatgagtaatgctttt

SEQ ID NO: 61858 - DNA, 20 bp, Artificial Sequence
  Description of Artificial Sequence: Synthetic oligonucleotide
  Target: ATXN2; (-) strand; PAM type: YTN; PAM sequence: TTT
ctggcaatgagtaatgcttt

SEQ ID NO: 61859 - DNA, 20 bp, Artificial Sequence
  Description of Artificial Sequence: Synthetic oligonucleotide
  Target: ATXN2; (-) strand; PAM type: YTN; PAM sequence: TTT
tctggcaatgagtaatgctt

SEQ ID NO: 61860 - DNA, 20 bp, Artificial Sequence
  Description of Artificial Sequence: Synthetic oligonucleotide
  Target: ATXN2; (-) strand; PAM type: YTN; PAM sequence: TTT
ttctggcaatgagtaatgct

SEQ ID NO: 61861 - DNA, 20 bp, Artificial Sequence
  Description of Artificial Sequence: Synthetic oligonucleotide
  Target: ATXN2; (-) strand; PAM type: YTN; PAM sequence: CTT
tttctggcaatgagtaatgc

SEQ ID NO: 61862 - DNA, 20 bp, Artificial Sequence
  Description of Artificial Sequence: Synthetic oligonucleotide
  Target: ATXN2; (-) strand; PAM type: YTN; PAM sequence: TTC
ctttttctggcaatgagtaa

SEQ ID NO: 61863 - DNA, 20 bp, Artificial Sequence
  Description of Artificial Sequence: Synthetic oligonucleotide
  Target: ATXN2; (-) strand; PAM type: YTN; PAM sequence: TTT
cctttttctggcaatgagta

SEQ ID NO: 61864 - DNA, 20 bp, Artificial Sequence
  Description of Artificial Sequence: Synthetic oligonucleotide
  Target: ATXN2; (-) strand; PAM type: YTN; PAM sequence: TTA
tttcctttttctggcaatga

SEQ ID NO: 61865 - DNA, 20 bp, Artificial Sequence
  Description of Artificial Sequence: Synthetic oligonucleotide
  Target: ATXN2; (-) strand; PAM type: YTN; PAM sequence: TTG
gattatttcctttttctggc

SEQ ID NO: 61866 - DNA, 20 bp, Artificial Sequence
  Description of Artificial Sequence: Synthetic oligonucleotide
  Target: ATXN2; (-) strand; PAM type: YTN; PAM sequence: TTT
ggattatttcctttttctgg

SEQ ID NO: 61867 - DNA, 20 bp, Artificial Sequence
  Description of Artificial Sequence: Synthetic oligonucleotide
  Target: ATXN2; (-) strand; PAM type: YTN; PAM sequence: TTG
atgaacatttggattatttc

SEQ ID NO: 61868 - DNA, 20 bp, Artificial Sequence
  Description of Artificial Sequence: Synthetic oligonucleotide
  Target: ATXN2; (-) strand; PAM type: YTN; PAM sequence: CTA
tcatcagttgatgaacattt

SEQ ID NO: 61869 - DNA, 20 bp, Artificial Sequence
  Description of Artificial Sequence: Synthetic oligonucleotide
  Target: ATXN2; (-) strand; PAM type: YTN; PAM sequence: TTA
cctatcatcagttgatgaac

SEQ ID NO: 61870 - DNA, 20 bp, Artificial Sequence
  Description of Artificial Sequence: Synthetic oligonucleotide
  Target: ATXN2; (-) strand; PAM type: YTN; PAM sequence: TTT
acctatcatcagttgatgaa

SEQ ID NO: 61871 - DNA, 20 bp, Artificial Sequence
  Description of Artificial Sequence: Synthetic oligonucleotide
  Target: ATXN2; (-) strand; PAM type: YTN; PAM sequence: TTT
tacctatcatcagttgatga

SEQ ID NO: 61872 - DNA, 20 bp, Artificial Sequence
  Description of Artificial Sequence: Synthetic oligonucleotide
  Target: ATXN2; (-) strand; PAM type: YTN; PAM sequence: CTT
ttacctatcatcagttgatg

SEQ ID NO: 61873 - DNA, 20 bp, Artificial Sequence
  Description of Artificial Sequence: Synthetic oligonucleotide
  Target: ATXN2; (-) strand; PAM type: YTN; PAM sequence: CTG
aatataccacttttacctat

SEQ ID NO: 61874 - DNA, 20 bp, Artificial Sequence
  Description of Artificial Sequence: Synthetic oligonucleotide
  Target: ATXN2; (-) strand; PAM type: YTN; PAM sequence: CTG
gcctgaatataccactttta

SEQ ID NO: 61875 - DNA, 20 bp, Artificial Sequence
  Description of Artificial Sequence: Synthetic oligonucleotide
  Target: ATXN2; (-) strand; PAM type: YTN; PAM sequence: CTC
ctggcctgaatataccactt

SEQ ID NO: 61876 - DNA, 20 bp, Artificial Sequence
  Description of Artificial Sequence: Synthetic oligonucleotide
  Target: ATXN2; (-) strand; PAM type: YTN; PAM sequence: CTG
ctcctggcctgaatatacca

SEQ ID NO: 61877 - DNA, 20 bp, Artificial Sequence
  Description of Artificial Sequence: Synthetic oligonucleotide
  Target: ATXN2; (-) strand; PAM type: YTN; PAM sequence: TTA
caggtgtgagccactgctcc

SEQ ID NO: 61878 - DNA, 20 bp, Artificial Sequence
  Description of Artificial Sequence: Synthetic oligonucleotide
  Target: ATXN2; (-) strand; PAM type: YTN; PAM sequence: CTG
ggattacaggtgtgagccac

SEQ ID NO: 61879 - DNA, 20 bp, Artificial Sequence
  Description of Artificial Sequence: Synthetic oligonucleotide
  Target: ATXN2; (-) strand; PAM type: YTN; PAM sequence: CTC
ccaaagtgctgggattacag

SEQ ID NO: 61880 - DNA, 20 bp, Artificial Sequence
  Description of Artificial Sequence: Synthetic oligonucleotide
  Target: ATXN2; (-) strand; PAM type: YTN; PAM sequence: CTC
ggcctcccaaagtgctggga

SEQ ID NO: 61881 - DNA, 20 bp, Artificial Sequence
  Description of Artificial Sequence: Synthetic oligonucleotide
  Target: ATXN2; (-) strand; PAM type: YTN; PAM sequence: CTC
cctcggcctcccaaagtgct

SEQ ID NO: 61882 - DNA, 20 bp, Artificial Sequence
  Description of Artificial Sequence: Synthetic oligonucleotide
  Target: ATXN2; (-) strand; PAM type: YTN; PAM sequence: CTC
aagtgatccacctccctcgg

SEQ ID NO: 61883 - DNA, 20 bp, Artificial Sequence
  Description of Artificial Sequence: Synthetic oligonucleotide
  Target: ATXN2; (-) strand; PAM type: YTN; PAM sequence: CTG
gcctcaagtgatccacctcc

SEQ ID NO: 61884 - DNA, 20 bp, Artificial Sequence
  Description of Artificial Sequence: Synthetic oligonucleotide
  Target: ATXN2; (-) strand; PAM type: YTN; PAM sequence: CTC
ctggcctcaagtgatccacc

SEQ ID NO: 61885 - DNA, 20 bp, Artificial Sequence
  Description of Artificial Sequence: Synthetic oligonucleotide
  Target: ATXN2; (-) strand; PAM type: YTN; PAM sequence: TTG
aactcctggcctcaagtgat

SEQ ID NO: 61886 - DNA, 20 bp, Artificial Sequence
  Description of Artificial Sequence: Synthetic oligonucleotide
  Target: ATXN2; (-) strand; PAM type: YTN; PAM sequence: CTT
gaactcctggcctcaagtga

SEQ ID NO: 61887 - DNA, 20 bp, Artificial Sequence
  Description of Artificial Sequence: Synthetic oligonucleotide
  Target: ATXN2; (-) strand; PAM type: YTN; PAM sequence: CTG
gtcttgaactcctggcctca

SEQ ID NO: 61888 - DNA, 20 bp, Artificial Sequence
  Description of Artificial Sequence: Synthetic oligonucleotide
  Target: ATXN2; (-) strand; PAM type: YTN; PAM sequence: TTG
gccgggctggtcttgaactc

SEQ ID NO: 61889 - DNA, 20 bp, Artificial Sequence
  Description of Artificial Sequence: Synthetic oligonucleotide
  Target: ATXN2; (-) strand; PAM type: YTN; PAM sequence: TTG
ccatgttggccgggctggtc

SEQ ID NO: 61890 - DNA, 20 bp, Artificial Sequence
  Description of Artificial Sequence: Synthetic oligonucleotide
  Target: ATXN2; (-) strand; PAM type: YTN; PAM sequence: TTT
gccatgttggccgggctggt

SEQ ID NO: 61891 - DNA, 20 bp, Artificial Sequence
  Description of Artificial Sequence: Synthetic oligonucleotide
  Target: ATXN2; (-) strand; PAM type: YTN; PAM sequence: CTT
tgccatgttggccgggctgg

SEQ ID NO: 61892 - DNA, 20 bp, Artificial Sequence
  Description of Artificial Sequence: Synthetic oligonucleotide
  Target: ATXN2; (-) strand; PAM type: YTN; PAM sequence: CTC
aaaaaaaaaaaaaaaaaaaa

SEQ ID NO: 61893 - DNA, 20 bp, Artificial Sequence
  Description of Artificial Sequence: Synthetic oligonucleotide
  Target: ATXN2; (-) strand; PAM type: YTN; PAM sequence: CTC
cgtctcaaaaaaaaaaaaaa

SEQ ID NO: 61894 - DNA, 20 bp, Artificial Sequence
  Description of Artificial Sequence: Synthetic oligonucleotide
  Target: ATXN2; (-) strand; PAM type: YTN; PAM sequence: CTG
ggtgacagagcgagactccg

SEQ ID NO: 61895 - DNA, 20 bp, Artificial Sequence
  Description of Artificial Sequence: Synthetic oligonucleotide
  Target: ATXN2; (-) strand; PAM type: YTN; PAM sequence: CTC
cagcctgggtgacagagcga

SEQ ID NO: 61896 - DNA, 20 bp, Artificial Sequence
  Description of Artificial Sequence: Synthetic oligonucleotide
  Target: ATXN2; (-) strand; PAM type: YTN; PAM sequence: CTG
cactccagcctgggtgacag

SEQ ID NO: 61897 - DNA, 20 bp, Artificial Sequence
  Description of Artificial Sequence: Synthetic oligonucleotide
  Target: ATXN2; (-) strand; PAM type: YTN; PAM sequence: CTG
agatggtgccactgcactcc

SEQ ID NO: 61898 - DNA, 20 bp, Artificial Sequence
  Description of Artificial Sequence: Synthetic oligonucleotide
  Target: ATXN2; (-) strand; PAM type: YTN; PAM sequence: CTG
gcagtgagctgagatggtgc

SEQ ID NO: 61899 - DNA, 20 bp, Artificial Sequence
  Description of Artificial Sequence: Synthetic oligonucleotide
  Target: ATXN2; (-) strand; PAM type: YTN; PAM sequence: CTG
ggaggcagagctggcagtga

SEQ ID NO: 61900 - DNA, 20 bp, Artificial Sequence
  Description of Artificial Sequence: Synthetic oligonucleotide
  Target: ATXN2; (-) strand; PAM type: YTN; PAM sequence: CTG
aggcaggagaatggcatgaa

SEQ ID NO: 61901 - DNA, 20 bp, Artificial Sequence
  Description of Artificial Sequence: Synthetic oligonucleotide
  Target: ATXN2; (-) strand; PAM type: YTN; PAM sequence: CTC
gggaggctgaggcaggagaa

SEQ ID NO: 61902 - DNA, 20 bp, Artificial Sequence
  Description of Artificial Sequence: Synthetic oligonucleotide
  Target: ATXN2; (-) strand; PAM type: YTN; PAM sequence: CTA
ctcgggaggctgaggcagga

SEQ ID NO: 61903 - DNA, 20 bp, Artificial Sequence
  Description of Artificial Sequence: Synthetic oligonucleotide
  Target: ATXN2; (-) strand; PAM type: YTN; PAM sequence: CTA
tagtcccagctactcgggag

SEQ ID NO: 61904 - DNA, 20 bp, Artificial Sequence
  Description of Artificial Sequence: Synthetic oligonucleotide
  Target: ATXN2; (-) strand; PAM type: YTN; PAM sequence: CTG
agcgtggtggcaggtgccta

SEQ ID NO: 61905 - DNA, 20 bp, Artificial Sequence
  Description of Artificial Sequence: Synthetic oligonucleotide
  Target: ATXN2; (-) strand; PAM type: YTN; PAM sequence: TTA
gctgagcgtggtggcaggtg

SEQ ID NO: 61906 - DNA, 20 bp, Artificial Sequence
  Description of Artificial Sequence: Synthetic oligonucleotide
  Target: ATXN2; (-) strand; PAM type: YTN; PAM sequence: CTA
aaaatacaaacaattagctg

SEQ ID NO: 61907 - DNA, 20 bp, Artificial Sequence
  Description of Artificial Sequence: Synthetic oligonucleotide
  Target: ATXN2; (-) strand; PAM type: YTN; PAM sequence: CTA
ctaaaaatacaaacaattag

SEQ ID NO: 61908 - DNA, 20 bp, Artificial Sequence
  Description of Artificial Sequence: Synthetic oligonucleotide
  Target: ATXN2; (-) strand; PAM type: YTN; PAM sequence: CTC
tactaaaaatacaaacaatt

SEQ ID NO: 61909 - DNA, 20 bp, Artificial Sequence
  Description of Artificial Sequence: Synthetic oligonucleotide
  Target: ATXN2; (-) strand; PAM type: YTN; PAM sequence: CTA
atacagtgaaaccgtgtctc

SEQ ID NO: 61910 - DNA, 20 bp, Artificial Sequence
  Description of Artificial Sequence: Synthetic oligonucleotide
  Target: ATXN2; (-) strand; PAM type: YTN; PAM sequence: CTG
gctaatacagtgaaaccgtg

SEQ ID NO: 61911 - DNA, 20 bp, Artificial Sequence
  Description of Artificial Sequence: Synthetic oligonucleotide
  Target: ATXN2; (-) strand; PAM type: YTN; PAM sequence: TTG
ggaggccgaggtgggcagat

SEQ ID NO: 61912 - DNA, 20 bp, Artificial Sequence
  Description of Artificial Sequence: Synthetic oligonucleotide
  Target: ATXN2; (-) strand; PAM type: YTN; PAM sequence: TTT
gggaggccgaggtgggcaga

SEQ ID NO: 61913 - DNA, 20 bp, Artificial Sequence
  Description of Artificial Sequence: Synthetic oligonucleotide
  Target: ATXN2; (-) strand; PAM type: YTN; PAM sequence: CTT
tgggaggccgaggtgggcag

SEQ ID NO: 61914 - DNA, 20 bp, Artificial Sequence
  Description of Artificial Sequence: Synthetic oligonucleotide
  Target: ATXN2; (-) strand; PAM type: YTN; PAM sequence: CTG
taatccagcactttgggagg

SEQ ID NO: 61915 - DNA, 20 bp, Artificial Sequence
  Description of Artificial Sequence: Synthetic oligonucleotide
  Target: ATXN2; (-) strand; PAM type: YTN; PAM sequence: CTC
acgcctgtaatccagcactt

SEQ ID NO: 61916 - DNA, 20 bp, Artificial Sequence
  Description of Artificial Sequence: Synthetic oligonucleotide
  Target: ATXN2; (-) strand; PAM type: YTN; PAM sequence: CTG
ggcacggtggctcacgcctg

SEQ ID NO: 61917 - DNA, 20 bp, Artificial Sequence
  Description of Artificial Sequence: Synthetic oligonucleotide
  Target: ATXN2; (-) strand; PAM type: YTN; PAM sequence: CTC
agagtctgggcacggtggct

SEQ ID NO: 61918 - DNA, 20 bp, Artificial Sequence
  Description of Artificial Sequence: Synthetic oligonucleotide
  Target: ATXN2; (-) strand; PAM type: YTN; PAM sequence: TTA
atagaaatgatatactcaga

SEQ ID NO: 61919 - DNA, 20 bp, Artificial Sequence
  Description of Artificial Sequence: Synthetic oligonucleotide
  Target: ATXN2; (-) strand; PAM type: YTN; PAM sequence: TTT
aatagaaatgatatactcag

SEQ ID NO: 61920 - DNA, 20 bp, Artificial Sequence
  Description of Artificial Sequence: Synthetic oligonucleotide
  Target: ATXN2; (-) strand; PAM type: YTN; PAM sequence: TTT
taatagaaatgatatactca

SEQ ID NO: 61921 - DNA, 20 bp, Artificial Sequence
  Description of Artificial Sequence: Synthetic oligonucleotide
  Target: ATXN2; (-) strand; PAM type: YTN; PAM sequence: TTT
ttaatagaaatgatatactc

SEQ ID NO: 61922 - DNA, 20 bp, Artificial Sequence
  Description of Artificial Sequence: Synthetic oligonucleotide
  Target: ATXN2; (-) strand; PAM type: YTN; PAM sequence: CTT
tttaatagaaatgatatact

SEQ ID NO: 61923 - DNA, 20 bp, Artificial Sequence
  Description of Artificial Sequence: Synthetic oligonucleotide
  Target: ATXN2; (-) strand; PAM type: YTN; PAM sequence: CTG
tctttttaatagaaatgata

SEQ ID NO: 61924 - DNA, 20 bp, Artificial Sequence
  Description of Artificial Sequence: Synthetic oligonucleotide
  Target: ATXN2; (-) strand; PAM type: YTN; PAM sequence: TTC
aggaggtactgtctttttaa

SEQ ID NO: 61925 - DNA, 20 bp, Artificial Sequence
  Description of Artificial Sequence: Synthetic oligonucleotide
  Target: ATXN2; (-) strand; PAM type: YTN; PAM sequence: CTT
caggaggtactgtcttttta

SEQ ID NO: 61926 - DNA, 20 bp, Artificial Sequence
  Description of Artificial Sequence: Synthetic oligonucleotide
  Target: ATXN2; (-) strand; PAM type: YTN; PAM sequence: CTA
acttcaggaggtactgtctt

SEQ ID NO: 61927 - DNA, 20 bp, Artificial Sequence
  Description of Artificial Sequence: Synthetic oligonucleotide
  Target: ATXN2; (-) strand; PAM type: YTN; PAM sequence: TTC
taacttcaggaggtactgtc

SEQ ID NO: 61928 - DNA, 20 bp, Artificial Sequence
  Description of Artificial Sequence: Synthetic oligonucleotide
  Target: ATXN2; (-) strand; PAM type: YTN; PAM sequence: CTG
atgggagagtcacattctaa

SEQ ID NO: 61929 - DNA, 20 bp, Artificial Sequence
  Description of Artificial Sequence: Synthetic oligonucleotide
  Target: ATXN2; (-) strand; PAM type: YTN; PAM sequence: CTA
tctgatgggagagtcacatt

SEQ ID NO: 61930 - DNA, 20 bp, Artificial Sequence
  Description of Artificial Sequence: Synthetic oligonucleotide
  Target: ATXN2; (-) strand; PAM type: YTN; PAM sequence: TTG
gctatctgatgggagagtca

SEQ ID NO: 61931 - DNA, 20 bp, Artificial Sequence
  Description of Artificial Sequence: Synthetic oligonucleotide
  Target: ATXN2; (-) strand; PAM type: YTN; PAM sequence: TTT
ggctatctgatgggagagtc

SEQ ID NO: 61932 - DNA, 20 bp, Artificial Sequence
  Description of Artificial Sequence: Synthetic oligonucleotide
  Target: ATXN2; (-) strand; PAM type: YTN; PAM sequence: CTG
tagtaagagcaagcatgaca

SEQ ID NO: 61933 - DNA, 20 bp, Artificial Sequence
  Description of Artificial Sequence: Synthetic oligonucleotide
  Target: ATXN2; (-) strand; PAM type: YTN; PAM sequence: TTA
ctgtagtaagagcaagcatg

SEQ ID NO: 61934 - DNA, 20 bp, Artificial Sequence
  Description of Artificial Sequence: Synthetic oligonucleotide
  Target: ATXN2; (-) strand; PAM type: YTN; PAM sequence: TTA
aaatataaaaggttactgta

SEQ ID NO: 61935 - DNA, 20 bp, Artificial Sequence
  Description of Artificial Sequence: Synthetic oligonucleotide
  Target: ATXN2; (-) strand; PAM type: YTN; PAM sequence: TTG
tcattaaaatataaaaggtt

SEQ ID NO: 61936 - DNA, 20 bp, Artificial Sequence
  Description of Artificial Sequence: Synthetic oligonucleotide
  Target: ATXN2; (-) strand; PAM type: YTN; PAM sequence: TTG
ttgtcattaaaatataaaag

SEQ ID NO: 61937 - DNA, 20 bp, Artificial Sequence
  Description of Artificial Sequence: Synthetic oligonucleotide
  Target: ATXN2; (-) strand; PAM type: YTN; PAM sequence: TTT
gttgtcattaaaatataaaa

SEQ ID NO: 61938 - DNA, 20 bp, Artificial Sequence
  Description of Artificial Sequence: Synthetic oligonucleotide
  Target: ATXN2; (-) strand; PAM type: YTN; PAM sequence: TTT
tgttgtcattaaaatataaa

SEQ ID NO: 61939 - DNA, 20 bp, Artificial Sequence
  Description of Artificial Sequence: Synthetic oligonucleotide
  Target: ATXN2; (-) strand; PAM type: YTN; PAM sequence: TTT
ttgttgtcattaaaatataa

SEQ ID NO: 61940 - DNA, 20 bp, Artificial Sequence
  Description of Artificial Sequence: Synthetic oligonucleotide
  Target: ATXN2; (-) strand; PAM type: YTN; PAM sequence: CTT
tttgttgtcattaaaatata

SEQ ID NO: 61941 - DNA, 20 bp, Artificial Sequence
  Description of Artificial Sequence: Synthetic oligonucleotide
  Target: ATXN2; (-) strand; PAM type: YTN; PAM sequence: TTA
aaacaatgcaatgggaactt

SEQ ID NO: 61942 - DNA, 20 bp, Artificial Sequence
  Description of Artificial Sequence: Synthetic oligonucleotide
  Target: ATXN2; (-) strand; PAM type: YTN; PAM sequence: CTT
aaaacaatgcaatgggaact

SEQ ID NO: 61943 - DNA, 20 bp, Artificial Sequence
  Description of Artificial Sequence: Synthetic oligonucleotide
  Target: ATXN2; (-) strand; PAM type: YTN; PAM sequence: TTA
cttaaaacaatgcaatggga

SEQ ID NO: 61944 - DNA, 20 bp, Artificial Sequence
  Description of Artificial Sequence: Synthetic oligonucleotide
  Target: ATXN2; (-) strand; PAM type: YTN; PAM sequence: TTC
aatgattacttaaaacaatg

SEQ ID NO: 61945 - DNA, 20 bp, Artificial Sequence
  Description of Artificial Sequence: Synthetic oligonucleotide
  Target: ATXN2; (-) strand; PAM type: YTN; PAM sequence: TTT
caatgattacttaaaacaat

SEQ ID NO: 61946 - DNA, 20 bp, Artificial Sequence
  Description of Artificial Sequence: Synthetic oligonucleotide
  Target: ATXN2; (-) strand; PAM type: YTN; PAM sequence: TTT
tcaatgattacttaaaacaa

SEQ ID NO: 61947 - DNA, 20 bp, Artificial Sequence
  Description of Artificial Sequence: Synthetic oligonucleotide
  Target: ATXN2; (-) strand; PAM type: YTN; PAM sequence: CTG
ttttcaatgattacttaaaa

SEQ ID NO: 61948 - DNA, 20 bp, Artificial Sequence
  Description of Artificial Sequence: Synthetic oligonucleotide
  Target: ATXN2; (-) strand; PAM type: YTN; PAM sequence: TTC
atgtatcaccagcaggtgta

SEQ ID NO: 61949 - DNA, 20 bp, Artificial Sequence
  Description of Artificial Sequence: Synthetic oligonucleotide
  Target: ATXN2; (-) strand; PAM type: YTN; PAM sequence: TTA
aggtgttcatgtatcaccag

SEQ ID NO: 61950 - DNA, 20 bp, Artificial Sequence
  Description of Artificial Sequence: Synthetic oligonucleotide
  Target: ATXN2; (-) strand; PAM type: YTN; PAM sequence: TTA
atgtagtgttaaggtgttca

SEQ ID NO: 61951 - DNA, 20 bp, Artificial Sequence
  Description of Artificial Sequence: Synthetic oligonucleotide
  Target: ATXN2; (-) strand; PAM type: YTN; PAM sequence: TTT
aatgtagtgttaaggtgttc

SEQ ID NO: 61952 - DNA, 20 bp, Artificial Sequence
  Description of Artificial Sequence: Synthetic oligonucleotide
  Target: ATXN2; (-) strand; PAM type: YTN; PAM sequence: TTT
taatgtagtgttaaggtgtt

SEQ ID NO: 61953 - DNA, 20 bp, Artificial Sequence
  Description of Artificial Sequence: Synthetic oligonucleotide
  Target: ATXN2; (-) strand; PAM type: YTN; PAM sequence: CTG
ccattttaatgtagtgttaa

SEQ ID NO: 61954 - DNA, 20 bp, Artificial Sequence
  Description of Artificial Sequence: Synthetic oligonucleotide
  Target: ATXN2; (-) strand; PAM type: YTN; PAM sequence: TTA
ctgccattttaatgtagtgt

SEQ ID NO: 61955 - DNA, 20 bp, Artificial Sequence
  Description of Artificial Sequence: Synthetic oligonucleotide
  Target: ATXN2; (-) strand; PAM type: YTN; PAM sequence: TTT
actgccattttaatgtagtg

SEQ ID NO: 61956 - DNA, 20 bp, Artificial Sequence
  Description of Artificial Sequence: Synthetic oligonucleotide
  Target: ATXN2; (-) strand; PAM type: YTN; PAM sequence: TTT
tactgccattttaatgtagt

SEQ ID NO: 61957 - DNA, 20 bp, Artificial Sequence
  Description of Artificial Sequence: Synthetic oligonucleotide
  Target: ATXN2; (-) strand; PAM type: YTN; PAM sequence: TTT
ttactgccattttaatgtag

SEQ ID NO: 61958 - DNA, 20 bp, Artificial Sequence
  Description of Artificial Sequence: Synthetic oligonucleotide
  Target: ATXN2; (-) strand; PAM type: YTN; PAM sequence: TTT
tttactgccattttaatgta

SEQ ID NO: 61959 - DNA, 20 bp, Artificial Sequence
  Description of Artificial Sequence: Synthetic oligonucleotide
  Target: ATXN2; (-) strand; PAM type: YTN; PAM sequence: TTT
ttttactgccattttaatgt

SEQ ID NO: 61960 - DNA, 20 bp, Artificial Sequence
  Description of Artificial Sequence: Synthetic oligonucleotide
  Target: ATXN2; (-) strand; PAM type: YTN; PAM sequence: TTT
tttttactgccattttaatg

SEQ ID NO: 61961 - DNA, 20 bp, Artificial Sequence
  Description of Artificial Sequence: Synthetic oligonucleotide
  Target: ATXN2; (-) strand; PAM type: YTN; PAM sequence: TTT
ttttttactgccattttaat

SEQ ID NO: 61962 - DNA, 20 bp, Artificial Sequence
  Description of Artificial Sequence: Synthetic oligonucleotide
  Target: ATXN2; (-) strand; PAM type: YTN; PAM sequence: TTT
tttttttactgccattttaa

SEQ ID NO: 61963 - DNA, 20 bp, Artificial Sequence
  Description of Artificial Sequence: Synthetic oligonucleotide
  Target: ATXN2; (-) strand; PAM type: YTN; PAM sequence: TTT
ttttttttactgccatttta

SEQ ID NO: 61964 - DNA, 20 bp, Artificial Sequence
  Description of Artificial Sequence: Synthetic oligonucleotide
  Target: ATXN2; (-) strand; PAM type: YTN; PAM sequence: CTG
agaagaaagtgggttttttt

SEQ ID NO: 61965 - DNA, 20 bp, Artificial Sequence
  Description of Artificial Sequence: Synthetic oligonucleotide
  Target: ATXN2; (-) strand; PAM type: YTN; PAM sequence: TTC
tgagaagaaagtgggttttt

SEQ ID NO: 61966 - DNA, 20 bp, Artificial Sequence
  Description of Artificial Sequence: Synthetic oligonucleotide
  Target: ATXN2; (-) strand; PAM type: YTN; PAM sequence: TTA
gaaattctgagaagaaagtg

SEQ ID NO: 61967 - DNA, 20 bp, Artificial Sequence
  Description of Artificial Sequence: Synthetic oligonucleotide
  Target: ATXN2; (-) strand; PAM type: YTN; PAM sequence: TTT
agaaattctgagaagaaagt

SEQ ID NO: 61968 - DNA, 20 bp, Artificial Sequence
  Description of Artificial Sequence: Synthetic oligonucleotide
  Target: ATXN2; (-) strand; PAM type: YTN; PAM sequence: CTT
tagaaattctgagaagaaag

SEQ ID NO: 61969 - DNA, 20 bp, Artificial Sequence
  Description of Artificial Sequence: Synthetic oligonucleotide
  Target: ATXN2; (-) strand; PAM type: YTN; PAM sequence: TTG
agggcctttagaaattctga

SEQ ID NO: 61970 - DNA, 20 bp, Artificial Sequence
  Description of Artificial Sequence: Synthetic oligonucleotide
  Target: ATXN2; (-) strand; PAM type: YTN; PAM sequence: TTT
gagggcctttagaaattctg

SEQ ID NO: 61971 - DNA, 20 bp, Artificial Sequence
  Description of Artificial Sequence: Synthetic oligonucleotide
  Target: ATXN2; (-) strand; PAM type: YTN; PAM sequence: TTT
tgagggcctttagaaattct

SEQ ID NO: 61972 - DNA, 20 bp, Artificial Sequence
  Description of Artificial Sequence: Synthetic oligonucleotide
  Target: ATXN2; (-) strand; PAM type: YTN; PAM sequence: TTA
ttttgagggcctttagaaat

SEQ ID NO: 61973 - DNA, 20 bp, Artificial Sequence
  Description of Artificial Sequence: Synthetic oligonucleotide
  Target: ATXN2; (-) strand; PAM type: YTN; PAM sequence: CTT
attttgagggcctttagaaa

SEQ ID NO: 61974 - DNA, 20 bp, Artificial Sequence
  Description of Artificial Sequence: Synthetic oligonucleotide
  Target: ATXN2; (-) strand; PAM type: YTN; PAM sequence: TTA
atcttattttgagggccttt

SEQ ID NO: 61975 - DNA, 20 bp, Artificial Sequence
  Description of Artificial Sequence: Synthetic oligonucleotide
  Target: ATXN2; (-) strand; PAM type: YTN; PAM sequence: TTT
aatcttattttgagggcctt

SEQ ID NO: 61976 - DNA, 20 bp, Artificial Sequence
  Description of Artificial Sequence: Synthetic oligonucleotide
  Target: ATXN2; (-) strand; PAM type: YTN; PAM sequence: TTA
tagagtttaatcttattttg

SEQ ID NO: 61977 - DNA, 20 bp, Artificial Sequence
  Description of Artificial Sequence: Synthetic oligonucleotide
  Target: ATXN2; (-) strand; PAM type: YTN; PAM sequence: CTG
aaataatgtaatcaaattat

SEQ ID NO: 61978 - DNA, 20 bp, Artificial Sequence
  Description of Artificial Sequence: Synthetic oligonucleotide
  Target: ATXN2; (-) strand; PAM type: YTN; PAM sequence: CTG
cctgaaataatgtaatcaaa

SEQ ID NO: 61979 - DNA, 20 bp, Artificial Sequence
  Description of Artificial Sequence: Synthetic oligonucleotide
  Target: ATXN2; (-) strand; PAM type: YTN; PAM sequence: CTC
tgcctgaaataatgtaatca

SEQ ID NO: 61980 - DNA, 20 bp, Artificial Sequence
  Description of Artificial Sequence: Synthetic oligonucleotide
  Target: ATXN2; (-) strand; PAM type: YTN; PAM sequence: TTG
aaagaactctgcctgaaata

SEQ ID NO: 61981 - DNA, 20 bp, Artificial Sequence
  Description of Artificial Sequence: Synthetic oligonucleotide
  Target: ATXN2; (-) strand; PAM type: YTN; PAM sequence: CTG
ttgaaagaactctgcctgaa

SEQ ID NO: 61982 - DNA, 20 bp, Artificial Sequence
  Description of Artificial Sequence: Synthetic oligonucleotide
  Target: ATXN2; (-) strand; PAM type: YTN; PAM sequence: TTG
gaacatatgaacctgttgaa

SEQ ID NO: 61983 - DNA, 20 bp, Artificial Sequence
  Description of Artificial Sequence: Synthetic oligonucleotide
  Target: ATXN2; (-) strand; PAM type: YTN; PAM sequence: CTT
ggaacatatgaacctgttga

SEQ ID NO: 61984 - DNA, 20 bp, Artificial Sequence
  Description of Artificial Sequence: Synthetic oligonucleotide
  Target: ATXN2; (-) strand; PAM type: YTN; PAM sequence: TTA
gccttggaacatatgaacct

SEQ ID NO: 61985 - DNA, 20 bp, Artificial Sequence
  Description of Artificial Sequence: Synthetic oligonucleotide
  Target: ATXN2; (-) strand; PAM type: YTN; PAM sequence: TTT
agccttggaacatatgaacc

SEQ ID NO: 61986 - DNA, 20 bp, Artificial Sequence
  Description of Artificial Sequence: Synthetic oligonucleotide
  Target: ATXN2; (-) strand; PAM type: YTN; PAM sequence: TTT
tagccttggaacatatgaac

SEQ ID NO: 61987 - DNA, 20 bp, Artificial Sequence
  Description of Artificial Sequence: Synthetic oligonucleotide
  Target: ATXN2; (-) strand; PAM type: YTN; PAM sequence: TTT
ttagccttggaacatatgaa

SEQ ID NO: 61988 - DNA, 20 bp, Artificial Sequence
  Description of Artificial Sequence: Synthetic oligonucleotide
  Target: ATXN2; (-) strand; PAM type: YTN; PAM sequence: TTT
tttagccttggaacatatga

SEQ ID NO: 61989 - DNA, 20 bp, Artificial Sequence
  Description of Artificial Sequence: Synthetic oligonucleotide
  Target: ATXN2; (-) strand; PAM type: YTN; PAM sequence: TTT
ttttagccttggaacatatg

SEQ ID NO: 61990 - DNA, 20 bp, Artificial Sequence
  Description of Artificial Sequence: Synthetic oligonucleotide
  Target: ATXN2; (-) strand; PAM type: YTN; PAM sequence: TTT
tttttagccttggaacatat

SEQ ID NO: 61991 - DNA, 20 bp, Artificial Sequence
  Description of Artificial Sequence: Synthetic oligonucleotide
  Target: ATXN2; (-) strand; PAM type: YTN; PAM sequence: TTT
ttttttagccttggaacata

SEQ ID NO: 61992 - DNA, 20 bp, Artificial Sequence
  Description of Artificial Sequence: Synthetic oligonucleotide
  Target: ATXN2; (-) strand; PAM type: YTN; PAM sequence: TTT
tttttttagccttggaacat

SEQ ID NO: 61993 - DNA, 20 bp, Artificial Sequence
  Description of Artificial Sequence: Synthetic oligonucleotide
  Target: ATXN2; (-) strand; PAM type: YTN; PAM sequence: TTT
ttttttttagccttggaaca

SEQ ID NO: 61994 - DNA, 20 bp, Artificial Sequence
  Description of Artificial Sequence: Synthetic oligonucleotide
  Target: ATXN2; (-) strand; PAM type: YTN; PAM sequence: TTT
tttttttttagccttggaac

SEQ ID NO: 61995 - DNA, 20 bp, Artificial Sequence
  Description of Artificial Sequence: Synthetic oligonucleotide
  Target: ATXN2; (-) strand; PAM type: YTN; PAM sequence: TTT
ttttttttttagccttggaa

SEQ ID NO: 61996 - DNA, 20 bp, Artificial Sequence
  Description of Artificial Sequence: Synthetic oligonucleotide
  Target: ATXN2; (-) strand; PAM type: YTN; PAM sequence: TTT
tttttttttttagccttgga

SEQ ID NO: 61997 - DNA, 20 bp, Artificial Sequence
  Description of Artificial Sequence: Synthetic oligonucleotide
  Target: ATXN2; (-) strand; PAM type: YTN; PAM sequence: CTA
ttttttttttttttagcctt

SEQ ID NO: 61998 - DNA, 20 bp, Artificial Sequence
  Description of Artificial Sequence: Synthetic oligonucleotide
  Target: ATXN2; (-) strand; PAM type: YTN; PAM sequence: CTC
agtatgctattttttttttt

SEQ ID NO: 61999 - DNA, 20 bp, Artificial Sequence
  Description of Artificial Sequence: Synthetic oligonucleotide
  Target: ATXN2; (-) strand; PAM type: YTN; PAM sequence: TTC
tcagtatgctattttttttt

SEQ ID NO: 62000 - DNA, 20 bp, Artificial Sequence
  Description of Artificial Sequence: Synthetic oligonucleotide
  Target: ATXN2; (-) strand; PAM type: YTN; PAM sequence: TTT
ctcagtatgctatttttttt

SEQ ID NO: 62001 - DNA, 20 bp, Artificial Sequence
  Description of Artificial Sequence: Synthetic oligonucleotide
  Target: ATXN2; (-) strand; PAM type: YTN; PAM sequence: TTT
tctcagtatgctattttttt

SEQ ID NO: 62002 - DNA, 20 bp, Artificial Sequence
  Description of Artificial Sequence: Synthetic oligonucleotide
  Target: ATXN2; (-) strand; PAM type: YTN; PAM sequence: TTC
gttttctcagtatgctattt

SEQ ID NO: 62003 - DNA, 20 bp, Artificial Sequence
  Description of Artificial Sequence: Synthetic oligonucleotide
  Target: ATXN2; (-) strand; PAM type: YTN; PAM sequence: TTT
cgttttctcagtatgctatt

SEQ ID NO: 62004 - DNA, 20 bp, Artificial Sequence
  Description of Artificial Sequence: Synthetic oligonucleotide
  Target: ATXN2; (-) strand; PAM type: YTN; PAM sequence: TTT
tcgttttctcagtatgctat

SEQ ID NO: 62005 - DNA, 20 bp, Artificial Sequence
  Description of Artificial Sequence: Synthetic oligonucleotide
  Target: ATXN2; (-) strand; PAM type: YTN; PAM sequence: TTA
attttcgttttctcagtatg

SEQ ID NO: 62006 - DNA, 20 bp, Artificial Sequence
  Description of Artificial Sequence: Synthetic oligonucleotide
  Target: ATXN2; (-) strand; PAM type: YTN; PAM sequence: CTT
aattttcgttttctcagtat

SEQ ID NO: 62007 - DNA, 20 bp, Artificial Sequence
  Description of Artificial Sequence: Synthetic oligonucleotide
  Target: ATXN2; (-) strand; PAM type: YTN; PAM sequence: CTC
ttaattttcgttttctcagt

SEQ ID NO: 62008 - DNA, 20 bp, Artificial Sequence
  Description of Artificial Sequence: Synthetic oligonucleotide
  Target: ATXN2; (-) strand; PAM type: YTN; PAM sequence: CTA
aaactcttaattttcgtttt

SEQ ID NO: 62009 - DNA, 20 bp, Artificial Sequence
  Description of Artificial Sequence: Synthetic oligonucleotide
  Target: ATXN2; (-) strand; PAM type: YTN; PAM sequence: TTA
actaaaactcttaattttcg

SEQ ID NO: 62010 - DNA, 20 bp, Artificial Sequence
  Description of Artificial Sequence: Synthetic oligonucleotide
  Target: ATXN2; (-) strand; PAM type: YTN; PAM sequence: TTC
atagatgttaactaaaactc

SEQ ID NO: 62011 - DNA, 20 bp, Artificial Sequence
  Description of Artificial Sequence: Synthetic oligonucleotide
  Target: ATXN2; (-) strand; PAM type: YTN; PAM sequence: TTT
catagatgttaactaaaact

SEQ ID NO: 62012 - DNA, 20 bp, Artificial Sequence
  Description of Artificial Sequence: Synthetic oligonucleotide
  Target: ATXN2; (-) strand; PAM type: YTN; PAM sequence: TTG
tgatttcatagatgttaact

SEQ ID NO: 62013 - DNA, 20 bp, Artificial Sequence
  Description of Artificial Sequence: Synthetic oligonucleotide
  Target: ATXN2; (-) strand; PAM type: YTN; PAM sequence: CTA
attgtgatttcatagatgtt

SEQ ID NO: 62014 - DNA, 20 bp, Artificial Sequence
  Description of Artificial Sequence: Synthetic oligonucleotide
  Target: ATXN2; (-) strand; PAM type: YTN; PAM sequence: TTG
acctaattgtgatttcatag

SEQ ID NO: 62015 - DNA, 20 bp, Artificial Sequence
  Description of Artificial Sequence: Synthetic oligonucleotide
  Target: ATXN2; (-) strand; PAM type: YTN; PAM sequence: TTT
gacctaattgtgatttcata

SEQ ID NO: 62016 - DNA, 20 bp, Artificial Sequence
  Description of Artificial Sequence: Synthetic oligonucleotide
  Target: ATXN2; (-) strand; PAM type: YTN; PAM sequence: CTC
catgtttgacctaattgtga

SEQ ID NO: 62017 - DNA, 20 bp, Artificial Sequence
  Description of Artificial Sequence: Synthetic oligonucleotide
  Target: ATXN2; (-) strand; PAM type: YTN; PAM sequence: TTC
tccatgtttgacctaattgt

SEQ ID NO: 62018 - DNA, 20 bp, Artificial Sequence
  Description of Artificial Sequence: Synthetic oligonucleotide
  Target: ATXN2; (-) strand; PAM type: YTN; PAM sequence: TTT
ctccatgtttgacctaattg

SEQ ID NO: 62019 - DNA, 20 bp, Artificial Sequence
  Description of Artificial Sequence: Synthetic oligonucleotide
  Target: ATXN2; (-) strand; PAM type: YTN; PAM sequence: TTT
tctccatgtttgacctaatt

SEQ ID NO: 62020 - DNA, 20 bp, Artificial Sequence
  Description of Artificial Sequence: Synthetic oligonucleotide
  Target: ATXN2; (-) strand; PAM type: YTN; PAM sequence: CTG
cgcccagccaattttctcca

SEQ ID NO: 62021 - DNA, 20 bp, Artificial Sequence
  Description of Artificial Sequence: Synthetic oligonucleotide
  Target: ATXN2; (-) strand; PAM type: YTN; PAM sequence: TTC
ccaaagtgcctgcgcccagc

SEQ ID NO: 62022 - DNA, 20 bp, Artificial Sequence
  Description of Artificial Sequence: Synthetic oligonucleotide
  Target: ATXN2; (-) strand; PAM type: YTN; PAM sequence: CTT
cccaaagtgcctgcgcccag

SEQ ID NO: 62023 - DNA, 20 bp, Artificial Sequence
  Description of Artificial Sequence: Synthetic oligonucleotide
  Target: ATXN2; (-) strand; PAM type: YTN; PAM sequence: CTG
cttcccaaagtgcctgcgcc

SEQ ID NO: 62024 - DNA, 20 bp, Artificial Sequence
  Description of Artificial Sequence: Synthetic oligonucleotide
  Target: ATXN2; (-) strand; PAM type: YTN; PAM sequence: CTC
tgcttcccaaagtgcctgcg

SEQ ID NO: 62025 - DNA, 20 bp, Artificial Sequence
  Description of Artificial Sequence: Synthetic oligonucleotide
  Target: ATXN2; (-) strand; PAM type: YTN; PAM sequence: CTG
gctctgcttcccaaagtgcc

SEQ ID NO: 62026 - DNA, 20 bp, Artificial Sequence
  Description of Artificial Sequence: Synthetic oligonucleotide
  Target: ATXN2; (-) strand; PAM type: YTN; PAM sequence: CTG
cctggctctgcttcccaaag

SEQ ID NO: 62027 - DNA, 20 bp, Artificial Sequence
  Description of Artificial Sequence: Synthetic oligonucleotide
  Target: ATXN2; (-) strand; PAM type: YTN; PAM sequence: CTC
aagcgatctgcctggctctg

SEQ ID NO: 62028 - DNA, 20 bp, Artificial Sequence
  Description of Artificial Sequence: Synthetic oligonucleotide
  Target: ATXN2; (-) strand; PAM type: YTN; PAM sequence: CTG
ggctcaagcgatctgcctgg

SEQ ID NO: 62029 - DNA, 20 bp, Artificial Sequence
  Description of Artificial Sequence: Synthetic oligonucleotide
  Target: ATXN2; (-) strand; PAM type: YTN; PAM sequence: CTC
ctgggctcaagcgatctgcc

SEQ ID NO: 62030 - DNA, 20 bp, Artificial Sequence
  Description of Artificial Sequence: Synthetic oligonucleotide
  Target: ATXN2; (-) strand; PAM type: YTN; PAM sequence: CTC
aaactcctgggctcaagcga

SEQ ID NO: 62031 - DNA, 20 bp, Artificial Sequence
  Description of Artificial Sequence: Synthetic oligonucleotide
  Target: ATXN2; (-) strand; PAM type: YTN; PAM sequence: CTG
gtctcaaactcctgggctca

SEQ ID NO: 62032 - DNA, 20 bp, Artificial Sequence
  Description of Artificial Sequence: Synthetic oligonucleotide
  Target: ATXN2; (-) strand; PAM type: YTN; PAM sequence: CTA
ggctggtctcaaactcctgg

SEQ ID NO: 62033 - DNA, 20 bp, Artificial Sequence
  Description of Artificial Sequence: Synthetic oligonucleotide
  Target: ATXN2; (-) strand; PAM type: YTN; PAM sequence: TTG
cctaggctggtctcaaactc

SEQ ID NO: 62034 - DNA, 20 bp, Artificial Sequence
  Description of Artificial Sequence: Synthetic oligonucleotide
  Target: ATXN2; (-) strand; PAM type: YTN; PAM sequence: TTG
ccatgttgcctaggctggtc

SEQ ID NO: 62035 - DNA, 20 bp, Artificial Sequence
  Description of Artificial Sequence: Synthetic oligonucleotide
  Target: ATXN2; (-) strand; PAM type: YTN; PAM sequence: TTT
gccatgttgcctaggctggt

SEQ ID NO: 62036 - DNA, 20 bp, Artificial Sequence
  Description of Artificial Sequence: Synthetic oligonucleotide
  Target: ATXN2; (-) strand; PAM type: YTN; PAM sequence: TTT
tgccatgttgcctaggctgg

SEQ ID NO: 62037 - DNA, 20 bp, Artificial Sequence
  Description of Artificial Sequence: Synthetic oligonucleotide
  Target: ATXN2; (-) strand; PAM type: YTN; PAM sequence: TTG
tagagatgggttttgccatg

SEQ ID NO: 62038 - DNA, 20 bp, Artificial Sequence
  Description of Artificial Sequence: Synthetic oligonucleotide
  Target: ATXN2; (-) strand; PAM type: YTN; PAM sequence: TTT
gtagagatgggttttgccat

SEQ ID NO: 62039 - DNA, 20 bp, Artificial Sequence
  Description of Artificial Sequence: Synthetic oligonucleotide
  Target: ATXN2; (-) strand; PAM type: YTN; PAM sequence: TTT
tgtagagatgggttttgcca

SEQ ID NO: 62040 - DNA, 20 bp, Artificial Sequence
  Description of Artificial Sequence: Synthetic oligonucleotide
  Target: ATXN2; (-) strand; PAM type: YTN; PAM sequence: TTT
ttgtagagatgggttttgcc

SEQ ID NO: 62041 - DNA, 20 bp, Artificial Sequence
  Description of Artificial Sequence: Synthetic oligonucleotide
  Target: ATXN2; (-) strand; PAM type: YTN; PAM sequence: TTT
tttgtagagatgggttttgc

SEQ ID NO: 62042 - DNA, 20 bp, Artificial Sequence
  Description of Artificial Sequence: Synthetic oligonucleotide
  Target: ATXN2; (-) strand; PAM type: YTN; PAM sequence: TTG
tattttttgtagagatgggt

SEQ ID NO: 62043 - DNA, 20 bp, Artificial Sequence
  Description of Artificial Sequence: Synthetic oligonucleotide
  Target: ATXN2; (-) strand; PAM type: YTN; PAM sequence: TTT
gtattttttgtagagatggg

SEQ ID NO: 62044 - DNA, 20 bp, Artificial Sequence
  Description of Artificial Sequence: Synthetic oligonucleotide
  Target: ATXN2; (-) strand; PAM type: YTN; PAM sequence: TTT
tgtattttttgtagagatgg

SEQ ID NO: 62045 - DNA, 20 bp, Artificial Sequence
  Description of Artificial Sequence: Synthetic oligonucleotide
  Target: ATXN2; (-) strand; PAM type: YTN; PAM sequence: TTT
ttgtattttttgtagagatg

SEQ ID NO: 62046 - DNA, 20 bp, Artificial Sequence
  Description of Artificial Sequence: Synthetic oligonucleotide
  Target: ATXN2; (-) strand; PAM type: YTN; PAM sequence: CTA
atttttgtattttttgtaga

SEQ ID NO: 62047 - DNA, 20 bp, Artificial Sequence
  Description of Artificial Sequence: Synthetic oligonucleotide
  Target: ATXN2; (-) strand; PAM type: YTN; PAM sequence: CTA
gctaatttttgtattttttg

SEQ ID NO: 62048 - DNA, 20 bp, Artificial Sequence
  Description of Artificial Sequence: Synthetic oligonucleotide
  Target: ATXN2; (-) strand; PAM type: YTN; PAM sequence: CTA
caggtgcacaccaccacacc

SEQ ID NO: 62049 - DNA, 20 bp, Artificial Sequence
  Description of Artificial Sequence: Synthetic oligonucleotide
  Target: ATXN2; (-) strand; PAM type: YTN; PAM sequence: CTG
gatagcgggggctacaggtg

SEQ ID NO: 62050 - DNA, 20 bp, Artificial Sequence
  Description of Artificial Sequence: Synthetic oligonucleotide
  Target: ATXN2; (-) strand; PAM type: YTN; PAM sequence: CTC
agtcccctggatagcggggg

SEQ ID NO: 62051 - DNA, 20 bp, Artificial Sequence
  Description of Artificial Sequence: Synthetic oligonucleotide
  Target: ATXN2; (-) strand; PAM type: YTN; PAM sequence: TTC
tcagtcccctggatagcggg

SEQ ID NO: 62052 - DNA, 20 bp, Artificial Sequence
  Description of Artificial Sequence: Synthetic oligonucleotide
  Target: ATXN2; (-) strand; PAM type: YTN; PAM sequence: CTT
ctcagtcccctggatagcgg

SEQ ID NO: 62053 - DNA, 20 bp, Artificial Sequence
  Description of Artificial Sequence: Synthetic oligonucleotide
  Target: ATXN2; (-) strand; PAM type: YTN; PAM sequence: CTC
ccttctcagtcccctggata

SEQ ID NO: 62054 - DNA, 20 bp, Artificial Sequence
  Description of Artificial Sequence: Synthetic oligonucleotide
  Target: ATXN2; (-) strand; PAM type: YTN; PAM sequence: CTC
aagcgatcctcccttctcag

SEQ ID NO: 62055 - DNA, 20 bp, Artificial Sequence
  Description of Artificial Sequence: Synthetic oligonucleotide
  Target: ATXN2; (-) strand; PAM type: YTN; PAM sequence: CTG
ggctcaagcgatcctccctt

SEQ ID NO: 62056 - DNA, 20 bp, Artificial Sequence
  Description of Artificial Sequence: Synthetic oligonucleotide
  Target: ATXN2; (-) strand; PAM type: YTN; PAM sequence: CTC
ctgggctcaagcgatcctcc

SEQ ID NO: 62057 - DNA, 20 bp, Artificial Sequence
  Description of Artificial Sequence: Synthetic oligonucleotide
  Target: ATXN2; (-) strand; PAM type: YTN; PAM sequence: TTG
acctcctgggctcaagcgat

SEQ ID NO: 62058 - DNA, 20 bp, Artificial Sequence
  Description of Artificial Sequence: Synthetic oligonucleotide
  Target: ATXN2; (-) strand; PAM type: YTN; PAM sequence: CTT
gacctcctgggctcaagcga

SEQ ID NO: 62059 - DNA, 20 bp, Artificial Sequence
  Description of Artificial Sequence: Synthetic oligonucleotide
  Target: ATXN2; (-) strand; PAM type: YTN; PAM sequence: CTC
aatgcagccttgacctcctg

SEQ ID NO: 62060 - DNA, 20 bp, Artificial Sequence
  Description of Artificial Sequence: Synthetic oligonucleotide
  Target: ATXN2; (-) strand; PAM type: YTN; PAM sequence: CTA
tcatggctcaatgcagcctt

SEQ ID NO: 62061 - DNA, 20 bp, Artificial Sequence
  Description of Artificial Sequence: Synthetic oligonucleotide
  Target: ATXN2; (-) strand; PAM type: YTN; PAM sequence: CTG
gaacgcagtggcgctatcat

SEQ ID NO: 62062 - DNA, 20 bp, Artificial Sequence
  Description of Artificial Sequence: Synthetic oligonucleotide
  Target: ATXN2; (-) strand; PAM type: YTN; PAM sequence: CTG
aggctggaacgcagtggcgc

SEQ ID NO: 62063 - DNA, 20 bp, Artificial Sequence
  Description of Artificial Sequence: Synthetic oligonucleotide
  Target: ATXN2; (-) strand; PAM type: YTN; PAM sequence: CTG
ctgaggctggaacgcagtgg

SEQ ID NO: 62064 - DNA, 20 bp, Artificial Sequence
  Description of Artificial Sequence: Synthetic oligonucleotide
  Target: ATXN2; (-) strand; PAM type: YTN; PAM sequence: TTG
ctgctgaggctggaacgcag

SEQ ID NO: 62065 - DNA, 20 bp, Artificial Sequence
  Description of Artificial Sequence: Synthetic oligonucleotide
  Target: ATXN2; (-) strand; PAM type: YTN; PAM sequence: TTT
gctgctgaggctggaacgca

SEQ ID NO: 62066 - DNA, 20 bp, Artificial Sequence
  Description of Artificial Sequence: Synthetic oligonucleotide
  Target: ATXN2; (-) strand; PAM type: YTN; PAM sequence: CTT
tgctgctgaggctggaacgc

SEQ ID NO: 62067 - DNA, 20 bp, Artificial Sequence
  Description of Artificial Sequence: Synthetic oligonucleotide
  Target: ATXN2; (-) strand; PAM type: YTN; PAM sequence: TTG
ctttgctgctgaggctggaa

SEQ ID NO: 62068 - DNA, 20 bp, Artificial Sequence
  Description of Artificial Sequence: Synthetic oligonucleotide
  Target: ATXN2; (-) strand; PAM type: YTN; PAM sequence: CTT
gctttgctgctgaggctgga

SEQ ID NO: 62069 - DNA, 20 bp, Artificial Sequence
  Description of Artificial Sequence: Synthetic oligonucleotide
  Target: ATXN2; (-) strand; PAM type: YTN; PAM sequence: TTG
atacagggtcttgctttgct

SEQ ID NO: 62070 - DNA, 20 bp, Artificial Sequence
  Description of Artificial Sequence: Synthetic oligonucleotide
  Target: ATXN2; (-) strand; PAM type: YTN; PAM sequence: TTT
gatacagggtcttgctttgc

SEQ ID NO: 62071 - DNA, 20 bp, Artificial Sequence
  Description of Artificial Sequence: Synthetic oligonucleotide
  Target: ATXN2; (-) strand; PAM type: YTN; PAM sequence: TTG
tgtgtgtgtgtgtgtgtgtg

SEQ ID NO: 62072 - DNA, 20 bp, Artificial Sequence
  Description of Artificial Sequence: Synthetic oligonucleotide
  Target: ATXN2; (-) strand; PAM type: YTN; PAM sequence: TTT
gtgtgtgtgtgtgtgtgtgt

SEQ ID NO: 62073 - DNA, 20 bp, Artificial Sequence
  Description of Artificial Sequence: Synthetic oligonucleotide
  Target: ATXN2; (-) strand; PAM type: YTN; PAM sequence: TTT
tgtgtgtgtgtgtgtgtgtg

SEQ ID NO: 62074 - DNA, 20 bp, Artificial Sequence
  Description of Artificial Sequence: Synthetic oligonucleotide
  Target: ATXN2; (-) strand; PAM type: YTN; PAM sequence: TTG
ggtgttttgtgtgtgtgtgt

SEQ ID NO: 62075 - DNA, 20 bp, Artificial Sequence
  Description of Artificial Sequence: Synthetic oligonucleotide
  Target: ATXN2; (-) strand; PAM type: YTN; PAM sequence: TTT
gggtgttttgtgtgtgtgtg

SEQ ID NO: 62076 - DNA, 20 bp, Artificial Sequence
  Description of Artificial Sequence: Synthetic oligonucleotide
  Target: ATXN2; (-) strand; PAM type: YTN; PAM sequence: TTT
tgggtgttttgtgtgtgtgt

SEQ ID NO: 62077 - DNA, 20 bp, Artificial Sequence
  Description of Artificial Sequence: Synthetic oligonucleotide
  Target: ATXN2; (-) strand; PAM type: YTN; PAM sequence: TTT
ttgggtgttttgtgtgtgtg

SEQ ID NO: 62078 - DNA, 20 bp, Artificial Sequence
  Description of Artificial Sequence: Synthetic oligonucleotide
  Target: ATXN2; (-) strand; PAM type: YTN; PAM sequence: TTT
tttgggtgttttgtgtgtgt

SEQ ID NO: 62079 - DNA, 20 bp, Artificial Sequence
  Description of Artificial Sequence: Synthetic oligonucleotide
  Target: ATXN2; (-) strand; PAM type: YTN; PAM sequence: TTT
ttttgggtgttttgtgtgtg

SEQ ID NO: 62080 - DNA, 20 bp, Artificial Sequence
  Description of Artificial Sequence: Synthetic oligonucleotide
  Target: ATXN2; (-) strand; PAM type: YTN; PAM sequence: CTC
aatgtgtttttttgggtgtt

SEQ ID NO: 62081 - DNA, 20 bp, Artificial Sequence
  Description of Artificial Sequence: Synthetic oligonucleotide
  Target: ATXN2; (-) strand; PAM type: YTN; PAM sequence: TTC
ctcaatgtgtttttttgggt

SEQ ID NO: 62082 - DNA, 20 bp, Artificial Sequence
  Description of Artificial Sequence: Synthetic oligonucleotide
  Target: ATXN2; (-) strand; PAM type: YTN; PAM sequence: TTT
cctcaatgtgtttttttggg

SEQ ID NO: 62083 - DNA, 20 bp, Artificial Sequence
  Description of Artificial Sequence: Synthetic oligonucleotide
  Target: ATXN2; (-) strand; PAM type: YTN; PAM sequence: TTA
ataagatttcctcaatgtgt

SEQ ID NO: 62084 - DNA, 20 bp, Artificial Sequence
  Description of Artificial Sequence: Synthetic oligonucleotide
  Target: ATXN2; (-) strand; PAM type: YTN; PAM sequence: CTG
aattaataagatttcctcaa

SEQ ID NO: 62085 - DNA, 20 bp, Artificial Sequence
  Description of Artificial Sequence: Synthetic oligonucleotide
  Target: ATXN2; (-) strand; PAM type: YTN; PAM sequence: TTC
ctgaattaataagatttcct

SEQ ID NO: 62086 - DNA, 20 bp, Artificial Sequence
  Description of Artificial Sequence: Synthetic oligonucleotide
  Target: ATXN2; (-) strand; PAM type: YTN; PAM sequence: TTT
cctgaattaataagatttcc

SEQ ID NO: 62087 - DNA, 20 bp, Artificial Sequence
  Description of Artificial Sequence: Synthetic oligonucleotide
  Target: ATXN2; (-) strand; PAM type: YTN; PAM sequence: TTT
tcctgaattaataagatttc

SEQ ID NO: 62088 - DNA, 20 bp, Artificial Sequence
  Description of Artificial Sequence: Synthetic oligonucleotide
  Target: ATXN2; (-) strand; PAM type: YTN; PAM sequence: TTT
ttcctgaattaataagattt

SEQ ID NO: 62089 - DNA, 20 bp, Artificial Sequence
  Description of Artificial Sequence: Synthetic oligonucleotide
  Target: ATXN2; (-) strand; PAM type: YTN; PAM sequence: TTC
atttttcctgaattaataag

SEQ ID NO: 62090 - DNA, 20 bp, Artificial Sequence
  Description of Artificial Sequence: Synthetic oligonucleotide
  Target: ATXN2; (-) strand; PAM type: YTN; PAM sequence: TTT
catttttcctgaattaataa

SEQ ID NO: 62091 - DNA, 20 bp, Artificial Sequence
  Description of Artificial Sequence: Synthetic oligonucleotide
  Target: ATXN2; (-) strand; PAM type: YTN; PAM sequence: TTT
tcatttttcctgaattaata

SEQ ID NO: 62092 - DNA, 20 bp, Artificial Sequence
  Description of Artificial Sequence: Synthetic oligonucleotide
  Target: ATXN2; (-) strand; PAM type: YTN; PAM sequence: CTG
acataaagttttcatttttc

SEQ ID NO: 62093 - DNA, 20 bp, Artificial Sequence
  Description of Artificial Sequence: Synthetic oligonucleotide
  Target: ATXN2; (-) strand; PAM type: YTN; PAM sequence: TTC
tgacataaagttttcatttt

SEQ ID NO: 62094 - DNA, 20 bp, Artificial Sequence
  Description of Artificial Sequence: Synthetic oligonucleotide
  Target: ATXN2; (-) strand; PAM type: YTN; PAM sequence: TTT
ctgacataaagttttcattt

SEQ ID NO: 62095 - DNA, 20 bp, Artificial Sequence
  Description of Artificial Sequence: Synthetic oligonucleotide
  Target: ATXN2; (-) strand; PAM type: YTN; PAM sequence: CTT
tctgacataaagttttcatt

SEQ ID NO: 62096 - DNA, 20 bp, Artificial Sequence
  Description of Artificial Sequence: Synthetic oligonucleotide
  Target: ATXN2; (-) strand; PAM type: YTN; PAM sequence: TTG
cctttctgacataaagtttt

SEQ ID NO: 62097 - DNA, 20 bp, Artificial Sequence
  Description of Artificial Sequence: Synthetic oligonucleotide
  Target: ATXN2; (-) strand; PAM type: YTN; PAM sequence: CTC
agtgcccaataattgccttt

SEQ ID NO: 62098 - DNA, 20 bp, Artificial Sequence
  Description of Artificial Sequence: Synthetic oligonucleotide
  Target: ATXN2; (-) strand; PAM type: YTN; PAM sequence: TTC
tcagtgcccaataattgcct

SEQ ID NO: 62099 - DNA, 20 bp, Artificial Sequence
  Description of Artificial Sequence: Synthetic oligonucleotide
  Target: ATXN2; (-) strand; PAM type: YTN; PAM sequence: TTT
ctcagtgcccaataattgcc

SEQ ID NO: 62100 - DNA, 20 bp, Artificial Sequence
  Description of Artificial Sequence: Synthetic oligonucleotide
  Target: ATXN2; (-) strand; PAM type: YTN; PAM sequence: TTA
tacagaaaagacatttctca

SEQ ID NO: 62101 - DNA, 20 bp, Artificial Sequence
  Description of Artificial Sequence: Synthetic oligonucleotide
  Target: ATXN2; (-) strand; PAM type: YTN; PAM sequence: TTT
atacagaaaagacatttctc

SEQ ID NO: 62102 - DNA, 20 bp, Artificial Sequence
  Description of Artificial Sequence: Synthetic oligonucleotide
  Target: ATXN2; (-) strand; PAM type: YTN; PAM sequence: CTA
tagaaagtagaataatttat

SEQ ID NO: 62103 - DNA, 20 bp, Artificial Sequence
  Description of Artificial Sequence: Synthetic oligonucleotide
  Target: ATXN2; (-) strand; PAM type: YTN; PAM sequence: TTG
agaaactatagaaagtagaa

SEQ ID NO: 62104 - DNA, 20 bp, Artificial Sequence
  Description of Artificial Sequence: Synthetic oligonucleotide
  Target: ATXN2; (-) strand; PAM type: YTN; PAM sequence: CTA
tcagttgagaaactatagaa

SEQ ID NO: 62105 - DNA, 20 bp, Artificial Sequence
  Description of Artificial Sequence: Synthetic oligonucleotide
  Target: ATXN2; (-) strand; PAM type: YTN; PAM sequence: CTG
ctatcagttgagaaactata

SEQ ID NO: 62106 - DNA, 20 bp, Artificial Sequence
  Description of Artificial Sequence: Synthetic oligonucleotide
  Target: ATXN2; (-) strand; PAM type: YTN; PAM sequence: TTA
actgctatcagttgagaaac

SEQ ID NO: 62107 - DNA, 20 bp, Artificial Sequence
  Description of Artificial Sequence: Synthetic oligonucleotide
  Target: ATXN2; (-) strand; PAM type: YTN; PAM sequence: TTA
gagtgattaactgctatcag

SEQ ID NO: 62108 - DNA, 20 bp, Artificial Sequence
  Description of Artificial Sequence: Synthetic oligonucleotide
  Target: ATXN2; (-) strand; PAM type: YTN; PAM sequence: TTT
agagtgattaactgctatca

SEQ ID NO: 62109 - DNA, 20 bp, Artificial Sequence
  Description of Artificial Sequence: Synthetic oligonucleotide
  Target: ATXN2; (-) strand; PAM type: YTN; PAM sequence: TTA
atttagagtgattaactgct

SEQ ID NO: 62110 - DNA, 20 bp, Artificial Sequence
  Description of Artificial Sequence: Synthetic oligonucleotide
  Target: ATXN2; (-) strand; PAM type: YTN; PAM sequence: TTG
ccaaccagttaatttagagt

SEQ ID NO: 62111 - DNA, 20 bp, Artificial Sequence
  Description of Artificial Sequence: Synthetic oligonucleotide
  Target: ATXN2; (-) strand; PAM type: YTN; PAM sequence: TTT
gccaaccagttaatttagag

SEQ ID NO: 62112 - DNA, 20 bp, Artificial Sequence
  Description of Artificial Sequence: Synthetic oligonucleotide
  Target: ATXN2; (-) strand; PAM type: YTN; PAM sequence: TTT
tgccaaccagttaatttaga

SEQ ID NO: 62113 - DNA, 20 bp, Artificial Sequence
  Description of Artificial Sequence: Synthetic oligonucleotide
  Target: ATXN2; (-) strand; PAM type: YTN; PAM sequence: TTT
ttgccaaccagttaatttag

SEQ ID NO: 62114 - DNA, 20 bp, Artificial Sequence
  Description of Artificial Sequence: Synthetic oligonucleotide
  Target: ATXN2; (-) strand; PAM type: YTN; PAM sequence: TTT
tttgccaaccagttaattta

SEQ ID NO: 62115 - DNA, 20 bp, Artificial Sequence
  Description of Artificial Sequence: Synthetic oligonucleotide
  Target: ATXN2; (-) strand; PAM type: YTN; PAM sequence: TTT
ttttgccaaccagttaattt

SEQ ID NO: 62116 - DNA, 20 bp, Artificial Sequence
  Description of Artificial Sequence: Synthetic oligonucleotide
  Target: ATXN2; (-) strand; PAM type: YTN; PAM sequence: TTT
tttttgccaaccagttaatt

SEQ ID NO: 62117 - DNA, 20 bp, Artificial Sequence
  Description of Artificial Sequence: Synthetic oligonucleotide
  Target: ATXN2; (-) strand; PAM type: YTN; PAM sequence: TTT
ttttttgccaaccagttaat

SEQ ID NO: 62118 - DNA, 20 bp, Artificial Sequence
  Description of Artificial Sequence: Synthetic oligonucleotide
  Target: ATXN2; (-) strand; PAM type: YTN; PAM sequence: TTT
tttttttgccaaccagttaa

SEQ ID NO: 62119 - DNA, 20 bp, Artificial Sequence
  Description of Artificial Sequence: Synthetic oligonucleotide
  Target: ATXN2; (-) strand; PAM type: YTN; PAM sequence: CTA
aagggttttttttttgccaa

SEQ ID NO: 62120 - DNA, 20 bp, Artificial Sequence
  Description of Artificial Sequence: Synthetic oligonucleotide
  Target: ATXN2; (-) strand; PAM type: YTN; PAM sequence: TTG
gaaaatgctaaagggttttt

SEQ ID NO: 62121 - DNA, 20 bp, Artificial Sequence
  Description of Artificial Sequence: Synthetic oligonucleotide
  Target: ATXN2; (-) strand; PAM type: YTN; PAM sequence: TTA
atgttggaaaatgctaaagg

SEQ ID NO: 62122 - DNA, 20 bp, Artificial Sequence
  Description of Artificial Sequence: Synthetic oligonucleotide
  Target: ATXN2; (-) strand; PAM type: YTN; PAM sequence: TTT
aatgttggaaaatgctaaag

SEQ ID NO: 62123 - DNA, 20 bp, Artificial Sequence
  Description of Artificial Sequence: Synthetic oligonucleotide
  Target: ATXN2; (-) strand; PAM type: YTN; PAM sequence: TTT
taatgttggaaaatgctaaa

SEQ ID NO: 62124 - DNA, 20 bp, Artificial Sequence
  Description of Artificial Sequence: Synthetic oligonucleotide
  Target: ATXN2; (-) strand; PAM type: YTN; PAM sequence: CTT
ttaatgttggaaaatgctaa

SEQ ID NO: 62125 - DNA, 20 bp, Artificial Sequence
  Description of Artificial Sequence: Synthetic oligonucleotide
  Target: ATXN2; (-) strand; PAM type: YTN; PAM sequence: TTC
ttttaatgttggaaaatgct

SEQ ID NO: 62126 - DNA, 20 bp, Artificial Sequence
  Description of Artificial Sequence: Synthetic oligonucleotide
  Target: ATXN2; (-) strand; PAM type: YTN; PAM sequence: CTC
cgtccaaaaaaaaaaaaaaa

SEQ ID NO: 62127 - DNA, 20 bp, Artificial Sequence
  Description of Artificial Sequence: Synthetic oligonucleotide
  Target: ATXN2; (-) strand; PAM type: YTN; PAM sequence: CTG
ggtgacagagcgagactccg

SEQ ID NO: 62128 - DNA, 20 bp, Artificial Sequence
  Description of Artificial Sequence: Synthetic oligonucleotide
  Target: ATXN2; (-) strand; PAM type: YTN; PAM sequence: CTG
ggcatggtggtgcgtgcctg

SEQ ID NO: 62129 - DNA, 20 bp, Artificial Sequence
  Description of Artificial Sequence: Synthetic oligonucleotide
  Target: ATXN2; (-) strand; PAM type: YTN; PAM sequence: CTA
aaaatacaaagatcagctgg

SEQ ID NO: 62130 - DNA, 20 bp, Artificial Sequence
  Description of Artificial Sequence: Synthetic oligonucleotide
  Target: ATXN2; (-) strand; PAM type: YTN; PAM sequence: CTA
ctaaaaatacaaagatcagc

SEQ ID NO: 62131 - DNA, 20 bp, Artificial Sequence
  Description of Artificial Sequence: Synthetic oligonucleotide
  Target: ATXN2; (-) strand; PAM type: YTN; PAM sequence: CTC
tactaaaaatacaaagatca

SEQ ID NO: 62132 - DNA, 20 bp, Artificial Sequence
  Description of Artificial Sequence: Synthetic oligonucleotide
  Target: ATXN2; (-) strand; PAM type: YTN; PAM sequence: CTG
gccaacatggtgaaaacccg

SEQ ID NO: 62133 - DNA, 20 bp, Artificial Sequence
  Description of Artificial Sequence: Synthetic oligonucleotide
  Target: ATXN2; (-) strand; PAM type: YTN; PAM sequence: TTG
aggtcaggagtacaaaacca

SEQ ID NO: 62134 - DNA, 20 bp, Artificial Sequence
  Description of Artificial Sequence: Synthetic oligonucleotide
  Target: ATXN2; (-) strand; PAM type: YTN; PAM sequence: CTT
gaggtcaggagtacaaaacc

SEQ ID NO: 62135 - DNA, 20 bp, Artificial Sequence
  Description of Artificial Sequence: Synthetic oligonucleotide
  Target: ATXN2; (-) strand; PAM type: YTN; PAM sequence: CTG
ggaagccgaggtgggcagat

SEQ ID NO: 62136 - DNA, 20 bp, Artificial Sequence
  Description of Artificial Sequence: Synthetic oligonucleotide
  Target: ATXN2; (-) strand; PAM type: YTN; PAM sequence: CTC
tgggaagccgaggtgggcag

SEQ ID NO: 62137 - DNA, 20 bp, Artificial Sequence
  Description of Artificial Sequence: Synthetic oligonucleotide
  Target: ATXN2; (-) strand; PAM type: YTN; PAM sequence: CTG
taagcccaacactctgggaa

SEQ ID NO: 62138 - DNA, 20 bp, Artificial Sequence
  Description of Artificial Sequence: Synthetic oligonucleotide
  Target: ATXN2; (-) strand; PAM type: YTN; PAM sequence: CTC
acatctgtaagcccaacact

SEQ ID NO: 62139 - DNA, 20 bp, Artificial Sequence
  Description of Artificial Sequence: Synthetic oligonucleotide
  Target: ATXN2; (-) strand; PAM type: YTN; PAM sequence: TTG
gccaggtgtggtggctcaca

SEQ ID NO: 62140 - DNA, 20 bp, Artificial Sequence
  Description of Artificial Sequence: Synthetic oligonucleotide
  Target: ATXN2; (-) strand; PAM type: YTN; PAM sequence: TTT
ggccaggtgtggtggctcac

SEQ ID NO: 62141 - DNA, 20 bp, Artificial Sequence
  Description of Artificial Sequence: Synthetic oligonucleotide
  Target: ATXN2; (-) strand; PAM type: YTN; PAM sequence: TTT
tggccaggtgtggtggctca

SEQ ID NO: 62142 - DNA, 20 bp, Artificial Sequence
  Description of Artificial Sequence: Synthetic oligonucleotide
  Target: ATXN2; (-) strand; PAM type: YTN; PAM sequence: CTT
ttggccaggtgtggtggctc

SEQ ID NO: 62143 - DNA, 20 bp, Artificial Sequence
  Description of Artificial Sequence: Synthetic oligonucleotide
  Target: ATXN2; (-) strand; PAM type: YTN; PAM sequence: TTA
aaaggaaatcttttggccag

SEQ ID NO: 62144 - DNA, 20 bp, Artificial Sequence
  Description of Artificial Sequence: Synthetic oligonucleotide
  Target: ATXN2; (-) strand; PAM type: YTN; PAM sequence: CTT
aaaaggaaatcttttggcca

SEQ ID NO: 62145 - DNA, 20 bp, Artificial Sequence
  Description of Artificial Sequence: Synthetic oligonucleotide
  Target: ATXN2; (-) strand; PAM type: YTN; PAM sequence: TTC
ttaaaaggaaatcttttggc

SEQ ID NO: 62146 - DNA, 20 bp, Artificial Sequence
  Description of Artificial Sequence: Synthetic oligonucleotide
  Target: ATXN2; (-) strand; PAM type: YTN; PAM sequence: TTT
cttaaaaggaaatcttttgg

SEQ ID NO: 62147 - DNA, 20 bp, Artificial Sequence
  Description of Artificial Sequence: Synthetic oligonucleotide
  Target: ATXN2; (-) strand; PAM type: YTN; PAM sequence: TTT
tcttaaaaggaaatcttttg

SEQ ID NO: 62148 - DNA, 20 bp, Artificial Sequence
  Description of Artificial Sequence: Synthetic oligonucleotide
  Target: ATXN2; (-) strand; PAM type: YTN; PAM sequence: TTT
ttcttaaaaggaaatctttt

SEQ ID NO: 62149 - DNA, 20 bp, Artificial Sequence
  Description of Artificial Sequence: Synthetic oligonucleotide
  Target: ATXN2; (-) strand; PAM type: YTN; PAM sequence: TTC
gtagaaaaaatcccacattt

SEQ ID NO: 62150 - DNA, 20 bp, Artificial Sequence
  Description of Artificial Sequence: Synthetic oligonucleotide
  Target: ATXN2; (-) strand; PAM type: YTN; PAM sequence: CTT
cgtagaaaaaatcccacatt

SEQ ID NO: 62151 - DNA, 20 bp, Artificial Sequence
  Description of Artificial Sequence: Synthetic oligonucleotide
  Target: ATXN2; (-) strand; PAM type: YTN; PAM sequence: TTA
aagagccttcgtagaaaaaa

SEQ ID NO: 62152 - DNA, 20 bp, Artificial Sequence
  Description of Artificial Sequence: Synthetic oligonucleotide
  Target: ATXN2; (-) strand; PAM type: YTN; PAM sequence: TTG
tgtggttaaagagccttcgt

SEQ ID NO: 62153 - DNA, 20 bp, Artificial Sequence
  Description of Artificial Sequence: Synthetic oligonucleotide
  Target: ATXN2; (-) strand; PAM type: YTN; PAM sequence: CTT
gtgtggttaaagagccttcg

SEQ ID NO: 62154 - DNA, 20 bp, Artificial Sequence
  Description of Artificial Sequence: Synthetic oligonucleotide
  Target: ATXN2; (-) strand; PAM type: YTN; PAM sequence: CTG
tgcttgtgtggttaaagagc

SEQ ID NO: 62155 - DNA, 20 bp, Artificial Sequence
  Description of Artificial Sequence: Synthetic oligonucleotide
  Target: ATXN2; (-) strand; PAM type: YTN; PAM sequence: TTC
tgtgcttgtgtggttaaaga

SEQ ID NO: 62156 - DNA, 20 bp, Artificial Sequence
  Description of Artificial Sequence: Synthetic oligonucleotide
  Target: ATXN2; (-) strand; PAM type: YTN; PAM sequence: CTA
gtattctgtgcttgtgtggt

SEQ ID NO: 62157 - DNA, 20 bp, Artificial Sequence
  Description of Artificial Sequence: Synthetic oligonucleotide
  Target: ATXN2; (-) strand; PAM type: YTN; PAM sequence: TTG
cataaactagtattctgtgc

SEQ ID NO: 62158 - DNA, 20 bp, Artificial Sequence
  Description of Artificial Sequence: Synthetic oligonucleotide
  Target: ATXN2; (-) strand; PAM type: YTN; PAM sequence: TTG
tcgtataatgtagttgcata

SEQ ID NO: 62159 - DNA, 20 bp, Artificial Sequence
  Description of Artificial Sequence: Synthetic oligonucleotide
  Target: ATXN2; (-) strand; PAM type: YTN; PAM sequence: TTA
gggagttgtcgtataatgta

SEQ ID NO: 62160 - DNA, 20 bp, Artificial Sequence
  Description of Artificial Sequence: Synthetic oligonucleotide
  Target: ATXN2; (-) strand; PAM type: YTN; PAM sequence: TTA
aaattagggagttgtcgtat

SEQ ID NO: 62161 - DNA, 20 bp, Artificial Sequence
  Description of Artificial Sequence: Synthetic oligonucleotide
  Target: ATXN2; (-) strand; PAM type: YTN; PAM sequence: CTG
cattaaaattagggagttgt

SEQ ID NO: 62162 - DNA, 20 bp, Artificial Sequence
  Description of Artificial Sequence: Synthetic oligonucleotide
  Target: ATXN2; (-) strand; PAM type: YTN; PAM sequence: TTC
tgcattaaaattagggagtt

SEQ ID NO: 62163 - DNA, 20 bp, Artificial Sequence
  Description of Artificial Sequence: Synthetic oligonucleotide
  Target: ATXN2; (-) strand; PAM type: YTN; PAM sequence: TTT
ctgcattaaaattagggagt

SEQ ID NO: 62164 - DNA, 20 bp, Artificial Sequence
  Description of Artificial Sequence: Synthetic oligonucleotide
  Target: ATXN2; (-) strand; PAM type: YTN; PAM sequence: CTC
aaaaagaaaaataagatgga

SEQ ID NO: 62165 - DNA, 20 bp, Artificial Sequence
  Description of Artificial Sequence: Synthetic oligonucleotide
  Target: ATXN2; (-) strand; PAM type: YTN; PAM sequence: CTG
cctcaaaaagaaaaataaga

SEQ ID NO: 62166 - DNA, 20 bp, Artificial Sequence
  Description of Artificial Sequence: Synthetic oligonucleotide
  Target: ATXN2; (-) strand; PAM type: YTN; PAM sequence: TTG
ggtgaaagagcgaaaccctg

SEQ ID NO: 62167 - DNA, 20 bp, Artificial Sequence
  Description of Artificial Sequence: Synthetic oligonucleotide
  Target: ATXN2; (-) strand; PAM type: YTN; PAM sequence: CTT
gggtgaaagagcgaaaccct

SEQ ID NO: 62168 - DNA, 20 bp, Artificial Sequence
  Description of Artificial Sequence: Synthetic oligonucleotide
  Target: ATXN2; (-) strand; PAM type: YTN; PAM sequence: CTC
cagcttgggtgaaagagcga

SEQ ID NO: 62169 - DNA, 20 bp, Artificial Sequence
  Description of Artificial Sequence: Synthetic oligonucleotide
  Target: ATXN2; (-) strand; PAM type: YTN; PAM sequence: CTG
ggctccagcttgggtgaaag

SEQ ID NO: 62170 - DNA, 20 bp, Artificial Sequence
  Description of Artificial Sequence: Synthetic oligonucleotide
  Target: ATXN2; (-) strand; PAM type: YTN; PAM sequence: CTG
caccactgggctccagcttg

SEQ ID NO: 62171 - DNA, 20 bp, Artificial Sequence
  Description of Artificial Sequence: Synthetic oligonucleotide
  Target: ATXN2; (-) strand; PAM type: YTN; PAM sequence: CTG
tgactgcaccactgggctcc

SEQ ID NO: 62172 - DNA, 20 bp, Artificial Sequence
  Description of Artificial Sequence: Synthetic oligonucleotide
  Target: ATXN2; (-) strand; PAM type: YTN; PAM sequence: CTG
cagggaactgtgactgcacc

SEQ ID NO: 62173 - DNA, 20 bp, Artificial Sequence
  Description of Artificial Sequence: Synthetic oligonucleotide
  Target: ATXN2; (-) strand; PAM type: YTN; PAM sequence: TTG
aaaccagaaggtccaggctg

SEQ ID NO: 62174 - DNA, 20 bp, Artificial Sequence
  Description of Artificial Sequence: Synthetic oligonucleotide
  Target: ATXN2; (-) strand; PAM type: YTN; PAM sequence: CTG
aggtgggaggatcaattgaa

SEQ ID NO: 62175 - DNA, 20 bp, Artificial Sequence
  Description of Artificial Sequence: Synthetic oligonucleotide
  Target: ATXN2; (-) strand; PAM type: YTN; PAM sequence: TTG
ggagactgaggtgggaggat

SEQ ID NO: 62176 - DNA, 20 bp, Artificial Sequence
  Description of Artificial Sequence: Synthetic oligonucleotide
  Target: ATXN2; (-) strand; PAM type: YTN; PAM sequence: CTT
gggagactgaggtgggagga

SEQ ID NO: 62177 - DNA, 20 bp, Artificial Sequence
  Description of Artificial Sequence: Synthetic oligonucleotide
  Target: ATXN2; (-) strand; PAM type: YTN; PAM sequence: CTA
cttgggagactgaggtggga

SEQ ID NO: 62178 - DNA, 20 bp, Artificial Sequence
  Description of Artificial Sequence: Synthetic oligonucleotide
  Target: ATXN2; (-) strand; PAM type: YTN; PAM sequence: CTA
gctacttgggagactgaggt

SEQ ID NO: 62179 - DNA, 20 bp, Artificial Sequence
  Description of Artificial Sequence: Synthetic oligonucleotide
  Target: ATXN2; (-) strand; PAM type: YTN; PAM sequence: CTG
tagtcctagctacttgggag

SEQ ID NO: 62180 - DNA, 20 bp, Artificial Sequence
  Description of Artificial Sequence: Synthetic oligonucleotide
  Target: ATXN2; (-) strand; PAM type: YTN; PAM sequence: CTC
ctgtagtcctagctacttgg

SEQ ID NO: 62181 - DNA, 20 bp, Artificial Sequence
  Description of Artificial Sequence: Synthetic oligonucleotide
  Target: ATXN2; (-) strand; PAM type: YTN; PAM sequence: TTA
gccagccgtcatggtgtgct

SEQ ID NO: 62182 - DNA, 20 bp, Artificial Sequence
  Description of Artificial Sequence: Synthetic oligonucleotide
  Target: ATXN2; (-) strand; PAM type: YTN; PAM sequence: CTT
agccagccgtcatggtgtgc

SEQ ID NO: 62183 - DNA, 20 bp, Artificial Sequence
  Description of Artificial Sequence: Synthetic oligonucleotide
  Target: ATXN2; (-) strand; PAM type: YTN; PAM sequence: CTG
caaaaaaaaaatagaaatct

SEQ ID NO: 62184 - DNA, 20 bp, Artificial Sequence
  Description of Artificial Sequence: Synthetic oligonucleotide
  Target: ATXN2; (-) strand; PAM type: YTN; PAM sequence: CTC
tgcaaaaaaaaaatagaaat

SEQ ID NO: 62185 - DNA, 20 bp, Artificial Sequence
  Description of Artificial Sequence: Synthetic oligonucleotide
  Target: ATXN2; (-) strand; PAM type: YTN; PAM sequence: CTA
tctctgcaaaaaaaaaatag

SEQ ID NO: 62186 - DNA, 20 bp, Artificial Sequence
  Description of Artificial Sequence: Synthetic oligonucleotide
  Target: ATXN2; (-) strand; PAM type: YTN; PAM sequence: CTG
ggcaacatggcaaaaaccta

SEQ ID NO: 62187 - DNA, 20 bp, Artificial Sequence
  Description of Artificial Sequence: Synthetic oligonucleotide
  Target: ATXN2; (-) strand; PAM type: YTN; PAM sequence: TTA
agaccagcctgggcaacatg

SEQ ID NO: 62188 - DNA, 20 bp, Artificial Sequence
  Description of Artificial Sequence: Synthetic oligonucleotide
  Target: ATXN2; (-) strand; PAM type: YTN; PAM sequence: TTT
aagaccagcctgggcaacat

SEQ ID NO: 62189 - DNA, 20 bp, Artificial Sequence
  Description of Artificial Sequence: Synthetic oligonucleotide
  Target: ATXN2; (-) strand; PAM type: YTN; PAM sequence: TTT
taagaccagcctgggcaaca

SEQ ID NO: 62190 - DNA, 20 bp, Artificial Sequence
  Description of Artificial Sequence: Synthetic oligonucleotide
  Target: ATXN2; (-) strand; PAM type: YTN; PAM sequence: CTG
aggtgggcagatcacatgac

SEQ ID NO: 62191 - DNA, 20 bp, Artificial Sequence
  Description of Artificial Sequence: Synthetic oligonucleotide
  Target: ATXN2; (-) strand; PAM type: YTN; PAM sequence: TTG
agaggctgaggtgggcagat

SEQ ID NO: 62192 - DNA, 20 bp, Artificial Sequence
  Description of Artificial Sequence: Synthetic oligonucleotide
  Target: ATXN2; (-) strand; PAM type: YTN; PAM sequence: TTT
gagaggctgaggtgggcaga

SEQ ID NO: 62193 - DNA, 20 bp, Artificial Sequence
  Description of Artificial Sequence: Synthetic oligonucleotide
  Target: ATXN2; (-) strand; PAM type: YTN; PAM sequence: CTT
tgagaggctgaggtgggcag

SEQ ID NO: 62194 - DNA, 20 bp, Artificial Sequence
  Description of Artificial Sequence: Synthetic oligonucleotide
  Target: ATXN2; (-) strand; PAM type: YTN; PAM sequence: TTC
cagcactttgagaggctgag

SEQ ID NO: 62195 - DNA, 20 bp, Artificial Sequence
  Description of Artificial Sequence: Synthetic oligonucleotide
  Target: ATXN2; (-) strand; PAM type: YTN; PAM sequence: CTC
acgtgtaattccagcacttt

SEQ ID NO: 62196 - DNA, 20 bp, Artificial Sequence
  Description of Artificial Sequence: Synthetic oligonucleotide
  Target: ATXN2; (-) strand; PAM type: YTN; PAM sequence: TTG
gtggctcacgtgtaattcca

SEQ ID NO: 62197 - DNA, 20 bp, Artificial Sequence
  Description of Artificial Sequence: Synthetic oligonucleotide
  Target: ATXN2; (-) strand; PAM type: YTN; PAM sequence: CTT
ggtggctcacgtgtaattcc

SEQ ID NO: 62198 - DNA, 20 bp, Artificial Sequence
  Description of Artificial Sequence: Synthetic oligonucleotide
  Target: ATXN2; (-) strand; PAM type: YTN; PAM sequence: CTA
ggcttggtggctcacgtgta

SEQ ID NO: 62199 - DNA, 20 bp, Artificial Sequence
  Description of Artificial Sequence: Synthetic oligonucleotide
  Target: ATXN2; (-) strand; PAM type: YTN; PAM sequence: TTC
ggctaggcttggtggctcac

SEQ ID NO: 62200 - DNA, 20 bp, Artificial Sequence
  Description of Artificial Sequence: Synthetic oligonucleotide
  Target: ATXN2; (-) strand; PAM type: YTN; PAM sequence: TTT
cggctaggcttggtggctca

SEQ ID NO: 62201 - DNA, 20 bp, Artificial Sequence
  Description of Artificial Sequence: Synthetic oligonucleotide
  Target: ATXN2; (-) strand; PAM type: YTN; PAM sequence: TTA
gaaggatgtttcggctaggc

SEQ ID NO: 62202 - DNA, 20 bp, Artificial Sequence
  Description of Artificial Sequence: Synthetic oligonucleotide
  Target: ATXN2; (-) strand; PAM type: YTN; PAM sequence: CTA
ttagaaggatgtttcggcta

SEQ ID NO: 62203 - DNA, 20 bp, Artificial Sequence
  Description of Artificial Sequence: Synthetic oligonucleotide
  Target: ATXN2; (-) strand; PAM type: YTN; PAM sequence: TTA
agatcctattagaaggatgt

SEQ ID NO: 62204 - DNA, 20 bp, Artificial Sequence
  Description of Artificial Sequence: Synthetic oligonucleotide
  Target: ATXN2; (-) strand; PAM type: YTN; PAM sequence: TTC
aaccaatgttaagatcctat

SEQ ID NO: 62205 - DNA, 20 bp, Artificial Sequence
  Description of Artificial Sequence: Synthetic oligonucleotide
  Target: ATXN2; (-) strand; PAM type: YTN; PAM sequence: CTT
caaccaatgttaagatccta

SEQ ID NO: 62206 - DNA, 20 bp, Artificial Sequence
  Description of Artificial Sequence: Synthetic oligonucleotide
  Target: ATXN2; (-) strand; PAM type: YTN; PAM sequence: CTA
acttcaaccaatgttaagat

SEQ ID NO: 62207 - DNA, 20 bp, Artificial Sequence
  Description of Artificial Sequence: Synthetic oligonucleotide
  Target: ATXN2; (-) strand; PAM type: YTN; PAM sequence: TTG
aagcagaggggcaactaact

SEQ ID NO: 62208 - DNA, 20 bp, Artificial Sequence
  Description of Artificial Sequence: Synthetic oligonucleotide
  Target: ATXN2; (-) strand; PAM type: YTN; PAM sequence: TTT
gaagcagaggggcaactaac

SEQ ID NO: 62209 - DNA, 20 bp, Artificial Sequence
  Description of Artificial Sequence: Synthetic oligonucleotide
  Target: ATXN2; (-) strand; PAM type: YTN; PAM sequence: TTT
tgaagcagaggggcaactaa

SEQ ID NO: 62210 - DNA, 20 bp, Artificial Sequence
  Description of Artificial Sequence: Synthetic oligonucleotide
  Target: ATXN2; (-) strand; PAM type: YTN; PAM sequence: CTT
ttgaagcagaggggcaacta

SEQ ID NO: 62211 - DNA, 20 bp, Artificial Sequence
  Description of Artificial Sequence: Synthetic oligonucleotide
  Target: ATXN2; (-) strand; PAM type: YTN; PAM sequence: TTC
ttttgaagcagaggggcaac

SEQ ID NO: 62212 - DNA, 20 bp, Artificial Sequence
  Description of Artificial Sequence: Synthetic oligonucleotide
  Target: ATXN2; (-) strand; PAM type: YTN; PAM sequence: TTT
cttttgaagcagaggggcaa

SEQ ID NO: 62213 - DNA, 20 bp, Artificial Sequence
  Description of Artificial Sequence: Synthetic oligonucleotide
  Target: ATXN2; (-) strand; PAM type: YTN; PAM sequence: TTC
cccaaagccagaatttcttt

SEQ ID NO: 62214 - DNA, 20 bp, Artificial Sequence
  Description of Artificial Sequence: Synthetic oligonucleotide
  Target: ATXN2; (-) strand; PAM type: YTN; PAM sequence: TTT
ccccaaagccagaatttctt

SEQ ID NO: 62215 - DNA, 20 bp, Artificial Sequence
  Description of Artificial Sequence: Synthetic oligonucleotide
  Target: ATXN2; (-) strand; PAM type: YTN; PAM sequence: TTA
tttccccaaagccagaattt

SEQ ID NO: 62216 - DNA, 20 bp, Artificial Sequence
  Description of Artificial Sequence: Synthetic oligonucleotide
  Target: ATXN2; (-) strand; PAM type: YTN; PAM sequence: CTA
cagttatttccccaaagcca

SEQ ID NO: 62217 - DNA, 20 bp, Artificial Sequence
  Description of Artificial Sequence: Synthetic oligonucleotide
  Target: ATXN2; (-) strand; PAM type: YTN; PAM sequence: TTA
tatatacctacagttatttc

SEQ ID NO: 62218 - DNA, 20 bp, Artificial Sequence
  Description of Artificial Sequence: Synthetic oligonucleotide
  Target: ATXN2; (-) strand; PAM type: YTN; PAM sequence: TTT
atatatacctacagttattt

SEQ ID NO: 62219 - DNA, 20 bp, Artificial Sequence
  Description of Artificial Sequence: Synthetic oligonucleotide
  Target: ATXN2; (-) strand; PAM type: YTN; PAM sequence: CTT
tatatatacctacagttatt

SEQ ID NO: 62220 - DNA, 20 bp, Artificial Sequence
  Description of Artificial Sequence: Synthetic oligonucleotide
  Target: ATXN2; (-) strand; PAM type: YTN; PAM sequence: TTG
ctttatatatacctacagtt

SEQ ID NO: 62221 - DNA, 20 bp, Artificial Sequence
  Description of Artificial Sequence: Synthetic oligonucleotide
  Target: ATXN2; (-) strand; PAM type: YTN; PAM sequence: CTT
gctttatatatacctacagt

SEQ ID NO: 62222 - DNA, 20 bp, Artificial Sequence
  Description of Artificial Sequence: Synthetic oligonucleotide
  Target: ATXN2; (-) strand; PAM type: YTN; PAM sequence: CTA
accttgctttatatatacct

SEQ ID NO: 62223 - DNA, 20 bp, Artificial Sequence
  Description of Artificial Sequence: Synthetic oligonucleotide
  Target: ATXN2; (-) strand; PAM type: YTN; PAM sequence: TTG
ctaaccttgctttatatata

SEQ ID NO: 62224 - DNA, 20 bp, Artificial Sequence
  Description of Artificial Sequence: Synthetic oligonucleotide
  Target: ATXN2; (-) strand; PAM type: YTN; PAM sequence: CTA
gattgctaaccttgctttat

SEQ ID NO: 62225 - DNA, 20 bp, Artificial Sequence
  Description of Artificial Sequence: Synthetic oligonucleotide
  Target: ATXN2; (-) strand; PAM type: YTN; PAM sequence: TTA
ctagattgctaaccttgctt

SEQ ID NO: 62226 - DNA, 20 bp, Artificial Sequence
  Description of Artificial Sequence: Synthetic oligonucleotide
  Target: ATXN2; (-) strand; PAM type: YTN; PAM sequence: TTT
actagattgctaaccttgct

SEQ ID NO: 62227 - DNA, 20 bp, Artificial Sequence
  Description of Artificial Sequence: Synthetic oligonucleotide
  Target: ATXN2; (-) strand; PAM type: YTN; PAM sequence: TTA
atttactagattgctaacct

SEQ ID NO: 62228 - DNA, 20 bp, Artificial Sequence
  Description of Artificial Sequence: Synthetic oligonucleotide
  Target: ATXN2; (-) strand; PAM type: YTN; PAM sequence: CTA
gattaatttactagattgct

SEQ ID NO: 62229 - DNA, 20 bp, Artificial Sequence
  Description of Artificial Sequence: Synthetic oligonucleotide
  Target: ATXN2; (-) strand; PAM type: YTN; PAM sequence: TTG
ctagattaatttactagatt

SEQ ID NO: 62230 - DNA, 20 bp, Artificial Sequence
  Description of Artificial Sequence: Synthetic oligonucleotide
  Target: ATXN2; (-) strand; PAM type: YTN; PAM sequence: TTT
gctagattaatttactagat

SEQ ID NO: 62231 - DNA, 20 bp, Artificial Sequence
  Description of Artificial Sequence: Synthetic oligonucleotide
  Target: ATXN2; (-) strand; PAM type: YTN; PAM sequence: TTG
aagaagagggtttgctagat

SEQ ID NO: 62232 - DNA, 20 bp, Artificial Sequence
  Description of Artificial Sequence: Synthetic oligonucleotide
  Target: ATXN2; (-) strand; PAM type: YTN; PAM sequence: TTT
gaagaagagggtttgctaga

SEQ ID NO: 62233 - DNA, 20 bp, Artificial Sequence
  Description of Artificial Sequence: Synthetic oligonucleotide
  Target: ATXN2; (-) strand; PAM type: YTN; PAM sequence: TTA
aatttgaagaagagggtttg

SEQ ID NO: 62234 - DNA, 20 bp, Artificial Sequence
  Description of Artificial Sequence: Synthetic oligonucleotide
  Target: ATXN2; (-) strand; PAM type: YTN; PAM sequence: CTT
aaatttgaagaagagggttt

SEQ ID NO: 62235 - DNA, 20 bp, Artificial Sequence
  Description of Artificial Sequence: Synthetic oligonucleotide
  Target: ATXN2; (-) strand; PAM type: YTN; PAM sequence: CTG
aacttaaatttgaagaagag

SEQ ID NO: 62236 - DNA, 20 bp, Artificial Sequence
  Description of Artificial Sequence: Synthetic oligonucleotide
  Target: ATXN2; (-) strand; PAM type: YTN; PAM sequence: TTA
aatctgaacttaaatttgaa

SEQ ID NO: 62237 - DNA, 20 bp, Artificial Sequence
  Description of Artificial Sequence: Synthetic oligonucleotide
  Target: ATXN2; (-) strand; PAM type: YTN; PAM sequence: TTT
aaatctgaacttaaatttga

SEQ ID NO: 62238 - DNA, 20 bp, Artificial Sequence
  Description of Artificial Sequence: Synthetic oligonucleotide
  Target: ATXN2; (-) strand; PAM type: YTN; PAM sequence: CTG
atttaaatctgaacttaaat

SEQ ID NO: 62239 - DNA, 20 bp, Artificial Sequence
  Description of Artificial Sequence: Synthetic oligonucleotide
  Target: ATXN2; (-) strand; PAM type: YTN; PAM sequence: CTG
aaatctgatttaaatctgaa

SEQ ID NO: 62240 - DNA, 20 bp, Artificial Sequence
  Description of Artificial Sequence: Synthetic oligonucleotide
  Target: ATXN2; (-) strand; PAM type: YTN; PAM sequence: TTG
atctgaaatctgatttaaat

SEQ ID NO: 62241 - DNA, 20 bp, Artificial Sequence
  Description of Artificial Sequence: Synthetic oligonucleotide
  Target: ATXN2; (-) strand; PAM type: YTN; PAM sequence: TTT
gatctgaaatctgatttaaa

SEQ ID NO: 62242 - DNA, 20 bp, Artificial Sequence
  Description of Artificial Sequence: Synthetic oligonucleotide
  Target: ATXN2; (-) strand; PAM type: YTN; PAM sequence: TTT
tgatctgaaatctgatttaa

SEQ ID NO: 62243 - DNA, 20 bp, Artificial Sequence
  Description of Artificial Sequence: Synthetic oligonucleotide
  Target: ATXN2; (-) strand; PAM type: YTN; PAM sequence: TTT
ttgatctgaaatctgattta

SEQ ID NO: 62244 - DNA, 20 bp, Artificial Sequence
  Description of Artificial Sequence: Synthetic oligonucleotide
  Target: ATXN2; (-) strand; PAM type: YTN; PAM sequence: CTT
tttgatctgaaatctgattt

SEQ ID NO: 62245 - DNA, 20 bp, Artificial Sequence
  Description of Artificial Sequence: Synthetic oligonucleotide
  Target: ATXN2; (-) strand; PAM type: YTN; PAM sequence: TTC
caaagctttttgatctgaaa

SEQ ID NO: 62246 - DNA, 20 bp, Artificial Sequence
  Description of Artificial Sequence: Synthetic oligonucleotide
  Target: ATXN2; (-) strand; PAM type: YTN; PAM sequence: TTA
attccaaagctttttgatct

SEQ ID NO: 62247 - DNA, 20 bp, Artificial Sequence
  Description of Artificial Sequence: Synthetic oligonucleotide
  Target: ATXN2; (-) strand; PAM type: YTN; PAM sequence: CTC
aaaaaaaaaaaaaaaagtta

SEQ ID NO: 62248 - DNA, 20 bp, Artificial Sequence
  Description of Artificial Sequence: Synthetic oligonucleotide
  Target: ATXN2; (-) strand; PAM type: YTN; PAM sequence: CTA
tctcaaaaaaaaaaaaaaaa

SEQ ID NO: 62249 - DNA, 20 bp, Artificial Sequence
  Description of Artificial Sequence: Synthetic oligonucleotide
  Target: ATXN2; (-) strand; PAM type: YTN; PAM sequence: TTC
gagagcagcatgggcaatat

SEQ ID NO: 62250 - DNA, 20 bp, Artificial Sequence
  Description of Artificial Sequence: Synthetic oligonucleotide
  Target: ATXN2; (-) strand; PAM type: YTN; PAM sequence: TTG
aacccatgagttcgagagca

SEQ ID NO: 62251 - DNA, 20 bp, Artificial Sequence
  Description of Artificial Sequence: Synthetic oligonucleotide
  Target: ATXN2; (-) strand; PAM type: YTN; PAM sequence: CTT
gaacccatgagttcgagagc

SEQ ID NO: 62252 - DNA, 20 bp, Artificial Sequence
  Description of Artificial Sequence: Synthetic oligonucleotide
  Target: ATXN2; (-) strand; PAM type: YTN; PAM sequence: CTG
gaggatgacttgaacccatg

SEQ ID NO: 62253 - DNA, 20 bp, Artificial Sequence
  Description of Artificial Sequence: Synthetic oligonucleotide
  Target: ATXN2; (-) strand; PAM type: YTN; PAM sequence: CTG
atatcccagctggaggatga

SEQ ID NO: 62254 - DNA, 20 bp, Artificial Sequence
  Description of Artificial Sequence: Synthetic oligonucleotide
  Target: ATXN2; (-) strand; PAM type: YTN; PAM sequence: CTC
catgcctgatatcccagctg

SEQ ID NO: 62255 - DNA, 20 bp, Artificial Sequence
  Description of Artificial Sequence: Synthetic oligonucleotide
  Target: ATXN2; (-) strand; PAM type: YTN; PAM sequence: CTG
gacacagtggctccatgcct

SEQ ID NO: 62256 - DNA, 20 bp, Artificial Sequence
  Description of Artificial Sequence: Synthetic oligonucleotide
  Target: ATXN2; (-) strand; PAM type: YTN; PAM sequence: TTG
gctggacacagtggctccat

SEQ ID NO: 62257 - DNA, 20 bp, Artificial Sequence
  Description of Artificial Sequence: Synthetic oligonucleotide
  Target: ATXN2; (-) strand; PAM type: YTN; PAM sequence: CTA
attggctggacacagtggct

SEQ ID NO: 62258 - DNA, 20 bp, Artificial Sequence
  Description of Artificial Sequence: Synthetic oligonucleotide
  Target: ATXN2; (-) strand; PAM type: YTN; PAM sequence: CTC
aaaacaaacaaacaaacaaa

SEQ ID NO: 62259 - DNA, 20 bp, Artificial Sequence
  Description of Artificial Sequence: Synthetic oligonucleotide
  Target: ATXN2; (-) strand; PAM type: YTN; PAM sequence: CTC
catctcaaaacaaacaaaca

SEQ ID NO: 62260 - DNA, 20 bp, Artificial Sequence
  Description of Artificial Sequence: Synthetic oligonucleotide
  Target: ATXN2; (-) strand; PAM type: YTN; PAM sequence: CTG
ggcaacagagtgagactcca

SEQ ID NO: 62261 - DNA, 20 bp, Artificial Sequence
  Description of Artificial Sequence: Synthetic oligonucleotide
  Target: ATXN2; (-) strand; PAM type: YTN; PAM sequence: TTC
agcctgggcaacagagtgag

SEQ ID NO: 62262 - DNA, 20 bp, Artificial Sequence
  Description of Artificial Sequence: Synthetic oligonucleotide
  Target: ATXN2; (-) strand; PAM type: YTN; PAM sequence: CTT
cagcctgggcaacagagtga

SEQ ID NO: 62263 - DNA, 20 bp, Artificial Sequence
  Description of Artificial Sequence: Synthetic oligonucleotide
  Target: ATXN2; (-) strand; PAM type: YTN; PAM sequence: CTG
cacttcagcctgggcaacag

SEQ ID NO: 62264 - DNA, 20 bp, Artificial Sequence
  Description of Artificial Sequence: Synthetic oligonucleotide
  Target: ATXN2; (-) strand; PAM type: YTN; PAM sequence: TTG
cagtgagccaagatcgtgcc

SEQ ID NO: 62265 - DNA, 20 bp, Artificial Sequence
  Description of Artificial Sequence: Synthetic oligonucleotide
  Target: ATXN2; (-) strand; PAM type: YTN; PAM sequence: TTG
aacccgggaggcaggggttg

SEQ ID NO: 62266 - DNA, 20 bp, Artificial Sequence
  Description of Artificial Sequence: Synthetic oligonucleotide
  Target: ATXN2; (-) strand; PAM type: YTN; PAM sequence: CTT
gaacccgggaggcaggggtt

SEQ ID NO: 62267 - DNA, 20 bp, Artificial Sequence
  Description of Artificial Sequence: Synthetic oligonucleotide
  Target: ATXN2; (-) strand; PAM type: YTN; PAM sequence: TTG
cttgaacccgggaggcaggg

SEQ ID NO: 62268 - DNA, 20 bp, Artificial Sequence
  Description of Artificial Sequence: Synthetic oligonucleotide
  Target: ATXN2; (-) strand; PAM type: YTN; PAM sequence: CTG
aggcaggagaattgcttgaa

SEQ ID NO: 62269 - DNA, 20 bp, Artificial Sequence
  Description of Artificial Sequence: Synthetic oligonucleotide
  Target: ATXN2; (-) strand; PAM type: YTN; PAM sequence: CTA
ggtggggctgaggcaggaga

SEQ ID NO: 62270 - DNA, 20 bp, Artificial Sequence
  Description of Artificial Sequence: Synthetic oligonucleotide
  Target: ATXN2; (-) strand; PAM type: YTN; PAM sequence: CTA
ctaggtggggctgaggcagg

SEQ ID NO: 62271 - DNA, 20 bp, Artificial Sequence
  Description of Artificial Sequence: Synthetic oligonucleotide
  Target: ATXN2; (-) strand; PAM type: YTN; PAM sequence: CTG
taatcccagctactaggtgg

SEQ ID NO: 62272 - DNA, 20 bp, Artificial Sequence
  Description of Artificial Sequence: Synthetic oligonucleotide
  Target: ATXN2; (-) strand; PAM type: YTN; PAM sequence: CTG
ccgcctgtaatcccagctac

SEQ ID NO: 62273 - DNA, 20 bp, Artificial Sequence
  Description of Artificial Sequence: Synthetic oligonucleotide
  Target: ATXN2; (-) strand; PAM type: YTN; PAM sequence: TTA
gccggacatggtggcacctg

SEQ ID NO: 62274 - DNA, 20 bp, Artificial Sequence
  Description of Artificial Sequence: Synthetic oligonucleotide
  Target: ATXN2; (-) strand; PAM type: YTN; PAM sequence: CTA
aaatacaaaaattagccgga

SEQ ID NO: 62275 - DNA, 20 bp, Artificial Sequence
  Description of Artificial Sequence: Synthetic oligonucleotide
  Target: ATXN2; (-) strand; PAM type: YTN; PAM sequence: CTA
ctaaaatacaaaaattagcc

SEQ ID NO: 62276 - DNA, 20 bp, Artificial Sequence
  Description of Artificial Sequence: Synthetic oligonucleotide
  Target: ATXN2; (-) strand; PAM type: YTN; PAM sequence: CTC
tactaaaatacaaaaattag

SEQ ID NO: 62277 - DNA, 20 bp, Artificial Sequence
  Description of Artificial Sequence: Synthetic oligonucleotide
  Target: ATXN2; (-) strand; PAM type: YTN; PAM sequence: CTG
gccaacatggcgaaacccca

SEQ ID NO: 62278 - DNA, 20 bp, Artificial Sequence
  Description of Artificial Sequence: Synthetic oligonucleotide
  Target: ATXN2; (-) strand; PAM type: YTN; PAM sequence: TTG
agaccagcctggccaacatg

SEQ ID NO: 62279 - DNA, 20 bp, Artificial Sequence
  Description of Artificial Sequence: Synthetic oligonucleotide
  Target: ATXN2; (-) strand; PAM type: YTN; PAM sequence: TTT
gagaccagcctggccaacat

SEQ ID NO: 62280 - DNA, 20 bp, Artificial Sequence
  Description of Artificial Sequence: Synthetic oligonucleotide
  Target: ATXN2; (-) strand; PAM type: YTN; PAM sequence: CTG
aggtcagtagtttgagacca

SEQ ID NO: 62281 - DNA, 20 bp, Artificial Sequence
  Description of Artificial Sequence: Synthetic oligonucleotide
  Target: ATXN2; (-) strand; PAM type: YTN; PAM sequence: TTG
ggaggccgaggtgggtgtat

SEQ ID NO: 62282 - DNA, 20 bp, Artificial Sequence
  Description of Artificial Sequence: Synthetic oligonucleotide
  Target: ATXN2; (-) strand; PAM type: YTN; PAM sequence: TTT
gggaggccgaggtgggtgta

SEQ ID NO: 62283 - DNA, 20 bp, Artificial Sequence
  Description of Artificial Sequence: Synthetic oligonucleotide
  Target: ATXN2; (-) strand; PAM type: YTN; PAM sequence: CTT
tgggaggccgaggtgggtgt

SEQ ID NO: 62284 - DNA, 20 bp, Artificial Sequence
  Description of Artificial Sequence: Synthetic oligonucleotide
  Target: ATXN2; (-) strand; PAM type: YTN; PAM sequence: CTG
taatcccagcactttgggag

SEQ ID NO: 62285 - DNA, 20 bp, Artificial Sequence
  Description of Artificial Sequence: Synthetic oligonucleotide
  Target: ATXN2; (-) strand; PAM type: YTN; PAM sequence: TTA
tgcctgtaatcccagcactt

SEQ ID NO: 62286 - DNA, 20 bp, Artificial Sequence
  Description of Artificial Sequence: Synthetic oligonucleotide
  Target: ATXN2; (-) strand; PAM type: YTN; PAM sequence: CTT
atgcctgtaatcccagcact

SEQ ID NO: 62287 - DNA, 20 bp, Artificial Sequence
  Description of Artificial Sequence: Synthetic oligonucleotide
  Target: ATXN2; (-) strand; PAM type: YTN; PAM sequence: CTG
ggcatggtggcttatgcctg

SEQ ID NO: 62288 - DNA, 20 bp, Artificial Sequence
  Description of Artificial Sequence: Synthetic oligonucleotide
  Target: ATXN2; (-) strand; PAM type: YTN; PAM sequence: CTG
gctgggcatggtggcttatg

SEQ ID NO: 62289 - DNA, 20 bp, Artificial Sequence
  Description of Artificial Sequence: Synthetic oligonucleotide
  Target: ATXN2; (-) strand; PAM type: YTN; PAM sequence: CTC
aaacataaatactggctggg

SEQ ID NO: 62290 - DNA, 20 bp, Artificial Sequence
  Description of Artificial Sequence: Synthetic oligonucleotide
  Target: ATXN2; (-) strand; PAM type: YTN; PAM sequence: CTG
ggcgacagagtgagaccccg

SEQ ID NO: 62291 - DNA, 20 bp, Artificial Sequence
  Description of Artificial Sequence: Synthetic oligonucleotide
  Target: ATXN2; (-) strand; PAM type: YTN; PAM sequence: CTC
cagcctgggcgacagagtga

SEQ ID NO: 62292 - DNA, 20 bp, Artificial Sequence
  Description of Artificial Sequence: Synthetic oligonucleotide
  Target: ATXN2; (-) strand; PAM type: YTN; PAM sequence: CTG
ccctccagcctgggcgacag

SEQ ID NO: 62293 - DNA, 20 bp, Artificial Sequence
  Description of Artificial Sequence: Synthetic oligonucleotide
  Target: ATXN2; (-) strand; PAM type: YTN; PAM sequence: TTA
tgccactgccctccagcctg

SEQ ID NO: 62294 - DNA, 20 bp, Artificial Sequence
  Description of Artificial Sequence: Synthetic oligonucleotide
  Target: ATXN2; (-) strand; PAM type: YTN; PAM sequence: CTG
tgattatgccactgccctcc

SEQ ID NO: 62295 - DNA, 20 bp, Artificial Sequence
  Description of Artificial Sequence: Synthetic oligonucleotide
  Target: ATXN2; (-) strand; PAM type: YTN; PAM sequence: CTG
cagtgagctgtgattatgcc

SEQ ID NO: 62296 - DNA, 20 bp, Artificial Sequence
  Description of Artificial Sequence: Synthetic oligonucleotide
  Target: ATXN2; (-) strand; PAM type: YTN; PAM sequence: TTG
agcccaggaagtagaggctg

SEQ ID NO: 62297 - DNA, 20 bp, Artificial Sequence
  Description of Artificial Sequence: Synthetic oligonucleotide
  Target: ATXN2; (-) strand; PAM type: YTN; PAM sequence: CTT
gagcccaggaagtagaggct

SEQ ID NO: 62298 - DNA, 20 bp, Artificial Sequence
  Description of Artificial Sequence: Synthetic oligonucleotide
  Target: ATXN2; (-) strand; PAM type: YTN; PAM sequence: CTG
aggcgagaggatcacttgag

SEQ ID NO: 62299 - DNA, 20 bp, Artificial Sequence
  Description of Artificial Sequence: Synthetic oligonucleotide
  Target: ATXN2; (-) strand; PAM type: YTN; PAM sequence: TTG
ggggactgaggcgagaggat

SEQ ID NO: 62300 - DNA, 20 bp, Artificial Sequence
  Description of Artificial Sequence: Synthetic oligonucleotide
  Target: ATXN2; (-) strand; PAM type: YTN; PAM sequence: TTT
gggggactgaggcgagagga

SEQ ID NO: 62301 - DNA, 20 bp, Artificial Sequence
  Description of Artificial Sequence: Synthetic oligonucleotide
  Target: ATXN2; (-) strand; PAM type: YTN; PAM sequence: CTG
tttgggggactgaggcgaga

SEQ ID NO: 62302 - DNA, 20 bp, Artificial Sequence
  Description of Artificial Sequence: Synthetic oligonucleotide
  Target: ATXN2; (-) strand; PAM type: YTN; PAM sequence: CTG
tagccccagctgtttggggg

SEQ ID NO: 62303 - DNA, 20 bp, Artificial Sequence
  Description of Artificial Sequence: Synthetic oligonucleotide
  Target: ATXN2; (-) strand; PAM type: YTN; PAM sequence: CTG
ggcatggtggcatatgcctg

SEQ ID NO: 62304 - DNA, 20 bp, Artificial Sequence
  Description of Artificial Sequence: Synthetic oligonucleotide
  Target: ATXN2; (-) strand; PAM type: YTN; PAM sequence: TTA
gctgggcatggtggcatatg

SEQ ID NO: 62305 - DNA, 20 bp, Artificial Sequence
  Description of Artificial Sequence: Synthetic oligonucleotide
  Target: ATXN2; (-) strand; PAM type: YTN; PAM sequence: TTC
aaaaaaattagctgggcatg

SEQ ID NO: 62306 - DNA, 20 bp, Artificial Sequence
  Description of Artificial Sequence: Synthetic oligonucleotide
  Target: ATXN2; (-) strand; PAM type: YTN; PAM sequence: CTA
aaattcaaaaaaattagctg

SEQ ID NO: 62307 - DNA, 20 bp, Artificial Sequence
  Description of Artificial Sequence: Synthetic oligonucleotide
  Target: ATXN2; (-) strand; PAM type: YTN; PAM sequence: CTA
ctaaaattcaaaaaaattag

SEQ ID NO: 62308 - DNA, 20 bp, Artificial Sequence
  Description of Artificial Sequence: Synthetic oligonucleotide
  Target: ATXN2; (-) strand; PAM type: YTN; PAM sequence: CTC
tactaaaattcaaaaaaatt

SEQ ID NO: 62309 - DNA, 20 bp, Artificial Sequence
  Description of Artificial Sequence: Synthetic oligonucleotide
  Target: ATXN2; (-) strand; PAM type: YTN; PAM sequence: TTG
tctctactaaaattcaaaaa

SEQ ID NO: 62310 - DNA, 20 bp, Artificial Sequence
  Description of Artificial Sequence: Synthetic oligonucleotide
  Target: ATXN2; (-) strand; PAM type: YTN; PAM sequence: TTT
gtctctactaaaattcaaaa

SEQ ID NO: 62311 - DNA, 20 bp, Artificial Sequence
  Description of Artificial Sequence: Synthetic oligonucleotide
  Target: ATXN2; (-) strand; PAM type: YTN; PAM sequence: CTT
tgtctctactaaaattcaaa

SEQ ID NO: 62312 - DNA, 20 bp, Artificial Sequence
  Description of Artificial Sequence: Synthetic oligonucleotide
  Target: ATXN2; (-) strand; PAM type: YTN; PAM sequence: CTG
gacaacagagactttgtctc

SEQ ID NO: 62313 - DNA, 20 bp, Artificial Sequence
  Description of Artificial Sequence: Synthetic oligonucleotide
  Target: ATXN2; (-) strand; PAM type: YTN; PAM sequence: CTC
aggagcccaagatcagcctg

SEQ ID NO: 62314 - DNA, 20 bp, Artificial Sequence
  Description of Artificial Sequence: Synthetic oligonucleotide
  Target: ATXN2; (-) strand; PAM type: YTN; PAM sequence: TTG
agctcaggagcccaagatca

SEQ ID NO: 62315 - DNA, 20 bp, Artificial Sequence
  Description of Artificial Sequence: Synthetic oligonucleotide
  Target: ATXN2; (-) strand; PAM type: YTN; PAM sequence: CTT
gagctcaggagcccaagatc

SEQ ID NO: 62316 - DNA, 20 bp, Artificial Sequence
  Description of Artificial Sequence: Synthetic oligonucleotide
  Target: ATXN2; (-) strand; PAM type: YTN; PAM sequence: TTG
cttgagctcaggagcccaag

SEQ ID NO: 62317 - DNA, 20 bp, Artificial Sequence
  Description of Artificial Sequence: Synthetic oligonucleotide
  Target: ATXN2; (-) strand; PAM type: YTN; PAM sequence: TTG
ggaggccaaggcaggaggat

SEQ ID NO: 62318 - DNA, 20 bp, Artificial Sequence
  Description of Artificial Sequence: Synthetic oligonucleotide
  Target: ATXN2; (-) strand; PAM type: YTN; PAM sequence: TTT
gggaggccaaggcaggagga

SEQ ID NO: 62319 - DNA, 20 bp, Artificial Sequence
  Description of Artificial Sequence: Synthetic oligonucleotide
  Target: ATXN2; (-) strand; PAM type: YTN; PAM sequence: CTT
tgggaggccaaggcaggagg

SEQ ID NO: 62320 - DNA, 20 bp, Artificial Sequence
  Description of Artificial Sequence: Synthetic oligonucleotide
  Target: ATXN2; (-) strand; PAM type: YTN; PAM sequence: TTA
gcactttgggaggccaaggc

SEQ ID NO: 62321 - DNA, 20 bp, Artificial Sequence
  Description of Artificial Sequence: Synthetic oligonucleotide
  Target: ATXN2; (-) strand; PAM type: YTN; PAM sequence: TTT
agcactttgggaggccaagg

SEQ ID NO: 62322 - DNA, 20 bp, Artificial Sequence
  Description of Artificial Sequence: Synthetic oligonucleotide
  Target: ATXN2; (-) strand; PAM type: YTN; PAM sequence: TTT
tagcactttgggaggccaag

SEQ ID NO: 62323 - DNA, 20 bp, Artificial Sequence
  Description of Artificial Sequence: Synthetic oligonucleotide
  Target: ATXN2; (-) strand; PAM type: YTN; PAM sequence: CTG
taattttagcactttgggag

SEQ ID NO: 62324 - DNA, 20 bp, Artificial Sequence
  Description of Artificial Sequence: Synthetic oligonucleotide
  Target: ATXN2; (-) strand; PAM type: YTN; PAM sequence: CTC
acacctgtaattttagcact

SEQ ID NO: 62325 - DNA, 20 bp, Artificial Sequence
  Description of Artificial Sequence: Synthetic oligonucleotide
  Target: ATXN2; (-) strand; PAM type: YTN; PAM sequence: CTG
gtgtgatggctcacacctgt

SEQ ID NO: 62326 - DNA, 20 bp, Artificial Sequence
  Description of Artificial Sequence: Synthetic oligonucleotide
  Target: ATXN2; (-) strand; PAM type: YTN; PAM sequence: TTG
gaggcctggtgtgatggctc

SEQ ID NO: 62327 - DNA, 20 bp, Artificial Sequence
  Description of Artificial Sequence: Synthetic oligonucleotide
  Target: ATXN2; (-) strand; PAM type: YTN; PAM sequence: TTC
aaaaagagtaattggaggcc

SEQ ID NO: 62328 - DNA, 20 bp, Artificial Sequence
  Description of Artificial Sequence: Synthetic oligonucleotide
  Target: ATXN2; (-) strand; PAM type: YTN; PAM sequence: CTT
caaaaagagtaattggaggc

SEQ ID NO: 62329 - DNA, 20 bp, Artificial Sequence
  Description of Artificial Sequence: Synthetic oligonucleotide
  Target: ATXN2; (-) strand; PAM type: YTN; PAM sequence: CTC
ttcaaaaagagtaattggag

SEQ ID NO: 62330 - DNA, 20 bp, Artificial Sequence
  Description of Artificial Sequence: Synthetic oligonucleotide
  Target: ATXN2; (-) strand; PAM type: YTN; PAM sequence: TTA
tatagtatcctcttcaaaaa

SEQ ID NO: 62331 - DNA, 20 bp, Artificial Sequence
  Description of Artificial Sequence: Synthetic oligonucleotide
  Target: ATXN2; (-) strand; PAM type: YTN; PAM sequence: TTG
tgattatatagtatcctctt

SEQ ID NO: 62332 - DNA, 20 bp, Artificial Sequence
  Description of Artificial Sequence: Synthetic oligonucleotide
  Target: ATXN2; (-) strand; PAM type: YTN; PAM sequence: TTA
tgaagaaaaacaggggagaa

SEQ ID NO: 62333 - DNA, 20 bp, Artificial Sequence
  Description of Artificial Sequence: Synthetic oligonucleotide
  Target: ATXN2; (-) strand; PAM type: YTN; PAM sequence: TTT
atgaagaaaaacaggggaga

SEQ ID NO: 62334 - DNA, 20 bp, Artificial Sequence
  Description of Artificial Sequence: Synthetic oligonucleotide
  Target: ATXN2; (-) strand; PAM type: YTN; PAM sequence: TTT
tatgaagaaaaacaggggag

SEQ ID NO: 62335 - DNA, 20 bp, Artificial Sequence
  Description of Artificial Sequence: Synthetic oligonucleotide
  Target: ATXN2; (-) strand; PAM type: YTN; PAM sequence: TTC
acatggattttatgaagaaa

SEQ ID NO: 62336 - DNA, 20 bp, Artificial Sequence
  Description of Artificial Sequence: Synthetic oligonucleotide
  Target: ATXN2; (-) strand; PAM type: YTN; PAM sequence: TTA
catagatattcacatggatt

SEQ ID NO: 62337 - DNA, 20 bp, Artificial Sequence
  Description of Artificial Sequence: Synthetic oligonucleotide
  Target: ATXN2; (-) strand; PAM type: YTN; PAM sequence: TTG
atgaacaacattacatagat

SEQ ID NO: 62338 - DNA, 20 bp, Artificial Sequence
  Description of Artificial Sequence: Synthetic oligonucleotide
  Target: ATXN2; (-) strand; PAM type: YTN; PAM sequence: TTT
gatgaacaacattacataga

SEQ ID NO: 62339 - DNA, 20 bp, Artificial Sequence
  Description of Artificial Sequence: Synthetic oligonucleotide
  Target: ATXN2; (-) strand; PAM type: YTN; PAM sequence: TTT
tgatgaacaacattacatag

SEQ ID NO: 62340 - DNA, 20 bp, Artificial Sequence
  Description of Artificial Sequence: Synthetic oligonucleotide
  Target: ATXN2; (-) strand; PAM type: YTN; PAM sequence: CTT
ttgatgaacaacattacata

SEQ ID NO: 62341 - DNA, 20 bp, Artificial Sequence
  Description of Artificial Sequence: Synthetic oligonucleotide
  Target: ATXN2; (-) strand; PAM type: YTN; PAM sequence: TTG
gcttttgatgaacaacatta

SEQ ID NO: 62342 - DNA, 20 bp, Artificial Sequence
  Description of Artificial Sequence: Synthetic oligonucleotide
  Target: ATXN2; (-) strand; PAM type: YTN; PAM sequence: CTA
tgcattggcttttgatgaac

SEQ ID NO: 62343 - DNA, 20 bp, Artificial Sequence
  Description of Artificial Sequence: Synthetic oligonucleotide
  Target: ATXN2; (-) strand; PAM type: YTN; PAM sequence: TTG
atgaggctatgcattggctt

SEQ ID NO: 62344 - DNA, 20 bp, Artificial Sequence
  Description of Artificial Sequence: Synthetic oligonucleotide
  Target: ATXN2; (-) strand; PAM type: YTN; PAM sequence: TTT
gatgaggctatgcattggct

SEQ ID NO: 62345 - DNA, 20 bp, Artificial Sequence
  Description of Artificial Sequence: Synthetic oligonucleotide
  Target: ATXN2; (-) strand; PAM type: YTN; PAM sequence: TTT
tgatgaggctatgcattggc

SEQ ID NO: 62346 - DNA, 20 bp, Artificial Sequence
  Description of Artificial Sequence: Synthetic oligonucleotide
  Target: ATXN2; (-) strand; PAM type: YTN; PAM sequence: TTT
ttgatgaggctatgcattgg

SEQ ID NO: 62347 - DNA, 20 bp, Artificial Sequence
  Description of Artificial Sequence: Synthetic oligonucleotide
  Target: ATXN2; (-) strand; PAM type: YTN; PAM sequence: CTT
tttgatgaggctatgcattg

SEQ ID NO: 62348 - DNA, 20 bp, Artificial Sequence
  Description of Artificial Sequence: Synthetic oligonucleotide
  Target: ATXN2; (-) strand; PAM type: YTN; PAM sequence: CTG
actttttgatgaggctatgc

SEQ ID NO: 62349 - DNA, 20 bp, Artificial Sequence
  Description of Artificial Sequence: Synthetic oligonucleotide
  Target: ATXN2; (-) strand; PAM type: YTN; PAM sequence: CTC
tgactttttgatgaggctat

SEQ ID NO: 62350 - DNA, 20 bp, Artificial Sequence
  Description of Artificial Sequence: Synthetic oligonucleotide
  Target: ATXN2; (-) strand; PAM type: YTN; PAM sequence: TTA
gctctgactttttgatgagg

SEQ ID NO: 62351 - DNA, 20 bp, Artificial Sequence
  Description of Artificial Sequence: Synthetic oligonucleotide
  Target: ATXN2; (-) strand; PAM type: YTN; PAM sequence: TTT
agctctgactttttgatgag

SEQ ID NO: 62352 - DNA, 20 bp, Artificial Sequence
  Description of Artificial Sequence: Synthetic oligonucleotide
  Target: ATXN2; (-) strand; PAM type: YTN; PAM sequence: TTG
tagtttagctctgacttttt

SEQ ID NO: 62353 - DNA, 20 bp, Artificial Sequence
  Description of Artificial Sequence: Synthetic oligonucleotide
  Target: ATXN2; (-) strand; PAM type: YTN; PAM sequence: TTA
taatgaataaatagttgtag

SEQ ID NO: 62354 - DNA, 20 bp, Artificial Sequence
  Description of Artificial Sequence: Synthetic oligonucleotide
  Target: ATXN2; (-) strand; PAM type: YTN; PAM sequence: TTT
ataatgaataaatagttgta

SEQ ID NO: 62355 - DNA, 20 bp, Artificial Sequence
  Description of Artificial Sequence: Synthetic oligonucleotide
  Target: ATXN2; (-) strand; PAM type: YTN; PAM sequence: CTA
agtttataatgaataaatag

SEQ ID NO: 62356 - DNA, 20 bp, Artificial Sequence
  Description of Artificial Sequence: Synthetic oligonucleotide
  Target: ATXN2; (-) strand; PAM type: YTN; PAM sequence: TTG
agtaactaagtttataatga

SEQ ID NO: 62357 - DNA, 20 bp, Artificial Sequence
  Description of Artificial Sequence: Synthetic oligonucleotide
  Target: ATXN2; (-) strand; PAM type: YTN; PAM sequence: CTG
catgaattgagtaactaagt

SEQ ID NO: 62358 - DNA, 20 bp, Artificial Sequence
  Description of Artificial Sequence: Synthetic oligonucleotide
  Target: ATXN2; (-) strand; PAM type: YTN; PAM sequence: TTG
catgctgcatgaattgagta

SEQ ID NO: 62359 - DNA, 20 bp, Artificial Sequence
  Description of Artificial Sequence: Synthetic oligonucleotide
  Target: ATXN2; (-) strand; PAM type: YTN; PAM sequence: TTT
gcatgctgcatgaattgagt

SEQ ID NO: 62360 - DNA, 20 bp, Artificial Sequence
  Description of Artificial Sequence: Synthetic oligonucleotide
  Target: ATXN2; (-) strand; PAM type: YTN; PAM sequence: TTG
tagtttgcatgctgcatgaa

SEQ ID NO: 62361 - DNA, 20 bp, Artificial Sequence
  Description of Artificial Sequence: Synthetic oligonucleotide
  Target: ATXN2; (-) strand; PAM type: YTN; PAM sequence: CTT
gtagtttgcatgctgcatga

SEQ ID NO: 62362 - DNA, 20 bp, Artificial Sequence
  Description of Artificial Sequence: Synthetic oligonucleotide
  Target: ATXN2; (-) strand; PAM type: YTN; PAM sequence: TTG
cttgtagtttgcatgctgca

SEQ ID NO: 62363 - DNA, 20 bp, Artificial Sequence
  Description of Artificial Sequence: Synthetic oligonucleotide
  Target: ATXN2; (-) strand; PAM type: YTN; PAM sequence: TTT
gcttgtagtttgcatgctgc

SEQ ID NO: 62364 - DNA, 20 bp, Artificial Sequence
  Description of Artificial Sequence: Synthetic oligonucleotide
  Target: ATXN2; (-) strand; PAM type: YTN; PAM sequence: CTG
tgtttgcttgtagtttgcat

SEQ ID NO: 62365 - DNA, 20 bp, Artificial Sequence
  Description of Artificial Sequence: Synthetic oligonucleotide
  Target: ATXN2; (-) strand; PAM type: YTN; PAM sequence: CTG
cctgtgtttgcttgtagttt

SEQ ID NO: 62366 - DNA, 20 bp, Artificial Sequence
  Description of Artificial Sequence: Synthetic oligonucleotide
  Target: ATXN2; (-) strand; PAM type: YTN; PAM sequence: CTA
tgacgcccatgccagtgaat

SEQ ID NO: 62367 - DNA, 20 bp, Artificial Sequence
  Description of Artificial Sequence: Synthetic oligonucleotide
  Target: ATXN2; (-) strand; PAM type: YTN; PAM sequence: TTA
tacccaatacctatgacgcc

SEQ ID NO: 62368 - DNA, 20 bp, Artificial Sequence
  Description of Artificial Sequence: Synthetic oligonucleotide
  Target: ATXN2; (-) strand; PAM type: YTN; PAM sequence: TTT
atacccaatacctatgacgc

SEQ ID NO: 62369 - DNA, 20 bp, Artificial Sequence
  Description of Artificial Sequence: Synthetic oligonucleotide
  Target: ATXN2; (-) strand; PAM type: YTN; PAM sequence: CTT
tatacccaatacctatgacg

SEQ ID NO: 62370 - DNA, 20 bp, Artificial Sequence
  Description of Artificial Sequence: Synthetic oligonucleotide
  Target: ATXN2; (-) strand; PAM type: YTN; PAM sequence: CTC
aagcctttatacccaatacc

SEQ ID NO: 62371 - DNA, 20 bp, Artificial Sequence
  Description of Artificial Sequence: Synthetic oligonucleotide
  Target: ATXN2; (-) strand; PAM type: YTN; PAM sequence: CTC
tcaagcctttatacccaata

SEQ ID NO: 62372 - DNA, 20 bp, Artificial Sequence
  Description of Artificial Sequence: Synthetic oligonucleotide
  Target: ATXN2; (-) strand; PAM type: YTN; PAM sequence: TTC
tctcaagcctttatacccaa

SEQ ID NO: 62373 - DNA, 20 bp, Artificial Sequence
  Description of Artificial Sequence: Synthetic oligonucleotide
  Target: ATXN2; (-) strand; PAM type: YTN; PAM sequence: TTA
attctctcaagcctttatac

SEQ ID NO: 62374 - DNA, 20 bp, Artificial Sequence
  Description of Artificial Sequence: Synthetic oligonucleotide
  Target: ATXN2; (-) strand; PAM type: YTN; PAM sequence: TTT
aattctctcaagcctttata

SEQ ID NO: 62375 - DNA, 20 bp, Artificial Sequence
  Description of Artificial Sequence: Synthetic oligonucleotide
  Target: ATXN2; (-) strand; PAM type: YTN; PAM sequence: TTT
taattctctcaagcctttat

SEQ ID NO: 62376 - DNA, 20 bp, Artificial Sequence
  Description of Artificial Sequence: Synthetic oligonucleotide
  Target: ATXN2; (-) strand; PAM type: YTN; PAM sequence: TTT
ttaattctctcaagccttta

SEQ ID NO: 62377 - DNA, 20 bp, Artificial Sequence
  Description of Artificial Sequence: Synthetic oligonucleotide
  Target: ATXN2; (-) strand; PAM type: YTN; PAM sequence: TTT
tttaattctctcaagccttt

SEQ ID NO: 62378 - DNA, 20 bp, Artificial Sequence
  Description of Artificial Sequence: Synthetic oligonucleotide
  Target: ATXN2; (-) strand; PAM type: YTN; PAM sequence: TTT
ttttaattctctcaagcctt

SEQ ID NO: 62379 - DNA, 20 bp, Artificial Sequence
  Description of Artificial Sequence: Synthetic oligonucleotide
  Target: ATXN2; (-) strand; PAM type: YTN; PAM sequence: TTT
tttttaattctctcaagcct

SEQ ID NO: 62380 - DNA, 20 bp, Artificial Sequence
  Description of Artificial Sequence: Synthetic oligonucleotide
  Target: ATXN2; (-) strand; PAM type: YTN; PAM sequence: TTT
ttttttaattctctcaagcc

SEQ ID NO: 62381 - DNA, 20 bp, Artificial Sequence
  Description of Artificial Sequence: Synthetic oligonucleotide
  Target: ATXN2; (-) strand; PAM type: YTN; PAM sequence: TTT
tttttttaattctctcaagc

SEQ ID NO: 62382 - DNA, 20 bp, Artificial Sequence
  Description of Artificial Sequence: Synthetic oligonucleotide
  Target: ATXN2; (-) strand; PAM type: YTN; PAM sequence: TTA
attttttttttaattctctc

SEQ ID NO: 62383 - DNA, 20 bp, Artificial Sequence
  Description of Artificial Sequence: Synthetic oligonucleotide
  Target: ATXN2; (-) strand; PAM type: YTN; PAM sequence: CTA
atgttaattttttttttaat

SEQ ID NO: 62384 - DNA, 20 bp, Artificial Sequence
  Description of Artificial Sequence: Synthetic oligonucleotide
  Target: ATXN2; (-) strand; PAM type: YTN; PAM sequence: TTA
tcataggtgcctaatgttaa

SEQ ID NO: 62385 - DNA, 20 bp, Artificial Sequence
  Description of Artificial Sequence: Synthetic oligonucleotide
  Target: ATXN2; (-) strand; PAM type: YTN; PAM sequence: TTA
ttatcataggtgcctaatgt

SEQ ID NO: 62386 - DNA, 20 bp, Artificial Sequence
  Description of Artificial Sequence: Synthetic oligonucleotide
  Target: ATXN2; (-) strand; PAM type: YTN; PAM sequence: TTG
ttattatcataggtgcctaa

SEQ ID NO: 62387 - DNA, 20 bp, Artificial Sequence
  Description of Artificial Sequence: Synthetic oligonucleotide
  Target: ATXN2; (-) strand; PAM type: YTN; PAM sequence: CTT
gttattatcataggtgccta

SEQ ID NO: 62388 - DNA, 20 bp, Artificial Sequence
  Description of Artificial Sequence: Synthetic oligonucleotide
  Target: ATXN2; (-) strand; PAM type: YTN; PAM sequence: CTA
agagtgacagaataccttgt

SEQ ID NO: 62389 - DNA, 20 bp, Artificial Sequence
  Description of Artificial Sequence: Synthetic oligonucleotide
  Target: ATXN2; (-) strand; PAM type: YTN; PAM sequence: CTA
gcaatataaaactaagagtg

SEQ ID NO: 62390 - DNA, 20 bp, Artificial Sequence
  Description of Artificial Sequence: Synthetic oligonucleotide
  Target: ATXN2; (-) strand; PAM type: YTN; PAM sequence: CTC
tagcaatataaaactaagag

SEQ ID NO: 62391 - DNA, 20 bp, Artificial Sequence
  Description of Artificial Sequence: Synthetic oligonucleotide
  Target: ATXN2; (-) strand; PAM type: YTN; PAM sequence: CTC
tctagcaatataaaactaag

SEQ ID NO: 62392 - DNA, 20 bp, Artificial Sequence
  Description of Artificial Sequence: Synthetic oligonucleotide
  Target: ATXN2; (-) strand; PAM type: YTN; PAM sequence: CTA
gctctctagcaatataaaac

SEQ ID NO: 62393 - DNA, 20 bp, Artificial Sequence
  Description of Artificial Sequence: Synthetic oligonucleotide
  Target: ATXN2; (-) strand; PAM type: YTN; PAM sequence: CTC
atgcctagctctctagcaat

SEQ ID NO: 62394 - DNA, 20 bp, Artificial Sequence
  Description of Artificial Sequence: Synthetic oligonucleotide
  Target: ATXN2; (-) strand; PAM type: YTN; PAM sequence: TTC
tcatgcctagctctctagca

SEQ ID NO: 62395 - DNA, 20 bp, Artificial Sequence
  Description of Artificial Sequence: Synthetic oligonucleotide
  Target: ATXN2; (-) strand; PAM type: YTN; PAM sequence: CTT
ctcatgcctagctctctagc

SEQ ID NO: 62396 - DNA, 20 bp, Artificial Sequence
  Description of Artificial Sequence: Synthetic oligonucleotide
  Target: ATXN2; (-) strand; PAM type: YTN; PAM sequence: CTA
atggagaatcaggaaacctt

SEQ ID NO: 62397 - DNA, 20 bp, Artificial Sequence
  Description of Artificial Sequence: Synthetic oligonucleotide
  Target: ATXN2; (-) strand; PAM type: YTN; PAM sequence: TTA
atgactaatggagaatcagg

SEQ ID NO: 62398 - DNA, 20 bp, Artificial Sequence
  Description of Artificial Sequence: Synthetic oligonucleotide
  Target: ATXN2; (-) strand; PAM type: YTN; PAM sequence: TTT
aatgactaatggagaatcag

SEQ ID NO: 62399 - DNA, 20 bp, Artificial Sequence
  Description of Artificial Sequence: Synthetic oligonucleotide
  Target: ATXN2; (-) strand; PAM type: YTN; PAM sequence: TTT
taatgactaatggagaatca

SEQ ID NO: 62400 - DNA, 20 bp, Artificial Sequence
  Description of Artificial Sequence: Synthetic oligonucleotide
  Target: ATXN2; (-) strand; PAM type: YTN; PAM sequence: TTT
ttaatgactaatggagaatc

SEQ ID NO: 62401 - DNA, 20 bp, Artificial Sequence
  Description of Artificial Sequence: Synthetic oligonucleotide
  Target: ATXN2; (-) strand; PAM type: YTN; PAM sequence: TTT
tttaatgactaatggagaat

SEQ ID NO: 62402 - DNA, 20 bp, Artificial Sequence
  Description of Artificial Sequence: Synthetic oligonucleotide
  Target: ATXN2; (-) strand; PAM type: YTN; PAM sequence: CTA
attttttaatgactaatgga

SEQ ID NO: 62403 - DNA, 20 bp, Artificial Sequence
  Description of Artificial Sequence: Synthetic oligonucleotide
  Target: ATXN2; (-) strand; PAM type: YTN; PAM sequence: CTG
tgggtatgatctaatttttt

SEQ ID NO: 62404 - DNA, 20 bp, Artificial Sequence
  Description of Artificial Sequence: Synthetic oligonucleotide
  Target: ATXN2; (-) strand; PAM type: YTN; PAM sequence: TTA
gctgtgggtatgatctaatt

SEQ ID NO: 62405 - DNA, 20 bp, Artificial Sequence
  Description of Artificial Sequence: Synthetic oligonucleotide
  Target: ATXN2; (-) strand; PAM type: YTN; PAM sequence: TTT
agctgtgggtatgatctaat

SEQ ID NO: 62406 - DNA, 20 bp, Artificial Sequence
  Description of Artificial Sequence: Synthetic oligonucleotide
  Target: ATXN2; (-) strand; PAM type: YTN; PAM sequence: TTT
tagctgtgggtatgatctaa

SEQ ID NO: 62407 - DNA, 20 bp, Artificial Sequence
  Description of Artificial Sequence: Synthetic oligonucleotide
  Target: ATXN2; (-) strand; PAM type: YTN; PAM sequence: CTT
ttagctgtgggtatgatcta

SEQ ID NO: 62408 - DNA, 20 bp, Artificial Sequence
  Description of Artificial Sequence: Synthetic oligonucleotide
  Target: ATXN2; (-) strand; PAM type: YTN; PAM sequence: TTC
cttttagctgtgggtatgat

SEQ ID NO: 62409 - DNA, 20 bp, Artificial Sequence
  Description of Artificial Sequence: Synthetic oligonucleotide
  Target: ATXN2; (-) strand; PAM type: YTN; PAM sequence: TTG
ttccttttagctgtgggtat

SEQ ID NO: 62410 - DNA, 20 bp, Artificial Sequence
  Description of Artificial Sequence: Synthetic oligonucleotide
  Target: ATXN2; (-) strand; PAM type: YTN; PAM sequence: TTT
gttccttttagctgtgggta

SEQ ID NO: 62411 - DNA, 20 bp, Artificial Sequence
  Description of Artificial Sequence: Synthetic oligonucleotide
  Target: ATXN2; (-) strand; PAM type: YTN; PAM sequence: TTG
gggtttgttccttttagctg

SEQ ID NO: 62412 - DNA, 20 bp, Artificial Sequence
  Description of Artificial Sequence: Synthetic oligonucleotide
  Target: ATXN2; (-) strand; PAM type: YTN; PAM sequence: TTT
ggggtttgttccttttagct

SEQ ID NO: 62413 - DNA, 20 bp, Artificial Sequence
  Description of Artificial Sequence: Synthetic oligonucleotide
  Target: ATXN2; (-) strand; PAM type: YTN; PAM sequence: CTG
tagtttggggtttgttcctt

SEQ ID NO: 62414 - DNA, 20 bp, Artificial Sequence
  Description of Artificial Sequence: Synthetic oligonucleotide
  Target: ATXN2; (-) strand; PAM type: YTN; PAM sequence: TTA
ctgtagtttggggtttgttc

SEQ ID NO: 62415 - DNA, 20 bp, Artificial Sequence
  Description of Artificial Sequence: Synthetic oligonucleotide
  Target: ATXN2; (-) strand; PAM type: YTN; PAM sequence: TTT
actgtagtttggggtttgtt

SEQ ID NO: 62416 - DNA, 20 bp, Artificial Sequence
  Description of Artificial Sequence: Synthetic oligonucleotide
  Target: ATXN2; (-) strand; PAM type: YTN; PAM sequence: TTA
gatttactgtagtttggggt

SEQ ID NO: 62417 - DNA, 20 bp, Artificial Sequence
  Description of Artificial Sequence: Synthetic oligonucleotide
  Target: ATXN2; (-) strand; PAM type: YTN; PAM sequence: TTT
agatttactgtagtttgggg

SEQ ID NO: 62418 - DNA, 20 bp, Artificial Sequence
  Description of Artificial Sequence: Synthetic oligonucleotide
  Target: ATXN2; (-) strand; PAM type: YTN; PAM sequence: CTG
tgaaaaagatggtttagatt

SEQ ID NO: 62419 - DNA, 20 bp, Artificial Sequence
  Description of Artificial Sequence: Synthetic oligonucleotide
  Target: ATXN2; (-) strand; PAM type: YTN; PAM sequence: TTC
tgtgaaaaagatggtttaga

SEQ ID NO: 62420 - DNA, 20 bp, Artificial Sequence
  Description of Artificial Sequence: Synthetic oligonucleotide
  Target: ATXN2; (-) strand; PAM type: YTN; PAM sequence: TTT
ctgtgaaaaagatggtttag

SEQ ID NO: 62421 - DNA, 20 bp, Artificial Sequence
  Description of Artificial Sequence: Synthetic oligonucleotide
  Target: ATXN2; (-) strand; PAM type: YTN; PAM sequence: TTT
tctgtgaaaaagatggttta

SEQ ID NO: 62422 - DNA, 20 bp, Artificial Sequence
  Description of Artificial Sequence: Synthetic oligonucleotide
  Target: ATXN2; (-) strand; PAM type: YTN; PAM sequence: CTG
agaatgttttctgtgaaaaa

SEQ ID NO: 62423 - DNA, 20 bp, Artificial Sequence
  Description of Artificial Sequence: Synthetic oligonucleotide
  Target: ATXN2; (-) strand; PAM type: YTN; PAM sequence: CTA
aatctgagaatgttttctgt

SEQ ID NO: 62424 - DNA, 20 bp, Artificial Sequence
  Description of Artificial Sequence: Synthetic oligonucleotide
  Target: ATXN2; (-) strand; PAM type: YTN; PAM sequence: TTA
agtatgaggacctaaatctg

SEQ ID NO: 62425 - DNA, 20 bp, Artificial Sequence
  Description of Artificial Sequence: Synthetic oligonucleotide
  Target: ATXN2; (-) strand; PAM type: YTN; PAM sequence: TTG
ttaagtatgaggacctaaat

SEQ ID NO: 62426 - DNA, 20 bp, Artificial Sequence
  Description of Artificial Sequence: Synthetic oligonucleotide
  Target: ATXN2; (-) strand; PAM type: YTN; PAM sequence: TTC
agtgtgttgttaagtatgag

SEQ ID NO: 62427 - DNA, 20 bp, Artificial Sequence
  Description of Artificial Sequence: Synthetic oligonucleotide
  Target: ATXN2; (-) strand; PAM type: YTN; PAM sequence: TTG
aaacagacaggcatgcagag

SEQ ID NO: 62428 - DNA, 20 bp, Artificial Sequence
  Description of Artificial Sequence: Synthetic oligonucleotide
  Target: ATXN2; (-) strand; PAM type: YTN; PAM sequence: TTT
gaaacagacaggcatgcaga

SEQ ID NO: 62429 - DNA, 20 bp, Artificial Sequence
  Description of Artificial Sequence: Synthetic oligonucleotide
  Target: ATXN2; (-) strand; PAM type: YTN; PAM sequence: TTA
tgcatatgcatttgaaacag

SEQ ID NO: 62430 - DNA, 20 bp, Artificial Sequence
  Description of Artificial Sequence: Synthetic oligonucleotide
  Target: ATXN2; (-) strand; PAM type: YTN; PAM sequence: TTG
agggtgtgatggttatgcat

SEQ ID NO: 62431 - DNA, 20 bp, Artificial Sequence
  Description of Artificial Sequence: Synthetic oligonucleotide
  Target: ATXN2; (-) strand; PAM type: YTN; PAM sequence: CTT
gagggtgtgatggttatgca

SEQ ID NO: 62432 - DNA, 20 bp, Artificial Sequence
  Description of Artificial Sequence: Synthetic oligonucleotide
  Target: ATXN2; (-) strand; PAM type: YTN; PAM sequence: TTC
agtgacttgagggtgtgatg

SEQ ID NO: 62433 - DNA, 20 bp, Artificial Sequence
  Description of Artificial Sequence: Synthetic oligonucleotide
  Target: ATXN2; (-) strand; PAM type: YTN; PAM sequence: TTT
cagtgacttgagggtgtgat

SEQ ID NO: 62434 - DNA, 20 bp, Artificial Sequence
  Description of Artificial Sequence: Synthetic oligonucleotide
  Target: ATXN2; (-) strand; PAM type: YTN; PAM sequence: TTT
tcagtgacttgagggtgtga

SEQ ID NO: 62435 - DNA, 20 bp, Artificial Sequence
  Description of Artificial Sequence: Synthetic oligonucleotide
  Target: ATXN2; (-) strand; PAM type: YTN; PAM sequence: TTA
ggttttcagtgacttgaggg

SEQ ID NO: 62436 - DNA, 20 bp, Artificial Sequence
  Description of Artificial Sequence: Synthetic oligonucleotide
  Target: ATXN2; (-) strand; PAM type: YTN; PAM sequence: TTT
aggttttcagtgacttgagg

SEQ ID NO: 62437 - DNA, 20 bp, Artificial Sequence
  Description of Artificial Sequence: Synthetic oligonucleotide
  Target: ATXN2; (-) strand; PAM type: YTN; PAM sequence: CTT
taggttttcagtgacttgag

SEQ ID NO: 62438 - DNA, 20 bp, Artificial Sequence
  Description of Artificial Sequence: Synthetic oligonucleotide
  Target: ATXN2; (-) strand; PAM type: YTN; PAM sequence: CTC
tttaggttttcagtgacttg

SEQ ID NO: 62439 - DNA, 20 bp, Artificial Sequence
  Description of Artificial Sequence: Synthetic oligonucleotide
  Target: ATXN2; (-) strand; PAM type: YTN; PAM sequence: CTG
acaccaagcactctttaggt

SEQ ID NO: 62440 - DNA, 20 bp, Artificial Sequence
  Description of Artificial Sequence: Synthetic oligonucleotide
  Target: ATXN2; (-) strand; PAM type: YTN; PAM sequence: TTG
tatctgacaccaagcactct

SEQ ID NO: 62441 - DNA, 20 bp, Artificial Sequence
  Description of Artificial Sequence: Synthetic oligonucleotide
  Target: ATXN2; (-) strand; PAM type: YTN; PAM sequence: TTT
gtatctgacaccaagcactc

SEQ ID NO: 62442 - DNA, 20 bp, Artificial Sequence
  Description of Artificial Sequence: Synthetic oligonucleotide
  Target: ATXN2; (-) strand; PAM type: YTN; PAM sequence: TTG
tttgtatctgacaccaagca

SEQ ID NO: 62443 - DNA, 20 bp, Artificial Sequence
  Description of Artificial Sequence: Synthetic oligonucleotide
  Target: ATXN2; (-) strand; PAM type: YTN; PAM sequence: CTC
cccaattgtttgtatctgac

SEQ ID NO: 62444 - DNA, 20 bp, Artificial Sequence
  Description of Artificial Sequence: Synthetic oligonucleotide
  Target: ATXN2; (-) strand; PAM type: YTN; PAM sequence: TTA
gcctccccaattgtttgtat

SEQ ID NO: 62445 - DNA, 20 bp, Artificial Sequence
  Description of Artificial Sequence: Synthetic oligonucleotide
  Target: ATXN2; (-) strand; PAM type: YTN; PAM sequence: CTT
agcctccccaattgtttgta

SEQ ID NO: 62446 - DNA, 20 bp, Artificial Sequence
  Description of Artificial Sequence: Synthetic oligonucleotide
  Target: ATXN2; (-) strand; PAM type: YTN; PAM sequence: TTC
acttagcctccccaattgtt

SEQ ID NO: 62447 - DNA, 20 bp, Artificial Sequence
  Description of Artificial Sequence: Synthetic oligonucleotide
  Target: ATXN2; (-) strand; PAM type: YTN; PAM sequence: TTG
atgttcacttagcctcccca

SEQ ID NO: 62448 - DNA, 20 bp, Artificial Sequence
  Description of Artificial Sequence: Synthetic oligonucleotide
  Target: ATXN2; (-) strand; PAM type: YTN; PAM sequence: TTT
gatgttcacttagcctcccc

SEQ ID NO: 62449 - DNA, 20 bp, Artificial Sequence
  Description of Artificial Sequence: Synthetic oligonucleotide
  Target: ATXN2; (-) strand; PAM type: YTN; PAM sequence: TTG
caccaaatatgatgtatcca

SEQ ID NO: 62450 - DNA, 20 bp, Artificial Sequence
  Description of Artificial Sequence: Synthetic oligonucleotide
  Target: ATXN2; (-) strand; PAM type: YTN; PAM sequence: TTT
gcaccaaatatgatgtatcc

SEQ ID NO: 62451 - DNA, 20 bp, Artificial Sequence
  Description of Artificial Sequence: Synthetic oligonucleotide
  Target: ATXN2; (-) strand; PAM type: YTN; PAM sequence: TTT
tgcaccaaatatgatgtatc

SEQ ID NO: 62452 - DNA, 20 bp, Artificial Sequence
  Description of Artificial Sequence: Synthetic oligonucleotide
  Target: ATXN2; (-) strand; PAM type: YTN; PAM sequence: TTG
ttttgcaccaaatatgatgt

SEQ ID NO: 62453 - DNA, 20 bp, Artificial Sequence
  Description of Artificial Sequence: Synthetic oligonucleotide
  Target: ATXN2; (-) strand; PAM type: YTN; PAM sequence: TTT
gttttgcaccaaatatgatg

SEQ ID NO: 62454 - DNA, 20 bp, Artificial Sequence
  Description of Artificial Sequence: Synthetic oligonucleotide
  Target: ATXN2; (-) strand; PAM type: YTN; PAM sequence: CTG
tttgttttgcaccaaatatg

SEQ ID NO: 62455 - DNA, 20 bp, Artificial Sequence
  Description of Artificial Sequence: Synthetic oligonucleotide
  Target: ATXN2; (-) strand; PAM type: YTN; PAM sequence: CTC
agcctgtttgttttgcacca

SEQ ID NO: 62456 - DNA, 20 bp, Artificial Sequence
  Description of Artificial Sequence: Synthetic oligonucleotide
  Target: ATXN2; (-) strand; PAM type: YTN; PAM sequence: TTA
tactcagcctgtttgttttg

SEQ ID NO: 62457 - DNA, 20 bp, Artificial Sequence
  Description of Artificial Sequence: Synthetic oligonucleotide
  Target: ATXN2; (-) strand; PAM type: YTN; PAM sequence: TTT
atactcagcctgtttgtttt

SEQ ID NO: 62458 - DNA, 20 bp, Artificial Sequence
  Description of Artificial Sequence: Synthetic oligonucleotide
  Target: ATXN2; (-) strand; PAM type: YTN; PAM sequence: CTC
cagtttatactcagcctgtt

SEQ ID NO: 62459 - DNA, 20 bp, Artificial Sequence
  Description of Artificial Sequence: Synthetic oligonucleotide
  Target: ATXN2; (-) strand; PAM type: YTN; PAM sequence: CTA
tggtgggtcatcaacagcca

SEQ ID NO: 62460 - DNA, 20 bp, Artificial Sequence
  Description of Artificial Sequence: Synthetic oligonucleotide
  Target: ATXN2; (-) strand; PAM type: YTN; PAM sequence: CTA
gcccatctatggtgggtcat

SEQ ID NO: 62461 - DNA, 20 bp, Artificial Sequence
  Description of Artificial Sequence: Synthetic oligonucleotide
  Target: ATXN2; (-) strand; PAM type: YTN; PAM sequence: CTC
aagcacaacctagcccatct

SEQ ID NO: 62462 - DNA, 20 bp, Artificial Sequence
  Description of Artificial Sequence: Synthetic oligonucleotide
  Target: ATXN2; (-) strand; PAM type: YTN; PAM sequence: CTC
ggcctcaagcacaacctagc

SEQ ID NO: 62463 - DNA, 20 bp, Artificial Sequence
  Description of Artificial Sequence: Synthetic oligonucleotide
  Target: ATXN2; (-) strand; PAM type: YTN; PAM sequence: TTC
acctcggcctcaagcacaac

SEQ ID NO: 62464 - DNA, 20 bp, Artificial Sequence
  Description of Artificial Sequence: Synthetic oligonucleotide
  Target: ATXN2; (-) strand; PAM type: YTN; PAM sequence: CTT
cacctcggcctcaagcacaa

SEQ ID NO: 62465 - DNA, 20 bp, Artificial Sequence
  Description of Artificial Sequence: Synthetic oligonucleotide
  Target: ATXN2; (-) strand; PAM type: YTN; PAM sequence: CTA
ccccaacttcacctcggcct

SEQ ID NO: 62466 - DNA, 20 bp, Artificial Sequence
  Description of Artificial Sequence: Synthetic oligonucleotide
  Target: ATXN2; (-) strand; PAM type: YTN; PAM sequence: CTA
ctaccccaacttcacctcgg

SEQ ID NO: 62467 - DNA, 20 bp, Artificial Sequence
  Description of Artificial Sequence: Synthetic oligonucleotide
  Target: ATXN2; (-) strand; PAM type: YTN; PAM sequence: TTC
tactaccccaacttcacctc

SEQ ID NO: 62468 - DNA, 20 bp, Artificial Sequence
  Description of Artificial Sequence: Synthetic oligonucleotide
  Target: ATXN2; (-) strand; PAM type: YTN; PAM sequence: CTT
ctactaccccaacttcacct

SEQ ID NO: 62469 - DNA, 20 bp, Artificial Sequence
  Description of Artificial Sequence: Synthetic oligonucleotide
  Target: ATXN2; (-) strand; PAM type: YTN; PAM sequence: TTG
tagccaaagccttctactac

SEQ ID NO: 62470 - DNA, 20 bp, Artificial Sequence
  Description of Artificial Sequence: Synthetic oligonucleotide
  Target: ATXN2; (-) strand; PAM type: YTN; PAM sequence: TTT
gtagccaaagccttctacta

SEQ ID NO: 62471 - DNA, 20 bp, Artificial Sequence
  Description of Artificial Sequence: Synthetic oligonucleotide
  Target: ATXN2; (-) strand; PAM type: YTN; PAM sequence: TTT
tgtagccaaagccttctact

SEQ ID NO: 62472 - DNA, 20 bp, Artificial Sequence
  Description of Artificial Sequence: Synthetic oligonucleotide
  Target: ATXN2; (-) strand; PAM type: YTN; PAM sequence: TTT
ttgtagccaaagccttctac

SEQ ID NO: 62473 - DNA, 20 bp, Artificial Sequence
  Description of Artificial Sequence: Synthetic oligonucleotide
  Target: ATXN2; (-) strand; PAM type: YTN; PAM sequence: TTG
tttttgtagccaaagccttc

SEQ ID NO: 62474 - DNA, 20 bp, Artificial Sequence
  Description of Artificial Sequence: Synthetic oligonucleotide
  Target: ATXN2; (-) strand; PAM type: YTN; PAM sequence: TTG
ttgtttttgtagccaaagcc

SEQ ID NO: 62475 - DNA, 20 bp, Artificial Sequence
  Description of Artificial Sequence: Synthetic oligonucleotide
  Target: ATXN2; (-) strand; PAM type: YTN; PAM sequence: TTA
ttgttgtttttgtagccaaa

SEQ ID NO: 62476 - DNA, 20 bp, Artificial Sequence
  Description of Artificial Sequence: Synthetic oligonucleotide
  Target: ATXN2; (-) strand; PAM type: YTN; PAM sequence: TTT
attgttgtttttgtagccaa

SEQ ID NO: 62477 - DNA, 20 bp, Artificial Sequence
  Description of Artificial Sequence: Synthetic oligonucleotide
  Target: ATXN2; (-) strand; PAM type: YTN; PAM sequence: TTG
aatttattgttgtttttgta

SEQ ID NO: 62478 - DNA, 20 bp, Artificial Sequence
  Description of Artificial Sequence: Synthetic oligonucleotide
  Target: ATXN2; (-) strand; PAM type: YTN; PAM sequence: TTG
agataattgaatttattgtt

SEQ ID NO: 62479 - DNA, 20 bp, Artificial Sequence
  Description of Artificial Sequence: Synthetic oligonucleotide
  Target: ATXN2; (-) strand; PAM type: YTN; PAM sequence: CTT
gagataattgaatttattgt

SEQ ID NO: 62480 - DNA, 20 bp, Artificial Sequence
  Description of Artificial Sequence: Synthetic oligonucleotide
  Target: ATXN2; (-) strand; PAM type: YTN; PAM sequence: TTA
ccttgagataattgaattta

SEQ ID NO: 62481 - DNA, 20 bp, Artificial Sequence
  Description of Artificial Sequence: Synthetic oligonucleotide
  Target: ATXN2; (-) strand; PAM type: YTN; PAM sequence: CTG
ttaccttgagataattgaat

SEQ ID NO: 62482 - DNA, 20 bp, Artificial Sequence
  Description of Artificial Sequence: Synthetic oligonucleotide
  Target: ATXN2; (-) strand; PAM type: YTN; PAM sequence: TTC
atctgttaccttgagataat

SEQ ID NO: 62483 - DNA, 20 bp, Artificial Sequence
  Description of Artificial Sequence: Synthetic oligonucleotide
  Target: ATXN2; (-) strand; PAM type: YTN; PAM sequence: TTG
caataatagttcatctgtta

SEQ ID NO: 62484 - DNA, 20 bp, Artificial Sequence
  Description of Artificial Sequence: Synthetic oligonucleotide
  Target: ATXN2; (-) strand; PAM type: YTN; PAM sequence: TTA
aattgcaataatagttcatc

SEQ ID NO: 62485 - DNA, 20 bp, Artificial Sequence
  Description of Artificial Sequence: Synthetic oligonucleotide
  Target: ATXN2; (-) strand; PAM type: YTN; PAM sequence: TTT
aaattgcaataatagttcat

SEQ ID NO: 62486 - DNA, 20 bp, Artificial Sequence
  Description of Artificial Sequence: Synthetic oligonucleotide
  Target: ATXN2; (-) strand; PAM type: YTN; PAM sequence: CTT
taaattgcaataatagttca

SEQ ID NO: 62487 - DNA, 20 bp, Artificial Sequence
  Description of Artificial Sequence: Synthetic oligonucleotide
  Target: ATXN2; (-) strand; PAM type: YTN; PAM sequence: CTG
ggaaaatccgtctttaaatt

SEQ ID NO: 62488 - DNA, 20 bp, Artificial Sequence
  Description of Artificial Sequence: Synthetic oligonucleotide
  Target: ATXN2; (-) strand; PAM type: YTN; PAM sequence: TTA
gaaagactgggaaaatccgt

SEQ ID NO: 62489 - DNA, 20 bp, Artificial Sequence
  Description of Artificial Sequence: Synthetic oligonucleotide
  Target: ATXN2; (-) strand; PAM type: YTN; PAM sequence: TTA
aagcaagtaaaattagaaag

SEQ ID NO: 62490 - DNA, 20 bp, Artificial Sequence
  Description of Artificial Sequence: Synthetic oligonucleotide
  Target: ATXN2; (-) strand; PAM type: YTN; PAM sequence: TTC
aataaaagggacatagttaa

SEQ ID NO: 62491 - DNA, 20 bp, Artificial Sequence
  Description of Artificial Sequence: Synthetic oligonucleotide
  Target: ATXN2; (-) strand; PAM type: YTN; PAM sequence: TTT
caataaaagggacatagtta

SEQ ID NO: 62492 - DNA, 20 bp, Artificial Sequence
  Description of Artificial Sequence: Synthetic oligonucleotide
  Target: ATXN2; (-) strand; PAM type: YTN; PAM sequence: TTT
tcaataaaagggacatagtt

SEQ ID NO: 62493 - DNA, 20 bp, Artificial Sequence
  Description of Artificial Sequence: Synthetic oligonucleotide
  Target: ATXN2; (-) strand; PAM type: YTN; PAM sequence: TTG
ttttcaataaaagggacata

SEQ ID NO: 62494 - DNA, 20 bp, Artificial Sequence
  Description of Artificial Sequence: Synthetic oligonucleotide
  Target: ATXN2; (-) strand; PAM type: YTN; PAM sequence: TTT
gttttcaataaaagggacat

SEQ ID NO: 62495 - DNA, 20 bp, Artificial Sequence
  Description of Artificial Sequence: Synthetic oligonucleotide
  Target: ATXN2; (-) strand; PAM type: YTN; PAM sequence: TTT
tgttttcaataaaagggaca

SEQ ID NO: 62496 - DNA, 20 bp, Artificial Sequence
  Description of Artificial Sequence: Synthetic oligonucleotide
  Target: ATXN2; (-) strand; PAM type: YTN; PAM sequence: TTT
ttgttttcaataaaagggac

SEQ ID NO: 62497 - DNA, 20 bp, Artificial Sequence
  Description of Artificial Sequence: Synthetic oligonucleotide
  Target: ATXN2; (-) strand; PAM type: YTN; PAM sequence: CTG
tgtttttgttttcaataaaa

SEQ ID NO: 62498 - DNA, 20 bp, Artificial Sequence
  Description of Artificial Sequence: Synthetic oligonucleotide
  Target: ATXN2; (-) strand; PAM type: YTN; PAM sequence: TTA
tgtgctgtgtttttgttttc

SEQ ID NO: 62499 - DNA, 20 bp, Artificial Sequence
  Description of Artificial Sequence: Synthetic oligonucleotide
  Target: ATXN2; (-) strand; PAM type: YTN; PAM sequence: TTT
atgtgctgtgtttttgtttt

SEQ ID NO: 62500 - DNA, 20 bp, Artificial Sequence
  Description of Artificial Sequence: Synthetic oligonucleotide
  Target: ATXN2; (-) strand; PAM type: YTN; PAM sequence: TTG
aaatgtgaaaatttatgtgc

SEQ ID NO: 62501 - DNA, 20 bp, Artificial Sequence
  Description of Artificial Sequence: Synthetic oligonucleotide
  Target: ATXN2; (-) strand; PAM type: YTN; PAM sequence: TTA
ttgaaatgtgaaaatttatg

SEQ ID NO: 62502 - DNA, 20 bp, Artificial Sequence
  Description of Artificial Sequence: Synthetic oligonucleotide
  Target: ATXN2; (-) strand; PAM type: YTN; PAM sequence: TTT
attgaaatgtgaaaatttat

SEQ ID NO: 62503 - DNA, 20 bp, Artificial Sequence
  Description of Artificial Sequence: Synthetic oligonucleotide
  Target: ATXN2; (-) strand; PAM type: YTN; PAM sequence: TTT
tattgaaatgtgaaaattta

SEQ ID NO: 62504 - DNA, 20 bp, Artificial Sequence
  Description of Artificial Sequence: Synthetic oligonucleotide
  Target: ATXN2; (-) strand; PAM type: YTN; PAM sequence: CTT
ttattgaaatgtgaaaattt

SEQ ID NO: 62505 - DNA, 20 bp, Artificial Sequence
  Description of Artificial Sequence: Synthetic oligonucleotide
  Target: ATXN2; (-) strand; PAM type: YTN; PAM sequence: TTC
ttttattgaaatgtgaaaat

SEQ ID NO: 62506 - DNA, 20 bp, Artificial Sequence
  Description of Artificial Sequence: Synthetic oligonucleotide
  Target: ATXN2; (-) strand; PAM type: YTN; PAM sequence: TTT
cttttattgaaatgtgaaaa

SEQ ID NO: 62507 - DNA, 20 bp, Artificial Sequence
  Description of Artificial Sequence: Synthetic oligonucleotide
  Target: ATXN2; (-) strand; PAM type: YTN; PAM sequence: TTT
tcttttattgaaatgtgaaa

SEQ ID NO: 62508 - DNA, 20 bp, Artificial Sequence
  Description of Artificial Sequence: Synthetic oligonucleotide
  Target: ATXN2; (-) strand; PAM type: YTN; PAM sequence: TTT
ttcttttattgaaatgtgaa

SEQ ID NO: 62509 - DNA, 20 bp, Artificial Sequence
  Description of Artificial Sequence: Synthetic oligonucleotide
  Target: ATXN2; (-) strand; PAM type: YTN; PAM sequence: TTT
tttcttttattgaaatgtga

SEQ ID NO: 62510 - DNA, 20 bp, Artificial Sequence
  Description of Artificial Sequence: Synthetic oligonucleotide
  Target: ATXN2; (-) strand; PAM type: YTN; PAM sequence: CTG
aaacattttttcttttattg

SEQ ID NO: 62511 - DNA, 20 bp, Artificial Sequence
  Description of Artificial Sequence: Synthetic oligonucleotide
  Target: ATXN2; (-) strand; PAM type: YTN; PAM sequence: CTA
ctgaaacattttttctttta

SEQ ID NO: 62512 - DNA, 20 bp, Artificial Sequence
  Description of Artificial Sequence: Synthetic oligonucleotide
  Target: ATXN2; (-) strand; PAM type: YTN; PAM sequence: TTC
ctactgaaacattttttctt

SEQ ID NO: 62513 - DNA, 20 bp, Artificial Sequence
  Description of Artificial Sequence: Synthetic oligonucleotide
  Target: ATXN2; (-) strand; PAM type: YTN; PAM sequence: TTA
agttcctactgaaacatttt

SEQ ID NO: 62514 - DNA, 20 bp, Artificial Sequence
  Description of Artificial Sequence: Synthetic oligonucleotide
  Target: ATXN2; (-) strand; PAM type: YTN; PAM sequence: TTT
aagttcctactgaaacattt

SEQ ID NO: 62515 - DNA, 20 bp, Artificial Sequence
  Description of Artificial Sequence: Synthetic oligonucleotide
  Target: ATXN2; (-) strand; PAM type: YTN; PAM sequence: TTT
taagttcctactgaaacatt

SEQ ID NO: 62516 - DNA, 20 bp, Artificial Sequence
  Description of Artificial Sequence: Synthetic oligonucleotide
  Target: ATXN2; (-) strand; PAM type: YTN; PAM sequence: TTG
acaaagttttaagttcctac

SEQ ID NO: 62517 - DNA, 20 bp, Artificial Sequence
  Description of Artificial Sequence: Synthetic oligonucleotide
  Target: ATXN2; (-) strand; PAM type: YTN; PAM sequence: TTA
attgacaaagttttaagttc

SEQ ID NO: 62518 - DNA, 20 bp, Artificial Sequence
  Description of Artificial Sequence: Synthetic oligonucleotide
  Target: ATXN2; (-) strand; PAM type: YTN; PAM sequence: TTT
aattgacaaagttttaagtt

SEQ ID NO: 62519 - DNA, 20 bp, Artificial Sequence
  Description of Artificial Sequence: Synthetic oligonucleotide
  Target: ATXN2; (-) strand; PAM type: YTN; PAM sequence: TTT
taattgacaaagttttaagt

SEQ ID NO: 62520 - DNA, 20 bp, Artificial Sequence
  Description of Artificial Sequence: Synthetic oligonucleotide
  Target: ATXN2; (-) strand; PAM type: YTN; PAM sequence: TTT
ttaattgacaaagttttaag

SEQ ID NO: 62521 - DNA, 20 bp, Artificial Sequence
  Description of Artificial Sequence: Synthetic oligonucleotide
  Target: ATXN2; (-) strand; PAM type: YTN; PAM sequence: TTT
tttaattgacaaagttttaa

SEQ ID NO: 62522 - DNA, 20 bp, Artificial Sequence
  Description of Artificial Sequence: Synthetic oligonucleotide
  Target: ATXN2; (-) strand; PAM type: YTN; PAM sequence: TTA
atattttttaattgacaaag

SEQ ID NO: 62523 - DNA, 20 bp, Artificial Sequence
  Description of Artificial Sequence: Synthetic oligonucleotide
  Target: ATXN2; (-) strand; PAM type: YTN; PAM sequence: TTT
aatattttttaattgacaaa

SEQ ID NO: 62524 - DNA, 20 bp, Artificial Sequence
  Description of Artificial Sequence: Synthetic oligonucleotide
  Target: ATXN2; (-) strand; PAM type: YTN; PAM sequence: TTT
taatattttttaattgacaa

SEQ ID NO: 62525 - DNA, 20 bp, Artificial Sequence
  Description of Artificial Sequence: Synthetic oligonucleotide
  Target: ATXN2; (-) strand; PAM type: YTN; PAM sequence: TTT
ttaatattttttaattgaca

SEQ ID NO: 62526 - DNA, 20 bp, Artificial Sequence
  Description of Artificial Sequence: Synthetic oligonucleotide
  Target: ATXN2; (-) strand; PAM type: YTN; PAM sequence: CTG
tttttaatattttttaattg

SEQ ID NO: 62527 - DNA, 20 bp, Artificial Sequence
  Description of Artificial Sequence: Synthetic oligonucleotide
  Target: ATXN2; (-) strand; PAM type: YTN; PAM sequence: CTG
ccactgtttttaatattttt

SEQ ID NO: 62528 - DNA, 20 bp, Artificial Sequence
  Description of Artificial Sequence: Synthetic oligonucleotide
  Target: ATXN2; (-) strand; PAM type: YTN; PAM sequence: TTA
aaaatagctgccactgtttt

SEQ ID NO: 62529 - DNA, 20 bp, Artificial Sequence
  Description of Artificial Sequence: Synthetic oligonucleotide
  Target: ATXN2; (-) strand; PAM type: YTN; PAM sequence: CTT
aaaaatagctgccactgttt

SEQ ID NO: 62530 - DNA, 20 bp, Artificial Sequence
  Description of Artificial Sequence: Synthetic oligonucleotide
  Target: ATXN2; (-) strand; PAM type: YTN; PAM sequence: TTC
ttaaaaatagctgccactgt

SEQ ID NO: 62531 - DNA, 20 bp, Artificial Sequence
  Description of Artificial Sequence: Synthetic oligonucleotide
  Target: ATXN2; (-) strand; PAM type: YTN; PAM sequence: TTT
cttaaaaatagctgccactg

SEQ ID NO: 62532 - DNA, 20 bp, Artificial Sequence
  Description of Artificial Sequence: Synthetic oligonucleotide
  Target: ATXN2; (-) strand; PAM type: YTN; PAM sequence: TTC
catcagtttcttaaaaatag

SEQ ID NO: 62533 - DNA, 20 bp, Artificial Sequence
  Description of Artificial Sequence: Synthetic oligonucleotide
  Target: ATXN2; (-) strand; PAM type: YTN; PAM sequence: CTT
ccatcagtttcttaaaaata

SEQ ID NO: 62534 - DNA, 20 bp, Artificial Sequence
  Description of Artificial Sequence: Synthetic oligonucleotide
  Target: ATXN2; (-) strand; PAM type: YTN; PAM sequence: TTA
aaaacacttccatcagtttc

SEQ ID NO: 62535 - DNA, 20 bp, Artificial Sequence
  Description of Artificial Sequence: Synthetic oligonucleotide
  Target: ATXN2; (-) strand; PAM type: YTN; PAM sequence: TTT
aaaaacacttccatcagttt

SEQ ID NO: 62536 - DNA, 20 bp, Artificial Sequence
  Description of Artificial Sequence: Synthetic oligonucleotide
  Target: ATXN2; (-) strand; PAM type: YTN; PAM sequence: TTT
taaaaacacttccatcagtt

SEQ ID NO: 62537 - DNA, 20 bp, Artificial Sequence
  Description of Artificial Sequence: Synthetic oligonucleotide
  Target: ATXN2; (-) strand; PAM type: YTN; PAM sequence: TTT
ttaaaaacacttccatcagt

SEQ ID NO: 62538 - DNA, 20 bp, Artificial Sequence
  Description of Artificial Sequence: Synthetic oligonucleotide
  Target: ATXN2; (-) strand; PAM type: YTN; PAM sequence: TTA
atttttaaaaacacttccat

SEQ ID NO: 62539 - DNA, 20 bp, Artificial Sequence
  Description of Artificial Sequence: Synthetic oligonucleotide
  Target: ATXN2; (-) strand; PAM type: YTN; PAM sequence: TTT
aatttttaaaaacacttcca

SEQ ID NO: 62540 - DNA, 20 bp, Artificial Sequence
  Description of Artificial Sequence: Synthetic oligonucleotide
  Target: ATXN2; (-) strand; PAM type: YTN; PAM sequence: TTT
taatttttaaaaacacttcc

SEQ ID NO: 62541 - DNA, 20 bp, Artificial Sequence
  Description of Artificial Sequence: Synthetic oligonucleotide
  Target: ATXN2; (-) strand; PAM type: YTN; PAM sequence: TTT
ttaatttttaaaaacacttc

SEQ ID NO: 62542 - DNA, 20 bp, Artificial Sequence
  Description of Artificial Sequence: Synthetic oligonucleotide
  Target: ATXN2; (-) strand; PAM type: YTN; PAM sequence: TTA
tttttaatttttaaaaacac

SEQ ID NO: 62543 - DNA, 20 bp, Artificial Sequence
  Description of Artificial Sequence: Synthetic oligonucleotide
  Target: ATXN2; (-) strand; PAM type: YTN; PAM sequence: TTT
atttttaatttttaaaaaca

SEQ ID NO: 62544 - DNA, 20 bp, Artificial Sequence
  Description of Artificial Sequence: Synthetic oligonucleotide
  Target: ATXN2; (-) strand; PAM type: YTN; PAM sequence: CTG
agatcataagaagatatatt

SEQ ID NO: 62545 - DNA, 20 bp, Artificial Sequence
  Description of Artificial Sequence: Synthetic oligonucleotide
  Target: ATXN2; (-) strand; PAM type: YTN; PAM sequence: TTC
gactgagatcataagaagat

SEQ ID NO: 62546 - DNA, 20 bp, Artificial Sequence
  Description of Artificial Sequence: Synthetic oligonucleotide
  Target: ATXN2; (-) strand; PAM type: YTN; PAM sequence: TTA
ttcgactgagatcataagaa

SEQ ID NO: 62547 - DNA, 20 bp, Artificial Sequence
  Description of Artificial Sequence: Synthetic oligonucleotide
  Target: ATXN2; (-) strand; PAM type: YTN; PAM sequence: TTA
ttattcgactgagatcataa

SEQ ID NO: 62548 - DNA, 20 bp, Artificial Sequence
  Description of Artificial Sequence: Synthetic oligonucleotide
  Target: ATXN2; (-) strand; PAM type: YTN; PAM sequence: TTG
ttattattcgactgagatca

SEQ ID NO: 62549 - DNA, 20 bp, Artificial Sequence
  Description of Artificial Sequence: Synthetic oligonucleotide
  Target: ATXN2; (-) strand; PAM type: YTN; PAM sequence: CTA
ttgttattattcgactgaga

SEQ ID NO: 62550 - DNA, 20 bp, Artificial Sequence
  Description of Artificial Sequence: Synthetic oligonucleotide
  Target: ATXN2; (-) strand; PAM type: YTN; PAM sequence: CTG
tactattgttattattcgac

SEQ ID NO: 62551 - DNA, 20 bp, Artificial Sequence
  Description of Artificial Sequence: Synthetic oligonucleotide
  Target: ATXN2; (-) strand; PAM type: YTN; PAM sequence: CTA
agagatgactgtactattgt

SEQ ID NO: 62552 - DNA, 20 bp, Artificial Sequence
  Description of Artificial Sequence: Synthetic oligonucleotide
  Target: ATXN2; (-) strand; PAM type: YTN; PAM sequence: CTG
taaccaatcccccacagata

SEQ ID NO: 62553 - DNA, 20 bp, Artificial Sequence
  Description of Artificial Sequence: Synthetic oligonucleotide
  Target: ATXN2; (-) strand; PAM type: YTN; PAM sequence: TTC
acagggtactgtaaccaatc

SEQ ID NO: 62554 - DNA, 20 bp, Artificial Sequence
  Description of Artificial Sequence: Synthetic oligonucleotide
  Target: ATXN2; (-) strand; PAM type: YTN; PAM sequence: CTT
cacagggtactgtaaccaat

SEQ ID NO: 62555 - DNA, 20 bp, Artificial Sequence
  Description of Artificial Sequence: Synthetic oligonucleotide
  Target: ATXN2; (-) strand; PAM type: YTN; PAM sequence: TTG
gtatcttcacagggtactgt

SEQ ID NO: 62556 - DNA, 20 bp, Artificial Sequence
  Description of Artificial Sequence: Synthetic oligonucleotide
  Target: ATXN2; (-) strand; PAM type: YTN; PAM sequence: TTT
ggtatcttcacagggtactg

SEQ ID NO: 62557 - DNA, 20 bp, Artificial Sequence
  Description of Artificial Sequence: Synthetic oligonucleotide
  Target: ATXN2; (-) strand; PAM type: YTN; PAM sequence: CTT
tggtatcttcacagggtact

SEQ ID NO: 62558 - DNA, 20 bp, Artificial Sequence
  Description of Artificial Sequence: Synthetic oligonucleotide
  Target: ATXN2; (-) strand; PAM type: YTN; PAM sequence: TTC
caagactttggtatcttcac

SEQ ID NO: 62559 - DNA, 20 bp, Artificial Sequence
  Description of Artificial Sequence: Synthetic oligonucleotide
  Target: ATXN2; (-) strand; PAM type: YTN; PAM sequence: TTG
agcattccaagactttggta

SEQ ID NO: 62560 - DNA, 20 bp, Artificial Sequence
  Description of Artificial Sequence: Synthetic oligonucleotide
  Target: ATXN2; (-) strand; PAM type: YTN; PAM sequence: CTT
gagcattccaagactttggt

SEQ ID NO: 62561 - DNA, 20 bp, Artificial Sequence
  Description of Artificial Sequence: Synthetic oligonucleotide
  Target: ATXN2; (-) strand; PAM type: YTN; PAM sequence: TTA
tgtaagggacttgagcattc

SEQ ID NO: 62562 - DNA, 20 bp, Artificial Sequence
  Description of Artificial Sequence: Synthetic oligonucleotide
  Target: ATXN2; (-) strand; PAM type: YTN; PAM sequence: TTT
atgtaagggacttgagcatt

SEQ ID NO: 62563 - DNA, 20 bp, Artificial Sequence
  Description of Artificial Sequence: Synthetic oligonucleotide
  Target: ATXN2; (-) strand; PAM type: YTN; PAM sequence: TTT
tatgtaagggacttgagcat

SEQ ID NO: 62564 - DNA, 20 bp, Artificial Sequence
  Description of Artificial Sequence: Synthetic oligonucleotide
  Target: ATXN2; (-) strand; PAM type: YTN; PAM sequence: CTA
catgattttatgtaagggac

SEQ ID NO: 62565 - DNA, 20 bp, Artificial Sequence
  Description of Artificial Sequence: Synthetic oligonucleotide
  Target: ATXN2; (-) strand; PAM type: YTN; PAM sequence: TTG
tatgcgaatactacatgatt

SEQ ID NO: 62566 - DNA, 20 bp, Artificial Sequence
  Description of Artificial Sequence: Synthetic oligonucleotide
  Target: ATXN2; (-) strand; PAM type: YTN; PAM sequence: CTA
gagatgatgtaaagtatata

SEQ ID NO: 62567 - DNA, 20 bp, Artificial Sequence
  Description of Artificial Sequence: Synthetic oligonucleotide
  Target: ATXN2; (-) strand; PAM type: YTN; PAM sequence: TTA
taaataatctagagatgatg

SEQ ID NO: 62568 - DNA, 20 bp, Artificial Sequence
  Description of Artificial Sequence: Synthetic oligonucleotide
  Target: ATXN2; (-) strand; PAM type: YTN; PAM sequence: TTA
ggtattataaataatctaga

SEQ ID NO: 62569 - DNA, 20 bp, Artificial Sequence
  Description of Artificial Sequence: Synthetic oligonucleotide
  Target: ATXN2; (-) strand; PAM type: YTN; PAM sequence: TTT
aggtattataaataatctag

SEQ ID NO: 62570 - DNA, 20 bp, Artificial Sequence
  Description of Artificial Sequence: Synthetic oligonucleotide
  Target: ATXN2; (-) strand; PAM type: YTN; PAM sequence: TTT
taggtattataaataatcta

SEQ ID NO: 62571 - DNA, 20 bp, Artificial Sequence
  Description of Artificial Sequence: Synthetic oligonucleotide
  Target: ATXN2; (-) strand; PAM type: YTN; PAM sequence: TTG
ttttaggtattataaataat

SEQ ID NO: 62572 - DNA, 20 bp, Artificial Sequence
  Description of Artificial Sequence: Synthetic oligonucleotide
  Target: ATXN2; (-) strand; PAM type: YTN; PAM sequence: CTT
gttttaggtattataaataa

SEQ ID NO: 62573 - DNA, 20 bp, Artificial Sequence
  Description of Artificial Sequence: Synthetic oligonucleotide
  Target: ATXN2; (-) strand; PAM type: YTN; PAM sequence: TTA
ccttgttttaggtattataa

SEQ ID NO: 62574 - DNA, 20 bp, Artificial Sequence
  Description of Artificial Sequence: Synthetic oligonucleotide
  Target: ATXN2; (-) strand; PAM type: YTN; PAM sequence: TTT
accttgttttaggtattata

SEQ ID NO: 62575 - DNA, 20 bp, Artificial Sequence
  Description of Artificial Sequence: Synthetic oligonucleotide
  Target: ATXN2; (-) strand; PAM type: YTN; PAM sequence: TTC
caaaacaatacagtaaagca

SEQ ID NO: 62576 - DNA, 20 bp, Artificial Sequence
  Description of Artificial Sequence: Synthetic oligonucleotide
  Target: ATXN2; (-) strand; PAM type: YTN; PAM sequence: TTA
ttccaaaacaatacagtaaa

SEQ ID NO: 62577 - DNA, 20 bp, Artificial Sequence
  Description of Artificial Sequence: Synthetic oligonucleotide
  Target: ATXN2; (-) strand; PAM type: YTN; PAM sequence: TTG
tcattattccaaaacaatac

SEQ ID NO: 62578 - DNA, 20 bp, Artificial Sequence
  Description of Artificial Sequence: Synthetic oligonucleotide
  Target: ATXN2; (-) strand; PAM type: YTN; PAM sequence: CTT
gtcattattccaaaacaata

SEQ ID NO: 62579 - DNA, 20 bp, Artificial Sequence
  Description of Artificial Sequence: Synthetic oligonucleotide
  Target: ATXN2; (-) strand; PAM type: YTN; PAM sequence: TTC
cttgtcattattccaaaaca

SEQ ID NO: 62580 - DNA, 20 bp, Artificial Sequence
  Description of Artificial Sequence: Synthetic oligonucleotide
  Target: ATXN2; (-) strand; PAM type: YTN; PAM sequence: TTT
ccttgtcattattccaaaac

SEQ ID NO: 62581 - DNA, 20 bp, Artificial Sequence
  Description of Artificial Sequence: Synthetic oligonucleotide
  Target: ATXN2; (-) strand; PAM type: YTN; PAM sequence: CTG
aacacatgcagacgtttcct

SEQ ID NO: 62582 - DNA, 20 bp, Artificial Sequence
  Description of Artificial Sequence: Synthetic oligonucleotide
  Target: ATXN2; (-) strand; PAM type: YTN; PAM sequence: CTA
tactgaacacatgcagacgt

SEQ ID NO: 62583 - DNA, 20 bp, Artificial Sequence
  Description of Artificial Sequence: Synthetic oligonucleotide
  Target: ATXN2; (-) strand; PAM type: YTN; PAM sequence: TTA
ggataatctatactgaacac

SEQ ID NO: 62584 - DNA, 20 bp, Artificial Sequence
  Description of Artificial Sequence: Synthetic oligonucleotide
  Target: ATXN2; (-) strand; PAM type: YTN; PAM sequence: TTC
aaccaaccatggatcaaaaa

SEQ ID NO: 62585 - DNA, 20 bp, Artificial Sequence
  Description of Artificial Sequence: Synthetic oligonucleotide
  Target: ATXN2; (-) strand; PAM type: YTN; PAM sequence: CTG
gattcaaccaaccatggatc

SEQ ID NO: 62586 - DNA, 20 bp, Artificial Sequence
  Description of Artificial Sequence: Synthetic oligonucleotide
  Target: ATXN2; (-) strand; PAM type: YTN; PAM sequence: TTG
catcactggattcaaccaac

SEQ ID NO: 62587 - DNA, 20 bp, Artificial Sequence
  Description of Artificial Sequence: Synthetic oligonucleotide
  Target: ATXN2; (-) strand; PAM type: YTN; PAM sequence: TTT
gcatcactggattcaaccaa

SEQ ID NO: 62588 - DNA, 20 bp, Artificial Sequence
  Description of Artificial Sequence: Synthetic oligonucleotide
  Target: ATXN2; (-) strand; PAM type: YTN; PAM sequence: TTT
tgcatcactggattcaacca

SEQ ID NO: 62589 - DNA, 20 bp, Artificial Sequence
  Description of Artificial Sequence: Synthetic oligonucleotide
  Target: ATXN2; (-) strand; PAM type: YTN; PAM sequence: CTG
agggttttgcatcactggat

SEQ ID NO: 62590 - DNA, 20 bp, Artificial Sequence
  Description of Artificial Sequence: Synthetic oligonucleotide
  Target: ATXN2; (-) strand; PAM type: YTN; PAM sequence: CTG
cacctgagggttttgcatca

SEQ ID NO: 62591 - DNA, 20 bp, Artificial Sequence
  Description of Artificial Sequence: Synthetic oligonucleotide
  Target: ATXN2; (-) strand; PAM type: YTN; PAM sequence: CTC
tgcacctgagggttttgcat

SEQ ID NO: 62592 - DNA, 20 bp, Artificial Sequence
  Description of Artificial Sequence: Synthetic oligonucleotide
  Target: ATXN2; (-) strand; PAM type: YTN; PAM sequence: TTA
tagatacgtcctctgcacct

SEQ ID NO: 62593 - DNA, 20 bp, Artificial Sequence
  Description of Artificial Sequence: Synthetic oligonucleotide
  Target: ATXN2; (-) strand; PAM type: YTN; PAM sequence: TTT
atagatacgtcctctgcacc

SEQ ID NO: 62594 - DNA, 20 bp, Artificial Sequence
  Description of Artificial Sequence: Synthetic oligonucleotide
  Target: ATXN2; (-) strand; PAM type: YTN; PAM sequence: CTG
tcaggtttatagatacgtcc

SEQ ID NO: 62595 - DNA, 20 bp, Artificial Sequence
  Description of Artificial Sequence: Synthetic oligonucleotide
  Target: ATXN2; (-) strand; PAM type: YTN; PAM sequence: CTA
ggctgtcaggtttatagata

SEQ ID NO: 62596 - DNA, 20 bp, Artificial Sequence
  Description of Artificial Sequence: Synthetic oligonucleotide
  Target: ATXN2; (-) strand; PAM type: YTN; PAM sequence: CTA
gctaggctgtcaggtttata

SEQ ID NO: 62597 - DNA, 20 bp, Artificial Sequence
  Description of Artificial Sequence: Synthetic oligonucleotide
  Target: ATXN2; (-) strand; PAM type: YTN; PAM sequence: TTG
gctagctaggctgtcaggtt

SEQ ID NO: 62598 - DNA, 20 bp, Artificial Sequence
  Description of Artificial Sequence: Synthetic oligonucleotide
  Target: ATXN2; (-) strand; PAM type: YTN; PAM sequence: TTG
acgatggttggctagctagg

SEQ ID NO: 62599 - DNA, 20 bp, Artificial Sequence
  Description of Artificial Sequence: Synthetic oligonucleotide
  Target: ATXN2; (-) strand; PAM type: YTN; PAM sequence: TTT
gacgatggttggctagctag

SEQ ID NO: 62600 - DNA, 20 bp, Artificial Sequence
  Description of Artificial Sequence: Synthetic oligonucleotide
  Target: ATXN2; (-) strand; PAM type: YTN; PAM sequence: CTG
acccagaatttgacgatggt

SEQ ID NO: 62601 - DNA, 20 bp, Artificial Sequence
  Description of Artificial Sequence: Synthetic oligonucleotide
  Target: ATXN2; (-) strand; PAM type: YTN; PAM sequence: CTC
tgacccagaatttgacgatg

SEQ ID NO: 62602 - DNA, 20 bp, Artificial Sequence
  Description of Artificial Sequence: Synthetic oligonucleotide
  Target: ATXN2; (-) strand; PAM type: YTN; PAM sequence: TTC
tctgacccagaatttgacga

SEQ ID NO: 62603 - DNA, 20 bp, Artificial Sequence
  Description of Artificial Sequence: Synthetic oligonucleotide
  Target: ATXN2; (-) strand; PAM type: YTN; PAM sequence: TTT
ctctgacccagaatttgacg

SEQ ID NO: 62604 - DNA, 20 bp, Artificial Sequence
  Description of Artificial Sequence: Synthetic oligonucleotide
  Target: ATXN2; (-) strand; PAM type: YTN; PAM sequence: TTG
aatttctctgacccagaatt

SEQ ID NO: 62605 - DNA, 20 bp, Artificial Sequence
  Description of Artificial Sequence: Synthetic oligonucleotide
  Target: ATXN2; (-) strand; PAM type: YTN; PAM sequence: TTT
gaatttctctgacccagaat

SEQ ID NO: 62606 - DNA, 20 bp, Artificial Sequence
  Description of Artificial Sequence: Synthetic oligonucleotide
  Target: ATXN2; (-) strand; PAM type: YTN; PAM sequence: CTT
tgaatttctctgacccagaa

SEQ ID NO: 62607 - DNA, 20 bp, Artificial Sequence
  Description of Artificial Sequence: Synthetic oligonucleotide
  Target: ATXN2; (-) strand; PAM type: YTN; PAM sequence: TTG
ggcaaatctttgaatttctc

SEQ ID NO: 62608 - DNA, 20 bp, Artificial Sequence
  Description of Artificial Sequence: Synthetic oligonucleotide
  Target: ATXN2; (-) strand; PAM type: YTN; PAM sequence: CTT
gggcaaatctttgaatttct

SEQ ID NO: 62609 - DNA, 20 bp, Artificial Sequence
  Description of Artificial Sequence: Synthetic oligonucleotide
  Target: ATXN2; (-) strand; PAM type: YTN; PAM sequence: TTA
gatgtgatcttgggcaaatc

SEQ ID NO: 62610 - DNA, 20 bp, Artificial Sequence
  Description of Artificial Sequence: Synthetic oligonucleotide
  Target: ATXN2; (-) strand; PAM type: YTN; PAM sequence: TTG
tcatcaattagatgtgatct

SEQ ID NO: 62611 - DNA, 20 bp, Artificial Sequence
  Description of Artificial Sequence: Synthetic oligonucleotide
  Target: ATXN2; (-) strand; PAM type: YTN; PAM sequence: TTT
gtcatcaattagatgtgatc

SEQ ID NO: 62612 - DNA, 20 bp, Artificial Sequence
  Description of Artificial Sequence: Synthetic oligonucleotide
  Target: ATXN2; (-) strand; PAM type: YTN; PAM sequence: TTT
tgtcatcaattagatgtgat

SEQ ID NO: 62613 - DNA, 20 bp, Artificial Sequence
  Description of Artificial Sequence: Synthetic oligonucleotide
  Target: ATXN2; (-) strand; PAM type: YTN; PAM sequence: TTG
ttttgtcatcaattagatgt

SEQ ID NO: 62614 - DNA, 20 bp, Artificial Sequence
  Description of Artificial Sequence: Synthetic oligonucleotide
  Target: ATXN2; (-) strand; PAM type: YTN; PAM sequence: TTT
gttttgtcatcaattagatg

SEQ ID NO: 62615 - DNA, 20 bp, Artificial Sequence
  Description of Artificial Sequence: Synthetic oligonucleotide
  Target: ATXN2; (-) strand; PAM type: YTN; PAM sequence: CTT
tgttttgtcatcaattagat

SEQ ID NO: 62616 - DNA, 20 bp, Artificial Sequence
  Description of Artificial Sequence: Synthetic oligonucleotide
  Target: ATXN2; (-) strand; PAM type: YTN; PAM sequence: TTA
aaaaaaggtctttgttttgt

SEQ ID NO: 62617 - DNA, 20 bp, Artificial Sequence
  Description of Artificial Sequence: Synthetic oligonucleotide
  Target: ATXN2; (-) strand; PAM type: YTN; PAM sequence: TTA
aacattaaaaaaaggtcttt

SEQ ID NO: 62618 - DNA, 20 bp, Artificial Sequence
  Description of Artificial Sequence: Synthetic oligonucleotide
  Target: ATXN2; (-) strand; PAM type: YTN; PAM sequence: TTT
aaacattaaaaaaaggtctt

SEQ ID NO: 62619 - DNA, 20 bp, Artificial Sequence
  Description of Artificial Sequence: Synthetic oligonucleotide
  Target: ATXN2; (-) strand; PAM type: YTN; PAM sequence: TTT
taaacattaaaaaaaggtct

SEQ ID NO: 62620 - DNA, 20 bp, Artificial Sequence
  Description of Artificial Sequence: Synthetic oligonucleotide
  Target: ATXN2; (-) strand; PAM type: YTN; PAM sequence: TTT
ttaaacattaaaaaaaggtc

SEQ ID NO: 62621 - DNA, 20 bp, Artificial Sequence
  Description of Artificial Sequence: Synthetic oligonucleotide
  Target: ATXN2; (-) strand; PAM type: YTN; PAM sequence: CTT
tttaaacattaaaaaaaggt

SEQ ID NO: 62622 - DNA, 20 bp, Artificial Sequence
  Description of Artificial Sequence: Synthetic oligonucleotide
  Target: ATXN2; (-) strand; PAM type: YTN; PAM sequence: TTA
atgaatactttttaaacatt

SEQ ID NO: 62623 - DNA, 20 bp, Artificial Sequence
  Description of Artificial Sequence: Synthetic oligonucleotide
  Target: ATXN2; (-) strand; PAM type: YTN; PAM sequence: TTA
catggccattaatgaatact

SEQ ID NO: 62624 - DNA, 20 bp, Artificial Sequence
  Description of Artificial Sequence: Synthetic oligonucleotide
  Target: ATXN2; (-) strand; PAM type: YTN; PAM sequence: TTT
acatggccattaatgaatac

SEQ ID NO: 62625 - DNA, 20 bp, Artificial Sequence
  Description of Artificial Sequence: Synthetic oligonucleotide
  Target: ATXN2; (-) strand; PAM type: YTN; PAM sequence: TTT
tacatggccattaatgaata

SEQ ID NO: 62626 - DNA, 20 bp, Artificial Sequence
  Description of Artificial Sequence: Synthetic oligonucleotide
  Target: ATXN2; (-) strand; PAM type: YTN; PAM sequence: TTT
ttacatggccattaatgaat

SEQ ID NO: 62627 - DNA, 20 bp, Artificial Sequence
  Description of Artificial Sequence: Synthetic oligonucleotide
  Target: ATXN2; (-) strand; PAM type: YTN; PAM sequence: TTT
tttacatggccattaatgaa

SEQ ID NO: 62628 - DNA, 20 bp, Artificial Sequence
  Description of Artificial Sequence: Synthetic oligonucleotide
  Target: ATXN2; (-) strand; PAM type: YTN; PAM sequence: TTT
ttttacatggccattaatga

SEQ ID NO: 62629 - DNA, 20 bp, Artificial Sequence
  Description of Artificial Sequence: Synthetic oligonucleotide
  Target: ATXN2; (-) strand; PAM type: YTN; PAM sequence: TTT
tttttacatggccattaatg

SEQ ID NO: 62630 - DNA, 20 bp, Artificial Sequence
  Description of Artificial Sequence: Synthetic oligonucleotide
  Target: ATXN2; (-) strand; PAM type: YTN; PAM sequence: CTT
ttttttacatggccattaat

SEQ ID NO: 62631 - DNA, 20 bp, Artificial Sequence
  Description of Artificial Sequence: Synthetic oligonucleotide
  Target: ATXN2; (-) strand; PAM type: YTN; PAM sequence: TTC
ttttttttacatggccatta

SEQ ID NO: 62632 - DNA, 20 bp, Artificial Sequence
  Description of Artificial Sequence: Synthetic oligonucleotide
  Target: ATXN2; (-) strand; PAM type: YTN; PAM sequence: TTT
cttttttttacatggccatt

SEQ ID NO: 62633 - DNA, 20 bp, Artificial Sequence
  Description of Artificial Sequence: Synthetic oligonucleotide
  Target: ATXN2; (-) strand; PAM type: YTN; PAM sequence: CTT
tcttttttttacatggccat

SEQ ID NO: 62634 - DNA, 20 bp, Artificial Sequence
  Description of Artificial Sequence: Synthetic oligonucleotide
  Target: ATXN2; (-) strand; PAM type: YTN; PAM sequence: TTC
tttcttttttttacatggcc

SEQ ID NO: 62635 - DNA, 20 bp, Artificial Sequence
  Description of Artificial Sequence: Synthetic oligonucleotide
  Target: ATXN2; (-) strand; PAM type: YTN; PAM sequence: CTT
ctttcttttttttacatggc

SEQ ID NO: 62636 - DNA, 20 bp, Artificial Sequence
  Description of Artificial Sequence: Synthetic oligonucleotide
  Target: ATXN2; (-) strand; PAM type: YTN; PAM sequence: CTG
aaccaaccttctttcttttt

SEQ ID NO: 62637 - DNA, 20 bp, Artificial Sequence
  Description of Artificial Sequence: Synthetic oligonucleotide
  Target: ATXN2; (-) strand; PAM type: YTN; PAM sequence: TTA
gtgtgctgaaccaaccttct

SEQ ID NO: 62638 - DNA, 20 bp, Artificial Sequence
  Description of Artificial Sequence: Synthetic oligonucleotide
  Target: ATXN2; (-) strand; PAM type: YTN; PAM sequence: TTT
agtgtgctgaaccaaccttc

SEQ ID NO: 62639 - DNA, 20 bp, Artificial Sequence
  Description of Artificial Sequence: Synthetic oligonucleotide
  Target: ATXN2; (-) strand; PAM type: YTN; PAM sequence: TTT
tagtgtgctgaaccaacctt

SEQ ID NO: 62640 - DNA, 20 bp, Artificial Sequence
  Description of Artificial Sequence: Synthetic oligonucleotide
  Target: ATXN2; (-) strand; PAM type: YTN; PAM sequence: TTG
ttttagtgtgctgaaccaac

SEQ ID NO: 62641 - DNA, 20 bp, Artificial Sequence
  Description of Artificial Sequence: Synthetic oligonucleotide
  Target: ATXN2; (-) strand; PAM type: YTN; PAM sequence: TTT
gttttagtgtgctgaaccaa

SEQ ID NO: 62642 - DNA, 20 bp, Artificial Sequence
  Description of Artificial Sequence: Synthetic oligonucleotide
  Target: ATXN2; (-) strand; PAM type: YTN; PAM sequence: TTT
tgttttagtgtgctgaacca

SEQ ID NO: 62643 - DNA, 20 bp, Artificial Sequence
  Description of Artificial Sequence: Synthetic oligonucleotide
  Target: ATXN2; (-) strand; PAM type: YTN; PAM sequence: CTG
aattttgttttagtgtgctg

SEQ ID NO: 62644 - DNA, 20 bp, Artificial Sequence
  Description of Artificial Sequence: Synthetic oligonucleotide
  Target: ATXN2; (-) strand; PAM type: YTN; PAM sequence: CTG
ccatctgaattttgttttag

SEQ ID NO: 62645 - DNA, 20 bp, Artificial Sequence
  Description of Artificial Sequence: Synthetic oligonucleotide
  Target: ATXN2; (-) strand; PAM type: YTN; PAM sequence: TTC
catacctgccatctgaattt

SEQ ID NO: 62646 - DNA, 20 bp, Artificial Sequence
  Description of Artificial Sequence: Synthetic oligonucleotide
  Target: ATXN2; (-) strand; PAM type: YTN; PAM sequence: CTT
ccatacctgccatctgaatt

SEQ ID NO: 62647 - DNA, 20 bp, Artificial Sequence
  Description of Artificial Sequence: Synthetic oligonucleotide
  Target: ATXN2; (-) strand; PAM type: YTN; PAM sequence: TTC
ttccatacctgccatctgaa

SEQ ID NO: 62648 - DNA, 20 bp, Artificial Sequence
  Description of Artificial Sequence: Synthetic oligonucleotide
  Target: ATXN2; (-) strand; PAM type: YTN; PAM sequence: CTT
cttccatacctgccatctga

SEQ ID NO: 62649 - DNA, 20 bp, Artificial Sequence
  Description of Artificial Sequence: Synthetic oligonucleotide
  Target: ATXN2; (-) strand; PAM type: YTN; PAM sequence: TTA
gtaatagtccttcttccata

SEQ ID NO: 62650 - DNA, 20 bp, Artificial Sequence
  Description of Artificial Sequence: Synthetic oligonucleotide
  Target: ATXN2; (-) strand; PAM type: YTN; PAM sequence: TTA
ttagtaatagtccttcttcc

SEQ ID NO: 62651 - DNA, 20 bp, Artificial Sequence
  Description of Artificial Sequence: Synthetic oligonucleotide
  Target: ATXN2; (-) strand; PAM type: YTN; PAM sequence: CTA
gtcccaaaaaaagaaaaatt

SEQ ID NO: 62652 - DNA, 20 bp, Artificial Sequence
  Description of Artificial Sequence: Synthetic oligonucleotide
  Target: ATXN2; (-) strand; PAM type: YTN; PAM sequence: TTA
tctagtcccaaaaaaagaaa

SEQ ID NO: 62653 - DNA, 20 bp, Artificial Sequence
  Description of Artificial Sequence: Synthetic oligonucleotide
  Target: ATXN2; (-) strand; PAM type: YTN; PAM sequence: TTG
aggttatctagtcccaaaaa

SEQ ID NO: 62654 - DNA, 20 bp, Artificial Sequence
  Description of Artificial Sequence: Synthetic oligonucleotide
  Target: ATXN2; (-) strand; PAM type: YTN; PAM sequence: TTT
gaggttatctagtcccaaaa

SEQ ID NO: 62655 - DNA, 20 bp, Artificial Sequence
  Description of Artificial Sequence: Synthetic oligonucleotide
  Target: ATXN2; (-) strand; PAM type: YTN; PAM sequence: CTT
tgaggttatctagtcccaaa

SEQ ID NO: 62656 - DNA, 20 bp, Artificial Sequence
  Description of Artificial Sequence: Synthetic oligonucleotide
  Target: ATXN2; (-) strand; PAM type: YTN; PAM sequence: TTC
tttgaggttatctagtccca

SEQ ID NO: 62657 - DNA, 20 bp, Artificial Sequence
  Description of Artificial Sequence: Synthetic oligonucleotide
  Target: ATXN2; (-) strand; PAM type: YTN; PAM sequence: TTT
ctttgaggttatctagtccc

SEQ ID NO: 62658 - DNA, 20 bp, Artificial Sequence
  Description of Artificial Sequence: Synthetic oligonucleotide
  Target: ATXN2; (-) strand; PAM type: YTN; PAM sequence: CTT
tctttgaggttatctagtcc

SEQ ID NO: 62659 - DNA, 20 bp, Artificial Sequence
  Description of Artificial Sequence: Synthetic oligonucleotide
  Target: ATXN2; (-) strand; PAM type: YTN; PAM sequence: TTA
ctttctttgaggttatctag

SEQ ID NO: 62660 - DNA, 20 bp, Artificial Sequence
  Description of Artificial Sequence: Synthetic oligonucleotide
  Target: ATXN2; (-) strand; PAM type: YTN; PAM sequence: TTA
ttactttctttgaggttatc

SEQ ID NO: 62661 - DNA, 20 bp, Artificial Sequence
  Description of Artificial Sequence: Synthetic oligonucleotide
  Target: ATXN2; (-) strand; PAM type: YTN; PAM sequence: TTT
attactttctttgaggttat

SEQ ID NO: 62662 - DNA, 20 bp, Artificial Sequence
  Description of Artificial Sequence: Synthetic oligonucleotide
  Target: ATXN2; (-) strand; PAM type: YTN; PAM sequence: CTC
aggtaggtttattactttct

SEQ ID NO: 62663 - DNA, 20 bp, Artificial Sequence
  Description of Artificial Sequence: Synthetic oligonucleotide
  Target: ATXN2; (-) strand; PAM type: YTN; PAM sequence: CTC
tcaggtaggtttattacttt

SEQ ID NO: 62664 - DNA, 20 bp, Artificial Sequence
  Description of Artificial Sequence: Synthetic oligonucleotide
  Target: ATXN2; (-) strand; PAM type: YTN; PAM sequence: TTC
tctcaggtaggtttattact

SEQ ID NO: 62665 - DNA, 20 bp, Artificial Sequence
  Description of Artificial Sequence: Synthetic oligonucleotide
  Target: ATXN2; (-) strand; PAM type: YTN; PAM sequence: CTT
ctctcaggtaggtttattac

SEQ ID NO: 62666 - DNA, 20 bp, Artificial Sequence
  Description of Artificial Sequence: Synthetic oligonucleotide
  Target: ATXN2; (-) strand; PAM type: YTN; PAM sequence: TTC
cttctctcaggtaggtttat

SEQ ID NO: 62667 - DNA, 20 bp, Artificial Sequence
  Description of Artificial Sequence: Synthetic oligonucleotide
  Target: ATXN2; (-) strand; PAM type: YTN; PAM sequence: TTC
aacccacgttccttctctca

SEQ ID NO: 62668 - DNA, 20 bp, Artificial Sequence
  Description of Artificial Sequence: Synthetic oligonucleotide
  Target: ATXN2; (-) strand; PAM type: YTN; PAM sequence: TTG
aatcccaatgcaaaggagtt

SEQ ID NO: 62669 - DNA, 20 bp, Artificial Sequence
  Description of Artificial Sequence: Synthetic oligonucleotide
  Target: ATXN2; (-) strand; PAM type: YTN; PAM sequence: TTA
ggaaatcaacattgaatccc

SEQ ID NO: 62670 - DNA, 20 bp, Artificial Sequence
  Description of Artificial Sequence: Synthetic oligonucleotide
  Target: ATXN2; (-) strand; PAM type: YTN; PAM sequence: TTA
ggcaagttaggaaatcaaca

SEQ ID NO: 62671 - DNA, 20 bp, Artificial Sequence
  Description of Artificial Sequence: Synthetic oligonucleotide
  Target: ATXN2; (-) strand; PAM type: YTN; PAM sequence: TTT
aggcaagttaggaaatcaac

SEQ ID NO: 62672 - DNA, 20 bp, Artificial Sequence
  Description of Artificial Sequence: Synthetic oligonucleotide
  Target: ATXN2; (-) strand; PAM type: YTN; PAM sequence: TTT
taggcaagttaggaaatcaa

SEQ ID NO: 62673 - DNA, 20 bp, Artificial Sequence
  Description of Artificial Sequence: Synthetic oligonucleotide
  Target: ATXN2; (-) strand; PAM type: YTN; PAM sequence: TTT
ttaggcaagttaggaaatca

SEQ ID NO: 62674 - DNA, 20 bp, Artificial Sequence
  Description of Artificial Sequence: Synthetic oligonucleotide
  Target: ATXN2; (-) strand; PAM type: YTN; PAM sequence: TTT
tttaggcaagttaggaaatc

SEQ ID NO: 62675 - DNA, 20 bp, Artificial Sequence
  Description of Artificial Sequence: Synthetic oligonucleotide
  Target: ATXN2; (-) strand; PAM type: YTN; PAM sequence: TTT
ttttaggcaagttaggaaat

SEQ ID NO: 62676 - DNA, 20 bp, Artificial Sequence
  Description of Artificial Sequence: Synthetic oligonucleotide
  Target: ATXN2; (-) strand; PAM type: YTN; PAM sequence: TTT
tttttaggcaagttaggaaa

SEQ ID NO: 62677 - DNA, 20 bp, Artificial Sequence
  Description of Artificial Sequence: Synthetic oligonucleotide
  Target: ATXN2; (-) strand; PAM type: YTN; PAM sequence: TTA
tattttttttaggcaagtta

SEQ ID NO: 62678 - DNA, 20 bp, Artificial Sequence
  Description of Artificial Sequence: Synthetic oligonucleotide
  Target: ATXN2; (-) strand; PAM type: YTN; PAM sequence: TTT
atattttttttaggcaagtt

SEQ ID NO: 62679 - DNA, 20 bp, Artificial Sequence
  Description of Artificial Sequence: Synthetic oligonucleotide
  Target: ATXN2; (-) strand; PAM type: YTN; PAM sequence: CTT
tatattttttttaggcaagt

SEQ ID NO: 62680 - DNA, 20 bp, Artificial Sequence
  Description of Artificial Sequence: Synthetic oligonucleotide
  Target: ATXN2; (-) strand; PAM type: YTN; PAM sequence: CTG
gcctttatattttttttagg

SEQ ID NO: 62681 - DNA, 20 bp, Artificial Sequence
  Description of Artificial Sequence: Synthetic oligonucleotide
  Target: ATXN2; (-) strand; PAM type: YTN; PAM sequence: TTC
actggcctttatattttttt

SEQ ID NO: 62682 - DNA, 20 bp, Artificial Sequence
  Description of Artificial Sequence: Synthetic oligonucleotide
  Target: ATXN2; (-) strand; PAM type: YTN; PAM sequence: TTT
cactggcctttatatttttt

SEQ ID NO: 62683 - DNA, 20 bp, Artificial Sequence
  Description of Artificial Sequence: Synthetic oligonucleotide
  Target: ATXN2; (-) strand; PAM type: YTN; PAM sequence: TTA
gagcaacgtaaagtccatgt

SEQ ID NO: 62684 - DNA, 20 bp, Artificial Sequence
  Description of Artificial Sequence: Synthetic oligonucleotide
  Target: ATXN2; (-) strand; PAM type: YTN; PAM sequence: TTT
agagcaacgtaaagtccatg

SEQ ID NO: 62685 - DNA, 20 bp, Artificial Sequence
  Description of Artificial Sequence: Synthetic oligonucleotide
  Target: ATXN2; (-) strand; PAM type: YTN; PAM sequence: TTT
tagagcaacgtaaagtccat

SEQ ID NO: 62686 - DNA, 20 bp, Artificial Sequence
  Description of Artificial Sequence: Synthetic oligonucleotide
  Target: ATXN2; (-) strand; PAM type: YTN; PAM sequence: TTG
tcaggtatggaagattttag

SEQ ID NO: 62687 - DNA, 20 bp, Artificial Sequence
  Description of Artificial Sequence: Synthetic oligonucleotide
  Target: ATXN2; (-) strand; PAM type: YTN; PAM sequence: TTA
aattgtcaggtatggaagat

SEQ ID NO: 62688 - DNA, 20 bp, Artificial Sequence
  Description of Artificial Sequence: Synthetic oligonucleotide
  Target: ATXN2; (-) strand; PAM type: YTN; PAM sequence: TTT
aaattgtcaggtatggaaga

SEQ ID NO: 62689 - DNA, 20 bp, Artificial Sequence
  Description of Artificial Sequence: Synthetic oligonucleotide
  Target: ATXN2; (-) strand; PAM type: YTN; PAM sequence: TTT
taaattgtcaggtatggaag

SEQ ID NO: 62690 - DNA, 20 bp, Artificial Sequence
  Description of Artificial Sequence: Synthetic oligonucleotide
  Target: ATXN2; (-) strand; PAM type: YTN; PAM sequence: TTT
ttaaattgtcaggtatggaa

SEQ ID NO: 62691 - DNA, 20 bp, Artificial Sequence
  Description of Artificial Sequence: Synthetic oligonucleotide
  Target: ATXN2; (-) strand; PAM type: YTN; PAM sequence: TTT
tttaaattgtcaggtatgga

SEQ ID NO: 62692 - DNA, 20 bp, Artificial Sequence
  Description of Artificial Sequence: Synthetic oligonucleotide
  Target: ATXN2; (-) strand; PAM type: YTN; PAM sequence: TTT
ttttaaattgtcaggtatgg

SEQ ID NO: 62693 - DNA, 20 bp, Artificial Sequence
  Description of Artificial Sequence: Synthetic oligonucleotide
  Target: ATXN2; (-) strand; PAM type: YTN; PAM sequence: TTT
tttttaaattgtcaggtatg

SEQ ID NO: 62694 - DNA, 20 bp, Artificial Sequence
  Description of Artificial Sequence: Synthetic oligonucleotide
  Target: ATXN2; (-) strand; PAM type: YTN; PAM sequence: TTA
gcaattttttttaaattgtc

SEQ ID NO: 62695 - DNA, 20 bp, Artificial Sequence
  Description of Artificial Sequence: Synthetic oligonucleotide
  Target: ATXN2; (-) strand; PAM type: YTN; PAM sequence: TTT
agcaattttttttaaattgt

SEQ ID NO: 62696 - DNA, 20 bp, Artificial Sequence
  Description of Artificial Sequence: Synthetic oligonucleotide
  Target: ATXN2; (-) strand; PAM type: YTN; PAM sequence: CTA
tatttagcaattttttttaa

SEQ ID NO: 62697 - DNA, 20 bp, Artificial Sequence
  Description of Artificial Sequence: Synthetic oligonucleotide
  Target: ATXN2; (-) strand; PAM type: YTN; PAM sequence: TTA
aatctatatttagcaatttt

SEQ ID NO: 62698 - DNA, 20 bp, Artificial Sequence
  Description of Artificial Sequence: Synthetic oligonucleotide
  Target: ATXN2; (-) strand; PAM type: YTN; PAM sequence: TTT
aaatctatatttagcaattt

SEQ ID NO: 62699 - DNA, 20 bp, Artificial Sequence
  Description of Artificial Sequence: Synthetic oligonucleotide
  Target: ATXN2; (-) strand; PAM type: YTN; PAM sequence: CTA
gtgagaacagtttaaatcta

SEQ ID NO: 62700 - DNA, 20 bp, Artificial Sequence
  Description of Artificial Sequence: Synthetic oligonucleotide
  Target: ATXN2; (-) strand; PAM type: YTN; PAM sequence: TTC
tagtgagaacagtttaaatc

SEQ ID NO: 62701 - DNA, 20 bp, Artificial Sequence
  Description of Artificial Sequence: Synthetic oligonucleotide
  Target: ATXN2; (-) strand; PAM type: YTN; PAM sequence: CTT
ctagtgagaacagtttaaat

SEQ ID NO: 62702 - DNA, 20 bp, Artificial Sequence
  Description of Artificial Sequence: Synthetic oligonucleotide
  Target: ATXN2; (-) strand; PAM type: YTN; PAM sequence: TTA
gtgatcttctagtgagaaca

SEQ ID NO: 62703 - DNA, 20 bp, Artificial Sequence
  Description of Artificial Sequence: Synthetic oligonucleotide
  Target: ATXN2; (-) strand; PAM type: YTN; PAM sequence: TTC
aataaaaacgattagtgatc

SEQ ID NO: 62704 - DNA, 20 bp, Artificial Sequence
  Description of Artificial Sequence: Synthetic oligonucleotide
  Target: ATXN2; (-) strand; PAM type: YTN; PAM sequence: TTT
caataaaaacgattagtgat

SEQ ID NO: 62705 - DNA, 20 bp, Artificial Sequence
  Description of Artificial Sequence: Synthetic oligonucleotide
  Target: ATXN2; (-) strand; PAM type: YTN; PAM sequence: TTA
aggaatgggcaatataagtg

SEQ ID NO: 62706 - DNA, 20 bp, Artificial Sequence
  Description of Artificial Sequence: Synthetic oligonucleotide
  Target: ATXN2; (-) strand; PAM type: YTN; PAM sequence: TTA
agggattaaggaatgggcaa

SEQ ID NO: 62707 - DNA, 20 bp, Artificial Sequence
  Description of Artificial Sequence: Synthetic oligonucleotide
  Target: ATXN2; (-) strand; PAM type: YTN; PAM sequence: TTT
aagggattaaggaatgggca

SEQ ID NO: 62708 - DNA, 20 bp, Artificial Sequence
  Description of Artificial Sequence: Synthetic oligonucleotide
  Target: ATXN2; (-) strand; PAM type: YTN; PAM sequence: CTT
taagggattaaggaatgggc

SEQ ID NO: 62709 - DNA, 20 bp, Artificial Sequence
  Description of Artificial Sequence: Synthetic oligonucleotide
  Target: ATXN2; (-) strand; PAM type: YTN; PAM sequence: TTC
tttaagggattaaggaatgg

SEQ ID NO: 62710 - DNA, 20 bp, Artificial Sequence
  Description of Artificial Sequence: Synthetic oligonucleotide
  Target: ATXN2; (-) strand; PAM type: YTN; PAM sequence: CTG
tattctttaagggattaagg

SEQ ID NO: 62711 - DNA, 20 bp, Artificial Sequence
  Description of Artificial Sequence: Synthetic oligonucleotide
  Target: ATXN2; (-) strand; PAM type: YTN; PAM sequence: TTA
tggctgtattctttaaggga

SEQ ID NO: 62712 - DNA, 20 bp, Artificial Sequence
  Description of Artificial Sequence: Synthetic oligonucleotide
  Target: ATXN2; (-) strand; PAM type: YTN; PAM sequence: TTT
atggctgtattctttaaggg

SEQ ID NO: 62713 - DNA, 20 bp, Artificial Sequence
  Description of Artificial Sequence: Synthetic oligonucleotide
  Target: ATXN2; (-) strand; PAM type: YTN; PAM sequence: TTT
tatggctgtattctttaagg

SEQ ID NO: 62714 - DNA, 20 bp, Artificial Sequence
  Description of Artificial Sequence: Synthetic oligonucleotide
  Target: ATXN2; (-) strand; PAM type: YTN; PAM sequence: CTT
ttatggctgtattctttaag

SEQ ID NO: 62715 - DNA, 20 bp, Artificial Sequence
  Description of Artificial Sequence: Synthetic oligonucleotide
  Target: ATXN2; (-) strand; PAM type: YTN; PAM sequence: TTC
ttttatggctgtattcttta

SEQ ID NO: 62716 - DNA, 20 bp, Artificial Sequence
  Description of Artificial Sequence: Synthetic oligonucleotide
  Target: ATXN2; (-) strand; PAM type: YTN; PAM sequence: TTG
ttcttttatggctgtattct

SEQ ID NO: 62717 - DNA, 20 bp, Artificial Sequence
  Description of Artificial Sequence: Synthetic oligonucleotide
  Target: ATXN2; (-) strand; PAM type: YTN; PAM sequence: TTA
aaaaattgttcttttatggc

SEQ ID NO: 62718 - DNA, 20 bp, Artificial Sequence
  Description of Artificial Sequence: Synthetic oligonucleotide
  Target: ATXN2; (-) strand; PAM type: YTN; PAM sequence: TTT
aaaaaattgttcttttatgg

SEQ ID NO: 62719 - DNA, 20 bp, Artificial Sequence
  Description of Artificial Sequence: Synthetic oligonucleotide
  Target: ATXN2; (-) strand; PAM type: YTN; PAM sequence: TTT
taaaaaattgttcttttatg

SEQ ID NO: 62720 - DNA, 20 bp, Artificial Sequence
  Description of Artificial Sequence: Synthetic oligonucleotide
  Target: ATXN2; (-) strand; PAM type: YTN; PAM sequence: TTT
ttaaaaaattgttcttttat

SEQ ID NO: 62721 - DNA, 20 bp, Artificial Sequence
  Description of Artificial Sequence: Synthetic oligonucleotide
  Target: ATXN2; (-) strand; PAM type: YTN; PAM sequence: CTC
agatttttaaaaaattgttc

SEQ ID NO: 62722 - DNA, 20 bp, Artificial Sequence
  Description of Artificial Sequence: Synthetic oligonucleotide
  Target: ATXN2; (-) strand; PAM type: YTN; PAM sequence: TTA
ctcagatttttaaaaaattg

SEQ ID NO: 62723 - DNA, 20 bp, Artificial Sequence
  Description of Artificial Sequence: Synthetic oligonucleotide
  Target: ATXN2; (-) strand; PAM type: YTN; PAM sequence: TTG
tatattactcagatttttaa

SEQ ID NO: 62724 - DNA, 20 bp, Artificial Sequence
  Description of Artificial Sequence: Synthetic oligonucleotide
  Target: ATXN2; (-) strand; PAM type: YTN; PAM sequence: TTG
agaggaacggttgtatatta

SEQ ID NO: 62725 - DNA, 20 bp, Artificial Sequence
  Description of Artificial Sequence: Synthetic oligonucleotide
  Target: ATXN2; (-) strand; PAM type: YTN; PAM sequence: TTT
gagaggaacggttgtatatt

SEQ ID NO: 62726 - DNA, 20 bp, Artificial Sequence
  Description of Artificial Sequence: Synthetic oligonucleotide
  Target: ATXN2; (-) strand; PAM type: YTN; PAM sequence: CTT
tgagaggaacggttgtatat

SEQ ID NO: 62727 - DNA, 20 bp, Artificial Sequence
  Description of Artificial Sequence: Synthetic oligonucleotide
  Target: ATXN2; (-) strand; PAM type: YTN; PAM sequence: TTG
cctttgagaggaacggttgt

SEQ ID NO: 62728 - DNA, 20 bp, Artificial Sequence
  Description of Artificial Sequence: Synthetic oligonucleotide
  Target: ATXN2; (-) strand; PAM type: YTN; PAM sequence: TTG
attgcctttgagaggaacgg

SEQ ID NO: 62729 - DNA, 20 bp, Artificial Sequence
  Description of Artificial Sequence: Synthetic oligonucleotide
  Target: ATXN2; (-) strand; PAM type: YTN; PAM sequence: TTT
gattgcctttgagaggaacg

SEQ ID NO: 62730 - DNA, 20 bp, Artificial Sequence
  Description of Artificial Sequence: Synthetic oligonucleotide
  Target: ATXN2; (-) strand; PAM type: YTN; PAM sequence: TTT
tgattgcctttgagaggaac

SEQ ID NO: 62731 - DNA, 20 bp, Artificial Sequence
  Description of Artificial Sequence: Synthetic oligonucleotide
  Target: ATXN2; (-) strand; PAM type: YTN; PAM sequence: TTT
ttgattgcctttgagaggaa

SEQ ID NO: 62732 - DNA, 20 bp, Artificial Sequence
  Description of Artificial Sequence: Synthetic oligonucleotide
  Target: ATXN2; (-) strand; PAM type: YTN; PAM sequence: TTT
tttgattgcctttgagagga

SEQ ID NO: 62733 - DNA, 20 bp, Artificial Sequence
  Description of Artificial Sequence: Synthetic oligonucleotide
  Target: ATXN2; (-) strand; PAM type: YTN; PAM sequence: CTG
tgaaggaaaaaaaaaaagta

SEQ ID NO: 62734 - DNA, 20 bp, Artificial Sequence
  Description of Artificial Sequence: Synthetic oligonucleotide
  Target: ATXN2; (-) strand; PAM type: YTN; PAM sequence: CTC
tgtgaaggaaaaaaaaaaag

SEQ ID NO: 62735 - DNA, 20 bp, Artificial Sequence
  Description of Artificial Sequence: Synthetic oligonucleotide
  Target: ATXN2; (-) strand; PAM type: YTN; PAM sequence: CTG
agcaacagagtgggactctg

SEQ ID NO: 62736 - DNA, 20 bp, Artificial Sequence
  Description of Artificial Sequence: Synthetic oligonucleotide
  Target: ATXN2; (-) strand; PAM type: YTN; PAM sequence: CTC
caacctgagcaacagagtgg

SEQ ID NO: 62737 - DNA, 20 bp, Artificial Sequence
  Description of Artificial Sequence: Synthetic oligonucleotide
  Target: ATXN2; (-) strand; PAM type: YTN; PAM sequence: CTG
cactccaacctgagcaacag

SEQ ID NO: 62738 - DNA, 20 bp, Artificial Sequence
  Description of Artificial Sequence: Synthetic oligonucleotide
  Target: ATXN2; (-) strand; PAM type: YTN; PAM sequence: CTG
ctgcactccaacctgagcaa

SEQ ID NO: 62739 - DNA, 20 bp, Artificial Sequence
  Description of Artificial Sequence: Synthetic oligonucleotide
  Target: ATXN2; (-) strand; PAM type: YTN; PAM sequence: TTG
cactgctgcactccaacctg

SEQ ID NO: 62740 - DNA, 20 bp, Artificial Sequence
  Description of Artificial Sequence: Synthetic oligonucleotide
  Target: ATXN2; (-) strand; PAM type: YTN; PAM sequence: TTG
cagtgagccaagattgcact

SEQ ID NO: 62741 - DNA, 20 bp, Artificial Sequence
  Description of Artificial Sequence: Synthetic oligonucleotide
  Target: ATXN2; (-) strand; PAM type: YTN; PAM sequence: CTC
gggaggcagaggttgcagtg

SEQ ID NO: 62742 - DNA, 20 bp, Artificial Sequence
  Description of Artificial Sequence: Synthetic oligonucleotide
  Target: ATXN2; (-) strand; PAM type: YTN; PAM sequence: TTA
aactcgggaggcagaggttg

SEQ ID NO: 62743 - DNA, 20 bp, Artificial Sequence
  Description of Artificial Sequence: Synthetic oligonucleotide
  Target: ATXN2; (-) strand; PAM type: YTN; PAM sequence: CTT
aaactcgggaggcagaggtt

SEQ ID NO: 62744 - DNA, 20 bp, Artificial Sequence
  Description of Artificial Sequence: Synthetic oligonucleotide
  Target: ATXN2; (-) strand; PAM type: YTN; PAM sequence: CTA
aggcaagagaatggcttaaa

SEQ ID NO: 62745 - DNA, 20 bp, Artificial Sequence
  Description of Artificial Sequence: Synthetic oligonucleotide
  Target: ATXN2; (-) strand; PAM type: YTN; PAM sequence: CTA
atcaggaggctaaggcaaga

SEQ ID NO: 62746 - DNA, 20 bp, Artificial Sequence
  Description of Artificial Sequence: Synthetic oligonucleotide
  Target: ATXN2; (-) strand; PAM type: YTN; PAM sequence: CTG
taatcccagctaatcaggag

SEQ ID NO: 62747 - DNA, 20 bp, Artificial Sequence
  Description of Artificial Sequence: Synthetic oligonucleotide
  Target: ATXN2; (-) strand; PAM type: YTN; PAM sequence: CTC
ctgtaatcccagctaatcag

SEQ ID NO: 62748 - DNA, 20 bp, Artificial Sequence
  Description of Artificial Sequence: Synthetic oligonucleotide
  Target: ATXN2; (-) strand; PAM type: YTN; PAM sequence: CTG
ggcgtggtggcagtctcctg

SEQ ID NO: 62749 - DNA, 20 bp, Artificial Sequence
  Description of Artificial Sequence: Synthetic oligonucleotide
  Target: ATXN2; (-) strand; PAM type: YTN; PAM sequence: TTA
gctgggcgtggtggcagtct

SEQ ID NO: 62750 - DNA, 20 bp, Artificial Sequence
  Description of Artificial Sequence: Synthetic oligonucleotide
  Target: ATXN2; (-) strand; PAM type: YTN; PAM sequence: TTA
aaaaaaattagctgggcgtg

SEQ ID NO: 62751 - DNA, 20 bp, Artificial Sequence
  Description of Artificial Sequence: Synthetic oligonucleotide
  Target: ATXN2; (-) strand; PAM type: YTN; PAM sequence: CTA
aaaataaatattaaaaaaaa

SEQ ID NO: 62752 - DNA, 20 bp, Artificial Sequence
  Description of Artificial Sequence: Synthetic oligonucleotide
  Target: ATXN2; (-) strand; PAM type: YTN; PAM sequence: TTA
ctaaaaataaatattaaaaa

SEQ ID NO: 62753 - DNA, 20 bp, Artificial Sequence
  Description of Artificial Sequence: Synthetic oligonucleotide
  Target: ATXN2; (-) strand; PAM type: YTN; PAM sequence: TTT
actaaaaataaatattaaaa

SEQ ID NO: 62754 - DNA, 20 bp, Artificial Sequence
  Description of Artificial Sequence: Synthetic oligonucleotide
  Target: ATXN2; (-) strand; PAM type: YTN; PAM sequence: CTT
tactaaaaataaatattaaa

SEQ ID NO: 62755 - DNA, 20 bp, Artificial Sequence
  Description of Artificial Sequence: Synthetic oligonucleotide
  Target: ATXN2; (-) strand; PAM type: YTN; PAM sequence: TTA
aggtcagcgtggccaaaatg

SEQ ID NO: 62756 - DNA, 20 bp, Artificial Sequence
  Description of Artificial Sequence: Synthetic oligonucleotide
  Target: ATXN2; (-) strand; PAM type: YTN; PAM sequence: CTT
aaggtcagcgtggccaaaat

SEQ ID NO: 62757 - DNA, 20 bp, Artificial Sequence
  Description of Artificial Sequence: Synthetic oligonucleotide
  Target: ATXN2; (-) strand; PAM type: YTN; PAM sequence: CTG
agtcaggcagatcacttaag

SEQ ID NO: 62758 - DNA, 20 bp, Artificial Sequence
  Description of Artificial Sequence: Synthetic oligonucleotide
  Target: ATXN2; (-) strand; PAM type: YTN; PAM sequence: TTG
ggaggctgagtcaggcagat

SEQ ID NO: 62759 - DNA, 20 bp, Artificial Sequence
  Description of Artificial Sequence: Synthetic oligonucleotide
  Target: ATXN2; (-) strand; PAM type: YTN; PAM sequence: TTT
gggaggctgagtcaggcaga

SEQ ID NO: 62760 - DNA, 20 bp, Artificial Sequence
  Description of Artificial Sequence: Synthetic oligonucleotide
  Target: ATXN2; (-) strand; PAM type: YTN; PAM sequence: CTT
tgggaggctgagtcaggcag

SEQ ID NO: 62761 - DNA, 20 bp, Artificial Sequence
  Description of Artificial Sequence: Synthetic oligonucleotide
  Target: ATXN2; (-) strand; PAM type: YTN; PAM sequence: CTG
taatcccagcactttgggag

SEQ ID NO: 62762 - DNA, 20 bp, Artificial Sequence
  Description of Artificial Sequence: Synthetic oligonucleotide
  Target: ATXN2; (-) strand; PAM type: YTN; PAM sequence: CTC
atacctgtaatcccagcact

SEQ ID NO: 62763 - DNA, 20 bp, Artificial Sequence
  Description of Artificial Sequence: Synthetic oligonucleotide
  Target: ATXN2; (-) strand; PAM type: YTN; PAM sequence: TTG
gccaggcgtggtagctcata

SEQ ID NO: 62764 - DNA, 20 bp, Artificial Sequence
  Description of Artificial Sequence: Synthetic oligonucleotide
  Target: ATXN2; (-) strand; PAM type: YTN; PAM sequence: TTG
attggccaggcgtggtagct

SEQ ID NO: 62765 - DNA, 20 bp, Artificial Sequence
  Description of Artificial Sequence: Synthetic oligonucleotide
  Target: ATXN2; (-) strand; PAM type: YTN; PAM sequence: TTG
ttgattggccaggcgtggta

SEQ ID NO: 62766 - DNA, 20 bp, Artificial Sequence
  Description of Artificial Sequence: Synthetic oligonucleotide
  Target: ATXN2; (-) strand; PAM type: YTN; PAM sequence: TTT
gttgattggccaggcgtggt

SEQ ID NO: 62767 - DNA, 20 bp, Artificial Sequence
  Description of Artificial Sequence: Synthetic oligonucleotide
  Target: ATXN2; (-) strand; PAM type: YTN; PAM sequence: CTC
aagtgtttgttgattggcca

SEQ ID NO: 62768 - DNA, 20 bp, Artificial Sequence
  Description of Artificial Sequence: Synthetic oligonucleotide
  Target: ATXN2; (-) strand; PAM type: YTN; PAM sequence: TTC
agctcaagtgtttgttgatt

SEQ ID NO: 62769 - DNA, 20 bp, Artificial Sequence
  Description of Artificial Sequence: Synthetic oligonucleotide
  Target: ATXN2; (-) strand; PAM type: YTN; PAM sequence: TTT
cagctcaagtgtttgttgat

SEQ ID NO: 62770 - DNA, 20 bp, Artificial Sequence
  Description of Artificial Sequence: Synthetic oligonucleotide
  Target: ATXN2; (-) strand; PAM type: YTN; PAM sequence: TTT
tcagctcaagtgtttgttga

SEQ ID NO: 62771 - DNA, 20 bp, Artificial Sequence
  Description of Artificial Sequence: Synthetic oligonucleotide
  Target: ATXN2; (-) strand; PAM type: YTN; PAM sequence: CTT
ttcagctcaagtgtttgttg

SEQ ID NO: 62772 - DNA, 20 bp, Artificial Sequence
  Description of Artificial Sequence: Synthetic oligonucleotide
  Target: ATXN2; (-) strand; PAM type: YTN; PAM sequence: CTG
tcttttcagctcaagtgttt

SEQ ID NO: 62773 - DNA, 20 bp, Artificial Sequence
  Description of Artificial Sequence: Synthetic oligonucleotide
  Target: ATXN2; (-) strand; PAM type: YTN; PAM sequence: CTA
ctgtcttttcagctcaagtg

SEQ ID NO: 62774 - DNA, 20 bp, Artificial Sequence
  Description of Artificial Sequence: Synthetic oligonucleotide
  Target: ATXN2; (-) strand; PAM type: YTN; PAM sequence: TTC
ataagtagctactgtctttt

SEQ ID NO: 62775 - DNA, 20 bp, Artificial Sequence
  Description of Artificial Sequence: Synthetic oligonucleotide
  Target: ATXN2; (-) strand; PAM type: YTN; PAM sequence: TTT
cataagtagctactgtcttt

SEQ ID NO: 62776 - DNA, 20 bp, Artificial Sequence
  Description of Artificial Sequence: Synthetic oligonucleotide
  Target: ATXN2; (-) strand; PAM type: YTN; PAM sequence: TTA
aggatatttcataagtagct

SEQ ID NO: 62777 - DNA, 20 bp, Artificial Sequence
  Description of Artificial Sequence: Synthetic oligonucleotide
  Target: ATXN2; (-) strand; PAM type: YTN; PAM sequence: TTT
aaggatatttcataagtagc

SEQ ID NO: 62778 - DNA, 20 bp, Artificial Sequence
  Description of Artificial Sequence: Synthetic oligonucleotide
  Target: ATXN2; (-) strand; PAM type: YTN; PAM sequence: TTT
taaggatatttcataagtag

SEQ ID NO: 62779 - DNA, 20 bp, Artificial Sequence
  Description of Artificial Sequence: Synthetic oligonucleotide
  Target: ATXN2; (-) strand; PAM type: YTN; PAM sequence: CTT
ttaaggatatttcataagta

SEQ ID NO: 62780 - DNA, 20 bp, Artificial Sequence
  Description of Artificial Sequence: Synthetic oligonucleotide
  Target: ATXN2; (-) strand; PAM type: YTN; PAM sequence: TTG
cttttaaggatatttcataa

SEQ ID NO: 62781 - DNA, 20 bp, Artificial Sequence
  Description of Artificial Sequence: Synthetic oligonucleotide
  Target: ATXN2; (-) strand; PAM type: YTN; PAM sequence: TTA
agaattgcttttaaggatat

SEQ ID NO: 62782 - DNA, 20 bp, Artificial Sequence
  Description of Artificial Sequence: Synthetic oligonucleotide
  Target: ATXN2; (-) strand; PAM type: YTN; PAM sequence: TTA
tgttaagaattgcttttaag

SEQ ID NO: 62783 - DNA, 20 bp, Artificial Sequence
  Description of Artificial Sequence: Synthetic oligonucleotide
  Target: ATXN2; (-) strand; PAM type: YTN; PAM sequence: CTG
ttatgttaagaattgctttt

SEQ ID NO: 62784 - DNA, 20 bp, Artificial Sequence
  Description of Artificial Sequence: Synthetic oligonucleotide
  Target: ATXN2; (-) strand; PAM type: YTN; PAM sequence: CTC
aaaaataaataaataaataa

SEQ ID NO: 62785 - DNA, 20 bp, Artificial Sequence
  Description of Artificial Sequence: Synthetic oligonucleotide
  Target: ATXN2; (-) strand; PAM type: YTN; PAM sequence: CTG
tctcaaaaataaataaataa

SEQ ID NO: 62786 - DNA, 20 bp, Artificial Sequence
  Description of Artificial Sequence: Synthetic oligonucleotide
  Target: ATXN2; (-) strand; PAM type: YTN; PAM sequence: CTC
tgtctcaaaaataaataaat

SEQ ID NO: 62787 - DNA, 20 bp, Artificial Sequence
  Description of Artificial Sequence: Synthetic oligonucleotide
  Target: ATXN2; (-) strand; PAM type: YTN; PAM sequence: CTG
ggtgacagagcgagactctg

SEQ ID NO: 62788 - DNA, 20 bp, Artificial Sequence
  Description of Artificial Sequence: Synthetic oligonucleotide
  Target: ATXN2; (-) strand; PAM type: YTN; PAM sequence: CTC
cagcctgggtgacagagcga

SEQ ID NO: 62789 - DNA, 20 bp, Artificial Sequence
  Description of Artificial Sequence: Synthetic oligonucleotide
  Target: ATXN2; (-) strand; PAM type: YTN; PAM sequence: CTG
cactccagcctgggtgacag

SEQ ID NO: 62790 - DNA, 20 bp, Artificial Sequence
  Description of Artificial Sequence: Synthetic oligonucleotide
  Target: ATXN2; (-) strand; PAM type: YTN; PAM sequence: CTG
cagtgagccgagatcatgcc

SEQ ID NO: 62791 - DNA, 20 bp, Artificial Sequence
  Description of Artificial Sequence: Synthetic oligonucleotide
  Target: ATXN2; (-) strand; PAM type: YTN; PAM sequence: TTG
aacccagaaggtggaggctg

SEQ ID NO: 62792 - DNA, 20 bp, Artificial Sequence
  Description of Artificial Sequence: Synthetic oligonucleotide
  Target: ATXN2; (-) strand; PAM type: YTN; PAM sequence: CTT
gaacccagaaggtggaggct

SEQ ID NO: 62793 - DNA, 20 bp, Artificial Sequence
  Description of Artificial Sequence: Synthetic oligonucleotide
  Target: ATXN2; (-) strand; PAM type: YTN; PAM sequence: TTG
cttgaacccagaaggtggag

SEQ ID NO: 62794 - DNA, 20 bp, Artificial Sequence
  Description of Artificial Sequence: Synthetic oligonucleotide
  Target: ATXN2; (-) strand; PAM type: YTN; PAM sequence: CTG
aggcaggagaattgcttgaa

SEQ ID NO: 62795 - DNA, 20 bp, Artificial Sequence
  Description of Artificial Sequence: Synthetic oligonucleotide
  Target: ATXN2; (-) strand; PAM type: YTN; PAM sequence: CTC
gggaggctgaggcaggagaa

SEQ ID NO: 62796 - DNA, 20 bp, Artificial Sequence
  Description of Artificial Sequence: Synthetic oligonucleotide
  Target: ATXN2; (-) strand; PAM type: YTN; PAM sequence: CTA
ctcgggaggctgaggcagga

SEQ ID NO: 62797 - DNA, 20 bp, Artificial Sequence
  Description of Artificial Sequence: Synthetic oligonucleotide
  Target: ATXN2; (-) strand; PAM type: YTN; PAM sequence: CTG
tatcccagctactcgggagg

SEQ ID NO: 62798 - DNA, 20 bp, Artificial Sequence
  Description of Artificial Sequence: Synthetic oligonucleotide
  Target: ATXN2; (-) strand; PAM type: YTN; PAM sequence: TTA
gccaggcatggtggtaggtg

SEQ ID NO: 62799 - DNA, 20 bp, Artificial Sequence
  Description of Artificial Sequence: Synthetic oligonucleotide
  Target: ATXN2; (-) strand; PAM type: YTN; PAM sequence: CTA
aaaatacaaaaattagccag

SEQ ID NO: 62800 - DNA, 20 bp, Artificial Sequence
  Description of Artificial Sequence: Synthetic oligonucleotide
  Target: ATXN2; (-) strand; PAM type: YTN; PAM sequence: CTG
tactaaaaatacaaaaatta

SEQ ID NO: 62801 - DNA, 20 bp, Artificial Sequence
  Description of Artificial Sequence: Synthetic oligonucleotide
  Target: ATXN2; (-) strand; PAM type: YTN; PAM sequence: CTG
tctgtactaaaaatacaaaa

SEQ ID NO: 62802 - DNA, 20 bp, Artificial Sequence
  Description of Artificial Sequence: Synthetic oligonucleotide
  Target: ATXN2; (-) strand; PAM type: YTN; PAM sequence: CTG
gccaacatgtgaaaccctgt

SEQ ID NO: 62803 - DNA, 20 bp, Artificial Sequence
  Description of Artificial Sequence: Synthetic oligonucleotide
  Target: ATXN2; (-) strand; PAM type: YTN; PAM sequence: TTG
aagaccagcctggccaacat

SEQ ID NO: 62804 - DNA, 20 bp, Artificial Sequence
  Description of Artificial Sequence: Synthetic oligonucleotide
  Target: ATXN2; (-) strand; PAM type: YTN; PAM sequence: TTA
ggagttgaagaccagcctgg

SEQ ID NO: 62805 - DNA, 20 bp, Artificial Sequence
  Description of Artificial Sequence: Synthetic oligonucleotide
  Target: ATXN2; (-) strand; PAM type: YTN; PAM sequence: TTG
aggttaggagttgaagacca

SEQ ID NO: 62806 - DNA, 20 bp, Artificial Sequence
  Description of Artificial Sequence: Synthetic oligonucleotide
  Target: ATXN2; (-) strand; PAM type: YTN; PAM sequence: CTT
gaggttaggagttgaagacc

SEQ ID NO: 62807 - DNA, 20 bp, Artificial Sequence
  Description of Artificial Sequence: Synthetic oligonucleotide
  Target: ATXN2; (-) strand; PAM type: YTN; PAM sequence: TTA
cttgaggttaggagttgaag

SEQ ID NO: 62808 - DNA, 20 bp, Artificial Sequence
  Description of Artificial Sequence: Synthetic oligonucleotide
  Target: ATXN2; (-) strand; PAM type: YTN; PAM sequence: CTG
ggaggtccaagcaggtagat

SEQ ID NO: 62809 - DNA, 20 bp, Artificial Sequence
  Description of Artificial Sequence: Synthetic oligonucleotide
  Target: ATXN2; (-) strand; PAM type: YTN; PAM sequence: CTC
tgggaggtccaagcaggtag

SEQ ID NO: 62810 - DNA, 20 bp, Artificial Sequence
  Description of Artificial Sequence: Synthetic oligonucleotide
  Target: ATXN2; (-) strand; PAM type: YTN; PAM sequence: CTA
taatcccagcactctgggag

SEQ ID NO: 62811 - DNA, 20 bp, Artificial Sequence
  Description of Artificial Sequence: Synthetic oligonucleotide
  Target: ATXN2; (-) strand; PAM type: YTN; PAM sequence: CTC
atacctataatcccagcact

SEQ ID NO: 62812 - DNA, 20 bp, Artificial Sequence
  Description of Artificial Sequence: Synthetic oligonucleotide
  Target: ATXN2; (-) strand; PAM type: YTN; PAM sequence: CTG
gtagctcatacctataatcc

SEQ ID NO: 62813 - DNA, 20 bp, Artificial Sequence
  Description of Artificial Sequence: Synthetic oligonucleotide
  Target: ATXN2; (-) strand; PAM type: YTN; PAM sequence: TTG
actggtagctcatacctata

SEQ ID NO: 62814 - DNA, 20 bp, Artificial Sequence
  Description of Artificial Sequence: Synthetic oligonucleotide
  Target: ATXN2; (-) strand; PAM type: YTN; PAM sequence: TTG
gtatgttgactggtagctca

SEQ ID NO: 62815 - DNA, 20 bp, Artificial Sequence
  Description of Artificial Sequence: Synthetic oligonucleotide
  Target: ATXN2; (-) strand; PAM type: YTN; PAM sequence: CTA
gaatattggtatgttgactg

SEQ ID NO: 62816 - DNA, 20 bp, Artificial Sequence
  Description of Artificial Sequence: Synthetic oligonucleotide
  Target: ATXN2; (-) strand; PAM type: YTN; PAM sequence: CTG
catgctagaatattggtatg

SEQ ID NO: 62817 - DNA, 20 bp, Artificial Sequence
  Description of Artificial Sequence: Synthetic oligonucleotide
  Target: ATXN2; (-) strand; PAM type: YTN; PAM sequence: TTA
ctgcatgctagaatattggt

SEQ ID NO: 62818 - DNA, 20 bp, Artificial Sequence
  Description of Artificial Sequence: Synthetic oligonucleotide
  Target: ATXN2; (-) strand; PAM type: YTN; PAM sequence: CTC
acataagaattactgcatgc

SEQ ID NO: 62819 - DNA, 20 bp, Artificial Sequence
  Description of Artificial Sequence: Synthetic oligonucleotide
  Target: ATXN2; (-) strand; PAM type: YTN; PAM sequence: TTC
tcacataagaattactgcat

SEQ ID NO: 62820 - DNA, 20 bp, Artificial Sequence
  Description of Artificial Sequence: Synthetic oligonucleotide
  Target: ATXN2; (-) strand; PAM type: YTN; PAM sequence: CTT
ctcacataagaattactgca

SEQ ID NO: 62821 - DNA, 20 bp, Artificial Sequence
  Description of Artificial Sequence: Synthetic oligonucleotide
  Target: ATXN2; (-) strand; PAM type: YTN; PAM sequence: TTC
caggtatgtcatgtaaaata

SEQ ID NO: 62822 - DNA, 20 bp, Artificial Sequence
  Description of Artificial Sequence: Synthetic oligonucleotide
  Target: ATXN2; (-) strand; PAM type: YTN; PAM sequence: TTT
ccaggtatgtcatgtaaaat

SEQ ID NO: 62823 - DNA, 20 bp, Artificial Sequence
  Description of Artificial Sequence: Synthetic oligonucleotide
  Target: ATXN2; (-) strand; PAM type: YTN; PAM sequence: TTT
tccaggtatgtcatgtaaaa

SEQ ID NO: 62824 - DNA, 20 bp, Artificial Sequence
  Description of Artificial Sequence: Synthetic oligonucleotide
  Target: ATXN2; (-) strand; PAM type: YTN; PAM sequence: TTT
ttccaggtatgtcatgtaaa

SEQ ID NO: 62825 - DNA, 20 bp, Artificial Sequence
  Description of Artificial Sequence: Synthetic oligonucleotide
  Target: ATXN2; (-) strand; PAM type: YTN; PAM sequence: CTT
tttccaggtatgtcatgtaa

SEQ ID NO: 62826 - DNA, 20 bp, Artificial Sequence
  Description of Artificial Sequence: Synthetic oligonucleotide
  Target: ATXN2; (-) strand; PAM type: YTN; PAM sequence: TTA
cagccatgactttttccagg

SEQ ID NO: 62827 - DNA, 20 bp, Artificial Sequence
  Description of Artificial Sequence: Synthetic oligonucleotide
  Target: ATXN2; (-) strand; PAM type: YTN; PAM sequence: TTT
acagccatgactttttccag

SEQ ID NO: 62828 - DNA, 20 bp, Artificial Sequence
  Description of Artificial Sequence: Synthetic oligonucleotide
  Target: ATXN2; (-) strand; PAM type: YTN; PAM sequence: TTT
tacagccatgactttttcca

SEQ ID NO: 62829 - DNA, 20 bp, Artificial Sequence
  Description of Artificial Sequence: Synthetic oligonucleotide
  Target: ATXN2; (-) strand; PAM type: YTN; PAM sequence: TTT
ttacagccatgactttttcc

SEQ ID NO: 62830 - DNA, 20 bp, Artificial Sequence
  Description of Artificial Sequence: Synthetic oligonucleotide
  Target: ATXN2; (-) strand; PAM type: YTN; PAM sequence: TTT
tttacagccatgactttttc

SEQ ID NO: 62831 - DNA, 20 bp, Artificial Sequence
  Description of Artificial Sequence: Synthetic oligonucleotide
  Target: ATXN2; (-) strand; PAM type: YTN; PAM sequence: TTT
ttttacagccatgacttttt

SEQ ID NO: 62832 - DNA, 20 bp, Artificial Sequence
  Description of Artificial Sequence: Synthetic oligonucleotide
  Target: ATXN2; (-) strand; PAM type: YTN; PAM sequence: TTT
tttttacagccatgactttt

SEQ ID NO: 62833 - DNA, 20 bp, Artificial Sequence
  Description of Artificial Sequence: Synthetic oligonucleotide
  Target: ATXN2; (-) strand; PAM type: YTN; PAM sequence: TTT
ttttttacagccatgacttt

SEQ ID NO: 62834 - DNA, 20 bp, Artificial Sequence
  Description of Artificial Sequence: Synthetic oligonucleotide
  Target: ATXN2; (-) strand; PAM type: YTN; PAM sequence: TTG
aggcaatttttttttacagc

SEQ ID NO: 62835 - DNA, 20 bp, Artificial Sequence
  Description of Artificial Sequence: Synthetic oligonucleotide
  Target: ATXN2; (-) strand; PAM type: YTN; PAM sequence: TTT
gaggcaatttttttttacag

SEQ ID NO: 62836 - DNA, 20 bp, Artificial Sequence
  Description of Artificial Sequence: Synthetic oligonucleotide
  Target: ATXN2; (-) strand; PAM type: YTN; PAM sequence: TTG
atttgaggcaattttttttt

SEQ ID NO: 62837 - DNA, 20 bp, Artificial Sequence
  Description of Artificial Sequence: Synthetic oligonucleotide
  Target: ATXN2; (-) strand; PAM type: YTN; PAM sequence: CTT
gatttgaggcaatttttttt

SEQ ID NO: 62838 - DNA, 20 bp, Artificial Sequence
  Description of Artificial Sequence: Synthetic oligonucleotide
  Target: ATXN2; (-) strand; PAM type: YTN; PAM sequence: TTC
ttgatttgaggcaatttttt

SEQ ID NO: 62839 - DNA, 20 bp, Artificial Sequence
  Description of Artificial Sequence: Synthetic oligonucleotide
  Target: ATXN2; (-) strand; PAM type: YTN; PAM sequence: TTA
ttcttgatttgaggcaattt

SEQ ID NO: 62840 - DNA, 20 bp, Artificial Sequence
  Description of Artificial Sequence: Synthetic oligonucleotide
  Target: ATXN2; (-) strand; PAM type: YTN; PAM sequence: CTT
attcttgatttgaggcaatt

SEQ ID NO: 62841 - DNA, 20 bp, Artificial Sequence
  Description of Artificial Sequence: Synthetic oligonucleotide
  Target: ATXN2; (-) strand; PAM type: YTN; PAM sequence: CTG
cttattcttgatttgaggca

SEQ ID NO: 62842 - DNA, 20 bp, Artificial Sequence
  Description of Artificial Sequence: Synthetic oligonucleotide
  Target: ATXN2; (-) strand; PAM type: YTN; PAM sequence: TTG
gggactgcttattcttgatt

SEQ ID NO: 62843 - DNA, 20 bp, Artificial Sequence
  Description of Artificial Sequence: Synthetic oligonucleotide
  Target: ATXN2; (-) strand; PAM type: YTN; PAM sequence: TTG
ataaattggggactgcttat

SEQ ID NO: 62844 - DNA, 20 bp, Artificial Sequence
  Description of Artificial Sequence: Synthetic oligonucleotide
  Target: ATXN2; (-) strand; PAM type: YTN; PAM sequence: TTA
ttgataaattggggactgct

SEQ ID NO: 62845 - DNA, 20 bp, Artificial Sequence
  Description of Artificial Sequence: Synthetic oligonucleotide
  Target: ATXN2; (-) strand; PAM type: YTN; PAM sequence: CTT
attgataaattggggactgc

SEQ ID NO: 62846 - DNA, 20 bp, Artificial Sequence
  Description of Artificial Sequence: Synthetic oligonucleotide
  Target: ATXN2; (-) strand; PAM type: YTN; PAM sequence: TTG
gaatgcagcttattgataaa

SEQ ID NO: 62847 - DNA, 20 bp, Artificial Sequence
  Description of Artificial Sequence: Synthetic oligonucleotide
  Target: ATXN2; (-) strand; PAM type: YTN; PAM sequence: TTT
ggaatgcagcttattgataa

SEQ ID NO: 62848 - DNA, 20 bp, Artificial Sequence
  Description of Artificial Sequence: Synthetic oligonucleotide
  Target: ATXN2; (-) strand; PAM type: YTN; PAM sequence: TTT
tggaatgcagcttattgata

SEQ ID NO: 62849 - DNA, 20 bp, Artificial Sequence
  Description of Artificial Sequence: Synthetic oligonucleotide
  Target: ATXN2; (-) strand; PAM type: YTN; PAM sequence: CTG
aagttttggaatgcagctta

SEQ ID NO: 62850 - DNA, 20 bp, Artificial Sequence
  Description of Artificial Sequence: Synthetic oligonucleotide
  Target: ATXN2; (-) strand; PAM type: YTN; PAM sequence: TTA
aagctgaagttttggaatgc

SEQ ID NO: 62851 - DNA, 20 bp, Artificial Sequence
  Description of Artificial Sequence: Synthetic oligonucleotide
  Target: ATXN2; (-) strand; PAM type: YTN; PAM sequence: TTG
ggtaccaaacaatccagtta

SEQ ID NO: 62852 - DNA, 20 bp, Artificial Sequence
  Description of Artificial Sequence: Synthetic oligonucleotide
  Target: ATXN2; (-) strand; PAM type: YTN; PAM sequence: TTT
gggtaccaaacaatccagtt

SEQ ID NO: 62853 - DNA, 20 bp, Artificial Sequence
  Description of Artificial Sequence: Synthetic oligonucleotide
  Target: ATXN2; (-) strand; PAM type: YTN; PAM sequence: TTA
ggtgtttgggtaccaaacaa

SEQ ID NO: 62854 - DNA, 20 bp, Artificial Sequence
  Description of Artificial Sequence: Synthetic oligonucleotide
  Target: ATXN2; (-) strand; PAM type: YTN; PAM sequence: CTT
aggtgtttgggtaccaaaca

SEQ ID NO: 62855 - DNA, 20 bp, Artificial Sequence
  Description of Artificial Sequence: Synthetic oligonucleotide
  Target: ATXN2; (-) strand; PAM type: YTN; PAM sequence: TTG
acttaggtgtttgggtacca

SEQ ID NO: 62856 - DNA, 20 bp, Artificial Sequence
  Description of Artificial Sequence: Synthetic oligonucleotide
  Target: ATXN2; (-) strand; PAM type: YTN; PAM sequence: CTA
ccattgacttaggtgtttgg

SEQ ID NO: 62857 - DNA, 20 bp, Artificial Sequence
  Description of Artificial Sequence: Synthetic oligonucleotide
  Target: ATXN2; (-) strand; PAM type: YTN; PAM sequence: TTA
actaccattgacttaggtgt

SEQ ID NO: 62858 - DNA, 20 bp, Artificial Sequence
  Description of Artificial Sequence: Synthetic oligonucleotide
  Target: ATXN2; (-) strand; PAM type: YTN; PAM sequence: CTT
aactaccattgacttaggtg

SEQ ID NO: 62859 - DNA, 20 bp, Artificial Sequence
  Description of Artificial Sequence: Synthetic oligonucleotide
  Target: ATXN2; (-) strand; PAM type: YTN; PAM sequence: CTC
agaacttaactaccattgac

SEQ ID NO: 62860 - DNA, 20 bp, Artificial Sequence
  Description of Artificial Sequence: Synthetic oligonucleotide
  Target: ATXN2; (-) strand; PAM type: YTN; PAM sequence: CTA
acctcagaacttaactacca

SEQ ID NO: 62861 - DNA, 20 bp, Artificial Sequence
  Description of Artificial Sequence: Synthetic oligonucleotide
  Target: ATXN2; (-) strand; PAM type: YTN; PAM sequence: TTA
ggggctaacctcagaactta

SEQ ID NO: 62862 - DNA, 20 bp, Artificial Sequence
  Description of Artificial Sequence: Synthetic oligonucleotide
  Target: ATXN2; (-) strand; PAM type: YTN; PAM sequence: TTT
aggggctaacctcagaactt

SEQ ID NO: 62863 - DNA, 20 bp, Artificial Sequence
  Description of Artificial Sequence: Synthetic oligonucleotide
  Target: ATXN2; (-) strand; PAM type: YTN; PAM sequence: TTT
taggggctaacctcagaact

SEQ ID NO: 62864 - DNA, 20 bp, Artificial Sequence
  Description of Artificial Sequence: Synthetic oligonucleotide
  Target: ATXN2; (-) strand; PAM type: YTN; PAM sequence: CTT
ttaggggctaacctcagaac

SEQ ID NO: 62865 - DNA, 20 bp, Artificial Sequence
  Description of Artificial Sequence: Synthetic oligonucleotide
  Target: ATXN2; (-) strand; PAM type: YTN; PAM sequence: TTA
aatggacttttaggggctaa

SEQ ID NO: 62866 - DNA, 20 bp, Artificial Sequence
  Description of Artificial Sequence: Synthetic oligonucleotide
  Target: ATXN2; (-) strand; PAM type: YTN; PAM sequence: TTA
attaaatggacttttagggg

SEQ ID NO: 62867 - DNA, 20 bp, Artificial Sequence
  Description of Artificial Sequence: Synthetic oligonucleotide
  Target: ATXN2; (-) strand; PAM type: YTN; PAM sequence: TTC
agtatattaattaaatggac

SEQ ID NO: 62868 - DNA, 20 bp, Artificial Sequence
  Description of Artificial Sequence: Synthetic oligonucleotide
  Target: ATXN2; (-) strand; PAM type: YTN; PAM sequence: CTG
cacattcagtatattaatta

SEQ ID NO: 62869 - DNA, 20 bp, Artificial Sequence
  Description of Artificial Sequence: Synthetic oligonucleotide
  Target: ATXN2; (-) strand; PAM type: YTN; PAM sequence: TTC
tgcacattcagtatattaat

SEQ ID NO: 62870 - DNA, 20 bp, Artificial Sequence
  Description of Artificial Sequence: Synthetic oligonucleotide
  Target: ATXN2; (-) strand; PAM type: YTN; PAM sequence: TTA
attctgcacattcagtatat

SEQ ID NO: 62871 - DNA, 20 bp, Artificial Sequence
  Description of Artificial Sequence: Synthetic oligonucleotide
  Target: ATXN2; (-) strand; PAM type: YTN; PAM sequence: CTT
aattctgcacattcagtata

SEQ ID NO: 62872 - DNA, 20 bp, Artificial Sequence
  Description of Artificial Sequence: Synthetic oligonucleotide
  Target: ATXN2; (-) strand; PAM type: YTN; PAM sequence: TTA
agatagacttaattctgcac

SEQ ID NO: 62873 - DNA, 20 bp, Artificial Sequence
  Description of Artificial Sequence: Synthetic oligonucleotide
  Target: ATXN2; (-) strand; PAM type: YTN; PAM sequence: TTG
ttaagatagacttaattctg

SEQ ID NO: 62874 - DNA, 20 bp, Artificial Sequence
  Description of Artificial Sequence: Synthetic oligonucleotide
  Target: ATXN2; (-) strand; PAM type: YTN; PAM sequence: TTT
gttaagatagacttaattct

SEQ ID NO: 62875 - DNA, 20 bp, Artificial Sequence
  Description of Artificial Sequence: Synthetic oligonucleotide
  Target: ATXN2; (-) strand; PAM type: YTN; PAM sequence: TTA
gatttgttaagatagactta

SEQ ID NO: 62876 - DNA, 20 bp, Artificial Sequence
  Description of Artificial Sequence: Synthetic oligonucleotide
  Target: ATXN2; (-) strand; PAM type: YTN; PAM sequence: TTT
agatttgttaagatagactt

SEQ ID NO: 62877 - DNA, 20 bp, Artificial Sequence
  Description of Artificial Sequence: Synthetic oligonucleotide
  Target: ATXN2; (-) strand; PAM type: YTN; PAM sequence: TTA
atgtttagatttgttaagat

SEQ ID NO: 62878 - DNA, 20 bp, Artificial Sequence
  Description of Artificial Sequence: Synthetic oligonucleotide
  Target: ATXN2; (-) strand; PAM type: YTN; PAM sequence: TTA
gttaatgtttagatttgtta

SEQ ID NO: 62879 - DNA, 20 bp, Artificial Sequence
  Description of Artificial Sequence: Synthetic oligonucleotide
  Target: ATXN2; (-) strand; PAM type: YTN; PAM sequence: TTT
agttaatgtttagatttgtt

SEQ ID NO: 62880 - DNA, 20 bp, Artificial Sequence
  Description of Artificial Sequence: Synthetic oligonucleotide
  Target: ATXN2; (-) strand; PAM type: YTN; PAM sequence: TTT
tagttaatgtttagatttgt

SEQ ID NO: 62881 - DNA, 20 bp, Artificial Sequence
  Description of Artificial Sequence: Synthetic oligonucleotide
  Target: ATXN2; (-) strand; PAM type: YTN; PAM sequence: CTG
tgttttagttaatgtttaga

SEQ ID NO: 62882 - DNA, 20 bp, Artificial Sequence
  Description of Artificial Sequence: Synthetic oligonucleotide
  Target: ATXN2; (-) strand; PAM type: YTN; PAM sequence: TTC
atcagaaactgtgttttagt

SEQ ID NO: 62883 - DNA, 20 bp, Artificial Sequence
  Description of Artificial Sequence: Synthetic oligonucleotide
  Target: ATXN2; (-) strand; PAM type: YTN; PAM sequence: TTT
catcagaaactgtgttttag

SEQ ID NO: 62884 - DNA, 20 bp, Artificial Sequence
  Description of Artificial Sequence: Synthetic oligonucleotide
  Target: ATXN2; (-) strand; PAM type: YTN; PAM sequence: TTT
tcatcagaaactgtgtttta

SEQ ID NO: 62885 - DNA, 20 bp, Artificial Sequence
  Description of Artificial Sequence: Synthetic oligonucleotide
  Target: ATXN2; (-) strand; PAM type: YTN; PAM sequence: TTT
ttcatcagaaactgtgtttt

SEQ ID NO: 62886 - DNA, 20 bp, Artificial Sequence
  Description of Artificial Sequence: Synthetic oligonucleotide
  Target: ATXN2; (-) strand; PAM type: YTN; PAM sequence: TTC
aaaatatttttcatcagaaa

SEQ ID NO: 62887 - DNA, 20 bp, Artificial Sequence
  Description of Artificial Sequence: Synthetic oligonucleotide
  Target: ATXN2; (-) strand; PAM type: YTN; PAM sequence: TTG
gaattcaaaatatttttcat

SEQ ID NO: 62888 - DNA, 20 bp, Artificial Sequence
  Description of Artificial Sequence: Synthetic oligonucleotide
  Target: ATXN2; (-) strand; PAM type: YTN; PAM sequence: CTT
ggaattcaaaatatttttca

SEQ ID NO: 62889 - DNA, 20 bp, Artificial Sequence
  Description of Artificial Sequence: Synthetic oligonucleotide
  Target: ATXN2; (-) strand; PAM type: YTN; PAM sequence: CTA
cttggaattcaaaatatttt

SEQ ID NO: 62890 - DNA, 20 bp, Artificial Sequence
  Description of Artificial Sequence: Synthetic oligonucleotide
  Target: ATXN2; (-) strand; PAM type: YTN; PAM sequence: TTC
tacttggaattcaaaatatt

SEQ ID NO: 62891 - DNA, 20 bp, Artificial Sequence
  Description of Artificial Sequence: Synthetic oligonucleotide
  Target: ATXN2; (-) strand; PAM type: YTN; PAM sequence: CTT
ctacttggaattcaaaatat

SEQ ID NO: 62892 - DNA, 20 bp, Artificial Sequence
  Description of Artificial Sequence: Synthetic oligonucleotide
  Target: ATXN2; (-) strand; PAM type: YTN; PAM sequence: CTG
tcaaggagagaagcatgcgg

SEQ ID NO: 62893 - DNA, 20 bp, Artificial Sequence
  Description of Artificial Sequence: Synthetic oligonucleotide
  Target: ATXN2; (-) strand; PAM type: YTN; PAM sequence: CTG
ccactgtcaaggagagaagc

SEQ ID NO: 62894 - DNA, 20 bp, Artificial Sequence
  Description of Artificial Sequence: Synthetic oligonucleotide
  Target: ATXN2; (-) strand; PAM type: YTN; PAM sequence: TTG
aaaaactgccactgtcaagg

SEQ ID NO: 62895 - DNA, 20 bp, Artificial Sequence
  Description of Artificial Sequence: Synthetic oligonucleotide
  Target: ATXN2; (-) strand; PAM type: YTN; PAM sequence: CTA
ggttgaaaaactgccactgt

SEQ ID NO: 62896 - DNA, 20 bp, Artificial Sequence
  Description of Artificial Sequence: Synthetic oligonucleotide
  Target: ATXN2; (-) strand; PAM type: YTN; PAM sequence: CTG
ctaggttgaaaaactgccac

SEQ ID NO: 62897 - DNA, 20 bp, Artificial Sequence
  Description of Artificial Sequence: Synthetic oligonucleotide
  Target: ATXN2; (-) strand; PAM type: YTN; PAM sequence: CTG
tgctgctaggttgaaaaact

SEQ ID NO: 62898 - DNA, 20 bp, Artificial Sequence
  Description of Artificial Sequence: Synthetic oligonucleotide
  Target: ATXN2; (-) strand; PAM type: YTN; PAM sequence: CTC
actgtgctgctaggttgaaa

SEQ ID NO: 62899 - DNA, 20 bp, Artificial Sequence
  Description of Artificial Sequence: Synthetic oligonucleotide
  Target: ATXN2; (-) strand; PAM type: YTN; PAM sequence: TTA
gtcaccctcactgtgctgct

SEQ ID NO: 62900 - DNA, 20 bp, Artificial Sequence
  Description of Artificial Sequence: Synthetic oligonucleotide
  Target: ATXN2; (-) strand; PAM type: YTN; PAM sequence: CTC
attagtcaccctcactgtgc

SEQ ID NO: 62901 - DNA, 20 bp, Artificial Sequence
  Description of Artificial Sequence: Synthetic oligonucleotide
  Target: ATXN2; (-) strand; PAM type: YTN; PAM sequence: TTC
cactcattagtcaccctcac

SEQ ID NO: 62902 - DNA, 20 bp, Artificial Sequence
  Description of Artificial Sequence: Synthetic oligonucleotide
  Target: ATXN2; (-) strand; PAM type: YTN; PAM sequence: CTG
gattccactcattagtcacc

SEQ ID NO: 62903 - DNA, 20 bp, Artificial Sequence
  Description of Artificial Sequence: Synthetic oligonucleotide
  Target: ATXN2; (-) strand; PAM type: YTN; PAM sequence: TTA
ctggattccactcattagtc

SEQ ID NO: 62904 - DNA, 20 bp, Artificial Sequence
  Description of Artificial Sequence: Synthetic oligonucleotide
  Target: ATXN2; (-) strand; PAM type: YTN; PAM sequence: TTT
actggattccactcattagt

SEQ ID NO: 62905 - DNA, 20 bp, Artificial Sequence
  Description of Artificial Sequence: Synthetic oligonucleotide
  Target: ATXN2; (-) strand; PAM type: YTN; PAM sequence: CTT
tactggattccactcattag

SEQ ID NO: 62906 - DNA, 20 bp, Artificial Sequence
  Description of Artificial Sequence: Synthetic oligonucleotide
  Target: ATXN2; (-) strand; PAM type: YTN; PAM sequence: CTA
tctttactggattccactca

SEQ ID NO: 62907 - DNA, 20 bp, Artificial Sequence
  Description of Artificial Sequence: Synthetic oligonucleotide
  Target: ATXN2; (-) strand; PAM type: YTN; PAM sequence: TTC
aggggacctatctttactgg

SEQ ID NO: 62908 - DNA, 20 bp, Artificial Sequence
  Description of Artificial Sequence: Synthetic oligonucleotide
  Target: ATXN2; (-) strand; PAM type: YTN; PAM sequence: TTA
tcaattcaggggacctatct

SEQ ID NO: 62909 - DNA, 20 bp, Artificial Sequence
  Description of Artificial Sequence: Synthetic oligonucleotide
  Target: ATXN2; (-) strand; PAM type: YTN; PAM sequence: TTG
aaaaattatcaattcagggg

SEQ ID NO: 62910 - DNA, 20 bp, Artificial Sequence
  Description of Artificial Sequence: Synthetic oligonucleotide
  Target: ATXN2; (-) strand; PAM type: YTN; PAM sequence: CTG
taaatgaacaggagttgaaa

SEQ ID NO: 62911 - DNA, 20 bp, Artificial Sequence
  Description of Artificial Sequence: Synthetic oligonucleotide
  Target: ATXN2; (-) strand; PAM type: YTN; PAM sequence: TTC
tgtaaatgaacaggagttga

SEQ ID NO: 62912 - DNA, 20 bp, Artificial Sequence
  Description of Artificial Sequence: Synthetic oligonucleotide
  Target: ATXN2; (-) strand; PAM type: YTN; PAM sequence: TTT
ctgtaaatgaacaggagttg

SEQ ID NO: 62913 - DNA, 20 bp, Artificial Sequence
  Description of Artificial Sequence: Synthetic oligonucleotide
  Target: ATXN2; (-) strand; PAM type: YTN; PAM sequence: TTT
tctgtaaatgaacaggagtt

SEQ ID NO: 62914 - DNA, 20 bp, Artificial Sequence
  Description of Artificial Sequence: Synthetic oligonucleotide
  Target: ATXN2; (-) strand; PAM type: YTN; PAM sequence: TTT
ttctgtaaatgaacaggagt

SEQ ID NO: 62915 - DNA, 20 bp, Artificial Sequence
  Description of Artificial Sequence: Synthetic oligonucleotide
  Target: ATXN2; (-) strand; PAM type: YTN; PAM sequence: TTA
agaaaagtttttctgtaaat

SEQ ID NO: 62916 - DNA, 20 bp, Artificial Sequence
  Description of Artificial Sequence: Synthetic oligonucleotide
  Target: ATXN2; (-) strand; PAM type: YTN; PAM sequence: CTA
gaaaaacaaggcataaatta

SEQ ID NO: 62917 - DNA, 20 bp, Artificial Sequence
  Description of Artificial Sequence: Synthetic oligonucleotide
  Target: ATXN2; (-) strand; PAM type: YTN; PAM sequence: TTG
taccccagggctagaaaaac

SEQ ID NO: 62918 - DNA, 20 bp, Artificial Sequence
  Description of Artificial Sequence: Synthetic oligonucleotide
  Target: ATXN2; (-) strand; PAM type: YTN; PAM sequence: TTT
gtaccccagggctagaaaaa

SEQ ID NO: 62919 - DNA, 20 bp, Artificial Sequence
  Description of Artificial Sequence: Synthetic oligonucleotide
  Target: ATXN2; (-) strand; PAM type: YTN; PAM sequence: TTT
tgtaccccagggctagaaaa

SEQ ID NO: 62920 - DNA, 20 bp, Artificial Sequence
  Description of Artificial Sequence: Synthetic oligonucleotide
  Target: ATXN2; (-) strand; PAM type: YTN; PAM sequence: TTT
ttgtaccccagggctagaaa

SEQ ID NO: 62921 - DNA, 20 bp, Artificial Sequence
  Description of Artificial Sequence: Synthetic oligonucleotide
  Target: ATXN2; (-) strand; PAM type: YTN; PAM sequence: TTT
tttgtaccccagggctagaa

SEQ ID NO: 62922 - DNA, 20 bp, Artificial Sequence
  Description of Artificial Sequence: Synthetic oligonucleotide
  Target: ATXN2; (-) strand; PAM type: YTN; PAM sequence: CTT
ttttgtaccccagggctaga

SEQ ID NO: 62923 - DNA, 20 bp, Artificial Sequence
  Description of Artificial Sequence: Synthetic oligonucleotide
  Target: ATXN2; (-) strand; PAM type: YTN; PAM sequence: TTC
cccttttttgtaccccaggg

SEQ ID NO: 62924 - DNA, 20 bp, Artificial Sequence
  Description of Artificial Sequence: Synthetic oligonucleotide
  Target: ATXN2; (-) strand; PAM type: YTN; PAM sequence: CTT
ccccttttttgtaccccagg

SEQ ID NO: 62925 - DNA, 20 bp, Artificial Sequence
  Description of Artificial Sequence: Synthetic oligonucleotide
  Target: ATXN2; (-) strand; PAM type: YTN; PAM sequence: TTC
ttccccttttttgtacccca

SEQ ID NO: 62926 - DNA, 20 bp, Artificial Sequence
  Description of Artificial Sequence: Synthetic oligonucleotide
  Target: ATXN2; (-) strand; PAM type: YTN; PAM sequence: CTG
ttcttccccttttttgtacc

SEQ ID NO: 62927 - DNA, 20 bp, Artificial Sequence
  Description of Artificial Sequence: Synthetic oligonucleotide
  Target: ATXN2; (-) strand; PAM type: YTN; PAM sequence: TTC
tgttcttccccttttttgta

SEQ ID NO: 62928 - DNA, 20 bp, Artificial Sequence
  Description of Artificial Sequence: Synthetic oligonucleotide
  Target: ATXN2; (-) strand; PAM type: YTN; PAM sequence: CTT
ctgttcttccccttttttgt

SEQ ID NO: 62929 - DNA, 20 bp, Artificial Sequence
  Description of Artificial Sequence: Synthetic oligonucleotide
  Target: ATXN2; (-) strand; PAM type: YTN; PAM sequence: CTC
ttctgttcttcccctttttt

SEQ ID NO: 62930 - DNA, 20 bp, Artificial Sequence
  Description of Artificial Sequence: Synthetic oligonucleotide
  Target: ATXN2; (-) strand; PAM type: YTN; PAM sequence: CTA
ctcttctgttcttccccttt

SEQ ID NO: 62931 - DNA, 20 bp, Artificial Sequence
  Description of Artificial Sequence: Synthetic oligonucleotide
  Target: ATXN2; (-) strand; PAM type: YTN; PAM sequence: CTG
tgctactcttctgttcttcc

SEQ ID NO: 62932 - DNA, 20 bp, Artificial Sequence
  Description of Artificial Sequence: Synthetic oligonucleotide
  Target: ATXN2; (-) strand; PAM type: YTN; PAM sequence: TTG
caccctgtgctactcttctg

SEQ ID NO: 62933 - DNA, 20 bp, Artificial Sequence
  Description of Artificial Sequence: Synthetic oligonucleotide
  Target: ATXN2; (-) strand; PAM type: YTN; PAM sequence: TTA
ttgcaccctgtgctactctt

SEQ ID NO: 62934 - DNA, 20 bp, Artificial Sequence
  Description of Artificial Sequence: Synthetic oligonucleotide
  Target: ATXN2; (-) strand; PAM type: YTN; PAM sequence: TTA
agtaaatgaggttattgcac

SEQ ID NO: 62935 - DNA, 20 bp, Artificial Sequence
  Description of Artificial Sequence: Synthetic oligonucleotide
  Target: ATXN2; (-) strand; PAM type: YTN; PAM sequence: CTT
aagtaaatgaggttattgca

SEQ ID NO: 62936 - DNA, 20 bp, Artificial Sequence
  Description of Artificial Sequence: Synthetic oligonucleotide
  Target: ATXN2; (-) strand; PAM type: YTN; PAM sequence: CTA
gtccaaacaaatgacatctt

SEQ ID NO: 62937 - DNA, 20 bp, Artificial Sequence
  Description of Artificial Sequence: Synthetic oligonucleotide
  Target: ATXN2; (-) strand; PAM type: YTN; PAM sequence: TTA
caaacagctagtccaaacaa

SEQ ID NO: 62938 - DNA, 20 bp, Artificial Sequence
  Description of Artificial Sequence: Synthetic oligonucleotide
  Target: ATXN2; (-) strand; PAM type: YTN; PAM sequence: TTT
acaaacagctagtccaaaca

SEQ ID NO: 62939 - DNA, 20 bp, Artificial Sequence
  Description of Artificial Sequence: Synthetic oligonucleotide
  Target: ATXN2; (-) strand; PAM type: YTN; PAM sequence: TTA
gtttacaaacagctagtcca

SEQ ID NO: 62940 - DNA, 20 bp, Artificial Sequence
  Description of Artificial Sequence: Synthetic oligonucleotide
  Target: ATXN2; (-) strand; PAM type: YTN; PAM sequence: CTT
agtttacaaacagctagtcc

SEQ ID NO: 62941 - DNA, 20 bp, Artificial Sequence
  Description of Artificial Sequence: Synthetic oligonucleotide
  Target: ATXN2; (-) strand; PAM type: YTN; PAM sequence: TTG
cccttagtttacaaacagct

SEQ ID NO: 62942 - DNA, 20 bp, Artificial Sequence
  Description of Artificial Sequence: Synthetic oligonucleotide
  Target: ATXN2; (-) strand; PAM type: YTN; PAM sequence: TTA
tacattgcccttagtttaca

SEQ ID NO: 62943 - DNA, 20 bp, Artificial Sequence
  Description of Artificial Sequence: Synthetic oligonucleotide
  Target: ATXN2; (-) strand; PAM type: YTN; PAM sequence: TTT
atacattgcccttagtttac

SEQ ID NO: 62944 - DNA, 20 bp, Artificial Sequence
  Description of Artificial Sequence: Synthetic oligonucleotide
  Target: ATXN2; (-) strand; PAM type: YTN; PAM sequence: CTT
tatacattgcccttagttta

SEQ ID NO: 62945 - DNA, 20 bp, Artificial Sequence
  Description of Artificial Sequence: Synthetic oligonucleotide
  Target: ATXN2; (-) strand; PAM type: YTN; PAM sequence: CTA
ctttatacattgcccttagt

SEQ ID NO: 62946 - DNA, 20 bp, Artificial Sequence
  Description of Artificial Sequence: Synthetic oligonucleotide
  Target: ATXN2; (-) strand; PAM type: YTN; PAM sequence: TTA
gactactttatacattgccc

SEQ ID NO: 62947 - DNA, 20 bp, Artificial Sequence
  Description of Artificial Sequence: Synthetic oligonucleotide
  Target: ATXN2; (-) strand; PAM type: YTN; PAM sequence: TTT
agactactttatacattgcc

SEQ ID NO: 62948 - DNA, 20 bp, Artificial Sequence
  Description of Artificial Sequence: Synthetic oligonucleotide
  Target: ATXN2; (-) strand; PAM type: YTN; PAM sequence: TTT
tagactactttatacattgc

SEQ ID NO: 62949 - DNA, 20 bp, Artificial Sequence
  Description of Artificial Sequence: Synthetic oligonucleotide
  Target: ATXN2; (-) strand; PAM type: YTN; PAM sequence: CTT
ttagactactttatacattg

SEQ ID NO: 62950 - DNA, 20 bp, Artificial Sequence
  Description of Artificial Sequence: Synthetic oligonucleotide
  Target: ATXN2; (-) strand; PAM type: YTN; PAM sequence: CTG
gacttttagactactttata

SEQ ID NO: 62951 - DNA, 20 bp, Artificial Sequence
  Description of Artificial Sequence: Synthetic oligonucleotide
  Target: ATXN2; (-) strand; PAM type: YTN; PAM sequence: CTG
tgaagaatccatctggactt

SEQ ID NO: 62952 - DNA, 20 bp, Artificial Sequence
  Description of Artificial Sequence: Synthetic oligonucleotide
  Target: ATXN2; (-) strand; PAM type: YTN; PAM sequence: TTC
caactgtgaagaatccatct

SEQ ID NO: 62953 - DNA, 20 bp, Artificial Sequence
  Description of Artificial Sequence: Synthetic oligonucleotide
  Target: ATXN2; (-) strand; PAM type: YTN; PAM sequence: CTT
ccaactgtgaagaatccatc

SEQ ID NO: 62954 - DNA, 20 bp, Artificial Sequence
  Description of Artificial Sequence: Synthetic oligonucleotide
  Target: ATXN2; (-) strand; PAM type: YTN; PAM sequence: TTA
ggtccttccaactgtgaaga

SEQ ID NO: 62955 - DNA, 20 bp, Artificial Sequence
  Description of Artificial Sequence: Synthetic oligonucleotide
  Target: ATXN2; (-) strand; PAM type: YTN; PAM sequence: TTT
aggtccttccaactgtgaag

SEQ ID NO: 62956 - DNA, 20 bp, Artificial Sequence
  Description of Artificial Sequence: Synthetic oligonucleotide
  Target: ATXN2; (-) strand; PAM type: YTN; PAM sequence: TTA
aaggcatttaggtccttcca

SEQ ID NO: 62957 - DNA, 20 bp, Artificial Sequence
  Description of Artificial Sequence: Synthetic oligonucleotide
  Target: ATXN2; (-) strand; PAM type: YTN; PAM sequence: TTT
aaaggcatttaggtccttcc

SEQ ID NO: 62958 - DNA, 20 bp, Artificial Sequence
  Description of Artificial Sequence: Synthetic oligonucleotide
  Target: ATXN2; (-) strand; PAM type: YTN; PAM sequence: TTT
taaaggcatttaggtccttc

SEQ ID NO: 62959 - DNA, 20 bp, Artificial Sequence
  Description of Artificial Sequence: Synthetic oligonucleotide
  Target: ATXN2; (-) strand; PAM type: YTN; PAM sequence: TTT
ttaaaggcatttaggtcctt

SEQ ID NO: 62960 - DNA, 20 bp, Artificial Sequence
  Description of Artificial Sequence: Synthetic oligonucleotide
  Target: ATXN2; (-) strand; PAM type: YTN; PAM sequence: TTT
tttaaaggcatttaggtcct

SEQ ID NO: 62961 - DNA, 20 bp, Artificial Sequence
  Description of Artificial Sequence: Synthetic oligonucleotide
  Target: ATXN2; (-) strand; PAM type: YTN; PAM sequence: TTT
ttttaaaggcatttaggtcc

SEQ ID NO: 62962 - DNA, 20 bp, Artificial Sequence
  Description of Artificial Sequence: Synthetic oligonucleotide
  Target: ATXN2; (-) strand; PAM type: YTN; PAM sequence: TTT
tttttaaaggcatttaggtc

SEQ ID NO: 62963 - DNA, 20 bp, Artificial Sequence
  Description of Artificial Sequence: Synthetic oligonucleotide
  Target: ATXN2; (-) strand; PAM type: YTN; PAM sequence: TTT
ttttttaaaggcatttaggt

SEQ ID NO: 62964 - DNA, 20 bp, Artificial Sequence
  Description of Artificial Sequence: Synthetic oligonucleotide
  Target: ATXN2; (-) strand; PAM type: YTN; PAM sequence: TTT
tttttttaaaggcatttagg

SEQ ID NO: 62965 - DNA, 20 bp, Artificial Sequence
  Description of Artificial Sequence: Synthetic oligonucleotide
  Target: ATXN2; (-) strand; PAM type: YTN; PAM sequence: TTT
ttttttttaaaggcatttag

SEQ ID NO: 62966 - DNA, 20 bp, Artificial Sequence
  Description of Artificial Sequence: Synthetic oligonucleotide
  Target: ATXN2; (-) strand; PAM type: YTN; PAM sequence: TTT
tttttttttaaaggcattta

SEQ ID NO: 62967 - DNA, 20 bp, Artificial Sequence
  Description of Artificial Sequence: Synthetic oligonucleotide
  Target: ATXN2; (-) strand; PAM type: YTN; PAM sequence: CTT
ttttttttttaaaggcattt

SEQ ID NO: 62968 - DNA, 20 bp, Artificial Sequence
  Description of Artificial Sequence: Synthetic oligonucleotide
  Target: ATXN2; (-) strand; PAM type: YTN; PAM sequence: TTA
acttttttttttttaaaggc

SEQ ID NO: 62969 - DNA, 20 bp, Artificial Sequence
  Description of Artificial Sequence: Synthetic oligonucleotide
  Target: ATXN2; (-) strand; PAM type: YTN; PAM sequence: CTC
aattaactttttttttttta

SEQ ID NO: 62970 - DNA, 20 bp, Artificial Sequence
  Description of Artificial Sequence: Synthetic oligonucleotide
  Target: ATXN2; (-) strand; PAM type: YTN; PAM sequence: TTA
ctcaattaactttttttttt

SEQ ID NO: 62971 - DNA, 20 bp, Artificial Sequence
  Description of Artificial Sequence: Synthetic oligonucleotide
  Target: ATXN2; (-) strand; PAM type: YTN; PAM sequence: CTG
ttactcaattaacttttttt

SEQ ID NO: 62972 - DNA, 20 bp, Artificial Sequence
  Description of Artificial Sequence: Synthetic oligonucleotide
  Target: ATXN2; (-) strand; PAM type: YTN; PAM sequence: TTA
gaccatcctgttactcaatt

SEQ ID NO: 62973 - DNA, 20 bp, Artificial Sequence
  Description of Artificial Sequence: Synthetic oligonucleotide
  Target: ATXN2; (-) strand; PAM type: YTN; PAM sequence: CTT
agaccatcctgttactcaat

SEQ ID NO: 62974 - DNA, 20 bp, Artificial Sequence
  Description of Artificial Sequence: Synthetic oligonucleotide
  Target: ATXN2; (-) strand; PAM type: YTN; PAM sequence: CTG
gaacttagaccatcctgtta

SEQ ID NO: 62975 - DNA, 20 bp, Artificial Sequence
  Description of Artificial Sequence: Synthetic oligonucleotide
  Target: ATXN2; (-) strand; PAM type: YTN; PAM sequence: CTG
agtgagtaaacctggaactt

SEQ ID NO: 62976 - DNA, 20 bp, Artificial Sequence
  Description of Artificial Sequence: Synthetic oligonucleotide
  Target: ATXN2; (-) strand; PAM type: YTN; PAM sequence: TTC
cagcccagcatgtaaacaag

SEQ ID NO: 62977 - DNA, 20 bp, Artificial Sequence
  Description of Artificial Sequence: Synthetic oligonucleotide
  Target: ATXN2; (-) strand; PAM type: YTN; PAM sequence: CTT
ccagcccagcatgtaaacaa

SEQ ID NO: 62978 - DNA, 20 bp, Artificial Sequence
  Description of Artificial Sequence: Synthetic oligonucleotide
  Target: ATXN2; (-) strand; PAM type: YTN; PAM sequence: TTC
agacttccagcccagcatgt

SEQ ID NO: 62979 - DNA, 20 bp, Artificial Sequence
  Description of Artificial Sequence: Synthetic oligonucleotide
  Target: ATXN2; (-) strand; PAM type: YTN; PAM sequence: TTC
ccaaggggttcagacttcca

SEQ ID NO: 62980 - DNA, 20 bp, Artificial Sequence
  Description of Artificial Sequence: Synthetic oligonucleotide
  Target: ATXN2; (-) strand; PAM type: YTN; PAM sequence: CTT
cccaaggggttcagacttcc

SEQ ID NO: 62981 - DNA, 20 bp, Artificial Sequence
  Description of Artificial Sequence: Synthetic oligonucleotide
  Target: ATXN2; (-) strand; PAM type: YTN; PAM sequence: CTG
aggtcacttcccaaggggtt

SEQ ID NO: 62982 - DNA, 20 bp, Artificial Sequence
  Description of Artificial Sequence: Synthetic oligonucleotide
  Target: ATXN2; (-) strand; PAM type: YTN; PAM sequence: TTA
gtaacacggagcacaagagg

SEQ ID NO: 62983 - DNA, 20 bp, Artificial Sequence
  Description of Artificial Sequence: Synthetic oligonucleotide
  Target: ATXN2; (-) strand; PAM type: YTN; PAM sequence: CTT
agtaacacggagcacaagag

SEQ ID NO: 62984 - DNA, 20 bp, Artificial Sequence
  Description of Artificial Sequence: Synthetic oligonucleotide
  Target: ATXN2; (-) strand; PAM type: YTN; PAM sequence: TTC
aatacttagtaacacggagc

SEQ ID NO: 62985 - DNA, 20 bp, Artificial Sequence
  Description of Artificial Sequence: Synthetic oligonucleotide
  Target: ATXN2; (-) strand; PAM type: YTN; PAM sequence: CTT
caatacttagtaacacggag

SEQ ID NO: 62986 - DNA, 20 bp, Artificial Sequence
  Description of Artificial Sequence: Synthetic oligonucleotide
  Target: ATXN2; (-) strand; PAM type: YTN; PAM sequence: TTC
cccttcaatacttagtaaca

SEQ ID NO: 62987 - DNA, 20 bp, Artificial Sequence
  Description of Artificial Sequence: Synthetic oligonucleotide
  Target: ATXN2; (-) strand; PAM type: YTN; PAM sequence: TTT
ccccttcaatacttagtaac

SEQ ID NO: 62988 - DNA, 20 bp, Artificial Sequence
  Description of Artificial Sequence: Synthetic oligonucleotide
  Target: ATXN2; (-) strand; PAM type: YTN; PAM sequence: CTG
taccagtggcagcagcaagc

SEQ ID NO: 62989 - DNA, 20 bp, Artificial Sequence
  Description of Artificial Sequence: Synthetic oligonucleotide
  Target: ATXN2; (-) strand; PAM type: YTN; PAM sequence: TTG
aaaatagcagcagcaactgt

SEQ ID NO: 62990 - DNA, 20 bp, Artificial Sequence
  Description of Artificial Sequence: Synthetic oligonucleotide
  Target: ATXN2; (-) strand; PAM type: YTN; PAM sequence: TTC
attgaaaatagcagcagcaa

SEQ ID NO: 62991 - DNA, 20 bp, Artificial Sequence
  Description of Artificial Sequence: Synthetic oligonucleotide
  Target: ATXN2; (-) strand; PAM type: YTN; PAM sequence: TTT
cattgaaaatagcagcagca

SEQ ID NO: 62992 - DNA, 20 bp, Artificial Sequence
  Description of Artificial Sequence: Synthetic oligonucleotide
  Target: ATXN2; (-) strand; PAM type: YTN; PAM sequence: CTT
tcattgaaaatagcagcagc

SEQ ID NO: 62993 - DNA, 20 bp, Artificial Sequence
  Description of Artificial Sequence: Synthetic oligonucleotide
  Target: ATXN2; (-) strand; PAM type: YTN; PAM sequence: TTC
tttcattgaaaatagcagca

SEQ ID NO: 62994 - DNA, 20 bp, Artificial Sequence
  Description of Artificial Sequence: Synthetic oligonucleotide
  Target: ATXN2; (-) strand; PAM type: YTN; PAM sequence: CTA
aggattctttcattgaaaat

SEQ ID NO: 62995 - DNA, 20 bp, Artificial Sequence
  Description of Artificial Sequence: Synthetic oligonucleotide
  Target: ATXN2; (-) strand; PAM type: YTN; PAM sequence: TTG
aaccaagtgctaaggattct

SEQ ID NO: 62996 - DNA, 20 bp, Artificial Sequence
  Description of Artificial Sequence: Synthetic oligonucleotide
  Target: ATXN2; (-) strand; PAM type: YTN; PAM sequence: TTG
atcaaagacaaaattgaacc

SEQ ID NO: 62997 - DNA, 20 bp, Artificial Sequence
  Description of Artificial Sequence: Synthetic oligonucleotide
  Target: ATXN2; (-) strand; PAM type: YTN; PAM sequence: TTT
gatcaaagacaaaattgaac

SEQ ID NO: 62998 - DNA, 20 bp, Artificial Sequence
  Description of Artificial Sequence: Synthetic oligonucleotide
  Target: ATXN2; (-) strand; PAM type: YTN; PAM sequence: CTA
aacaaaaatagagagggaga

SEQ ID NO: 62999 - DNA, 20 bp, Artificial Sequence
  Description of Artificial Sequence: Synthetic oligonucleotide
  Target: ATXN2; (-) strand; PAM type: YTN; PAM sequence: CTA
ctaaacaaaaatagagaggg

SEQ ID NO: 63000 - DNA, 20 bp, Artificial Sequence
  Description of Artificial Sequence: Synthetic oligonucleotide
  Target: ATXN2; (-) strand; PAM type: YTN; PAM sequence: CTA
tggatcaactactaaacaaa

SEQ ID NO: 63001 - DNA, 20 bp, Artificial Sequence
  Description of Artificial Sequence: Synthetic oligonucleotide
  Target: ATXN2; (-) strand; PAM type: YTN; PAM sequence: CTG
aatctatggatcaactacta

SEQ ID NO: 63002 - DNA, 20 bp, Artificial Sequence
  Description of Artificial Sequence: Synthetic oligonucleotide
  Target: ATXN2; (-) strand; PAM type: YTN; PAM sequence: TTC
tgaatctatggatcaactac

SEQ ID NO: 63003 - DNA, 20 bp, Artificial Sequence
  Description of Artificial Sequence: Synthetic oligonucleotide
  Target: ATXN2; (-) strand; PAM type: YTN; PAM sequence: CTT
ctgaatctatggatcaacta

SEQ ID NO: 63004 - DNA, 20 bp, Artificial Sequence
  Description of Artificial Sequence: Synthetic oligonucleotide
  Target: ATXN2; (-) strand; PAM type: YTN; PAM sequence: CTA
cttctgaatctatggatcaa

SEQ ID NO: 63005 - DNA, 20 bp, Artificial Sequence
  Description of Artificial Sequence: Synthetic oligonucleotide
  Target: ATXN2; (-) strand; PAM type: YTN; PAM sequence: TTC
tacttctgaatctatggatc

SEQ ID NO: 63006 - DNA, 20 bp, Artificial Sequence
  Description of Artificial Sequence: Synthetic oligonucleotide
  Target: ATXN2; (-) strand; PAM type: YTN; PAM sequence: TTA
cagccaagttctacttctga

SEQ ID NO: 63007 - DNA, 20 bp, Artificial Sequence
  Description of Artificial Sequence: Synthetic oligonucleotide
  Target: ATXN2; (-) strand; PAM type: YTN; PAM sequence: TTA
gttacagccaagttctactt

SEQ ID NO: 63008 - DNA, 20 bp, Artificial Sequence
  Description of Artificial Sequence: Synthetic oligonucleotide
  Target: ATXN2; (-) strand; PAM type: YTN; PAM sequence: TTT
agttacagccaagttctact

SEQ ID NO: 63009 - DNA, 20 bp, Artificial Sequence
  Description of Artificial Sequence: Synthetic oligonucleotide
  Target: ATXN2; (-) strand; PAM type: YTN; PAM sequence: TTA
tttagttacagccaagttct

SEQ ID NO: 63010 - DNA, 20 bp, Artificial Sequence
  Description of Artificial Sequence: Synthetic oligonucleotide
  Target: ATXN2; (-) strand; PAM type: YTN; PAM sequence: TTT
atttagttacagccaagttc

SEQ ID NO: 63011 - DNA, 20 bp, Artificial Sequence
  Description of Artificial Sequence: Synthetic oligonucleotide
  Target: ATXN2; (-) strand; PAM type: YTN; PAM sequence: CTT
tatttagttacagccaagtt

SEQ ID NO: 63012 - DNA, 20 bp, Artificial Sequence
  Description of Artificial Sequence: Synthetic oligonucleotide
  Target: ATXN2; (-) strand; PAM type: YTN; PAM sequence: TTC
ctttatttagttacagccaa

SEQ ID NO: 63013 - DNA, 20 bp, Artificial Sequence
  Description of Artificial Sequence: Synthetic oligonucleotide
  Target: ATXN2; (-) strand; PAM type: YTN; PAM sequence: TTT
cctttatttagttacagcca

SEQ ID NO: 63014 - DNA, 20 bp, Artificial Sequence
  Description of Artificial Sequence: Synthetic oligonucleotide
  Target: ATXN2; (-) strand; PAM type: YTN; PAM sequence: TTG
tttcctttatttagttacag

SEQ ID NO: 63015 - DNA, 20 bp, Artificial Sequence
  Description of Artificial Sequence: Synthetic oligonucleotide
  Target: ATXN2; (-) strand; PAM type: YTN; PAM sequence: TTA
agtataattgtttcctttat

SEQ ID NO: 63016 - DNA, 20 bp, Artificial Sequence
  Description of Artificial Sequence: Synthetic oligonucleotide
  Target: ATXN2; (-) strand; PAM type: YTN; PAM sequence: TTT
aagtataattgtttccttta

SEQ ID NO: 63017 - DNA, 20 bp, Artificial Sequence
  Description of Artificial Sequence: Synthetic oligonucleotide
  Target: ATXN2; (-) strand; PAM type: YTN; PAM sequence: TTA
agatatttaagtataattgt

SEQ ID NO: 63018 - DNA, 20 bp, Artificial Sequence
  Description of Artificial Sequence: Synthetic oligonucleotide
  Target: ATXN2; (-) strand; PAM type: YTN; PAM sequence: TTT
aagatatttaagtataattg

SEQ ID NO: 63019 - DNA, 20 bp, Artificial Sequence
  Description of Artificial Sequence: Synthetic oligonucleotide
  Target: ATXN2; (-) strand; PAM type: YTN; PAM sequence: TTA
tttaagatatttaagtataa

SEQ ID NO: 63020 - DNA, 20 bp, Artificial Sequence
  Description of Artificial Sequence: Synthetic oligonucleotide
  Target: ATXN2; (-) strand; PAM type: YTN; PAM sequence: CTA
aagttatttaagatatttaa

SEQ ID NO: 63021 - DNA, 20 bp, Artificial Sequence
  Description of Artificial Sequence: Synthetic oligonucleotide
  Target: ATXN2; (-) strand; PAM type: YTN; PAM sequence: TTA
ctaaagttatttaagatatt

SEQ ID NO: 63022 - DNA, 20 bp, Artificial Sequence
  Description of Artificial Sequence: Synthetic oligonucleotide
  Target: ATXN2; (-) strand; PAM type: YTN; PAM sequence: CTC
atggcaaaaatgtattacta

SEQ ID NO: 63023 - DNA, 20 bp, Artificial Sequence
  Description of Artificial Sequence: Synthetic oligonucleotide
  Target: ATXN2; (-) strand; PAM type: YTN; PAM sequence: TTG
tgctcatggcaaaaatgtat

SEQ ID NO: 63024 - DNA, 20 bp, Artificial Sequence
  Description of Artificial Sequence: Synthetic oligonucleotide
  Target: ATXN2; (-) strand; PAM type: YTN; PAM sequence: CTT
gtgctcatggcaaaaatgta

SEQ ID NO: 63025 - DNA, 20 bp, Artificial Sequence
  Description of Artificial Sequence: Synthetic oligonucleotide
  Target: ATXN2; (-) strand; PAM type: YTN; PAM sequence: TTA
cgtagcttgtgctcatggca

SEQ ID NO: 63026 - DNA, 20 bp, Artificial Sequence
  Description of Artificial Sequence: Synthetic oligonucleotide
  Target: ATXN2; (-) strand; PAM type: YTN; PAM sequence: TTA
atattacgtagcttgtgctc

SEQ ID NO: 63027 - DNA, 20 bp, Artificial Sequence
  Description of Artificial Sequence: Synthetic oligonucleotide
  Target: ATXN2; (-) strand; PAM type: YTN; PAM sequence: TTC
atgcgtatagttaatattac

SEQ ID NO: 63028 - DNA, 20 bp, Artificial Sequence
  Description of Artificial Sequence: Synthetic oligonucleotide
  Target: ATXN2; (-) strand; PAM type: YTN; PAM sequence: TTT
catgcgtatagttaatatta

SEQ ID NO: 63029 - DNA, 20 bp, Artificial Sequence
  Description of Artificial Sequence: Synthetic oligonucleotide
  Target: ATXN2; (-) strand; PAM type: YTN; PAM sequence: TTC
agaacatttcatgcgtatag

SEQ ID NO: 63030 - DNA, 20 bp, Artificial Sequence
  Description of Artificial Sequence: Synthetic oligonucleotide
  Target: ATXN2; (-) strand; PAM type: YTN; PAM sequence: TTA
ttcagaacatttcatgcgta

SEQ ID NO: 63031 - DNA, 20 bp, Artificial Sequence
  Description of Artificial Sequence: Synthetic oligonucleotide
  Target: ATXN2; (-) strand; PAM type: YTN; PAM sequence: CTT
attcagaacatttcatgcgt

SEQ ID NO: 63032 - DNA, 20 bp, Artificial Sequence
  Description of Artificial Sequence: Synthetic oligonucleotide
  Target: ATXN2; (-) strand; PAM type: YTN; PAM sequence: TTA
aagtatgaaaaaagccttat

SEQ ID NO: 63033 - DNA, 20 bp, Artificial Sequence
  Description of Artificial Sequence: Synthetic oligonucleotide
  Target: ATXN2; (-) strand; PAM type: YTN; PAM sequence: CTT
aaagtatgaaaaaagcctta

SEQ ID NO: 63034 - DNA, 20 bp, Artificial Sequence
  Description of Artificial Sequence: Synthetic oligonucleotide
  Target: ATXN2; (-) strand; PAM type: YTN; PAM sequence: CTC
ttaaagtatgaaaaaagcct

SEQ ID NO: 63035 - DNA, 20 bp, Artificial Sequence
  Description of Artificial Sequence: Synthetic oligonucleotide
  Target: ATXN2; (-) strand; PAM type: YTN; PAM sequence: TTA
ctcttaaagtatgaaaaaag

SEQ ID NO: 63036 - DNA, 20 bp, Artificial Sequence
  Description of Artificial Sequence: Synthetic oligonucleotide
  Target: ATXN2; (-) strand; PAM type: YTN; PAM sequence: TTA
tagtaaaagcattactctta

SEQ ID NO: 63037 - DNA, 20 bp, Artificial Sequence
  Description of Artificial Sequence: Synthetic oligonucleotide
  Target: ATXN2; (-) strand; PAM type: YTN; PAM sequence: TTT
atagtaaaagcattactctt

SEQ ID NO: 63038 - DNA, 20 bp, Artificial Sequence
  Description of Artificial Sequence: Synthetic oligonucleotide
  Target: ATXN2; (-) strand; PAM type: YTN; PAM sequence: TTA
gtttatagtaaaagcattac

SEQ ID NO: 63039 - DNA, 20 bp, Artificial Sequence
  Description of Artificial Sequence: Synthetic oligonucleotide
  Target: ATXN2; (-) strand; PAM type: YTN; PAM sequence: TTG
ttagtttatagtaaaagcat

SEQ ID NO: 63040 - DNA, 20 bp, Artificial Sequence
  Description of Artificial Sequence: Synthetic oligonucleotide
  Target: ATXN2; (-) strand; PAM type: YTN; PAM sequence: TTA
ttgttagtttatagtaaaag

SEQ ID NO: 63041 - DNA, 20 bp, Artificial Sequence
  Description of Artificial Sequence: Synthetic oligonucleotide
  Target: ATXN2; (-) strand; PAM type: YTN; PAM sequence: CTG
ttattgttagtttatagtaa

SEQ ID NO: 63042 - DNA, 20 bp, Artificial Sequence
  Description of Artificial Sequence: Synthetic oligonucleotide
  Target: ATXN2; (-) strand; PAM type: YTN; PAM sequence: CTC
tgttattgttagtttatagt

SEQ ID NO: 63043 - DNA, 20 bp, Artificial Sequence
  Description of Artificial Sequence: Synthetic oligonucleotide
  Target: ATXN2; (-) strand; PAM type: YTN; PAM sequence: CTA
tataggtactctgttattgt

SEQ ID NO: 63044 - DNA, 20 bp, Artificial Sequence
  Description of Artificial Sequence: Synthetic oligonucleotide
  Target: ATXN2; (-) strand; PAM type: YTN; PAM sequence: TTG
tgctatataggtactctgtt

SEQ ID NO: 63045 - DNA, 20 bp, Artificial Sequence
  Description of Artificial Sequence: Synthetic oligonucleotide
  Target: ATXN2; (-) strand; PAM type: YTN; PAM sequence: CTG
tggttgtgctatataggtac

SEQ ID NO: 63046 - DNA, 20 bp, Artificial Sequence
  Description of Artificial Sequence: Synthetic oligonucleotide
  Target: ATXN2; (-) strand; PAM type: YTN; PAM sequence: TTG
gtgactgtggttgtgctata

SEQ ID NO: 63047 - DNA, 20 bp, Artificial Sequence
  Description of Artificial Sequence: Synthetic oligonucleotide
  Target: ATXN2; (-) strand; PAM type: YTN; PAM sequence: TTT
ggtgactgtggttgtgctat

SEQ ID NO: 63048 - DNA, 20 bp, Artificial Sequence
  Description of Artificial Sequence: Synthetic oligonucleotide
  Target: ATXN2; (-) strand; PAM type: YTN; PAM sequence: CTT
tggtgactgtggttgtgcta

SEQ ID NO: 63049 - DNA, 20 bp, Artificial Sequence
  Description of Artificial Sequence: Synthetic oligonucleotide
  Target: ATXN2; (-) strand; PAM type: YTN; PAM sequence: TTG
agtgctttggtgactgtggt

SEQ ID NO: 63050 - DNA, 20 bp, Artificial Sequence
  Description of Artificial Sequence: Synthetic oligonucleotide
  Target: ATXN2; (-) strand; PAM type: YTN; PAM sequence: TTT
gagtgctttggtgactgtgg

SEQ ID NO: 63051 - DNA, 20 bp, Artificial Sequence
  Description of Artificial Sequence: Synthetic oligonucleotide
  Target: ATXN2; (-) strand; PAM type: YTN; PAM sequence: CTA
ggacatttgagtgctttggt

SEQ ID NO: 63052 - DNA, 20 bp, Artificial Sequence
  Description of Artificial Sequence: Synthetic oligonucleotide
  Target: ATXN2; (-) strand; PAM type: YTN; PAM sequence: TTA
gaggctaggacatttgagtg

SEQ ID NO: 63053 - DNA, 20 bp, Artificial Sequence
  Description of Artificial Sequence: Synthetic oligonucleotide
  Target: ATXN2; (-) strand; PAM type: YTN; PAM sequence: TTT
agaggctaggacatttgagt

SEQ ID NO: 63054 - DNA, 20 bp, Artificial Sequence
  Description of Artificial Sequence: Synthetic oligonucleotide
  Target: ATXN2; (-) strand; PAM type: YTN; PAM sequence: CTT
tagaggctaggacatttgag

SEQ ID NO: 63055 - DNA, 20 bp, Artificial Sequence
  Description of Artificial Sequence: Synthetic oligonucleotide
  Target: ATXN2; (-) strand; PAM type: YTN; PAM sequence: TTG
aactttagaggctaggacat

SEQ ID NO: 63056 - DNA, 20 bp, Artificial Sequence
  Description of Artificial Sequence: Synthetic oligonucleotide
  Target: ATXN2; (-) strand; PAM type: YTN; PAM sequence: CTC
agtaaatattgaactttaga

SEQ ID NO: 63057 - DNA, 20 bp, Artificial Sequence
  Description of Artificial Sequence: Synthetic oligonucleotide
  Target: ATXN2; (-) strand; PAM type: YTN; PAM sequence: CTG
acatgtggtaagcactcagt

SEQ ID NO: 63058 - DNA, 20 bp, Artificial Sequence
  Description of Artificial Sequence: Synthetic oligonucleotide
  Target: ATXN2; (-) strand; PAM type: YTN; PAM sequence: TTC
tgacatgtggtaagcactca

SEQ ID NO: 63059 - DNA, 20 bp, Artificial Sequence
  Description of Artificial Sequence: Synthetic oligonucleotide
  Target: ATXN2; (-) strand; PAM type: YTN; PAM sequence: TTT
ctgacatgtggtaagcactc

SEQ ID NO: 63060 - DNA, 20 bp, Artificial Sequence
  Description of Artificial Sequence: Synthetic oligonucleotide
  Target: ATXN2; (-) strand; PAM type: YTN; PAM sequence: CTC
acccagcaggcacaatttct

SEQ ID NO: 63061 - DNA, 20 bp, Artificial Sequence
  Description of Artificial Sequence: Synthetic oligonucleotide
  Target: ATXN2; (-) strand; PAM type: YTN; PAM sequence: TTC
tcacccagcaggcacaattt

SEQ ID NO: 63062 - DNA, 20 bp, Artificial Sequence
  Description of Artificial Sequence: Synthetic oligonucleotide
  Target: ATXN2; (-) strand; PAM type: YTN; PAM sequence: TTT
ctcacccagcaggcacaatt

SEQ ID NO: 63063 - DNA, 20 bp, Artificial Sequence
  Description of Artificial Sequence: Synthetic oligonucleotide
  Target: ATXN2; (-) strand; PAM type: YTN; PAM sequence: TTT
tctcacccagcaggcacaat

SEQ ID NO: 63064 - DNA, 20 bp, Artificial Sequence
  Description of Artificial Sequence: Synthetic oligonucleotide
  Target: ATXN2; (-) strand; PAM type: YTN; PAM sequence: TTT
ttctcacccagcaggcacaa

SEQ ID NO: 63065 - DNA, 20 bp, Artificial Sequence
  Description of Artificial Sequence: Synthetic oligonucleotide
  Target: ATXN2; (-) strand; PAM type: YTN; PAM sequence: TTC
atatttttctcacccagcag

SEQ ID NO: 63066 - DNA, 20 bp, Artificial Sequence
  Description of Artificial Sequence: Synthetic oligonucleotide
  Target: ATXN2; (-) strand; PAM type: YTN; PAM sequence: TTT
catatttttctcacccagca

SEQ ID NO: 63067 - DNA, 20 bp, Artificial Sequence
  Description of Artificial Sequence: Synthetic oligonucleotide
  Target: ATXN2; (-) strand; PAM type: YTN; PAM sequence: CTA
tttcatatttttctcaccca

SEQ ID NO: 63068 - DNA, 20 bp, Artificial Sequence
  Description of Artificial Sequence: Synthetic oligonucleotide
  Target: ATXN2; (-) strand; PAM type: YTN; PAM sequence: TTA
aatgacaagtataagaggat

SEQ ID NO: 63069 - DNA, 20 bp, Artificial Sequence
  Description of Artificial Sequence: Synthetic oligonucleotide
  Target: ATXN2; (-) strand; PAM type: YTN; PAM sequence: TTT
aaatgacaagtataagagga

SEQ ID NO: 63070 - DNA, 20 bp, Artificial Sequence
  Description of Artificial Sequence: Synthetic oligonucleotide
  Target: ATXN2; (-) strand; PAM type: YTN; PAM sequence: TTA
tttaaatgacaagtataaga

SEQ ID NO: 63071 - DNA, 20 bp, Artificial Sequence
  Description of Artificial Sequence: Synthetic oligonucleotide
  Target: ATXN2; (-) strand; PAM type: YTN; PAM sequence: CTT
atttaaatgacaagtataag

SEQ ID NO: 63072 - DNA, 20 bp, Artificial Sequence
  Description of Artificial Sequence: Synthetic oligonucleotide
  Target: ATXN2; (-) strand; PAM type: YTN; PAM sequence: CTG
atcttatttaaatgacaagt

SEQ ID NO: 63073 - DNA, 20 bp, Artificial Sequence
  Description of Artificial Sequence: Synthetic oligonucleotide
  Target: ATXN2; (-) strand; PAM type: YTN; PAM sequence: TTG
tgaagtgtctgatcttattt

SEQ ID NO: 63074 - DNA, 20 bp, Artificial Sequence
  Description of Artificial Sequence: Synthetic oligonucleotide
  Target: ATXN2; (-) strand; PAM type: YTN; PAM sequence: TTA
ttgtgaagtgtctgatctta

SEQ ID NO: 63075 - DNA, 20 bp, Artificial Sequence
  Description of Artificial Sequence: Synthetic oligonucleotide
  Target: ATXN2; (-) strand; PAM type: YTN; PAM sequence: TTT
attgtgaagtgtctgatctt

SEQ ID NO: 63076 - DNA, 20 bp, Artificial Sequence
  Description of Artificial Sequence: Synthetic oligonucleotide
  Target: ATXN2; (-) strand; PAM type: YTN; PAM sequence: TTT
tattgtgaagtgtctgatct

SEQ ID NO: 63077 - DNA, 20 bp, Artificial Sequence
  Description of Artificial Sequence: Synthetic oligonucleotide
  Target: ATXN2; (-) strand; PAM type: YTN; PAM sequence: CTC
attttattgtgaagtgtctg

SEQ ID NO: 63078 - DNA, 20 bp, Artificial Sequence
  Description of Artificial Sequence: Synthetic oligonucleotide
  Target: ATXN2; (-) strand; PAM type: YTN; PAM sequence: TTA
ctcattttattgtgaagtgt

SEQ ID NO: 63079 - DNA, 20 bp, Artificial Sequence
  Description of Artificial Sequence: Synthetic oligonucleotide
  Target: ATXN2; (-) strand; PAM type: YTN; PAM sequence: TTT
actcattttattgtgaagtg

SEQ ID NO: 63080 - DNA, 20 bp, Artificial Sequence
  Description of Artificial Sequence: Synthetic oligonucleotide
  Target: ATXN2; (-) strand; PAM type: YTN; PAM sequence: TTA
gcatttactcattttattgt

SEQ ID NO: 63081 - DNA, 20 bp, Artificial Sequence
  Description of Artificial Sequence: Synthetic oligonucleotide
  Target: ATXN2; (-) strand; PAM type: YTN; PAM sequence: CTT
agcatttactcattttattg

SEQ ID NO: 63082 - DNA, 20 bp, Artificial Sequence
  Description of Artificial Sequence: Synthetic oligonucleotide
  Target: ATXN2; (-) strand; PAM type: YTN; PAM sequence: CTC
ttagcatttactcattttat

SEQ ID NO: 63083 - DNA, 20 bp, Artificial Sequence
  Description of Artificial Sequence: Synthetic oligonucleotide
  Target: ATXN2; (-) strand; PAM type: YTN; PAM sequence: CTC
tcttagcatttactcatttt

SEQ ID NO: 63084 - DNA, 20 bp, Artificial Sequence
  Description of Artificial Sequence: Synthetic oligonucleotide
  Target: ATXN2; (-) strand; PAM type: YTN; PAM sequence: CTA
tagactctcttagcatttac

SEQ ID NO: 63085 - DNA, 20 bp, Artificial Sequence
  Description of Artificial Sequence: Synthetic oligonucleotide
  Target: ATXN2; (-) strand; PAM type: YTN; PAM sequence: TTC
tatagactctcttagcattt

SEQ ID NO: 63086 - DNA, 20 bp, Artificial Sequence
  Description of Artificial Sequence: Synthetic oligonucleotide
  Target: ATXN2; (-) strand; PAM type: YTN; PAM sequence: TTT
ctatagactctcttagcatt

SEQ ID NO: 63087 - DNA, 20 bp, Artificial Sequence
  Description of Artificial Sequence: Synthetic oligonucleotide
  Target: ATXN2; (-) strand; PAM type: YTN; PAM sequence: TTT
tctatagactctcttagcat

SEQ ID NO: 63088 - DNA, 20 bp, Artificial Sequence
  Description of Artificial Sequence: Synthetic oligonucleotide
  Target: ATXN2; (-) strand; PAM type: YTN; PAM sequence: TTT
ttctatagactctcttagca

SEQ ID NO: 63089 - DNA, 20 bp, Artificial Sequence
  Description of Artificial Sequence: Synthetic oligonucleotide
  Target: ATXN2; (-) strand; PAM type: YTN; PAM sequence: CTT
tttctatagactctcttagc

SEQ ID NO: 63090 - DNA, 20 bp, Artificial Sequence
  Description of Artificial Sequence: Synthetic oligonucleotide
  Target: ATXN2; (-) strand; PAM type: YTN; PAM sequence: TTG
ctttttctatagactctctt

SEQ ID NO: 63091 - DNA, 20 bp, Artificial Sequence
  Description of Artificial Sequence: Synthetic oligonucleotide
  Target: ATXN2; (-) strand; PAM type: YTN; PAM sequence: TTA
taggttgctttttctataga

SEQ ID NO: 63092 - DNA, 20 bp, Artificial Sequence
  Description of Artificial Sequence: Synthetic oligonucleotide
  Target: ATXN2; (-) strand; PAM type: YTN; PAM sequence: TTT
ataggttgctttttctatag

SEQ ID NO: 63093 - DNA, 20 bp, Artificial Sequence
  Description of Artificial Sequence: Synthetic oligonucleotide
  Target: ATXN2; (-) strand; PAM type: YTN; PAM sequence: TTT
tataggttgctttttctata

SEQ ID NO: 63094 - DNA, 20 bp, Artificial Sequence
  Description of Artificial Sequence: Synthetic oligonucleotide
  Target: ATXN2; (-) strand; PAM type: YTN; PAM sequence: TTT
ttataggttgctttttctat

SEQ ID NO: 63095 - DNA, 20 bp, Artificial Sequence
  Description of Artificial Sequence: Synthetic oligonucleotide
  Target: ATXN2; (-) strand; PAM type: YTN; PAM sequence: TTT
tttataggttgctttttcta

SEQ ID NO: 63096 - DNA, 20 bp, Artificial Sequence
  Description of Artificial Sequence: Synthetic oligonucleotide
  Target: ATXN2; (-) strand; PAM type: YTN; PAM sequence: CTT
ttttataggttgctttttct

SEQ ID NO: 63097 - DNA, 20 bp, Artificial Sequence
  Description of Artificial Sequence: Synthetic oligonucleotide
  Target: ATXN2; (-) strand; PAM type: YTN; PAM sequence: TTC
ttttttataggttgcttttt

SEQ ID NO: 63098 - DNA, 20 bp, Artificial Sequence
  Description of Artificial Sequence: Synthetic oligonucleotide
  Target: ATXN2; (-) strand; PAM type: YTN; PAM sequence: TTT
cttttttataggttgctttt

SEQ ID NO: 63099 - DNA, 20 bp, Artificial Sequence
  Description of Artificial Sequence: Synthetic oligonucleotide
  Target: ATXN2; (-) strand; PAM type: YTN; PAM sequence: CTT
tcttttttataggttgcttt

SEQ ID NO: 63100 - DNA, 20 bp, Artificial Sequence
  Description of Artificial Sequence: Synthetic oligonucleotide
  Target: ATXN2; (-) strand; PAM type: YTN; PAM sequence: CTG
agaaacctttcttttttata

SEQ ID NO: 63101 - DNA, 20 bp, Artificial Sequence
  Description of Artificial Sequence: Synthetic oligonucleotide
  Target: ATXN2; (-) strand; PAM type: YTN; PAM sequence: TTA
ctgagaaacctttctttttt

SEQ ID NO: 63102 - DNA, 20 bp, Artificial Sequence
  Description of Artificial Sequence: Synthetic oligonucleotide
  Target: ATXN2; (-) strand; PAM type: YTN; PAM sequence: TTT
actgagaaacctttcttttt

SEQ ID NO: 63103 - DNA, 20 bp, Artificial Sequence
  Description of Artificial Sequence: Synthetic oligonucleotide
  Target: ATXN2; (-) strand; PAM type: YTN; PAM sequence: CTT
tactgagaaacctttctttt

SEQ ID NO: 63104 - DNA, 20 bp, Artificial Sequence
  Description of Artificial Sequence: Synthetic oligonucleotide
  Target: ATXN2; (-) strand; PAM type: YTN; PAM sequence: CTG
acactttactgagaaacctt

SEQ ID NO: 63105 - DNA, 20 bp, Artificial Sequence
  Description of Artificial Sequence: Synthetic oligonucleotide
  Target: ATXN2; (-) strand; PAM type: YTN; PAM sequence: CTA
gctgacactttactgagaaa

SEQ ID NO: 63106 - DNA, 20 bp, Artificial Sequence
  Description of Artificial Sequence: Synthetic oligonucleotide
  Target: ATXN2; (-) strand; PAM type: YTN; PAM sequence: TTA
gactagctgacactttactg

SEQ ID NO: 63107 - DNA, 20 bp, Artificial Sequence
  Description of Artificial Sequence: Synthetic oligonucleotide
  Target: ATXN2; (-) strand; PAM type: YTN; PAM sequence: CTT
agactagctgacactttact

SEQ ID NO: 63108 - DNA, 20 bp, Artificial Sequence
  Description of Artificial Sequence: Synthetic oligonucleotide
  Target: ATXN2; (-) strand; PAM type: YTN; PAM sequence: TTC
acaccttagactagctgaca

SEQ ID NO: 63109 - DNA, 20 bp, Artificial Sequence
  Description of Artificial Sequence: Synthetic oligonucleotide
  Target: ATXN2; (-) strand; PAM type: YTN; PAM sequence: TTT
cacaccttagactagctgac

SEQ ID NO: 63110 - DNA, 20 bp, Artificial Sequence
  Description of Artificial Sequence: Synthetic oligonucleotide
  Target: ATXN2; (-) strand; PAM type: YTN; PAM sequence: CTT
tcacaccttagactagctga

SEQ ID NO: 63111 - DNA, 20 bp, Artificial Sequence
  Description of Artificial Sequence: Synthetic oligonucleotide
  Target: ATXN2; (-) strand; PAM type: YTN; PAM sequence: TTC
tttcacaccttagactagct

SEQ ID NO: 63112 - DNA, 20 bp, Artificial Sequence
  Description of Artificial Sequence: Synthetic oligonucleotide
  Target: ATXN2; (-) strand; PAM type: YTN; PAM sequence: CTT
ctttcacaccttagactagc

SEQ ID NO: 63113 - DNA, 20 bp, Artificial Sequence
  Description of Artificial Sequence: Synthetic oligonucleotide
  Target: ATXN2; (-) strand; PAM type: YTN; PAM sequence: CTA
aacttctttcacaccttaga

SEQ ID NO: 63114 - DNA, 20 bp, Artificial Sequence
  Description of Artificial Sequence: Synthetic oligonucleotide
  Target: ATXN2; (-) strand; PAM type: YTN; PAM sequence: TTC
ctaaacttctttcacacctt

SEQ ID NO: 63115 - DNA, 20 bp, Artificial Sequence
  Description of Artificial Sequence: Synthetic oligonucleotide
  Target: ATXN2; (-) strand; PAM type: YTN; PAM sequence: TTT
cctaaacttctttcacacct

SEQ ID NO: 63116 - DNA, 20 bp, Artificial Sequence
  Description of Artificial Sequence: Synthetic oligonucleotide
  Target: ATXN2; (-) strand; PAM type: YTN; PAM sequence: CTT
tcctaaacttctttcacacc

SEQ ID NO: 63117 - DNA, 20 bp, Artificial Sequence
  Description of Artificial Sequence: Synthetic oligonucleotide
  Target: ATXN2; (-) strand; PAM type: YTN; PAM sequence: CTC
catcccaacacctttcctaa

SEQ ID NO: 63118 - DNA, 20 bp, Artificial Sequence
  Description of Artificial Sequence: Synthetic oligonucleotide
  Target: ATXN2; (-) strand; PAM type: YTN; PAM sequence: TTC
tccatcccaacacctttcct

SEQ ID NO: 63119 - DNA, 20 bp, Artificial Sequence
  Description of Artificial Sequence: Synthetic oligonucleotide
  Target: ATXN2; (-) strand; PAM type: YTN; PAM sequence: CTA
ttctccatcccaacaccttt

SEQ ID NO: 63120 - DNA, 20 bp, Artificial Sequence
  Description of Artificial Sequence: Synthetic oligonucleotide
  Target: ATXN2; (-) strand; PAM type: YTN; PAM sequence: TTA
gactattctccatcccaaca

SEQ ID NO: 63121 - DNA, 20 bp, Artificial Sequence
  Description of Artificial Sequence: Synthetic oligonucleotide
  Target: ATXN2; (-) strand; PAM type: YTN; PAM sequence: CTT
agactattctccatcccaac

SEQ ID NO: 63122 - DNA, 20 bp, Artificial Sequence
  Description of Artificial Sequence: Synthetic oligonucleotide
  Target: ATXN2; (-) strand; PAM type: YTN; PAM sequence: TTA
cttagactattctccatccc

SEQ ID NO: 63123 - DNA, 20 bp, Artificial Sequence
  Description of Artificial Sequence: Synthetic oligonucleotide
  Target: ATXN2; (-) strand; PAM type: YTN; PAM sequence: TTT
acttagactattctccatcc

SEQ ID NO: 63124 - DNA, 20 bp, Artificial Sequence
  Description of Artificial Sequence: Synthetic oligonucleotide
  Target: ATXN2; (-) strand; PAM type: YTN; PAM sequence: TTT
tacttagactattctccatc

SEQ ID NO: 63125 - DNA, 20 bp, Artificial Sequence
  Description of Artificial Sequence: Synthetic oligonucleotide
  Target: ATXN2; (-) strand; PAM type: YTN; PAM sequence: CTT
ttacttagactattctccat

SEQ ID NO: 63126 - DNA, 20 bp, Artificial Sequence
  Description of Artificial Sequence: Synthetic oligonucleotide
  Target: ATXN2; (-) strand; PAM type: YTN; PAM sequence: TTC
cttttacttagactattctc

SEQ ID NO: 63127 - DNA, 20 bp, Artificial Sequence
  Description of Artificial Sequence: Synthetic oligonucleotide
  Target: ATXN2; (-) strand; PAM type: YTN; PAM sequence: CTT
ccttttacttagactattct

SEQ ID NO: 63128 - DNA, 20 bp, Artificial Sequence
  Description of Artificial Sequence: Synthetic oligonucleotide
  Target: ATXN2; (-) strand; PAM type: YTN; PAM sequence: CTC
ttccttttacttagactatt

SEQ ID NO: 63129 - DNA, 20 bp, Artificial Sequence
  Description of Artificial Sequence: Synthetic oligonucleotide
  Target: ATXN2; (-) strand; PAM type: YTN; PAM sequence: TTA
aacatactcttccttttact

SEQ ID NO: 63130 - DNA, 20 bp, Artificial Sequence
  Description of Artificial Sequence: Synthetic oligonucleotide
  Target: ATXN2; (-) strand; PAM type: YTN; PAM sequence: TTT
aaacatactcttccttttac

SEQ ID NO: 63131 - DNA, 20 bp, Artificial Sequence
  Description of Artificial Sequence: Synthetic oligonucleotide
  Target: ATXN2; (-) strand; PAM type: YTN; PAM sequence: TTT
taaacatactcttcctttta

SEQ ID NO: 63132 - DNA, 20 bp, Artificial Sequence
  Description of Artificial Sequence: Synthetic oligonucleotide
  Target: ATXN2; (-) strand; PAM type: YTN; PAM sequence: TTT
ttaaacatactcttcctttt

SEQ ID NO: 63133 - DNA, 20 bp, Artificial Sequence
  Description of Artificial Sequence: Synthetic oligonucleotide
  Target: ATXN2; (-) strand; PAM type: YTN; PAM sequence: TTG
gatttttaaacatactcttc

SEQ ID NO: 63134 - DNA, 20 bp, Artificial Sequence
  Description of Artificial Sequence: Synthetic oligonucleotide
  Target: ATXN2; (-) strand; PAM type: YTN; PAM sequence: TTT
ggatttttaaacatactctt

SEQ ID NO: 63135 - DNA, 20 bp, Artificial Sequence
  Description of Artificial Sequence: Synthetic oligonucleotide
  Target: ATXN2; (-) strand; PAM type: YTN; PAM sequence: CTT
tggatttttaaacatactct

SEQ ID NO: 63136 - DNA, 20 bp, Artificial Sequence
  Description of Artificial Sequence: Synthetic oligonucleotide
  Target: ATXN2; (-) strand; PAM type: YTN; PAM sequence: TTC
tttggatttttaaacatact

SEQ ID NO: 63137 - DNA, 20 bp, Artificial Sequence
  Description of Artificial Sequence: Synthetic oligonucleotide
  Target: ATXN2; (-) strand; PAM type: YTN; PAM sequence: TTT
ctttggatttttaaacatac

SEQ ID NO: 63138 - DNA, 20 bp, Artificial Sequence
  Description of Artificial Sequence: Synthetic oligonucleotide
  Target: ATXN2; (-) strand; PAM type: YTN; PAM sequence: TTT
tctttggatttttaaacata

SEQ ID NO: 63139 - DNA, 20 bp, Artificial Sequence
  Description of Artificial Sequence: Synthetic oligonucleotide
  Target: ATXN2; (-) strand; PAM type: YTN; PAM sequence: CTT
ttctttggatttttaaacat

SEQ ID NO: 63140 - DNA, 20 bp, Artificial Sequence
  Description of Artificial Sequence: Synthetic oligonucleotide
  Target: ATXN2; (-) strand; PAM type: YTN; PAM sequence: CTC
ccttttctttggatttttaa

SEQ ID NO: 63141 - DNA, 20 bp, Artificial Sequence
  Description of Artificial Sequence: Synthetic oligonucleotide
  Target: ATXN2; (-) strand; PAM type: YTN; PAM sequence: TTC
tcccttttctttggattttt

SEQ ID NO: 63142 - DNA, 20 bp, Artificial Sequence
  Description of Artificial Sequence: Synthetic oligonucleotide
  Target: ATXN2; (-) strand; PAM type: YTN; PAM sequence: CTT
ctcccttttctttggatttt

SEQ ID NO: 63143 - DNA, 20 bp, Artificial Sequence
  Description of Artificial Sequence: Synthetic oligonucleotide
  Target: ATXN2; (-) strand; PAM type: YTN; PAM sequence: TTA
tgtgatagagccagcttctc

SEQ ID NO: 63144 - DNA, 20 bp, Artificial Sequence
  Description of Artificial Sequence: Synthetic oligonucleotide
  Target: ATXN2; (-) strand; PAM type: YTN; PAM sequence: TTT
atgtgatagagccagcttct

SEQ ID NO: 63145 - DNA, 20 bp, Artificial Sequence
  Description of Artificial Sequence: Synthetic oligonucleotide
  Target: ATXN2; (-) strand; PAM type: YTN; PAM sequence: TTT
tatgtgatagagccagcttc

SEQ ID NO: 63146 - DNA, 20 bp, Artificial Sequence
  Description of Artificial Sequence: Synthetic oligonucleotide
  Target: ATXN2; (-) strand; PAM type: YTN; PAM sequence: TTG
ttttatgtgatagagccagc

SEQ ID NO: 63147 - DNA, 20 bp, Artificial Sequence
  Description of Artificial Sequence: Synthetic oligonucleotide
  Target: ATXN2; (-) strand; PAM type: YTN; PAM sequence: CTA
ttgttttatgtgatagagcc

SEQ ID NO: 63148 - DNA, 20 bp, Artificial Sequence
  Description of Artificial Sequence: Synthetic oligonucleotide
  Target: ATXN2; (-) strand; PAM type: YTN; PAM sequence: TTG
gtgctattgttttatgtgat

SEQ ID NO: 63149 - DNA, 20 bp, Artificial Sequence
  Description of Artificial Sequence: Synthetic oligonucleotide
  Target: ATXN2; (-) strand; PAM type: YTN; PAM sequence: TTA
caggcgtgagccaccgtgcc

SEQ ID NO: 63150 - DNA, 20 bp, Artificial Sequence
  Description of Artificial Sequence: Synthetic oligonucleotide
  Target: ATXN2; (-) strand; PAM type: YTN; PAM sequence: CTG
ggattacaggcgtgagccac

SEQ ID NO: 63151 - DNA, 20 bp, Artificial Sequence
  Description of Artificial Sequence: Synthetic oligonucleotide
  Target: ATXN2; (-) strand; PAM type: YTN; PAM sequence: CTC
ccaaagtgctgggattacag

SEQ ID NO: 63152 - DNA, 20 bp, Artificial Sequence
  Description of Artificial Sequence: Synthetic oligonucleotide
  Target: ATXN2; (-) strand; PAM type: YTN; PAM sequence: TTG
gcctcccaaagtgctgggat

SEQ ID NO: 63153 - DNA, 20 bp, Artificial Sequence
  Description of Artificial Sequence: Synthetic oligonucleotide
  Target: ATXN2; (-) strand; PAM type: YTN; PAM sequence: CTT
ggcctcccaaagtgctggga

SEQ ID NO: 63154 - DNA, 20 bp, Artificial Sequence
  Description of Artificial Sequence: Synthetic oligonucleotide
  Target: ATXN2; (-) strand; PAM type: YTN; PAM sequence: CTG
ccttggcctcccaaagtgct

SEQ ID NO: 63155 - DNA, 20 bp, Artificial Sequence
  Description of Artificial Sequence: Synthetic oligonucleotide
  Target: ATXN2; (-) strand; PAM type: YTN; PAM sequence: CTC
gtgatccgcctgccttggcc

SEQ ID NO: 63156 - DNA, 20 bp, Artificial Sequence
  Description of Artificial Sequence: Synthetic oligonucleotide
  Target: ATXN2; (-) strand; PAM type: YTN; PAM sequence: CTG
acctcgtgatccgcctgcct

SEQ ID NO: 63157 - DNA, 20 bp, Artificial Sequence
  Description of Artificial Sequence: Synthetic oligonucleotide
  Target: ATXN2; (-) strand; PAM type: YTN; PAM sequence: CTC
ctgacctcgtgatccgcctg

SEQ ID NO: 63158 - DNA, 20 bp, Artificial Sequence
  Description of Artificial Sequence: Synthetic oligonucleotide
  Target: ATXN2; (-) strand; PAM type: YTN; PAM sequence: CTC
gatctcctgacctcgtgatc

SEQ ID NO: 63159 - DNA, 20 bp, Artificial Sequence
  Description of Artificial Sequence: Synthetic oligonucleotide
  Target: ATXN2; (-) strand; PAM type: YTN; PAM sequence: TTC
agcgtgtgagccaagatggt

SEQ ID NO: 63160 - DNA, 20 bp, Artificial Sequence
  Description of Artificial Sequence: Synthetic oligonucleotide
  Target: ATXN2; (-) strand; PAM type: YTN; PAM sequence: TTT
cagcgtgtgagccaagatgg

SEQ ID NO: 63161 - DNA, 20 bp, Artificial Sequence
  Description of Artificial Sequence: Synthetic oligonucleotide
  Target: ATXN2; (-) strand; PAM type: YTN; PAM sequence: TTA
gtagagatggggtttcagcg

SEQ ID NO: 63162 - DNA, 20 bp, Artificial Sequence
  Description of Artificial Sequence: Synthetic oligonucleotide
  Target: ATXN2; (-) strand; PAM type: YTN; PAM sequence: TTT
agtagagatggggtttcagc

SEQ ID NO: 63163 - DNA, 20 bp, Artificial Sequence
  Description of Artificial Sequence: Synthetic oligonucleotide
  Target: ATXN2; (-) strand; PAM type: YTN; PAM sequence: TTT
tagtagagatggggtttcag

SEQ ID NO: 63164 - DNA, 20 bp, Artificial Sequence
  Description of Artificial Sequence: Synthetic oligonucleotide
  Target: ATXN2; (-) strand; PAM type: YTN; PAM sequence: TTT
ttagtagagatggggtttca

SEQ ID NO: 63165 - DNA, 20 bp, Artificial Sequence
  Description of Artificial Sequence: Synthetic oligonucleotide
  Target: ATXN2; (-) strand; PAM type: YTN; PAM sequence: TTG
tatttttagtagagatgggg

SEQ ID NO: 63166 - DNA, 20 bp, Artificial Sequence
  Description of Artificial Sequence: Synthetic oligonucleotide
  Target: ATXN2; (-) strand; PAM type: YTN; PAM sequence: TTT
gtatttttagtagagatggg

SEQ ID NO: 63167 - DNA, 20 bp, Artificial Sequence
  Description of Artificial Sequence: Synthetic oligonucleotide
  Target: ATXN2; (-) strand; PAM type: YTN; PAM sequence: TTT
tgtatttttagtagagatgg

SEQ ID NO: 63168 - DNA, 20 bp, Artificial Sequence
  Description of Artificial Sequence: Synthetic oligonucleotide
  Target: ATXN2; (-) strand; PAM type: YTN; PAM sequence: TTT
ttgtatttttagtagagatg

SEQ ID NO: 63169 - DNA, 20 bp, Artificial Sequence
  Description of Artificial Sequence: Synthetic oligonucleotide
  Target: ATXN2; (-) strand; PAM type: YTN; PAM sequence: CTA
atttttgtatttttagtaga

SEQ ID NO: 63170 - DNA, 20 bp, Artificial Sequence
  Description of Artificial Sequence: Synthetic oligonucleotide
  Target: ATXN2; (-) strand; PAM type: YTN; PAM sequence: CTG
gctaatttttgtatttttag

SEQ ID NO: 63171 - DNA, 20 bp, Artificial Sequence
  Description of Artificial Sequence: Synthetic oligonucleotide
  Target: ATXN2; (-) strand; PAM type: YTN; PAM sequence: CTG
ccaccatgcctggctaattt

SEQ ID NO: 63172 - DNA, 20 bp, Artificial Sequence
  Description of Artificial Sequence: Synthetic oligonucleotide
  Target: ATXN2; (-) strand; PAM type: YTN; PAM sequence: CTA
taggcgcctgccaccatgcc

SEQ ID NO: 63173 - DNA, 20 bp, Artificial Sequence
  Description of Artificial Sequence: Synthetic oligonucleotide
  Target: ATXN2; (-) strand; PAM type: YTN; PAM sequence: CTC
ccgagtagcagggactatag

SEQ ID NO: 63174 - DNA, 20 bp, Artificial Sequence
  Description of Artificial Sequence: Synthetic oligonucleotide
  Target: ATXN2; (-) strand; PAM type: YTN; PAM sequence: CTC
agcctcccgagtagcaggga

SEQ ID NO: 63175 - DNA, 20 bp, Artificial Sequence
  Description of Artificial Sequence: Synthetic oligonucleotide
  Target: ATXN2; (-) strand; PAM type: YTN; PAM sequence: CTA
cctcagcctcccgagtagca

SEQ ID NO: 63176 - DNA, 20 bp, Artificial Sequence
  Description of Artificial Sequence: Synthetic oligonucleotide
  Target: ATXN2; (-) strand; PAM type: YTN; PAM sequence: CTC
ctacctcagcctcccgagta

SEQ ID NO: 63177 - DNA, 20 bp, Artificial Sequence
  Description of Artificial Sequence: Synthetic oligonucleotide
  Target: ATXN2; (-) strand; PAM type: YTN; PAM sequence: TTC
tcctacctcagcctcccgag

SEQ ID NO: 63178 - DNA, 20 bp, Artificial Sequence
  Description of Artificial Sequence: Synthetic oligonucleotide
  Target: ATXN2; (-) strand; PAM type: YTN; PAM sequence: TTC
acaccattctcctacctcag

SEQ ID NO: 63179 - DNA, 20 bp, Artificial Sequence
  Description of Artificial Sequence: Synthetic oligonucleotide
  Target: ATXN2; (-) strand; PAM type: YTN; PAM sequence: TTC
ccaggttcacaccattctcc

SEQ ID NO: 63180 - DNA, 20 bp, Artificial Sequence
  Description of Artificial Sequence: Synthetic oligonucleotide
  Target: ATXN2; (-) strand; PAM type: YTN; PAM sequence: CTT
cccaggttcacaccattctc

SEQ ID NO: 63181 - DNA, 20 bp, Artificial Sequence
  Description of Artificial Sequence: Synthetic oligonucleotide
  Target: ATXN2; (-) strand; PAM type: YTN; PAM sequence: CTC
cacttcccaggttcacacca

SEQ ID NO: 63182 - DNA, 20 bp, Artificial Sequence
  Description of Artificial Sequence: Synthetic oligonucleotide
  Target: ATXN2; (-) strand; PAM type: YTN; PAM sequence: CTG
cagctccacttcccaggttc

SEQ ID NO: 63183 - DNA, 20 bp, Artificial Sequence
  Description of Artificial Sequence: Synthetic oligonucleotide
  Target: ATXN2; (-) strand; PAM type: YTN; PAM sequence: CTC
actgcagctccacttcccag

SEQ ID NO: 63184 - DNA, 20 bp, Artificial Sequence
  Description of Artificial Sequence: Synthetic oligonucleotide
  Target: ATXN2; (-) strand; PAM type: YTN; PAM sequence: TTG
gctcactgcagctccacttc

SEQ ID NO: 63185 - DNA, 20 bp, Artificial Sequence
  Description of Artificial Sequence: Synthetic oligonucleotide
  Target: ATXN2; (-) strand; PAM type: YTN; PAM sequence: CTT
ggctcactgcagctccactt

SEQ ID NO: 63186 - DNA, 20 bp, Artificial Sequence
  Description of Artificial Sequence: Synthetic oligonucleotide
  Target: ATXN2; (-) strand; PAM type: YTN; PAM sequence: CTG
gagtgcagtggcgtgatctt

SEQ ID NO: 63187 - DNA, 20 bp, Artificial Sequence
  Description of Artificial Sequence: Synthetic oligonucleotide
  Target: ATXN2; (-) strand; PAM type: YTN; PAM sequence: CTG
tcacccaggctggagtgcag

SEQ ID NO: 63188 - DNA, 20 bp, Artificial Sequence
  Description of Artificial Sequence: Synthetic oligonucleotide
  Target: ATXN2; (-) strand; PAM type: YTN; PAM sequence: CTC
tgtcacccaggctggagtgc

SEQ ID NO: 63189 - DNA, 20 bp, Artificial Sequence
  Description of Artificial Sequence: Synthetic oligonucleotide
  Target: ATXN2; (-) strand; PAM type: YTN; PAM sequence: CTC
gctctgtcacccaggctgga

SEQ ID NO: 63190 - DNA, 20 bp, Artificial Sequence
  Description of Artificial Sequence: Synthetic oligonucleotide
  Target: ATXN2; (-) strand; PAM type: YTN; PAM sequence: TTG
agacggagtctcgctctgtc

SEQ ID NO: 63191 - DNA, 20 bp, Artificial Sequence
  Description of Artificial Sequence: Synthetic oligonucleotide
  Target: ATXN2; (-) strand; PAM type: YTN; PAM sequence: TTT
gagacggagtctcgctctgt

SEQ ID NO: 63192 - DNA, 20 bp, Artificial Sequence
  Description of Artificial Sequence: Synthetic oligonucleotide
  Target: ATXN2; (-) strand; PAM type: YTN; PAM sequence: TTT
tgagacggagtctcgctctg

SEQ ID NO: 63193 - DNA, 20 bp, Artificial Sequence
  Description of Artificial Sequence: Synthetic oligonucleotide
  Target: ATXN2; (-) strand; PAM type: YTN; PAM sequence: TTT
ttgagacggagtctcgctct

SEQ ID NO: 63194 - DNA, 20 bp, Artificial Sequence
  Description of Artificial Sequence: Synthetic oligonucleotide
  Target: ATXN2; (-) strand; PAM type: YTN; PAM sequence: TTT
tttgagacggagtctcgctc

SEQ ID NO: 63195 - DNA, 20 bp, Artificial Sequence
  Description of Artificial Sequence: Synthetic oligonucleotide
  Target: ATXN2; (-) strand; PAM type: YTN; PAM sequence: TTT
ttttgagacggagtctcgct

SEQ ID NO: 63196 - DNA, 20 bp, Artificial Sequence
  Description of Artificial Sequence: Synthetic oligonucleotide
  Target: ATXN2; (-) strand; PAM type: YTN; PAM sequence: TTT
tttttgagacggagtctcgc

SEQ ID NO: 63197 - DNA, 20 bp, Artificial Sequence
  Description of Artificial Sequence: Synthetic oligonucleotide
  Target: ATXN2; (-) strand; PAM type: YTN; PAM sequence: TTT
ttttttgagacggagtctcg

SEQ ID NO: 63198 - DNA, 20 bp, Artificial Sequence
  Description of Artificial Sequence: Synthetic oligonucleotide
  Target: ATXN2; (-) strand; PAM type: YTN; PAM sequence: TTT
tttttttgagacggagtctc

SEQ ID NO: 63199 - DNA, 20 bp, Artificial Sequence
  Description of Artificial Sequence: Synthetic oligonucleotide
  Target: ATXN2; (-) strand; PAM type: YTN; PAM sequence: TTT
ttttttttgagacggagtct

SEQ ID NO: 63200 - DNA, 20 bp, Artificial Sequence
  Description of Artificial Sequence: Synthetic oligonucleotide
  Target: ATXN2; (-) strand; PAM type: YTN; PAM sequence: TTT
tttttttttgagacggagtc

SEQ ID NO: 63201 - DNA, 20 bp, Artificial Sequence
  Description of Artificial Sequence: Synthetic oligonucleotide
  Target: ATXN2; (-) strand; PAM type: YTN; PAM sequence: TTT
ttttttttttgagacggagt

SEQ ID NO: 63202 - DNA, 20 bp, Artificial Sequence
  Description of Artificial Sequence: Synthetic oligonucleotide
  Target: ATXN2; (-) strand; PAM type: YTN; PAM sequence: TTT
tttttttttttgagacggag

SEQ ID NO: 63203 - DNA, 20 bp, Artificial Sequence
  Description of Artificial Sequence: Synthetic oligonucleotide
  Target: ATXN2; (-) strand; PAM type: YTN; PAM sequence: TTT
ttttttttttttgagacgga

SEQ ID NO: 63204 - DNA, 20 bp, Artificial Sequence
  Description of Artificial Sequence: Synthetic oligonucleotide
  Target: ATXN2; (-) strand; PAM type: YTN; PAM sequence: CTT
tttttttttttttgagacgg

SEQ ID NO: 63205 - DNA, 20 bp, Artificial Sequence
  Description of Artificial Sequence: Synthetic oligonucleotide
  Target: ATXN2; (-) strand; PAM type: YTN; PAM sequence: CTA
tctttttttttttttttgag

SEQ ID NO: 63206 - DNA, 20 bp, Artificial Sequence
  Description of Artificial Sequence: Synthetic oligonucleotide
  Target: ATXN2; (-) strand; PAM type: YTN; PAM sequence: TTG
gtgctatctttttttttttt

SEQ ID NO: 63207 - DNA, 20 bp, Artificial Sequence
  Description of Artificial Sequence: Synthetic oligonucleotide
  Target: ATXN2; (-) strand; PAM type: YTN; PAM sequence: CTC
attggtgctatctttttttt

SEQ ID NO: 63208 - DNA, 20 bp, Artificial Sequence
  Description of Artificial Sequence: Synthetic oligonucleotide
  Target: ATXN2; (-) strand; PAM type: YTN; PAM sequence: CTG
tgcccagctcattggtgcta

SEQ ID NO: 63209 - DNA, 20 bp, Artificial Sequence
  Description of Artificial Sequence: Synthetic oligonucleotide
  Target: ATXN2; (-) strand; PAM type: YTN; PAM sequence: CTA
ctgtgcccagctcattggtg

SEQ ID NO: 63210 - DNA, 20 bp, Artificial Sequence
  Description of Artificial Sequence: Synthetic oligonucleotide
  Target: ATXN2; (-) strand; PAM type: YTN; PAM sequence: TTA
cagtgatgagctactgtgcc

SEQ ID NO: 63211 - DNA, 20 bp, Artificial Sequence
  Description of Artificial Sequence: Synthetic oligonucleotide
  Target: ATXN2; (-) strand; PAM type: YTN; PAM sequence: CTG
gaattacagtgatgagctac

SEQ ID NO: 63212 - DNA, 20 bp, Artificial Sequence
  Description of Artificial Sequence: Synthetic oligonucleotide
  Target: ATXN2; (-) strand; PAM type: YTN; PAM sequence: CTC
ccaaagggctggaattacag

SEQ ID NO: 63213 - DNA, 20 bp, Artificial Sequence
  Description of Artificial Sequence: Synthetic oligonucleotide
  Target: ATXN2; (-) strand; PAM type: YTN; PAM sequence: CTC
agcctcccaaagggctggaa

SEQ ID NO: 63214 - DNA, 20 bp, Artificial Sequence
  Description of Artificial Sequence: Synthetic oligonucleotide
  Target: ATXN2; (-) strand; PAM type: YTN; PAM sequence: TTG
tctcagcctcccaaagggct

SEQ ID NO: 63215 - DNA, 20 bp, Artificial Sequence
  Description of Artificial Sequence: Synthetic oligonucleotide
  Target: ATXN2; (-) strand; PAM type: YTN; PAM sequence: CTT
gtctcagcctcccaaagggc

SEQ ID NO: 63216 - DNA, 20 bp, Artificial Sequence
  Description of Artificial Sequence: Synthetic oligonucleotide
  Target: ATXN2; (-) strand; PAM type: YTN; PAM sequence: CTG
cttgtctcagcctcccaaag

SEQ ID NO: 63217 - DNA, 20 bp, Artificial Sequence
  Description of Artificial Sequence: Synthetic oligonucleotide
  Target: ATXN2; (-) strand; PAM type: YTN; PAM sequence: TTA
agcagtctgcttgtctcagc

SEQ ID NO: 63218 - DNA, 20 bp, Artificial Sequence
  Description of Artificial Sequence: Synthetic oligonucleotide
  Target: ATXN2; (-) strand; PAM type: YTN; PAM sequence: CTT
aagcagtctgcttgtctcag

SEQ ID NO: 63219 - DNA, 20 bp, Artificial Sequence
  Description of Artificial Sequence: Synthetic oligonucleotide
  Target: ATXN2; (-) strand; PAM type: YTN; PAM sequence: CTG
agcttaagcagtctgcttgt

SEQ ID NO: 63220 - DNA, 20 bp, Artificial Sequence
  Description of Artificial Sequence: Synthetic oligonucleotide
  Target: ATXN2; (-) strand; PAM type: YTN; PAM sequence: CTC
ctgagcttaagcagtctgct

SEQ ID NO: 63221 - DNA, 20 bp, Artificial Sequence
  Description of Artificial Sequence: Synthetic oligonucleotide
  Target: ATXN2; (-) strand; PAM type: YTN; PAM sequence: TTG
aactcctgagcttaagcagt

SEQ ID NO: 63222 - DNA, 20 bp, Artificial Sequence
  Description of Artificial Sequence: Synthetic oligonucleotide
  Target: ATXN2; (-) strand; PAM type: YTN; PAM sequence: CTT
gaactcctgagcttaagcag

SEQ ID NO: 63223 - DNA, 20 bp, Artificial Sequence
  Description of Artificial Sequence: Synthetic oligonucleotide
  Target: ATXN2; (-) strand; PAM type: YTN; PAM sequence: CTG
gtcttgaactcctgagctta

SEQ ID NO: 63224 - DNA, 20 bp, Artificial Sequence
  Description of Artificial Sequence: Synthetic oligonucleotide
  Target: ATXN2; (-) strand; PAM type: YTN; PAM sequence: TTG
cccaggctggtcttgaactc

SEQ ID NO: 63225 - DNA, 20 bp, Artificial Sequence
  Description of Artificial Sequence: Synthetic oligonucleotide
  Target: ATXN2; (-) strand; PAM type: YTN; PAM sequence: CTA
tgttgcccaggctggtcttg

SEQ ID NO: 63226 - DNA, 20 bp, Artificial Sequence
  Description of Artificial Sequence: Synthetic oligonucleotide
  Target: ATXN2; (-) strand; PAM type: YTN; PAM sequence: TTA
aatgagacagggtatcacta

SEQ ID NO: 63227 - DNA, 20 bp, Artificial Sequence
  Description of Artificial Sequence: Synthetic oligonucleotide
  Target: ATXN2; (-) strand; PAM type: YTN; PAM sequence: TTT
aaatgagacagggtatcact

SEQ ID NO: 63228 - DNA, 20 bp, Artificial Sequence
  Description of Artificial Sequence: Synthetic oligonucleotide
  Target: ATXN2; (-) strand; PAM type: YTN; PAM sequence: TTT
taaatgagacagggtatcac

SEQ ID NO: 63229 - DNA, 20 bp, Artificial Sequence
  Description of Artificial Sequence: Synthetic oligonucleotide
  Target: ATXN2; (-) strand; PAM type: YTN; PAM sequence: TTT
ttaaatgagacagggtatca

SEQ ID NO: 63230 - DNA, 20 bp, Artificial Sequence
  Description of Artificial Sequence: Synthetic oligonucleotide
  Target: ATXN2; (-) strand; PAM type: YTN; PAM sequence: TTT
tttaaatgagacagggtatc

SEQ ID NO: 63231 - DNA, 20 bp, Artificial Sequence
  Description of Artificial Sequence: Synthetic oligonucleotide
  Target: ATXN2; (-) strand; PAM type: YTN; PAM sequence: TTA
ttttttaaatgagacagggt

SEQ ID NO: 63232 - DNA, 20 bp, Artificial Sequence
  Description of Artificial Sequence: Synthetic oligonucleotide
  Target: ATXN2; (-) strand; PAM type: YTN; PAM sequence: TTA
ttattttttaaatgagacag

SEQ ID NO: 63233 - DNA, 20 bp, Artificial Sequence
  Description of Artificial Sequence: Synthetic oligonucleotide
  Target: ATXN2; (-) strand; PAM type: YTN; PAM sequence: TTA
ttattattttttaaatgaga

SEQ ID NO: 63234 - DNA, 20 bp, Artificial Sequence
  Description of Artificial Sequence: Synthetic oligonucleotide
  Target: ATXN2; (-) strand; PAM type: YTN; PAM sequence: TTT
attattattttttaaatgag

SEQ ID NO: 63235 - DNA, 20 bp, Artificial Sequence
  Description of Artificial Sequence: Synthetic oligonucleotide
  Target: ATXN2; (-) strand; PAM type: YTN; PAM sequence: TTT
tattattattttttaaatga

SEQ ID NO: 63236 - DNA, 20 bp, Artificial Sequence
  Description of Artificial Sequence: Synthetic oligonucleotide
  Target: ATXN2; (-) strand; PAM type: YTN; PAM sequence: TTA
ttttattattattttttaaa

SEQ ID NO: 63237 - DNA, 20 bp, Artificial Sequence
  Description of Artificial Sequence: Synthetic oligonucleotide
  Target: ATXN2; (-) strand; PAM type: YTN; PAM sequence: TTT
attttattattattttttaa

SEQ ID NO: 63238 - DNA, 20 bp, Artificial Sequence
  Description of Artificial Sequence: Synthetic oligonucleotide
  Target: ATXN2; (-) strand; PAM type: YTN; PAM sequence: TTT
tattttattattatttttta

SEQ ID NO: 63239 - DNA, 20 bp, Artificial Sequence
  Description of Artificial Sequence: Synthetic oligonucleotide
  Target: ATXN2; (-) strand; PAM type: YTN; PAM sequence: TTA
ttttattttattattatttt

SEQ ID NO: 63240 - DNA, 20 bp, Artificial Sequence
  Description of Artificial Sequence: Synthetic oligonucleotide
  Target: ATXN2; (-) strand; PAM type: YTN; PAM sequence: TTT
attttattttattattattt

SEQ ID NO: 63241 - DNA, 20 bp, Artificial Sequence
  Description of Artificial Sequence: Synthetic oligonucleotide
  Target: ATXN2; (-) strand; PAM type: YTN; PAM sequence: TTT
tattttattttattattatt

SEQ ID NO: 63242 - DNA, 20 bp, Artificial Sequence
  Description of Artificial Sequence: Synthetic oligonucleotide
  Target: ATXN2; (-) strand; PAM type: YTN; PAM sequence: TTA
ttttattttattttattatt

SEQ ID NO: 63243 - DNA, 20 bp, Artificial Sequence
  Description of Artificial Sequence: Synthetic oligonucleotide
  Target: ATXN2; (-) strand; PAM type: YTN; PAM sequence: TTG
ttattttattttattttatt

SEQ ID NO: 63244 - DNA, 20 bp, Artificial Sequence
  Description of Artificial Sequence: Synthetic oligonucleotide
  Target: ATXN2; (-) strand; PAM type: YTN; PAM sequence: TTT
gttattttattttattttat

SEQ ID NO: 63245 - DNA, 20 bp, Artificial Sequence
  Description of Artificial Sequence: Synthetic oligonucleotide
  Target: ATXN2; (-) strand; PAM type: YTN; PAM sequence: TTT
tgttattttattttatttta

SEQ ID NO: 63246 - DNA, 20 bp, Artificial Sequence
  Description of Artificial Sequence: Synthetic oligonucleotide
  Target: ATXN2; (-) strand; PAM type: YTN; PAM sequence: TTT
ttgttattttattttatttt

SEQ ID NO: 63247 - DNA, 20 bp, Artificial Sequence
  Description of Artificial Sequence: Synthetic oligonucleotide
  Target: ATXN2; (-) strand; PAM type: YTN; PAM sequence: TTA
tttttgttattttattttat

SEQ ID NO: 63248 - DNA, 20 bp, Artificial Sequence
  Description of Artificial Sequence: Synthetic oligonucleotide
  Target: ATXN2; (-) strand; PAM type: YTN; PAM sequence: TTT
atttttgttattttatttta

SEQ ID NO: 63249 - DNA, 20 bp, Artificial Sequence
  Description of Artificial Sequence: Synthetic oligonucleotide
  Target: ATXN2; (-) strand; PAM type: YTN; PAM sequence: CTT
tatttttgttattttatttt

SEQ ID NO: 63250 - DNA, 20 bp, Artificial Sequence
  Description of Artificial Sequence: Synthetic oligonucleotide
  Target: ATXN2; (-) strand; PAM type: YTN; PAM sequence: TTC
tttatttttgttattttatt

SEQ ID NO: 63251 - DNA, 20 bp, Artificial Sequence
  Description of Artificial Sequence: Synthetic oligonucleotide
  Target: ATXN2; (-) strand; PAM type: YTN; PAM sequence: CTT
ctttatttttgttattttat

SEQ ID NO: 63252 - DNA, 20 bp, Artificial Sequence
  Description of Artificial Sequence: Synthetic oligonucleotide
  Target: ATXN2; (-) strand; PAM type: YTN; PAM sequence: TTA
cttctttatttttgttattt

SEQ ID NO: 63253 - DNA, 20 bp, Artificial Sequence
  Description of Artificial Sequence: Synthetic oligonucleotide
  Target: ATXN2; (-) strand; PAM type: YTN; PAM sequence: TTT
acttctttatttttgttatt

SEQ ID NO: 63254 - DNA, 20 bp, Artificial Sequence
  Description of Artificial Sequence: Synthetic oligonucleotide
  Target: ATXN2; (-) strand; PAM type: YTN; PAM sequence: CTT
tacttctttatttttgttat

SEQ ID NO: 63255 - DNA, 20 bp, Artificial Sequence
  Description of Artificial Sequence: Synthetic oligonucleotide
  Target: ATXN2; (-) strand; PAM type: YTN; PAM sequence: TTC
tttacttctttatttttgtt

SEQ ID NO: 63256 - DNA, 20 bp, Artificial Sequence
  Description of Artificial Sequence: Synthetic oligonucleotide
  Target: ATXN2; (-) strand; PAM type: YTN; PAM sequence: TTT
ctttacttctttatttttgt

SEQ ID NO: 63257 - DNA, 20 bp, Artificial Sequence
  Description of Artificial Sequence: Synthetic oligonucleotide
  Target: ATXN2; (-) strand; PAM type: YTN; PAM sequence: TTT
tctttacttctttatttttg

SEQ ID NO: 63258 - DNA, 20 bp, Artificial Sequence
  Description of Artificial Sequence: Synthetic oligonucleotide
  Target: ATXN2; (-) strand; PAM type: YTN; PAM sequence: CTT
ttctttacttctttattttt

SEQ ID NO: 63259 - DNA, 20 bp, Artificial Sequence
  Description of Artificial Sequence: Synthetic oligonucleotide
  Target: ATXN2; (-) strand; PAM type: YTN; PAM sequence: TTG
gtgcttttctttacttcttt

SEQ ID NO: 63260 - DNA, 20 bp, Artificial Sequence
  Description of Artificial Sequence: Synthetic oligonucleotide
  Target: ATXN2; (-) strand; PAM type: YTN; PAM sequence: TTG
gtccagccattggtgctttt

SEQ ID NO: 63261 - DNA, 20 bp, Artificial Sequence
  Description of Artificial Sequence: Synthetic oligonucleotide
  Target: ATXN2; (-) strand; PAM type: YTN; PAM sequence: CTT
ggtccagccattggtgcttt

SEQ ID NO: 63262 - DNA, 20 bp, Artificial Sequence
  Description of Artificial Sequence: Synthetic oligonucleotide
  Target: ATXN2; (-) strand; PAM type: YTN; PAM sequence: CTC
acccttggtccagccattgg

SEQ ID NO: 63263 - DNA, 20 bp, Artificial Sequence
  Description of Artificial Sequence: Synthetic oligonucleotide
  Target: ATXN2; (-) strand; PAM type: YTN; PAM sequence: TTG
tacatgtgtgtctcaccctt

SEQ ID NO: 63264 - DNA, 20 bp, Artificial Sequence
  Description of Artificial Sequence: Synthetic oligonucleotide
  Target: ATXN2; (-) strand; PAM type: YTN; PAM sequence: CTT
gtacatgtgtgtctcaccct

SEQ ID NO: 63265 - DNA, 20 bp, Artificial Sequence
  Description of Artificial Sequence: Synthetic oligonucleotide
  Target: ATXN2; (-) strand; PAM type: YTN; PAM sequence: CTC
acttgtacatgtgtgtctca

SEQ ID NO: 63266 - DNA, 20 bp, Artificial Sequence
  Description of Artificial Sequence: Synthetic oligonucleotide
  Target: ATXN2; (-) strand; PAM type: YTN; PAM sequence: CTG
actcacttgtacatgtgtgt

SEQ ID NO: 63267 - DNA, 20 bp, Artificial Sequence
  Description of Artificial Sequence: Synthetic oligonucleotide
  Target: ATXN2; (-) strand; PAM type: YTN; PAM sequence: TTC
tgactcacttgtacatgtgt

SEQ ID NO: 63268 - DNA, 20 bp, Artificial Sequence
  Description of Artificial Sequence: Synthetic oligonucleotide
  Target: ATXN2; (-) strand; PAM type: YTN; PAM sequence: TTT
ctgactcacttgtacatgtg

SEQ ID NO: 63269 - DNA, 20 bp, Artificial Sequence
  Description of Artificial Sequence: Synthetic oligonucleotide
  Target: ATXN2; (-) strand; PAM type: YTN; PAM sequence: TTT
tctgactcacttgtacatgt

SEQ ID NO: 63270 - DNA, 20 bp, Artificial Sequence
  Description of Artificial Sequence: Synthetic oligonucleotide
  Target: ATXN2; (-) strand; PAM type: YTN; PAM sequence: CTA
tcattttctgactcacttgt

SEQ ID NO: 63271 - DNA, 20 bp, Artificial Sequence
  Description of Artificial Sequence: Synthetic oligonucleotide
  Target: ATXN2; (-) strand; PAM type: YTN; PAM sequence: TTG
acgagtctatcattttctga

SEQ ID NO: 63272 - DNA, 20 bp, Artificial Sequence
  Description of Artificial Sequence: Synthetic oligonucleotide
  Target: ATXN2; (-) strand; PAM type: YTN; PAM sequence: TTT
gacgagtctatcattttctg

SEQ ID NO: 63273 - DNA, 20 bp, Artificial Sequence
  Description of Artificial Sequence: Synthetic oligonucleotide
  Target: ATXN2; (-) strand; PAM type: YTN; PAM sequence: TTT
tgacgagtctatcattttct

SEQ ID NO: 63274 - DNA, 20 bp, Artificial Sequence
  Description of Artificial Sequence: Synthetic oligonucleotide
  Target: ATXN2; (-) strand; PAM type: YTN; PAM sequence: CTT
ttgacgagtctatcattttc

SEQ ID NO: 63275 - DNA, 20 bp, Artificial Sequence
  Description of Artificial Sequence: Synthetic oligonucleotide
  Target: ATXN2; (-) strand; PAM type: YTN; PAM sequence: TTC
cttttgacgagtctatcatt

SEQ ID NO: 63276 - DNA, 20 bp, Artificial Sequence
  Description of Artificial Sequence: Synthetic oligonucleotide
  Target: ATXN2; (-) strand; PAM type: YTN; PAM sequence: TTG
tcatattccttttgacgagt

SEQ ID NO: 63277 - DNA, 20 bp, Artificial Sequence
  Description of Artificial Sequence: Synthetic oligonucleotide
  Target: ATXN2; (-) strand; PAM type: YTN; PAM sequence: TTA
ttgtcatattccttttgacg

SEQ ID NO: 63278 - DNA, 20 bp, Artificial Sequence
  Description of Artificial Sequence: Synthetic oligonucleotide
  Target: ATXN2; (-) strand; PAM type: YTN; PAM sequence: TTT
attgtcatattccttttgac

SEQ ID NO: 63279 - DNA, 20 bp, Artificial Sequence
  Description of Artificial Sequence: Synthetic oligonucleotide
  Target: ATXN2; (-) strand; PAM type: YTN; PAM sequence: CTT
tattgtcatattccttttga

SEQ ID NO: 63280 - DNA, 20 bp, Artificial Sequence
  Description of Artificial Sequence: Synthetic oligonucleotide
  Target: ATXN2; (-) strand; PAM type: YTN; PAM sequence: TTC
ctttattgtcatattccttt

SEQ ID NO: 63281 - DNA, 20 bp, Artificial Sequence
  Description of Artificial Sequence: Synthetic oligonucleotide
  Target: ATXN2; (-) strand; PAM type: YTN; PAM sequence: TTA
agttcctttattgtcatatt

SEQ ID NO: 63282 - DNA, 20 bp, Artificial Sequence
  Description of Artificial Sequence: Synthetic oligonucleotide
  Target: ATXN2; (-) strand; PAM type: YTN; PAM sequence: TTT
aagttcctttattgtcatat

SEQ ID NO: 63283 - DNA, 20 bp, Artificial Sequence
  Description of Artificial Sequence: Synthetic oligonucleotide
  Target: ATXN2; (-) strand; PAM type: YTN; PAM sequence: TTT
taagttcctttattgtcata

SEQ ID NO: 63284 - DNA, 20 bp, Artificial Sequence
  Description of Artificial Sequence: Synthetic oligonucleotide
  Target: ATXN2; (-) strand; PAM type: YTN; PAM sequence: CTT
ttaagttcctttattgtcat

SEQ ID NO: 63285 - DNA, 20 bp, Artificial Sequence
  Description of Artificial Sequence: Synthetic oligonucleotide
  Target: ATXN2; (-) strand; PAM type: YTN; PAM sequence: CTG
aacatagcttttaagttcct

SEQ ID NO: 63286 - DNA, 20 bp, Artificial Sequence
  Description of Artificial Sequence: Synthetic oligonucleotide
  Target: ATXN2; (-) strand; PAM type: YTN; PAM sequence: CTG
cacgcagccctgaacatagc

SEQ ID NO: 63287 - DNA, 20 bp, Artificial Sequence
  Description of Artificial Sequence: Synthetic oligonucleotide
  Target: ATXN2; (-) strand; PAM type: YTN; PAM sequence: TTA
gccactgcacgcagccctga

SEQ ID NO: 63288 - DNA, 20 bp, Artificial Sequence
  Description of Artificial Sequence: Synthetic oligonucleotide
  Target: ATXN2; (-) strand; PAM type: YTN; PAM sequence: CTA
ggatgataggtgttagccac

SEQ ID NO: 63289 - DNA, 20 bp, Artificial Sequence
  Description of Artificial Sequence: Synthetic oligonucleotide
  Target: ATXN2; (-) strand; PAM type: YTN; PAM sequence: TTC
ccaaagtgctaggatgatag

SEQ ID NO: 63290 - DNA, 20 bp, Artificial Sequence
  Description of Artificial Sequence: Synthetic oligonucleotide
  Target: ATXN2; (-) strand; PAM type: YTN; PAM sequence: CTT
cccaaagtgctaggatgata

SEQ ID NO: 63291 - DNA, 20 bp, Artificial Sequence
  Description of Artificial Sequence: Synthetic oligonucleotide
  Target: ATXN2; (-) strand; PAM type: YTN; PAM sequence: TTG
gcttcccaaagtgctaggat

SEQ ID NO: 63292 - DNA, 20 bp, Artificial Sequence
  Description of Artificial Sequence: Synthetic oligonucleotide
  Target: ATXN2; (-) strand; PAM type: YTN; PAM sequence: CTT
ggcttcccaaagtgctagga

SEQ ID NO: 63293 - DNA, 20 bp, Artificial Sequence
  Description of Artificial Sequence: Synthetic oligonucleotide
  Target: ATXN2; (-) strand; PAM type: YTN; PAM sequence: CTG
ccttggcttcccaaagtgct

SEQ ID NO: 63294 - DNA, 20 bp, Artificial Sequence
  Description of Artificial Sequence: Synthetic oligonucleotide
  Target: ATXN2; (-) strand; PAM type: YTN; PAM sequence: CTC
aagtgatccacctgccttgg

SEQ ID NO: 63295 - DNA, 20 bp, Artificial Sequence
  Description of Artificial Sequence: Synthetic oligonucleotide
  Target: ATXN2; (-) strand; PAM type: YTN; PAM sequence: CTG
acctcaagtgatccacctgc

SEQ ID NO: 63296 - DNA, 20 bp, Artificial Sequence
  Description of Artificial Sequence: Synthetic oligonucleotide
  Target: ATXN2; (-) strand; PAM type: YTN; PAM sequence: CTC
ctgacctcaagtgatccacc

SEQ ID NO: 63297 - DNA, 20 bp, Artificial Sequence
  Description of Artificial Sequence: Synthetic oligonucleotide
  Target: ATXN2; (-) strand; PAM type: YTN; PAM sequence: TTA
aactcctgacctcaagtgat

SEQ ID NO: 63298 - DNA, 20 bp, Artificial Sequence
  Description of Artificial Sequence: Synthetic oligonucleotide
  Target: ATXN2; (-) strand; PAM type: YTN; PAM sequence: CTT
aaactcctgacctcaagtga

SEQ ID NO: 63299 - DNA, 20 bp, Artificial Sequence
  Description of Artificial Sequence: Synthetic oligonucleotide
  Target: ATXN2; (-) strand; PAM type: YTN; PAM sequence: CTG
gtcttaaactcctgacctca

SEQ ID NO: 63300 - DNA, 20 bp, Artificial Sequence
  Description of Artificial Sequence: Synthetic oligonucleotide
  Target: ATXN2; (-) strand; PAM type: YTN; PAM sequence: TTG
gccagtctggtcttaaactc

SEQ ID NO: 63301 - DNA, 20 bp, Artificial Sequence
  Description of Artificial Sequence: Synthetic oligonucleotide
  Target: ATXN2; (-) strand; PAM type: YTN; PAM sequence: TTC
accatgttggccagtctggt

SEQ ID NO: 63302 - DNA, 20 bp, Artificial Sequence
  Description of Artificial Sequence: Synthetic oligonucleotide
  Target: ATXN2; (-) strand; PAM type: YTN; PAM sequence: TTT
caccatgttggccagtctgg

SEQ ID NO: 63303 - DNA, 20 bp, Artificial Sequence
  Description of Artificial Sequence: Synthetic oligonucleotide
  Target: ATXN2; (-) strand; PAM type: YTN; PAM sequence: TTA
gtagagacggagtttcacca

SEQ ID NO: 63304 - DNA, 20 bp, Artificial Sequence
  Description of Artificial Sequence: Synthetic oligonucleotide
  Target: ATXN2; (-) strand; PAM type: YTN; PAM sequence: TTT
agtagagacggagtttcacc

SEQ ID NO: 63305 - DNA, 20 bp, Artificial Sequence
  Description of Artificial Sequence: Synthetic oligonucleotide
  Target: ATXN2; (-) strand; PAM type: YTN; PAM sequence: CTT
tagtagagacggagtttcac

SEQ ID NO: 63306 - DNA, 20 bp, Artificial Sequence
  Description of Artificial Sequence: Synthetic oligonucleotide
  Target: ATXN2; (-) strand; PAM type: YTN; PAM sequence: TTA
tctttagtagagacggagtt

SEQ ID NO: 63307 - DNA, 20 bp, Artificial Sequence
  Description of Artificial Sequence: Synthetic oligonucleotide
  Target: ATXN2; (-) strand; PAM type: YTN; PAM sequence: TTT
atctttagtagagacggagt

SEQ ID NO: 63308 - DNA, 20 bp, Artificial Sequence
  Description of Artificial Sequence: Synthetic oligonucleotide
  Target: ATXN2; (-) strand; PAM type: YTN; PAM sequence: TTT
tatctttagtagagacggag

SEQ ID NO: 63309 - DNA, 20 bp, Artificial Sequence
  Description of Artificial Sequence: Synthetic oligonucleotide
  Target: ATXN2; (-) strand; PAM type: YTN; PAM sequence: TTT
ttatctttagtagagacgga

SEQ ID NO: 63310 - DNA, 20 bp, Artificial Sequence
  Description of Artificial Sequence: Synthetic oligonucleotide
  Target: ATXN2; (-) strand; PAM type: YTN; PAM sequence: TTT
tttatctttagtagagacgg

SEQ ID NO: 63311 - DNA, 20 bp, Artificial Sequence
  Description of Artificial Sequence: Synthetic oligonucleotide
  Target: ATXN2; (-) strand; PAM type: YTN; PAM sequence: TTT
ttttatctttagtagagacg

SEQ ID NO: 63312 - DNA, 20 bp, Artificial Sequence
  Description of Artificial Sequence: Synthetic oligonucleotide
  Target: ATXN2; (-) strand; PAM type: YTN; PAM sequence: TTT
tttttatctttagtagagac

SEQ ID NO: 63313 - DNA, 20 bp, Artificial Sequence
  Description of Artificial Sequence: Synthetic oligonucleotide
  Target: ATXN2; (-) strand; PAM type: YTN; PAM sequence: TTT
ttttttatctttagtagaga

SEQ ID NO: 63314 - DNA, 20 bp, Artificial Sequence
  Description of Artificial Sequence: Synthetic oligonucleotide
  Target: ATXN2; (-) strand; PAM type: YTN; PAM sequence: TTT
tttttttatctttagtagag

SEQ ID NO: 63315 - DNA, 20 bp, Artificial Sequence
  Description of Artificial Sequence: Synthetic oligonucleotide
  Target: ATXN2; (-) strand; PAM type: YTN; PAM sequence: TTT
ttttttttatctttagtaga

SEQ ID NO: 63316 - DNA, 20 bp, Artificial Sequence
  Description of Artificial Sequence: Synthetic oligonucleotide
  Target: ATXN2; (-) strand; PAM type: YTN; PAM sequence: TTT
tttttttttatctttagtag

SEQ ID NO: 63317 - DNA, 20 bp, Artificial Sequence
  Description of Artificial Sequence: Synthetic oligonucleotide
  Target: ATXN2; (-) strand; PAM type: YTN; PAM sequence: CTA
attttttttttttatcttta

SEQ ID NO: 63318 - DNA, 20 bp, Artificial Sequence
  Description of Artificial Sequence: Synthetic oligonucleotide
  Target: ATXN2; (-) strand; PAM type: YTN; PAM sequence: CTG
gctaattttttttttttatc

SEQ ID NO: 63319 - DNA, 20 bp, Artificial Sequence
  Description of Artificial Sequence: Synthetic oligonucleotide
  Target: ATXN2; (-) strand; PAM type: YTN; PAM sequence: TTA
cacgtgtgccatcacgcctg

SEQ ID NO: 63320 - DNA, 20 bp, Artificial Sequence
  Description of Artificial Sequence: Synthetic oligonucleotide
  Target: ATXN2; (-) strand; PAM type: YTN; PAM sequence: TTT
acacgtgtgccatcacgcct

SEQ ID NO: 63321 - DNA, 20 bp, Artificial Sequence
  Description of Artificial Sequence: Synthetic oligonucleotide
  Target: ATXN2; (-) strand; PAM type: YTN; PAM sequence: CTG
ggatttacacgtgtgccatc

SEQ ID NO: 63322 - DNA, 20 bp, Artificial Sequence
  Description of Artificial Sequence: Synthetic oligonucleotide
  Target: ATXN2; (-) strand; PAM type: YTN; PAM sequence: CTC
ccaagtagctgggatttaca

SEQ ID NO: 63323 - DNA, 20 bp, Artificial Sequence
  Description of Artificial Sequence: Synthetic oligonucleotide
  Target: ATXN2; (-) strand; PAM type: YTN; PAM sequence: CTC
atatgtcagcctcccaagta

SEQ ID NO: 63324 - DNA, 20 bp, Artificial Sequence
  Description of Artificial Sequence: Synthetic oligonucleotide
  Target: ATXN2; (-) strand; PAM type: YTN; PAM sequence: TTC
tcatatgtcagcctcccaag

SEQ ID NO: 63325 - DNA, 20 bp, Artificial Sequence
  Description of Artificial Sequence: Synthetic oligonucleotide
  Target: ATXN2; (-) strand; PAM type: YTN; PAM sequence: TTC
aagcaattctcatatgtcag

SEQ ID NO: 63326 - DNA, 20 bp, Artificial Sequence
  Description of Artificial Sequence: Synthetic oligonucleotide
  Target: ATXN2; (-) strand; PAM type: YTN; PAM sequence: CTG
ggttcaagcaattctcatat

SEQ ID NO: 63327 - DNA, 20 bp, Artificial Sequence
  Description of Artificial Sequence: Synthetic oligonucleotide
  Target: ATXN2; (-) strand; PAM type: YTN; PAM sequence: CTC
ctgggttcaagcaattctca

SEQ ID NO: 63328 - DNA, 20 bp, Artificial Sequence
  Description of Artificial Sequence: Synthetic oligonucleotide
  Target: ATXN2; (-) strand; PAM type: YTN; PAM sequence: CTC
cgcctcctgggttcaagcaa

SEQ ID NO: 63329 - DNA, 20 bp, Artificial Sequence
  Description of Artificial Sequence: Synthetic oligonucleotide
  Target: ATXN2; (-) strand; PAM type: YTN; PAM sequence: CTG
caacctccgcctcctgggtt

SEQ ID NO: 63330 - DNA, 20 bp, Artificial Sequence
  Description of Artificial Sequence: Synthetic oligonucleotide
  Target: ATXN2; (-) strand; PAM type: YTN; PAM sequence: CTC
actgcaacctccgcctcctg

SEQ ID NO: 63331 - DNA, 20 bp, Artificial Sequence
  Description of Artificial Sequence: Synthetic oligonucleotide
  Target: ATXN2; (-) strand; PAM type: YTN; PAM sequence: TTG
gctcactgcaacctccgcct

SEQ ID NO: 63332 - DNA, 20 bp, Artificial Sequence
  Description of Artificial Sequence: Synthetic oligonucleotide
  Target: ATXN2; (-) strand; PAM type: YTN; PAM sequence: CTT
ggctcactgcaacctccgcc

SEQ ID NO: 63333 - DNA, 20 bp, Artificial Sequence
  Description of Artificial Sequence: Synthetic oligonucleotide
  Target: ATXN2; (-) strand; PAM type: YTN; PAM sequence: CTG
gagtgcagtggtgtgatctt

SEQ ID NO: 63334 - DNA, 20 bp, Artificial Sequence
  Description of Artificial Sequence: Synthetic oligonucleotide
  Target: ATXN2; (-) strand; PAM type: YTN; PAM sequence: CTG
tcacccaggctggagtgcag

SEQ ID NO: 63335 - DNA, 20 bp, Artificial Sequence
  Description of Artificial Sequence: Synthetic oligonucleotide
  Target: ATXN2; (-) strand; PAM type: YTN; PAM sequence: CTC
tgtcacccaggctggagtgc

SEQ ID NO: 63336 - DNA, 20 bp, Artificial Sequence
  Description of Artificial Sequence: Synthetic oligonucleotide
  Target: ATXN2; (-) strand; PAM type: YTN; PAM sequence: TTG
ctctgtcacccaggctggag

SEQ ID NO: 63337 - DNA, 20 bp, Artificial Sequence
  Description of Artificial Sequence: Synthetic oligonucleotide
  Target: ATXN2; (-) strand; PAM type: YTN; PAM sequence: CTT
gctctgtcacccaggctgga

SEQ ID NO: 63338 - DNA, 20 bp, Artificial Sequence
  Description of Artificial Sequence: Synthetic oligonucleotide
  Target: ATXN2; (-) strand; PAM type: YTN; PAM sequence: TTA
gatggagtcttgctctgtca

SEQ ID NO: 63339 - DNA, 20 bp, Artificial Sequence
  Description of Artificial Sequence: Synthetic oligonucleotide
  Target: ATXN2; (-) strand; PAM type: YTN; PAM sequence: TTT
agatggagtcttgctctgtc

SEQ ID NO: 63340 - DNA, 20 bp, Artificial Sequence
  Description of Artificial Sequence: Synthetic oligonucleotide
  Target: ATXN2; (-) strand; PAM type: YTN; PAM sequence: TTT
tagatggagtcttgctctgt

SEQ ID NO: 63341 - DNA, 20 bp, Artificial Sequence
  Description of Artificial Sequence: Synthetic oligonucleotide
  Target: ATXN2; (-) strand; PAM type: YTN; PAM sequence: TTT
ttagatggagtcttgctctg

SEQ ID NO: 63342 - DNA, 20 bp, Artificial Sequence
  Description of Artificial Sequence: Synthetic oligonucleotide
  Target: ATXN2; (-) strand; PAM type: YTN; PAM sequence: TTA
atttttagatggagtcttgc

SEQ ID NO: 63343 - DNA, 20 bp, Artificial Sequence
  Description of Artificial Sequence: Synthetic oligonucleotide
  Target: ATXN2; (-) strand; PAM type: YTN; PAM sequence: TTT
aatttttagatggagtcttg

SEQ ID NO: 63344 - DNA, 20 bp, Artificial Sequence
  Description of Artificial Sequence: Synthetic oligonucleotide
  Target: ATXN2; (-) strand; PAM type: YTN; PAM sequence: TTT
taatttttagatggagtctt

SEQ ID NO: 63345 - DNA, 20 bp, Artificial Sequence
  Description of Artificial Sequence: Synthetic oligonucleotide
  Target: ATXN2; (-) strand; PAM type: YTN; PAM sequence: TTT
ttaatttttagatggagtct

SEQ ID NO: 63346 - DNA, 20 bp, Artificial Sequence
  Description of Artificial Sequence: Synthetic oligonucleotide
  Target: ATXN2; (-) strand; PAM type: YTN; PAM sequence: TTT
tttaatttttagatggagtc

SEQ ID NO: 63347 - DNA, 20 bp, Artificial Sequence
  Description of Artificial Sequence: Synthetic oligonucleotide
  Target: ATXN2; (-) strand; PAM type: YTN; PAM sequence: TTT
ttttaatttttagatggagt

SEQ ID NO: 63348 - DNA, 20 bp, Artificial Sequence
  Description of Artificial Sequence: Synthetic oligonucleotide
  Target: ATXN2; (-) strand; PAM type: YTN; PAM sequence: TTT
tttttaatttttagatggag

SEQ ID NO: 63349 - DNA, 20 bp, Artificial Sequence
  Description of Artificial Sequence: Synthetic oligonucleotide
  Target: ATXN2; (-) strand; PAM type: YTN; PAM sequence: TTT
ttttttaatttttagatgga

SEQ ID NO: 63350 - DNA, 20 bp, Artificial Sequence
  Description of Artificial Sequence: Synthetic oligonucleotide
  Target: ATXN2; (-) strand; PAM type: YTN; PAM sequence: TTT
tttttttaatttttagatgg

SEQ ID NO: 63351 - DNA, 20 bp, Artificial Sequence
  Description of Artificial Sequence: Synthetic oligonucleotide
  Target: ATXN2; (-) strand; PAM type: YTN; PAM sequence: TTT
ttttttttaatttttagatg

SEQ ID NO: 63352 - DNA, 20 bp, Artificial Sequence
  Description of Artificial Sequence: Synthetic oligonucleotide
  Target: ATXN2; (-) strand; PAM type: YTN; PAM sequence: TTT
tttttttttaatttttagat

SEQ ID NO: 63353 - DNA, 20 bp, Artificial Sequence
  Description of Artificial Sequence: Synthetic oligonucleotide
  Target: ATXN2; (-) strand; PAM type: YTN; PAM sequence: TTT
ttttttttttaatttttaga

SEQ ID NO: 63354 - DNA, 20 bp, Artificial Sequence
  Description of Artificial Sequence: Synthetic oligonucleotide
  Target: ATXN2; (-) strand; PAM type: YTN; PAM sequence: TTT
tttttttttttaatttttag

SEQ ID NO: 63355 - DNA, 20 bp, Artificial Sequence
  Description of Artificial Sequence: Synthetic oligonucleotide
  Target: ATXN2; (-) strand; PAM type: YTN; PAM sequence: TTT
ttttttttttttaattttta

SEQ ID NO: 63356 - DNA, 20 bp, Artificial Sequence
  Description of Artificial Sequence: Synthetic oligonucleotide
  Target: ATXN2; (-) strand; PAM type: YTN; PAM sequence: TTT
tttttttttttttaattttt

SEQ ID NO: 63357 - DNA, 20 bp, Artificial Sequence
  Description of Artificial Sequence: Synthetic oligonucleotide
  Target: ATXN2; (-) strand; PAM type: YTN; PAM sequence: TTT
ttttttttttttttaatttt

SEQ ID NO: 63358 - DNA, 20 bp, Artificial Sequence
  Description of Artificial Sequence: Synthetic oligonucleotide
  Target: ATXN2; (-) strand; PAM type: YTN; PAM sequence: TTT
tttttttttttttttaattt

SEQ ID NO: 63359 - DNA, 20 bp, Artificial Sequence
  Description of Artificial Sequence: Synthetic oligonucleotide
  Target: ATXN2; (-) strand; PAM type: YTN; PAM sequence: CTT
ttttttttttttttttaatt

SEQ ID NO: 63360 - DNA, 20 bp, Artificial Sequence
  Description of Artificial Sequence: Synthetic oligonucleotide
  Target: ATXN2; (-) strand; PAM type: YTN; PAM sequence: TTA
aaactttttttttttttttt

SEQ ID NO: 63361 - DNA, 20 bp, Artificial Sequence
  Description of Artificial Sequence: Synthetic oligonucleotide
  Target: ATXN2; (-) strand; PAM type: YTN; PAM sequence: TTT
aaaacttttttttttttttt

SEQ ID NO: 63362 - DNA, 20 bp, Artificial Sequence
  Description of Artificial Sequence: Synthetic oligonucleotide
  Target: ATXN2; (-) strand; PAM type: YTN; PAM sequence: TTT
taaaactttttttttttttt

SEQ ID NO: 63363 - DNA, 20 bp, Artificial Sequence
  Description of Artificial Sequence: Synthetic oligonucleotide
  Target: ATXN2; (-) strand; PAM type: YTN; PAM sequence: TTT
ttaaaacttttttttttttt

SEQ ID NO: 63364 - DNA, 20 bp, Artificial Sequence
  Description of Artificial Sequence: Synthetic oligonucleotide
  Target: ATXN2; (-) strand; PAM type: YTN; PAM sequence: CTT
tttaaaactttttttttttt

SEQ ID NO: 63365 - DNA, 20 bp, Artificial Sequence
  Description of Artificial Sequence: Synthetic oligonucleotide
  Target: ATXN2; (-) strand; PAM type: YTN; PAM sequence: CTA
aacgtagctttttaaaactt

SEQ ID NO: 63366 - DNA, 20 bp, Artificial Sequence
  Description of Artificial Sequence: Synthetic oligonucleotide
  Target: ATXN2; (-) strand; PAM type: YTN; PAM sequence: TTA
aaagccaaagtcctaaacgt

SEQ ID NO: 63367 - DNA, 20 bp, Artificial Sequence
  Description of Artificial Sequence: Synthetic oligonucleotide
  Target: ATXN2; (-) strand; PAM type: YTN; PAM sequence: CTG
agaattaaaagccaaagtcc

SEQ ID NO: 63368 - DNA, 20 bp, Artificial Sequence
  Description of Artificial Sequence: Synthetic oligonucleotide
  Target: ATXN2; (-) strand; PAM type: YTN; PAM sequence: TTG
ccctgagaattaaaagccaa

SEQ ID NO: 63369 - DNA, 20 bp, Artificial Sequence
  Description of Artificial Sequence: Synthetic oligonucleotide
  Target: ATXN2; (-) strand; PAM type: YTN; PAM sequence: TTT
gccctgagaattaaaagcca

SEQ ID NO: 63370 - DNA, 20 bp, Artificial Sequence
  Description of Artificial Sequence: Synthetic oligonucleotide
  Target: ATXN2; (-) strand; PAM type: YTN; PAM sequence: CTG
cccatttgccctgagaatta

SEQ ID NO: 63371 - DNA, 20 bp, Artificial Sequence
  Description of Artificial Sequence: Synthetic oligonucleotide
  Target: ATXN2; (-) strand; PAM type: YTN; PAM sequence: TTC
cgtatagactgcccatttgc

SEQ ID NO: 63372 - DNA, 20 bp, Artificial Sequence
  Description of Artificial Sequence: Synthetic oligonucleotide
  Target: ATXN2; (-) strand; PAM type: YTN; PAM sequence: TTA
aaattccgtatagactgccc

SEQ ID NO: 63373 - DNA, 20 bp, Artificial Sequence
  Description of Artificial Sequence: Synthetic oligonucleotide
  Target: ATXN2; (-) strand; PAM type: YTN; PAM sequence: CTT
aaaattccgtatagactgcc

SEQ ID NO: 63374 - DNA, 20 bp, Artificial Sequence
  Description of Artificial Sequence: Synthetic oligonucleotide
  Target: ATXN2; (-) strand; PAM type: YTN; PAM sequence: CTA
cttaaaattccgtatagact

SEQ ID NO: 63375 - DNA, 20 bp, Artificial Sequence
  Description of Artificial Sequence: Synthetic oligonucleotide
  Target: ATXN2; (-) strand; PAM type: YTN; PAM sequence: CTA
ccctacttaaaattccgtat

SEQ ID NO: 63376 - DNA, 20 bp, Artificial Sequence
  Description of Artificial Sequence: Synthetic oligonucleotide
  Target: ATXN2; (-) strand; PAM type: YTN; PAM sequence: CTC
taccctacttaaaattccgt

SEQ ID NO: 63377 - DNA, 20 bp, Artificial Sequence
  Description of Artificial Sequence: Synthetic oligonucleotide
  Target: ATXN2; (-) strand; PAM type: YTN; PAM sequence: CTG
cccagtactctaccctactt

SEQ ID NO: 63378 - DNA, 20 bp, Artificial Sequence
  Description of Artificial Sequence: Synthetic oligonucleotide
  Target: ATXN2; (-) strand; PAM type: YTN; PAM sequence: CTA
taaatctgcccagtactcta

SEQ ID NO: 63379 - DNA, 20 bp, Artificial Sequence
  Description of Artificial Sequence: Synthetic oligonucleotide
  Target: ATXN2; (-) strand; PAM type: YTN; PAM sequence: CTG
aactataaatctgcccagta

SEQ ID NO: 63380 - DNA, 20 bp, Artificial Sequence
  Description of Artificial Sequence: Synthetic oligonucleotide
  Target: ATXN2; (-) strand; PAM type: YTN; PAM sequence: TTC
tgaactataaatctgcccag

SEQ ID NO: 63381 - DNA, 20 bp, Artificial Sequence
  Description of Artificial Sequence: Synthetic oligonucleotide
  Target: ATXN2; (-) strand; PAM type: YTN; PAM sequence: TTT
ctgaactataaatctgccca

SEQ ID NO: 63382 - DNA, 20 bp, Artificial Sequence
  Description of Artificial Sequence: Synthetic oligonucleotide
  Target: ATXN2; (-) strand; PAM type: YTN; PAM sequence: CTT
tctgaactataaatctgccc

SEQ ID NO: 63383 - DNA, 20 bp, Artificial Sequence
  Description of Artificial Sequence: Synthetic oligonucleotide
  Target: ATXN2; (-) strand; PAM type: YTN; PAM sequence: TTC
acctttctgaactataaatc

SEQ ID NO: 63384 - DNA, 20 bp, Artificial Sequence
  Description of Artificial Sequence: Synthetic oligonucleotide
  Target: ATXN2; (-) strand; PAM type: YTN; PAM sequence: CTG
tgttcacctttctgaactat

SEQ ID NO: 63385 - DNA, 20 bp, Artificial Sequence
  Description of Artificial Sequence: Synthetic oligonucleotide
  Target: ATXN2; (-) strand; PAM type: YTN; PAM sequence: CTG
ctgtgttcacctttctgaac

SEQ ID NO: 63386 - DNA, 20 bp, Artificial Sequence
  Description of Artificial Sequence: Synthetic oligonucleotide
  Target: ATXN2; (-) strand; PAM type: YTN; PAM sequence: TTC
acacaaagctgctgtgttca

SEQ ID NO: 63387 - DNA, 20 bp, Artificial Sequence
  Description of Artificial Sequence: Synthetic oligonucleotide
  Target: ATXN2; (-) strand; PAM type: YTN; PAM sequence: TTT
cacacaaagctgctgtgttc

SEQ ID NO: 63388 - DNA, 20 bp, Artificial Sequence
  Description of Artificial Sequence: Synthetic oligonucleotide
  Target: ATXN2; (-) strand; PAM type: YTN; PAM sequence: TTC
atttcacacaaagctgctgt

SEQ ID NO: 63389 - DNA, 20 bp, Artificial Sequence
  Description of Artificial Sequence: Synthetic oligonucleotide
  Target: ATXN2; (-) strand; PAM type: YTN; PAM sequence: CTC
cagttcatttcacacaaagc

SEQ ID NO: 63390 - DNA, 20 bp, Artificial Sequence
  Description of Artificial Sequence: Synthetic oligonucleotide
  Target: ATXN2; (-) strand; PAM type: YTN; PAM sequence: CTC
cctccagttcatttcacaca

SEQ ID NO: 63391 - DNA, 20 bp, Artificial Sequence
  Description of Artificial Sequence: Synthetic oligonucleotide
  Target: ATXN2; (-) strand; PAM type: YTN; PAM sequence: TTA
gcctccctccagttcatttc

SEQ ID NO: 63392 - DNA, 20 bp, Artificial Sequence
  Description of Artificial Sequence: Synthetic oligonucleotide
  Target: ATXN2; (-) strand; PAM type: YTN; PAM sequence: CTA
attagcctccctccagttca

SEQ ID NO: 63393 - DNA, 20 bp, Artificial Sequence
  Description of Artificial Sequence: Synthetic oligonucleotide
  Target: ATXN2; (-) strand; PAM type: YTN; PAM sequence: CTC
cacatcctaattagcctccc

SEQ ID NO: 63394 - DNA, 20 bp, Artificial Sequence
  Description of Artificial Sequence: Synthetic oligonucleotide
  Target: ATXN2; (-) strand; PAM type: YTN; PAM sequence: CTC
catgacggtccctccacatc

SEQ ID NO: 63395 - DNA, 20 bp, Artificial Sequence
  Description of Artificial Sequence: Synthetic oligonucleotide
  Target: ATXN2; (-) strand; PAM type: YTN; PAM sequence: TTA
gtccagcctccatgacggtc

SEQ ID NO: 63396 - DNA, 20 bp, Artificial Sequence
  Description of Artificial Sequence: Synthetic oligonucleotide
  Target: ATXN2; (-) strand; PAM type: YTN; PAM sequence: CTT
agtccagcctccatgacggt

SEQ ID NO: 63397 - DNA, 20 bp, Artificial Sequence
  Description of Artificial Sequence: Synthetic oligonucleotide
  Target: ATXN2; (-) strand; PAM type: YTN; PAM sequence: CTA
ggcccagcgcttagtccagc

SEQ ID NO: 63398 - DNA, 20 bp, Artificial Sequence
  Description of Artificial Sequence: Synthetic oligonucleotide
  Target: ATXN2; (-) strand; PAM type: YTN; PAM sequence: CTG
actaggcccagcgcttagtc

SEQ ID NO: 63399 - DNA, 20 bp, Artificial Sequence
  Description of Artificial Sequence: Synthetic oligonucleotide
  Target: ATXN2; (-) strand; PAM type: YTN; PAM sequence: TTC
caagctgactaggcccagcg

SEQ ID NO: 63400 - DNA, 20 bp, Artificial Sequence
  Description of Artificial Sequence: Synthetic oligonucleotide
  Target: ATXN2; (-) strand; PAM type: YTN; PAM sequence: CTT
ccaagctgactaggcccagc

SEQ ID NO: 63401 - DNA, 20 bp, Artificial Sequence
  Description of Artificial Sequence: Synthetic oligonucleotide
  Target: ATXN2; (-) strand; PAM type: YTN; PAM sequence: TTA
atgaccttccaagctgacta

SEQ ID NO: 63402 - DNA, 20 bp, Artificial Sequence
  Description of Artificial Sequence: Synthetic oligonucleotide
  Target: ATXN2; (-) strand; PAM type: YTN; PAM sequence: CTT
aatgaccttccaagctgact

SEQ ID NO: 63403 - DNA, 20 bp, Artificial Sequence
  Description of Artificial Sequence: Synthetic oligonucleotide
  Target: ATXN2; (-) strand; PAM type: YTN; PAM sequence: CTA
cttaatgaccttccaagctg

SEQ ID NO: 63404 - DNA, 20 bp, Artificial Sequence
  Description of Artificial Sequence: Synthetic oligonucleotide
  Target: ATXN2; (-) strand; PAM type: YTN; PAM sequence: TTC
acctacttaatgaccttcca

SEQ ID NO: 63405 - DNA, 20 bp, Artificial Sequence
  Description of Artificial Sequence: Synthetic oligonucleotide
  Target: ATXN2; (-) strand; PAM type: YTN; PAM sequence: CTG
aattcacctacttaatgacc

SEQ ID NO: 63406 - DNA, 20 bp, Artificial Sequence
  Description of Artificial Sequence: Synthetic oligonucleotide
  Target: ATXN2; (-) strand; PAM type: YTN; PAM sequence: TTC
tgaattcacctacttaatga

SEQ ID NO: 63407 - DNA, 20 bp, Artificial Sequence
  Description of Artificial Sequence: Synthetic oligonucleotide
  Target: ATXN2; (-) strand; PAM type: YTN; PAM sequence: CTC
attctgaattcacctactta

SEQ ID NO: 63408 - DNA, 20 bp, Artificial Sequence
  Description of Artificial Sequence: Synthetic oligonucleotide
  Target: ATXN2; (-) strand; PAM type: YTN; PAM sequence: CTG
accaatatgtacagtcaggt

SEQ ID NO: 63409 - DNA, 20 bp, Artificial Sequence
  Description of Artificial Sequence: Synthetic oligonucleotide
  Target: ATXN2; (-) strand; PAM type: YTN; PAM sequence: CTA
actgaccaatatgtacagtc

SEQ ID NO: 63410 - DNA, 20 bp, Artificial Sequence
  Description of Artificial Sequence: Synthetic oligonucleotide
  Target: ATXN2; (-) strand; PAM type: YTN; PAM sequence: TTA
gaatgtctaactgaccaata

SEQ ID NO: 63411 - DNA, 20 bp, Artificial Sequence
  Description of Artificial Sequence: Synthetic oligonucleotide
  Target: ATXN2; (-) strand; PAM type: YTN; PAM sequence: TTT
agaatgtctaactgaccaat

SEQ ID NO: 63412 - DNA, 20 bp, Artificial Sequence
  Description of Artificial Sequence: Synthetic oligonucleotide
  Target: ATXN2; (-) strand; PAM type: YTN; PAM sequence: TTA
ggggtttagaatgtctaact

SEQ ID NO: 63413 - DNA, 20 bp, Artificial Sequence
  Description of Artificial Sequence: Synthetic oligonucleotide
  Target: ATXN2; (-) strand; PAM type: YTN; PAM sequence: CTT
aggggtttagaatgtctaac

SEQ ID NO: 63414 - DNA, 20 bp, Artificial Sequence
  Description of Artificial Sequence: Synthetic oligonucleotide
  Target: ATXN2; (-) strand; PAM type: YTN; PAM sequence: TTA
cttaggggtttagaatgtct

SEQ ID NO: 63415 - DNA, 20 bp, Artificial Sequence
  Description of Artificial Sequence: Synthetic oligonucleotide
  Target: ATXN2; (-) strand; PAM type: YTN; PAM sequence: TTT
acttaggggtttagaatgtc

SEQ ID NO: 63416 - DNA, 20 bp, Artificial Sequence
  Description of Artificial Sequence: Synthetic oligonucleotide
  Target: ATXN2; (-) strand; PAM type: YTN; PAM sequence: TTT
tacttaggggtttagaatgt

SEQ ID NO: 63417 - DNA, 20 bp, Artificial Sequence
  Description of Artificial Sequence: Synthetic oligonucleotide
  Target: ATXN2; (-) strand; PAM type: YTN; PAM sequence: TTT
ttacttaggggtttagaatg

SEQ ID NO: 63418 - DNA, 20 bp, Artificial Sequence
  Description of Artificial Sequence: Synthetic oligonucleotide
  Target: ATXN2; (-) strand; PAM type: YTN; PAM sequence: TTT
tttacttaggggtttagaat

SEQ ID NO: 63419 - DNA, 20 bp, Artificial Sequence
  Description of Artificial Sequence: Synthetic oligonucleotide
  Target: ATXN2; (-) strand; PAM type: YTN; PAM sequence: TTT
ttttacttaggggtttagaa

SEQ ID NO: 63420 - DNA, 20 bp, Artificial Sequence
  Description of Artificial Sequence: Synthetic oligonucleotide
  Target: ATXN2; (-) strand; PAM type: YTN; PAM sequence: CTT
tttttacttaggggtttaga

SEQ ID NO: 63421 - DNA, 20 bp, Artificial Sequence
  Description of Artificial Sequence: Synthetic oligonucleotide
  Target: ATXN2; (-) strand; PAM type: YTN; PAM sequence: CTC
ctttttttacttaggggttt

SEQ ID NO: 63422 - DNA, 20 bp, Artificial Sequence
  Description of Artificial Sequence: Synthetic oligonucleotide
  Target: ATXN2; (-) strand; PAM type: YTN; PAM sequence: CTG
ccatctcctttttttactta

SEQ ID NO: 63423 - DNA, 20 bp, Artificial Sequence
  Description of Artificial Sequence: Synthetic oligonucleotide
  Target: ATXN2; (-) strand; PAM type: YTN; PAM sequence: CTC
ccctgccatctccttttttt

SEQ ID NO: 63424 - DNA, 20 bp, Artificial Sequence
  Description of Artificial Sequence: Synthetic oligonucleotide
  Target: ATXN2; (-) strand; PAM type: YTN; PAM sequence: TTC
tcccctgccatctccttttt

SEQ ID NO: 63425 - DNA, 20 bp, Artificial Sequence
  Description of Artificial Sequence: Synthetic oligonucleotide
  Target: ATXN2; (-) strand; PAM type: YTN; PAM sequence: CTT
ctcccctgccatctcctttt

SEQ ID NO: 63426 - DNA, 20 bp, Artificial Sequence
  Description of Artificial Sequence: Synthetic oligonucleotide
  Target: ATXN2; (-) strand; PAM type: YTN; PAM sequence: CTC
ttctcccctgccatctcctt

SEQ ID NO: 63427 - DNA, 20 bp, Artificial Sequence
  Description of Artificial Sequence: Synthetic oligonucleotide
  Target: ATXN2; (-) strand; PAM type: YTN; PAM sequence: CTG
tctcttctcccctgccatct

SEQ ID NO: 63428 - DNA, 20 bp, Artificial Sequence
  Description of Artificial Sequence: Synthetic oligonucleotide
  Target: ATXN2; (-) strand; PAM type: YTN; PAM sequence: CTC
tgtctcttctcccctgccat

SEQ ID NO: 63429 - DNA, 20 bp, Artificial Sequence
  Description of Artificial Sequence: Synthetic oligonucleotide
  Target: ATXN2; (-) strand; PAM type: YTN; PAM sequence: TTG
gccaccatgctctgtctctt

SEQ ID NO: 63430 - DNA, 20 bp, Artificial Sequence
  Description of Artificial Sequence: Synthetic oligonucleotide
  Target: ATXN2; (-) strand; PAM type: YTN; PAM sequence: TTT
ggccaccatgctctgtctct

SEQ ID NO: 63431 - DNA, 20 bp, Artificial Sequence
  Description of Artificial Sequence: Synthetic oligonucleotide
  Target: ATXN2; (-) strand; PAM type: YTN; PAM sequence: CTG
tttggccaccatgctctgtc

SEQ ID NO: 63432 - DNA, 20 bp, Artificial Sequence
  Description of Artificial Sequence: Synthetic oligonucleotide
  Target: ATXN2; (-) strand; PAM type: YTN; PAM sequence: TTC
tgtttggccaccatgctctg

SEQ ID NO: 63433 - DNA, 20 bp, Artificial Sequence
  Description of Artificial Sequence: Synthetic oligonucleotide
  Target: ATXN2; (-) strand; PAM type: YTN; PAM sequence: CTG
gaaggttctgtttggccacc

SEQ ID NO: 63434 - DNA, 20 bp, Artificial Sequence
  Description of Artificial Sequence: Synthetic oligonucleotide
  Target: ATXN2; (-) strand; PAM type: YTN; PAM sequence: TTG
gggatgatcactggaaggtt

SEQ ID NO: 63435 - DNA, 20 bp, Artificial Sequence
  Description of Artificial Sequence: Synthetic oligonucleotide
  Target: ATXN2; (-) strand; PAM type: YTN; PAM sequence: TTG
ttggggatgatcactggaag

SEQ ID NO: 63436 - DNA, 20 bp, Artificial Sequence
  Description of Artificial Sequence: Synthetic oligonucleotide
  Target: ATXN2; (-) strand; PAM type: YTN; PAM sequence: CTT
gttggggatgatcactggaa

SEQ ID NO: 63437 - DNA, 20 bp, Artificial Sequence
  Description of Artificial Sequence: Synthetic oligonucleotide
  Target: ATXN2; (-) strand; PAM type: YTN; PAM sequence: CTC
cttgttggggatgatcactg

SEQ ID NO: 63438 - DNA, 20 bp, Artificial Sequence
  Description of Artificial Sequence: Synthetic oligonucleotide
  Target: ATXN2; (-) strand; PAM type: YTN; PAM sequence: TTG
gtgctccttgttggggatga

SEQ ID NO: 63439 - DNA, 20 bp, Artificial Sequence
  Description of Artificial Sequence: Synthetic oligonucleotide
  Target: ATXN2; (-) strand; PAM type: YTN; PAM sequence: TTT
ggtgctccttgttggggatg

SEQ ID NO: 63440 - DNA, 20 bp, Artificial Sequence
  Description of Artificial Sequence: Synthetic oligonucleotide
  Target: ATXN2; (-) strand; PAM type: YTN; PAM sequence: TTC
aatttggtgctccttgttgg

SEQ ID NO: 63441 - DNA, 20 bp, Artificial Sequence
  Description of Artificial Sequence: Synthetic oligonucleotide
  Target: ATXN2; (-) strand; PAM type: YTN; PAM sequence: TTG
ttcaatttggtgctccttgt

SEQ ID NO: 63442 - DNA, 20 bp, Artificial Sequence
  Description of Artificial Sequence: Synthetic oligonucleotide
  Target: ATXN2; (-) strand; PAM type: YTN; PAM sequence: TTG
tgtggatagttgttcaattt

SEQ ID NO: 63443 - DNA, 20 bp, Artificial Sequence
  Description of Artificial Sequence: Synthetic oligonucleotide
  Target: ATXN2; (-) strand; PAM type: YTN; PAM sequence: CTT
gtgtggatagttgttcaatt

SEQ ID NO: 63444 - DNA, 20 bp, Artificial Sequence
  Description of Artificial Sequence: Synthetic oligonucleotide
  Target: ATXN2; (-) strand; PAM type: YTN; PAM sequence: TTC
ttgtgtggatagttgttcaa

SEQ ID NO: 63445 - DNA, 20 bp, Artificial Sequence
  Description of Artificial Sequence: Synthetic oligonucleotide
  Target: ATXN2; (-) strand; PAM type: YTN; PAM sequence: TTT
cttgtgtggatagttgttca

SEQ ID NO: 63446 - DNA, 20 bp, Artificial Sequence
  Description of Artificial Sequence: Synthetic oligonucleotide
  Target: ATXN2; (-) strand; PAM type: YTN; PAM sequence: CTT
tcttgtgtggatagttgttc

SEQ ID NO: 63447 - DNA, 20 bp, Artificial Sequence
  Description of Artificial Sequence: Synthetic oligonucleotide
  Target: ATXN2; (-) strand; PAM type: YTN; PAM sequence: TTA
tgaaggtgctttcttgtgtg

SEQ ID NO: 63448 - DNA, 20 bp, Artificial Sequence
  Description of Artificial Sequence: Synthetic oligonucleotide
  Target: ATXN2; (-) strand; PAM type: YTN; PAM sequence: CTT
atgaaggtgctttcttgtgt

SEQ ID NO: 63449 - DNA, 20 bp, Artificial Sequence
  Description of Artificial Sequence: Synthetic oligonucleotide
  Target: ATXN2; (-) strand; PAM type: YTN; PAM sequence: TTC
ttatgaaggtgctttcttgt

SEQ ID NO: 63450 - DNA, 20 bp, Artificial Sequence
  Description of Artificial Sequence: Synthetic oligonucleotide
  Target: ATXN2; (-) strand; PAM type: YTN; PAM sequence: TTG
gttcttatgaaggtgctttc

SEQ ID NO: 63451 - DNA, 20 bp, Artificial Sequence
  Description of Artificial Sequence: Synthetic oligonucleotide
  Target: ATXN2; (-) strand; PAM type: YTN; PAM sequence: TTT
ggttcttatgaaggtgcttt

SEQ ID NO: 63452 - DNA, 20 bp, Artificial Sequence
  Description of Artificial Sequence: Synthetic oligonucleotide
  Target: ATXN2; (-) strand; PAM type: YTN; PAM sequence: TTT
tggttcttatgaaggtgctt

SEQ ID NO: 63453 - DNA, 20 bp, Artificial Sequence
  Description of Artificial Sequence: Synthetic oligonucleotide
  Target: ATXN2; (-) strand; PAM type: YTN; PAM sequence: TTT
ttggttcttatgaaggtgct

SEQ ID NO: 63454 - DNA, 20 bp, Artificial Sequence
  Description of Artificial Sequence: Synthetic oligonucleotide
  Target: ATXN2; (-) strand; PAM type: YTN; PAM sequence: CTA
atttttggttcttatgaagg

SEQ ID NO: 63455 - DNA, 20 bp, Artificial Sequence
  Description of Artificial Sequence: Synthetic oligonucleotide
  Target: ATXN2; (-) strand; PAM type: YTN; PAM sequence: TTA
cctaatttttggttcttatg

SEQ ID NO: 63456 - DNA, 20 bp, Artificial Sequence
  Description of Artificial Sequence: Synthetic oligonucleotide
  Target: ATXN2; (-) strand; PAM type: YTN; PAM sequence: CTT
acctaatttttggttcttat

SEQ ID NO: 63457 - DNA, 20 bp, Artificial Sequence
  Description of Artificial Sequence: Synthetic oligonucleotide
  Target: ATXN2; (-) strand; PAM type: YTN; PAM sequence: CTG
tgatcgcttacctaattttt

SEQ ID NO: 63458 - DNA, 20 bp, Artificial Sequence
  Description of Artificial Sequence: Synthetic oligonucleotide
  Target: ATXN2; (-) strand; PAM type: YTN; PAM sequence: CTG
ggtactgtgatcgcttacct

SEQ ID NO: 63459 - DNA, 20 bp, Artificial Sequence
  Description of Artificial Sequence: Synthetic oligonucleotide
  Target: ATXN2; (-) strand; PAM type: YTN; PAM sequence: TTG
ataggatgtcaaaactgggt

SEQ ID NO: 63460 - DNA, 20 bp, Artificial Sequence
  Description of Artificial Sequence: Synthetic oligonucleotide
  Target: ATXN2; (-) strand; PAM type: YTN; PAM sequence: CTT
gataggatgtcaaaactggg

SEQ ID NO: 63461 - DNA, 20 bp, Artificial Sequence
  Description of Artificial Sequence: Synthetic oligonucleotide
  Target: ATXN2; (-) strand; PAM type: YTN; PAM sequence: TTC
cttgataggatgtcaaaact

SEQ ID NO: 63462 - DNA, 20 bp, Artificial Sequence
  Description of Artificial Sequence: Synthetic oligonucleotide
  Target: ATXN2; (-) strand; PAM type: YTN; PAM sequence: TTT
ccttgataggatgtcaaaac

SEQ ID NO: 63463 - DNA, 20 bp, Artificial Sequence
  Description of Artificial Sequence: Synthetic oligonucleotide
  Target: ATXN2; (-) strand; PAM type: YTN; PAM sequence: TTT
tccttgataggatgtcaaaa

SEQ ID NO: 63464 - DNA, 20 bp, Artificial Sequence
  Description of Artificial Sequence: Synthetic oligonucleotide
  Target: ATXN2; (-) strand; PAM type: YTN; PAM sequence: TTT
ttccttgataggatgtcaaa

SEQ ID NO: 63465 - DNA, 20 bp, Artificial Sequence
  Description of Artificial Sequence: Synthetic oligonucleotide
  Target: ATXN2; (-) strand; PAM type: YTN; PAM sequence: CTT
tttccttgataggatgtcaa

SEQ ID NO: 63466 - DNA, 20 bp, Artificial Sequence
  Description of Artificial Sequence: Synthetic oligonucleotide
  Target: ATXN2; (-) strand; PAM type: YTN; PAM sequence: TTG
gtgtctttttccttgatagg

SEQ ID NO: 63467 - DNA, 20 bp, Artificial Sequence
  Description of Artificial Sequence: Synthetic oligonucleotide
  Target: ATXN2; (-) strand; PAM type: YTN; PAM sequence: TTT
ggtgtctttttccttgatag

SEQ ID NO: 63468 - DNA, 20 bp, Artificial Sequence
  Description of Artificial Sequence: Synthetic oligonucleotide
  Target: ATXN2; (-) strand; PAM type: YTN; PAM sequence: TTT
tggtgtctttttccttgata

SEQ ID NO: 63469 - DNA, 20 bp, Artificial Sequence
  Description of Artificial Sequence: Synthetic oligonucleotide
  Target: ATXN2; (-) strand; PAM type: YTN; PAM sequence: TTT
ttggtgtctttttccttgat

SEQ ID NO: 63470 - DNA, 20 bp, Artificial Sequence
  Description of Artificial Sequence: Synthetic oligonucleotide
  Target: ATXN2; (-) strand; PAM type: YTN; PAM sequence: TTT
tttggtgtctttttccttga

SEQ ID NO: 63471 - DNA, 20 bp, Artificial Sequence
  Description of Artificial Sequence: Synthetic oligonucleotide
  Target: ATXN2; (-) strand; PAM type: YTN; PAM sequence: CTT
ttttggtgtctttttccttg

SEQ ID NO: 63472 - DNA, 20 bp, Artificial Sequence
  Description of Artificial Sequence: Synthetic oligonucleotide
  Target: ATXN2; (-) strand; PAM type: YTN; PAM sequence: TTA
tcttttttggtgtctttttc

SEQ ID NO: 63473 - DNA, 20 bp, Artificial Sequence
  Description of Artificial Sequence: Synthetic oligonucleotide
  Target: ATXN2; (-) strand; PAM type: YTN; PAM sequence: CTT
atcttttttggtgtcttttt

SEQ ID NO: 63474 - DNA, 20 bp, Artificial Sequence
  Description of Artificial Sequence: Synthetic oligonucleotide
  Target: ATXN2; (-) strand; PAM type: YTN; PAM sequence: TTC
cttatcttttttggtgtctt

SEQ ID NO: 63475 - DNA, 20 bp, Artificial Sequence
  Description of Artificial Sequence: Synthetic oligonucleotide
  Target: ATXN2; (-) strand; PAM type: YTN; PAM sequence: CTT
ccttatcttttttggtgtct

SEQ ID NO: 63476 - DNA, 20 bp, Artificial Sequence
  Description of Artificial Sequence: Synthetic oligonucleotide
  Target: ATXN2; (-) strand; PAM type: YTN; PAM sequence: CTA
tcttccttatcttttttggt

SEQ ID NO: 63477 - DNA, 20 bp, Artificial Sequence
  Description of Artificial Sequence: Synthetic oligonucleotide
  Target: ATXN2; (-) strand; PAM type: YTN; PAM sequence: TTC
aagactatcttccttatctt

SEQ ID NO: 63478 - DNA, 20 bp, Artificial Sequence
  Description of Artificial Sequence: Synthetic oligonucleotide
  Target: ATXN2; (-) strand; PAM type: YTN; PAM sequence: TTG
gaggggcagttcaagactat

SEQ ID NO: 63479 - DNA, 20 bp, Artificial Sequence
  Description of Artificial Sequence: Synthetic oligonucleotide
  Target: ATXN2; (-) strand; PAM type: YTN; PAM sequence: TTG
tgggggaatgtcaggggtgt

SEQ ID NO: 63480 - DNA, 20 bp, Artificial Sequence
  Description of Artificial Sequence: Synthetic oligonucleotide
  Target: ATXN2; (-) strand; PAM type: YTN; PAM sequence: CTG
cattgtgggggaatgtcagg

SEQ ID NO: 63481 - DNA, 20 bp, Artificial Sequence
  Description of Artificial Sequence: Synthetic oligonucleotide
  Target: ATXN2; (-) strand; PAM type: YTN; PAM sequence: CTC
caccccacactgcattgtgg

SEQ ID NO: 63482 - DNA, 20 bp, Artificial Sequence
  Description of Artificial Sequence: Synthetic oligonucleotide
  Target: ATXN2; (-) strand; PAM type: YTN; PAM sequence: TTC
tccaccccacactgcattgt

SEQ ID NO: 63483 - DNA, 20 bp, Artificial Sequence
  Description of Artificial Sequence: Synthetic oligonucleotide
  Target: ATXN2; (-) strand; PAM type: YTN; PAM sequence: TTT
ctccaccccacactgcattg

SEQ ID NO: 63484 - DNA, 20 bp, Artificial Sequence
  Description of Artificial Sequence: Synthetic oligonucleotide
  Target: ATXN2; (-) strand; PAM type: YTN; PAM sequence: CTT
tctccaccccacactgcatt

SEQ ID NO: 63485 - DNA, 20 bp, Artificial Sequence
  Description of Artificial Sequence: Synthetic oligonucleotide
  Target: ATXN2; (-) strand; PAM type: YTN; PAM sequence: TTC
tttctccaccccacactgca

SEQ ID NO: 63486 - DNA, 20 bp, Artificial Sequence
  Description of Artificial Sequence: Synthetic oligonucleotide
  Target: ATXN2; (-) strand; PAM type: YTN; PAM sequence: CTC
ccccgagcacacagattctt

SEQ ID NO: 63487 - DNA, 20 bp, Artificial Sequence
  Description of Artificial Sequence: Synthetic oligonucleotide
  Target: ATXN2; (-) strand; PAM type: YTN; PAM sequence: CTC
tcccccgagcacacagattc

SEQ ID NO: 63488 - DNA, 20 bp, Artificial Sequence
  Description of Artificial Sequence: Synthetic oligonucleotide
  Target: ATXN2; (-) strand; PAM type: YTN; PAM sequence: CTC
tctcccccgagcacacagat

SEQ ID NO: 63489 - DNA, 20 bp, Artificial Sequence
  Description of Artificial Sequence: Synthetic oligonucleotide
  Target: ATXN2; (-) strand; PAM type: YTN; PAM sequence: CTC
tctctcccccgagcacacag

SEQ ID NO: 63490 - DNA, 20 bp, Artificial Sequence
  Description of Artificial Sequence: Synthetic oligonucleotide
  Target: ATXN2; (-) strand; PAM type: YTN; PAM sequence: CTC
tctctctcccccgagcacac

SEQ ID NO: 63491 - DNA, 20 bp, Artificial Sequence
  Description of Artificial Sequence: Synthetic oligonucleotide
  Target: ATXN2; (-) strand; PAM type: YTN; PAM sequence: TTC
tctctctctcccccgagcac

SEQ ID NO: 63492 - DNA, 20 bp, Artificial Sequence
  Description of Artificial Sequence: Synthetic oligonucleotide
  Target: ATXN2; (-) strand; PAM type: YTN; PAM sequence: TTT
ctctctctctcccccgagca

SEQ ID NO: 63493 - DNA, 20 bp, Artificial Sequence
  Description of Artificial Sequence: Synthetic oligonucleotide
  Target: ATXN2; (-) strand; PAM type: YTN; PAM sequence: TTC
aatgcaaaatcccacagtca

SEQ ID NO: 63494 - DNA, 20 bp, Artificial Sequence
  Description of Artificial Sequence: Synthetic oligonucleotide
  Target: ATXN2; (-) strand; PAM type: YTN; PAM sequence: TTT
caatgcaaaatcccacagtc

SEQ ID NO: 63495 - DNA, 20 bp, Artificial Sequence
  Description of Artificial Sequence: Synthetic oligonucleotide
  Target: ATXN2; (-) strand; PAM type: YTN; PAM sequence: CTG
agtttcaatgcaaaatccca

SEQ ID NO: 63496 - DNA, 20 bp, Artificial Sequence
  Description of Artificial Sequence: Synthetic oligonucleotide
  Target: ATXN2; (-) strand; PAM type: YTN; PAM sequence: CTG
tgacagggcagcactgagtt

SEQ ID NO: 63497 - DNA, 20 bp, Artificial Sequence
  Description of Artificial Sequence: Synthetic oligonucleotide
  Target: ATXN2; (-) strand; PAM type: YTN; PAM sequence: TTC
cactgtgacagggcagcact

SEQ ID NO: 63498 - DNA, 20 bp, Artificial Sequence
  Description of Artificial Sequence: Synthetic oligonucleotide
  Target: ATXN2; (-) strand; PAM type: YTN; PAM sequence: TTT
ccactgtgacagggcagcac

SEQ ID NO: 63499 - DNA, 20 bp, Artificial Sequence
  Description of Artificial Sequence: Synthetic oligonucleotide
  Target: ATXN2; (-) strand; PAM type: YTN; PAM sequence: CTT
tccactgtgacagggcagca

SEQ ID NO: 63500 - DNA, 20 bp, Artificial Sequence
  Description of Artificial Sequence: Synthetic oligonucleotide
  Target: ATXN2; (-) strand; PAM type: YTN; PAM sequence: CTG
ctttccactgtgacagggca

SEQ ID NO: 63501 - DNA, 20 bp, Artificial Sequence
  Description of Artificial Sequence: Synthetic oligonucleotide
  Target: ATXN2; (-) strand; PAM type: YTN; PAM sequence: CTA
tgctgctttccactgtgaca

SEQ ID NO: 63502 - DNA, 20 bp, Artificial Sequence
  Description of Artificial Sequence: Synthetic oligonucleotide
  Target: ATXN2; (-) strand; PAM type: YTN; PAM sequence: CTG
tcctatgctgctttccactg

SEQ ID NO: 63503 - DNA, 20 bp, Artificial Sequence
  Description of Artificial Sequence: Synthetic oligonucleotide
  Target: ATXN2; (-) strand; PAM type: YTN; PAM sequence: TTC
tgtcctatgctgctttccac

SEQ ID NO: 63504 - DNA, 20 bp, Artificial Sequence
  Description of Artificial Sequence: Synthetic oligonucleotide
  Target: ATXN2; (-) strand; PAM type: YTN; PAM sequence: CTG
aattctgtcctatgctgctt

SEQ ID NO: 63505 - DNA, 20 bp, Artificial Sequence
  Description of Artificial Sequence: Synthetic oligonucleotide
  Target: ATXN2; (-) strand; PAM type: YTN; PAM sequence: CTG
gctgaattctgtcctatgct

SEQ ID NO: 63506 - DNA, 20 bp, Artificial Sequence
  Description of Artificial Sequence: Synthetic oligonucleotide
  Target: ATXN2; (-) strand; PAM type: YTN; PAM sequence: CTG
tgggtgctggctgaattctg

SEQ ID NO: 63507 - DNA, 20 bp, Artificial Sequence
  Description of Artificial Sequence: Synthetic oligonucleotide
  Target: ATXN2; (-) strand; PAM type: YTN; PAM sequence: CTC
tgtgggtgctggctgaattc

SEQ ID NO: 63508 - DNA, 20 bp, Artificial Sequence
  Description of Artificial Sequence: Synthetic oligonucleotide
  Target: ATXN2; (-) strand; PAM type: YTN; PAM sequence: CTC
cctctgtgggtgctggctga

SEQ ID NO: 63509 - DNA, 20 bp, Artificial Sequence
  Description of Artificial Sequence: Synthetic oligonucleotide
  Target: ATXN2; (-) strand; PAM type: YTN; PAM sequence: CTA
aatactccctctgtgggtgc

SEQ ID NO: 63510 - DNA, 20 bp, Artificial Sequence
  Description of Artificial Sequence: Synthetic oligonucleotide
  Target: ATXN2; (-) strand; PAM type: YTN; PAM sequence: CTA
gtctaaatactccctctgtg

SEQ ID NO: 63511 - DNA, 20 bp, Artificial Sequence
  Description of Artificial Sequence: Synthetic oligonucleotide
  Target: ATXN2; (-) strand; PAM type: YTN; PAM sequence: CTA
gggctagtctaaatactccc

SEQ ID NO: 63512 - DNA, 20 bp, Artificial Sequence
  Description of Artificial Sequence: Synthetic oligonucleotide
  Target: ATXN2; (-) strand; PAM type: YTN; PAM sequence: CTG
actagggctagtctaaatac

SEQ ID NO: 63513 - DNA, 20 bp, Artificial Sequence
  Description of Artificial Sequence: Synthetic oligonucleotide
  Target: ATXN2; (-) strand; PAM type: YTN; PAM sequence: CTC
tgactagggctagtctaaat

SEQ ID NO: 63514 - DNA, 20 bp, Artificial Sequence
  Description of Artificial Sequence: Synthetic oligonucleotide
  Target: ATXN2; (-) strand; PAM type: YTN; PAM sequence: TTC
ccctctgactagggctagtc

SEQ ID NO: 63515 - DNA, 20 bp, Artificial Sequence
  Description of Artificial Sequence: Synthetic oligonucleotide
  Target: ATXN2; (-) strand; PAM type: YTN; PAM sequence: CTG
ggatggacaattcccctctg

SEQ ID NO: 63516 - DNA, 20 bp, Artificial Sequence
  Description of Artificial Sequence: Synthetic oligonucleotide
  Target: ATXN2; (-) strand; PAM type: YTN; PAM sequence: CTA
atcactgggatggacaattc

SEQ ID NO: 63517 - DNA, 20 bp, Artificial Sequence
  Description of Artificial Sequence: Synthetic oligonucleotide
  Target: ATXN2; (-) strand; PAM type: YTN; PAM sequence: TTC
taatcactgggatggacaat

SEQ ID NO: 63518 - DNA, 20 bp, Artificial Sequence
  Description of Artificial Sequence: Synthetic oligonucleotide
  Target: ATXN2; (-) strand; PAM type: YTN; PAM sequence: TTC
agattctaatcactgggatg

SEQ ID NO: 63519 - DNA, 20 bp, Artificial Sequence
  Description of Artificial Sequence: Synthetic oligonucleotide
  Target: ATXN2; (-) strand; PAM type: YTN; PAM sequence: TTA
cagaccatagtgcccagccc

SEQ ID NO: 63520 - DNA, 20 bp, Artificial Sequence
  Description of Artificial Sequence: Synthetic oligonucleotide
  Target: ATXN2; (-) strand; PAM type: YTN; PAM sequence: CTG
ggattacagaccatagtgcc

SEQ ID NO: 63521 - DNA, 20 bp, Artificial Sequence
  Description of Artificial Sequence: Synthetic oligonucleotide
  Target: ATXN2; (-) strand; PAM type: YTN; PAM sequence: CTC
ccaaagtgctgggattacag

SEQ ID NO: 63522 - DNA, 20 bp, Artificial Sequence
  Description of Artificial Sequence: Synthetic oligonucleotide
  Target: ATXN2; (-) strand; PAM type: YTN; PAM sequence: CTC
ggcctcccaaagtgctggga

SEQ ID NO: 63523 - DNA, 20 bp, Artificial Sequence
  Description of Artificial Sequence: Synthetic oligonucleotide
  Target: ATXN2; (-) strand; PAM type: YTN; PAM sequence: TTA
tccgtccgcctcggcctccc

SEQ ID NO: 63524 - DNA, 20 bp, Artificial Sequence
  Description of Artificial Sequence: Synthetic oligonucleotide
  Target: ATXN2; (-) strand; PAM type: YTN; PAM sequence: CTC
aggttatccgtccgcctcgg

SEQ ID NO: 63525 - DNA, 20 bp, Artificial Sequence
  Description of Artificial Sequence: Synthetic oligonucleotide
  Target: ATXN2; (-) strand; PAM type: YTN; PAM sequence: CTC
ccgacctcaggttatccgtc

SEQ ID NO: 63526 - DNA, 20 bp, Artificial Sequence
  Description of Artificial Sequence: Synthetic oligonucleotide
  Target: ATXN2; (-) strand; PAM type: YTN; PAM sequence: TTG
aactcccgacctcaggttat

SEQ ID NO: 63527 - DNA, 20 bp, Artificial Sequence
  Description of Artificial Sequence: Synthetic oligonucleotide
  Target: ATXN2; (-) strand; PAM type: YTN; PAM sequence: CTT
gaactcccgacctcaggtta

SEQ ID NO: 63528 - DNA, 20 bp, Artificial Sequence
  Description of Artificial Sequence: Synthetic oligonucleotide
  Target: ATXN2; (-) strand; PAM type: YTN; PAM sequence: CTG
gtcttgaactcccgacctca

SEQ ID NO: 63529 - DNA, 20 bp, Artificial Sequence
  Description of Artificial Sequence: Synthetic oligonucleotide
  Target: ATXN2; (-) strand; PAM type: YTN; PAM sequence: TTG
gtcaggctggtcttgaactc

SEQ ID NO: 63530 - DNA, 20 bp, Artificial Sequence
  Description of Artificial Sequence: Synthetic oligonucleotide
  Target: ATXN2; (-) strand; PAM type: YTN; PAM sequence: CTC
catgttggtcaggctggtct

SEQ ID NO: 63531 - DNA, 20 bp, Artificial Sequence
  Description of Artificial Sequence: Synthetic oligonucleotide
  Target: ATXN2; (-) strand; PAM type: YTN; PAM sequence: TTC
tccatgttggtcaggctggt

SEQ ID NO: 63532 - DNA, 20 bp, Artificial Sequence
  Description of Artificial Sequence: Synthetic oligonucleotide
  Target: ATXN2; (-) strand; PAM type: YTN; PAM sequence: TTT
ctccatgttggtcaggctgg

SEQ ID NO: 63533 - DNA, 20 bp, Artificial Sequence
  Description of Artificial Sequence: Synthetic oligonucleotide
  Target: ATXN2; (-) strand; PAM type: YTN; PAM sequence: TTA
gtagagatgaggtttctcca

SEQ ID NO: 63534 - DNA, 20 bp, Artificial Sequence
  Description of Artificial Sequence: Synthetic oligonucleotide
  Target: ATXN2; (-) strand; PAM type: YTN; PAM sequence: TTT
agtagagatgaggtttctcc

SEQ ID NO: 63535 - DNA, 20 bp, Artificial Sequence
  Description of Artificial Sequence: Synthetic oligonucleotide
  Target: ATXN2; (-) strand; PAM type: YTN; PAM sequence: TTT
tagtagagatgaggtttctc

SEQ ID NO: 63536 - DNA, 20 bp, Artificial Sequence
  Description of Artificial Sequence: Synthetic oligonucleotide
  Target: ATXN2; (-) strand; PAM type: YTN; PAM sequence: TTT
ttagtagagatgaggtttct

SEQ ID NO: 63537 - DNA, 20 bp, Artificial Sequence
  Description of Artificial Sequence: Synthetic oligonucleotide
  Target: ATXN2; (-) strand; PAM type: YTN; PAM sequence: TTT
tttagtagagatgaggtttc

SEQ ID NO: 63538 - DNA, 20 bp, Artificial Sequence
  Description of Artificial Sequence: Synthetic oligonucleotide
  Target: ATXN2; (-) strand; PAM type: YTN; PAM sequence: TTG
ttttttagtagagatgaggt

SEQ ID NO: 63539 - DNA, 20 bp, Artificial Sequence
  Description of Artificial Sequence: Synthetic oligonucleotide
  Target: ATXN2; (-) strand; PAM type: YTN; PAM sequence: TTT
gttttttagtagagatgagg

SEQ ID NO: 63540 - DNA, 20 bp, Artificial Sequence
  Description of Artificial Sequence: Synthetic oligonucleotide
  Target: ATXN2; (-) strand; PAM type: YTN; PAM sequence: TTT
tgttttttagtagagatgag

SEQ ID NO: 63541 - DNA, 20 bp, Artificial Sequence
  Description of Artificial Sequence: Synthetic oligonucleotide
  Target: ATXN2; (-) strand; PAM type: YTN; PAM sequence: TTT
ttgttttttagtagagatga

SEQ ID NO: 63542 - DNA, 20 bp, Artificial Sequence
  Description of Artificial Sequence: Synthetic oligonucleotide
  Target: ATXN2; (-) strand; PAM type: YTN; PAM sequence: TTT
tttgttttttagtagagatg

SEQ ID NO: 63543 - DNA, 20 bp, Artificial Sequence
  Description of Artificial Sequence: Synthetic oligonucleotide
  Target: ATXN2; (-) strand; PAM type: YTN; PAM sequence: TTT
ttttgttttttagtagagat

SEQ ID NO: 63544 - DNA, 20 bp, Artificial Sequence
  Description of Artificial Sequence: Synthetic oligonucleotide
  Target: ATXN2; (-) strand; PAM type: YTN; PAM sequence: CTA
atttttttgttttttagtag

SEQ ID NO: 63545 - DNA, 20 bp, Artificial Sequence
  Description of Artificial Sequence: Synthetic oligonucleotide
  Target: ATXN2; (-) strand; PAM type: YTN; PAM sequence: CTG
gctaatttttttgtttttta

SEQ ID NO: 63546 - DNA, 20 bp, Artificial Sequence
  Description of Artificial Sequence: Synthetic oligonucleotide
  Target: ATXN2; (-) strand; PAM type: YTN; PAM sequence: CTC
tggctaatttttttgttttt

SEQ ID NO: 63547 - DNA, 20 bp, Artificial Sequence
  Description of Artificial Sequence: Synthetic oligonucleotide
  Target: ATXN2; (-) strand; PAM type: YTN; PAM sequence: CTA
ccacctctggctaatttttt

SEQ ID NO: 63548 - DNA, 20 bp, Artificial Sequence
  Description of Artificial Sequence: Synthetic oligonucleotide
  Target: ATXN2; (-) strand; PAM type: YTN; PAM sequence: TTA
ccggcatgcgctaccacctc

SEQ ID NO: 63549 - DNA, 20 bp, Artificial Sequence
  Description of Artificial Sequence: Synthetic oligonucleotide
  Target: ATXN2; (-) strand; PAM type: YTN; PAM sequence: CTG
ggattaccggcatgcgctac

SEQ ID NO: 63550 - DNA, 20 bp, Artificial Sequence
  Description of Artificial Sequence: Synthetic oligonucleotide
  Target: ATXN2; (-) strand; PAM type: YTN; PAM sequence: CTG
agtagctgggattaccggca

SEQ ID NO: 63551 - DNA, 20 bp, Artificial Sequence
  Description of Artificial Sequence: Synthetic oligonucleotide
  Target: ATXN2; (-) strand; PAM type: YTN; PAM sequence: CTC
ctgagtagctgggattaccg

SEQ ID NO: 63552 - DNA, 20 bp, Artificial Sequence
  Description of Artificial Sequence: Synthetic oligonucleotide
  Target: ATXN2; (-) strand; PAM type: YTN; PAM sequence: CTC
agcctcctgagtagctggga

SEQ ID NO: 63553 - DNA, 20 bp, Artificial Sequence
  Description of Artificial Sequence: Synthetic oligonucleotide
  Target: ATXN2; (-) strand; PAM type: YTN; PAM sequence: CTA
cctcagcctcctgagtagct

SEQ ID NO: 63554 - DNA, 20 bp, Artificial Sequence
  Description of Artificial Sequence: Synthetic oligonucleotide
  Target: ATXN2; (-) strand; PAM type: YTN; PAM sequence: CTC
ctacctcagcctcctgagta

SEQ ID NO: 63555 - DNA, 20 bp, Artificial Sequence
  Description of Artificial Sequence: Synthetic oligonucleotide
  Target: ATXN2; (-) strand; PAM type: YTN; PAM sequence: TTC
tcctacctcagcctcctgag

SEQ ID NO: 63556 - DNA, 20 bp, Artificial Sequence
  Description of Artificial Sequence: Synthetic oligonucleotide
  Target: ATXN2; (-) strand; PAM type: YTN; PAM sequence: TTC
aaataattctcctacctcag

SEQ ID NO: 63557 - DNA, 20 bp, Artificial Sequence
  Description of Artificial Sequence: Synthetic oligonucleotide
  Target: ATXN2; (-) strand; PAM type: YTN; PAM sequence: CTC
ccgggttcaaataattctcc

SEQ ID NO: 63558 - DNA, 20 bp, Artificial Sequence
  Description of Artificial Sequence: Synthetic oligonucleotide
  Target: ATXN2; (-) strand; PAM type: YTN; PAM sequence: CTC
cgcctcccgggttcaaataa

SEQ ID NO: 63559 - DNA, 20 bp, Artificial Sequence
  Description of Artificial Sequence: Synthetic oligonucleotide
  Target: ATXN2; (-) strand; PAM type: YTN; PAM sequence: CTC
accacaacctccgcctcccg

SEQ ID NO: 63560 - DNA, 20 bp, Artificial Sequence
  Description of Artificial Sequence: Synthetic oligonucleotide
  Target: ATXN2; (-) strand; PAM type: YTN; PAM sequence: CTC
agctcaccacaacctccgcc

SEQ ID NO: 63561 - DNA, 20 bp, Artificial Sequence
  Description of Artificial Sequence: Synthetic oligonucleotide
  Target: ATXN2; (-) strand; PAM type: YTN; PAM sequence: CTG
gagtatagtgacgcaatctc

SEQ ID NO: 63562 - DNA, 20 bp, Artificial Sequence
  Description of Artificial Sequence: Synthetic oligonucleotide
  Target: ATXN2; (-) strand; PAM type: YTN; PAM sequence: TTG
cccaggctggagtatagtga

SEQ ID NO: 63563 - DNA, 20 bp, Artificial Sequence
  Description of Artificial Sequence: Synthetic oligonucleotide
  Target: ATXN2; (-) strand; PAM type: YTN; PAM sequence: TTA
ttgcccaggctggagtatag

SEQ ID NO: 63564 - DNA, 20 bp, Artificial Sequence
  Description of Artificial Sequence: Synthetic oligonucleotide
  Target: ATXN2; (-) strand; PAM type: YTN; PAM sequence: CTT
attgcccaggctggagtata

SEQ ID NO: 63565 - DNA, 20 bp, Artificial Sequence
  Description of Artificial Sequence: Synthetic oligonucleotide
  Target: ATXN2; (-) strand; PAM type: YTN; PAM sequence: CTC
ttattgcccaggctggagta

SEQ ID NO: 63566 - DNA, 20 bp, Artificial Sequence
  Description of Artificial Sequence: Synthetic oligonucleotide
  Target: ATXN2; (-) strand; PAM type: YTN; PAM sequence: TTC
gctcttattgcccaggctgg

SEQ ID NO: 63567 - DNA, 20 bp, Artificial Sequence
  Description of Artificial Sequence: Synthetic oligonucleotide
  Target: ATXN2; (-) strand; PAM type: YTN; PAM sequence: TTT
cgctcttattgcccaggctg

SEQ ID NO: 63568 - DNA, 20 bp, Artificial Sequence
  Description of Artificial Sequence: Synthetic oligonucleotide
  Target: ATXN2; (-) strand; PAM type: YTN; PAM sequence: TTG
gcagagtttcgctcttattg

SEQ ID NO: 63569 - DNA, 20 bp, Artificial Sequence
  Description of Artificial Sequence: Synthetic oligonucleotide
  Target: ATXN2; (-) strand; PAM type: YTN; PAM sequence: TTT
ggcagagtttcgctcttatt

SEQ ID NO: 63570 - DNA, 20 bp, Artificial Sequence
  Description of Artificial Sequence: Synthetic oligonucleotide
  Target: ATXN2; (-) strand; PAM type: YTN; PAM sequence: TTT
tggcagagtttcgctcttat

SEQ ID NO: 63571 - DNA, 20 bp, Artificial Sequence
  Description of Artificial Sequence: Synthetic oligonucleotide
  Target: ATXN2; (-) strand; PAM type: YTN; PAM sequence: TTT
ttggcagagtttcgctctta

SEQ ID NO: 63572 - DNA, 20 bp, Artificial Sequence
  Description of Artificial Sequence: Synthetic oligonucleotide
  Target: ATXN2; (-) strand; PAM type: YTN; PAM sequence: TTT
tttggcagagtttcgctctt

SEQ ID NO: 63573 - DNA, 20 bp, Artificial Sequence
  Description of Artificial Sequence: Synthetic oligonucleotide
  Target: ATXN2; (-) strand; PAM type: YTN; PAM sequence: TTT
ttttggcagagtttcgctct

SEQ ID NO: 63574 - DNA, 20 bp, Artificial Sequence
  Description of Artificial Sequence: Synthetic oligonucleotide
  Target: ATXN2; (-) strand; PAM type: YTN; PAM sequence: TTT
tttttggcagagtttcgctc

SEQ ID NO: 63575 - DNA, 20 bp, Artificial Sequence
  Description of Artificial Sequence: Synthetic oligonucleotide
  Target: ATXN2; (-) strand; PAM type: YTN; PAM sequence: TTG
gttttttttggcagagtttc

SEQ ID NO: 63576 - DNA, 20 bp, Artificial Sequence
  Description of Artificial Sequence: Synthetic oligonucleotide
  Target: ATXN2; (-) strand; PAM type: YTN; PAM sequence: TTT
ggttttttttggcagagttt

SEQ ID NO: 63577 - DNA, 20 bp, Artificial Sequence
  Description of Artificial Sequence: Synthetic oligonucleotide
  Target: ATXN2; (-) strand; PAM type: YTN; PAM sequence: TTT
tggttttttttggcagagtt

SEQ ID NO: 63578 - DNA, 20 bp, Artificial Sequence
  Description of Artificial Sequence: Synthetic oligonucleotide
  Target: ATXN2; (-) strand; PAM type: YTN; PAM sequence: CTT
ttggttttttttggcagagt

SEQ ID NO: 63579 - DNA, 20 bp, Artificial Sequence
  Description of Artificial Sequence: Synthetic oligonucleotide
  Target: ATXN2; (-) strand; PAM type: YTN; PAM sequence: TTC
ttttggttttttttggcaga

SEQ ID NO: 63580 - DNA, 20 bp, Artificial Sequence
  Description of Artificial Sequence: Synthetic oligonucleotide
  Target: ATXN2; (-) strand; PAM type: YTN; PAM sequence: TTA
agattcttttggtttttttt

SEQ ID NO: 63581 - DNA, 20 bp, Artificial Sequence
  Description of Artificial Sequence: Synthetic oligonucleotide
  Target: ATXN2; (-) strand; PAM type: YTN; PAM sequence: TTA
ccaaaattaagattcttttg

SEQ ID NO: 63582 - DNA, 20 bp, Artificial Sequence
  Description of Artificial Sequence: Synthetic oligonucleotide
  Target: ATXN2; (-) strand; PAM type: YTN; PAM sequence: CTT
accaaaattaagattctttt

SEQ ID NO: 63583 - DNA, 20 bp, Artificial Sequence
  Description of Artificial Sequence: Synthetic oligonucleotide
  Target: ATXN2; (-) strand; PAM type: YTN; PAM sequence: TTA
cccacggtggtggggcttac

SEQ ID NO: 63584 - DNA, 20 bp, Artificial Sequence
  Description of Artificial Sequence: Synthetic oligonucleotide
  Target: ATXN2; (-) strand; PAM type: YTN; PAM sequence: TTT
acccacggtggtggggctta

SEQ ID NO: 63585 - DNA, 20 bp, Artificial Sequence
  Description of Artificial Sequence: Synthetic oligonucleotide
  Target: ATXN2; (-) strand; PAM type: YTN; PAM sequence: CTT
tacccacggtggtggggctt

SEQ ID NO: 63586 - DNA, 20 bp, Artificial Sequence
  Description of Artificial Sequence: Synthetic oligonucleotide
  Target: ATXN2; (-) strand; PAM type: YTN; PAM sequence: TTA
ggaccccagaggactttacc

SEQ ID NO: 63587 - DNA, 20 bp, Artificial Sequence
  Description of Artificial Sequence: Synthetic oligonucleotide
  Target: ATXN2; (-) strand; PAM type: YTN; PAM sequence: TTT
aggaccccagaggactttac

SEQ ID NO: 63588 - DNA, 20 bp, Artificial Sequence
  Description of Artificial Sequence: Synthetic oligonucleotide
  Target: ATXN2; (-) strand; PAM type: YTN; PAM sequence: TTA
tttaggaccccagaggactt

SEQ ID NO: 63589 - DNA, 20 bp, Artificial Sequence
  Description of Artificial Sequence: Synthetic oligonucleotide
  Target: ATXN2; (-) strand; PAM type: YTN; PAM sequence: TTT
atttaggaccccagaggact

SEQ ID NO: 63590 - DNA, 20 bp, Artificial Sequence
  Description of Artificial Sequence: Synthetic oligonucleotide
  Target: ATXN2; (-) strand; PAM type: YTN; PAM sequence: TTC
aagtttatttaggaccccag

SEQ ID NO: 63591 - DNA, 20 bp, Artificial Sequence
  Description of Artificial Sequence: Synthetic oligonucleotide
  Target: ATXN2; (-) strand; PAM type: YTN; PAM sequence: TTT
caagtttatttaggacccca

SEQ ID NO: 63592 - DNA, 20 bp, Artificial Sequence
  Description of Artificial Sequence: Synthetic oligonucleotide
  Target: ATXN2; (-) strand; PAM type: YTN; PAM sequence: CTT
tcaagtttatttaggacccc

SEQ ID NO: 63593 - DNA, 20 bp, Artificial Sequence
  Description of Artificial Sequence: Synthetic oligonucleotide
  Target: ATXN2; (-) strand; PAM type: YTN; PAM sequence: CTG
cctttcaagtttatttagga

SEQ ID NO: 63594 - DNA, 20 bp, Artificial Sequence
  Description of Artificial Sequence: Synthetic oligonucleotide
  Target: ATXN2; (-) strand; PAM type: YTN; PAM sequence: CTA
gactgcctttcaagtttatt

SEQ ID NO: 63595 - DNA, 20 bp, Artificial Sequence
  Description of Artificial Sequence: Synthetic oligonucleotide
  Target: ATXN2; (-) strand; PAM type: YTN; PAM sequence: CTG
gtctagactgcctttcaagt

SEQ ID NO: 63596 - DNA, 20 bp, Artificial Sequence
  Description of Artificial Sequence: Synthetic oligonucleotide
  Target: ATXN2; (-) strand; PAM type: YTN; PAM sequence: TTC
tggtctagactgcctttcaa

SEQ ID NO: 63597 - DNA, 20 bp, Artificial Sequence
  Description of Artificial Sequence: Synthetic oligonucleotide
  Target: ATXN2; (-) strand; PAM type: YTN; PAM sequence: CTT
ctggtctagactgcctttca

SEQ ID NO: 63598 - DNA, 20 bp, Artificial Sequence
  Description of Artificial Sequence: Synthetic oligonucleotide
  Target: ATXN2; (-) strand; PAM type: YTN; PAM sequence: TTG
cagtccttctggtctagact

SEQ ID NO: 63599 - DNA, 20 bp, Artificial Sequence
  Description of Artificial Sequence: Synthetic oligonucleotide
  Target: ATXN2; (-) strand; PAM type: YTN; PAM sequence: TTG
tccaggaattgcagtccttc

SEQ ID NO: 63600 - DNA, 20 bp, Artificial Sequence
  Description of Artificial Sequence: Synthetic oligonucleotide
  Target: ATXN2; (-) strand; PAM type: YTN; PAM sequence: CTT
gtccaggaattgcagtcctt

SEQ ID NO: 63601 - DNA, 20 bp, Artificial Sequence
  Description of Artificial Sequence: Synthetic oligonucleotide
  Target: ATXN2; (-) strand; PAM type: YTN; PAM sequence: CTA
tgagcccagcacagtaccat

SEQ ID NO: 63602 - DNA, 20 bp, Artificial Sequence
  Description of Artificial Sequence: Synthetic oligonucleotide
  Target: ATXN2; (-) strand; PAM type: YTN; PAM sequence: CTG
actatgagcccagcacagta

SEQ ID NO: 63603 - DNA, 20 bp, Artificial Sequence
  Description of Artificial Sequence: Synthetic oligonucleotide
  Target: ATXN2; (-) strand; PAM type: YTN; PAM sequence: CTC
agtgggtcacatgtacccca

SEQ ID NO: 63604 - DNA, 20 bp, Artificial Sequence
  Description of Artificial Sequence: Synthetic oligonucleotide
  Target: ATXN2; (-) strand; PAM type: YTN; PAM sequence: CTG
gtgtctcagtgggtcacatg

SEQ ID NO: 63605 - DNA, 20 bp, Artificial Sequence
  Description of Artificial Sequence: Synthetic oligonucleotide
  Target: ATXN2; (-) strand; PAM type: YTN; PAM sequence: CTA
gctggtgtctcagtgggtca

SEQ ID NO: 63606 - DNA, 20 bp, Artificial Sequence
  Description of Artificial Sequence: Synthetic oligonucleotide
  Target: ATXN2; (-) strand; PAM type: YTN; PAM sequence: TTG
gccaccctagctggtgtctc

SEQ ID NO: 63607 - DNA, 20 bp, Artificial Sequence
  Description of Artificial Sequence: Synthetic oligonucleotide
  Target: ATXN2; (-) strand; PAM type: YTN; PAM sequence: CTT
ggccaccctagctggtgtct

SEQ ID NO: 63608 - DNA, 20 bp, Artificial Sequence
  Description of Artificial Sequence: Synthetic oligonucleotide
  Target: ATXN2; (-) strand; PAM type: YTN; PAM sequence: CTC
ccttggccaccctagctggt

SEQ ID NO: 63609 - DNA, 20 bp, Artificial Sequence
  Description of Artificial Sequence: Synthetic oligonucleotide
  Target: ATXN2; (-) strand; PAM type: YTN; PAM sequence: CTG
gcacaagcactcccttggcc

SEQ ID NO: 63610 - DNA, 20 bp, Artificial Sequence
  Description of Artificial Sequence: Synthetic oligonucleotide
  Target: ATXN2; (-) strand; PAM type: YTN; PAM sequence: TTG
ggggaaggctggcacaagca

SEQ ID NO: 63611 - DNA, 20 bp, Artificial Sequence
  Description of Artificial Sequence: Synthetic oligonucleotide
  Target: ATXN2; (-) strand; PAM type: YTN; PAM sequence: CTG
gagttgggggaaggctggca

SEQ ID NO: 63612 - DNA, 20 bp, Artificial Sequence
  Description of Artificial Sequence: Synthetic oligonucleotide
  Target: ATXN2; (-) strand; PAM type: YTN; PAM sequence: CTG
tggtacctggagttggggga

SEQ ID NO: 63613 - DNA, 20 bp, Artificial Sequence
  Description of Artificial Sequence: Synthetic oligonucleotide
  Target: ATXN2; (-) strand; PAM type: YTN; PAM sequence: CTG
tgagctgtggtacctggagt

SEQ ID NO: 63614 - DNA, 20 bp, Artificial Sequence
  Description of Artificial Sequence: Synthetic oligonucleotide
  Target: ATXN2; (-) strand; PAM type: YTN; PAM sequence: CTC
ccagagctgtgagctgtggt

SEQ ID NO: 63615 - DNA, 20 bp, Artificial Sequence
  Description of Artificial Sequence: Synthetic oligonucleotide
  Target: ATXN2; (-) strand; PAM type: YTN; PAM sequence: CTC
ctcccagagctgtgagctgt

SEQ ID NO: 63616 - DNA, 20 bp, Artificial Sequence
  Description of Artificial Sequence: Synthetic oligonucleotide
  Target: ATXN2; (-) strand; PAM type: YTN; PAM sequence: CTC
tcctcccagagctgtgagct

SEQ ID NO: 63617 - DNA, 20 bp, Artificial Sequence
  Description of Artificial Sequence: Synthetic oligonucleotide
  Target: ATXN2; (-) strand; PAM type: YTN; PAM sequence: TTC
cctctcctcccagagctgtg

SEQ ID NO: 63618 - DNA, 20 bp, Artificial Sequence
  Description of Artificial Sequence: Synthetic oligonucleotide
  Target: ATXN2; (-) strand; PAM type: YTN; PAM sequence: CTT
ccctctcctcccagagctgt

SEQ ID NO: 63619 - DNA, 20 bp, Artificial Sequence
  Description of Artificial Sequence: Synthetic oligonucleotide
  Target: ATXN2; (-) strand; PAM type: YTN; PAM sequence: CTC
ttccctctcctcccagagct

SEQ ID NO: 63620 - DNA, 20 bp, Artificial Sequence
  Description of Artificial Sequence: Synthetic oligonucleotide
  Target: ATXN2; (-) strand; PAM type: YTN; PAM sequence: CTA
ctcttccctctcctcccaga

SEQ ID NO: 63621 - DNA, 20 bp, Artificial Sequence
  Description of Artificial Sequence: Synthetic oligonucleotide
  Target: ATXN2; (-) strand; PAM type: YTN; PAM sequence: CTC
cctactcttccctctcctcc

SEQ ID NO: 63622 - DNA, 20 bp, Artificial Sequence
  Description of Artificial Sequence: Synthetic oligonucleotide
  Target: ATXN2; (-) strand; PAM type: YTN; PAM sequence: TTG
caagacaaagtcctccctac

SEQ ID NO: 63623 - DNA, 20 bp, Artificial Sequence
  Description of Artificial Sequence: Synthetic oligonucleotide
  Target: ATXN2; (-) strand; PAM type: YTN; PAM sequence: CTA
gtatccacattgcaagacaa

SEQ ID NO: 63624 - DNA, 20 bp, Artificial Sequence
  Description of Artificial Sequence: Synthetic oligonucleotide
  Target: ATXN2; (-) strand; PAM type: YTN; PAM sequence: CTG
aactagtatccacattgcaa

SEQ ID NO: 63625 - DNA, 20 bp, Artificial Sequence
  Description of Artificial Sequence: Synthetic oligonucleotide
  Target: ATXN2; (-) strand; PAM type: YTN; PAM sequence: CTG
tggctgaactagtatccaca

SEQ ID NO: 63626 - DNA, 20 bp, Artificial Sequence
  Description of Artificial Sequence: Synthetic oligonucleotide
  Target: ATXN2; (-) strand; PAM type: YTN; PAM sequence: TTA
ctgtggctgaactagtatcc

SEQ ID NO: 63627 - DNA, 20 bp, Artificial Sequence
  Description of Artificial Sequence: Synthetic oligonucleotide
  Target: ATXN2; (-) strand; PAM type: YTN; PAM sequence: TTT
actgtggctgaactagtatc

SEQ ID NO: 63628 - DNA, 20 bp, Artificial Sequence
  Description of Artificial Sequence: Synthetic oligonucleotide
  Target: ATXN2; (-) strand; PAM type: YTN; PAM sequence: TTT
tactgtggctgaactagtat

SEQ ID NO: 63629 - DNA, 20 bp, Artificial Sequence
  Description of Artificial Sequence: Synthetic oligonucleotide
  Target: ATXN2; (-) strand; PAM type: YTN; PAM sequence: TTA
ttttactgtggctgaactag

SEQ ID NO: 63630 - DNA, 20 bp, Artificial Sequence
  Description of Artificial Sequence: Synthetic oligonucleotide
  Target: ATXN2; (-) strand; PAM type: YTN; PAM sequence: TTT
attttactgtggctgaacta

SEQ ID NO: 63631 - DNA, 20 bp, Artificial Sequence
  Description of Artificial Sequence: Synthetic oligonucleotide
  Target: ATXN2; (-) strand; PAM type: YTN; PAM sequence: CTT
tattttactgtggctgaact

SEQ ID NO: 63632 - DNA, 20 bp, Artificial Sequence
  Description of Artificial Sequence: Synthetic oligonucleotide
  Target: ATXN2; (-) strand; PAM type: YTN; PAM sequence: TTG
gtgctttattttactgtggc

SEQ ID NO: 63633 - DNA, 20 bp, Artificial Sequence
  Description of Artificial Sequence: Synthetic oligonucleotide
  Target: ATXN2; (-) strand; PAM type: YTN; PAM sequence: CTT
ggtgctttattttactgtgg

SEQ ID NO: 63634 - DNA, 20 bp, Artificial Sequence
  Description of Artificial Sequence: Synthetic oligonucleotide
  Target: ATXN2; (-) strand; PAM type: YTN; PAM sequence: CTA
tgcttggtgctttattttac

SEQ ID NO: 63635 - DNA, 20 bp, Artificial Sequence
  Description of Artificial Sequence: Synthetic oligonucleotide
  Target: ATXN2; (-) strand; PAM type: YTN; PAM sequence: TTC
agaactatgcttggtgcttt

SEQ ID NO: 63636 - DNA, 20 bp, Artificial Sequence
  Description of Artificial Sequence: Synthetic oligonucleotide
  Target: ATXN2; (-) strand; PAM type: YTN; PAM sequence: CTT
cagaactatgcttggtgctt

SEQ ID NO: 63637 - DNA, 20 bp, Artificial Sequence
  Description of Artificial Sequence: Synthetic oligonucleotide
  Target: ATXN2; (-) strand; PAM type: YTN; PAM sequence: TTG
aggcttcagaactatgcttg

SEQ ID NO: 63638 - DNA, 20 bp, Artificial Sequence
  Description of Artificial Sequence: Synthetic oligonucleotide
  Target: ATXN2; (-) strand; PAM type: YTN; PAM sequence: CTA
gaattgaggcttcagaacta

SEQ ID NO: 63639 - DNA, 20 bp, Artificial Sequence
  Description of Artificial Sequence: Synthetic oligonucleotide
  Target: ATXN2; (-) strand; PAM type: YTN; PAM sequence: CTA
tggcctagaattgaggcttc

SEQ ID NO: 63640 - DNA, 20 bp, Artificial Sequence
  Description of Artificial Sequence: Synthetic oligonucleotide
  Target: ATXN2; (-) strand; PAM type: YTN; PAM sequence: CTG
ggagctatggcctagaattg

SEQ ID NO: 63641 - DNA, 20 bp, Artificial Sequence
  Description of Artificial Sequence: Synthetic oligonucleotide
  Target: ATXN2; (-) strand; PAM type: YTN; PAM sequence: CTA
gaaatgtcatctgggagcta

SEQ ID NO: 63642 - DNA, 20 bp, Artificial Sequence
  Description of Artificial Sequence: Synthetic oligonucleotide
  Target: ATXN2; (-) strand; PAM type: YTN; PAM sequence: CTG
gtccagaatatgtctagaaa

SEQ ID NO: 63643 - DNA, 20 bp, Artificial Sequence
  Description of Artificial Sequence: Synthetic oligonucleotide
  Target: ATXN2; (-) strand; PAM type: YTN; PAM sequence: TTC
tggtccagaatatgtctaga

SEQ ID NO: 63644 - DNA, 20 bp, Artificial Sequence
  Description of Artificial Sequence: Synthetic oligonucleotide
  Target: ATXN2; (-) strand; PAM type: YTN; PAM sequence: CTT
ctggtccagaatatgtctag

SEQ ID NO: 63645 - DNA, 20 bp, Artificial Sequence
  Description of Artificial Sequence: Synthetic oligonucleotide
  Target: ATXN2; (-) strand; PAM type: YTN; PAM sequence: TTC
ccttctggtccagaatatgt

SEQ ID NO: 63646 - DNA, 20 bp, Artificial Sequence
  Description of Artificial Sequence: Synthetic oligonucleotide
  Target: ATXN2; (-) strand; PAM type: YTN; PAM sequence: TTC
aaggcaatgggttcccttct

SEQ ID NO: 63647 - DNA, 20 bp, Artificial Sequence
  Description of Artificial Sequence: Synthetic oligonucleotide
  Target: ATXN2; (-) strand; PAM type: YTN; PAM sequence: CTT
caaggcaatgggttcccttc

SEQ ID NO: 63648 - DNA, 20 bp, Artificial Sequence
  Description of Artificial Sequence: Synthetic oligonucleotide
  Target: ATXN2; (-) strand; PAM type: YTN; PAM sequence: TTC
ccttcaaggcaatgggttcc

SEQ ID NO: 63649 - DNA, 20 bp, Artificial Sequence
  Description of Artificial Sequence: Synthetic oligonucleotide
  Target: ATXN2; (-) strand; PAM type: YTN; PAM sequence: TTT
cccttcaaggcaatgggttc

SEQ ID NO: 63650 - DNA, 20 bp, Artificial Sequence
  Description of Artificial Sequence: Synthetic oligonucleotide
  Target: ATXN2; (-) strand; PAM type: YTN; PAM sequence: CTA
ggtatttcccttcaaggcaa

SEQ ID NO: 63651 - DNA, 20 bp, Artificial Sequence
  Description of Artificial Sequence: Synthetic oligonucleotide
  Target: ATXN2; (-) strand; PAM type: YTN; PAM sequence: CTA
ggactaggtatttcccttca

SEQ ID NO: 63652 - DNA, 20 bp, Artificial Sequence
  Description of Artificial Sequence: Synthetic oligonucleotide
  Target: ATXN2; (-) strand; PAM type: YTN; PAM sequence: CTA
ctaggactaggtatttccct

SEQ ID NO: 63653 - DNA, 20 bp, Artificial Sequence
  Description of Artificial Sequence: Synthetic oligonucleotide
  Target: ATXN2; (-) strand; PAM type: YTN; PAM sequence: CTG
gtggtgaatcctactaggac

SEQ ID NO: 63654 - DNA, 20 bp, Artificial Sequence
  Description of Artificial Sequence: Synthetic oligonucleotide
  Target: ATXN2; (-) strand; PAM type: YTN; PAM sequence: TTA
gtcagctggtggtgaatcct

SEQ ID NO: 63655 - DNA, 20 bp, Artificial Sequence
  Description of Artificial Sequence: Synthetic oligonucleotide
  Target: ATXN2; (-) strand; PAM type: YTN; PAM sequence: TTT
agtcagctggtggtgaatcc

SEQ ID NO: 63656 - DNA, 20 bp, Artificial Sequence
  Description of Artificial Sequence: Synthetic oligonucleotide
  Target: ATXN2; (-) strand; PAM type: YTN; PAM sequence: CTT
tagtcagctggtggtgaatc

SEQ ID NO: 63657 - DNA, 20 bp, Artificial Sequence
  Description of Artificial Sequence: Synthetic oligonucleotide
  Target: ATXN2; (-) strand; PAM type: YTN; PAM sequence: CTC
tttagtcagctggtggtgaa

SEQ ID NO: 63658 - DNA, 20 bp, Artificial Sequence
  Description of Artificial Sequence: Synthetic oligonucleotide
  Target: ATXN2; (-) strand; PAM type: YTN; PAM sequence: TTC
aaggcacaagggctctttag

SEQ ID NO: 63659 - DNA, 20 bp, Artificial Sequence
  Description of Artificial Sequence: Synthetic oligonucleotide
  Target: ATXN2; (-) strand; PAM type: YTN; PAM sequence: TTA
ttcaaggcacaagggctctt

SEQ ID NO: 63660 - DNA, 20 bp, Artificial Sequence
  Description of Artificial Sequence: Synthetic oligonucleotide
  Target: ATXN2; (-) strand; PAM type: YTN; PAM sequence: TTT
attcaaggcacaagggctct

SEQ ID NO: 63661 - DNA, 20 bp, Artificial Sequence
  Description of Artificial Sequence: Synthetic oligonucleotide
  Target: ATXN2; (-) strand; PAM type: YTN; PAM sequence: TTT
tattcaaggcacaagggctc

SEQ ID NO: 63662 - DNA, 20 bp, Artificial Sequence
  Description of Artificial Sequence: Synthetic oligonucleotide
  Target: ATXN2; (-) strand; PAM type: YTN; PAM sequence: TTT
ttattcaaggcacaagggct

SEQ ID NO: 63663 - DNA, 20 bp, Artificial Sequence
  Description of Artificial Sequence: Synthetic oligonucleotide
  Target: ATXN2; (-) strand; PAM type: YTN; PAM sequence: TTT
tttattcaaggcacaagggc

SEQ ID NO: 63664 - DNA, 20 bp, Artificial Sequence
  Description of Artificial Sequence: Synthetic oligonucleotide
  Target: ATXN2; (-) strand; PAM type: YTN; PAM sequence: TTG
ttttttattcaaggcacaag

SEQ ID NO: 63665 - DNA, 20 bp, Artificial Sequence
  Description of Artificial Sequence: Synthetic oligonucleotide
  Target: ATXN2; (-) strand; PAM type: YTN; PAM sequence: CTT
gttttttattcaaggcacaa

SEQ ID NO: 63666 - DNA, 20 bp, Artificial Sequence
  Description of Artificial Sequence: Synthetic oligonucleotide
  Target: ATXN2; (-) strand; PAM type: YTN; PAM sequence: CTG
gcacaatacgacatggcacc

SEQ ID NO: 63667 - DNA, 20 bp, Artificial Sequence
  Description of Artificial Sequence: Synthetic oligonucleotide
  Target: ATXN2; (-) strand; PAM type: YTN; PAM sequence: CTG
aagctggcacaatacgacat

SEQ ID NO: 63668 - DNA, 20 bp, Artificial Sequence
  Description of Artificial Sequence: Synthetic oligonucleotide
  Target: ATXN2; (-) strand; PAM type: YTN; PAM sequence: CTG
tgaatgtgcggggtcatatc

SEQ ID NO: 63669 - DNA, 20 bp, Artificial Sequence
  Description of Artificial Sequence: Synthetic oligonucleotide
  Target: ATXN2; (-) strand; PAM type: YTN; PAM sequence: CTC
cccatggacaccacagctgt

SEQ ID NO: 63670 - DNA, 20 bp, Artificial Sequence
  Description of Artificial Sequence: Synthetic oligonucleotide
  Target: ATXN2; (-) strand; PAM type: YTN; PAM sequence: CTC
aagcaggtgggtctccccat

SEQ ID NO: 63671 - DNA, 20 bp, Artificial Sequence
  Description of Artificial Sequence: Synthetic oligonucleotide
  Target: ATXN2; (-) strand; PAM type: YTN; PAM sequence: CTC
acctcaagcaggtgggtctc

SEQ ID NO: 63672 - DNA, 20 bp, Artificial Sequence
  Description of Artificial Sequence: Synthetic oligonucleotide
  Target: ATXN2; (-) strand; PAM type: YTN; PAM sequence: CTC
tcacctcaagcaggtgggtc

SEQ ID NO: 63673 - DNA, 20 bp, Artificial Sequence
  Description of Artificial Sequence: Synthetic oligonucleotide
  Target: ATXN2; (-) strand; PAM type: YTN; PAM sequence: TTC
tctcacctcaagcaggtggg

SEQ ID NO: 63674 - DNA, 20 bp, Artificial Sequence
  Description of Artificial Sequence: Synthetic oligonucleotide
  Target: ATXN2; (-) strand; PAM type: YTN; PAM sequence: CTT
ctctcacctcaagcaggtgg

SEQ ID NO: 63675 - DNA, 20 bp, Artificial Sequence
  Description of Artificial Sequence: Synthetic oligonucleotide
  Target: ATXN2; (-) strand; PAM type: YTN; PAM sequence: CTC
ttctctcacctcaagcaggt

SEQ ID NO: 63676 - DNA, 20 bp, Artificial Sequence
  Description of Artificial Sequence: Synthetic oligonucleotide
  Target: ATXN2; (-) strand; PAM type: YTN; PAM sequence: TTA
ctcttctctcacctcaagca

SEQ ID NO: 63677 - DNA, 20 bp, Artificial Sequence
  Description of Artificial Sequence: Synthetic oligonucleotide
  Target: ATXN2; (-) strand; PAM type: YTN; PAM sequence: TTT
actcttctctcacctcaagc

SEQ ID NO: 63678 - DNA, 20 bp, Artificial Sequence
  Description of Artificial Sequence: Synthetic oligonucleotide
  Target: ATXN2; (-) strand; PAM type: YTN; PAM sequence: TTT
tactcttctctcacctcaag

SEQ ID NO: 63679 - DNA, 20 bp, Artificial Sequence
  Description of Artificial Sequence: Synthetic oligonucleotide
  Target: ATXN2; (-) strand; PAM type: YTN; PAM sequence: TTT
ttactcttctctcacctcaa

SEQ ID NO: 63680 - DNA, 20 bp, Artificial Sequence
  Description of Artificial Sequence: Synthetic oligonucleotide
  Target: ATXN2; (-) strand; PAM type: YTN; PAM sequence: CTT
tttactcttctctcacctca

SEQ ID NO: 63681 - DNA, 20 bp, Artificial Sequence
  Description of Artificial Sequence: Synthetic oligonucleotide
  Target: ATXN2; (-) strand; PAM type: YTN; PAM sequence: TTG
caagataaagtcctttttac

SEQ ID NO: 63682 - DNA, 20 bp, Artificial Sequence
  Description of Artificial Sequence: Synthetic oligonucleotide
  Target: ATXN2; (-) strand; PAM type: YTN; PAM sequence: CTT
gcaagataaagtccttttta

SEQ ID NO: 63683 - DNA, 20 bp, Artificial Sequence
  Description of Artificial Sequence: Synthetic oligonucleotide
  Target: ATXN2; (-) strand; PAM type: YTN; PAM sequence: CTG
gcacccacttgcaagataaa

SEQ ID NO: 63684 - DNA, 20 bp, Artificial Sequence
  Description of Artificial Sequence: Synthetic oligonucleotide
  Target: ATXN2; (-) strand; PAM type: YTN; PAM sequence: CTG
agctggcacccacttgcaag

SEQ ID NO: 63685 - DNA, 20 bp, Artificial Sequence
  Description of Artificial Sequence: Synthetic oligonucleotide
  Target: ATXN2; (-) strand; PAM type: YTN; PAM sequence: CTG
gggctgagctggcacccact

SEQ ID NO: 63686 - DNA, 20 bp, Artificial Sequence
  Description of Artificial Sequence: Synthetic oligonucleotide
  Target: ATXN2; (-) strand; PAM type: YTN; PAM sequence: TTG
tactggggctgagctggcac

SEQ ID NO: 63687 - DNA, 20 bp, Artificial Sequence
  Description of Artificial Sequence: Synthetic oligonucleotide
  Target: ATXN2; (-) strand; PAM type: YTN; PAM sequence: TTA
ttgtactggggctgagctgg

SEQ ID NO: 63688 - DNA, 20 bp, Artificial Sequence
  Description of Artificial Sequence: Synthetic oligonucleotide
  Target: ATXN2; (-) strand; PAM type: YTN; PAM sequence: TTT
attgtactggggctgagctg

SEQ ID NO: 63689 - DNA, 20 bp, Artificial Sequence
  Description of Artificial Sequence: Synthetic oligonucleotide
  Target: ATXN2; (-) strand; PAM type: YTN; PAM sequence: CTT
tattgtactggggctgagct

SEQ ID NO: 63690 - DNA, 20 bp, Artificial Sequence
  Description of Artificial Sequence: Synthetic oligonucleotide
  Target: ATXN2; (-) strand; PAM type: YTN; PAM sequence: CTG
ctttattgtactggggctga

SEQ ID NO: 63691 - DNA, 20 bp, Artificial Sequence
  Description of Artificial Sequence: Synthetic oligonucleotide
  Target: ATXN2; (-) strand; PAM type: YTN; PAM sequence: TTA
ggaatctgctttattgtact

SEQ ID NO: 63692 - DNA, 20 bp, Artificial Sequence
  Description of Artificial Sequence: Synthetic oligonucleotide
  Target: ATXN2; (-) strand; PAM type: YTN; PAM sequence: TTT
aggaatctgctttattgtac

SEQ ID NO: 63693 - DNA, 20 bp, Artificial Sequence
  Description of Artificial Sequence: Synthetic oligonucleotide
  Target: ATXN2; (-) strand; PAM type: YTN; PAM sequence: CTT
taggaatctgctttattgta

SEQ ID NO: 63694 - DNA, 20 bp, Artificial Sequence
  Description of Artificial Sequence: Synthetic oligonucleotide
  Target: ATXN2; (-) strand; PAM type: YTN; PAM sequence: CTG
ggatcgggagctttaggaat

SEQ ID NO: 63695 - DNA, 20 bp, Artificial Sequence
  Description of Artificial Sequence: Synthetic oligonucleotide
  Target: ATXN2; (-) strand; PAM type: YTN; PAM sequence: CTG
cccaggagccagggcctggg

SEQ ID NO: 63696 - DNA, 20 bp, Artificial Sequence
  Description of Artificial Sequence: Synthetic oligonucleotide
  Target: ATXN2; (-) strand; PAM type: YTN; PAM sequence: CTA
gaaatgctgcccaggagcca

SEQ ID NO: 63697 - DNA, 20 bp, Artificial Sequence
  Description of Artificial Sequence: Synthetic oligonucleotide
  Target: ATXN2; (-) strand; PAM type: YTN; PAM sequence: CTG
gcccagggtgtgtctagaaa

SEQ ID NO: 63698 - DNA, 20 bp, Artificial Sequence
  Description of Artificial Sequence: Synthetic oligonucleotide
  Target: ATXN2; (-) strand; PAM type: YTN; PAM sequence: TTC
tggcccagggtgtgtctaga

SEQ ID NO: 63699 - DNA, 20 bp, Artificial Sequence
  Description of Artificial Sequence: Synthetic oligonucleotide
  Target: ATXN2; (-) strand; PAM type: YTN; PAM sequence: CTT
ctggcccagggtgtgtctag

SEQ ID NO: 63700 - DNA, 20 bp, Artificial Sequence
  Description of Artificial Sequence: Synthetic oligonucleotide
  Target: ATXN2; (-) strand; PAM type: YTN; PAM sequence: TTC
ccttctggcccagggtgtgt

SEQ ID NO: 63701 - DNA, 20 bp, Artificial Sequence
  Description of Artificial Sequence: Synthetic oligonucleotide
  Target: ATXN2; (-) strand; PAM type: YTN; PAM sequence: TTC
agtgcagcaggttcccttct

SEQ ID NO: 63702 - DNA, 20 bp, Artificial Sequence
  Description of Artificial Sequence: Synthetic oligonucleotide
  Target: ATXN2; (-) strand; PAM type: YTN; PAM sequence: TTT
cagtgcagcaggttcccttc

SEQ ID NO: 63703 - DNA, 20 bp, Artificial Sequence
  Description of Artificial Sequence: Synthetic oligonucleotide
  Target: ATXN2; (-) strand; PAM type: YTN; PAM sequence: CTT
tcagtgcagcaggttccctt

SEQ ID NO: 63704 - DNA, 20 bp, Artificial Sequence
  Description of Artificial Sequence: Synthetic oligonucleotide
  Target: ATXN2; (-) strand; PAM type: YTN; PAM sequence: TTA
ctttcagtgcagcaggttcc

SEQ ID NO: 63705 - DNA, 20 bp, Artificial Sequence
  Description of Artificial Sequence: Synthetic oligonucleotide
  Target: ATXN2; (-) strand; PAM type: YTN; PAM sequence: TTT
actttcagtgcagcaggttc

SEQ ID NO: 63706 - DNA, 20 bp, Artificial Sequence
  Description of Artificial Sequence: Synthetic oligonucleotide
  Target: ATXN2; (-) strand; PAM type: YTN; PAM sequence: CTT
tactttcagtgcagcaggtt

SEQ ID NO: 63707 - DNA, 20 bp, Artificial Sequence
  Description of Artificial Sequence: Synthetic oligonucleotide
  Target: ATXN2; (-) strand; PAM type: YTN; PAM sequence: CTG
ggtctttactttcagtgcag

SEQ ID NO: 63708 - DNA, 20 bp, Artificial Sequence
  Description of Artificial Sequence: Synthetic oligonucleotide
  Target: ATXN2; (-) strand; PAM type: YTN; PAM sequence: CTG
caagaactgggtctttactt

SEQ ID NO: 63709 - DNA, 20 bp, Artificial Sequence
  Description of Artificial Sequence: Synthetic oligonucleotide
  Target: ATXN2; (-) strand; PAM type: YTN; PAM sequence: TTA
gtcagtaggtgaagaatcct

SEQ ID NO: 63710 - DNA, 20 bp, Artificial Sequence
  Description of Artificial Sequence: Synthetic oligonucleotide
  Target: ATXN2; (-) strand; PAM type: YTN; PAM sequence: TTT
agtcagtaggtgaagaatcc

SEQ ID NO: 63711 - DNA, 20 bp, Artificial Sequence
  Description of Artificial Sequence: Synthetic oligonucleotide
  Target: ATXN2; (-) strand; PAM type: YTN; PAM sequence: CTT
tagtcagtaggtgaagaatc

SEQ ID NO: 63712 - DNA, 20 bp, Artificial Sequence
  Description of Artificial Sequence: Synthetic oligonucleotide
  Target: ATXN2; (-) strand; PAM type: YTN; PAM sequence: TTA
aggcccaagggtgctttagt

SEQ ID NO: 63713 - DNA, 20 bp, Artificial Sequence
  Description of Artificial Sequence: Synthetic oligonucleotide
  Target: ATXN2; (-) strand; PAM type: YTN; PAM sequence: TTT
aaggcccaagggtgctttag

SEQ ID NO: 63714 - DNA, 20 bp, Artificial Sequence
  Description of Artificial Sequence: Synthetic oligonucleotide
  Target: ATXN2; (-) strand; PAM type: YTN; PAM sequence: TTA
atttaaggcccaagggtgct

SEQ ID NO: 63715 - DNA, 20 bp, Artificial Sequence
  Description of Artificial Sequence: Synthetic oligonucleotide
  Target: ATXN2; (-) strand; PAM type: YTN; PAM sequence: CTG
atgttaatttaaggcccaag

SEQ ID NO: 63716 - DNA, 20 bp, Artificial Sequence
  Description of Artificial Sequence: Synthetic oligonucleotide
  Target: ATXN2; (-) strand; PAM type: YTN; PAM sequence: CTG
gccaccactgatgttaattt

SEQ ID NO: 63717 - DNA, 20 bp, Artificial Sequence
  Description of Artificial Sequence: Synthetic oligonucleotide
  Target: ATXN2; (-) strand; PAM type: YTN; PAM sequence: TTC
tggccaccactgatgttaat

SEQ ID NO: 63718 - DNA, 20 bp, Artificial Sequence
  Description of Artificial Sequence: Synthetic oligonucleotide
  Target: ATXN2; (-) strand; PAM type: YTN; PAM sequence: TTT
ctggccaccactgatgttaa

SEQ ID NO: 63719 - DNA, 20 bp, Artificial Sequence
  Description of Artificial Sequence: Synthetic oligonucleotide
  Target: ATXN2; (-) strand; PAM type: YTN; PAM sequence: TTT
tctggccaccactgatgtta

SEQ ID NO: 63720 - DNA, 20 bp, Artificial Sequence
  Description of Artificial Sequence: Synthetic oligonucleotide
  Target: ATXN2; (-) strand; PAM type: YTN; PAM sequence: CTA
ttttctggccaccactgatg

SEQ ID NO: 63721 - DNA, 20 bp, Artificial Sequence
  Description of Artificial Sequence: Synthetic oligonucleotide
  Target: ATXN2; (-) strand; PAM type: YTN; PAM sequence: CTG
tggcagctattttctggcca

SEQ ID NO: 63722 - DNA, 20 bp, Artificial Sequence
  Description of Artificial Sequence: Synthetic oligonucleotide
  Target: ATXN2; (-) strand; PAM type: YTN; PAM sequence: CTC
acccaaggcctgtggcagct

SEQ ID NO: 63723 - DNA, 20 bp, Artificial Sequence
  Description of Artificial Sequence: Synthetic oligonucleotide
  Target: ATXN2; (-) strand; PAM type: YTN; PAM sequence: TTG
gtctcacccaaggcctgtgg

SEQ ID NO: 63724 - DNA, 20 bp, Artificial Sequence
  Description of Artificial Sequence: Synthetic oligonucleotide
  Target: ATXN2; (-) strand; PAM type: YTN; PAM sequence: CTT
ggtctcacccaaggcctgtg

SEQ ID NO: 63725 - DNA, 20 bp, Artificial Sequence
  Description of Artificial Sequence: Synthetic oligonucleotide
  Target: ATXN2; (-) strand; PAM type: YTN; PAM sequence: CTG
tacttggtctcacccaaggc

SEQ ID NO: 63726 - DNA, 20 bp, Artificial Sequence
  Description of Artificial Sequence: Synthetic oligonucleotide
  Target: ATXN2; (-) strand; PAM type: YTN; PAM sequence: CTG
gaactgtacttggtctcacc

SEQ ID NO: 63727 - DNA, 20 bp, Artificial Sequence
  Description of Artificial Sequence: Synthetic oligonucleotide
  Target: ATXN2; (-) strand; PAM type: YTN; PAM sequence: CTG
ccatggccaccgtcactgga

SEQ ID NO: 63728 - DNA, 20 bp, Artificial Sequence
  Description of Artificial Sequence: Synthetic oligonucleotide
  Target: ATXN2; (-) strand; PAM type: YTN; PAM sequence: TTG
gggaagggtgacacaagcac

SEQ ID NO: 63729 - DNA, 20 bp, Artificial Sequence
  Description of Artificial Sequence: Synthetic oligonucleotide
  Target: ATXN2; (-) strand; PAM type: YTN; PAM sequence: TTT
ggggaagggtgacacaagca

SEQ ID NO: 63730 - DNA, 20 bp, Artificial Sequence
  Description of Artificial Sequence: Synthetic oligonucleotide
  Target: ATXN2; (-) strand; PAM type: YTN; PAM sequence: TTG
gagtttggggaagggtgaca

SEQ ID NO: 63731 - DNA, 20 bp, Artificial Sequence
  Description of Artificial Sequence: Synthetic oligonucleotide
  Target: ATXN2; (-) strand; PAM type: YTN; PAM sequence: CTT
ggagtttggggaagggtgac

SEQ ID NO: 63732 - DNA, 20 bp, Artificial Sequence
  Description of Artificial Sequence: Synthetic oligonucleotide
  Target: ATXN2; (-) strand; PAM type: YTN; PAM sequence: CTG
cttggagtttggggaagggt

SEQ ID NO: 63733 - DNA, 20 bp, Artificial Sequence
  Description of Artificial Sequence: Synthetic oligonucleotide
  Target: ATXN2; (-) strand; PAM type: YTN; PAM sequence: CTG
agctgcttggagtttgggga

SEQ ID NO: 63734 - DNA, 20 bp, Artificial Sequence
  Description of Artificial Sequence: Synthetic oligonucleotide
  Target: ATXN2; (-) strand; PAM type: YTN; PAM sequence: TTG
tgctgagctgcttggagttt

SEQ ID NO: 63735 - DNA, 20 bp, Artificial Sequence
  Description of Artificial Sequence: Synthetic oligonucleotide
  Target: ATXN2; (-) strand; PAM type: YTN; PAM sequence: TTT
gtgctgagctgcttggagtt

SEQ ID NO: 63736 - DNA, 20 bp, Artificial Sequence
  Description of Artificial Sequence: Synthetic oligonucleotide
  Target: ATXN2; (-) strand; PAM type: YTN; PAM sequence: CTT
tgtgctgagctgcttggagt

SEQ ID NO: 63737 - DNA, 20 bp, Artificial Sequence
  Description of Artificial Sequence: Synthetic oligonucleotide
  Target: ATXN2; (-) strand; PAM type: YTN; PAM sequence: CTC
tttgtgctgagctgcttgga

SEQ ID NO: 63738 - DNA, 20 bp, Artificial Sequence
  Description of Artificial Sequence: Synthetic oligonucleotide
  Target: ATXN2; (-) strand; PAM type: YTN; PAM sequence: CTC
tctttgtgctgagctgcttg

SEQ ID NO: 63739 - DNA, 20 bp, Artificial Sequence
  Description of Artificial Sequence: Synthetic oligonucleotide
  Target: ATXN2; (-) strand; PAM type: YTN; PAM sequence: CTC
caaacaaatggagtctctct

SEQ ID NO: 63740 - DNA, 20 bp, Artificial Sequence
  Description of Artificial Sequence: Synthetic oligonucleotide
  Target: ATXN2; (-) strand; PAM type: YTN; PAM sequence: TTC
tccaaacaaatggagtctct

SEQ ID NO: 63741 - DNA, 20 bp, Artificial Sequence
  Description of Artificial Sequence: Synthetic oligonucleotide
  Target: ATXN2; (-) strand; PAM type: YTN; PAM sequence: TTT
ctccaaacaaatggagtctc

SEQ ID NO: 63742 - DNA, 20 bp, Artificial Sequence
  Description of Artificial Sequence: Synthetic oligonucleotide
  Target: ATXN2; (-) strand; PAM type: YTN; PAM sequence: TTA
catttctccaaacaaatgga

SEQ ID NO: 63743 - DNA, 20 bp, Artificial Sequence
  Description of Artificial Sequence: Synthetic oligonucleotide
  Target: ATXN2; (-) strand; PAM type: YTN; PAM sequence: CTT
acatttctccaaacaaatgg

SEQ ID NO: 63744 - DNA, 20 bp, Artificial Sequence
  Description of Artificial Sequence: Synthetic oligonucleotide
  Target: ATXN2; (-) strand; PAM type: YTN; PAM sequence: CTC
ttacatttctccaaacaaat

SEQ ID NO: 63745 - DNA, 20 bp, Artificial Sequence
  Description of Artificial Sequence: Synthetic oligonucleotide
  Target: ATXN2; (-) strand; PAM type: YTN; PAM sequence: TTG
tcctcttacatttctccaaa

SEQ ID NO: 63746 - DNA, 20 bp, Artificial Sequence
  Description of Artificial Sequence: Synthetic oligonucleotide
  Target: ATXN2; (-) strand; PAM type: YTN; PAM sequence: CTT
gtcctcttacatttctccaa

SEQ ID NO: 63747 - DNA, 20 bp, Artificial Sequence
  Description of Artificial Sequence: Synthetic oligonucleotide
  Target: ATXN2; (-) strand; PAM type: YTN; PAM sequence: CTC
ttgtcctcttacatttctcc

SEQ ID NO: 63748 - DNA, 20 bp, Artificial Sequence
  Description of Artificial Sequence: Synthetic oligonucleotide
  Target: ATXN2; (-) strand; PAM type: YTN; PAM sequence: TTA
ccaggcagtctcttgtcctc

SEQ ID NO: 63749 - DNA, 20 bp, Artificial Sequence
  Description of Artificial Sequence: Synthetic oligonucleotide
  Target: ATXN2; (-) strand; PAM type: YTN; PAM sequence: CTG
tattaccaggcagtctcttg

SEQ ID NO: 63750 - DNA, 20 bp, Artificial Sequence
  Description of Artificial Sequence: Synthetic oligonucleotide
  Target: ATXN2; (-) strand; PAM type: YTN; PAM sequence: TTC
cctgtattaccaggcagtct

SEQ ID NO: 63751 - DNA, 20 bp, Artificial Sequence
  Description of Artificial Sequence: Synthetic oligonucleotide
  Target: ATXN2; (-) strand; PAM type: YTN; PAM sequence: CTG
ggagaattccctgtattacc

SEQ ID NO: 63752 - DNA, 20 bp, Artificial Sequence
  Description of Artificial Sequence: Synthetic oligonucleotide
  Target: ATXN2; (-) strand; PAM type: YTN; PAM sequence: TTG
gggaagatctgggagaattc

SEQ ID NO: 63753 - DNA, 20 bp, Artificial Sequence
  Description of Artificial Sequence: Synthetic oligonucleotide
  Target: ATXN2; (-) strand; PAM type: YTN; PAM sequence: CTT
ggggaagatctgggagaatt

SEQ ID NO: 63754 - DNA, 20 bp, Artificial Sequence
  Description of Artificial Sequence: Synthetic oligonucleotide
  Target: ATXN2; (-) strand; PAM type: YTN; PAM sequence: TTG
gtagtcttggggaagatctg

SEQ ID NO: 63755 - DNA, 20 bp, Artificial Sequence
  Description of Artificial Sequence: Synthetic oligonucleotide
  Target: ATXN2; (-) strand; PAM type: YTN; PAM sequence: CTT
ggtagtcttggggaagatct

SEQ ID NO: 63756 - DNA, 20 bp, Artificial Sequence
  Description of Artificial Sequence: Synthetic oligonucleotide
  Target: ATXN2; (-) strand; PAM type: YTN; PAM sequence: CTG
tagaggtatcaccttggtag

SEQ ID NO: 63757 - DNA, 20 bp, Artificial Sequence
  Description of Artificial Sequence: Synthetic oligonucleotide
  Target: ATXN2; (-) strand; PAM type: YTN; PAM sequence: CTC
tgtagaggtatcaccttggt

SEQ ID NO: 63758 - DNA, 20 bp, Artificial Sequence
  Description of Artificial Sequence: Synthetic oligonucleotide
  Target: ATXN2; (-) strand; PAM type: YTN; PAM sequence: TTG
tgactctgtagaggtatcac

SEQ ID NO: 63759 - DNA, 20 bp, Artificial Sequence
  Description of Artificial Sequence: Synthetic oligonucleotide
  Target: ATXN2; (-) strand; PAM type: YTN; PAM sequence: CTA
gtaatgttgtgactctgtag

SEQ ID NO: 63760 - DNA, 20 bp, Artificial Sequence
  Description of Artificial Sequence: Synthetic oligonucleotide
  Target: ATXN2; (-) strand; PAM type: YTN; PAM sequence: TTA
gagggcaccccaagactagt

SEQ ID NO: 63761 - DNA, 20 bp, Artificial Sequence
  Description of Artificial Sequence: Synthetic oligonucleotide
  Target: ATXN2; (-) strand; PAM type: YTN; PAM sequence: CTG
cagccatacatgcattagag

SEQ ID NO: 63762 - DNA, 20 bp, Artificial Sequence
  Description of Artificial Sequence: Synthetic oligonucleotide
  Target: ATXN2; (-) strand; PAM type: YTN; PAM sequence: CTC
actgcagccatacatgcatt

SEQ ID NO: 63763 - DNA, 20 bp, Artificial Sequence
  Description of Artificial Sequence: Synthetic oligonucleotide
  Target: ATXN2; (-) strand; PAM type: YTN; PAM sequence: TTC
gctcactgcagccatacatg

SEQ ID NO: 63764 - DNA, 20 bp, Artificial Sequence
  Description of Artificial Sequence: Synthetic oligonucleotide
  Target: ATXN2; (-) strand; PAM type: YTN; PAM sequence: CTT
cgctcactgcagccatacat

SEQ ID NO: 63765 - DNA, 20 bp, Artificial Sequence
  Description of Artificial Sequence: Synthetic oligonucleotide
  Target: ATXN2; (-) strand; PAM type: YTN; PAM sequence: CTA
agtcttcgctcactgcagcc

SEQ ID NO: 63766 - DNA, 20 bp, Artificial Sequence
  Description of Artificial Sequence: Synthetic oligonucleotide
  Target: ATXN2; (-) strand; PAM type: YTN; PAM sequence: TTG
tcatctaagtcttcgctcac

SEQ ID NO: 63767 - DNA, 20 bp, Artificial Sequence
  Description of Artificial Sequence: Synthetic oligonucleotide
  Target: ATXN2; (-) strand; PAM type: YTN; PAM sequence: TTA
agtgttgtcatctaagtctt

SEQ ID NO: 63768 - DNA, 20 bp, Artificial Sequence
  Description of Artificial Sequence: Synthetic oligonucleotide
  Target: ATXN2; (-) strand; PAM type: YTN; PAM sequence: TTC
aaagggaattaagtgttgtc

SEQ ID NO: 63769 - DNA, 20 bp, Artificial Sequence
  Description of Artificial Sequence: Synthetic oligonucleotide
  Target: ATXN2; (-) strand; PAM type: YTN; PAM sequence: TTC
aagtattcaaagggaattaa

SEQ ID NO: 63770 - DNA, 20 bp, Artificial Sequence
  Description of Artificial Sequence: Synthetic oligonucleotide
  Target: ATXN2; (-) strand; PAM type: YTN; PAM sequence: TTT
caagtattcaaagggaatta

SEQ ID NO: 63771 - DNA, 20 bp, Artificial Sequence
  Description of Artificial Sequence: Synthetic oligonucleotide
  Target: ATXN2; (-) strand; PAM type: YTN; PAM sequence: TTT
tcaagtattcaaagggaatt

SEQ ID NO: 63772 - DNA, 20 bp, Artificial Sequence
  Description of Artificial Sequence: Synthetic oligonucleotide
  Target: ATXN2; (-) strand; PAM type: YTN; PAM sequence: TTT
ttcaagtattcaaagggaat

SEQ ID NO: 63773 - DNA, 20 bp, Artificial Sequence
  Description of Artificial Sequence: Synthetic oligonucleotide
  Target: ATXN2; (-) strand; PAM type: YTN; PAM sequence: TTG
agaaggtttttcaagtattc

SEQ ID NO: 63774 - DNA, 20 bp, Artificial Sequence
  Description of Artificial Sequence: Synthetic oligonucleotide
  Target: ATXN2; (-) strand; PAM type: YTN; PAM sequence: CTT
gagaaggtttttcaagtatt

SEQ ID NO: 63775 - DNA, 20 bp, Artificial Sequence
  Description of Artificial Sequence: Synthetic oligonucleotide
  Target: ATXN2; (-) strand; PAM type: YTN; PAM sequence: TTC
ttgagaaggtttttcaagta

SEQ ID NO: 63776 - DNA, 20 bp, Artificial Sequence
  Description of Artificial Sequence: Synthetic oligonucleotide
  Target: ATXN2; (-) strand; PAM type: YTN; PAM sequence: CTT
cttgagaaggtttttcaagt

SEQ ID NO: 63777 - DNA, 20 bp, Artificial Sequence
  Description of Artificial Sequence: Synthetic oligonucleotide
  Target: ATXN2; (-) strand; PAM type: YTN; PAM sequence: TTC
ttcttgagaaggtttttcaa

SEQ ID NO: 63778 - DNA, 20 bp, Artificial Sequence
  Description of Artificial Sequence: Synthetic oligonucleotide
  Target: ATXN2; (-) strand; PAM type: YTN; PAM sequence: CTC
ccattcttcttgagaaggtt

SEQ ID NO: 63779 - DNA, 20 bp, Artificial Sequence
  Description of Artificial Sequence: Synthetic oligonucleotide
  Target: ATXN2; (-) strand; PAM type: YTN; PAM sequence: CTG
catccggctcccattcttct

SEQ ID NO: 63780 - DNA, 20 bp, Artificial Sequence
  Description of Artificial Sequence: Synthetic oligonucleotide
  Target: ATXN2; (-) strand; PAM type: YTN; PAM sequence: TTA
gccactgcatccggctccca

SEQ ID NO: 63781 - DNA, 20 bp, Artificial Sequence
  Description of Artificial Sequence: Synthetic oligonucleotide
  Target: ATXN2; (-) strand; PAM type: YTN; PAM sequence: TTA
caggcgttagccactgcatc

SEQ ID NO: 63782 - DNA, 20 bp, Artificial Sequence
  Description of Artificial Sequence: Synthetic oligonucleotide
  Target: ATXN2; (-) strand; PAM type: YTN; PAM sequence: TTG
ggattacaggcgttagccac

SEQ ID NO: 63783 - DNA, 20 bp, Artificial Sequence
  Description of Artificial Sequence: Synthetic oligonucleotide
  Target: ATXN2; (-) strand; PAM type: YTN; PAM sequence: CTC
agagtgttgggattacaggc

SEQ ID NO: 63784 - DNA, 20 bp, Artificial Sequence
  Description of Artificial Sequence: Synthetic oligonucleotide
  Target: ATXN2; (-) strand; PAM type: YTN; PAM sequence: CTC
tcagagtgttgggattacag

SEQ ID NO: 63785 - DNA, 20 bp, Artificial Sequence
  Description of Artificial Sequence: Synthetic oligonucleotide
  Target: ATXN2; (-) strand; PAM type: YTN; PAM sequence: TTG
gcctctcagagtgttgggat

SEQ ID NO: 63786 - DNA, 20 bp, Artificial Sequence
  Description of Artificial Sequence: Synthetic oligonucleotide
  Target: ATXN2; (-) strand; PAM type: YTN; PAM sequence: CTT
ggcctctcagagtgttggga

SEQ ID NO: 63787 - DNA, 20 bp, Artificial Sequence
  Description of Artificial Sequence: Synthetic oligonucleotide
  Target: ATXN2; (-) strand; PAM type: YTN; PAM sequence: CTG
tccgccttggcctctcagag

SEQ ID NO: 63788 - DNA, 20 bp, Artificial Sequence
  Description of Artificial Sequence: Synthetic oligonucleotide
  Target: ATXN2; (-) strand; PAM type: YTN; PAM sequence: CTC
gtgatctgtccgccttggcc

SEQ ID NO: 63789 - DNA, 20 bp, Artificial Sequence
  Description of Artificial Sequence: Synthetic oligonucleotide
  Target: ATXN2; (-) strand; PAM type: YTN; PAM sequence: CTA
acctcgtgatctgtccgcct

SEQ ID NO: 63790 - DNA, 20 bp, Artificial Sequence
  Description of Artificial Sequence: Synthetic oligonucleotide
  Target: ATXN2; (-) strand; PAM type: YTN; PAM sequence: CTC
ctaacctcgtgatctgtccg

SEQ ID NO: 63791 - DNA, 20 bp, Artificial Sequence
  Description of Artificial Sequence: Synthetic oligonucleotide
  Target: ATXN2; (-) strand; PAM type: YTN; PAM sequence: CTC
gaactcctaacctcgtgatc

SEQ ID NO: 63792 - DNA, 20 bp, Artificial Sequence
  Description of Artificial Sequence: Synthetic oligonucleotide
  Target: ATXN2; (-) strand; PAM type: YTN; PAM sequence: CTG
gtctcgaactcctaacctcg

SEQ ID NO: 63793 - DNA, 20 bp, Artificial Sequence
  Description of Artificial Sequence: Synthetic oligonucleotide
  Target: ATXN2; (-) strand; PAM type: YTN; PAM sequence: TTG
gtcaggctggtctcgaactc

SEQ ID NO: 63794 - DNA, 20 bp, Artificial Sequence
  Description of Artificial Sequence: Synthetic oligonucleotide
  Target: ATXN2; (-) strand; PAM type: YTN; PAM sequence: TTC
accatgttggtcaggctggt

SEQ ID NO: 63795 - DNA, 20 bp, Artificial Sequence
  Description of Artificial Sequence: Synthetic oligonucleotide
  Target: ATXN2; (-) strand; PAM type: YTN; PAM sequence: TTT
caccatgttggtcaggctgg

SEQ ID NO: 63796 - DNA, 20 bp, Artificial Sequence
  Description of Artificial Sequence: Synthetic oligonucleotide
  Target: ATXN2; (-) strand; PAM type: YTN; PAM sequence: TTA
gtaaatatggtgtttcacca

SEQ ID NO: 63797 - DNA, 20 bp, Artificial Sequence
  Description of Artificial Sequence: Synthetic oligonucleotide
  Target: ATXN2; (-) strand; PAM type: YTN; PAM sequence: TTT
agtaaatatggtgtttcacc

SEQ ID NO: 63798 - DNA, 20 bp, Artificial Sequence
  Description of Artificial Sequence: Synthetic oligonucleotide
  Target: ATXN2; (-) strand; PAM type: YTN; PAM sequence: TTT
tagtaaatatggtgtttcac

SEQ ID NO: 63799 - DNA, 20 bp, Artificial Sequence
  Description of Artificial Sequence: Synthetic oligonucleotide
  Target: ATXN2; (-) strand; PAM type: YTN; PAM sequence: TTT
ttagtaaatatggtgtttca

SEQ ID NO: 63800 - DNA, 20 bp, Artificial Sequence
  Description of Artificial Sequence: Synthetic oligonucleotide
  Target: ATXN2; (-) strand; PAM type: YTN; PAM sequence: TTG
tatttttagtaaatatggtg

SEQ ID NO: 63801 - DNA, 20 bp, Artificial Sequence
  Description of Artificial Sequence: Synthetic oligonucleotide
  Target: ATXN2; (-) strand; PAM type: YTN; PAM sequence: TTT
gtatttttagtaaatatggt

SEQ ID NO: 63802 - DNA, 20 bp, Artificial Sequence
  Description of Artificial Sequence: Synthetic oligonucleotide
  Target: ATXN2; (-) strand; PAM type: YTN; PAM sequence: TTT
tgtatttttagtaaatatgg

SEQ ID NO: 63803 - DNA, 20 bp, Artificial Sequence
  Description of Artificial Sequence: Synthetic oligonucleotide
  Target: ATXN2; (-) strand; PAM type: YTN; PAM sequence: TTT
ttgtatttttagtaaatatg

SEQ ID NO: 63804 - DNA, 20 bp, Artificial Sequence
  Description of Artificial Sequence: Synthetic oligonucleotide
  Target: ATXN2; (-) strand; PAM type: YTN; PAM sequence: CTA
atttttgtatttttagtaaa

SEQ ID NO: 63805 - DNA, 20 bp, Artificial Sequence
  Description of Artificial Sequence: Synthetic oligonucleotide
  Target: ATXN2; (-) strand; PAM type: YTN; PAM sequence: CTG
gctaatttttgtatttttag

SEQ ID NO: 63806 - DNA, 20 bp, Artificial Sequence
  Description of Artificial Sequence: Synthetic oligonucleotide
  Target: ATXN2; (-) strand; PAM type: YTN; PAM sequence: TTA
caggtgcgtgccaccacgcc

SEQ ID NO: 63807 - DNA, 20 bp, Artificial Sequence
  Description of Artificial Sequence: Synthetic oligonucleotide
  Target: ATXN2; (-) strand; PAM type: YTN; PAM sequence: CTG
ggattacaggtgcgtgccac

SEQ ID NO: 63808 - DNA, 20 bp, Artificial Sequence
  Description of Artificial Sequence: Synthetic oligonucleotide
  Target: ATXN2; (-) strand; PAM type: YTN; PAM sequence: CTG
agtagctgggattacaggtg

SEQ ID NO: 63809 - DNA, 20 bp, Artificial Sequence
  Description of Artificial Sequence: Synthetic oligonucleotide
  Target: ATXN2; (-) strand; PAM type: YTN; PAM sequence: CTC
ctgagtagctgggattacag

SEQ ID NO: 63810 - DNA, 20 bp, Artificial Sequence
  Description of Artificial Sequence: Synthetic oligonucleotide
  Target: ATXN2; (-) strand; PAM type: YTN; PAM sequence: CTC
agcctcctgagtagctggga

SEQ ID NO: 63811 - DNA, 20 bp, Artificial Sequence
  Description of Artificial Sequence: Synthetic oligonucleotide
  Target: ATXN2; (-) strand; PAM type: YTN; PAM sequence: CTG
cctcagcctcctgagtagct

SEQ ID NO: 63812 - DNA, 20 bp, Artificial Sequence
  Description of Artificial Sequence: Synthetic oligonucleotide
  Target: ATXN2; (-) strand; PAM type: YTN; PAM sequence: CTC
ctgcctcagcctcctgagta

SEQ ID NO: 63813 - DNA, 20 bp, Artificial Sequence
  Description of Artificial Sequence: Synthetic oligonucleotide
  Target: ATXN2; (-) strand; PAM type: YTN; PAM sequence: TTC
tcctgcctcagcctcctgag

SEQ ID NO: 63814 - DNA, 20 bp, Artificial Sequence
  Description of Artificial Sequence: Synthetic oligonucleotide
  Target: ATXN2; (-) strand; PAM type: YTN; PAM sequence: TTC
aagcaattctcctgcctcag

SEQ ID NO: 63815 - DNA, 20 bp, Artificial Sequence
  Description of Artificial Sequence: Synthetic oligonucleotide
  Target: ATXN2; (-) strand; PAM type: YTN; PAM sequence: CTC
ccggattcaagcaattctcc

SEQ ID NO: 63816 - DNA, 20 bp, Artificial Sequence
  Description of Artificial Sequence: Synthetic oligonucleotide
  Target: ATXN2; (-) strand; PAM type: YTN; PAM sequence: CTC
cgtctcccggattcaagcaa

SEQ ID NO: 63817 - DNA, 20 bp, Artificial Sequence
  Description of Artificial Sequence: Synthetic oligonucleotide
  Target: ATXN2; (-) strand; PAM type: YTN; PAM sequence: CTC
accgcaacctccgtctcccg

SEQ ID NO: 63818 - DNA, 20 bp, Artificial Sequence
  Description of Artificial Sequence: Synthetic oligonucleotide
  Target: ATXN2; (-) strand; PAM type: YTN; PAM sequence: TTG
ctcaccgcaacctccgtctc

SEQ ID NO: 63819 - DNA, 20 bp, Artificial Sequence
  Description of Artificial Sequence: Synthetic oligonucleotide
  Target: ATXN2; (-) strand; PAM type: YTN; PAM sequence: TTT
gctcaccgcaacctccgtct

SEQ ID NO: 63820 - DNA, 20 bp, Artificial Sequence
  Description of Artificial Sequence: Synthetic oligonucleotide
  Target: ATXN2; (-) strand; PAM type: YTN; PAM sequence: CTT
tgctcaccgcaacctccgtc

SEQ ID NO: 63821 - DNA, 20 bp, Artificial Sequence
  Description of Artificial Sequence: Synthetic oligonucleotide
  Target: ATXN2; (-) strand; PAM type: YTN; PAM sequence: CTG
gagtgcagtggcacagtctt

SEQ ID NO: 63822 - DNA, 20 bp, Artificial Sequence
  Description of Artificial Sequence: Synthetic oligonucleotide
  Target: ATXN2; (-) strand; PAM type: YTN; PAM sequence: CTG
tcgcccaggctggagtgcag

SEQ ID NO: 63823 - DNA, 20 bp, Artificial Sequence
  Description of Artificial Sequence: Synthetic oligonucleotide
  Target: ATXN2; (-) strand; PAM type: YTN; PAM sequence: CTC
tgtcgcccaggctggagtgc

SEQ ID NO: 63824 - DNA, 20 bp, Artificial Sequence
  Description of Artificial Sequence: Synthetic oligonucleotide
  Target: ATXN2; (-) strand; PAM type: YTN; PAM sequence: CTC
gctctgtcgcccaggctgga

SEQ ID NO: 63825 - DNA, 20 bp, Artificial Sequence
  Description of Artificial Sequence: Synthetic oligonucleotide
  Target: ATXN2; (-) strand; PAM type: YTN; PAM sequence: TTG
agacagagtctcgctctgtc

SEQ ID NO: 63826 - DNA, 20 bp, Artificial Sequence
  Description of Artificial Sequence: Synthetic oligonucleotide
  Target: ATXN2; (-) strand; PAM type: YTN; PAM sequence: TTT
gagacagagtctcgctctgt

SEQ ID NO: 63827 - DNA, 20 bp, Artificial Sequence
  Description of Artificial Sequence: Synthetic oligonucleotide
  Target: ATXN2; (-) strand; PAM type: YTN; PAM sequence: TTT
tgagacagagtctcgctctg

SEQ ID NO: 63828 - DNA, 20 bp, Artificial Sequence
  Description of Artificial Sequence: Synthetic oligonucleotide
  Target: ATXN2; (-) strand; PAM type: YTN; PAM sequence: TTT
ttgagacagagtctcgctct

SEQ ID NO: 63829 - DNA, 20 bp, Artificial Sequence
  Description of Artificial Sequence: Synthetic oligonucleotide
  Target: ATXN2; (-) strand; PAM type: YTN; PAM sequence: CTG
tttttgagacagagtctcgc

SEQ ID NO: 63830 - DNA, 20 bp, Artificial Sequence
  Description of Artificial Sequence: Synthetic oligonucleotide
  Target: ATXN2; (-) strand; PAM type: YTN; PAM sequence: TTC
tgtttttgagacagagtctc

SEQ ID NO: 63831 - DNA, 20 bp, Artificial Sequence
  Description of Artificial Sequence: Synthetic oligonucleotide
  Target: ATXN2; (-) strand; PAM type: YTN; PAM sequence: TTT
ctgtttttgagacagagtct

SEQ ID NO: 63832 - DNA, 20 bp, Artificial Sequence
  Description of Artificial Sequence: Synthetic oligonucleotide
  Target: ATXN2; (-) strand; PAM type: YTN; PAM sequence: TTT
tctgtttttgagacagagtc

SEQ ID NO: 63833 - DNA, 20 bp, Artificial Sequence
  Description of Artificial Sequence: Synthetic oligonucleotide
  Target: ATXN2; (-) strand; PAM type: YTN; PAM sequence: TTT
ttctgtttttgagacagagt

SEQ ID NO: 63834 - DNA, 20 bp, Artificial Sequence
  Description of Artificial Sequence: Synthetic oligonucleotide
  Target: ATXN2; (-) strand; PAM type: YTN; PAM sequence: TTT
tttctgtttttgagacagag

SEQ ID NO: 63835 - DNA, 20 bp, Artificial Sequence
  Description of Artificial Sequence: Synthetic oligonucleotide
  Target: ATXN2; (-) strand; PAM type: YTN; PAM sequence: TTT
ttttctgtttttgagacaga

SEQ ID NO: 63836 - DNA, 20 bp, Artificial Sequence
  Description of Artificial Sequence: Synthetic oligonucleotide
  Target: ATXN2; (-) strand; PAM type: YTN; PAM sequence: TTT
tttttctgtttttgagacag

SEQ ID NO: 63837 - DNA, 20 bp, Artificial Sequence
  Description of Artificial Sequence: Synthetic oligonucleotide
  Target: ATXN2; (-) strand; PAM type: YTN; PAM sequence: TTT
ttttttctgtttttgagaca

SEQ ID NO: 63838 - DNA, 20 bp, Artificial Sequence
  Description of Artificial Sequence: Synthetic oligonucleotide
  Target: ATXN2; (-) strand; PAM type: YTN; PAM sequence: TTT
tttttttctgtttttgagac

SEQ ID NO: 63839 - DNA, 20 bp, Artificial Sequence
  Description of Artificial Sequence: Synthetic oligonucleotide
  Target: ATXN2; (-) strand; PAM type: YTN; PAM sequence: TTT
ttttttttctgtttttgaga

SEQ ID NO: 63840 - DNA, 20 bp, Artificial Sequence
  Description of Artificial Sequence: Synthetic oligonucleotide
  Target: ATXN2; (-) strand; PAM type: YTN; PAM sequence: TTT
tttttttttctgtttttgag

SEQ ID NO: 63841 - DNA, 20 bp, Artificial Sequence
  Description of Artificial Sequence: Synthetic oligonucleotide
  Target: ATXN2; (-) strand; PAM type: YTN; PAM sequence: TTT
ttttttttttctgtttttga

SEQ ID NO: 63842 - DNA, 20 bp, Artificial Sequence
  Description of Artificial Sequence: Synthetic oligonucleotide
  Target: ATXN2; (-) strand; PAM type: YTN; PAM sequence: TTT
tttttttttttctgtttttg

SEQ ID NO: 63843 - DNA, 20 bp, Artificial Sequence
  Description of Artificial Sequence: Synthetic oligonucleotide
  Target: ATXN2; (-) strand; PAM type: YTN; PAM sequence: CTT
ttttttttttttctgttttt

SEQ ID NO: 63844 - DNA, 20 bp, Artificial Sequence
  Description of Artificial Sequence: Synthetic oligonucleotide
  Target: ATXN2; (-) strand; PAM type: YTN; PAM sequence: TTC
ttttttttttttttctgttt

SEQ ID NO: 63845 - DNA, 20 bp, Artificial Sequence
  Description of Artificial Sequence: Synthetic oligonucleotide
  Target: ATXN2; (-) strand; PAM type: YTN; PAM sequence: TTG
tacgcattcttttttttttt

SEQ ID NO: 63846 - DNA, 20 bp, Artificial Sequence
  Description of Artificial Sequence: Synthetic oligonucleotide
  Target: ATXN2; (-) strand; PAM type: YTN; PAM sequence: TTT
gtacgcattctttttttttt

SEQ ID NO: 63847 - DNA, 20 bp, Artificial Sequence
  Description of Artificial Sequence: Synthetic oligonucleotide
  Target: ATXN2; (-) strand; PAM type: YTN; PAM sequence: TTG
tttgtacgcattcttttttt

SEQ ID NO: 63848 - DNA, 20 bp, Artificial Sequence
  Description of Artificial Sequence: Synthetic oligonucleotide
  Target: ATXN2; (-) strand; PAM type: YTN; PAM sequence: TTT
gtttgtacgcattctttttt

SEQ ID NO: 63849 - DNA, 20 bp, Artificial Sequence
  Description of Artificial Sequence: Synthetic oligonucleotide
  Target: ATXN2; (-) strand; PAM type: YTN; PAM sequence: TTT
tgtttgtacgcattcttttt

SEQ ID NO: 63850 - DNA, 20 bp, Artificial Sequence
  Description of Artificial Sequence: Synthetic oligonucleotide
  Target: ATXN2; (-) strand; PAM type: YTN; PAM sequence: CTG
gttttgtttgtacgcattct

SEQ ID NO: 63851 - DNA, 20 bp, Artificial Sequence
  Description of Artificial Sequence: Synthetic oligonucleotide
  Target: ATXN2; (-) strand; PAM type: YTN; PAM sequence: TTG
tagtctggttttgtttgtac

SEQ ID NO: 63852 - DNA, 20 bp, Artificial Sequence
  Description of Artificial Sequence: Synthetic oligonucleotide
  Target: ATXN2; (-) strand; PAM type: YTN; PAM sequence: TTT
gtagtctggttttgtttgta

SEQ ID NO: 63853 - DNA, 20 bp, Artificial Sequence
  Description of Artificial Sequence: Synthetic oligonucleotide
  Target: ATXN2; (-) strand; PAM type: YTN; PAM sequence: CTT
tgtagtctggttttgtttgt

SEQ ID NO: 63854 - DNA, 20 bp, Artificial Sequence
  Description of Artificial Sequence: Synthetic oligonucleotide
  Target: ATXN2; (-) strand; PAM type: YTN; PAM sequence: TTC
tttgtagtctggttttgttt

SEQ ID NO: 63855 - DNA, 20 bp, Artificial Sequence
  Description of Artificial Sequence: Synthetic oligonucleotide
  Target: ATXN2; (-) strand; PAM type: YTN; PAM sequence: CTG
ttctttgtagtctggttttg

SEQ ID NO: 63856 - DNA, 20 bp, Artificial Sequence
  Description of Artificial Sequence: Synthetic oligonucleotide
  Target: ATXN2; (-) strand; PAM type: YTN; PAM sequence: TTC
tgttctttgtagtctggttt

SEQ ID NO: 63857 - DNA, 20 bp, Artificial Sequence
  Description of Artificial Sequence: Synthetic oligonucleotide
  Target: ATXN2; (-) strand; PAM type: YTN; PAM sequence: TTG
ggtattctgttctttgtagt

SEQ ID NO: 63858 - DNA, 20 bp, Artificial Sequence
  Description of Artificial Sequence: Synthetic oligonucleotide
  Target: ATXN2; (-) strand; PAM type: YTN; PAM sequence: TTG
aagagttgggtattctgttc

SEQ ID NO: 63859 - DNA, 20 bp, Artificial Sequence
  Description of Artificial Sequence: Synthetic oligonucleotide
  Target: ATXN2; (-) strand; PAM type: YTN; PAM sequence: CTG
ggcattgaagagttgggtat

SEQ ID NO: 63860 - DNA, 20 bp, Artificial Sequence
  Description of Artificial Sequence: Synthetic oligonucleotide
  Target: ATXN2; (-) strand; PAM type: YTN; PAM sequence: TTC
atcagtgtctgggcattgaa

SEQ ID NO: 63861 - DNA, 20 bp, Artificial Sequence
  Description of Artificial Sequence: Synthetic oligonucleotide
  Target: ATXN2; (-) strand; PAM type: YTN; PAM sequence: TTG
tggatgttcatcagtgtctg

SEQ ID NO: 63862 - DNA, 20 bp, Artificial Sequence
  Description of Artificial Sequence: Synthetic oligonucleotide
  Target: ATXN2; (-) strand; PAM type: YTN; PAM sequence: CTT
gtggatgttcatcagtgtct

SEQ ID NO: 63863 - DNA, 20 bp, Artificial Sequence
  Description of Artificial Sequence: Synthetic oligonucleotide
  Target: ATXN2; (-) strand; PAM type: YTN; PAM sequence: TTG
atgcttgtggatgttcatca

SEQ ID NO: 63864 - DNA, 20 bp, Artificial Sequence
  Description of Artificial Sequence: Synthetic oligonucleotide
  Target: ATXN2; (-) strand; PAM type: YTN; PAM sequence: CTT
gatgcttgtggatgttcatc

SEQ ID NO: 63865 - DNA, 20 bp, Artificial Sequence
  Description of Artificial Sequence: Synthetic oligonucleotide
  Target: ATXN2; (-) strand; PAM type: YTN; PAM sequence: CTC
agatggccttgatgcttgtg

SEQ ID NO: 63866 - DNA, 20 bp, Artificial Sequence
  Description of Artificial Sequence: Synthetic oligonucleotide
  Target: ATXN2; (-) strand; PAM type: YTN; PAM sequence: TTC
tcagatggccttgatgcttg

SEQ ID NO: 63867 - DNA, 20 bp, Artificial Sequence
  Description of Artificial Sequence: Synthetic oligonucleotide
  Target: ATXN2; (-) strand; PAM type: YTN; PAM sequence: TTT
ctcagatggccttgatgctt

SEQ ID NO: 63868 - DNA, 20 bp, Artificial Sequence
  Description of Artificial Sequence: Synthetic oligonucleotide
  Target: ATXN2; (-) strand; PAM type: YTN; PAM sequence: TTT
tctcagatggccttgatgct

SEQ ID NO: 63869 - DNA, 20 bp, Artificial Sequence
  Description of Artificial Sequence: Synthetic oligonucleotide
  Target: ATXN2; (-) strand; PAM type: YTN; PAM sequence: TTG
gtgaggtcatgttttctcag

SEQ ID NO: 63870 - DNA, 20 bp, Artificial Sequence
  Description of Artificial Sequence: Synthetic oligonucleotide
  Target: ATXN2; (-) strand; PAM type: YTN; PAM sequence: TTT
ggtgaggtcatgttttctca

SEQ ID NO: 63871 - DNA, 20 bp, Artificial Sequence
  Description of Artificial Sequence: Synthetic oligonucleotide
  Target: ATXN2; (-) strand; PAM type: YTN; PAM sequence: TTC
atttggtgaggtcatgtttt

SEQ ID NO: 63872 - DNA, 20 bp, Artificial Sequence
  Description of Artificial Sequence: Synthetic oligonucleotide
  Target: ATXN2; (-) strand; PAM type: YTN; PAM sequence: TTA
gttcatttggtgaggtcatg

SEQ ID NO: 63873 - DNA, 20 bp, Artificial Sequence
  Description of Artificial Sequence: Synthetic oligonucleotide
  Target: ATXN2; (-) strand; PAM type: YTN; PAM sequence: TTT
agttcatttggtgaggtcat

SEQ ID NO: 63874 - DNA, 20 bp, Artificial Sequence
  Description of Artificial Sequence: Synthetic oligonucleotide
  Target: ATXN2; (-) strand; PAM type: YTN; PAM sequence: TTT
tagttcatttggtgaggtca

SEQ ID NO: 63875 - DNA, 20 bp, Artificial Sequence
  Description of Artificial Sequence: Synthetic oligonucleotide
  Target: ATXN2; (-) strand; PAM type: YTN; PAM sequence: TTT
ttagttcatttggtgaggtc

SEQ ID NO: 63876 - DNA, 20 bp, Artificial Sequence
  Description of Artificial Sequence: Synthetic oligonucleotide
  Target: ATXN2; (-) strand; PAM type: YTN; PAM sequence: TTA
tttttagttcatttggtgag

SEQ ID NO: 63877 - DNA, 20 bp, Artificial Sequence
  Description of Artificial Sequence: Synthetic oligonucleotide
  Target: ATXN2; (-) strand; PAM type: YTN; PAM sequence: TTT
atttttagttcatttggtga

SEQ ID NO: 63878 - DNA, 20 bp, Artificial Sequence
  Description of Artificial Sequence: Synthetic oligonucleotide
  Target: ATXN2; (-) strand; PAM type: YTN; PAM sequence: CTT
tatttttagttcatttggtg

SEQ ID NO: 63879 - DNA, 20 bp, Artificial Sequence
  Description of Artificial Sequence: Synthetic oligonucleotide
  Target: ATXN2; (-) strand; PAM type: YTN; PAM sequence: CTG
gtgtcctttatttttagttc

SEQ ID NO: 63880 - DNA, 20 bp, Artificial Sequence
  Description of Artificial Sequence: Synthetic oligonucleotide
  Target: ATXN2; (-) strand; PAM type: YTN; PAM sequence: TTG
gtcactggtgtcctttattt

SEQ ID NO: 63881 - DNA, 20 bp, Artificial Sequence
  Description of Artificial Sequence: Synthetic oligonucleotide
  Target: ATXN2; (-) strand; PAM type: YTN; PAM sequence: TTG
ggaattggtcactggtgtcc

SEQ ID NO: 63882 - DNA, 20 bp, Artificial Sequence
  Description of Artificial Sequence: Synthetic oligonucleotide
  Target: ATXN2; (-) strand; PAM type: YTN; PAM sequence: CTT
gggaattggtcactggtgtc

SEQ ID NO: 63883 - DNA, 20 bp, Artificial Sequence
  Description of Artificial Sequence: Synthetic oligonucleotide
  Target: ATXN2; (-) strand; PAM type: YTN; PAM sequence: TTA
tcacttgggaattggtcact

SEQ ID NO: 63884 - DNA, 20 bp, Artificial Sequence
  Description of Artificial Sequence: Synthetic oligonucleotide
  Target: ATXN2; (-) strand; PAM type: YTN; PAM sequence: CTT
atcacttgggaattggtcac

SEQ ID NO: 63885 - DNA, 20 bp, Artificial Sequence
  Description of Artificial Sequence: Synthetic oligonucleotide
  Target: ATXN2; (-) strand; PAM type: YTN; PAM sequence: CTC
ttatcacttgggaattggtc

SEQ ID NO: 63886 - DNA, 20 bp, Artificial Sequence
  Description of Artificial Sequence: Synthetic oligonucleotide
  Target: ATXN2; (-) strand; PAM type: YTN; PAM sequence: TTC
acatatctcttatcacttgg

SEQ ID NO: 63887 - DNA, 20 bp, Artificial Sequence
  Description of Artificial Sequence: Synthetic oligonucleotide
  Target: ATXN2; (-) strand; PAM type: YTN; PAM sequence: CTG
aaagttcacatatctcttat

SEQ ID NO: 63888 - DNA, 20 bp, Artificial Sequence
  Description of Artificial Sequence: Synthetic oligonucleotide
  Target: ATXN2; (-) strand; PAM type: YTN; PAM sequence: CTG
tctgaaagttcacatatctc

SEQ ID NO: 63889 - DNA, 20 bp, Artificial Sequence
  Description of Artificial Sequence: Synthetic oligonucleotide
  Target: ATXN2; (-) strand; PAM type: YTN; PAM sequence: TTC
tgtctgaaagttcacatatc

SEQ ID NO: 63890 - DNA, 20 bp, Artificial Sequence
  Description of Artificial Sequence: Synthetic oligonucleotide
  Target: ATXN2; (-) strand; PAM type: YTN; PAM sequence: TTG
aattctgtctgaaagttcac

SEQ ID NO: 63891 - DNA, 20 bp, Artificial Sequence
  Description of Artificial Sequence: Synthetic oligonucleotide
  Target: ATXN2; (-) strand; PAM type: YTN; PAM sequence: CTT
gaattctgtctgaaagttca

SEQ ID NO: 63892 - DNA, 20 bp, Artificial Sequence
  Description of Artificial Sequence: Synthetic oligonucleotide
  Target: ATXN2; (-) strand; PAM type: YTN; PAM sequence: TTC
agcttgaattctgtctgaaa

SEQ ID NO: 63893 - DNA, 20 bp, Artificial Sequence
  Description of Artificial Sequence: Synthetic oligonucleotide
  Target: ATXN2; (-) strand; PAM type: YTN; PAM sequence: CTC
aaagcattcagcttgaattc

SEQ ID NO: 63894 - DNA, 20 bp, Artificial Sequence
  Description of Artificial Sequence: Synthetic oligonucleotide
  Target: ATXN2; (-) strand; PAM type: YTN; PAM sequence: TTC
tcaaagcattcagcttgaat

SEQ ID NO: 63895 - DNA, 20 bp, Artificial Sequence
  Description of Artificial Sequence: Synthetic oligonucleotide
  Target: ATXN2; (-) strand; PAM type: YTN; PAM sequence: TTT
ctcaaagcattcagcttgaa

SEQ ID NO: 63896 - DNA, 20 bp, Artificial Sequence
  Description of Artificial Sequence: Synthetic oligonucleotide
  Target: ATXN2; (-) strand; PAM type: YTN; PAM sequence: CTT
tctcaaagcattcagcttga

SEQ ID NO: 63897 - DNA, 20 bp, Artificial Sequence
  Description of Artificial Sequence: Synthetic oligonucleotide
  Target: ATXN2; (-) strand; PAM type: YTN; PAM sequence: TTG
aactttctcaaagcattcag

SEQ ID NO: 63898 - DNA, 20 bp, Artificial Sequence
  Description of Artificial Sequence: Synthetic oligonucleotide
  Target: ATXN2; (-) strand; PAM type: YTN; PAM sequence: TTC
gttgaactttctcaaagcat

SEQ ID NO: 63899 - DNA, 20 bp, Artificial Sequence
  Description of Artificial Sequence: Synthetic oligonucleotide
  Target: ATXN2; (-) strand; PAM type: YTN; PAM sequence: TTT
cgttgaactttctcaaagca

SEQ ID NO: 63900 - DNA, 20 bp, Artificial Sequence
  Description of Artificial Sequence: Synthetic oligonucleotide
  Target: ATXN2; (-) strand; PAM type: YTN; PAM sequence: TTG
gatttcgttgaactttctca

SEQ ID NO: 63901 - DNA, 20 bp, Artificial Sequence
  Description of Artificial Sequence: Synthetic oligonucleotide
  Target: ATXN2; (-) strand; PAM type: YTN; PAM sequence: CTT
ggatttcgttgaactttctc

SEQ ID NO: 63902 - DNA, 20 bp, Artificial Sequence
  Description of Artificial Sequence: Synthetic oligonucleotide
  Target: ATXN2; (-) strand; PAM type: YTN; PAM sequence: TTA
tcttggatttcgttgaactt

SEQ ID NO: 63903 - DNA, 20 bp, Artificial Sequence
  Description of Artificial Sequence: Synthetic oligonucleotide
  Target: ATXN2; (-) strand; PAM type: YTN; PAM sequence: CTG
tattatcttggatttcgttg

SEQ ID NO: 63904 - DNA, 20 bp, Artificial Sequence
  Description of Artificial Sequence: Synthetic oligonucleotide
  Target: ATXN2; (-) strand; PAM type: YTN; PAM sequence: CTC
tgtattatcttggatttcgt

SEQ ID NO: 63905 - DNA, 20 bp, Artificial Sequence
  Description of Artificial Sequence: Synthetic oligonucleotide
  Target: ATXN2; (-) strand; PAM type: YTN; PAM sequence: TTC
tctgtattatcttggatttc

SEQ ID NO: 63906 - DNA, 20 bp, Artificial Sequence
  Description of Artificial Sequence: Synthetic oligonucleotide
  Target: ATXN2; (-) strand; PAM type: YTN; PAM sequence: TTG
ttctctgtattatcttggat

SEQ ID NO: 63907 - DNA, 20 bp, Artificial Sequence
  Description of Artificial Sequence: Synthetic oligonucleotide
  Target: ATXN2; (-) strand; PAM type: YTN; PAM sequence: TTT
gttctctgtattatcttgga

SEQ ID NO: 63908 - DNA, 20 bp, Artificial Sequence
  Description of Artificial Sequence: Synthetic oligonucleotide
  Target: ATXN2; (-) strand; PAM type: YTN; PAM sequence: CTG
aatttgttctctgtattatc

SEQ ID NO: 63909 - DNA, 20 bp, Artificial Sequence
  Description of Artificial Sequence: Synthetic oligonucleotide
  Target: ATXN2; (-) strand; PAM type: YTN; PAM sequence: TTC
tgaatttgttctctgtatta

SEQ ID NO: 63910 - DNA, 20 bp, Artificial Sequence
  Description of Artificial Sequence: Synthetic oligonucleotide
  Target: ATXN2; (-) strand; PAM type: YTN; PAM sequence: TTA
taggattctgaatttgttct

SEQ ID NO: 63911 - DNA, 20 bp, Artificial Sequence
  Description of Artificial Sequence: Synthetic oligonucleotide
  Target: ATXN2; (-) strand; PAM type: YTN; PAM sequence: TTT
ataggattctgaatttgttc

SEQ ID NO: 63912 - DNA, 20 bp, Artificial Sequence
  Description of Artificial Sequence: Synthetic oligonucleotide
  Target: ATXN2; (-) strand; PAM type: YTN; PAM sequence: TTA
aatttataggattctgaatt

SEQ ID NO: 63913 - DNA, 20 bp, Artificial Sequence
  Description of Artificial Sequence: Synthetic oligonucleotide
  Target: ATXN2; (-) strand; PAM type: YTN; PAM sequence: TTT
aaatttataggattctgaat

SEQ ID NO: 63914 - DNA, 20 bp, Artificial Sequence
  Description of Artificial Sequence: Synthetic oligonucleotide
  Target: ATXN2; (-) strand; PAM type: YTN; PAM sequence: TTT
taaatttataggattctgaa

SEQ ID NO: 63915 - DNA, 20 bp, Artificial Sequence
  Description of Artificial Sequence: Synthetic oligonucleotide
  Target: ATXN2; (-) strand; PAM type: YTN; PAM sequence: TTT
ttaaatttataggattctga

SEQ ID NO: 63916 - DNA, 20 bp, Artificial Sequence
  Description of Artificial Sequence: Synthetic oligonucleotide
  Target: ATXN2; (-) strand; PAM type: YTN; PAM sequence: TTT
tttaaatttataggattctg

SEQ ID NO: 63917 - DNA, 20 bp, Artificial Sequence
  Description of Artificial Sequence: Synthetic oligonucleotide
  Target: ATXN2; (-) strand; PAM type: YTN; PAM sequence: CTT
ttttaaatttataggattct

SEQ ID NO: 63918 - DNA, 20 bp, Artificial Sequence
  Description of Artificial Sequence: Synthetic oligonucleotide
  Target: ATXN2; (-) strand; PAM type: YTN; PAM sequence: CTC
ttttttaaatttataggatt

SEQ ID NO: 63919 - DNA, 20 bp, Artificial Sequence
  Description of Artificial Sequence: Synthetic oligonucleotide
  Target: ATXN2; (-) strand; PAM type: YTN; PAM sequence: TTG
cagtctcttttttaaattta

SEQ ID NO: 63920 - DNA, 20 bp, Artificial Sequence
  Description of Artificial Sequence: Synthetic oligonucleotide
  Target: ATXN2; (-) strand; PAM type: YTN; PAM sequence: TTA
ttgcagtctcttttttaaat

SEQ ID NO: 63921 - DNA, 20 bp, Artificial Sequence
  Description of Artificial Sequence: Synthetic oligonucleotide
  Target: ATXN2; (-) strand; PAM type: YTN; PAM sequence: CTA
ataattattgcagtctcttt

SEQ ID NO: 63922 - DNA, 20 bp, Artificial Sequence
  Description of Artificial Sequence: Synthetic oligonucleotide
  Target: ATXN2; (-) strand; PAM type: YTN; PAM sequence: TTA
ctaataattattgcagtctc

SEQ ID NO: 63923 - DNA, 20 bp, Artificial Sequence
  Description of Artificial Sequence: Synthetic oligonucleotide
  Target: ATXN2; (-) strand; PAM type: YTN; PAM sequence: TTT
actaataattattgcagtct

SEQ ID NO: 63924 - DNA, 20 bp, Artificial Sequence
  Description of Artificial Sequence: Synthetic oligonucleotide
  Target: ATXN2; (-) strand; PAM type: YTN; PAM sequence: TTT
tactaataattattgcagtc

SEQ ID NO: 63925 - DNA, 20 bp, Artificial Sequence
  Description of Artificial Sequence: Synthetic oligonucleotide
  Target: ATXN2; (-) strand; PAM type: YTN; PAM sequence: TTT
ttactaataattattgcagt

SEQ ID NO: 63926 - DNA, 20 bp, Artificial Sequence
  Description of Artificial Sequence: Synthetic oligonucleotide
  Target: ATXN2; (-) strand; PAM type: YTN; PAM sequence: CTT
tttactaataattattgcag

SEQ ID NO: 63927 - DNA, 20 bp, Artificial Sequence
  Description of Artificial Sequence: Synthetic oligonucleotide
  Target: ATXN2; (-) strand; PAM type: YTN; PAM sequence: TTC
tttttactaataattattgc

SEQ ID NO: 63928 - DNA, 20 bp, Artificial Sequence
  Description of Artificial Sequence: Synthetic oligonucleotide
  Target: ATXN2; (-) strand; PAM type: YTN; PAM sequence: TTG
attctttttactaataatta

SEQ ID NO: 63929 - DNA, 20 bp, Artificial Sequence
  Description of Artificial Sequence: Synthetic oligonucleotide
  Target: ATXN2; (-) strand; PAM type: YTN; PAM sequence: CTT
gattctttttactaataatt

SEQ ID NO: 63930 - DNA, 20 bp, Artificial Sequence
  Description of Artificial Sequence: Synthetic oligonucleotide
  Target: ATXN2; (-) strand; PAM type: YTN; PAM sequence: CTG
cttgattctttttactaata

SEQ ID NO: 63931 - DNA, 20 bp, Artificial Sequence
  Description of Artificial Sequence: Synthetic oligonucleotide
  Target: ATXN2; (-) strand; PAM type: YTN; PAM sequence: TTC
tgcttgattctttttactaa

SEQ ID NO: 63932 - DNA, 20 bp, Artificial Sequence
  Description of Artificial Sequence: Synthetic oligonucleotide
  Target: ATXN2; (-) strand; PAM type: YTN; PAM sequence: TTT
ctgcttgattctttttacta

SEQ ID NO: 63933 - DNA, 20 bp, Artificial Sequence
  Description of Artificial Sequence: Synthetic oligonucleotide
  Target: ATXN2; (-) strand; PAM type: YTN; PAM sequence: TTG
ggatttctgcttgattcttt

SEQ ID NO: 63934 - DNA, 20 bp, Artificial Sequence
  Description of Artificial Sequence: Synthetic oligonucleotide
  Target: ATXN2; (-) strand; PAM type: YTN; PAM sequence: TTT
gggatttctgcttgattctt

SEQ ID NO: 63935 - DNA, 20 bp, Artificial Sequence
  Description of Artificial Sequence: Synthetic oligonucleotide
  Target: ATXN2; (-) strand; PAM type: YTN; PAM sequence: CTT
tgggatttctgcttgattct

SEQ ID NO: 63936 - DNA, 20 bp, Artificial Sequence
  Description of Artificial Sequence: Synthetic oligonucleotide
  Target: ATXN2; (-) strand; PAM type: YTN; PAM sequence: TTC
cactttgggatttctgcttg

SEQ ID NO: 63937 - DNA, 20 bp, Artificial Sequence
  Description of Artificial Sequence: Synthetic oligonucleotide
  Target: ATXN2; (-) strand; PAM type: YTN; PAM sequence: TTT
ccactttgggatttctgctt

SEQ ID NO: 63938 - DNA, 20 bp, Artificial Sequence
  Description of Artificial Sequence: Synthetic oligonucleotide
  Target: ATXN2; (-) strand; PAM type: YTN; PAM sequence: TTT
tccactttgggatttctgct

SEQ ID NO: 63939 - DNA, 20 bp, Artificial Sequence
  Description of Artificial Sequence: Synthetic oligonucleotide
  Target: ATXN2; (-) strand; PAM type: YTN; PAM sequence: TTT
ttccactttgggatttctgc

SEQ ID NO: 63940 - DNA, 20 bp, Artificial Sequence
  Description of Artificial Sequence: Synthetic oligonucleotide
  Target: ATXN2; (-) strand; PAM type: YTN; PAM sequence: TTG
aatttttccactttgggatt

SEQ ID NO: 63941 - DNA, 20 bp, Artificial Sequence
  Description of Artificial Sequence: Synthetic oligonucleotide
  Target: ATXN2; (-) strand; PAM type: YTN; PAM sequence: TTG
tcaattgaatttttccactt

SEQ ID NO: 63942 - DNA, 20 bp, Artificial Sequence
  Description of Artificial Sequence: Synthetic oligonucleotide
  Target: ATXN2; (-) strand; PAM type: YTN; PAM sequence: TTT
gtcaattgaatttttccact

SEQ ID NO: 63943 - DNA, 20 bp, Artificial Sequence
  Description of Artificial Sequence: Synthetic oligonucleotide
  Target: ATXN2; (-) strand; PAM type: YTN; PAM sequence: TTC
agtttgtcaattgaattttt

SEQ ID NO: 63944 - DNA, 20 bp, Artificial Sequence
  Description of Artificial Sequence: Synthetic oligonucleotide
  Target: ATXN2; (-) strand; PAM type: YTN; PAM sequence: TTT
cagtttgtcaattgaatttt

SEQ ID NO: 63945 - DNA, 20 bp, Artificial Sequence
  Description of Artificial Sequence: Synthetic oligonucleotide
  Target: ATXN2; (-) strand; PAM type: YTN; PAM sequence: TTT
tcagtttgtcaattgaattt

SEQ ID NO: 63946 - DNA, 20 bp, Artificial Sequence
  Description of Artificial Sequence: Synthetic oligonucleotide
  Target: ATXN2; (-) strand; PAM type: YTN; PAM sequence: TTT
ttcagtttgtcaattgaatt

SEQ ID NO: 63947 - DNA, 20 bp, Artificial Sequence
  Description of Artificial Sequence: Synthetic oligonucleotide
  Target: ATXN2; (-) strand; PAM type: YTN; PAM sequence: CTG
atgcatttttcagtttgtca

SEQ ID NO: 63948 - DNA, 20 bp, Artificial Sequence
  Description of Artificial Sequence: Synthetic oligonucleotide
  Target: ATXN2; (-) strand; PAM type: YTN; PAM sequence: TTG
agagactgatgcatttttca

SEQ ID NO: 63949 - DNA, 20 bp, Artificial Sequence
  Description of Artificial Sequence: Synthetic oligonucleotide
  Target: ATXN2; (-) strand; PAM type: YTN; PAM sequence: CTA
ttgagagactgatgcatttt

SEQ ID NO: 63950 - DNA, 20 bp, Artificial Sequence
  Description of Artificial Sequence: Synthetic oligonucleotide
  Target: ATXN2; (-) strand; PAM type: YTN; PAM sequence: CTG
ctattgagagactgatgcat

SEQ ID NO: 63951 - DNA, 20 bp, Artificial Sequence
  Description of Artificial Sequence: Synthetic oligonucleotide
  Target: ATXN2; (-) strand; PAM type: YTN; PAM sequence: TTC
tgctattgagagactgatgc

SEQ ID NO: 63952 - DNA, 20 bp, Artificial Sequence
  Description of Artificial Sequence: Synthetic oligonucleotide
  Target: ATXN2; (-) strand; PAM type: YTN; PAM sequence: TTT
ctgctattgagagactgatg

SEQ ID NO: 63953 - DNA, 20 bp, Artificial Sequence
  Description of Artificial Sequence: Synthetic oligonucleotide
  Target: ATXN2; (-) strand; PAM type: YTN; PAM sequence: TTG
atacatttctgctattgaga

SEQ ID NO: 63954 - DNA, 20 bp, Artificial Sequence
  Description of Artificial Sequence: Synthetic oligonucleotide
  Target: ATXN2; (-) strand; PAM type: YTN; PAM sequence: CTT
gatacatttctgctattgag

SEQ ID NO: 63955 - DNA, 20 bp, Artificial Sequence
  Description of Artificial Sequence: Synthetic oligonucleotide
  Target: ATXN2; (-) strand; PAM type: YTN; PAM sequence: CTG
cttgatacatttctgctatt

SEQ ID NO: 63956 - DNA, 20 bp, Artificial Sequence
  Description of Artificial Sequence: Synthetic oligonucleotide
  Target: ATXN2; (-) strand; PAM type: YTN; PAM sequence: CTG
ctgcttgatacatttctgct

SEQ ID NO: 63957 - DNA, 20 bp, Artificial Sequence
  Description of Artificial Sequence: Synthetic oligonucleotide
  Target: ATXN2; (-) strand; PAM type: YTN; PAM sequence: TTC
tgctgcttgatacatttctg

SEQ ID NO: 63958 - DNA, 20 bp, Artificial Sequence
  Description of Artificial Sequence: Synthetic oligonucleotide
  Target: ATXN2; (-) strand; PAM type: YTN; PAM sequence: TTT
ctgctgcttgatacatttct

SEQ ID NO: 63959 - DNA, 20 bp, Artificial Sequence
  Description of Artificial Sequence: Synthetic oligonucleotide
  Target: ATXN2; (-) strand; PAM type: YTN; PAM sequence: TTT
tctgctgcttgatacatttc

SEQ ID NO: 63960 - DNA, 20 bp, Artificial Sequence
  Description of Artificial Sequence: Synthetic oligonucleotide
  Target: ATXN2; (-) strand; PAM type: YTN; PAM sequence: CTA
atgttttctgctgcttgata

SEQ ID NO: 63961 - DNA, 20 bp, Artificial Sequence
  Description of Artificial Sequence: Synthetic oligonucleotide
  Target: ATXN2; (-) strand; PAM type: YTN; PAM sequence: CTC
actaatgttttctgctgctt

SEQ ID NO: 63962 - DNA, 20 bp, Artificial Sequence
  Description of Artificial Sequence: Synthetic oligonucleotide
  Target: ATXN2; (-) strand; PAM type: YTN; PAM sequence: TTC
aagctcactaatgttttctg

SEQ ID NO: 63963 - DNA, 20 bp, Artificial Sequence
  Description of Artificial Sequence: Synthetic oligonucleotide
  Target: ATXN2; (-) strand; PAM type: YTN; PAM sequence: CTG
aattcaagctcactaatgtt

SEQ ID NO: 63964 - DNA, 20 bp, Artificial Sequence
  Description of Artificial Sequence: Synthetic oligonucleotide
  Target: ATXN2; (-) strand; PAM type: YTN; PAM sequence: TTC
aaatagcctgaattcaagct

SEQ ID NO: 63965 - DNA, 20 bp, Artificial Sequence
  Description of Artificial Sequence: Synthetic oligonucleotide
  Target: ATXN2; (-) strand; PAM type: YTN; PAM sequence: TTT
caaatagcctgaattcaagc

SEQ ID NO: 63966 - DNA, 20 bp, Artificial Sequence
  Description of Artificial Sequence: Synthetic oligonucleotide
  Target: ATXN2; (-) strand; PAM type: YTN; PAM sequence: TTT
tcaaatagcctgaattcaag

SEQ ID NO: 63967 - DNA, 20 bp, Artificial Sequence
  Description of Artificial Sequence: Synthetic oligonucleotide
  Target: ATXN2; (-) strand; PAM type: YTN; PAM sequence: TTA
ttttcaaatagcctgaattc

SEQ ID NO: 63968 - DNA, 20 bp, Artificial Sequence
  Description of Artificial Sequence: Synthetic oligonucleotide
  Target: ATXN2; (-) strand; PAM type: YTN; PAM sequence: TTT
attttcaaatagcctgaatt

SEQ ID NO: 63969 - DNA, 20 bp, Artificial Sequence
  Description of Artificial Sequence: Synthetic oligonucleotide
  Target: ATXN2; (-) strand; PAM type: YTN; PAM sequence: TTG
tttattttcaaatagcctga

SEQ ID NO: 63970 - DNA, 20 bp, Artificial Sequence
  Description of Artificial Sequence: Synthetic oligonucleotide
  Target: ATXN2; (-) strand; PAM type: YTN; PAM sequence: TTG
gttgtttattttcaaatagc

SEQ ID NO: 63971 - DNA, 20 bp, Artificial Sequence
  Description of Artificial Sequence: Synthetic oligonucleotide
  Target: ATXN2; (-) strand; PAM type: YTN; PAM sequence: CTT
ggttgtttattttcaaatag

SEQ ID NO: 63972 - DNA, 20 bp, Artificial Sequence
  Description of Artificial Sequence: Synthetic oligonucleotide
  Target: ATXN2; (-) strand; PAM type: YTN; PAM sequence: TTA
taagcgtgagtcatcgtgcc

SEQ ID NO: 63973 - DNA, 20 bp, Artificial Sequence
  Description of Artificial Sequence: Synthetic oligonucleotide
  Target: ATXN2; (-) strand; PAM type: YTN; PAM sequence: CTA
ggattataagcgtgagtcat

SEQ ID NO: 63974 - DNA, 20 bp, Artificial Sequence
  Description of Artificial Sequence: Synthetic oligonucleotide
  Target: ATXN2; (-) strand; PAM type: YTN; PAM sequence: CTA
aagtgctaggattataagcg

SEQ ID NO: 63975 - DNA, 20 bp, Artificial Sequence
  Description of Artificial Sequence: Synthetic oligonucleotide
  Target: ATXN2; (-) strand; PAM type: YTN; PAM sequence: TTG
gcatcctaaagtgctaggat

SEQ ID NO: 63976 - DNA, 20 bp, Artificial Sequence
  Description of Artificial Sequence: Synthetic oligonucleotide
  Target: ATXN2; (-) strand; PAM type: YTN; PAM sequence: CTT
ggcatcctaaagtgctagga

SEQ ID NO: 63977 - DNA, 20 bp, Artificial Sequence
  Description of Artificial Sequence: Synthetic oligonucleotide
  Target: ATXN2; (-) strand; PAM type: YTN; PAM sequence: CTC
agggtgatccgcccgccttg

SEQ ID NO: 63978 - DNA, 20 bp, Artificial Sequence
  Description of Artificial Sequence: Synthetic oligonucleotide
  Target: ATXN2; (-) strand; PAM type: YTN; PAM sequence: CTG
acctcagggtgatccgcccg

SEQ ID NO: 63979 - DNA, 20 bp, Artificial Sequence
  Description of Artificial Sequence: Synthetic oligonucleotide
  Target: ATXN2; (-) strand; PAM type: YTN; PAM sequence: CTC
ctgacctcagggtgatccgc

SEQ ID NO: 63980 - DNA, 20 bp, Artificial Sequence
  Description of Artificial Sequence: Synthetic oligonucleotide
  Target: ATXN2; (-) strand; PAM type: YTN; PAM sequence: TTG
agctcctgacctcagggtga

SEQ ID NO: 63981 - DNA, 20 bp, Artificial Sequence
  Description of Artificial Sequence: Synthetic oligonucleotide
  Target: ATXN2; (-) strand; PAM type: YTN; PAM sequence: CTT
gagctcctgacctcagggtg

SEQ ID NO: 63982 - DNA, 20 bp, Artificial Sequence
  Description of Artificial Sequence: Synthetic oligonucleotide
  Target: ATXN2; (-) strand; PAM type: YTN; PAM sequence: CTG
gtcttgagctcctgacctca

SEQ ID NO: 63983 - DNA, 20 bp, Artificial Sequence
  Description of Artificial Sequence: Synthetic oligonucleotide
  Target: ATXN2; (-) strand; PAM type: YTN; PAM sequence: TTG
ccaggctggtcttgagctcc

SEQ ID NO: 63984 - DNA, 20 bp, Artificial Sequence
  Description of Artificial Sequence: Synthetic oligonucleotide
  Target: ATXN2; (-) strand; PAM type: YTN; PAM sequence: TTT
gccaggctggtcttgagctc

SEQ ID NO: 63985 - DNA, 20 bp, Artificial Sequence
  Description of Artificial Sequence: Synthetic oligonucleotide
  Target: ATXN2; (-) strand; PAM type: YTN; PAM sequence: TTG
ccatatttgccaggctggtc

SEQ ID NO: 63986 - DNA, 20 bp, Artificial Sequence
  Description of Artificial Sequence: Synthetic oligonucleotide
  Target: ATXN2; (-) strand; PAM type: YTN; PAM sequence: TTT
gccatatttgccaggctggt

SEQ ID NO: 63987 - DNA, 20 bp, Artificial Sequence
  Description of Artificial Sequence: Synthetic oligonucleotide
  Target: ATXN2; (-) strand; PAM type: YTN; PAM sequence: TTT
tgccatatttgccaggctgg

SEQ ID NO: 63988 - DNA, 20 bp, Artificial Sequence
  Description of Artificial Sequence: Synthetic oligonucleotide
  Target: ATXN2; (-) strand; PAM type: YTN; PAM sequence: TTA
gtaaagacggggttttgcca

SEQ ID NO: 63989 - DNA, 20 bp, Artificial Sequence
  Description of Artificial Sequence: Synthetic oligonucleotide
  Target: ATXN2; (-) strand; PAM type: YTN; PAM sequence: TTT
agtaaagacggggttttgcc

SEQ ID NO: 63990 - DNA, 20 bp, Artificial Sequence
  Description of Artificial Sequence: Synthetic oligonucleotide
  Target: ATXN2; (-) strand; PAM type: YTN; PAM sequence: TTT
tagtaaagacggggttttgc

SEQ ID NO: 63991 - DNA, 20 bp, Artificial Sequence
  Description of Artificial Sequence: Synthetic oligonucleotide
  Target: ATXN2; (-) strand; PAM type: YTN; PAM sequence: TTT
ttagtaaagacggggttttg

SEQ ID NO: 63992 - DNA, 20 bp, Artificial Sequence
  Description of Artificial Sequence: Synthetic oligonucleotide
  Target: ATXN2; (-) strand; PAM type: YTN; PAM sequence: TTG
tatttttagtaaagacgggg

SEQ ID NO: 63993 - DNA, 20 bp, Artificial Sequence
  Description of Artificial Sequence: Synthetic oligonucleotide
  Target: ATXN2; (-) strand; PAM type: YTN; PAM sequence: TTT
gtatttttagtaaagacggg

SEQ ID NO: 63994 - DNA, 20 bp, Artificial Sequence
  Description of Artificial Sequence: Synthetic oligonucleotide
  Target: ATXN2; (-) strand; PAM type: YTN; PAM sequence: TTT
tgtatttttagtaaagacgg

SEQ ID NO: 63995 - DNA, 20 bp, Artificial Sequence
  Description of Artificial Sequence: Synthetic oligonucleotide
  Target: ATXN2; (-) strand; PAM type: YTN; PAM sequence: TTT
ttgtatttttagtaaagacg

SEQ ID NO: 63996 - DNA, 20 bp, Artificial Sequence
  Description of Artificial Sequence: Synthetic oligonucleotide
  Target: ATXN2; (-) strand; PAM type: YTN; PAM sequence: CTT
tttgtatttttagtaaagac

SEQ ID NO: 63997 - DNA, 20 bp, Artificial Sequence
  Description of Artificial Sequence: Synthetic oligonucleotide
  Target: ATXN2; (-) strand; PAM type: YTN; PAM sequence: CTA
ctttttgtatttttagtaaa

SEQ ID NO: 63998 - DNA, 20 bp, Artificial Sequence
  Description of Artificial Sequence: Synthetic oligonucleotide
  Target: ATXN2; (-) strand; PAM type: YTN; PAM sequence: TTA
caagcatgtgccaccacgcc

SEQ ID NO: 63999 - DNA, 20 bp, Artificial Sequence
  Description of Artificial Sequence: Synthetic oligonucleotide
  Target: ATXN2; (-) strand; PAM type: YTN; PAM sequence: CTG
ggattacaagcatgtgccac

SEQ ID NO: 64000 - DNA, 20 bp, Artificial Sequence
  Description of Artificial Sequence: Synthetic oligonucleotide
  Target: ATXN2; (-) strand; PAM type: YTN; PAM sequence: CTC
ccaagtagctgggattacaa

SEQ ID NO: 64001 - DNA, 20 bp, Artificial Sequence
  Description of Artificial Sequence: Synthetic oligonucleotide
  Target: ATXN2; (-) strand; PAM type: YTN; PAM sequence: CTC
agcctcccaagtagctggga

SEQ ID NO: 64002 - DNA, 20 bp, Artificial Sequence
  Description of Artificial Sequence: Synthetic oligonucleotide
  Target: ATXN2; (-) strand; PAM type: YTN; PAM sequence: CTG
cctcagcctcccaagtagct

SEQ ID NO: 64003 - DNA, 20 bp, Artificial Sequence
  Description of Artificial Sequence: Synthetic oligonucleotide
  Target: ATXN2; (-) strand; PAM type: YTN; PAM sequence: TTC
tgcctcagcctcccaagtag

SEQ ID NO: 64004 - DNA, 20 bp, Artificial Sequence
  Description of Artificial Sequence: Synthetic oligonucleotide
  Target: ATXN2; (-) strand; PAM type: YTN; PAM sequence: CTT
ctgcctcagcctcccaagta

SEQ ID NO: 64005 - DNA, 20 bp, Artificial Sequence
  Description of Artificial Sequence: Synthetic oligonucleotide
  Target: ATXN2; (-) strand; PAM type: YTN; PAM sequence: TTC
ttctgcctcagcctcccaag

SEQ ID NO: 64006 - DNA, 20 bp, Artificial Sequence
  Description of Artificial Sequence: Synthetic oligonucleotide
  Target: ATXN2; (-) strand; PAM type: YTN; PAM sequence: TTC
aagcgattcttctgcctcag

SEQ ID NO: 64007 - DNA, 20 bp, Artificial Sequence
  Description of Artificial Sequence: Synthetic oligonucleotide
  Target: ATXN2; (-) strand; PAM type: YTN; PAM sequence: CTC
ccaggttcaagcgattcttc

SEQ ID NO: 64008 - DNA, 20 bp, Artificial Sequence
  Description of Artificial Sequence: Synthetic oligonucleotide
  Target: ATXN2; (-) strand; PAM type: YTN; PAM sequence: CTC
caactcccaggttcaagcga

SEQ ID NO: 64009 - DNA, 20 bp, Artificial Sequence
  Description of Artificial Sequence: Synthetic oligonucleotide
  Target: ATXN2; (-) strand; PAM type: YTN; PAM sequence: CTA
caacctccaactcccaggtt

SEQ ID NO: 64010 - DNA, 20 bp, Artificial Sequence
  Description of Artificial Sequence: Synthetic oligonucleotide
  Target: ATXN2; (-) strand; PAM type: YTN; PAM sequence: CTC
actacaacctccaactccca

SEQ ID NO: 64011 - DNA, 20 bp, Artificial Sequence
  Description of Artificial Sequence: Synthetic oligonucleotide
  Target: ATXN2; (-) strand; PAM type: YTN; PAM sequence: TTG
gctcactacaacctccaact

SEQ ID NO: 64012 - DNA, 20 bp, Artificial Sequence
  Description of Artificial Sequence: Synthetic oligonucleotide
  Target: ATXN2; (-) strand; PAM type: YTN; PAM sequence: CTT
ggctcactacaacctccaac

SEQ ID NO: 64013 - DNA, 20 bp, Artificial Sequence
  Description of Artificial Sequence: Synthetic oligonucleotide
  Target: ATXN2; (-) strand; PAM type: YTN; PAM sequence: CTG
gagtgcagtggtgccatctt

SEQ ID NO: 64014 - DNA, 20 bp, Artificial Sequence
  Description of Artificial Sequence: Synthetic oligonucleotide
  Target: ATXN2; (-) strand; PAM type: YTN; PAM sequence: TTA
ccagcctggagtgcagtggt

SEQ ID NO: 64015 - DNA, 20 bp, Artificial Sequence
  Description of Artificial Sequence: Synthetic oligonucleotide
  Target: ATXN2; (-) strand; PAM type: YTN; PAM sequence: CTG
ttaccagcctggagtgcagt

SEQ ID NO: 64016 - DNA, 20 bp, Artificial Sequence
  Description of Artificial Sequence: Synthetic oligonucleotide
  Target: ATXN2; (-) strand; PAM type: YTN; PAM sequence: CTC
tgttaccagcctggagtgca

SEQ ID NO: 64017 - DNA, 20 bp, Artificial Sequence
  Description of Artificial Sequence: Synthetic oligonucleotide
  Target: ATXN2; (-) strand; PAM type: YTN; PAM sequence: TTG
agacagagtcatgctctgtt

SEQ ID NO: 64018 - DNA, 20 bp, Artificial Sequence
  Description of Artificial Sequence: Synthetic oligonucleotide
  Target: ATXN2; (-) strand; PAM type: YTN; PAM sequence: TTT
gagacagagtcatgctctgt

SEQ ID NO: 64019 - DNA, 20 bp, Artificial Sequence
  Description of Artificial Sequence: Synthetic oligonucleotide
  Target: ATXN2; (-) strand; PAM type: YTN; PAM sequence: TTT
tgagacagagtcatgctctg

SEQ ID NO: 64020 - DNA, 20 bp, Artificial Sequence
  Description of Artificial Sequence: Synthetic oligonucleotide
  Target: ATXN2; (-) strand; PAM type: YTN; PAM sequence: TTT
ttgagacagagtcatgctct

SEQ ID NO: 64021 - DNA, 20 bp, Artificial Sequence
  Description of Artificial Sequence: Synthetic oligonucleotide
  Target: ATXN2; (-) strand; PAM type: YTN; PAM sequence: TTT
tttgagacagagtcatgctc

SEQ ID NO: 64022 - DNA, 20 bp, Artificial Sequence
  Description of Artificial Sequence: Synthetic oligonucleotide
  Target: ATXN2; (-) strand; PAM type: YTN; PAM sequence: TTT
ttttgagacagagtcatgct

SEQ ID NO: 64023 - DNA, 20 bp, Artificial Sequence
  Description of Artificial Sequence: Synthetic oligonucleotide
  Target: ATXN2; (-) strand; PAM type: YTN; PAM sequence: TTT
tttttgagacagagtcatgc

SEQ ID NO: 64024 - DNA, 20 bp, Artificial Sequence
  Description of Artificial Sequence: Synthetic oligonucleotide
  Target: ATXN2; (-) strand; PAM type: YTN; PAM sequence: TTT
ttttttgagacagagtcatg

SEQ ID NO: 64025 - DNA, 20 bp, Artificial Sequence
  Description of Artificial Sequence: Synthetic oligonucleotide
  Target: ATXN2; (-) strand; PAM type: YTN; PAM sequence: TTT
tttttttgagacagagtcat

SEQ ID NO: 64026 - DNA, 20 bp, Artificial Sequence
  Description of Artificial Sequence: Synthetic oligonucleotide
  Target: ATXN2; (-) strand; PAM type: YTN; PAM sequence: TTT
ttttttttgagacagagtca

SEQ ID NO: 64027 - DNA, 20 bp, Artificial Sequence
  Description of Artificial Sequence: Synthetic oligonucleotide
  Target: ATXN2; (-) strand; PAM type: YTN; PAM sequence: TTT
tttttttttgagacagagtc

SEQ ID NO: 64028 - DNA, 20 bp, Artificial Sequence
  Description of Artificial Sequence: Synthetic oligonucleotide
  Target: ATXN2; (-) strand; PAM type: YTN; PAM sequence: TTT
ttttttttttgagacagagt

SEQ ID NO: 64029 - DNA, 20 bp, Artificial Sequence
  Description of Artificial Sequence: Synthetic oligonucleotide
  Target: ATXN2; (-) strand; PAM type: YTN; PAM sequence: TTT
tttttttttttgagacagag

SEQ ID NO: 64030 - DNA, 20 bp, Artificial Sequence
  Description of Artificial Sequence: Synthetic oligonucleotide
  Target: ATXN2; (-) strand; PAM type: YTN; PAM sequence: TTT
ttttttttttttgagacaga

SEQ ID NO: 64031 - DNA, 20 bp, Artificial Sequence
  Description of Artificial Sequence: Synthetic oligonucleotide
  Target: ATXN2; (-) strand; PAM type: YTN; PAM sequence: TTT
tttttttttttttgagacag

SEQ ID NO: 64032 - DNA, 20 bp, Artificial Sequence
  Description of Artificial Sequence: Synthetic oligonucleotide
  Target: ATXN2; (-) strand; PAM type: YTN; PAM sequence: TTT
ttttttttttttttgagaca

SEQ ID NO: 64033 - DNA, 20 bp, Artificial Sequence
  Description of Artificial Sequence: Synthetic oligonucleotide
  Target: ATXN2; (-) strand; PAM type: YTN; PAM sequence: TTT
tttttttttttttttgagac

SEQ ID NO: 64034 - DNA, 20 bp, Artificial Sequence
  Description of Artificial Sequence: Synthetic oligonucleotide
  Target: ATXN2; (-) strand; PAM type: YTN; PAM sequence: TTT
ttttttttttttttttgaga

SEQ ID NO: 64035 - DNA, 20 bp, Artificial Sequence
  Description of Artificial Sequence: Synthetic oligonucleotide
  Target: ATXN2; (-) strand; PAM type: YTN; PAM sequence: TTT
tttttttttttttttttgag

SEQ ID NO: 64036 - DNA, 20 bp, Artificial Sequence
  Description of Artificial Sequence: Synthetic oligonucleotide
  Target: ATXN2; (-) strand; PAM type: YTN; PAM sequence: TTT
ttttttttttttttttttga

SEQ ID NO: 64037 - DNA, 20 bp, Artificial Sequence
  Description of Artificial Sequence: Synthetic oligonucleotide
  Target: ATXN2; (-) strand; PAM type: YTN; PAM sequence: TTT
tttttttttttttttttttg

SEQ ID NO: 64038 - DNA, 20 bp, Artificial Sequence
  Description of Artificial Sequence: Synthetic oligonucleotide
  Target: ATXN2; (-) strand; PAM type: YTN; PAM sequence: TTT
tttttttttttttttttttt

SEQ ID NO: 64039 - DNA, 20 bp, Artificial Sequence
  Description of Artificial Sequence: Synthetic oligonucleotide
  Target: ATXN2; (-) strand; PAM type: YTN; PAM sequence: CTT
tttttttttttttttttttt

SEQ ID NO: 64040 - DNA, 20 bp, Artificial Sequence
  Description of Artificial Sequence: Synthetic oligonucleotide
  Target: ATXN2; (-) strand; PAM type: YTN; PAM sequence: TTG
aagaactttttttttttttt

SEQ ID NO: 64041 - DNA, 20 bp, Artificial Sequence
  Description of Artificial Sequence: Synthetic oligonucleotide
  Target: ATXN2; (-) strand; PAM type: YTN; PAM sequence: TTG
cagattgaagaacttttttt

SEQ ID NO: 64042 - DNA, 20 bp, Artificial Sequence
  Description of Artificial Sequence: Synthetic oligonucleotide
  Target: ATXN2; (-) strand; PAM type: YTN; PAM sequence: CTT
gcagattgaagaactttttt

SEQ ID NO: 64043 - DNA, 20 bp, Artificial Sequence
  Description of Artificial Sequence: Synthetic oligonucleotide
  Target: ATXN2; (-) strand; PAM type: YTN; PAM sequence: TTC
ttgcagattgaagaactttt

SEQ ID NO: 64044 - DNA, 20 bp, Artificial Sequence
  Description of Artificial Sequence: Synthetic oligonucleotide
  Target: ATXN2; (-) strand; PAM type: YTN; PAM sequence: TTT
cttgcagattgaagaacttt

SEQ ID NO: 64045 - DNA, 20 bp, Artificial Sequence
  Description of Artificial Sequence: Synthetic oligonucleotide
  Target: ATXN2; (-) strand; PAM type: YTN; PAM sequence: TTT
tcttgcagattgaagaactt

SEQ ID NO: 64046 - DNA, 20 bp, Artificial Sequence
  Description of Artificial Sequence: Synthetic oligonucleotide
  Target: ATXN2; (-) strand; PAM type: YTN; PAM sequence: CTT
ttcttgcagattgaagaact

SEQ ID NO: 64047 - DNA, 20 bp, Artificial Sequence
  Description of Artificial Sequence: Synthetic oligonucleotide
  Target: ATXN2; (-) strand; PAM type: YTN; PAM sequence: TTA
acatccttttcttgcagatt

SEQ ID NO: 64048 - DNA, 20 bp, Artificial Sequence
  Description of Artificial Sequence: Synthetic oligonucleotide
  Target: ATXN2; (-) strand; PAM type: YTN; PAM sequence: TTG
ttaacatccttttcttgcag

SEQ ID NO: 64049 - DNA, 20 bp, Artificial Sequence
  Description of Artificial Sequence: Synthetic oligonucleotide
  Target: ATXN2; (-) strand; PAM type: YTN; PAM sequence: TTT
gttaacatccttttcttgca

SEQ ID NO: 64050 - DNA, 20 bp, Artificial Sequence
  Description of Artificial Sequence: Synthetic oligonucleotide
  Target: ATXN2; (-) strand; PAM type: YTN; PAM sequence: TTG
tttgttaacatccttttctt

SEQ ID NO: 64051 - DNA, 20 bp, Artificial Sequence
  Description of Artificial Sequence: Synthetic oligonucleotide
  Target: ATXN2; (-) strand; PAM type: YTN; PAM sequence: TTA
ttgtttgttaacatcctttt

SEQ ID NO: 64052 - DNA, 20 bp, Artificial Sequence
  Description of Artificial Sequence: Synthetic oligonucleotide
  Target: ATXN2; (-) strand; PAM type: YTN; PAM sequence: TTA
ttattgtttgttaacatcct

SEQ ID NO: 64053 - DNA, 20 bp, Artificial Sequence
  Description of Artificial Sequence: Synthetic oligonucleotide
  Target: ATXN2; (-) strand; PAM type: YTN; PAM sequence: TTT
attattgtttgttaacatcc

SEQ ID NO: 64054 - DNA, 20 bp, Artificial Sequence
  Description of Artificial Sequence: Synthetic oligonucleotide
  Target: ATXN2; (-) strand; PAM type: YTN; PAM sequence: TTC
aggtgatttattattgtttg

SEQ ID NO: 64055 - DNA, 20 bp, Artificial Sequence
  Description of Artificial Sequence: Synthetic oligonucleotide
  Target: ATXN2; (-) strand; PAM type: YTN; PAM sequence: CTT
caggtgatttattattgttt

SEQ ID NO: 64056 - DNA, 20 bp, Artificial Sequence
  Description of Artificial Sequence: Synthetic oligonucleotide
  Target: ATXN2; (-) strand; PAM type: YTN; PAM sequence: TTG
caccttcaggtgatttatta

SEQ ID NO: 64057 - DNA, 20 bp, Artificial Sequence
  Description of Artificial Sequence: Synthetic oligonucleotide
  Target: ATXN2; (-) strand; PAM type: YTN; PAM sequence: TTT
gcaccttcaggtgatttatt

SEQ ID NO: 64058 - DNA, 20 bp, Artificial Sequence
  Description of Artificial Sequence: Synthetic oligonucleotide
  Target: ATXN2; (-) strand; PAM type: YTN; PAM sequence: TTT
tgcaccttcaggtgatttat

SEQ ID NO: 64059 - DNA, 20 bp, Artificial Sequence
  Description of Artificial Sequence: Synthetic oligonucleotide
  Target: ATXN2; (-) strand; PAM type: YTN; PAM sequence: TTT
ttgcaccttcaggtgattta

SEQ ID NO: 64060 - DNA, 20 bp, Artificial Sequence
  Description of Artificial Sequence: Synthetic oligonucleotide
  Target: ATXN2; (-) strand; PAM type: YTN; PAM sequence: TTA
ccagtgagtttttgcacctt

SEQ ID NO: 64061 - DNA, 20 bp, Artificial Sequence
  Description of Artificial Sequence: Synthetic oligonucleotide
  Target: ATXN2; (-) strand; PAM type: YTN; PAM sequence: TTG
ttaccagtgagtttttgcac

SEQ ID NO: 64062 - DNA, 20 bp, Artificial Sequence
  Description of Artificial Sequence: Synthetic oligonucleotide
  Target: ATXN2; (-) strand; PAM type: YTN; PAM sequence: CTT
gttaccagtgagtttttgca

SEQ ID NO: 64063 - DNA, 20 bp, Artificial Sequence
  Description of Artificial Sequence: Synthetic oligonucleotide
  Target: ATXN2; (-) strand; PAM type: YTN; PAM sequence: CTG
tgtacttgttaccagtgagt

SEQ ID NO: 64064 - DNA, 20 bp, Artificial Sequence
  Description of Artificial Sequence: Synthetic oligonucleotide
  Target: ATXN2; (-) strand; PAM type: YTN; PAM sequence: TTC
tgtgtacttgttaccagtga

SEQ ID NO: 64065 - DNA, 20 bp, Artificial Sequence
  Description of Artificial Sequence: Synthetic oligonucleotide
  Target: ATXN2; (-) strand; PAM type: YTN; PAM sequence: TTT
ctgtgtacttgttaccagtg

SEQ ID NO: 64066 - DNA, 20 bp, Artificial Sequence
  Description of Artificial Sequence: Synthetic oligonucleotide
  Target: ATXN2; (-) strand; PAM type: YTN; PAM sequence: TTT
tctgtgtacttgttaccagt

SEQ ID NO: 64067 - DNA, 20 bp, Artificial Sequence
  Description of Artificial Sequence: Synthetic oligonucleotide
  Target: ATXN2; (-) strand; PAM type: YTN; PAM sequence: TTT
ttctgtgtacttgttaccag

SEQ ID NO: 64068 - DNA, 20 bp, Artificial Sequence
  Description of Artificial Sequence: Synthetic oligonucleotide
  Target: ATXN2; (-) strand; PAM type: YTN; PAM sequence: CTG
tatttttctgtgtacttgtt

SEQ ID NO: 64069 - DNA, 20 bp, Artificial Sequence
  Description of Artificial Sequence: Synthetic oligonucleotide
  Target: ATXN2; (-) strand; PAM type: YTN; PAM sequence: TTC
tgtatttttctgtgtacttg

SEQ ID NO: 64070 - DNA, 20 bp, Artificial Sequence
  Description of Artificial Sequence: Synthetic oligonucleotide
  Target: ATXN2; (-) strand; PAM type: YTN; PAM sequence: TTA
caatattctgtatttttctg

SEQ ID NO: 64071 - DNA, 20 bp, Artificial Sequence
  Description of Artificial Sequence: Synthetic oligonucleotide
  Target: ATXN2; (-) strand; PAM type: YTN; PAM sequence: TTA
cagtgttacaatattctgta

SEQ ID NO: 64072 - DNA, 20 bp, Artificial Sequence
  Description of Artificial Sequence: Synthetic oligonucleotide
  Target: ATXN2; (-) strand; PAM type: YTN; PAM sequence: TTA
tacaccacaattacagtgtt

SEQ ID NO: 64073 - DNA, 20 bp, Artificial Sequence
  Description of Artificial Sequence: Synthetic oligonucleotide
  Target: ATXN2; (-) strand; PAM type: YTN; PAM sequence: TTT
atacaccacaattacagtgt

SEQ ID NO: 64074 - DNA, 20 bp, Artificial Sequence
  Description of Artificial Sequence: Synthetic oligonucleotide
  Target: ATXN2; (-) strand; PAM type: YTN; PAM sequence: CTC
aaaatatgagtagtagttta

SEQ ID NO: 64075 - DNA, 20 bp, Artificial Sequence
  Description of Artificial Sequence: Synthetic oligonucleotide
  Target: ATXN2; (-) strand; PAM type: YTN; PAM sequence: CTG
ctcaaaatatgagtagtagt

SEQ ID NO: 64076 - DNA, 20 bp, Artificial Sequence
  Description of Artificial Sequence: Synthetic oligonucleotide
  Target: ATXN2; (-) strand; PAM type: YTN; PAM sequence: TTC
ctgctcaaaatatgagtagt

SEQ ID NO: 64077 - DNA, 20 bp, Artificial Sequence
  Description of Artificial Sequence: Synthetic oligonucleotide
  Target: ATXN2; (-) strand; PAM type: YTN; PAM sequence: CTT
cctgctcaaaatatgagtag

SEQ ID NO: 64078 - DNA, 20 bp, Artificial Sequence
  Description of Artificial Sequence: Synthetic oligonucleotide
  Target: ATXN2; (-) strand; PAM type: YTN; PAM sequence: TTC
ttcctgctcaaaatatgagt

SEQ ID NO: 64079 - DNA, 20 bp, Artificial Sequence
  Description of Artificial Sequence: Synthetic oligonucleotide
  Target: ATXN2; (-) strand; PAM type: YTN; PAM sequence: TTA
ttcttcctgctcaaaatatg

SEQ ID NO: 64080 - DNA, 20 bp, Artificial Sequence
  Description of Artificial Sequence: Synthetic oligonucleotide
  Target: ATXN2; (-) strand; PAM type: YTN; PAM sequence: TTT
attcttcctgctcaaaatat

SEQ ID NO: 64081 - DNA, 20 bp, Artificial Sequence
  Description of Artificial Sequence: Synthetic oligonucleotide
  Target: ATXN2; (-) strand; PAM type: YTN; PAM sequence: TTT
tattcttcctgctcaaaata

SEQ ID NO: 64082 - DNA, 20 bp, Artificial Sequence
  Description of Artificial Sequence: Synthetic oligonucleotide
  Target: ATXN2; (-) strand; PAM type: YTN; PAM sequence: TTT
ttattcttcctgctcaaaat

SEQ ID NO: 64083 - DNA, 20 bp, Artificial Sequence
  Description of Artificial Sequence: Synthetic oligonucleotide
  Target: ATXN2; (-) strand; PAM type: YTN; PAM sequence: TTT
tttattcttcctgctcaaaa

SEQ ID NO: 64084 - DNA, 20 bp, Artificial Sequence
  Description of Artificial Sequence: Synthetic oligonucleotide
  Target: ATXN2; (-) strand; PAM type: YTN; PAM sequence: TTC
attttttattcttcctgctc

SEQ ID NO: 64085 - DNA, 20 bp, Artificial Sequence
  Description of Artificial Sequence: Synthetic oligonucleotide
  Target: ATXN2; (-) strand; PAM type: YTN; PAM sequence: TTG
aaaggttcattttttattct

SEQ ID NO: 64086 - DNA, 20 bp, Artificial Sequence
  Description of Artificial Sequence: Synthetic oligonucleotide
  Target: ATXN2; (-) strand; PAM type: YTN; PAM sequence: TTT
gaaaggttcattttttattc

SEQ ID NO: 64087 - DNA, 20 bp, Artificial Sequence
  Description of Artificial Sequence: Synthetic oligonucleotide
  Target: ATXN2; (-) strand; PAM type: YTN; PAM sequence: TTT
tgaaaggttcattttttatt

SEQ ID NO: 64088 - DNA, 20 bp, Artificial Sequence
  Description of Artificial Sequence: Synthetic oligonucleotide
  Target: ATXN2; (-) strand; PAM type: YTN; PAM sequence: TTT
ttgaaaggttcattttttat

SEQ ID NO: 64089 - DNA, 20 bp, Artificial Sequence
  Description of Artificial Sequence: Synthetic oligonucleotide
  Target: ATXN2; (-) strand; PAM type: YTN; PAM sequence: TTA
tttttgaaaggttcattttt

SEQ ID NO: 64090 - DNA, 20 bp, Artificial Sequence
  Description of Artificial Sequence: Synthetic oligonucleotide
  Target: ATXN2; (-) strand; PAM type: YTN; PAM sequence: CTT
atttttgaaaggttcatttt

SEQ ID NO: 64091 - DNA, 20 bp, Artificial Sequence
  Description of Artificial Sequence: Synthetic oligonucleotide
  Target: ATXN2; (-) strand; PAM type: YTN; PAM sequence: TTC
ttatttttgaaaggttcatt

SEQ ID NO: 64092 - DNA, 20 bp, Artificial Sequence
  Description of Artificial Sequence: Synthetic oligonucleotide
  Target: ATXN2; (-) strand; PAM type: YTN; PAM sequence: TTG
tagttcttatttttgaaagg

SEQ ID NO: 64093 - DNA, 20 bp, Artificial Sequence
  Description of Artificial Sequence: Synthetic oligonucleotide
  Target: ATXN2; (-) strand; PAM type: YTN; PAM sequence: CTC
acaaaaaaaaaaaaaattgt

SEQ ID NO: 64094 - DNA, 20 bp, Artificial Sequence
  Description of Artificial Sequence: Synthetic oligonucleotide
  Target: ATXN2; (-) strand; PAM type: YTN; PAM sequence: CTG
tctcacaaaaaaaaaaaaaa

SEQ ID NO: 64095 - DNA, 20 bp, Artificial Sequence
  Description of Artificial Sequence: Synthetic oligonucleotide
  Target: ATXN2; (-) strand; PAM type: YTN; PAM sequence: CTC
tgtctcacaaaaaaaaaaaa

SEQ ID NO: 64096 - DNA, 20 bp, Artificial Sequence
  Description of Artificial Sequence: Synthetic oligonucleotide
  Target: ATXN2; (-) strand; PAM type: YTN; PAM sequence: CTG
ggcagcagagcaagactctg

SEQ ID NO: 64097 - DNA, 20 bp, Artificial Sequence
  Description of Artificial Sequence: Synthetic oligonucleotide
  Target: ATXN2; (-) strand; PAM type: YTN; PAM sequence: CTG
ccgtccagcctgggcagcag

SEQ ID NO: 64098 - DNA, 20 bp, Artificial Sequence
  Description of Artificial Sequence: Synthetic oligonucleotide
  Target: ATXN2; (-) strand; PAM type: YTN; PAM sequence: TTA
gccgagatcgcgccactgcc

SEQ ID NO: 64099 - DNA, 20 bp, Artificial Sequence
  Description of Artificial Sequence: Synthetic oligonucleotide
  Target: ATXN2; (-) strand; PAM type: YTN; PAM sequence: TTG
cagttagccgagatcgcgcc

SEQ ID NO: 64100 - DNA, 20 bp, Artificial Sequence
  Description of Artificial Sequence: Synthetic oligonucleotide
  Target: ATXN2; (-) strand; PAM type: YTN; PAM sequence: CTG
ggaggcggaggttgcagtta

SEQ ID NO: 64101 - DNA, 20 bp, Artificial Sequence
  Description of Artificial Sequence: Synthetic oligonucleotide
  Target: ATXN2; (-) strand; PAM type: YTN; PAM sequence: TTG
aacctgggaggcggaggttg

SEQ ID NO: 64102 - DNA, 20 bp, Artificial Sequence
  Description of Artificial Sequence: Synthetic oligonucleotide
  Target: ATXN2; (-) strand; PAM type: YTN; PAM sequence: CTT
gaacctgggaggcggaggtt

SEQ ID NO: 64103 - DNA, 20 bp, Artificial Sequence
  Description of Artificial Sequence: Synthetic oligonucleotide
  Target: ATXN2; (-) strand; PAM type: YTN; PAM sequence: CTG
aggcaggagaatcgcttgaa

SEQ ID NO: 64104 - DNA, 20 bp, Artificial Sequence
  Description of Artificial Sequence: Synthetic oligonucleotide
  Target: ATXN2; (-) strand; PAM type: YTN; PAM sequence: CTC
aggaggctgaggcaggagaa

SEQ ID NO: 64105 - DNA, 20 bp, Artificial Sequence
  Description of Artificial Sequence: Synthetic oligonucleotide
  Target: ATXN2; (-) strand; PAM type: YTN; PAM sequence: CTA
ctcaggaggctgaggcagga

SEQ ID NO: 64106 - DNA, 20 bp, Artificial Sequence
  Description of Artificial Sequence: Synthetic oligonucleotide
  Target: ATXN2; (-) strand; PAM type: YTN; PAM sequence: CTA
gctactcaggaggctgaggc

SEQ ID NO: 64107 - DNA, 20 bp, Artificial Sequence
  Description of Artificial Sequence: Synthetic oligonucleotide
  Target: ATXN2; (-) strand; PAM type: YTN; PAM sequence: CTG
taatcctagctactcaggag

SEQ ID NO: 64108 - DNA, 20 bp, Artificial Sequence
  Description of Artificial Sequence: Synthetic oligonucleotide
  Target: ATXN2; (-) strand; PAM type: YTN; PAM sequence: TTA
gccaggcgtggtggcacgca

SEQ ID NO: 64109 - DNA, 20 bp, Artificial Sequence
  Description of Artificial Sequence: Synthetic oligonucleotide
  Target: ATXN2; (-) strand; PAM type: YTN; PAM sequence: CTA
aaaatacaaaaattagccag

SEQ ID NO: 64110 - DNA, 20 bp, Artificial Sequence
  Description of Artificial Sequence: Synthetic oligonucleotide
  Target: ATXN2; (-) strand; PAM type: YTN; PAM sequence: CTA
ctaaaaatacaaaaattagc

SEQ ID NO: 64111 - DNA, 20 bp, Artificial Sequence
  Description of Artificial Sequence: Synthetic oligonucleotide
  Target: ATXN2; (-) strand; PAM type: YTN; PAM sequence: CTC
tactaaaaatacaaaaatta

SEQ ID NO: 64112 - DNA, 20 bp, Artificial Sequence
  Description of Artificial Sequence: Synthetic oligonucleotide
  Target: ATXN2; (-) strand; PAM type: YTN; PAM sequence: CTG
tctctactaaaaatacaaaa

SEQ ID NO: 64113 - DNA, 20 bp, Artificial Sequence
  Description of Artificial Sequence: Synthetic oligonucleotide
  Target: ATXN2; (-) strand; PAM type: YTN; PAM sequence: CTC
tgtctctactaaaaatacaa

SEQ ID NO: 64114 - DNA, 20 bp, Artificial Sequence
  Description of Artificial Sequence: Synthetic oligonucleotide
  Target: ATXN2; (-) strand; PAM type: YTN; PAM sequence: CTG
accaacgtggtgaaactctg

SEQ ID NO: 64115 - DNA, 20 bp, Artificial Sequence
  Description of Artificial Sequence: Synthetic oligonucleotide
  Target: ATXN2; (-) strand; PAM type: YTN; PAM sequence: TTC
gagaccagcctgaccaacgt

SEQ ID NO: 64116 - DNA, 20 bp, Artificial Sequence
  Description of Artificial Sequence: Synthetic oligonucleotide
  Target: ATXN2; (-) strand; PAM type: YTN; PAM sequence: TTA
ggagttcgagaccagcctga

SEQ ID NO: 64117 - DNA, 20 bp, Artificial Sequence
  Description of Artificial Sequence: Synthetic oligonucleotide
  Target: ATXN2; (-) strand; PAM type: YTN; PAM sequence: TTG
gaaggcaaaggtggggcgaa

SEQ ID NO: 64118 - DNA, 20 bp, Artificial Sequence
  Description of Artificial Sequence: Synthetic oligonucleotide
  Target: ATXN2; (-) strand; PAM type: YTN; PAM sequence: TTT
ggaaggcaaaggtggggcga

SEQ ID NO: 64119 - DNA, 20 bp, Artificial Sequence
  Description of Artificial Sequence: Synthetic oligonucleotide
  Target: ATXN2; (-) strand; PAM type: YTN; PAM sequence: CTT
tggaaggcaaaggtggggcg

SEQ ID NO: 64120 - DNA, 20 bp, Artificial Sequence
  Description of Artificial Sequence: Synthetic oligonucleotide
  Target: ATXN2; (-) strand; PAM type: YTN; PAM sequence: CTA
atcccagcactttggaaggc

SEQ ID NO: 64121 - DNA, 20 bp, Artificial Sequence
  Description of Artificial Sequence: Synthetic oligonucleotide
  Target: ATXN2; (-) strand; PAM type: YTN; PAM sequence: CTC
acgcctaatcccagcacttt

SEQ ID NO: 64122 - DNA, 20 bp, Artificial Sequence
  Description of Artificial Sequence: Synthetic oligonucleotide
  Target: ATXN2; (-) strand; PAM type: YTN; PAM sequence: CTA
gtggctcacgcctaatccca

SEQ ID NO: 64123 - DNA, 20 bp, Artificial Sequence
  Description of Artificial Sequence: Synthetic oligonucleotide
  Target: ATXN2; (-) strand; PAM type: YTN; PAM sequence: CTG
gcctagtggctcacgcctaa

SEQ ID NO: 64124 - DNA, 20 bp, Artificial Sequence
  Description of Artificial Sequence: Synthetic oligonucleotide
  Target: ATXN2; (-) strand; PAM type: YTN; PAM sequence: CTC
aaaaaacaatacaaaacaaa

SEQ ID NO: 64125 - DNA, 20 bp, Artificial Sequence
  Description of Artificial Sequence: Synthetic oligonucleotide
  Target: ATXN2; (-) strand; PAM type: YTN; PAM sequence: CTG
tctcaaaaaacaatacaaaa

SEQ ID NO: 64126 - DNA, 20 bp, Artificial Sequence
  Description of Artificial Sequence: Synthetic oligonucleotide
  Target: ATXN2; (-) strand; PAM type: YTN; PAM sequence: CTG
ggcaacagagtaagactgtc

SEQ ID NO: 64127 - DNA, 20 bp, Artificial Sequence
  Description of Artificial Sequence: Synthetic oligonucleotide
  Target: ATXN2; (-) strand; PAM type: YTN; PAM sequence: CTC
cagtctgggcaacagagtaa

SEQ ID NO: 64128 - DNA, 20 bp, Artificial Sequence
  Description of Artificial Sequence: Synthetic oligonucleotide
  Target: ATXN2; (-) strand; PAM type: YTN; PAM sequence: CTG
cactccagtctgggcaacag

SEQ ID NO: 64129 - DNA, 20 bp, Artificial Sequence
  Description of Artificial Sequence: Synthetic oligonucleotide
  Target: ATXN2; (-) strand; PAM type: YTN; PAM sequence: TTG
cagtgagccgagagtgcgcc

SEQ ID NO: 64130 - DNA, 20 bp, Artificial Sequence
  Description of Artificial Sequence: Synthetic oligonucleotide
  Target: ATXN2; (-) strand; PAM type: YTN; PAM sequence: TTG
aacccaggaggcccaggttg

SEQ ID NO: 64131 - DNA, 20 bp, Artificial Sequence
  Description of Artificial Sequence: Synthetic oligonucleotide
  Target: ATXN2; (-) strand; PAM type: YTN; PAM sequence: CTT
gaacccaggaggcccaggtt

SEQ ID NO: 64132 - DNA, 20 bp, Artificial Sequence
  Description of Artificial Sequence: Synthetic oligonucleotide
  Target: ATXN2; (-) strand; PAM type: YTN; PAM sequence: CTG
aggcaggagaatcacttgaa

SEQ ID NO: 64133 - DNA, 20 bp, Artificial Sequence
  Description of Artificial Sequence: Synthetic oligonucleotide
  Target: ATXN2; (-) strand; PAM type: YTN; PAM sequence: CTC
ggaggctgaggcaggagaat

SEQ ID NO: 64134 - DNA, 20 bp, Artificial Sequence
  Description of Artificial Sequence: Synthetic oligonucleotide
  Target: ATXN2; (-) strand; PAM type: YTN; PAM sequence: CTA
ctcggaggctgaggcaggag

SEQ ID NO: 64135 - DNA, 20 bp, Artificial Sequence
  Description of Artificial Sequence: Synthetic oligonucleotide
  Target: ATXN2; (-) strand; PAM type: YTN; PAM sequence: CTG
taatcccagctactcggagg

SEQ ID NO: 64136 - DNA, 20 bp, Artificial Sequence
  Description of Artificial Sequence: Synthetic oligonucleotide
  Target: ATXN2; (-) strand; PAM type: YTN; PAM sequence: TTA
gccggacatggtggcgggtg

SEQ ID NO: 64137 - DNA, 20 bp, Artificial Sequence
  Description of Artificial Sequence: Synthetic oligonucleotide
  Target: ATXN2; (-) strand; PAM type: YTN; PAM sequence: CTA
aaaatagaaaaattagccgg

SEQ ID NO: 64138 - DNA, 20 bp, Artificial Sequence
  Description of Artificial Sequence: Synthetic oligonucleotide
  Target: ATXN2; (-) strand; PAM type: YTN; PAM sequence: CTA
ctaaaaatagaaaaattagc

SEQ ID NO: 64139 - DNA, 20 bp, Artificial Sequence
  Description of Artificial Sequence: Synthetic oligonucleotide
  Target: ATXN2; (-) strand; PAM type: YTN; PAM sequence: CTC
tactaaaaatagaaaaatta

SEQ ID NO: 64140 - DNA, 20 bp, Artificial Sequence
  Description of Artificial Sequence: Synthetic oligonucleotide
  Target: ATXN2; (-) strand; PAM type: YTN; PAM sequence: CTC
tctactaaaaatagaaaaat

SEQ ID NO: 64141 - DNA, 20 bp, Artificial Sequence
  Description of Artificial Sequence: Synthetic oligonucleotide
  Target: ATXN2; (-) strand; PAM type: YTN; PAM sequence: CTA
gccaatatggcaaaaccccc

SEQ ID NO: 64142 - DNA, 20 bp, Artificial Sequence
  Description of Artificial Sequence: Synthetic oligonucleotide
  Target: ATXN2; (-) strand; PAM type: YTN; PAM sequence: TTC
gagaccagcctagccaatat

SEQ ID NO: 64143 - DNA, 20 bp, Artificial Sequence
  Description of Artificial Sequence: Synthetic oligonucleotide
  Target: ATXN2; (-) strand; PAM type: YTN; PAM sequence: CTA
aggtcaggagttcgagacca

SEQ ID NO: 64144 - DNA, 20 bp, Artificial Sequence
  Description of Artificial Sequence: Synthetic oligonucleotide
  Target: ATXN2; (-) strand; PAM type: YTN; PAM sequence: CTG
aggtgggcggatcacctaag

SEQ ID NO: 64145 - DNA, 20 bp, Artificial Sequence
  Description of Artificial Sequence: Synthetic oligonucleotide
  Target: ATXN2; (-) strand; PAM type: YTN; PAM sequence: TTG
ggaggctgaggtgggcggat

SEQ ID NO: 64146 - DNA, 20 bp, Artificial Sequence
  Description of Artificial Sequence: Synthetic oligonucleotide
  Target: ATXN2; (-) strand; PAM type: YTN; PAM sequence: TTT
gggaggctgaggtgggcgga

SEQ ID NO: 64147 - DNA, 20 bp, Artificial Sequence
  Description of Artificial Sequence: Synthetic oligonucleotide
  Target: ATXN2; (-) strand; PAM type: YTN; PAM sequence: CTT
tgggaggctgaggtgggcgg

SEQ ID NO: 64148 - DNA, 20 bp, Artificial Sequence
  Description of Artificial Sequence: Synthetic oligonucleotide
  Target: ATXN2; (-) strand; PAM type: YTN; PAM sequence: TTC
acgtgtgtaatcccagcact

SEQ ID NO: 64149 - DNA, 20 bp, Artificial Sequence
  Description of Artificial Sequence: Synthetic oligonucleotide
  Target: ATXN2; (-) strand; PAM type: YTN; PAM sequence: TTA
taagccaggcgcagtggttc

SEQ ID NO: 64150 - DNA, 20 bp, Artificial Sequence
  Description of Artificial Sequence: Synthetic oligonucleotide
  Target: ATXN2; (-) strand; PAM type: YTN; PAM sequence: CTG
tagttataagccaggcgcag

SEQ ID NO: 64151 - DNA, 20 bp, Artificial Sequence
  Description of Artificial Sequence: Synthetic oligonucleotide
  Target: ATXN2; (-) strand; PAM type: YTN; PAM sequence: TTA
aaaaactgtagttataagcc

SEQ ID NO: 64152 - DNA, 20 bp, Artificial Sequence
  Description of Artificial Sequence: Synthetic oligonucleotide
  Target: ATXN2; (-) strand; PAM type: YTN; PAM sequence: CTT
aaaaaactgtagttataagc

SEQ ID NO: 64153 - DNA, 20 bp, Artificial Sequence
  Description of Artificial Sequence: Synthetic oligonucleotide
  Target: ATXN2; (-) strand; PAM type: YTN; PAM sequence: CTA
tgtcttaaaaaactgtagtt

SEQ ID NO: 64154 - DNA, 20 bp, Artificial Sequence
  Description of Artificial Sequence: Synthetic oligonucleotide
  Target: ATXN2; (-) strand; PAM type: YTN; PAM sequence: TTA
tactatgtcttaaaaaactg

SEQ ID NO: 64155 - DNA, 20 bp, Artificial Sequence
  Description of Artificial Sequence: Synthetic oligonucleotide
  Target: ATXN2; (-) strand; PAM type: YTN; PAM sequence: TTA
ttatactatgtcttaaaaaa

SEQ ID NO: 64156 - DNA, 20 bp, Artificial Sequence
  Description of Artificial Sequence: Synthetic oligonucleotide
  Target: ATXN2; (-) strand; PAM type: YTN; PAM sequence: TTT
attatactatgtcttaaaaa

SEQ ID NO: 64157 - DNA, 20 bp, Artificial Sequence
  Description of Artificial Sequence: Synthetic oligonucleotide
  Target: ATXN2; (-) strand; PAM type: YTN; PAM sequence: CTT
tattatactatgtcttaaaa

SEQ ID NO: 64158 - DNA, 20 bp, Artificial Sequence
  Description of Artificial Sequence: Synthetic oligonucleotide
  Target: ATXN2; (-) strand; PAM type: YTN; PAM sequence: TTA
tatctttattatactatgtc

SEQ ID NO: 64159 - DNA, 20 bp, Artificial Sequence
  Description of Artificial Sequence: Synthetic oligonucleotide
  Target: ATXN2; (-) strand; PAM type: YTN; PAM sequence: TTT
atatctttattatactatgt

SEQ ID NO: 64160 - DNA, 20 bp, Artificial Sequence
  Description of Artificial Sequence: Synthetic oligonucleotide
  Target: ATXN2; (-) strand; PAM type: YTN; PAM sequence: TTA
tttatatctttattatacta

SEQ ID NO: 64161 - DNA, 20 bp, Artificial Sequence
  Description of Artificial Sequence: Synthetic oligonucleotide
  Target: ATXN2; (-) strand; PAM type: YTN; PAM sequence: TTT
atttatatctttattatact

SEQ ID NO: 64162 - DNA, 20 bp, Artificial Sequence
  Description of Artificial Sequence: Synthetic oligonucleotide
  Target: ATXN2; (-) strand; PAM type: YTN; PAM sequence: TTT
tatttatatctttattatac

SEQ ID NO: 64163 - DNA, 20 bp, Artificial Sequence
  Description of Artificial Sequence: Synthetic oligonucleotide
  Target: ATXN2; (-) strand; PAM type: YTN; PAM sequence: TTT
ttatttatatctttattata

SEQ ID NO: 64164 - DNA, 20 bp, Artificial Sequence
  Description of Artificial Sequence: Synthetic oligonucleotide
  Target: ATXN2; (-) strand; PAM type: YTN; PAM sequence: TTG
tttttatttatatctttatt

SEQ ID NO: 64165 - DNA, 20 bp, Artificial Sequence
  Description of Artificial Sequence: Synthetic oligonucleotide
  Target: ATXN2; (-) strand; PAM type: YTN; PAM sequence: TTG
ttgtttttatttatatcttt

SEQ ID NO: 64166 - DNA, 20 bp, Artificial Sequence
  Description of Artificial Sequence: Synthetic oligonucleotide
  Target: ATXN2; (-) strand; PAM type: YTN; PAM sequence: TTT
gttgtttttatttatatctt

SEQ ID NO: 64167 - DNA, 20 bp, Artificial Sequence
  Description of Artificial Sequence: Synthetic oligonucleotide
  Target: ATXN2; (-) strand; PAM type: YTN; PAM sequence: TTT
tgttgtttttatttatatct

SEQ ID NO: 64168 - DNA, 20 bp, Artificial Sequence
  Description of Artificial Sequence: Synthetic oligonucleotide
  Target: ATXN2; (-) strand; PAM type: YTN; PAM sequence: CTT
ttgttgtttttatttatatc

SEQ ID NO: 64169 - DNA, 20 bp, Artificial Sequence
  Description of Artificial Sequence: Synthetic oligonucleotide
  Target: ATXN2; (-) strand; PAM type: YTN; PAM sequence: TTA
acttttgttgtttttattta

SEQ ID NO: 64170 - DNA, 20 bp, Artificial Sequence
  Description of Artificial Sequence: Synthetic oligonucleotide
  Target: ATXN2; (-) strand; PAM type: YTN; PAM sequence: TTT
aacttttgttgtttttattt

SEQ ID NO: 64171 - DNA, 20 bp, Artificial Sequence
  Description of Artificial Sequence: Synthetic oligonucleotide
  Target: ATXN2; (-) strand; PAM type: YTN; PAM sequence: TTT
taacttttgttgtttttatt

SEQ ID NO: 64172 - DNA, 20 bp, Artificial Sequence
  Description of Artificial Sequence: Synthetic oligonucleotide
  Target: ATXN2; (-) strand; PAM type: YTN; PAM sequence: TTT
ttaacttttgttgtttttat

SEQ ID NO: 64173 - DNA, 20 bp, Artificial Sequence
  Description of Artificial Sequence: Synthetic oligonucleotide
  Target: ATXN2; (-) strand; PAM type: YTN; PAM sequence: CTT
tttaacttttgttgttttta

SEQ ID NO: 64174 - DNA, 20 bp, Artificial Sequence
  Description of Artificial Sequence: Synthetic oligonucleotide
  Target: ATXN2; (-) strand; PAM type: YTN; PAM sequence: CTG
cccgctttttaacttttgtt

SEQ ID NO: 64175 - DNA, 20 bp, Artificial Sequence
  Description of Artificial Sequence: Synthetic oligonucleotide
  Target: ATXN2; (-) strand; PAM type: YTN; PAM sequence: TTC
atctgcccgctttttaactt

SEQ ID NO: 64176 - DNA, 20 bp, Artificial Sequence
  Description of Artificial Sequence: Synthetic oligonucleotide
  Target: ATXN2; (-) strand; PAM type: YTN; PAM sequence: CTT
catctgcccgctttttaact

SEQ ID NO: 64177 - DNA, 20 bp, Artificial Sequence
  Description of Artificial Sequence: Synthetic oligonucleotide
  Target: ATXN2; (-) strand; PAM type: YTN; PAM sequence: CTA
cacttcatctgcccgctttt

SEQ ID NO: 64178 - DNA, 20 bp, Artificial Sequence
  Description of Artificial Sequence: Synthetic oligonucleotide
  Target: ATXN2; (-) strand; PAM type: YTN; PAM sequence: CTC
tacacttcatctgcccgctt

SEQ ID NO: 64179 - DNA, 20 bp, Artificial Sequence
  Description of Artificial Sequence: Synthetic oligonucleotide
  Target: ATXN2; (-) strand; PAM type: YTN; PAM sequence: CTA
ataaaaactctacacttcat

SEQ ID NO: 64180 - DNA, 20 bp, Artificial Sequence
  Description of Artificial Sequence: Synthetic oligonucleotide
  Target: ATXN2; (-) strand; PAM type: YTN; PAM sequence: TTG
caaaaacaagcaagcaaaga

SEQ ID NO: 64181 - DNA, 20 bp, Artificial Sequence
  Description of Artificial Sequence: Synthetic oligonucleotide
  Target: ATXN2; (-) strand; PAM type: YTN; PAM sequence: TTG
attgcaaaaacaagcaagca

SEQ ID NO: 64182 - DNA, 20 bp, Artificial Sequence
  Description of Artificial Sequence: Synthetic oligonucleotide
  Target: ATXN2; (-) strand; PAM type: YTN; PAM sequence: TTT
gattgcaaaaacaagcaagc

SEQ ID NO: 64183 - DNA, 20 bp, Artificial Sequence
  Description of Artificial Sequence: Synthetic oligonucleotide
  Target: ATXN2; (-) strand; PAM type: YTN; PAM sequence: CTT
tgattgcaaaaacaagcaag

SEQ ID NO: 64184 - DNA, 20 bp, Artificial Sequence
  Description of Artificial Sequence: Synthetic oligonucleotide
  Target: ATXN2; (-) strand; PAM type: YTN; PAM sequence: TTG
aaactttgattgcaaaaaca

SEQ ID NO: 64185 - DNA, 20 bp, Artificial Sequence
  Description of Artificial Sequence: Synthetic oligonucleotide
  Target: ATXN2; (-) strand; PAM type: YTN; PAM sequence: CTT
gaaactttgattgcaaaaac

SEQ ID NO: 64186 - DNA, 20 bp, Artificial Sequence
  Description of Artificial Sequence: Synthetic oligonucleotide
  Target: ATXN2; (-) strand; PAM type: YTN; PAM sequence: TTA
aaccaatgacaacttgaaac

SEQ ID NO: 64187 - DNA, 20 bp, Artificial Sequence
  Description of Artificial Sequence: Synthetic oligonucleotide
  Target: ATXN2; (-) strand; PAM type: YTN; PAM sequence: TTT
aaaccaatgacaacttgaaa

SEQ ID NO: 64188 - DNA, 20 bp, Artificial Sequence
  Description of Artificial Sequence: Synthetic oligonucleotide
  Target: ATXN2; (-) strand; PAM type: YTN; PAM sequence: TTT
taaaccaatgacaacttgaa

SEQ ID NO: 64189 - DNA, 20 bp, Artificial Sequence
  Description of Artificial Sequence: Synthetic oligonucleotide
  Target: ATXN2; (-) strand; PAM type: YTN; PAM sequence: TTA
ttttaaaccaatgacaactt

SEQ ID NO: 64190 - DNA, 20 bp, Artificial Sequence
  Description of Artificial Sequence: Synthetic oligonucleotide
  Target: ATXN2; (-) strand; PAM type: YTN; PAM sequence: TTA
taacccattattttaaacca

SEQ ID NO: 64191 - DNA, 20 bp, Artificial Sequence
  Description of Artificial Sequence: Synthetic oligonucleotide
  Target: ATXN2; (-) strand; PAM type: YTN; PAM sequence: TTT
ataacccattattttaaacc

SEQ ID NO: 64192 - DNA, 20 bp, Artificial Sequence
  Description of Artificial Sequence: Synthetic oligonucleotide
  Target: ATXN2; (-) strand; PAM type: YTN; PAM sequence: TTT
tataacccattattttaaac

SEQ ID NO: 64193 - DNA, 20 bp, Artificial Sequence
  Description of Artificial Sequence: Synthetic oligonucleotide
  Target: ATXN2; (-) strand; PAM type: YTN; PAM sequence: TTG
caaataacattttataaccc

SEQ ID NO: 64194 - DNA, 20 bp, Artificial Sequence
  Description of Artificial Sequence: Synthetic oligonucleotide
  Target: ATXN2; (-) strand; PAM type: YTN; PAM sequence: CTC
aaaaaaaaaaaaaaaaaaga

SEQ ID NO: 64195 - DNA, 20 bp, Artificial Sequence
  Description of Artificial Sequence: Synthetic oligonucleotide
  Target: ATXN2; (-) strand; PAM type: YTN; PAM sequence: CTC
cgtctcaaaaaaaaaaaaaa

SEQ ID NO: 64196 - DNA, 20 bp, Artificial Sequence
  Description of Artificial Sequence: Synthetic oligonucleotide
  Target: ATXN2; (-) strand; PAM type: YTN; PAM sequence: CTG
ggcgacagagtgagactccg

SEQ ID NO: 64197 - DNA, 20 bp, Artificial Sequence
  Description of Artificial Sequence: Synthetic oligonucleotide
  Target: ATXN2; (-) strand; PAM type: YTN; PAM sequence: CTG
caccccagcctgggcgacag

SEQ ID NO: 64198 - DNA, 20 bp, Artificial Sequence
  Description of Artificial Sequence: Synthetic oligonucleotide
  Target: ATXN2; (-) strand; PAM type: YTN; PAM sequence: TTG
tgccactgcaccccagcctg

SEQ ID NO: 64199 - DNA, 20 bp, Artificial Sequence
  Description of Artificial Sequence: Synthetic oligonucleotide
  Target: ATXN2; (-) strand; PAM type: YTN; PAM sequence: TTG
cagtgagtcaatattgtgcc

SEQ ID NO: 64200 - DNA, 20 bp, Artificial Sequence
  Description of Artificial Sequence: Synthetic oligonucleotide
  Target: ATXN2; (-) strand; PAM type: YTN; PAM sequence: TTG
aacccaggaggcagaggttg

SEQ ID NO: 64201 - DNA, 20 bp, Artificial Sequence
  Description of Artificial Sequence: Synthetic oligonucleotide
  Target: ATXN2; (-) strand; PAM type: YTN; PAM sequence: CTT
gaacccaggaggcagaggtt

SEQ ID NO: 64202 - DNA, 20 bp, Artificial Sequence
  Description of Artificial Sequence: Synthetic oligonucleotide
  Target: ATXN2; (-) strand; PAM type: YTN; PAM sequence: TTG
cttgaacccaggaggcagag

SEQ ID NO: 64203 - DNA, 20 bp, Artificial Sequence
  Description of Artificial Sequence: Synthetic oligonucleotide
  Target: ATXN2; (-) strand; PAM type: YTN; PAM sequence: CTG
aggcaggagaattgcttgaa

SEQ ID NO: 64204 - DNA, 20 bp, Artificial Sequence
  Description of Artificial Sequence: Synthetic oligonucleotide
  Target: ATXN2; (-) strand; PAM type: YTN; PAM sequence: CTC
aggaggctgaggcaggagaa

SEQ ID NO: 64205 - DNA, 20 bp, Artificial Sequence
  Description of Artificial Sequence: Synthetic oligonucleotide
  Target: ATXN2; (-) strand; PAM type: YTN; PAM sequence: CTC
agatactcaggaggctgagg

SEQ ID NO: 64206 - DNA, 20 bp, Artificial Sequence
  Description of Artificial Sequence: Synthetic oligonucleotide
  Target: ATXN2; (-) strand; PAM type: YTN; PAM sequence: CTG
taatctcagatactcaggag

SEQ ID NO: 64207 - DNA, 20 bp, Artificial Sequence
  Description of Artificial Sequence: Synthetic oligonucleotide
  Target: ATXN2; (-) strand; PAM type: YTN; PAM sequence: TTA
gccaggcgtggaggcacgtg

SEQ ID NO: 64208 - DNA, 20 bp, Artificial Sequence
  Description of Artificial Sequence: Synthetic oligonucleotide
  Target: ATXN2; (-) strand; PAM type: YTN; PAM sequence: CTT
agccaggcgtggaggcacgt

SEQ ID NO: 64209 - DNA, 20 bp, Artificial Sequence
  Description of Artificial Sequence: Synthetic oligonucleotide
  Target: ATXN2; (-) strand; PAM type: YTN; PAM sequence: CTA
aaaatacaaaacttagccag

SEQ ID NO: 64210 - DNA, 20 bp, Artificial Sequence
  Description of Artificial Sequence: Synthetic oligonucleotide
  Target: ATXN2; (-) strand; PAM type: YTN; PAM sequence: CTA
ctaaaaatacaaaacttagc

SEQ ID NO: 64211 - DNA, 20 bp, Artificial Sequence
  Description of Artificial Sequence: Synthetic oligonucleotide
  Target: ATXN2; (-) strand; PAM type: YTN; PAM sequence: CTC
tactaaaaatacaaaactta

SEQ ID NO: 64212 - DNA, 20 bp, Artificial Sequence
  Description of Artificial Sequence: Synthetic oligonucleotide
  Target: ATXN2; (-) strand; PAM type: YTN; PAM sequence: CTA
acatggtgaaaccccatctc

SEQ ID NO: 64213 - DNA, 20 bp, Artificial Sequence
  Description of Artificial Sequence: Synthetic oligonucleotide
  Target: ATXN2; (-) strand; PAM type: YTN; PAM sequence: CTG
gctaacatggtgaaacccca

SEQ ID NO: 64214 - DNA, 20 bp, Artificial Sequence
  Description of Artificial Sequence: Synthetic oligonucleotide
  Target: ATXN2; (-) strand; PAM type: YTN; PAM sequence: TTG
agaccagcctggctaacatg

SEQ ID NO: 64215 - DNA, 20 bp, Artificial Sequence
  Description of Artificial Sequence: Synthetic oligonucleotide
  Target: ATXN2; (-) strand; PAM type: YTN; PAM sequence: TTG
ggaggccgaggtgggtggat

SEQ ID NO: 64216 - DNA, 20 bp, Artificial Sequence
  Description of Artificial Sequence: Synthetic oligonucleotide
  Target: ATXN2; (-) strand; PAM type: YTN; PAM sequence: TTT
gggaggccgaggtgggtgga

SEQ ID NO: 64217 - DNA, 20 bp, Artificial Sequence
  Description of Artificial Sequence: Synthetic oligonucleotide
  Target: ATXN2; (-) strand; PAM type: YTN; PAM sequence: CTT
tgggaggccgaggtgggtgg

SEQ ID NO: 64218 - DNA, 20 bp, Artificial Sequence
  Description of Artificial Sequence: Synthetic oligonucleotide
  Target: ATXN2; (-) strand; PAM type: YTN; PAM sequence: CTG
taatcccagcactttgggag

SEQ ID NO: 64219 - DNA, 20 bp, Artificial Sequence
  Description of Artificial Sequence: Synthetic oligonucleotide
  Target: ATXN2; (-) strand; PAM type: YTN; PAM sequence: TTC
acacctgtaatcccagcact

SEQ ID NO: 64220 - DNA, 20 bp, Artificial Sequence
  Description of Artificial Sequence: Synthetic oligonucleotide
  Target: ATXN2; (-) strand; PAM type: YTN; PAM sequence: CTG
ggtgcagtggttcacacctg

SEQ ID NO: 64221 - DNA, 20 bp, Artificial Sequence
  Description of Artificial Sequence: Synthetic oligonucleotide
  Target: ATXN2; (-) strand; PAM type: YTN; PAM sequence: TTA
agatcaccatgacagctggg

SEQ ID NO: 64222 - DNA, 20 bp, Artificial Sequence
  Description of Artificial Sequence: Synthetic oligonucleotide
  Target: ATXN2; (-) strand; PAM type: YTN; PAM sequence: TTT
aagatcaccatgacagctgg

SEQ ID NO: 64223 - DNA, 20 bp, Artificial Sequence
  Description of Artificial Sequence: Synthetic oligonucleotide
  Target: ATXN2; (-) strand; PAM type: YTN; PAM sequence: TTG
atttaagatcaccatgacag

SEQ ID NO: 64224 - DNA, 20 bp, Artificial Sequence
  Description of Artificial Sequence: Synthetic oligonucleotide
  Target: ATXN2; (-) strand; PAM type: YTN; PAM sequence: TTT
gatttaagatcaccatgaca

SEQ ID NO: 64225 - DNA, 20 bp, Artificial Sequence
  Description of Artificial Sequence: Synthetic oligonucleotide
  Target: ATXN2; (-) strand; PAM type: YTN; PAM sequence: TTT
tgatttaagatcaccatgac

SEQ ID NO: 64226 - DNA, 20 bp, Artificial Sequence
  Description of Artificial Sequence: Synthetic oligonucleotide
  Target: ATXN2; (-) strand; PAM type: YTN; PAM sequence: TTT
ttgatttaagatcaccatga

SEQ ID NO: 64227 - DNA, 20 bp, Artificial Sequence
  Description of Artificial Sequence: Synthetic oligonucleotide
  Target: ATXN2; (-) strand; PAM type: YTN; PAM sequence: TTG
taggtgtttttgatttaaga

SEQ ID NO: 64228 - DNA, 20 bp, Artificial Sequence
  Description of Artificial Sequence: Synthetic oligonucleotide
  Target: ATXN2; (-) strand; PAM type: YTN; PAM sequence: CTG
ttgtaggtgtttttgattta

SEQ ID NO: 64229 - DNA, 20 bp, Artificial Sequence
  Description of Artificial Sequence: Synthetic oligonucleotide
  Target: ATXN2; (-) strand; PAM type: YTN; PAM sequence: TTG
tgtatctgttgtaggtgttt

SEQ ID NO: 64230 - DNA, 20 bp, Artificial Sequence
  Description of Artificial Sequence: Synthetic oligonucleotide
  Target: ATXN2; (-) strand; PAM type: YTN; PAM sequence: TTT
gtgtatctgttgtaggtgtt

SEQ ID NO: 64231 - DNA, 20 bp, Artificial Sequence
  Description of Artificial Sequence: Synthetic oligonucleotide
  Target: ATXN2; (-) strand; PAM type: YTN; PAM sequence: TTT
tgtgtatctgttgtaggtgt

SEQ ID NO: 64232 - DNA, 20 bp, Artificial Sequence
  Description of Artificial Sequence: Synthetic oligonucleotide
  Target: ATXN2; (-) strand; PAM type: YTN; PAM sequence: TTT
ttgtgtatctgttgtaggtg

SEQ ID NO: 64233 - DNA, 20 bp, Artificial Sequence
  Description of Artificial Sequence: Synthetic oligonucleotide
  Target: ATXN2; (-) strand; PAM type: YTN; PAM sequence: TTT
tttgtgtatctgttgtaggt

SEQ ID NO: 64234 - DNA, 20 bp, Artificial Sequence
  Description of Artificial Sequence: Synthetic oligonucleotide
  Target: ATXN2; (-) strand; PAM type: YTN; PAM sequence: TTA
tattttttgtgtatctgttg

SEQ ID NO: 64235 - DNA, 20 bp, Artificial Sequence
  Description of Artificial Sequence: Synthetic oligonucleotide
  Target: ATXN2; (-) strand; PAM type: YTN; PAM sequence: TTT
atattttttgtgtatctgtt

SEQ ID NO: 64236 - DNA, 20 bp, Artificial Sequence
  Description of Artificial Sequence: Synthetic oligonucleotide
  Target: ATXN2; (-) strand; PAM type: YTN; PAM sequence: CTT
tatattttttgtgtatctgt

SEQ ID NO: 64237 - DNA, 20 bp, Artificial Sequence
  Description of Artificial Sequence: Synthetic oligonucleotide
  Target: ATXN2; (-) strand; PAM type: YTN; PAM sequence: CTG
ctttatattttttgtgtatc

SEQ ID NO: 64238 - DNA, 20 bp, Artificial Sequence
  Description of Artificial Sequence: Synthetic oligonucleotide
  Target: ATXN2; (-) strand; PAM type: YTN; PAM sequence: TTC
ctgctttatattttttgtgt

SEQ ID NO: 64239 - DNA, 20 bp, Artificial Sequence
  Description of Artificial Sequence: Synthetic oligonucleotide
  Target: ATXN2; (-) strand; PAM type: YTN; PAM sequence: TTT
cctgctttatattttttgtg

SEQ ID NO: 64240 - DNA, 20 bp, Artificial Sequence
  Description of Artificial Sequence: Synthetic oligonucleotide
  Target: ATXN2; (-) strand; PAM type: YTN; PAM sequence: TTA
atttcctgctttatattttt

SEQ ID NO: 64241 - DNA, 20 bp, Artificial Sequence
  Description of Artificial Sequence: Synthetic oligonucleotide
  Target: ATXN2; (-) strand; PAM type: YTN; PAM sequence: TTT
aatttcctgctttatatttt

SEQ ID NO: 64242 - DNA, 20 bp, Artificial Sequence
  Description of Artificial Sequence: Synthetic oligonucleotide
  Target: ATXN2; (-) strand; PAM type: YTN; PAM sequence: TTT
taatttcctgctttatattt

SEQ ID NO: 64243 - DNA, 20 bp, Artificial Sequence
  Description of Artificial Sequence: Synthetic oligonucleotide
  Target: ATXN2; (-) strand; PAM type: YTN; PAM sequence: CTG
gtggtatgttttaatttcct

SEQ ID NO: 64244 - DNA, 20 bp, Artificial Sequence
  Description of Artificial Sequence: Synthetic oligonucleotide
  Target: ATXN2; (-) strand; PAM type: YTN; PAM sequence: CTC
tggtggtatgttttaatttc

SEQ ID NO: 64245 - DNA, 20 bp, Artificial Sequence
  Description of Artificial Sequence: Synthetic oligonucleotide
  Target: ATXN2; (-) strand; PAM type: YTN; PAM sequence: TTC
tctggtggtatgttttaatt

SEQ ID NO: 64246 - DNA, 20 bp, Artificial Sequence
  Description of Artificial Sequence: Synthetic oligonucleotide
  Target: ATXN2; (-) strand; PAM type: YTN; PAM sequence: TTT
ctctggtggtatgttttaat

SEQ ID NO: 64247 - DNA, 20 bp, Artificial Sequence
  Description of Artificial Sequence: Synthetic oligonucleotide
  Target: ATXN2; (-) strand; PAM type: YTN; PAM sequence: TTT
tctctggtggtatgttttaa

SEQ ID NO: 64248 - DNA, 20 bp, Artificial Sequence
  Description of Artificial Sequence: Synthetic oligonucleotide
  Target: ATXN2; (-) strand; PAM type: YTN; PAM sequence: TTG
aaagtgattttctctggtgg

SEQ ID NO: 64249 - DNA, 20 bp, Artificial Sequence
  Description of Artificial Sequence: Synthetic oligonucleotide
  Target: ATXN2; (-) strand; PAM type: YTN; PAM sequence: TTT
gaaagtgattttctctggtg

SEQ ID NO: 64250 - DNA, 20 bp, Artificial Sequence
  Description of Artificial Sequence: Synthetic oligonucleotide
  Target: ATXN2; (-) strand; PAM type: YTN; PAM sequence: TTT
tgaaagtgattttctctggt

SEQ ID NO: 64251 - DNA, 20 bp, Artificial Sequence
  Description of Artificial Sequence: Synthetic oligonucleotide
  Target: ATXN2; (-) strand; PAM type: YTN; PAM sequence: TTG
ttttgaaagtgattttctct

SEQ ID NO: 64252 - DNA, 20 bp, Artificial Sequence
  Description of Artificial Sequence: Synthetic oligonucleotide
  Target: ATXN2; (-) strand; PAM type: YTN; PAM sequence: CTT
gttttgaaagtgattttctc

SEQ ID NO: 64253 - DNA, 20 bp, Artificial Sequence
  Description of Artificial Sequence: Synthetic oligonucleotide
  Target: ATXN2; (-) strand; PAM type: YTN; PAM sequence: TTC
cttgttttgaaagtgatttt

SEQ ID NO: 64254 - DNA, 20 bp, Artificial Sequence
  Description of Artificial Sequence: Synthetic oligonucleotide
  Target: ATXN2; (-) strand; PAM type: YTN; PAM sequence: CTT
ccttgttttgaaagtgattt

SEQ ID NO: 64255 - DNA, 20 bp, Artificial Sequence
  Description of Artificial Sequence: Synthetic oligonucleotide
  Target: ATXN2; (-) strand; PAM type: YTN; PAM sequence: CTC
ccttccttgttttgaaagtg

SEQ ID NO: 64256 - DNA, 20 bp, Artificial Sequence
  Description of Artificial Sequence: Synthetic oligonucleotide
  Target: ATXN2; (-) strand; PAM type: YTN; PAM sequence: CTC
cctcccttccttgttttgaa

SEQ ID NO: 64257 - DNA, 20 bp, Artificial Sequence
  Description of Artificial Sequence: Synthetic oligonucleotide
  Target: ATXN2; (-) strand; PAM type: YTN; PAM sequence: TTC
cctccctcccttccttgttt

SEQ ID NO: 64258 - DNA, 20 bp, Artificial Sequence
  Description of Artificial Sequence: Synthetic oligonucleotide
  Target: ATXN2; (-) strand; PAM type: YTN; PAM sequence: TTT
ccctccctcccttccttgtt

SEQ ID NO: 64259 - DNA, 20 bp, Artificial Sequence
  Description of Artificial Sequence: Synthetic oligonucleotide
  Target: ATXN2; (-) strand; PAM type: YTN; PAM sequence: TTT
tccctccctcccttccttgt

SEQ ID NO: 64260 - DNA, 20 bp, Artificial Sequence
  Description of Artificial Sequence: Synthetic oligonucleotide
  Target: ATXN2; (-) strand; PAM type: YTN; PAM sequence: TTT
ttccctccctcccttccttg

SEQ ID NO: 64261 - DNA, 20 bp, Artificial Sequence
  Description of Artificial Sequence: Synthetic oligonucleotide
  Target: ATXN2; (-) strand; PAM type: YTN; PAM sequence: TTT
tttccctccctcccttcctt

SEQ ID NO: 64262 - DNA, 20 bp, Artificial Sequence
  Description of Artificial Sequence: Synthetic oligonucleotide
  Target: ATXN2; (-) strand; PAM type: YTN; PAM sequence: CTT
ttttccctccctcccttcct

SEQ ID NO: 64263 - DNA, 20 bp, Artificial Sequence
  Description of Artificial Sequence: Synthetic oligonucleotide
  Target: ATXN2; (-) strand; PAM type: YTN; PAM sequence: CTC
cttttttccctccctccctt

SEQ ID NO: 64264 - DNA, 20 bp, Artificial Sequence
  Description of Artificial Sequence: Synthetic oligonucleotide
  Target: ATXN2; (-) strand; PAM type: YTN; PAM sequence: TTC
gctccttttttccctccctc

SEQ ID NO: 64265 - DNA, 20 bp, Artificial Sequence
  Description of Artificial Sequence: Synthetic oligonucleotide
  Target: ATXN2; (-) strand; PAM type: YTN; PAM sequence: CTT
cgctccttttttccctccct

SEQ ID NO: 64266 - DNA, 20 bp, Artificial Sequence
  Description of Artificial Sequence: Synthetic oligonucleotide
  Target: ATXN2; (-) strand; PAM type: YTN; PAM sequence: CTC
ttcgctccttttttccctcc

SEQ ID NO: 64267 - DNA, 20 bp, Artificial Sequence
  Description of Artificial Sequence: Synthetic oligonucleotide
  Target: ATXN2; (-) strand; PAM type: YTN; PAM sequence: TTC
ctcttcgctccttttttccc

SEQ ID NO: 64268 - DNA, 20 bp, Artificial Sequence
  Description of Artificial Sequence: Synthetic oligonucleotide
  Target: ATXN2; (-) strand; PAM type: YTN; PAM sequence: CTT
cctcttcgctccttttttcc

SEQ ID NO: 64269 - DNA, 20 bp, Artificial Sequence
  Description of Artificial Sequence: Synthetic oligonucleotide
  Target: ATXN2; (-) strand; PAM type: YTN; PAM sequence: TTA
cttcctcttcgctccttttt

SEQ ID NO: 64270 - DNA, 20 bp, Artificial Sequence
  Description of Artificial Sequence: Synthetic oligonucleotide
  Target: ATXN2; (-) strand; PAM type: YTN; PAM sequence: TTT
acttcctcttcgctcctttt

SEQ ID NO: 64271 - DNA, 20 bp, Artificial Sequence
  Description of Artificial Sequence: Synthetic oligonucleotide
  Target: ATXN2; (-) strand; PAM type: YTN; PAM sequence: TTT
tacttcctcttcgctccttt

SEQ ID NO: 64272 - DNA, 20 bp, Artificial Sequence
  Description of Artificial Sequence: Synthetic oligonucleotide
  Target: ATXN2; (-) strand; PAM type: YTN; PAM sequence: TTT
ttacttcctcttcgctcctt

SEQ ID NO: 64273 - DNA, 20 bp, Artificial Sequence
  Description of Artificial Sequence: Synthetic oligonucleotide
  Target: ATXN2; (-) strand; PAM type: YTN; PAM sequence: TTT
tttacttcctcttcgctcct

SEQ ID NO: 64274 - DNA, 20 bp, Artificial Sequence
  Description of Artificial Sequence: Synthetic oligonucleotide
  Target: ATXN2; (-) strand; PAM type: YTN; PAM sequence: CTT
ttttacttcctcttcgctcc

SEQ ID NO: 64275 - DNA, 20 bp, Artificial Sequence
  Description of Artificial Sequence: Synthetic oligonucleotide
  Target: ATXN2; (-) strand; PAM type: YTN; PAM sequence: TTC
ttttttacttcctcttcgct

SEQ ID NO: 64276 - DNA, 20 bp, Artificial Sequence
  Description of Artificial Sequence: Synthetic oligonucleotide
  Target: ATXN2; (-) strand; PAM type: YTN; PAM sequence: CTT
cttttttacttcctcttcgc

SEQ ID NO: 64277 - DNA, 20 bp, Artificial Sequence
  Description of Artificial Sequence: Synthetic oligonucleotide
  Target: ATXN2; (-) strand; PAM type: YTN; PAM sequence: TTC
ccccttcttttttacttcct

SEQ ID NO: 64278 - DNA, 20 bp, Artificial Sequence
  Description of Artificial Sequence: Synthetic oligonucleotide
  Target: ATXN2; (-) strand; PAM type: YTN; PAM sequence: CTT
cccccttcttttttacttcc

SEQ ID NO: 64279 - DNA, 20 bp, Artificial Sequence
  Description of Artificial Sequence: Synthetic oligonucleotide
  Target: ATXN2; (-) strand; PAM type: YTN; PAM sequence: CTC
ccttcccccttcttttttac

SEQ ID NO: 64280 - DNA, 20 bp, Artificial Sequence
  Description of Artificial Sequence: Synthetic oligonucleotide
  Target: ATXN2; (-) strand; PAM type: YTN; PAM sequence: CTC
cctcccttcccccttctttt

SEQ ID NO: 64281 - DNA, 20 bp, Artificial Sequence
  Description of Artificial Sequence: Synthetic oligonucleotide
  Target: ATXN2; (-) strand; PAM type: YTN; PAM sequence: CTA
ctccctcccttcccccttct

SEQ ID NO: 64282 - DNA, 20 bp, Artificial Sequence
  Description of Artificial Sequence: Synthetic oligonucleotide
  Target: ATXN2; (-) strand; PAM type: YTN; PAM sequence: TTG
tagtcctactccctcccttc

SEQ ID NO: 64283 - DNA, 20 bp, Artificial Sequence
  Description of Artificial Sequence: Synthetic oligonucleotide
  Target: ATXN2; (-) strand; PAM type: YTN; PAM sequence: TTT
gtagtcctactccctccctt

SEQ ID NO: 64284 - DNA, 20 bp, Artificial Sequence
  Description of Artificial Sequence: Synthetic oligonucleotide
  Target: ATXN2; (-) strand; PAM type: YTN; PAM sequence: TTT
tgtagtcctactccctccct

SEQ ID NO: 64285 - DNA, 20 bp, Artificial Sequence
  Description of Artificial Sequence: Synthetic oligonucleotide
  Target: ATXN2; (-) strand; PAM type: YTN; PAM sequence: TTG
ttttgtagtcctactccctc

SEQ ID NO: 64286 - DNA, 20 bp, Artificial Sequence
  Description of Artificial Sequence: Synthetic oligonucleotide
  Target: ATXN2; (-) strand; PAM type: YTN; PAM sequence: CTG
gttgttttgtagtcctactc

SEQ ID NO: 64287 - DNA, 20 bp, Artificial Sequence
  Description of Artificial Sequence: Synthetic oligonucleotide
  Target: ATXN2; (-) strand; PAM type: YTN; PAM sequence: TTA
tctggttgttttgtagtcct

SEQ ID NO: 64288 - DNA, 20 bp, Artificial Sequence
  Description of Artificial Sequence: Synthetic oligonucleotide
  Target: ATXN2; (-) strand; PAM type: YTN; PAM sequence: TTA
ttatctggttgttttgtagt

SEQ ID NO: 64289 - DNA, 20 bp, Artificial Sequence
  Description of Artificial Sequence: Synthetic oligonucleotide
  Target: ATXN2; (-) strand; PAM type: YTN; PAM sequence: CTT
attatctggttgttttgtag

SEQ ID NO: 64290 - DNA, 20 bp, Artificial Sequence
  Description of Artificial Sequence: Synthetic oligonucleotide
  Target: ATXN2; (-) strand; PAM type: YTN; PAM sequence: TTA
cttattatctggttgttttg

SEQ ID NO: 64291 - DNA, 20 bp, Artificial Sequence
  Description of Artificial Sequence: Synthetic oligonucleotide
  Target: ATXN2; (-) strand; PAM type: YTN; PAM sequence: TTG
ttacttattatctggttgtt

SEQ ID NO: 64292 - DNA, 20 bp, Artificial Sequence
  Description of Artificial Sequence: Synthetic oligonucleotide
  Target: ATXN2; (-) strand; PAM type: YTN; PAM sequence: TTT
gttacttattatctggttgt

SEQ ID NO: 64293 - DNA, 20 bp, Artificial Sequence
  Description of Artificial Sequence: Synthetic oligonucleotide
  Target: ATXN2; (-) strand; PAM type: YTN; PAM sequence: TTT
tgttacttattatctggttg

SEQ ID NO: 64294 - DNA, 20 bp, Artificial Sequence
  Description of Artificial Sequence: Synthetic oligonucleotide
  Target: ATXN2; (-) strand; PAM type: YTN; PAM sequence: CTA
ccattttgttacttattatc

SEQ ID NO: 64295 - DNA, 20 bp, Artificial Sequence
  Description of Artificial Sequence: Synthetic oligonucleotide
  Target: ATXN2; (-) strand; PAM type: YTN; PAM sequence: CTA
ctaccattttgttacttatt

SEQ ID NO: 64296 - DNA, 20 bp, Artificial Sequence
  Description of Artificial Sequence: Synthetic oligonucleotide
  Target: ATXN2; (-) strand; PAM type: YTN; PAM sequence: TTA
actactaccattttgttact

SEQ ID NO: 64297 - DNA, 20 bp, Artificial Sequence
  Description of Artificial Sequence: Synthetic oligonucleotide
  Target: ATXN2; (-) strand; PAM type: YTN; PAM sequence: CTT
aactactaccattttgttac

SEQ ID NO: 64298 - DNA, 20 bp, Artificial Sequence
  Description of Artificial Sequence: Synthetic oligonucleotide
  Target: ATXN2; (-) strand; PAM type: YTN; PAM sequence: TTA
gtgaggacttaactactacc

SEQ ID NO: 64299 - DNA, 20 bp, Artificial Sequence
  Description of Artificial Sequence: Synthetic oligonucleotide
  Target: ATXN2; (-) strand; PAM type: YTN; PAM sequence: CTG
attagtgaggacttaactac

SEQ ID NO: 64300 - DNA, 20 bp, Artificial Sequence
  Description of Artificial Sequence: Synthetic oligonucleotide
  Target: ATXN2; (-) strand; PAM type: YTN; PAM sequence: TTA
ctgattagtgaggacttaac

SEQ ID NO: 64301 - DNA, 20 bp, Artificial Sequence
  Description of Artificial Sequence: Synthetic oligonucleotide
  Target: ATXN2; (-) strand; PAM type: YTN; PAM sequence: TTG
ttactgattagtgaggactt

SEQ ID NO: 64302 - DNA, 20 bp, Artificial Sequence
  Description of Artificial Sequence: Synthetic oligonucleotide
  Target: ATXN2; (-) strand; PAM type: YTN; PAM sequence: TTC
agtgttgttactgattagtg

SEQ ID NO: 64303 - DNA, 20 bp, Artificial Sequence
  Description of Artificial Sequence: Synthetic oligonucleotide
  Target: ATXN2; (-) strand; PAM type: YTN; PAM sequence: TTA
cattcagtgttgttactgat

SEQ ID NO: 64304 - DNA, 20 bp, Artificial Sequence
  Description of Artificial Sequence: Synthetic oligonucleotide
  Target: ATXN2; (-) strand; PAM type: YTN; PAM sequence: TTT
acattcagtgttgttactga

SEQ ID NO: 64305 - DNA, 20 bp, Artificial Sequence
  Description of Artificial Sequence: Synthetic oligonucleotide
  Target: ATXN2; (-) strand; PAM type: YTN; PAM sequence: TTA
gtcgatttacattcagtgtt

SEQ ID NO: 64306 - DNA, 20 bp, Artificial Sequence
  Description of Artificial Sequence: Synthetic oligonucleotide
  Target: ATXN2; (-) strand; PAM type: YTN; PAM sequence: TTT
agtcgatttacattcagtgt

SEQ ID NO: 64307 - DNA, 20 bp, Artificial Sequence
  Description of Artificial Sequence: Synthetic oligonucleotide
  Target: ATXN2; (-) strand; PAM type: YTN; PAM sequence: TTG
gagagtttagtcgatttaca

SEQ ID NO: 64308 - DNA, 20 bp, Artificial Sequence
  Description of Artificial Sequence: Synthetic oligonucleotide
  Target: ATXN2; (-) strand; PAM type: YTN; PAM sequence: TTG
attggagagtttagtcgatt

SEQ ID NO: 64309 - DNA, 20 bp, Artificial Sequence
  Description of Artificial Sequence: Synthetic oligonucleotide
  Target: ATXN2; (-) strand; PAM type: YTN; PAM sequence: TTT
gattggagagtttagtcgat

SEQ ID NO: 64310 - DNA, 20 bp, Artificial Sequence
  Description of Artificial Sequence: Synthetic oligonucleotide
  Target: ATXN2; (-) strand; PAM type: YTN; PAM sequence: TTT
tgattggagagtttagtcga

SEQ ID NO: 64311 - DNA, 20 bp, Artificial Sequence
  Description of Artificial Sequence: Synthetic oligonucleotide
  Target: ATXN2; (-) strand; PAM type: YTN; PAM sequence: CTT
ttgattggagagtttagtcg

SEQ ID NO: 64312 - DNA, 20 bp, Artificial Sequence
  Description of Artificial Sequence: Synthetic oligonucleotide
  Target: ATXN2; (-) strand; PAM type: YTN; PAM sequence: CTG
tatcttttgattggagagtt

SEQ ID NO: 64313 - DNA, 20 bp, Artificial Sequence
  Description of Artificial Sequence: Synthetic oligonucleotide
  Target: ATXN2; (-) strand; PAM type: YTN; PAM sequence: CTC
tgtatcttttgattggagag

SEQ ID NO: 64314 - DNA, 20 bp, Artificial Sequence
  Description of Artificial Sequence: Synthetic oligonucleotide
  Target: ATXN2; (-) strand; PAM type: YTN; PAM sequence: TTA
gccactctgtatcttttgat

SEQ ID NO: 64315 - DNA, 20 bp, Artificial Sequence
  Description of Artificial Sequence: Synthetic oligonucleotide
  Target: ATXN2; (-) strand; PAM type: YTN; PAM sequence: TTT
agccactctgtatcttttga

SEQ ID NO: 64316 - DNA, 20 bp, Artificial Sequence
  Description of Artificial Sequence: Synthetic oligonucleotide
  Target: ATXN2; (-) strand; PAM type: YTN; PAM sequence: TTA
aatccatttagccactctgt

SEQ ID NO: 64317 - DNA, 20 bp, Artificial Sequence
  Description of Artificial Sequence: Synthetic oligonucleotide
  Target: ATXN2; (-) strand; PAM type: YTN; PAM sequence: TTT
aaatccatttagccactctg

SEQ ID NO: 64318 - DNA, 20 bp, Artificial Sequence
  Description of Artificial Sequence: Synthetic oligonucleotide
  Target: ATXN2; (-) strand; PAM type: YTN; PAM sequence: TTT
taaatccatttagccactct

SEQ ID NO: 64319 - DNA, 20 bp, Artificial Sequence
  Description of Artificial Sequence: Synthetic oligonucleotide
  Target: ATXN2; (-) strand; PAM type: YTN; PAM sequence: TTT
ttaaatccatttagccactc

SEQ ID NO: 64320 - DNA, 20 bp, Artificial Sequence
  Description of Artificial Sequence: Synthetic oligonucleotide
  Target: ATXN2; (-) strand; PAM type: YTN; PAM sequence: TTT
tttaaatccatttagccact

SEQ ID NO: 64321 - DNA, 20 bp, Artificial Sequence
  Description of Artificial Sequence: Synthetic oligonucleotide
  Target: ATXN2; (-) strand; PAM type: YTN; PAM sequence: TTT
ttttaaatccatttagccac

SEQ ID NO: 64322 - DNA, 20 bp, Artificial Sequence
  Description of Artificial Sequence: Synthetic oligonucleotide
  Target: ATXN2; (-) strand; PAM type: YTN; PAM sequence: TTT
tttttaaatccatttagcca

SEQ ID NO: 64323 - DNA, 20 bp, Artificial Sequence
  Description of Artificial Sequence: Synthetic oligonucleotide
  Target: ATXN2; (-) strand; PAM type: YTN; PAM sequence: CTT
ttttttaaatccatttagcc

SEQ ID NO: 64324 - DNA, 20 bp, Artificial Sequence
  Description of Artificial Sequence: Synthetic oligonucleotide
  Target: ATXN2; (-) strand; PAM type: YTN; PAM sequence: TTA
caggcgtgagccaccgcacc

SEQ ID NO: 64325 - DNA, 20 bp, Artificial Sequence
  Description of Artificial Sequence: Synthetic oligonucleotide
  Target: ATXN2; (-) strand; PAM type: YTN; PAM sequence: CTG
ggattacaggcgtgagccac

SEQ ID NO: 64326 - DNA, 20 bp, Artificial Sequence
  Description of Artificial Sequence: Synthetic oligonucleotide
  Target: ATXN2; (-) strand; PAM type: YTN; PAM sequence: CTC
ccaaagtcctgggattacag

SEQ ID NO: 64327 - DNA, 20 bp, Artificial Sequence
  Description of Artificial Sequence: Synthetic oligonucleotide
  Target: ATXN2; (-) strand; PAM type: YTN; PAM sequence: TTG
gcctcccaaagtcctgggat

SEQ ID NO: 64328 - DNA, 20 bp, Artificial Sequence
  Description of Artificial Sequence: Synthetic oligonucleotide
  Target: ATXN2; (-) strand; PAM type: YTN; PAM sequence: CTT
ggcctcccaaagtcctggga

SEQ ID NO: 64329 - DNA, 20 bp, Artificial Sequence
  Description of Artificial Sequence: Synthetic oligonucleotide
  Target: ATXN2; (-) strand; PAM type: YTN; PAM sequence: CTG
ccttggcctcccaaagtcct

SEQ ID NO: 64330 - DNA, 20 bp, Artificial Sequence
  Description of Artificial Sequence: Synthetic oligonucleotide
  Target: ATXN2; (-) strand; PAM type: YTN; PAM sequence: TTG
cctgccttggcctcccaaag

SEQ ID NO: 64331 - DNA, 20 bp, Artificial Sequence
  Description of Artificial Sequence: Synthetic oligonucleotide
  Target: ATXN2; (-) strand; PAM type: YTN; PAM sequence: TTT
gcctgccttggcctcccaaa

SEQ ID NO: 64332 - DNA, 20 bp, Artificial Sequence
  Description of Artificial Sequence: Synthetic oligonucleotide
  Target: ATXN2; (-) strand; PAM type: YTN; PAM sequence: CTC
aggtgatttgcctgccttgg

SEQ ID NO: 64333 - DNA, 20 bp, Artificial Sequence
  Description of Artificial Sequence: Synthetic oligonucleotide
  Target: ATXN2; (-) strand; PAM type: YTN; PAM sequence: CTA
acctcaggtgatttgcctgc

SEQ ID NO: 64334 - DNA, 20 bp, Artificial Sequence
  Description of Artificial Sequence: Synthetic oligonucleotide
  Target: ATXN2; (-) strand; PAM type: YTN; PAM sequence: CTC
ctaacctcaggtgatttgcc

SEQ ID NO: 64335 - DNA, 20 bp, Artificial Sequence
  Description of Artificial Sequence: Synthetic oligonucleotide
  Target: ATXN2; (-) strand; PAM type: YTN; PAM sequence: TTG
aactcctaacctcaggtgat

SEQ ID NO: 64336 - DNA, 20 bp, Artificial Sequence
  Description of Artificial Sequence: Synthetic oligonucleotide
  Target: ATXN2; (-) strand; PAM type: YTN; PAM sequence: CTT
gaactcctaacctcaggtga

SEQ ID NO: 64337 - DNA, 20 bp, Artificial Sequence
  Description of Artificial Sequence: Synthetic oligonucleotide
  Target: ATXN2; (-) strand; PAM type: YTN; PAM sequence: TTC
ttgaactcctaacctcaggt

SEQ ID NO: 64338 - DNA, 20 bp, Artificial Sequence
  Description of Artificial Sequence: Synthetic oligonucleotide
  Target: ATXN2; (-) strand; PAM type: YTN; PAM sequence: CTG
ttcttgaactcctaacctca

SEQ ID NO: 64339 - DNA, 20 bp, Artificial Sequence
  Description of Artificial Sequence: Synthetic oligonucleotide
  Target: ATXN2; (-) strand; PAM type: YTN; PAM sequence: TTC
gtcaggctgttcttgaactc

SEQ ID NO: 64340 - DNA, 20 bp, Artificial Sequence
  Description of Artificial Sequence: Synthetic oligonucleotide
  Target: ATXN2; (-) strand; PAM type: YTN; PAM sequence: TTC
agtatgttcgtcaggctgtt

SEQ ID NO: 64341 - DNA, 20 bp, Artificial Sequence
  Description of Artificial Sequence: Synthetic oligonucleotide
  Target: ATXN2; (-) strand; PAM type: YTN; PAM sequence: TTT
cagtatgttcgtcaggctgt

SEQ ID NO: 64342 - DNA, 20 bp, Artificial Sequence
  Description of Artificial Sequence: Synthetic oligonucleotide
  Target: ATXN2; (-) strand; PAM type: YTN; PAM sequence: TTC
agtagagatggggtttcagt

SEQ ID NO: 64343 - DNA, 20 bp, Artificial Sequence
  Description of Artificial Sequence: Synthetic oligonucleotide
  Target: ATXN2; (-) strand; PAM type: YTN; PAM sequence: TTT
cagtagagatggggtttcag

SEQ ID NO: 64344 - DNA, 20 bp, Artificial Sequence
  Description of Artificial Sequence: Synthetic oligonucleotide
  Target: ATXN2; (-) strand; PAM type: YTN; PAM sequence: TTT
tcagtagagatggggtttca

SEQ ID NO: 64345 - DNA, 20 bp, Artificial Sequence
  Description of Artificial Sequence: Synthetic oligonucleotide
  Target: ATXN2; (-) strand; PAM type: YTN; PAM sequence: TTG
tattttcagtagagatgggg

SEQ ID NO: 64346 - DNA, 20 bp, Artificial Sequence
  Description of Artificial Sequence: Synthetic oligonucleotide
  Target: ATXN2; (-) strand; PAM type: YTN; PAM sequence: TTT
gtattttcagtagagatggg

SEQ ID NO: 64347 - DNA, 20 bp, Artificial Sequence
  Description of Artificial Sequence: Synthetic oligonucleotide
  Target: ATXN2; (-) strand; PAM type: YTN; PAM sequence: TTT
tgtattttcagtagagatgg

SEQ ID NO: 64348 - DNA, 20 bp, Artificial Sequence
  Description of Artificial Sequence: Synthetic oligonucleotide
  Target: ATXN2; (-) strand; PAM type: YTN; PAM sequence: TTT
ttgtattttcagtagagatg

SEQ ID NO: 64349 - DNA, 20 bp, Artificial Sequence
  Description of Artificial Sequence: Synthetic oligonucleotide
  Target: ATXN2; (-) strand; PAM type: YTN; PAM sequence: TTT
tttgtattttcagtagagat

SEQ ID NO: 64350 - DNA, 20 bp, Artificial Sequence
  Description of Artificial Sequence: Synthetic oligonucleotide
  Target: ATXN2; (-) strand; PAM type: YTN; PAM sequence: CTA
aattttttgtattttcagta

SEQ ID NO: 64351 - DNA, 20 bp, Artificial Sequence
  Description of Artificial Sequence: Synthetic oligonucleotide
  Target: ATXN2; (-) strand; PAM type: YTN; PAM sequence: CTG
ccaccaagcccagctaaatt

SEQ ID NO: 64352 - DNA, 20 bp, Artificial Sequence
  Description of Artificial Sequence: Synthetic oligonucleotide
  Target: ATXN2; (-) strand; PAM type: YTN; PAM sequence: TTA
caggcgcctgccaccaagcc

SEQ ID NO: 64353 - DNA, 20 bp, Artificial Sequence
  Description of Artificial Sequence: Synthetic oligonucleotide
  Target: ATXN2; (-) strand; PAM type: YTN; PAM sequence: CTG
ggattacaggcgcctgccac

SEQ ID NO: 64354 - DNA, 20 bp, Artificial Sequence
  Description of Artificial Sequence: Synthetic oligonucleotide
  Target: ATXN2; (-) strand; PAM type: YTN; PAM sequence: CTC
ccaagtagctgggattacag

SEQ ID NO: 64355 - DNA, 20 bp, Artificial Sequence
  Description of Artificial Sequence: Synthetic oligonucleotide
  Target: ATXN2; (-) strand; PAM type: YTN; PAM sequence: CTC
agcctcccaagtagctggga

SEQ ID NO: 64356 - DNA, 20 bp, Artificial Sequence
  Description of Artificial Sequence: Synthetic oligonucleotide
  Target: ATXN2; (-) strand; PAM type: YTN; PAM sequence: CTG
cctcagcctcccaagtagct

SEQ ID NO: 64357 - DNA, 20 bp, Artificial Sequence
  Description of Artificial Sequence: Synthetic oligonucleotide
  Target: ATXN2; (-) strand; PAM type: YTN; PAM sequence: CTC
ctgcctcagcctcccaagta

SEQ ID NO: 64358 - DNA, 20 bp, Artificial Sequence
  Description of Artificial Sequence: Synthetic oligonucleotide
  Target: ATXN2; (-) strand; PAM type: YTN; PAM sequence: TTC
tcctgcctcagcctcccaag

SEQ ID NO: 64359 - DNA, 20 bp, Artificial Sequence
  Description of Artificial Sequence: Synthetic oligonucleotide
  Target: ATXN2; (-) strand; PAM type: YTN; PAM sequence: TTC
aagcgattctcctgcctcag

SEQ ID NO: 64360 - DNA, 20 bp, Artificial Sequence
  Description of Artificial Sequence: Synthetic oligonucleotide
  Target: ATXN2; (-) strand; PAM type: YTN; PAM sequence: CTG
agttcaagcgattctcctgc

SEQ ID NO: 64361 - DNA, 20 bp, Artificial Sequence
  Description of Artificial Sequence: Synthetic oligonucleotide
  Target: ATXN2; (-) strand; PAM type: YTN; PAM sequence: CTC
ctgagttcaagcgattctcc

SEQ ID NO: 64362 - DNA, 20 bp, Artificial Sequence
  Description of Artificial Sequence: Synthetic oligonucleotide
  Target: ATXN2; (-) strand; PAM type: YTN; PAM sequence: CTC
cgcctcctgagttcaagcga

SEQ ID NO: 64363 - DNA, 20 bp, Artificial Sequence
  Description of Artificial Sequence: Synthetic oligonucleotide
  Target: ATXN2; (-) strand; PAM type: YTN; PAM sequence: CTG
caacctccgcctcctgagtt

SEQ ID NO: 64364 - DNA, 20 bp, Artificial Sequence
  Description of Artificial Sequence: Synthetic oligonucleotide
  Target: ATXN2; (-) strand; PAM type: YTN; PAM sequence: CTC
actgcaacctccgcctcctg

SEQ ID NO: 64365 - DNA, 20 bp, Artificial Sequence
  Description of Artificial Sequence: Synthetic oligonucleotide
  Target: ATXN2; (-) strand; PAM type: YTN; PAM sequence: CTC
agctcactgcaacctccgcc

SEQ ID NO: 64366 - DNA, 20 bp, Artificial Sequence
  Description of Artificial Sequence: Synthetic oligonucleotide
  Target: ATXN2; (-) strand; PAM type: YTN; PAM sequence: CTA
tctcagctcactgcaacctc

SEQ ID NO: 64367 - DNA, 20 bp, Artificial Sequence
  Description of Artificial Sequence: Synthetic oligonucleotide
  Target: ATXN2; (-) strand; PAM type: YTN; PAM sequence: CTG
gagggcaatggcgctatctc

SEQ ID NO: 64368 - DNA, 20 bp, Artificial Sequence
  Description of Artificial Sequence: Synthetic oligonucleotide
  Target: ATXN2; (-) strand; PAM type: YTN; PAM sequence: TTG
cccaggctggagggcaatgg

SEQ ID NO: 64369 - DNA, 20 bp, Artificial Sequence
  Description of Artificial Sequence: Synthetic oligonucleotide
  Target: ATXN2; (-) strand; PAM type: YTN; PAM sequence: TTG
ttgcccaggctggagggcaa

SEQ ID NO: 64370 - DNA, 20 bp, Artificial Sequence
  Description of Artificial Sequence: Synthetic oligonucleotide
  Target: ATXN2; (-) strand; PAM type: YTN; PAM sequence: CTA
ttgttgcccaggctggaggg

SEQ ID NO: 64371 - DNA, 20 bp, Artificial Sequence
  Description of Artificial Sequence: Synthetic oligonucleotide
  Target: ATXN2; (-) strand; PAM type: YTN; PAM sequence: TTG
ctattgttgcccaggctgga

SEQ ID NO: 64372 - DNA, 20 bp, Artificial Sequence
  Description of Artificial Sequence: Synthetic oligonucleotide
  Target: ATXN2; (-) strand; PAM type: YTN; PAM sequence: TTT
gctattgttgcccaggctgg

SEQ ID NO: 64373 - DNA, 20 bp, Artificial Sequence
  Description of Artificial Sequence: Synthetic oligonucleotide
  Target: ATXN2; (-) strand; PAM type: YTN; PAM sequence: TTT
tgctattgttgcccaggctg

SEQ ID NO: 64374 - DNA, 20 bp, Artificial Sequence
  Description of Artificial Sequence: Synthetic oligonucleotide
  Target: ATXN2; (-) strand; PAM type: YTN; PAM sequence: TTG
agacagagttttgctattgt

SEQ ID NO: 64375 - DNA, 20 bp, Artificial Sequence
  Description of Artificial Sequence: Synthetic oligonucleotide
  Target: ATXN2; (-) strand; PAM type: YTN; PAM sequence: TTT
gagacagagttttgctattg

SEQ ID NO: 64376 - DNA, 20 bp, Artificial Sequence
  Description of Artificial Sequence: Synthetic oligonucleotide
  Target: ATXN2; (-) strand; PAM type: YTN; PAM sequence: TTT
tgagacagagttttgctatt

SEQ ID NO: 64377 - DNA, 20 bp, Artificial Sequence
  Description of Artificial Sequence: Synthetic oligonucleotide
  Target: ATXN2; (-) strand; PAM type: YTN; PAM sequence: TTT
ttgagacagagttttgctat

SEQ ID NO: 64378 - DNA, 20 bp, Artificial Sequence
  Description of Artificial Sequence: Synthetic oligonucleotide
  Target: ATXN2; (-) strand; PAM type: YTN; PAM sequence: TTT
tttgagacagagttttgcta

SEQ ID NO: 64379 - DNA, 20 bp, Artificial Sequence
  Description of Artificial Sequence: Synthetic oligonucleotide
  Target: ATXN2; (-) strand; PAM type: YTN; PAM sequence: TTT
ttttgagacagagttttgct

SEQ ID NO: 64380 - DNA, 20 bp, Artificial Sequence
  Description of Artificial Sequence: Synthetic oligonucleotide
  Target: ATXN2; (-) strand; PAM type: YTN; PAM sequence: TTT
tttttgagacagagttttgc

SEQ ID NO: 64381 - DNA, 20 bp, Artificial Sequence
  Description of Artificial Sequence: Synthetic oligonucleotide
  Target: ATXN2; (-) strand; PAM type: YTN; PAM sequence: TTT
ttttttgagacagagttttg

SEQ ID NO: 64382 - DNA, 20 bp, Artificial Sequence
  Description of Artificial Sequence: Synthetic oligonucleotide
  Target: ATXN2; (-) strand; PAM type: YTN; PAM sequence: TTT
tttttttgagacagagtttt

SEQ ID NO: 64383 - DNA, 20 bp, Artificial Sequence
  Description of Artificial Sequence: Synthetic oligonucleotide
  Target: ATXN2; (-) strand; PAM type: YTN; PAM sequence: TTT
ttttttttgagacagagttt

SEQ ID NO: 64384 - DNA, 20 bp, Artificial Sequence
  Description of Artificial Sequence: Synthetic oligonucleotide
  Target: ATXN2; (-) strand; PAM type: YTN; PAM sequence: TTT
tttttttttgagacagagtt

SEQ ID NO: 64385 - DNA, 20 bp, Artificial Sequence
  Description of Artificial Sequence: Synthetic oligonucleotide
  Target: ATXN2; (-) strand; PAM type: YTN; PAM sequence: TTT
ttttttttttgagacagagt

SEQ ID NO: 64386 - DNA, 20 bp, Artificial Sequence
  Description of Artificial Sequence: Synthetic oligonucleotide
  Target: ATXN2; (-) strand; PAM type: YTN; PAM sequence: TTT
tttttttttttgagacagag

SEQ ID NO: 64387 - DNA, 20 bp, Artificial Sequence
  Description of Artificial Sequence: Synthetic oligonucleotide
  Target: ATXN2; (-) strand; PAM type: YTN; PAM sequence: TTT
ttttttttttttgagacaga

SEQ ID NO: 64388 - DNA, 20 bp, Artificial Sequence
  Description of Artificial Sequence: Synthetic oligonucleotide
  Target: ATXN2; (-) strand; PAM type: YTN; PAM sequence: TTT
tttttttttttttgagacag

SEQ ID NO: 64389 - DNA, 20 bp, Artificial Sequence
  Description of Artificial Sequence: Synthetic oligonucleotide
  Target: ATXN2; (-) strand; PAM type: YTN; PAM sequence: TTT
ttttttttttttttgagaca

SEQ ID NO: 64390 - DNA, 20 bp, Artificial Sequence
  Description of Artificial Sequence: Synthetic oligonucleotide
  Target: ATXN2; (-) strand; PAM type: YTN; PAM sequence: TTT
tttttttttttttttgagac

SEQ ID NO: 64391 - DNA, 20 bp, Artificial Sequence
  Description of Artificial Sequence: Synthetic oligonucleotide
  Target: ATXN2; (-) strand; PAM type: YTN; PAM sequence: TTT
ttttttttttttttttgaga

SEQ ID NO: 64392 - DNA, 20 bp, Artificial Sequence
  Description of Artificial Sequence: Synthetic oligonucleotide
  Target: ATXN2; (-) strand; PAM type: YTN; PAM sequence: TTG
gttttttttttttttttttt

SEQ ID NO: 64393 - DNA, 20 bp, Artificial Sequence
  Description of Artificial Sequence: Synthetic oligonucleotide
  Target: ATXN2; (-) strand; PAM type: YTN; PAM sequence: TTT
ggtttttttttttttttttt

SEQ ID NO: 64394 - DNA, 20 bp, Artificial Sequence
  Description of Artificial Sequence: Synthetic oligonucleotide
  Target: ATXN2; (-) strand; PAM type: YTN; PAM sequence: CTT
tggttttttttttttttttt

SEQ ID NO: 64395 - DNA, 20 bp, Artificial Sequence
  Description of Artificial Sequence: Synthetic oligonucleotide
  Target: ATXN2; (-) strand; PAM type: YTN; PAM sequence: TTG
taggcaatggatctttggtt

SEQ ID NO: 64396 - DNA, 20 bp, Artificial Sequence
  Description of Artificial Sequence: Synthetic oligonucleotide
  Target: ATXN2; (-) strand; PAM type: YTN; PAM sequence: CTT
gtaggcaatggatctttggt

SEQ ID NO: 64397 - DNA, 20 bp, Artificial Sequence
  Description of Artificial Sequence: Synthetic oligonucleotide
  Target: ATXN2; (-) strand; PAM type: YTN; PAM sequence: TTC
ttgtaggcaatggatctttg

SEQ ID NO: 64398 - DNA, 20 bp, Artificial Sequence
  Description of Artificial Sequence: Synthetic oligonucleotide
  Target: ATXN2; (-) strand; PAM type: YTN; PAM sequence: TTT
cttgtaggcaatggatcttt

SEQ ID NO: 64399 - DNA, 20 bp, Artificial Sequence
  Description of Artificial Sequence: Synthetic oligonucleotide
  Target: ATXN2; (-) strand; PAM type: YTN; PAM sequence: TTA
taggtaaagtgtgtttcttg

SEQ ID NO: 64400 - DNA, 20 bp, Artificial Sequence
  Description of Artificial Sequence: Synthetic oligonucleotide
  Target: ATXN2; (-) strand; PAM type: YTN; PAM sequence: TTT
ataggtaaagtgtgtttctt

SEQ ID NO: 64401 - DNA, 20 bp, Artificial Sequence
  Description of Artificial Sequence: Synthetic oligonucleotide
  Target: ATXN2; (-) strand; PAM type: YTN; PAM sequence: TTT
tataggtaaagtgtgtttct

SEQ ID NO: 64402 - DNA, 20 bp, Artificial Sequence
  Description of Artificial Sequence: Synthetic oligonucleotide
  Target: ATXN2; (-) strand; PAM type: YTN; PAM sequence: CTA
tgtgtgattttataggtaaa

SEQ ID NO: 64403 - DNA, 20 bp, Artificial Sequence
  Description of Artificial Sequence: Synthetic oligonucleotide
  Target: ATXN2; (-) strand; PAM type: YTN; PAM sequence: TTA
gtctatgtgtgattttatag

SEQ ID NO: 64404 - DNA, 20 bp, Artificial Sequence
  Description of Artificial Sequence: Synthetic oligonucleotide
  Target: ATXN2; (-) strand; PAM type: YTN; PAM sequence: TTT
agtctatgtgtgattttata

SEQ ID NO: 64405 - DNA, 20 bp, Artificial Sequence
  Description of Artificial Sequence: Synthetic oligonucleotide
  Target: ATXN2; (-) strand; PAM type: YTN; PAM sequence: TTT
tagtctatgtgtgattttat

SEQ ID NO: 64406 - DNA, 20 bp, Artificial Sequence
  Description of Artificial Sequence: Synthetic oligonucleotide
  Target: ATXN2; (-) strand; PAM type: YTN; PAM sequence: TTC
aattttagtctatgtgtgat

SEQ ID NO: 64407 - DNA, 20 bp, Artificial Sequence
  Description of Artificial Sequence: Synthetic oligonucleotide
  Target: ATXN2; (-) strand; PAM type: YTN; PAM sequence: CTT
caattttagtctatgtgtga

SEQ ID NO: 64408 - DNA, 20 bp, Artificial Sequence
  Description of Artificial Sequence: Synthetic oligonucleotide
  Target: ATXN2; (-) strand; PAM type: YTN; PAM sequence: CTC
ttcaattttagtctatgtgt

SEQ ID NO: 64409 - DNA, 20 bp, Artificial Sequence
  Description of Artificial Sequence: Synthetic oligonucleotide
  Target: ATXN2; (-) strand; PAM type: YTN; PAM sequence: TTC
cagctcttcaattttagtct

SEQ ID NO: 64410 - DNA, 20 bp, Artificial Sequence
  Description of Artificial Sequence: Synthetic oligonucleotide
  Target: ATXN2; (-) strand; PAM type: YTN; PAM sequence: TTT
ccagctcttcaattttagtc

SEQ ID NO: 64411 - DNA, 20 bp, Artificial Sequence
  Description of Artificial Sequence: Synthetic oligonucleotide
  Target: ATXN2; (-) strand; PAM type: YTN; PAM sequence: TTT
tccagctcttcaattttagt

SEQ ID NO: 64412 - DNA, 20 bp, Artificial Sequence
  Description of Artificial Sequence: Synthetic oligonucleotide
  Target: ATXN2; (-) strand; PAM type: YTN; PAM sequence: TTG
ttttccagctcttcaatttt

SEQ ID NO: 64413 - DNA, 20 bp, Artificial Sequence
  Description of Artificial Sequence: Synthetic oligonucleotide
  Target: ATXN2; (-) strand; PAM type: YTN; PAM sequence: TTG
catggaatattgttttccag

SEQ ID NO: 64414 - DNA, 20 bp, Artificial Sequence
  Description of Artificial Sequence: Synthetic oligonucleotide
  Target: ATXN2; (-) strand; PAM type: YTN; PAM sequence: TTT
gcatggaatattgttttcca

SEQ ID NO: 64415 - DNA, 20 bp, Artificial Sequence
  Description of Artificial Sequence: Synthetic oligonucleotide
  Target: ATXN2; (-) strand; PAM type: YTN; PAM sequence: TTC
catttgcatggaatattgtt

SEQ ID NO: 64416 - DNA, 20 bp, Artificial Sequence
  Description of Artificial Sequence: Synthetic oligonucleotide
  Target: ATXN2; (-) strand; PAM type: YTN; PAM sequence: TTT
ccatttgcatggaatattgt

SEQ ID NO: 64417 - DNA, 20 bp, Artificial Sequence
  Description of Artificial Sequence: Synthetic oligonucleotide
  Target: ATXN2; (-) strand; PAM type: YTN; PAM sequence: CTG
gtttccatttgcatggaata

SEQ ID NO: 64418 - DNA, 20 bp, Artificial Sequence
  Description of Artificial Sequence: Synthetic oligonucleotide
  Target: ATXN2; (-) strand; PAM type: YTN; PAM sequence: TTC
tggtttccatttgcatggaa

SEQ ID NO: 64419 - DNA, 20 bp, Artificial Sequence
  Description of Artificial Sequence: Synthetic oligonucleotide
  Target: ATXN2; (-) strand; PAM type: YTN; PAM sequence: TTT
ctggtttccatttgcatgga

SEQ ID NO: 64420 - DNA, 20 bp, Artificial Sequence
  Description of Artificial Sequence: Synthetic oligonucleotide
  Target: ATXN2; (-) strand; PAM type: YTN; PAM sequence: TTT
tctggtttccatttgcatgg

SEQ ID NO: 64421 - DNA, 20 bp, Artificial Sequence
  Description of Artificial Sequence: Synthetic oligonucleotide
  Target: ATXN2; (-) strand; PAM type: YTN; PAM sequence: CTT
ttctggtttccatttgcatg

SEQ ID NO: 64422 - DNA, 20 bp, Artificial Sequence
  Description of Artificial Sequence: Synthetic oligonucleotide
  Target: ATXN2; (-) strand; PAM type: YTN; PAM sequence: TTC
ttttctggtttccatttgca

SEQ ID NO: 64423 - DNA, 20 bp, Artificial Sequence
  Description of Artificial Sequence: Synthetic oligonucleotide
  Target: ATXN2; (-) strand; PAM type: YTN; PAM sequence: CTG
ttcttttctggtttccattt

SEQ ID NO: 64424 - DNA, 20 bp, Artificial Sequence
  Description of Artificial Sequence: Synthetic oligonucleotide
  Target: ATXN2; (-) strand; PAM type: YTN; PAM sequence: CTC
ctgttcttttctggtttcca

SEQ ID NO: 64425 - DNA, 20 bp, Artificial Sequence
  Description of Artificial Sequence: Synthetic oligonucleotide
  Target: ATXN2; (-) strand; PAM type: YTN; PAM sequence: CTA
ctcctgttcttttctggttt

SEQ ID NO: 64426 - DNA, 20 bp, Artificial Sequence
  Description of Artificial Sequence: Synthetic oligonucleotide
  Target: ATXN2; (-) strand; PAM type: YTN; PAM sequence: CTA
agcatagctactcctgttct

SEQ ID NO: 64427 - DNA, 20 bp, Artificial Sequence
  Description of Artificial Sequence: Synthetic oligonucleotide
  Target: ATXN2; (-) strand; PAM type: YTN; PAM sequence: TTA
tctaagcatagctactcctg

SEQ ID NO: 64428 - DNA, 20 bp, Artificial Sequence
  Description of Artificial Sequence: Synthetic oligonucleotide
  Target: ATXN2; (-) strand; PAM type: YTN; PAM sequence: TTT
atctaagcatagctactcct

SEQ ID NO: 64429 - DNA, 20 bp, Artificial Sequence
  Description of Artificial Sequence: Synthetic oligonucleotide
  Target: ATXN2; (-) strand; PAM type: YTN; PAM sequence: TTT
tatctaagcatagctactcc

SEQ ID NO: 64430 - DNA, 20 bp, Artificial Sequence
  Description of Artificial Sequence: Synthetic oligonucleotide
  Target: ATXN2; (-) strand; PAM type: YTN; PAM sequence: CTA
ttttatctaagcatagctac

SEQ ID NO: 64431 - DNA, 20 bp, Artificial Sequence
  Description of Artificial Sequence: Synthetic oligonucleotide
  Target: ATXN2; (-) strand; PAM type: YTN; PAM sequence: CTC
aaaatctattttatctaagc

SEQ ID NO: 64432 - DNA, 20 bp, Artificial Sequence
  Description of Artificial Sequence: Synthetic oligonucleotide
  Target: ATXN2; (-) strand; PAM type: YTN; PAM sequence: TTG
tctcaaaatctattttatct

SEQ ID NO: 64433 - DNA, 20 bp, Artificial Sequence
  Description of Artificial Sequence: Synthetic oligonucleotide
  Target: ATXN2; (-) strand; PAM type: YTN; PAM sequence: TTT
gtctcaaaatctattttatc

SEQ ID NO: 64434 - DNA, 20 bp, Artificial Sequence
  Description of Artificial Sequence: Synthetic oligonucleotide
  Target: ATXN2; (-) strand; PAM type: YTN; PAM sequence: CTT
tgtctcaaaatctattttat

SEQ ID NO: 64435 - DNA, 20 bp, Artificial Sequence
  Description of Artificial Sequence: Synthetic oligonucleotide
  Target: ATXN2; (-) strand; PAM type: YTN; PAM sequence: TTA
tagactttgtctcaaaatct

SEQ ID NO: 64436 - DNA, 20 bp, Artificial Sequence
  Description of Artificial Sequence: Synthetic oligonucleotide
  Target: ATXN2; (-) strand; PAM type: YTN; PAM sequence: TTT
atagactttgtctcaaaatc

SEQ ID NO: 64437 - DNA, 20 bp, Artificial Sequence
  Description of Artificial Sequence: Synthetic oligonucleotide
  Target: ATXN2; (-) strand; PAM type: YTN; PAM sequence: TTT
tatagactttgtctcaaaat

SEQ ID NO: 64438 - DNA, 20 bp, Artificial Sequence
  Description of Artificial Sequence: Synthetic oligonucleotide
  Target: ATXN2; (-) strand; PAM type: YTN; PAM sequence: TTT
ttatagactttgtctcaaaa

SEQ ID NO: 64439 - DNA, 20 bp, Artificial Sequence
  Description of Artificial Sequence: Synthetic oligonucleotide
  Target: ATXN2; (-) strand; PAM type: YTN; PAM sequence: CTG
tttttatagactttgtctca

SEQ ID NO: 64440 - DNA, 20 bp, Artificial Sequence
  Description of Artificial Sequence: Synthetic oligonucleotide
  Target: ATXN2; (-) strand; PAM type: YTN; PAM sequence: TTG
tctgtttttatagactttgt

SEQ ID NO: 64441 - DNA, 20 bp, Artificial Sequence
  Description of Artificial Sequence: Synthetic oligonucleotide
  Target: ATXN2; (-) strand; PAM type: YTN; PAM sequence: TTT
gtctgtttttatagactttg

SEQ ID NO: 64442 - DNA, 20 bp, Artificial Sequence
  Description of Artificial Sequence: Synthetic oligonucleotide
  Target: ATXN2; (-) strand; PAM type: YTN; PAM sequence: CTT
tgtctgtttttatagacttt

SEQ ID NO: 64443 - DNA, 20 bp, Artificial Sequence
  Description of Artificial Sequence: Synthetic oligonucleotide
  Target: ATXN2; (-) strand; PAM type: YTN; PAM sequence: TTC
tttgtctgtttttatagact

SEQ ID NO: 64444 - DNA, 20 bp, Artificial Sequence
  Description of Artificial Sequence: Synthetic oligonucleotide
  Target: ATXN2; (-) strand; PAM type: YTN; PAM sequence: CTT
ctttgtctgtttttatagac

SEQ ID NO: 64445 - DNA, 20 bp, Artificial Sequence
  Description of Artificial Sequence: Synthetic oligonucleotide
  Target: ATXN2; (-) strand; PAM type: YTN; PAM sequence: TTA
tacaataatcttctttgtct

SEQ ID NO: 64446 - DNA, 20 bp, Artificial Sequence
  Description of Artificial Sequence: Synthetic oligonucleotide
  Target: ATXN2; (-) strand; PAM type: YTN; PAM sequence: TTA
tcattatacaataatcttct

SEQ ID NO: 64447 - DNA, 20 bp, Artificial Sequence
  Description of Artificial Sequence: Synthetic oligonucleotide
  Target: ATXN2; (-) strand; PAM type: YTN; PAM sequence: TTT
atcattatacaataatcttc

SEQ ID NO: 64448 - DNA, 20 bp, Artificial Sequence
  Description of Artificial Sequence: Synthetic oligonucleotide
  Target: ATXN2; (-) strand; PAM type: YTN; PAM sequence: CTT
tatcattatacaataatctt

SEQ ID NO: 64449 - DNA, 20 bp, Artificial Sequence
  Description of Artificial Sequence: Synthetic oligonucleotide
  Target: ATXN2; (-) strand; PAM type: YTN; PAM sequence: TTG
atccctttatcattatacaa

SEQ ID NO: 64450 - DNA, 20 bp, Artificial Sequence
  Description of Artificial Sequence: Synthetic oligonucleotide
  Target: ATXN2; (-) strand; PAM type: YTN; PAM sequence: TTG
ccgaattgatccctttatca

SEQ ID NO: 64451 - DNA, 20 bp, Artificial Sequence
  Description of Artificial Sequence: Synthetic oligonucleotide
  Target: ATXN2; (-) strand; PAM type: YTN; PAM sequence: CTT
gccgaattgatccctttatc

SEQ ID NO: 64452 - DNA, 20 bp, Artificial Sequence
  Description of Artificial Sequence: Synthetic oligonucleotide
  Target: ATXN2; (-) strand; PAM type: YTN; PAM sequence: CTC
ttgccgaattgatcccttta

SEQ ID NO: 64453 - DNA, 20 bp, Artificial Sequence
  Description of Artificial Sequence: Synthetic oligonucleotide
  Target: ATXN2; (-) strand; PAM type: YTN; PAM sequence: TTA
taacctcttgccgaattgat

SEQ ID NO: 64454 - DNA, 20 bp, Artificial Sequence
  Description of Artificial Sequence: Synthetic oligonucleotide
  Target: ATXN2; (-) strand; PAM type: YTN; PAM sequence: TTG
ttataacctcttgccgaatt

SEQ ID NO: 64455 - DNA, 20 bp, Artificial Sequence
  Description of Artificial Sequence: Synthetic oligonucleotide
  Target: ATXN2; (-) strand; PAM type: YTN; PAM sequence: CTT
gttataacctcttgccgaat

SEQ ID NO: 64456 - DNA, 20 bp, Artificial Sequence
  Description of Artificial Sequence: Synthetic oligonucleotide
  Target: ATXN2; (-) strand; PAM type: YTN; PAM sequence: TTA
tacttgttataacctcttgc

SEQ ID NO: 64457 - DNA, 20 bp, Artificial Sequence
  Description of Artificial Sequence: Synthetic oligonucleotide
  Target: ATXN2; (-) strand; PAM type: YTN; PAM sequence: TTT
atacttgttataacctcttg

SEQ ID NO: 64458 - DNA, 20 bp, Artificial Sequence
  Description of Artificial Sequence: Synthetic oligonucleotide
  Target: ATXN2; (-) strand; PAM type: YTN; PAM sequence: TTG
catatgtatttatacttgtt

SEQ ID NO: 64459 - DNA, 20 bp, Artificial Sequence
  Description of Artificial Sequence: Synthetic oligonucleotide
  Target: ATXN2; (-) strand; PAM type: YTN; PAM sequence: TTG
gttgcatatgtatttatact

SEQ ID NO: 64460 - DNA, 20 bp, Artificial Sequence
  Description of Artificial Sequence: Synthetic oligonucleotide
  Target: ATXN2; (-) strand; PAM type: YTN; PAM sequence: CTC
cagtattggttgcatatgta

SEQ ID NO: 64461 - DNA, 20 bp, Artificial Sequence
  Description of Artificial Sequence: Synthetic oligonucleotide
  Target: ATXN2; (-) strand; PAM type: YTN; PAM sequence: CTG
gatgctccagtattggttgc

SEQ ID NO: 64462 - DNA, 20 bp, Artificial Sequence
  Description of Artificial Sequence: Synthetic oligonucleotide
  Target: ATXN2; (-) strand; PAM type: YTN; PAM sequence: TTA
tatatctggatgctccagta

SEQ ID NO: 64463 - DNA, 20 bp, Artificial Sequence
  Description of Artificial Sequence: Synthetic oligonucleotide
  Target: ATXN2; (-) strand; PAM type: YTN; PAM sequence: TTT
atatatctggatgctccagt

SEQ ID NO: 64464 - DNA, 20 bp, Artificial Sequence
  Description of Artificial Sequence: Synthetic oligonucleotide
  Target: ATXN2; (-) strand; PAM type: YTN; PAM sequence: CTT
tatatatctggatgctccag

SEQ ID NO: 64465 - DNA, 20 bp, Artificial Sequence
  Description of Artificial Sequence: Synthetic oligonucleotide
  Target: ATXN2; (-) strand; PAM type: YTN; PAM sequence: TTG
ctttatatatctggatgctc

SEQ ID NO: 64466 - DNA, 20 bp, Artificial Sequence
  Description of Artificial Sequence: Synthetic oligonucleotide
  Target: ATXN2; (-) strand; PAM type: YTN; PAM sequence: TTT
gctttatatatctggatgct

SEQ ID NO: 64467 - DNA, 20 bp, Artificial Sequence
  Description of Artificial Sequence: Synthetic oligonucleotide
  Target: ATXN2; (-) strand; PAM type: YTN; PAM sequence: CTA
ataatgtttgctttatatat

SEQ ID NO: 64468 - DNA, 20 bp, Artificial Sequence
  Description of Artificial Sequence: Synthetic oligonucleotide
  Target: ATXN2; (-) strand; PAM type: YTN; PAM sequence: CTC
taataatgtttgctttatat

SEQ ID NO: 64469 - DNA, 20 bp, Artificial Sequence
  Description of Artificial Sequence: Synthetic oligonucleotide
  Target: ATXN2; (-) strand; PAM type: YTN; PAM sequence: TTG
ctctaataatgtttgcttta

SEQ ID NO: 64470 - DNA, 20 bp, Artificial Sequence
  Description of Artificial Sequence: Synthetic oligonucleotide
  Target: ATXN2; (-) strand; PAM type: YTN; PAM sequence: TTT
gctctaataatgtttgcttt

SEQ ID NO: 64471 - DNA, 20 bp, Artificial Sequence
  Description of Artificial Sequence: Synthetic oligonucleotide
  Target: ATXN2; (-) strand; PAM type: YTN; PAM sequence: TTT
tgctctaataatgtttgctt

SEQ ID NO: 64472 - DNA, 20 bp, Artificial Sequence
  Description of Artificial Sequence: Synthetic oligonucleotide
  Target: ATXN2; (-) strand; PAM type: YTN; PAM sequence: TTT
ttgctctaataatgtttgct

SEQ ID NO: 64473 - DNA, 20 bp, Artificial Sequence
  Description of Artificial Sequence: Synthetic oligonucleotide
  Target: ATXN2; (-) strand; PAM type: YTN; PAM sequence: TTT
tttgctctaataatgtttgc

SEQ ID NO: 64474 - DNA, 20 bp, Artificial Sequence
  Description of Artificial Sequence: Synthetic oligonucleotide
  Target: ATXN2; (-) strand; PAM type: YTN; PAM sequence: CTT
ttttgctctaataatgtttg

SEQ ID NO: 64475 - DNA, 20 bp, Artificial Sequence
  Description of Artificial Sequence: Synthetic oligonucleotide
  Target: ATXN2; (-) strand; PAM type: YTN; PAM sequence: CTC
ttttttgctctaataatgtt

SEQ ID NO: 64476 - DNA, 20 bp, Artificial Sequence
  Description of Artificial Sequence: Synthetic oligonucleotide
  Target: ATXN2; (-) strand; PAM type: YTN; PAM sequence: TTC
tcttttttgctctaataatg

SEQ ID NO: 64477 - DNA, 20 bp, Artificial Sequence
  Description of Artificial Sequence: Synthetic oligonucleotide
  Target: ATXN2; (-) strand; PAM type: YTN; PAM sequence: TTT
ctcttttttgctctaataat

SEQ ID NO: 64478 - DNA, 20 bp, Artificial Sequence
  Description of Artificial Sequence: Synthetic oligonucleotide
  Target: ATXN2; (-) strand; PAM type: YTN; PAM sequence: CTG
tttctcttttttgctctaat

SEQ ID NO: 64479 - DNA, 20 bp, Artificial Sequence
  Description of Artificial Sequence: Synthetic oligonucleotide
  Target: ATXN2; (-) strand; PAM type: YTN; PAM sequence: CTG
aggtctgtttctcttttttg

SEQ ID NO: 64480 - DNA, 20 bp, Artificial Sequence
  Description of Artificial Sequence: Synthetic oligonucleotide
  Target: ATXN2; (-) strand; PAM type: YTN; PAM sequence: TTA
ctgaggtctgtttctctttt

SEQ ID NO: 64481 - DNA, 20 bp, Artificial Sequence
  Description of Artificial Sequence: Synthetic oligonucleotide
  Target: ATXN2; (-) strand; PAM type: YTN; PAM sequence: CTG
ttactgaggtctgtttctct

SEQ ID NO: 64482 - DNA, 20 bp, Artificial Sequence
  Description of Artificial Sequence: Synthetic oligonucleotide
  Target: ATXN2; (-) strand; PAM type: YTN; PAM sequence: TTC
cgactgttactgaggtctgt

SEQ ID NO: 64483 - DNA, 20 bp, Artificial Sequence
  Description of Artificial Sequence: Synthetic oligonucleotide
  Target: ATXN2; (-) strand; PAM type: YTN; PAM sequence: TTT
ccgactgttactgaggtctg

SEQ ID NO: 64484 - DNA, 20 bp, Artificial Sequence
  Description of Artificial Sequence: Synthetic oligonucleotide
  Target: ATXN2; (-) strand; PAM type: YTN; PAM sequence: TTG
aagtttccgactgttactga

SEQ ID NO: 64485 - DNA, 20 bp, Artificial Sequence
  Description of Artificial Sequence: Synthetic oligonucleotide
  Target: ATXN2; (-) strand; PAM type: YTN; PAM sequence: CTG
agagtggggtgttgaagttt

SEQ ID NO: 64486 - DNA, 20 bp, Artificial Sequence
  Description of Artificial Sequence: Synthetic oligonucleotide
  Target: ATXN2; (-) strand; PAM type: YTN; PAM sequence: TTG
ctgagagtggggtgttgaag

SEQ ID NO: 64487 - DNA, 20 bp, Artificial Sequence
  Description of Artificial Sequence: Synthetic oligonucleotide
  Target: ATXN2; (-) strand; PAM type: YTN; PAM sequence: CTG
tccattgctgagagtggggt

SEQ ID NO: 64488 - DNA, 20 bp, Artificial Sequence
  Description of Artificial Sequence: Synthetic oligonucleotide
  Target: ATXN2; (-) strand; PAM type: YTN; PAM sequence: CTG
aatgatctgtccattgctga

SEQ ID NO: 64489 - DNA, 20 bp, Artificial Sequence
  Description of Artificial Sequence: Synthetic oligonucleotide
  Target: ATXN2; (-) strand; PAM type: YTN; PAM sequence: CTG
tctgaatgatctgtccattg

SEQ ID NO: 64490 - DNA, 20 bp, Artificial Sequence
  Description of Artificial Sequence: Synthetic oligonucleotide
  Target: ATXN2; (-) strand; PAM type: YTN; PAM sequence: TTC
tgtctgaatgatctgtccat

SEQ ID NO: 64491 - DNA, 20 bp, Artificial Sequence
  Description of Artificial Sequence: Synthetic oligonucleotide
  Target: ATXN2; (-) strand; PAM type: YTN; PAM sequence: TTT
ctgtctgaatgatctgtcca

SEQ ID NO: 64492 - DNA, 20 bp, Artificial Sequence
  Description of Artificial Sequence: Synthetic oligonucleotide
  Target: ATXN2; (-) strand; PAM type: YTN; PAM sequence: TTT
tctgtctgaatgatctgtcc

SEQ ID NO: 64493 - DNA, 20 bp, Artificial Sequence
  Description of Artificial Sequence: Synthetic oligonucleotide
  Target: ATXN2; (-) strand; PAM type: YTN; PAM sequence: TTG
attttctgtctgaatgatct

SEQ ID NO: 64494 - DNA, 20 bp, Artificial Sequence
  Description of Artificial Sequence: Synthetic oligonucleotide
  Target: ATXN2; (-) strand; PAM type: YTN; PAM sequence: TTG
ttgattttctgtctgaatga

SEQ ID NO: 64495 - DNA, 20 bp, Artificial Sequence
  Description of Artificial Sequence: Synthetic oligonucleotide
  Target: ATXN2; (-) strand; PAM type: YTN; PAM sequence: TTT
gttgattttctgtctgaatg

SEQ ID NO: 64496 - DNA, 20 bp, Artificial Sequence
  Description of Artificial Sequence: Synthetic oligonucleotide
  Target: ATXN2; (-) strand; PAM type: YTN; PAM sequence: CTT
tgttgattttctgtctgaat

SEQ ID NO: 64497 - DNA, 20 bp, Artificial Sequence
  Description of Artificial Sequence: Synthetic oligonucleotide
  Target: ATXN2; (-) strand; PAM type: YTN; PAM sequence: TTC
tttgttgattttctgtctga

SEQ ID NO: 64498 - DNA, 20 bp, Artificial Sequence
  Description of Artificial Sequence: Synthetic oligonucleotide
  Target: ATXN2; (-) strand; PAM type: YTN; PAM sequence: TTT
ctttgttgattttctgtctg

SEQ ID NO: 64499 - DNA, 20 bp, Artificial Sequence
  Description of Artificial Sequence: Synthetic oligonucleotide
  Target: ATXN2; (-) strand; PAM type: YTN; PAM sequence: CTA
atgtttctttgttgattttc

SEQ ID NO: 64500 - DNA, 20 bp, Artificial Sequence
  Description of Artificial Sequence: Synthetic oligonucleotide
  Target: ATXN2; (-) strand; PAM type: YTN; PAM sequence: TTA
ggtctaatgtttctttgttg

SEQ ID NO: 64501 - DNA, 20 bp, Artificial Sequence
  Description of Artificial Sequence: Synthetic oligonucleotide
  Target: ATXN2; (-) strand; PAM type: YTN; PAM sequence: CTA
tagagcaaattaggtctaat

SEQ ID NO: 64502 - DNA, 20 bp, Artificial Sequence
  Description of Artificial Sequence: Synthetic oligonucleotide
  Target: ATXN2; (-) strand; PAM type: YTN; PAM sequence: TTG
gtctatagagcaaattaggt

SEQ ID NO: 64503 - DNA, 20 bp, Artificial Sequence
  Description of Artificial Sequence: Synthetic oligonucleotide
  Target: ATXN2; (-) strand; PAM type: YTN; PAM sequence: TTT
ggtctatagagcaaattagg

SEQ ID NO: 64504 - DNA, 20 bp, Artificial Sequence
  Description of Artificial Sequence: Synthetic oligonucleotide
  Target: ATXN2; (-) strand; PAM type: YTN; PAM sequence: CTA
tttggtctatagagcaaatt

SEQ ID NO: 64505 - DNA, 20 bp, Artificial Sequence
  Description of Artificial Sequence: Synthetic oligonucleotide
  Target: ATXN2; (-) strand; PAM type: YTN; PAM sequence: TTG
ggcctatttggtctatagag

SEQ ID NO: 64506 - DNA, 20 bp, Artificial Sequence
  Description of Artificial Sequence: Synthetic oligonucleotide
  Target: ATXN2; (-) strand; PAM type: YTN; PAM sequence: CTG
taaatatgtattgggcctat

SEQ ID NO: 64507 - DNA, 20 bp, Artificial Sequence
  Description of Artificial Sequence: Synthetic oligonucleotide
  Target: ATXN2; (-) strand; PAM type: YTN; PAM sequence: TTC
tgtaaatatgtattgggcct

SEQ ID NO: 64508 - DNA, 20 bp, Artificial Sequence
  Description of Artificial Sequence: Synthetic oligonucleotide
  Target: ATXN2; (-) strand; PAM type: YTN; PAM sequence: TTG
gacacaatgttctgtaaata

SEQ ID NO: 64509 - DNA, 20 bp, Artificial Sequence
  Description of Artificial Sequence: Synthetic oligonucleotide
  Target: ATXN2; (-) strand; PAM type: YTN; PAM sequence: CTG
ttggacacaatgttctgtaa

SEQ ID NO: 64510 - DNA, 20 bp, Artificial Sequence
  Description of Artificial Sequence: Synthetic oligonucleotide
  Target: ATXN2; (-) strand; PAM type: YTN; PAM sequence: CTA
tagctgttggacacaatgtt

SEQ ID NO: 64511 - DNA, 20 bp, Artificial Sequence
  Description of Artificial Sequence: Synthetic oligonucleotide
  Target: ATXN2; (-) strand; PAM type: YTN; PAM sequence: TTC
tatagctgttggacacaatg

SEQ ID NO: 64512 - DNA, 20 bp, Artificial Sequence
  Description of Artificial Sequence: Synthetic oligonucleotide
  Target: ATXN2; (-) strand; PAM type: YTN; PAM sequence: TTG
aggagaagaatgtgtattct

SEQ ID NO: 64513 - DNA, 20 bp, Artificial Sequence
  Description of Artificial Sequence: Synthetic oligonucleotide
  Target: ATXN2; (-) strand; PAM type: YTN; PAM sequence: TTG
agagcaatccatatgttgag

SEQ ID NO: 64514 - DNA, 20 bp, Artificial Sequence
  Description of Artificial Sequence: Synthetic oligonucleotide
  Target: ATXN2; (-) strand; PAM type: YTN; PAM sequence: TTT
gagagcaatccatatgttga

SEQ ID NO: 64515 - DNA, 20 bp, Artificial Sequence
  Description of Artificial Sequence: Synthetic oligonucleotide
  Target: ATXN2; (-) strand; PAM type: YTN; PAM sequence: CTT
tgagagcaatccatatgttg

SEQ ID NO: 64516 - DNA, 20 bp, Artificial Sequence
  Description of Artificial Sequence: Synthetic oligonucleotide
  Target: ATXN2; (-) strand; PAM type: YTN; PAM sequence: CTA
tctttgagagcaatccatat

SEQ ID NO: 64517 - DNA, 20 bp, Artificial Sequence
  Description of Artificial Sequence: Synthetic oligonucleotide
  Target: ATXN2; (-) strand; PAM type: YTN; PAM sequence: TTA
acatagggtctatctttgag

SEQ ID NO: 64518 - DNA, 20 bp, Artificial Sequence
  Description of Artificial Sequence: Synthetic oligonucleotide
  Target: ATXN2; (-) strand; PAM type: YTN; PAM sequence: CTT
aacatagggtctatctttga

SEQ ID NO: 64519 - DNA, 20 bp, Artificial Sequence
  Description of Artificial Sequence: Synthetic oligonucleotide
  Target: ATXN2; (-) strand; PAM type: YTN; PAM sequence: TTG
tggcttaacatagggtctat

SEQ ID NO: 64520 - DNA, 20 bp, Artificial Sequence
  Description of Artificial Sequence: Synthetic oligonucleotide
  Target: ATXN2; (-) strand; PAM type: YTN; PAM sequence: TTT
gtggcttaacatagggtcta

SEQ ID NO: 64521 - DNA, 20 bp, Artificial Sequence
  Description of Artificial Sequence: Synthetic oligonucleotide
  Target: ATXN2; (-) strand; PAM type: YTN; PAM sequence: TTT
tgtggcttaacatagggtct

SEQ ID NO: 64522 - DNA, 20 bp, Artificial Sequence
  Description of Artificial Sequence: Synthetic oligonucleotide
  Target: ATXN2; (-) strand; PAM type: YTN; PAM sequence: TTG
ttttgtggcttaacataggg

SEQ ID NO: 64523 - DNA, 20 bp, Artificial Sequence
  Description of Artificial Sequence: Synthetic oligonucleotide
  Target: ATXN2; (-) strand; PAM type: YTN; PAM sequence: CTT
gttttgtggcttaacatagg

SEQ ID NO: 64524 - DNA, 20 bp, Artificial Sequence
  Description of Artificial Sequence: Synthetic oligonucleotide
  Target: ATXN2; (-) strand; PAM type: YTN; PAM sequence: TTA
gacttgttttgtggcttaac

SEQ ID NO: 64525 - DNA, 20 bp, Artificial Sequence
  Description of Artificial Sequence: Synthetic oligonucleotide
  Target: ATXN2; (-) strand; PAM type: YTN; PAM sequence: TTT
agacttgttttgtggcttaa

SEQ ID NO: 64526 - DNA, 20 bp, Artificial Sequence
  Description of Artificial Sequence: Synthetic oligonucleotide
  Target: ATXN2; (-) strand; PAM type: YTN; PAM sequence: CTT
tagacttgttttgtggctta

SEQ ID NO: 64527 - DNA, 20 bp, Artificial Sequence
  Description of Artificial Sequence: Synthetic oligonucleotide
  Target: ATXN2; (-) strand; PAM type: YTN; PAM sequence: CTG
tgccacgtcaaatctttaga

SEQ ID NO: 64528 - DNA, 20 bp, Artificial Sequence
  Description of Artificial Sequence: Synthetic oligonucleotide
  Target: ATXN2; (-) strand; PAM type: YTN; PAM sequence: TTA
cagacatgagccactgtgcc

SEQ ID NO: 64529 - DNA, 20 bp, Artificial Sequence
  Description of Artificial Sequence: Synthetic oligonucleotide
  Target: ATXN2; (-) strand; PAM type: YTN; PAM sequence: CTG
ggattacagacatgagccac

SEQ ID NO: 64530 - DNA, 20 bp, Artificial Sequence
  Description of Artificial Sequence: Synthetic oligonucleotide
  Target: ATXN2; (-) strand; PAM type: YTN; PAM sequence: CTC
ccaaggtgctgggattacag

SEQ ID NO: 64531 - DNA, 20 bp, Artificial Sequence
  Description of Artificial Sequence: Synthetic oligonucleotide
  Target: ATXN2; (-) strand; PAM type: YTN; PAM sequence: TTC
ggcctcccaaggtgctggga

SEQ ID NO: 64532 - DNA, 20 bp, Artificial Sequence
  Description of Artificial Sequence: Synthetic oligonucleotide
  Target: ATXN2; (-) strand; PAM type: YTN; PAM sequence: TTT
cggcctcccaaggtgctggg

SEQ ID NO: 64533 - DNA, 20 bp, Artificial Sequence
  Description of Artificial Sequence: Synthetic oligonucleotide
  Target: ATXN2; (-) strand; PAM type: YTN; PAM sequence: CTA
tttcggcctcccaaggtgct

SEQ ID NO: 64534 - DNA, 20 bp, Artificial Sequence
  Description of Artificial Sequence: Synthetic oligonucleotide
  Target: ATXN2; (-) strand; PAM type: YTN; PAM sequence: CTC
aagcaatccacctatttcgg

SEQ ID NO: 64535 - DNA, 20 bp, Artificial Sequence
  Description of Artificial Sequence: Synthetic oligonucleotide
  Target: ATXN2; (-) strand; PAM type: YTN; PAM sequence: CTG
agctcaagcaatccacctat

SEQ ID NO: 64536 - DNA, 20 bp, Artificial Sequence
  Description of Artificial Sequence: Synthetic oligonucleotide
  Target: ATXN2; (-) strand; PAM type: YTN; PAM sequence: CTC
ctgagctcaagcaatccacc

SEQ ID NO: 64537 - DNA, 20 bp, Artificial Sequence
  Description of Artificial Sequence: Synthetic oligonucleotide
  Target: ATXN2; (-) strand; PAM type: YTN; PAM sequence: TTC
gaactcctgagctcaagcaa

SEQ ID NO: 64538 - DNA, 20 bp, Artificial Sequence
  Description of Artificial Sequence: Synthetic oligonucleotide
  Target: ATXN2; (-) strand; PAM type: YTN; PAM sequence: TTT
cgaactcctgagctcaagca

SEQ ID NO: 64539 - DNA, 20 bp, Artificial Sequence
  Description of Artificial Sequence: Synthetic oligonucleotide
  Target: ATXN2; (-) strand; PAM type: YTN; PAM sequence: TTG
tttcgaactcctgagctcaa

SEQ ID NO: 64540 - DNA, 20 bp, Artificial Sequence
  Description of Artificial Sequence: Synthetic oligonucleotide
  Target: ATXN2; (-) strand; PAM type: YTN; PAM sequence: TTG
cgatgtgtcccagggttgtt

SEQ ID NO: 64541 - DNA, 20 bp, Artificial Sequence
  Description of Artificial Sequence: Synthetic oligonucleotide
  Target: ATXN2; (-) strand; PAM type: YTN; PAM sequence: TTT
gcgatgtgtcccagggttgt

SEQ ID NO: 64542 - DNA, 20 bp, Artificial Sequence
  Description of Artificial Sequence: Synthetic oligonucleotide
  Target: ATXN2; (-) strand; PAM type: YTN; PAM sequence: CTT
tgcgatgtgtcccagggttg

SEQ ID NO: 64543 - DNA, 20 bp, Artificial Sequence
  Description of Artificial Sequence: Synthetic oligonucleotide
  Target: ATXN2; (-) strand; PAM type: YTN; PAM sequence: TTG
tagagatggggctttgcgat

SEQ ID NO: 64544 - DNA, 20 bp, Artificial Sequence
  Description of Artificial Sequence: Synthetic oligonucleotide
  Target: ATXN2; (-) strand; PAM type: YTN; PAM sequence: TTT
gtagagatggggctttgcga

SEQ ID NO: 64545 - DNA, 20 bp, Artificial Sequence
  Description of Artificial Sequence: Synthetic oligonucleotide
  Target: ATXN2; (-) strand; PAM type: YTN; PAM sequence: TTT
tgtagagatggggctttgcg

SEQ ID NO: 64546 - DNA, 20 bp, Artificial Sequence
  Description of Artificial Sequence: Synthetic oligonucleotide
  Target: ATXN2; (-) strand; PAM type: YTN; PAM sequence: TTT
ttgtagagatggggctttgc

SEQ ID NO: 64547 - DNA, 20 bp, Artificial Sequence
  Description of Artificial Sequence: Synthetic oligonucleotide
  Target: ATXN2; (-) strand; PAM type: YTN; PAM sequence: TTT
tttgtagagatggggctttg

SEQ ID NO: 64548 - DNA, 20 bp, Artificial Sequence
  Description of Artificial Sequence: Synthetic oligonucleotide
  Target: ATXN2; (-) strand; PAM type: YTN; PAM sequence: TTT
ttttgtagagatggggcttt

SEQ ID NO: 64549 - DNA, 20 bp, Artificial Sequence
  Description of Artificial Sequence: Synthetic oligonucleotide
  Target: ATXN2; (-) strand; PAM type: YTN; PAM sequence: TTT
tttttgtagagatggggctt

SEQ ID NO: 64550 - DNA, 20 bp, Artificial Sequence
  Description of Artificial Sequence: Synthetic oligonucleotide
  Target: ATXN2; (-) strand; PAM type: YTN; PAM sequence: TTT
ttttttgtagagatggggct

SEQ ID NO: 64551 - DNA, 20 bp, Artificial Sequence
  Description of Artificial Sequence: Synthetic oligonucleotide
  Target: ATXN2; (-) strand; PAM type: YTN; PAM sequence: TTT
tttttttgtagagatggggc

SEQ ID NO: 64552 - DNA, 20 bp, Artificial Sequence
  Description of Artificial Sequence: Synthetic oligonucleotide
  Target: ATXN2; (-) strand; PAM type: YTN; PAM sequence: TTT
ttttttttgtagagatgggg

SEQ ID NO: 64553 - DNA, 20 bp, Artificial Sequence
  Description of Artificial Sequence: Synthetic oligonucleotide
  Target: ATXN2; (-) strand; PAM type: YTN; PAM sequence: TTT
tttttttttgtagagatggg

SEQ ID NO: 64554 - DNA, 20 bp, Artificial Sequence
  Description of Artificial Sequence: Synthetic oligonucleotide
  Target: ATXN2; (-) strand; PAM type: YTN; PAM sequence: TTT
ttttttttttgtagagatgg

SEQ ID NO: 64555 - DNA, 20 bp, Artificial Sequence
  Description of Artificial Sequence: Synthetic oligonucleotide
  Target: ATXN2; (-) strand; PAM type: YTN; PAM sequence: TTT
tttttttttttgtagagatg

SEQ ID NO: 64556 - DNA, 20 bp, Artificial Sequence
  Description of Artificial Sequence: Synthetic oligonucleotide
  Target: ATXN2; (-) strand; PAM type: YTN; PAM sequence: TTG
gattttttttttttttgtag

SEQ ID NO: 64557 - DNA, 20 bp, Artificial Sequence
  Description of Artificial Sequence: Synthetic oligonucleotide
  Target: ATXN2; (-) strand; PAM type: YTN; PAM sequence: TTT
ggattttttttttttttgta

SEQ ID NO: 64558 - DNA, 20 bp, Artificial Sequence
  Description of Artificial Sequence: Synthetic oligonucleotide
  Target: ATXN2; (-) strand; PAM type: YTN; PAM sequence: TTT
tggattttttttttttttgt

SEQ ID NO: 64559 - DNA, 20 bp, Artificial Sequence
  Description of Artificial Sequence: Synthetic oligonucleotide
  Target: ATXN2; (-) strand; PAM type: YTN; PAM sequence: TTT
ttggattttttttttttttg

SEQ ID NO: 64560 - DNA, 20 bp, Artificial Sequence
  Description of Artificial Sequence: Synthetic oligonucleotide
  Target: ATXN2; (-) strand; PAM type: YTN; PAM sequence: CTG
atatttttggattttttttt

SEQ ID NO: 64561 - DNA, 20 bp, Artificial Sequence
  Description of Artificial Sequence: Synthetic oligonucleotide
  Target: ATXN2; (-) strand; PAM type: YTN; PAM sequence: CTA
caggcacatgccgtcacata

SEQ ID NO: 64562 - DNA, 20 bp, Artificial Sequence
  Description of Artificial Sequence: Synthetic oligonucleotide
  Target: ATXN2; (-) strand; PAM type: YTN; PAM sequence: CTG
ggactacaggcacatgccgt

SEQ ID NO: 64563 - DNA, 20 bp, Artificial Sequence
  Description of Artificial Sequence: Synthetic oligonucleotide
  Target: ATXN2; (-) strand; PAM type: YTN; PAM sequence: TTC
caagtagctgggactacagg

SEQ ID NO: 64564 - DNA, 20 bp, Artificial Sequence
  Description of Artificial Sequence: Synthetic oligonucleotide
  Target: ATXN2; (-) strand; PAM type: YTN; PAM sequence: CTT
ccaagtagctgggactacag

SEQ ID NO: 64565 - DNA, 20 bp, Artificial Sequence
  Description of Artificial Sequence: Synthetic oligonucleotide
  Target: ATXN2; (-) strand; PAM type: YTN; PAM sequence: TTA
gccttccaagtagctgggac

SEQ ID NO: 64566 - DNA, 20 bp, Artificial Sequence
  Description of Artificial Sequence: Synthetic oligonucleotide
  Target: ATXN2; (-) strand; PAM type: YTN; PAM sequence: CTT
agccttccaagtagctggga

SEQ ID NO: 64567 - DNA, 20 bp, Artificial Sequence
  Description of Artificial Sequence: Synthetic oligonucleotide
  Target: ATXN2; (-) strand; PAM type: YTN; PAM sequence: CTC
ccaccttagccttccaagta

SEQ ID NO: 64568 - DNA, 20 bp, Artificial Sequence
  Description of Artificial Sequence: Synthetic oligonucleotide
  Target: ATXN2; (-) strand; PAM type: YTN; PAM sequence: CTC
aagcaatcctcccaccttag

SEQ ID NO: 64569 - DNA, 20 bp, Artificial Sequence
  Description of Artificial Sequence: Synthetic oligonucleotide
  Target: ATXN2; (-) strand; PAM type: YTN; PAM sequence: CTG
gctcaagcaatcctcccacc

SEQ ID NO: 64570 - DNA, 20 bp, Artificial Sequence
  Description of Artificial Sequence: Synthetic oligonucleotide
  Target: ATXN2; (-) strand; PAM type: YTN; PAM sequence: TTC
ctggctcaagcaatcctccc

SEQ ID NO: 64571 - DNA, 20 bp, Artificial Sequence
  Description of Artificial Sequence: Synthetic oligonucleotide
  Target: ATXN2; (-) strand; PAM type: YTN; PAM sequence: CTT
cctggctcaagcaatcctcc

SEQ ID NO: 64572 - DNA, 20 bp, Artificial Sequence
  Description of Artificial Sequence: Synthetic oligonucleotide
  Target: ATXN2; (-) strand; PAM type: YTN; PAM sequence: CTC
cgccttcctggctcaagcaa

SEQ ID NO: 64573 - DNA, 20 bp, Artificial Sequence
  Description of Artificial Sequence: Synthetic oligonucleotide
  Target: ATXN2; (-) strand; PAM type: YTN; PAM sequence: CTG
caacctccgccttcctggct

SEQ ID NO: 64574 - DNA, 20 bp, Artificial Sequence
  Description of Artificial Sequence: Synthetic oligonucleotide
  Target: ATXN2; (-) strand; PAM type: YTN; PAM sequence: CTC
acctgcaacctccgccttcc

SEQ ID NO: 64575 - DNA, 20 bp, Artificial Sequence
  Description of Artificial Sequence: Synthetic oligonucleotide
  Target: ATXN2; (-) strand; PAM type: YTN; PAM sequence: TTG
gctcacctgcaacctccgcc

SEQ ID NO: 64576 - DNA, 20 bp, Artificial Sequence
  Description of Artificial Sequence: Synthetic oligonucleotide
  Target: ATXN2; (-) strand; PAM type: YTN; PAM sequence: CTT
ggctcacctgcaacctccgc

SEQ ID NO: 64577 - DNA, 20 bp, Artificial Sequence
  Description of Artificial Sequence: Synthetic oligonucleotide
  Target: ATXN2; (-) strand; PAM type: YTN; PAM sequence: CTG
gagtacatgtcatgatcttg

SEQ ID NO: 64578 - DNA, 20 bp, Artificial Sequence
  Description of Artificial Sequence: Synthetic oligonucleotide
  Target: ATXN2; (-) strand; PAM type: YTN; PAM sequence: TTA
cccaggctggagtacatgtc

SEQ ID NO: 64579 - DNA, 20 bp, Artificial Sequence
  Description of Artificial Sequence: Synthetic oligonucleotide
  Target: ATXN2; (-) strand; PAM type: YTN; PAM sequence: CTG
ttacccaggctggagtacat

SEQ ID NO: 64580 - DNA, 20 bp, Artificial Sequence
  Description of Artificial Sequence: Synthetic oligonucleotide
  Target: ATXN2; (-) strand; PAM type: YTN; PAM sequence: CTC
tgttacccaggctggagtac

SEQ ID NO: 64581 - DNA, 20 bp, Artificial Sequence
  Description of Artificial Sequence: Synthetic oligonucleotide
  Target: ATXN2; (-) strand; PAM type: YTN; PAM sequence: CTC
actctgttacccaggctgga

SEQ ID NO: 64582 - DNA, 20 bp, Artificial Sequence
  Description of Artificial Sequence: Synthetic oligonucleotide
  Target: ATXN2; (-) strand; PAM type: YTN; PAM sequence: TTG
taacagagtctcactctgtt

SEQ ID NO: 64583 - DNA, 20 bp, Artificial Sequence
  Description of Artificial Sequence: Synthetic oligonucleotide
  Target: ATXN2; (-) strand; PAM type: YTN; PAM sequence: TTT
gtaacagagtctcactctgt

SEQ ID NO: 64584 - DNA, 20 bp, Artificial Sequence
  Description of Artificial Sequence: Synthetic oligonucleotide
  Target: ATXN2; (-) strand; PAM type: YTN; PAM sequence: TTG
tttgtaacagagtctcactc

SEQ ID NO: 64585 - DNA, 20 bp, Artificial Sequence
  Description of Artificial Sequence: Synthetic oligonucleotide
  Target: ATXN2; (-) strand; PAM type: YTN; PAM sequence: TTT
gtttgtaacagagtctcact

SEQ ID NO: 64586 - DNA, 20 bp, Artificial Sequence
  Description of Artificial Sequence: Synthetic oligonucleotide
  Target: ATXN2; (-) strand; PAM type: YTN; PAM sequence: TTG
tttgtttgtaacagagtctc

SEQ ID NO: 64587 - DNA, 20 bp, Artificial Sequence
  Description of Artificial Sequence: Synthetic oligonucleotide
  Target: ATXN2; (-) strand; PAM type: YTN; PAM sequence: TTT
gtttgtttgtaacagagtct

SEQ ID NO: 64588 - DNA, 20 bp, Artificial Sequence
  Description of Artificial Sequence: Synthetic oligonucleotide
  Target: ATXN2; (-) strand; PAM type: YTN; PAM sequence: TTG
tttgtttgtttgtaacagag

SEQ ID NO: 64589 - DNA, 20 bp, Artificial Sequence
  Description of Artificial Sequence: Synthetic oligonucleotide
  Target: ATXN2; (-) strand; PAM type: YTN; PAM sequence: TTT
gtttgtttgtttgtaacaga

SEQ ID NO: 64590 - DNA, 20 bp, Artificial Sequence
  Description of Artificial Sequence: Synthetic oligonucleotide
  Target: ATXN2; (-) strand; PAM type: YTN; PAM sequence: TTG
tttgtttgtttgtttgtaac

SEQ ID NO: 64591 - DNA, 20 bp, Artificial Sequence
  Description of Artificial Sequence: Synthetic oligonucleotide
  Target: ATXN2; (-) strand; PAM type: YTN; PAM sequence: TTT
gtttgtttgtttgtttgtaa

SEQ ID NO: 64592 - DNA, 20 bp, Artificial Sequence
  Description of Artificial Sequence: Synthetic oligonucleotide
  Target: ATXN2; (-) strand; PAM type: YTN; PAM sequence: TTG
tttgtttgtttgtttgtttg

SEQ ID NO: 64593 - DNA, 20 bp, Artificial Sequence
  Description of Artificial Sequence: Synthetic oligonucleotide
  Target: ATXN2; (-) strand; PAM type: YTN; PAM sequence: TTT
gtttgtttgtttgtttgttt

SEQ ID NO: 64594 - DNA, 20 bp, Artificial Sequence
  Description of Artificial Sequence: Synthetic oligonucleotide
  Target: ATXN2; (-) strand; PAM type: YTN; PAM sequence: TTA
tttgtttgtttgtttgtttg

SEQ ID NO: 64595 - DNA, 20 bp, Artificial Sequence
  Description of Artificial Sequence: Synthetic oligonucleotide
  Target: ATXN2; (-) strand; PAM type: YTN; PAM sequence: TTT
atttgtttgtttgtttgttt

SEQ ID NO: 64596 - DNA, 20 bp, Artificial Sequence
  Description of Artificial Sequence: Synthetic oligonucleotide
  Target: ATXN2; (-) strand; PAM type: YTN; PAM sequence: TTA
tttatttgtttgtttgtttg

SEQ ID NO: 64597 - DNA, 20 bp, Artificial Sequence
  Description of Artificial Sequence: Synthetic oligonucleotide
  Target: ATXN2; (-) strand; PAM type: YTN; PAM sequence: TTT
atttatttgtttgtttgttt

SEQ ID NO: 64598 - DNA, 20 bp, Artificial Sequence
  Description of Artificial Sequence: Synthetic oligonucleotide
  Target: ATXN2; (-) strand; PAM type: YTN; PAM sequence: TTA
tttatttatttgtttgtttg

SEQ ID NO: 64599 - DNA, 20 bp, Artificial Sequence
  Description of Artificial Sequence: Synthetic oligonucleotide
  Target: ATXN2; (-) strand; PAM type: YTN; PAM sequence: TTT
atttatttatttgtttgttt

SEQ ID NO: 64600 - DNA, 20 bp, Artificial Sequence
  Description of Artificial Sequence: Synthetic oligonucleotide
  Target: ATXN2; (-) strand; PAM type: YTN; PAM sequence: TTT
tatttatttatttgtttgtt

SEQ ID NO: 64601 - DNA, 20 bp, Artificial Sequence
  Description of Artificial Sequence: Synthetic oligonucleotide
  Target: ATXN2; (-) strand; PAM type: YTN; PAM sequence: TTT
ttatttatttatttgtttgt

SEQ ID NO: 64602 - DNA, 20 bp, Artificial Sequence
  Description of Artificial Sequence: Synthetic oligonucleotide
  Target: ATXN2; (-) strand; PAM type: YTN; PAM sequence: TTG
aatttttatttatttatttg

SEQ ID NO: 64603 - DNA, 20 bp, Artificial Sequence
  Description of Artificial Sequence: Synthetic oligonucleotide
  Target: ATXN2; (-) strand; PAM type: YTN; PAM sequence: TTT
gaatttttatttatttattt

SEQ ID NO: 64604 - DNA, 20 bp, Artificial Sequence
  Description of Artificial Sequence: Synthetic oligonucleotide
  Target: ATXN2; (-) strand; PAM type: YTN; PAM sequence: TTT
tgaatttttatttatttatt

SEQ ID NO: 64605 - DNA, 20 bp, Artificial Sequence
  Description of Artificial Sequence: Synthetic oligonucleotide
  Target: ATXN2; (-) strand; PAM type: YTN; PAM sequence: TTT
ttgaatttttatttatttat

SEQ ID NO: 64606 - DNA, 20 bp, Artificial Sequence
  Description of Artificial Sequence: Synthetic oligonucleotide
  Target: ATXN2; (-) strand; PAM type: YTN; PAM sequence: TTT
tttgaatttttatttattta

SEQ ID NO: 64607 - DNA, 20 bp, Artificial Sequence
  Description of Artificial Sequence: Synthetic oligonucleotide
  Target: ATXN2; (-) strand; PAM type: YTN; PAM sequence: CTT
ttttgaatttttatttattt

SEQ ID NO: 64608 - DNA, 20 bp, Artificial Sequence
  Description of Artificial Sequence: Synthetic oligonucleotide
  Target: ATXN2; (-) strand; PAM type: YTN; PAM sequence: TTA
acttttttgaatttttattt

SEQ ID NO: 64609 - DNA, 20 bp, Artificial Sequence
  Description of Artificial Sequence: Synthetic oligonucleotide
  Target: ATXN2; (-) strand; PAM type: YTN; PAM sequence: TTT
aacttttttgaatttttatt

SEQ ID NO: 64610 - DNA, 20 bp, Artificial Sequence
  Description of Artificial Sequence: Synthetic oligonucleotide
  Target: ATXN2; (-) strand; PAM type: YTN; PAM sequence: TTT
taacttttttgaatttttat

SEQ ID NO: 64611 - DNA, 20 bp, Artificial Sequence
  Description of Artificial Sequence: Synthetic oligonucleotide
  Target: ATXN2; (-) strand; PAM type: YTN; PAM sequence: TTG
atatgattttaacttttttg

SEQ ID NO: 64612 - DNA, 20 bp, Artificial Sequence
  Description of Artificial Sequence: Synthetic oligonucleotide
  Target: ATXN2; (-) strand; PAM type: YTN; PAM sequence: TTG
tgatcagagaagatagttga

SEQ ID NO: 64613 - DNA, 20 bp, Artificial Sequence
  Description of Artificial Sequence: Synthetic oligonucleotide
  Target: ATXN2; (-) strand; PAM type: YTN; PAM sequence: TTA
ttgtgatcagagaagatagt

SEQ ID NO: 64614 - DNA, 20 bp, Artificial Sequence
  Description of Artificial Sequence: Synthetic oligonucleotide
  Target: ATXN2; (-) strand; PAM type: YTN; PAM sequence: CTT
attgtgatcagagaagatag

SEQ ID NO: 64615 - DNA, 20 bp, Artificial Sequence
  Description of Artificial Sequence: Synthetic oligonucleotide
  Target: ATXN2; (-) strand; PAM type: YTN; PAM sequence: TTA
tcttattgtgatcagagaag

SEQ ID NO: 64616 - DNA, 20 bp, Artificial Sequence
  Description of Artificial Sequence: Synthetic oligonucleotide
  Target: ATXN2; (-) strand; PAM type: YTN; PAM sequence: CTA
gtgttatcttattgtgatca

SEQ ID NO: 64617 - DNA, 20 bp, Artificial Sequence
  Description of Artificial Sequence: Synthetic oligonucleotide
  Target: ATXN2; (-) strand; PAM type: YTN; PAM sequence: CTC
tagtgttatcttattgtgat

SEQ ID NO: 64618 - DNA, 20 bp, Artificial Sequence
  Description of Artificial Sequence: Synthetic oligonucleotide
  Target: ATXN2; (-) strand; PAM type: YTN; PAM sequence: TTA
caggcatgagccaccgtgcc

SEQ ID NO: 64619 - DNA, 20 bp, Artificial Sequence
  Description of Artificial Sequence: Synthetic oligonucleotide
  Target: ATXN2; (-) strand; PAM type: YTN; PAM sequence: CTG
gaattacaggcatgagccac

SEQ ID NO: 64620 - DNA, 20 bp, Artificial Sequence
  Description of Artificial Sequence: Synthetic oligonucleotide
  Target: ATXN2; (-) strand; PAM type: YTN; PAM sequence: CTA
aagtgctggaattacaggca

SEQ ID NO: 64621 - DNA, 20 bp, Artificial Sequence
  Description of Artificial Sequence: Synthetic oligonucleotide
  Target: ATXN2; (-) strand; PAM type: YTN; PAM sequence: CTC
ctaaagtgctggaattacag

SEQ ID NO: 64622 - DNA, 20 bp, Artificial Sequence
  Description of Artificial Sequence: Synthetic oligonucleotide
  Target: ATXN2; (-) strand; PAM type: YTN; PAM sequence: TTG
gcctcctaaagtgctggaat

SEQ ID NO: 64623 - DNA, 20 bp, Artificial Sequence
  Description of Artificial Sequence: Synthetic oligonucleotide
  Target: ATXN2; (-) strand; PAM type: YTN; PAM sequence: CTT
ggcctcctaaagtgctggaa

SEQ ID NO: 64624 - DNA, 20 bp, Artificial Sequence
  Description of Artificial Sequence: Synthetic oligonucleotide
  Target: ATXN2; (-) strand; PAM type: YTN; PAM sequence: CTC
agatgatccacccaccttgg

SEQ ID NO: 64625 - DNA, 20 bp, Artificial Sequence
  Description of Artificial Sequence: Synthetic oligonucleotide
  Target: ATXN2; (-) strand; PAM type: YTN; PAM sequence: CTG
acctcagatgatccacccac

SEQ ID NO: 64626 - DNA, 20 bp, Artificial Sequence
  Description of Artificial Sequence: Synthetic oligonucleotide
  Target: ATXN2; (-) strand; PAM type: YTN; PAM sequence: CTC
ctgacctcagatgatccacc

SEQ ID NO: 64627 - DNA, 20 bp, Artificial Sequence
  Description of Artificial Sequence: Synthetic oligonucleotide
  Target: ATXN2; (-) strand; PAM type: YTN; PAM sequence: CTC
gaactcctgacctcagatga

SEQ ID NO: 64628 - DNA, 20 bp, Artificial Sequence
  Description of Artificial Sequence: Synthetic oligonucleotide
  Target: ATXN2; (-) strand; PAM type: YTN; PAM sequence: CTG
atctcgaactcctgacctca

SEQ ID NO: 64629 - DNA, 20 bp, Artificial Sequence
  Description of Artificial Sequence: Synthetic oligonucleotide
  Target: ATXN2; (-) strand; PAM type: YTN; PAM sequence: TTG
gtcaagctgatctcgaactc

SEQ ID NO: 64630 - DNA, 20 bp, Artificial Sequence
  Description of Artificial Sequence: Synthetic oligonucleotide
  Target: ATXN2; (-) strand; PAM type: YTN; PAM sequence: TTC
accatgttggtcaagctgat

SEQ ID NO: 64631 - DNA, 20 bp, Artificial Sequence
  Description of Artificial Sequence: Synthetic oligonucleotide
  Target: ATXN2; (-) strand; PAM type: YTN; PAM sequence: TTT
caccatgttggtcaagctga

SEQ ID NO: 64632 - DNA, 20 bp, Artificial Sequence
  Description of Artificial Sequence: Synthetic oligonucleotide
  Target: ATXN2; (-) strand; PAM type: YTN; PAM sequence: TTA
gtagagagggggtttcacca

SEQ ID NO: 64633 - DNA, 20 bp, Artificial Sequence
  Description of Artificial Sequence: Synthetic oligonucleotide
  Target: ATXN2; (-) strand; PAM type: YTN; PAM sequence: TTT
agtagagagggggtttcacc

SEQ ID NO: 64634 - DNA, 20 bp, Artificial Sequence
  Description of Artificial Sequence: Synthetic oligonucleotide
  Target: ATXN2; (-) strand; PAM type: YTN; PAM sequence: TTT
tagtagagagggggtttcac

SEQ ID NO: 64635 - DNA, 20 bp, Artificial Sequence
  Description of Artificial Sequence: Synthetic oligonucleotide
  Target: ATXN2; (-) strand; PAM type: YTN; PAM sequence: TTT
ttagtagagagggggtttca

SEQ ID NO: 64636 - DNA, 20 bp, Artificial Sequence
  Description of Artificial Sequence: Synthetic oligonucleotide
  Target: ATXN2; (-) strand; PAM type: YTN; PAM sequence: TTG
tatttttagtagagaggggg

SEQ ID NO: 64637 - DNA, 20 bp, Artificial Sequence
  Description of Artificial Sequence: Synthetic oligonucleotide
  Target: ATXN2; (-) strand; PAM type: YTN; PAM sequence: TTT
gtatttttagtagagagggg

SEQ ID NO: 64638 - DNA, 20 bp, Artificial Sequence
  Description of Artificial Sequence: Synthetic oligonucleotide
  Target: ATXN2; (-) strand; PAM type: YTN; PAM sequence: TTT
tgtatttttagtagagaggg

SEQ ID NO: 64639 - DNA, 20 bp, Artificial Sequence
  Description of Artificial Sequence: Synthetic oligonucleotide
  Target: ATXN2; (-) strand; PAM type: YTN; PAM sequence: TTT
ttgtatttttagtagagagg

SEQ ID NO: 64640 - DNA, 20 bp, Artificial Sequence
  Description of Artificial Sequence: Synthetic oligonucleotide
  Target: ATXN2; (-) strand; PAM type: YTN; PAM sequence: TTT
tttgtatttttagtagagag

SEQ ID NO: 64641 - DNA, 20 bp, Artificial Sequence
  Description of Artificial Sequence: Synthetic oligonucleotide
  Target: ATXN2; (-) strand; PAM type: YTN; PAM sequence: TTT
ttttgtatttttagtagaga

SEQ ID NO: 64642 - DNA, 20 bp, Artificial Sequence
  Description of Artificial Sequence: Synthetic oligonucleotide
  Target: ATXN2; (-) strand; PAM type: YTN; PAM sequence: TTT
tttttgtatttttagtagag

SEQ ID NO: 64643 - DNA, 20 bp, Artificial Sequence
  Description of Artificial Sequence: Synthetic oligonucleotide
  Target: ATXN2; (-) strand; PAM type: YTN; PAM sequence: TTT
ttttttgtatttttagtaga

SEQ ID NO: 64644 - DNA, 20 bp, Artificial Sequence
  Description of Artificial Sequence: Synthetic oligonucleotide
  Target: ATXN2; (-) strand; PAM type: YTN; PAM sequence: CTA
atttttttttgtatttttag

SEQ ID NO: 64645 - DNA, 20 bp, Artificial Sequence
  Description of Artificial Sequence: Synthetic oligonucleotide
  Target: ATXN2; (-) strand; PAM type: YTN; PAM sequence: CTG
gctaatttttttttgtattt

SEQ ID NO: 64646 - DNA, 20 bp, Artificial Sequence
  Description of Artificial Sequence: Synthetic oligonucleotide
  Target: ATXN2; (-) strand; PAM type: YTN; PAM sequence: CTC
ctggctaatttttttttgta

SEQ ID NO: 64647 - DNA, 20 bp, Artificial Sequence
  Description of Artificial Sequence: Synthetic oligonucleotide
  Target: ATXN2; (-) strand; PAM type: YTN; PAM sequence: TTA
caggcatgtaccaccactcc

SEQ ID NO: 64648 - DNA, 20 bp, Artificial Sequence
  Description of Artificial Sequence: Synthetic oligonucleotide
  Target: ATXN2; (-) strand; PAM type: YTN; PAM sequence: CTG
ggattacaggcatgtaccac

SEQ ID NO: 64649 - DNA, 20 bp, Artificial Sequence
  Description of Artificial Sequence: Synthetic oligonucleotide
  Target: ATXN2; (-) strand; PAM type: YTN; PAM sequence: CTG
agtagctgggattacaggca

SEQ ID NO: 64650 - DNA, 20 bp, Artificial Sequence
  Description of Artificial Sequence: Synthetic oligonucleotide
  Target: ATXN2; (-) strand; PAM type: YTN; PAM sequence: CTC
ctgagtagctgggattacag

SEQ ID NO: 64651 - DNA, 20 bp, Artificial Sequence
  Description of Artificial Sequence: Synthetic oligonucleotide
  Target: ATXN2; (-) strand; PAM type: YTN; PAM sequence: CTC
agcctcctgagtagctggga

SEQ ID NO: 64652 - DNA, 20 bp, Artificial Sequence
  Description of Artificial Sequence: Synthetic oligonucleotide
  Target: ATXN2; (-) strand; PAM type: YTN; PAM sequence: CTG
cctcagcctcctgagtagct

SEQ ID NO: 64653 - DNA, 20 bp, Artificial Sequence
  Description of Artificial Sequence: Synthetic oligonucleotide
  Target: ATXN2; (-) strand; PAM type: YTN; PAM sequence: TTC
tgcctcagcctcctgagtag

SEQ ID NO: 64654 - DNA, 20 bp, Artificial Sequence
  Description of Artificial Sequence: Synthetic oligonucleotide
  Target: ATXN2; (-) strand; PAM type: YTN; PAM sequence: CTT
ctgcctcagcctcctgagta

SEQ ID NO: 64655 - DNA, 20 bp, Artificial Sequence
  Description of Artificial Sequence: Synthetic oligonucleotide
  Target: ATXN2; (-) strand; PAM type: YTN; PAM sequence: TTC
ttctgcctcagcctcctgag

SEQ ID NO: 64656 - DNA, 20 bp, Artificial Sequence
  Description of Artificial Sequence: Synthetic oligonucleotide
  Target: ATXN2; (-) strand; PAM type: YTN; PAM sequence: TTC
aagtgattcttctgcctcag

SEQ ID NO: 64657 - DNA, 20 bp, Artificial Sequence
  Description of Artificial Sequence: Synthetic oligonucleotide
  Target: ATXN2; (-) strand; PAM type: YTN; PAM sequence: CTC
cccagttcaagtgattcttc

SEQ ID NO: 64658 - DNA, 20 bp, Artificial Sequence
  Description of Artificial Sequence: Synthetic oligonucleotide
  Target: ATXN2; (-) strand; PAM type: YTN; PAM sequence: CTG
cctccccagttcaagtgatt

SEQ ID NO: 64659 - DNA, 20 bp, Artificial Sequence
  Description of Artificial Sequence: Synthetic oligonucleotide
  Target: ATXN2; (-) strand; PAM type: YTN; PAM sequence: CTC
tgcctccccagttcaagtga

SEQ ID NO: 64660 - DNA, 20 bp, Artificial Sequence
  Description of Artificial Sequence: Synthetic oligonucleotide
  Target: ATXN2; (-) strand; PAM type: YTN; PAM sequence: CTG
caacctctgcctccccagtt

SEQ ID NO: 64661 - DNA, 20 bp, Artificial Sequence
  Description of Artificial Sequence: Synthetic oligonucleotide
  Target: ATXN2; (-) strand; PAM type: YTN; PAM sequence: TTA
ctgcaacctctgcctcccca

SEQ ID NO: 64662 - DNA, 20 bp, Artificial Sequence
  Description of Artificial Sequence: Synthetic oligonucleotide
  Target: ATXN2; (-) strand; PAM type: YTN; PAM sequence: CTT
actgcaacctctgcctcccc

SEQ ID NO: 64663 - DNA, 20 bp, Artificial Sequence
  Description of Artificial Sequence: Synthetic oligonucleotide
  Target: ATXN2; (-) strand; PAM type: YTN; PAM sequence: CTC
ggcttactgcaacctctgcc

SEQ ID NO: 64664 - DNA, 20 bp, Artificial Sequence
  Description of Artificial Sequence: Synthetic oligonucleotide
  Target: ATXN2; (-) strand; PAM type: YTN; PAM sequence: CTG
gagtgtagtggcgcgatctc

SEQ ID NO: 64665 - DNA, 20 bp, Artificial Sequence
  Description of Artificial Sequence: Synthetic oligonucleotide
  Target: ATXN2; (-) strand; PAM type: YTN; PAM sequence: CTG
tcacccatgctggagtgtag

SEQ ID NO: 64666 - DNA, 20 bp, Artificial Sequence
  Description of Artificial Sequence: Synthetic oligonucleotide
  Target: ATXN2; (-) strand; PAM type: YTN; PAM sequence: CTC
tgtcacccatgctggagtgt

SEQ ID NO: 64667 - DNA, 20 bp, Artificial Sequence
  Description of Artificial Sequence: Synthetic oligonucleotide
  Target: ATXN2; (-) strand; PAM type: YTN; PAM sequence: CTC
gctctgtcacccatgctgga

SEQ ID NO: 64668 - DNA, 20 bp, Artificial Sequence
  Description of Artificial Sequence: Synthetic oligonucleotide
  Target: ATXN2; (-) strand; PAM type: YTN; PAM sequence: TTG
agatggagtctcgctctgtc

SEQ ID NO: 64669 - DNA, 20 bp, Artificial Sequence
  Description of Artificial Sequence: Synthetic oligonucleotide
  Target: ATXN2; (-) strand; PAM type: YTN; PAM sequence: TTT
gagatggagtctcgctctgt

SEQ ID NO: 64670 - DNA, 20 bp, Artificial Sequence
  Description of Artificial Sequence: Synthetic oligonucleotide
  Target: ATXN2; (-) strand; PAM type: YTN; PAM sequence: TTT
tgagatggagtctcgctctg

SEQ ID NO: 64671 - DNA, 20 bp, Artificial Sequence
  Description of Artificial Sequence: Synthetic oligonucleotide
  Target: ATXN2; (-) strand; PAM type: YTN; PAM sequence: TTT
ttgagatggagtctcgctct

SEQ ID NO: 64672 - DNA, 20 bp, Artificial Sequence
  Description of Artificial Sequence: Synthetic oligonucleotide
  Target: ATXN2; (-) strand; PAM type: YTN; PAM sequence: TTT
tttgagatggagtctcgctc

SEQ ID NO: 64673 - DNA, 20 bp, Artificial Sequence
  Description of Artificial Sequence: Synthetic oligonucleotide
  Target: ATXN2; (-) strand; PAM type: YTN; PAM sequence: TTT
ttttgagatggagtctcgct

SEQ ID NO: 64674 - DNA, 20 bp, Artificial Sequence
  Description of Artificial Sequence: Synthetic oligonucleotide
  Target: ATXN2; (-) strand; PAM type: YTN; PAM sequence: TTG
tttttttgagatggagtctc

SEQ ID NO: 64675 - DNA, 20 bp, Artificial Sequence
  Description of Artificial Sequence: Synthetic oligonucleotide
  Target: ATXN2; (-) strand; PAM type: YTN; PAM sequence: TTT
gtttttttgagatggagtct

SEQ ID NO: 64676 - DNA, 20 bp, Artificial Sequence
  Description of Artificial Sequence: Synthetic oligonucleotide
  Target: ATXN2; (-) strand; PAM type: YTN; PAM sequence: TTT
tgtttttttgagatggagtc

SEQ ID NO: 64677 - DNA, 20 bp, Artificial Sequence
  Description of Artificial Sequence: Synthetic oligonucleotide
  Target: ATXN2; (-) strand; PAM type: YTN; PAM sequence: TTT
ttgtttttttgagatggagt

SEQ ID NO: 64678 - DNA, 20 bp, Artificial Sequence
  Description of Artificial Sequence: Synthetic oligonucleotide
  Target: ATXN2; (-) strand; PAM type: YTN; PAM sequence: TTA
tttttgtttttttgagatgg

SEQ ID NO: 64679 - DNA, 20 bp, Artificial Sequence
  Description of Artificial Sequence: Synthetic oligonucleotide
  Target: ATXN2; (-) strand; PAM type: YTN; PAM sequence: TTT
atttttgtttttttgagatg

SEQ ID NO: 64680 - DNA, 20 bp, Artificial Sequence
  Description of Artificial Sequence: Synthetic oligonucleotide
  Target: ATXN2; (-) strand; PAM type: YTN; PAM sequence: TTT
tatttttgtttttttgagat

SEQ ID NO: 64681 - DNA, 20 bp, Artificial Sequence
  Description of Artificial Sequence: Synthetic oligonucleotide
  Target: ATXN2; (-) strand; PAM type: YTN; PAM sequence: TTT
ttatttttgtttttttgaga

SEQ ID NO: 64682 - DNA, 20 bp, Artificial Sequence
  Description of Artificial Sequence: Synthetic oligonucleotide
  Target: ATXN2; (-) strand; PAM type: YTN; PAM sequence: TTA
tttttatttttgtttttttg

SEQ ID NO: 64683 - DNA, 20 bp, Artificial Sequence
  Description of Artificial Sequence: Synthetic oligonucleotide
  Target: ATXN2; (-) strand; PAM type: YTN; PAM sequence: TTT
atttttatttttgttttttt

SEQ ID NO: 64684 - DNA, 20 bp, Artificial Sequence
  Description of Artificial Sequence: Synthetic oligonucleotide
  Target: ATXN2; (-) strand; PAM type: YTN; PAM sequence: TTT
tatttttatttttgtttttt

SEQ ID NO: 64685 - DNA, 20 bp, Artificial Sequence
  Description of Artificial Sequence: Synthetic oligonucleotide
  Target: ATXN2; (-) strand; PAM type: YTN; PAM sequence: TTA
ttttatttttatttttgttt

SEQ ID NO: 64686 - DNA, 20 bp, Artificial Sequence
  Description of Artificial Sequence: Synthetic oligonucleotide
  Target: ATXN2; (-) strand; PAM type: YTN; PAM sequence: TTT
attttatttttatttttgtt

SEQ ID NO: 64687 - DNA, 20 bp, Artificial Sequence
  Description of Artificial Sequence: Synthetic oligonucleotide
  Target: ATXN2; (-) strand; PAM type: YTN; PAM sequence: TTT
tattttatttttatttttgt

SEQ ID NO: 64688 - DNA, 20 bp, Artificial Sequence
  Description of Artificial Sequence: Synthetic oligonucleotide
  Target: ATXN2; (-) strand; PAM type: YTN; PAM sequence: TTA
ttttattttatttttatttt

SEQ ID NO: 64689 - DNA, 20 bp, Artificial Sequence
  Description of Artificial Sequence: Synthetic oligonucleotide
  Target: ATXN2; (-) strand; PAM type: YTN; PAM sequence: CTA
gtgttattttattttatttt

SEQ ID NO: 64690 - DNA, 20 bp, Artificial Sequence
  Description of Artificial Sequence: Synthetic oligonucleotide
  Target: ATXN2; (-) strand; PAM type: YTN; PAM sequence: TTA
tctagtgttattttatttta

SEQ ID NO: 64691 - DNA, 20 bp, Artificial Sequence
  Description of Artificial Sequence: Synthetic oligonucleotide
  Target: ATXN2; (-) strand; PAM type: YTN; PAM sequence: TTG
ttatctagtgttattttatt

SEQ ID NO: 64692 - DNA, 20 bp, Artificial Sequence
  Description of Artificial Sequence: Synthetic oligonucleotide
  Target: ATXN2; (-) strand; PAM type: YTN; PAM sequence: CTT
gttatctagtgttattttat

SEQ ID NO: 64693 - DNA, 20 bp, Artificial Sequence
  Description of Artificial Sequence: Synthetic oligonucleotide
  Target: ATXN2; (-) strand; PAM type: YTN; PAM sequence: CTC
ttgttatctagtgttatttt

SEQ ID NO: 64694 - DNA, 20 bp, Artificial Sequence
  Description of Artificial Sequence: Synthetic oligonucleotide
  Target: ATXN2; (-) strand; PAM type: YTN; PAM sequence: TTC
ctcttgttatctagtgttat

SEQ ID NO: 64695 - DNA, 20 bp, Artificial Sequence
  Description of Artificial Sequence: Synthetic oligonucleotide
  Target: ATXN2; (-) strand; PAM type: YTN; PAM sequence: TTC
caaagttcctcttgttatct

SEQ ID NO: 64696 - DNA, 20 bp, Artificial Sequence
  Description of Artificial Sequence: Synthetic oligonucleotide
  Target: ATXN2; (-) strand; PAM type: YTN; PAM sequence: TTT
ccaaagttcctcttgttatc

SEQ ID NO: 64697 - DNA, 20 bp, Artificial Sequence
  Description of Artificial Sequence: Synthetic oligonucleotide
  Target: ATXN2; (-) strand; PAM type: YTN; PAM sequence: CTT
tccaaagttcctcttgttat

SEQ ID NO: 64698 - DNA, 20 bp, Artificial Sequence
  Description of Artificial Sequence: Synthetic oligonucleotide
  Target: ATXN2; (-) strand; PAM type: YTN; PAM sequence: TTG
tatactttccaaagttcctc

SEQ ID NO: 64699 - DNA, 20 bp, Artificial Sequence
  Description of Artificial Sequence: Synthetic oligonucleotide
  Target: ATXN2; (-) strand; PAM type: YTN; PAM sequence: TTT
gtatactttccaaagttcct

SEQ ID NO: 64700 - DNA, 20 bp, Artificial Sequence
  Description of Artificial Sequence: Synthetic oligonucleotide
  Target: ATXN2; (-) strand; PAM type: YTN; PAM sequence: TTC
atgtatttgtatactttcca

SEQ ID NO: 64701 - DNA, 20 bp, Artificial Sequence
  Description of Artificial Sequence: Synthetic oligonucleotide
  Target: ATXN2; (-) strand; PAM type: YTN; PAM sequence: TTT
catgtatttgtatactttcc

SEQ ID NO: 64702 - DNA, 20 bp, Artificial Sequence
  Description of Artificial Sequence: Synthetic oligonucleotide
  Target: ATXN2; (-) strand; PAM type: YTN; PAM sequence: TTT
tcatgtatttgtatactttc

SEQ ID NO: 64703 - DNA, 20 bp, Artificial Sequence
  Description of Artificial Sequence: Synthetic oligonucleotide
  Target: ATXN2; (-) strand; PAM type: YTN; PAM sequence: TTA
attttcatgtatttgtatac

SEQ ID NO: 64704 - DNA, 20 bp, Artificial Sequence
  Description of Artificial Sequence: Synthetic oligonucleotide
  Target: ATXN2; (-) strand; PAM type: YTN; PAM sequence: CTT
aattttcatgtatttgtata

SEQ ID NO: 64705 - DNA, 20 bp, Artificial Sequence
  Description of Artificial Sequence: Synthetic oligonucleotide
  Target: ATXN2; (-) strand; PAM type: YTN; PAM sequence: TTG
cttaattttcatgtatttgt

SEQ ID NO: 64706 - DNA, 20 bp, Artificial Sequence
  Description of Artificial Sequence: Synthetic oligonucleotide
  Target: ATXN2; (-) strand; PAM type: YTN; PAM sequence: TTC
aggagcatattgcttaattt

SEQ ID NO: 64707 - DNA, 20 bp, Artificial Sequence
  Description of Artificial Sequence: Synthetic oligonucleotide
  Target: ATXN2; (-) strand; PAM type: YTN; PAM sequence: CTG
gtcattcaggagcatattgc

SEQ ID NO: 64708 - DNA, 20 bp, Artificial Sequence
  Description of Artificial Sequence: Synthetic oligonucleotide
  Target: ATXN2; (-) strand; PAM type: YTN; PAM sequence: TTC
atggacccactggtcattca

SEQ ID NO: 64709 - DNA, 20 bp, Artificial Sequence
  Description of Artificial Sequence: Synthetic oligonucleotide
  Target: ATXN2; (-) strand; PAM type: YTN; PAM sequence: CTT
catggacccactggtcattc

SEQ ID NO: 64710 - DNA, 20 bp, Artificial Sequence
  Description of Artificial Sequence: Synthetic oligonucleotide
  Target: ATXN2; (-) strand; PAM type: YTN; PAM sequence: TTC
ttcatggacccactggtcat

SEQ ID NO: 64711 - DNA, 20 bp, Artificial Sequence
  Description of Artificial Sequence: Synthetic oligonucleotide
  Target: ATXN2; (-) strand; PAM type: YTN; PAM sequence: TTT
cttcatggacccactggtca

SEQ ID NO: 64712 - DNA, 20 bp, Artificial Sequence
  Description of Artificial Sequence: Synthetic oligonucleotide
  Target: ATXN2; (-) strand; PAM type: YTN; PAM sequence: TTA
atttcttcatggacccactg

SEQ ID NO: 64713 - DNA, 20 bp, Artificial Sequence
  Description of Artificial Sequence: Synthetic oligonucleotide
  Target: ATXN2; (-) strand; PAM type: YTN; PAM sequence: CTT
aatttcttcatggacccact

SEQ ID NO: 64714 - DNA, 20 bp, Artificial Sequence
  Description of Artificial Sequence: Synthetic oligonucleotide
  Target: ATXN2; (-) strand; PAM type: YTN; PAM sequence: TTC
ttaatttcttcatggaccca

SEQ ID NO: 64715 - DNA, 20 bp, Artificial Sequence
  Description of Artificial Sequence: Synthetic oligonucleotide
  Target: ATXN2; (-) strand; PAM type: YTN; PAM sequence: CTT
cttaatttcttcatggaccc

SEQ ID NO: 64716 - DNA, 20 bp, Artificial Sequence
  Description of Artificial Sequence: Synthetic oligonucleotide
  Target: ATXN2; (-) strand; PAM type: YTN; PAM sequence: TTC
ttcttaatttcttcatggac

SEQ ID NO: 64717 - DNA, 20 bp, Artificial Sequence
  Description of Artificial Sequence: Synthetic oligonucleotide
  Target: ATXN2; (-) strand; PAM type: YTN; PAM sequence: TTT
cttcttaatttcttcatgga

SEQ ID NO: 64718 - DNA, 20 bp, Artificial Sequence
  Description of Artificial Sequence: Synthetic oligonucleotide
  Target: ATXN2; (-) strand; PAM type: YTN; PAM sequence: TTT
tcttcttaatttcttcatgg

SEQ ID NO: 64719 - DNA, 20 bp, Artificial Sequence
  Description of Artificial Sequence: Synthetic oligonucleotide
  Target: ATXN2; (-) strand; PAM type: YTN; PAM sequence: TTC
cagttttcttcttaatttct

SEQ ID NO: 64720 - DNA, 20 bp, Artificial Sequence
  Description of Artificial Sequence: Synthetic oligonucleotide
  Target: ATXN2; (-) strand; PAM type: YTN; PAM sequence: TTT
ccagttttcttcttaatttc

SEQ ID NO: 64721 - DNA, 20 bp, Artificial Sequence
  Description of Artificial Sequence: Synthetic oligonucleotide
  Target: ATXN2; (-) strand; PAM type: YTN; PAM sequence: TTT
tccagttttcttcttaattt

SEQ ID NO: 64722 - DNA, 20 bp, Artificial Sequence
  Description of Artificial Sequence: Synthetic oligonucleotide
  Target: ATXN2; (-) strand; PAM type: YTN; PAM sequence: TTC
aaggaattttccagttttct

SEQ ID NO: 64723 - DNA, 20 bp, Artificial Sequence
  Description of Artificial Sequence: Synthetic oligonucleotide
  Target: ATXN2; (-) strand; PAM type: YTN; PAM sequence: TTT
caaggaattttccagttttc

SEQ ID NO: 64724 - DNA, 20 bp, Artificial Sequence
  Description of Artificial Sequence: Synthetic oligonucleotide
  Target: ATXN2; (-) strand; PAM type: YTN; PAM sequence: TTG
tttcaaggaattttccagtt

SEQ ID NO: 64725 - DNA, 20 bp, Artificial Sequence
  Description of Artificial Sequence: Synthetic oligonucleotide
  Target: ATXN2; (-) strand; PAM type: YTN; PAM sequence: TTT
gtttcaaggaattttccagt

SEQ ID NO: 64726 - DNA, 20 bp, Artificial Sequence
  Description of Artificial Sequence: Synthetic oligonucleotide
  Target: ATXN2; (-) strand; PAM type: YTN; PAM sequence: TTC
atttgtttcaaggaattttc

SEQ ID NO: 64727 - DNA, 20 bp, Artificial Sequence
  Description of Artificial Sequence: Synthetic oligonucleotide
  Target: ATXN2; (-) strand; PAM type: YTN; PAM sequence: TTT
catttgtttcaaggaatttt

SEQ ID NO: 64728 - DNA, 20 bp, Artificial Sequence
  Description of Artificial Sequence: Synthetic oligonucleotide
  Target: ATXN2; (-) strand; PAM type: YTN; PAM sequence: TTT
tcatttgtttcaaggaattt

SEQ ID NO: 64729 - DNA, 20 bp, Artificial Sequence
  Description of Artificial Sequence: Synthetic oligonucleotide
  Target: ATXN2; (-) strand; PAM type: YTN; PAM sequence: TTC
cattttcatttgtttcaagg

SEQ ID NO: 64730 - DNA, 20 bp, Artificial Sequence
  Description of Artificial Sequence: Synthetic oligonucleotide
  Target: ATXN2; (-) strand; PAM type: YTN; PAM sequence: TTT
ccattttcatttgtttcaag

SEQ ID NO: 64731 - DNA, 20 bp, Artificial Sequence
  Description of Artificial Sequence: Synthetic oligonucleotide
  Target: ATXN2; (-) strand; PAM type: YTN; PAM sequence: CTG
tgtttccattttcatttgtt

SEQ ID NO: 64732 - DNA, 20 bp, Artificial Sequence
  Description of Artificial Sequence: Synthetic oligonucleotide
  Target: ATXN2; (-) strand; PAM type: YTN; PAM sequence: TTG
ataagctgtgtttccatttt

SEQ ID NO: 64733 - DNA, 20 bp, Artificial Sequence
  Description of Artificial Sequence: Synthetic oligonucleotide
  Target: ATXN2; (-) strand; PAM type: YTN; PAM sequence: TTT
gataagctgtgtttccattt

SEQ ID NO: 64734 - DNA, 20 bp, Artificial Sequence
  Description of Artificial Sequence: Synthetic oligonucleotide
  Target: ATXN2; (-) strand; PAM type: YTN; PAM sequence: TTT
tgataagctgtgtttccatt

SEQ ID NO: 64735 - DNA, 20 bp, Artificial Sequence
  Description of Artificial Sequence: Synthetic oligonucleotide
  Target: ATXN2; (-) strand; PAM type: YTN; PAM sequence: CTA
taggttttgataagctgtgt

SEQ ID NO: 64736 - DNA, 20 bp, Artificial Sequence
  Description of Artificial Sequence: Synthetic oligonucleotide
  Target: ATXN2; (-) strand; PAM type: YTN; PAM sequence: CTG
tatcctataggttttgataa

SEQ ID NO: 64737 - DNA, 20 bp, Artificial Sequence
  Description of Artificial Sequence: Synthetic oligonucleotide
  Target: ATXN2; (-) strand; PAM type: YTN; PAM sequence: TTA
ctgtatcctataggttttga

SEQ ID NO: 64738 - DNA, 20 bp, Artificial Sequence
  Description of Artificial Sequence: Synthetic oligonucleotide
  Target: ATXN2; (-) strand; PAM type: YTN; PAM sequence: TTT
actgtatcctataggttttg

SEQ ID NO: 64739 - DNA, 20 bp, Artificial Sequence
  Description of Artificial Sequence: Synthetic oligonucleotide
  Target: ATXN2; (-) strand; PAM type: YTN; PAM sequence: TTT
tactgtatcctataggtttt

SEQ ID NO: 64740 - DNA, 20 bp, Artificial Sequence
  Description of Artificial Sequence: Synthetic oligonucleotide
  Target: ATXN2; (-) strand; PAM type: YTN; PAM sequence: CTT
ttactgtatcctataggttt

SEQ ID NO: 64741 - DNA, 20 bp, Artificial Sequence
  Description of Artificial Sequence: Synthetic oligonucleotide
  Target: ATXN2; (-) strand; PAM type: YTN; PAM sequence: TTG
cttttactgtatcctatagg

SEQ ID NO: 64742 - DNA, 20 bp, Artificial Sequence
  Description of Artificial Sequence: Synthetic oligonucleotide
  Target: ATXN2; (-) strand; PAM type: YTN; PAM sequence: TTG
ttgcttttactgtatcctat

SEQ ID NO: 64743 - DNA, 20 bp, Artificial Sequence
  Description of Artificial Sequence: Synthetic oligonucleotide
  Target: ATXN2; (-) strand; PAM type: YTN; PAM sequence: TTA
ttgttgcttttactgtatcc

SEQ ID NO: 64744 - DNA, 20 bp, Artificial Sequence
  Description of Artificial Sequence: Synthetic oligonucleotide
  Target: ATXN2; (-) strand; PAM type: YTN; PAM sequence: CTT
attgttgcttttactgtatc

SEQ ID NO: 64745 - DNA, 20 bp, Artificial Sequence
  Description of Artificial Sequence: Synthetic oligonucleotide
  Target: ATXN2; (-) strand; PAM type: YTN; PAM sequence: CTC
ttattgttgcttttactgta

SEQ ID NO: 64746 - DNA, 20 bp, Artificial Sequence
  Description of Artificial Sequence: Synthetic oligonucleotide
  Target: ATXN2; (-) strand; PAM type: YTN; PAM sequence: TTC
ctcttattgttgcttttact

SEQ ID NO: 64747 - DNA, 20 bp, Artificial Sequence
  Description of Artificial Sequence: Synthetic oligonucleotide
  Target: ATXN2; (-) strand; PAM type: YTN; PAM sequence: CTG
taaacattcctcttattgtt

SEQ ID NO: 64748 - DNA, 20 bp, Artificial Sequence
  Description of Artificial Sequence: Synthetic oligonucleotide
  Target: ATXN2; (-) strand; PAM type: YTN; PAM sequence: CTG
ctgtaaacattcctcttatt

SEQ ID NO: 64749 - DNA, 20 bp, Artificial Sequence
  Description of Artificial Sequence: Synthetic oligonucleotide
  Target: ATXN2; (-) strand; PAM type: YTN; PAM sequence: TTA
ctgctgtaaacattcctctt

SEQ ID NO: 64750 - DNA, 20 bp, Artificial Sequence
  Description of Artificial Sequence: Synthetic oligonucleotide
  Target: ATXN2; (-) strand; PAM type: YTN; PAM sequence: CTT
actgctgtaaacattcctct

SEQ ID NO: 64751 - DNA, 20 bp, Artificial Sequence
  Description of Artificial Sequence: Synthetic oligonucleotide
  Target: ATXN2; (-) strand; PAM type: YTN; PAM sequence: TTG
atgtaggcacttactgctgt

SEQ ID NO: 64752 - DNA, 20 bp, Artificial Sequence
  Description of Artificial Sequence: Synthetic oligonucleotide
  Target: ATXN2; (-) strand; PAM type: YTN; PAM sequence: TTT
gatgtaggcacttactgctg

SEQ ID NO: 64753 - DNA, 20 bp, Artificial Sequence
  Description of Artificial Sequence: Synthetic oligonucleotide
  Target: ATXN2; (-) strand; PAM type: YTN; PAM sequence: TTT
tgatgtaggcacttactgct

SEQ ID NO: 64754 - DNA, 20 bp, Artificial Sequence
  Description of Artificial Sequence: Synthetic oligonucleotide
  Target: ATXN2; (-) strand; PAM type: YTN; PAM sequence: TTT
ttgatgtaggcacttactgc

SEQ ID NO: 64755 - DNA, 20 bp, Artificial Sequence
  Description of Artificial Sequence: Synthetic oligonucleotide
  Target: ATXN2; (-) strand; PAM type: YTN; PAM sequence: TTT
tttgatgtaggcacttactg

SEQ ID NO: 64756 - DNA, 20 bp, Artificial Sequence
  Description of Artificial Sequence: Synthetic oligonucleotide
  Target: ATXN2; (-) strand; PAM type: YTN; PAM sequence: CTT
ttttgatgtaggcacttact

SEQ ID NO: 64757 - DNA, 20 bp, Artificial Sequence
  Description of Artificial Sequence: Synthetic oligonucleotide
  Target: ATXN2; (-) strand; PAM type: YTN; PAM sequence: TTC
cacttttttgatgtaggcac

SEQ ID NO: 64758 - DNA, 20 bp, Artificial Sequence
  Description of Artificial Sequence: Synthetic oligonucleotide
  Target: ATXN2; (-) strand; PAM type: YTN; PAM sequence: TTT
ccacttttttgatgtaggca

SEQ ID NO: 64759 - DNA, 20 bp, Artificial Sequence
  Description of Artificial Sequence: Synthetic oligonucleotide
  Target: ATXN2; (-) strand; PAM type: YTN; PAM sequence: TTT
tccacttttttgatgtaggc

SEQ ID NO: 64760 - DNA, 20 bp, Artificial Sequence
  Description of Artificial Sequence: Synthetic oligonucleotide
  Target: ATXN2; (-) strand; PAM type: YTN; PAM sequence: TTT
ttccacttttttgatgtagg

SEQ ID NO: 64761 - DNA, 20 bp, Artificial Sequence
  Description of Artificial Sequence: Synthetic oligonucleotide
  Target: ATXN2; (-) strand; PAM type: YTN; PAM sequence: TTG
gcagatgaagtttttccact

SEQ ID NO: 64762 - DNA, 20 bp, Artificial Sequence
  Description of Artificial Sequence: Synthetic oligonucleotide
  Target: ATXN2; (-) strand; PAM type: YTN; PAM sequence: TTA
ggatgtattggcagatgaag

SEQ ID NO: 64763 - DNA, 20 bp, Artificial Sequence
  Description of Artificial Sequence: Synthetic oligonucleotide
  Target: ATXN2; (-) strand; PAM type: YTN; PAM sequence: TTT
aggatgtattggcagatgaa

SEQ ID NO: 64764 - DNA, 20 bp, Artificial Sequence
  Description of Artificial Sequence: Synthetic oligonucleotide
  Target: ATXN2; (-) strand; PAM type: YTN; PAM sequence: CTT
taggatgtattggcagatga

SEQ ID NO: 64765 - DNA, 20 bp, Artificial Sequence
  Description of Artificial Sequence: Synthetic oligonucleotide
  Target: ATXN2; (-) strand; PAM type: YTN; PAM sequence: TTC
tttaggatgtattggcagat

SEQ ID NO: 64766 - DNA, 20 bp, Artificial Sequence
  Description of Artificial Sequence: Synthetic oligonucleotide
  Target: ATXN2; (-) strand; PAM type: YTN; PAM sequence: CTA
gttctttaggatgtattggc

SEQ ID NO: 64767 - DNA, 20 bp, Artificial Sequence
  Description of Artificial Sequence: Synthetic oligonucleotide
  Target: ATXN2; (-) strand; PAM type: YTN; PAM sequence: TTC
tagttctttaggatgtattg

SEQ ID NO: 64768 - DNA, 20 bp, Artificial Sequence
  Description of Artificial Sequence: Synthetic oligonucleotide
  Target: ATXN2; (-) strand; PAM type: YTN; PAM sequence: TTT
ctagttctttaggatgtatt

SEQ ID NO: 64769 - DNA, 20 bp, Artificial Sequence
  Description of Artificial Sequence: Synthetic oligonucleotide
  Target: ATXN2; (-) strand; PAM type: YTN; PAM sequence: TTT
tctagttctttaggatgtat

SEQ ID NO: 64770 - DNA, 20 bp, Artificial Sequence
  Description of Artificial Sequence: Synthetic oligonucleotide
  Target: ATXN2; (-) strand; PAM type: YTN; PAM sequence: CTT
ttctagttctttaggatgta

SEQ ID NO: 64771 - DNA, 20 bp, Artificial Sequence
  Description of Artificial Sequence: Synthetic oligonucleotide
  Target: ATXN2; (-) strand; PAM type: YTN; PAM sequence: TTG
cttttctagttctttaggat

SEQ ID NO: 64772 - DNA, 20 bp, Artificial Sequence
  Description of Artificial Sequence: Synthetic oligonucleotide
  Target: ATXN2; (-) strand; PAM type: YTN; PAM sequence: CTT
gcttttctagttctttagga

SEQ ID NO: 64773 - DNA, 20 bp, Artificial Sequence
  Description of Artificial Sequence: Synthetic oligonucleotide
  Target: ATXN2; (-) strand; PAM type: YTN; PAM sequence: TTG
tccttgcttttctagttctt

SEQ ID NO: 64774 - DNA, 20 bp, Artificial Sequence
  Description of Artificial Sequence: Synthetic oligonucleotide
  Target: ATXN2; (-) strand; PAM type: YTN; PAM sequence: TTT
gtccttgcttttctagttct

SEQ ID NO: 64775 - DNA, 20 bp, Artificial Sequence
  Description of Artificial Sequence: Synthetic oligonucleotide
  Target: ATXN2; (-) strand; PAM type: YTN; PAM sequence: TTT
tgtccttgcttttctagttc

SEQ ID NO: 64776 - DNA, 20 bp, Artificial Sequence
  Description of Artificial Sequence: Synthetic oligonucleotide
  Target: ATXN2; (-) strand; PAM type: YTN; PAM sequence: TTA
ggttttgtccttgcttttct

SEQ ID NO: 64777 - DNA, 20 bp, Artificial Sequence
  Description of Artificial Sequence: Synthetic oligonucleotide
  Target: ATXN2; (-) strand; PAM type: YTN; PAM sequence: TTT
aggttttgtccttgcttttc

SEQ ID NO: 64778 - DNA, 20 bp, Artificial Sequence
  Description of Artificial Sequence: Synthetic oligonucleotide
  Target: ATXN2; (-) strand; PAM type: YTN; PAM sequence: TTT
taggttttgtccttgctttt

SEQ ID NO: 64779 - DNA, 20 bp, Artificial Sequence
  Description of Artificial Sequence: Synthetic oligonucleotide
  Target: ATXN2; (-) strand; PAM type: YTN; PAM sequence: CTG
attttaggttttgtccttgc

SEQ ID NO: 64780 - DNA, 20 bp, Artificial Sequence
  Description of Artificial Sequence: Synthetic oligonucleotide
  Target: ATXN2; (-) strand; PAM type: YTN; PAM sequence: CTA
ctgattttaggttttgtcct

SEQ ID NO: 64781 - DNA, 20 bp, Artificial Sequence
  Description of Artificial Sequence: Synthetic oligonucleotide
  Target: ATXN2; (-) strand; PAM type: YTN; PAM sequence: TTC
tactgattttaggttttgtc

SEQ ID NO: 64782 - DNA, 20 bp, Artificial Sequence
  Description of Artificial Sequence: Synthetic oligonucleotide
  Target: ATXN2; (-) strand; PAM type: YTN; PAM sequence: CTT
ctactgattttaggttttgt

SEQ ID NO: 64783 - DNA, 20 bp, Artificial Sequence
  Description of Artificial Sequence: Synthetic oligonucleotide
  Target: ATXN2; (-) strand; PAM type: YTN; PAM sequence: TTC
ttctactgattttaggtttt

SEQ ID NO: 64784 - DNA, 20 bp, Artificial Sequence
  Description of Artificial Sequence: Synthetic oligonucleotide
  Target: ATXN2; (-) strand; PAM type: YTN; PAM sequence: TTT
cttctactgattttaggttt

SEQ ID NO: 64785 - DNA, 20 bp, Artificial Sequence
  Description of Artificial Sequence: Synthetic oligonucleotide
  Target: ATXN2; (-) strand; PAM type: YTN; PAM sequence: TTA
tttcttctactgattttagg

SEQ ID NO: 64786 - DNA, 20 bp, Artificial Sequence
  Description of Artificial Sequence: Synthetic oligonucleotide
  Target: ATXN2; (-) strand; PAM type: YTN; PAM sequence: TTT
atttcttctactgattttag

SEQ ID NO: 64787 - DNA, 20 bp, Artificial Sequence
  Description of Artificial Sequence: Synthetic oligonucleotide
  Target: ATXN2; (-) strand; PAM type: YTN; PAM sequence: TTT
tatttcttctactgatttta

SEQ ID NO: 64788 - DNA, 20 bp, Artificial Sequence
  Description of Artificial Sequence: Synthetic oligonucleotide
  Target: ATXN2; (-) strand; PAM type: YTN; PAM sequence: TTT
ttatttcttctactgatttt

SEQ ID NO: 64789 - DNA, 20 bp, Artificial Sequence
  Description of Artificial Sequence: Synthetic oligonucleotide
  Target: ATXN2; (-) strand; PAM type: YTN; PAM sequence: TTT
tttatttcttctactgattt

SEQ ID NO: 64790 - DNA, 20 bp, Artificial Sequence
  Description of Artificial Sequence: Synthetic oligonucleotide
  Target: ATXN2; (-) strand; PAM type: YTN; PAM sequence: TTT
ttttatttcttctactgatt

SEQ ID NO: 64791 - DNA, 20 bp, Artificial Sequence
  Description of Artificial Sequence: Synthetic oligonucleotide
  Target: ATXN2; (-) strand; PAM type: YTN; PAM sequence: TTT
tttttatttcttctactgat

SEQ ID NO: 64792 - DNA, 20 bp, Artificial Sequence
  Description of Artificial Sequence: Synthetic oligonucleotide
  Target: ATXN2; (-) strand; PAM type: YTN; PAM sequence: TTG
attttttttatttcttctac

SEQ ID NO: 64793 - DNA, 20 bp, Artificial Sequence
  Description of Artificial Sequence: Synthetic oligonucleotide
  Target: ATXN2; (-) strand; PAM type: YTN; PAM sequence: TTT
gattttttttatttcttcta

SEQ ID NO: 64794 - DNA, 20 bp, Artificial Sequence
  Description of Artificial Sequence: Synthetic oligonucleotide
  Target: ATXN2; (-) strand; PAM type: YTN; PAM sequence: CTT
tgattttttttatttcttct

SEQ ID NO: 64795 - DNA, 20 bp, Artificial Sequence
  Description of Artificial Sequence: Synthetic oligonucleotide
  Target: ATXN2; (-) strand; PAM type: YTN; PAM sequence: CTG
ctttgattttttttatttct

SEQ ID NO: 64796 - DNA, 20 bp, Artificial Sequence
  Description of Artificial Sequence: Synthetic oligonucleotide
  Target: ATXN2; (-) strand; PAM type: YTN; PAM sequence: TTC
tgctttgattttttttattt

SEQ ID NO: 64797 - DNA, 20 bp, Artificial Sequence
  Description of Artificial Sequence: Synthetic oligonucleotide
  Target: ATXN2; (-) strand; PAM type: YTN; PAM sequence: TTT
ctgctttgattttttttatt

SEQ ID NO: 64798 - DNA, 20 bp, Artificial Sequence
  Description of Artificial Sequence: Synthetic oligonucleotide
  Target: ATXN2; (-) strand; PAM type: YTN; PAM sequence: TTA
tttctgctttgatttttttt

SEQ ID NO: 64799 - DNA, 20 bp, Artificial Sequence
  Description of Artificial Sequence: Synthetic oligonucleotide
  Target: ATXN2; (-) strand; PAM type: YTN; PAM sequence: TTT
atttctgctttgattttttt

SEQ ID NO: 64800 - DNA, 20 bp, Artificial Sequence
  Description of Artificial Sequence: Synthetic oligonucleotide
  Target: ATXN2; (-) strand; PAM type: YTN; PAM sequence: TTA
tttatttctgctttgatttt

SEQ ID NO: 64801 - DNA, 20 bp, Artificial Sequence
  Description of Artificial Sequence: Synthetic oligonucleotide
  Target: ATXN2; (-) strand; PAM type: YTN; PAM sequence: TTT
atttatttctgctttgattt

SEQ ID NO: 64802 - DNA, 20 bp, Artificial Sequence
  Description of Artificial Sequence: Synthetic oligonucleotide
  Target: ATXN2; (-) strand; PAM type: YTN; PAM sequence: TTT
tatttatttctgctttgatt

SEQ ID NO: 64803 - DNA, 20 bp, Artificial Sequence
  Description of Artificial Sequence: Synthetic oligonucleotide
  Target: ATXN2; (-) strand; PAM type: YTN; PAM sequence: TTC
aattttatttatttctgctt

SEQ ID NO: 64804 - DNA, 20 bp, Artificial Sequence
  Description of Artificial Sequence: Synthetic oligonucleotide
  Target: ATXN2; (-) strand; PAM type: YTN; PAM sequence: TTT
caattttatttatttctgct

SEQ ID NO: 64805 - DNA, 20 bp, Artificial Sequence
  Description of Artificial Sequence: Synthetic oligonucleotide
  Target: ATXN2; (-) strand; PAM type: YTN; PAM sequence: TTC
atttcaattttatttatttc

SEQ ID NO: 64806 - DNA, 20 bp, Artificial Sequence
  Description of Artificial Sequence: Synthetic oligonucleotide
  Target: ATXN2; (-) strand; PAM type: YTN; PAM sequence: CTT
catttcaattttatttattt

SEQ ID NO: 64807 - DNA, 20 bp, Artificial Sequence
  Description of Artificial Sequence: Synthetic oligonucleotide
  Target: ATXN2; (-) strand; PAM type: YTN; PAM sequence: TTC
ttcatttcaattttatttat

SEQ ID NO: 64808 - DNA, 20 bp, Artificial Sequence
  Description of Artificial Sequence: Synthetic oligonucleotide
  Target: ATXN2; (-) strand; PAM type: YTN; PAM sequence: TTT
cttcatttcaattttattta

SEQ ID NO: 64809 - DNA, 20 bp, Artificial Sequence
  Description of Artificial Sequence: Synthetic oligonucleotide
  Target: ATXN2; (-) strand; PAM type: YTN; PAM sequence: TTT
tcttcatttcaattttattt

SEQ ID NO: 64810 - DNA, 20 bp, Artificial Sequence
  Description of Artificial Sequence: Synthetic oligonucleotide
  Target: ATXN2; (-) strand; PAM type: YTN; PAM sequence: TTG
tattttcttcatttcaattt

SEQ ID NO: 64811 - DNA, 20 bp, Artificial Sequence
  Description of Artificial Sequence: Synthetic oligonucleotide
  Target: ATXN2; (-) strand; PAM type: YTN; PAM sequence: TTT
gtattttcttcatttcaatt

SEQ ID NO: 64812 - DNA, 20 bp, Artificial Sequence
  Description of Artificial Sequence: Synthetic oligonucleotide
  Target: ATXN2; (-) strand; PAM type: YTN; PAM sequence: TTT
tgtattttcttcatttcaat

SEQ ID NO: 64813 - DNA, 20 bp, Artificial Sequence
  Description of Artificial Sequence: Synthetic oligonucleotide
  Target: ATXN2; (-) strand; PAM type: YTN; PAM sequence: CTT
ttgtattttcttcatttcaa

SEQ ID NO: 64814 - DNA, 20 bp, Artificial Sequence
  Description of Artificial Sequence: Synthetic oligonucleotide
  Target: ATXN2; (-) strand; PAM type: YTN; PAM sequence: TTG
atcttttgtattttcttcat

SEQ ID NO: 64815 - DNA, 20 bp, Artificial Sequence
  Description of Artificial Sequence: Synthetic oligonucleotide
  Target: ATXN2; (-) strand; PAM type: YTN; PAM sequence: TTA
ttgatcttttgtattttctt

SEQ ID NO: 64816 - DNA, 20 bp, Artificial Sequence
  Description of Artificial Sequence: Synthetic oligonucleotide
  Target: ATXN2; (-) strand; PAM type: YTN; PAM sequence: TTT
attgatcttttgtattttct

SEQ ID NO: 64817 - DNA, 20 bp, Artificial Sequence
  Description of Artificial Sequence: Synthetic oligonucleotide
  Target: ATXN2; (-) strand; PAM type: YTN; PAM sequence: TTT
tattgatcttttgtattttc

SEQ ID NO: 64818 - DNA, 20 bp, Artificial Sequence
  Description of Artificial Sequence: Synthetic oligonucleotide
  Target: ATXN2; (-) strand; PAM type: YTN; PAM sequence: CTG
ttttattgatcttttgtatt

SEQ ID NO: 64819 - DNA, 20 bp, Artificial Sequence
  Description of Artificial Sequence: Synthetic oligonucleotide
  Target: ATXN2; (-) strand; PAM type: YTN; PAM sequence: TTA
ctgttttattgatcttttgt

SEQ ID NO: 64820 - DNA, 20 bp, Artificial Sequence
  Description of Artificial Sequence: Synthetic oligonucleotide
  Target: ATXN2; (-) strand; PAM type: YTN; PAM sequence: TTT
actgttttattgatcttttg

SEQ ID NO: 64821 - DNA, 20 bp, Artificial Sequence
  Description of Artificial Sequence: Synthetic oligonucleotide
  Target: ATXN2; (-) strand; PAM type: YTN; PAM sequence: TTC
aaaacaatttactgttttat

SEQ ID NO: 64822 - DNA, 20 bp, Artificial Sequence
  Description of Artificial Sequence: Synthetic oligonucleotide
  Target: ATXN2; (-) strand; PAM type: YTN; PAM sequence: CTT
caaaacaatttactgtttta

SEQ ID NO: 64823 - DNA, 20 bp, Artificial Sequence
  Description of Artificial Sequence: Synthetic oligonucleotide
  Target: ATXN2; (-) strand; PAM type: YTN; PAM sequence: CTC
ttcaaaacaatttactgttt

SEQ ID NO: 64824 - DNA, 20 bp, Artificial Sequence
  Description of Artificial Sequence: Synthetic oligonucleotide
  Target: ATXN2; (-) strand; PAM type: YTN; PAM sequence: TTA
tctcttcaaaacaatttact

SEQ ID NO: 64825 - DNA, 20 bp, Artificial Sequence
  Description of Artificial Sequence: Synthetic oligonucleotide
  Target: ATXN2; (-) strand; PAM type: YTN; PAM sequence: TTT
atctcttcaaaacaatttac

SEQ ID NO: 64826 - DNA, 20 bp, Artificial Sequence
  Description of Artificial Sequence: Synthetic oligonucleotide
  Target: ATXN2; (-) strand; PAM type: YTN; PAM sequence: TTG
tttatctcttcaaaacaatt

SEQ ID NO: 64827 - DNA, 20 bp, Artificial Sequence
  Description of Artificial Sequence: Synthetic oligonucleotide
  Target: ATXN2; (-) strand; PAM type: YTN; PAM sequence: TTT
gtttatctcttcaaaacaat

SEQ ID NO: 64828 - DNA, 20 bp, Artificial Sequence
  Description of Artificial Sequence: Synthetic oligonucleotide
  Target: ATXN2; (-) strand; PAM type: YTN; PAM sequence: TTT
tgtttatctcttcaaaacaa

SEQ ID NO: 64829 - DNA, 20 bp, Artificial Sequence
  Description of Artificial Sequence: Synthetic oligonucleotide
  Target: ATXN2; (-) strand; PAM type: YTN; PAM sequence: TTG
tcagttttgtttatctcttc

SEQ ID NO: 64830 - DNA, 20 bp, Artificial Sequence
  Description of Artificial Sequence: Synthetic oligonucleotide
  Target: ATXN2; (-) strand; PAM type: YTN; PAM sequence: TTT
gtcagttttgtttatctctt

SEQ ID NO: 64831 - DNA, 20 bp, Artificial Sequence
  Description of Artificial Sequence: Synthetic oligonucleotide
  Target: ATXN2; (-) strand; PAM type: YTN; PAM sequence: CTA
aaggtttgtcagttttgttt

SEQ ID NO: 64832 - DNA, 20 bp, Artificial Sequence
  Description of Artificial Sequence: Synthetic oligonucleotide
  Target: ATXN2; (-) strand; PAM type: YTN; PAM sequence: CTG
gctaaaggtttgtcagtttt

SEQ ID NO: 64833 - DNA, 20 bp, Artificial Sequence
  Description of Artificial Sequence: Synthetic oligonucleotide
  Target: ATXN2; (-) strand; PAM type: YTN; PAM sequence: CTG
agtctggctaaaggtttgtc

SEQ ID NO: 64834 - DNA, 20 bp, Artificial Sequence
  Description of Artificial Sequence: Synthetic oligonucleotide
  Target: ATXN2; (-) strand; PAM type: YTN; PAM sequence: TTC
tgagtctggctaaaggtttg

SEQ ID NO: 64835 - DNA, 20 bp, Artificial Sequence
  Description of Artificial Sequence: Synthetic oligonucleotide
  Target: ATXN2; (-) strand; PAM type: YTN; PAM sequence: TTT
ctgagtctggctaaaggttt

SEQ ID NO: 64836 - DNA, 20 bp, Artificial Sequence
  Description of Artificial Sequence: Synthetic oligonucleotide
  Target: ATXN2; (-) strand; PAM type: YTN; PAM sequence: TTT
tctgagtctggctaaaggtt

SEQ ID NO: 64837 - DNA, 20 bp, Artificial Sequence
  Description of Artificial Sequence: Synthetic oligonucleotide
  Target: ATXN2; (-) strand; PAM type: YTN; PAM sequence: TTT
ttctgagtctggctaaaggt

SEQ ID NO: 64838 - DNA, 20 bp, Artificial Sequence
  Description of Artificial Sequence: Synthetic oligonucleotide
  Target: ATXN2; (-) strand; PAM type: YTN; PAM sequence: TTT
tttctgagtctggctaaagg

SEQ ID NO: 64839 - DNA, 20 bp, Artificial Sequence
  Description of Artificial Sequence: Synthetic oligonucleotide
  Target: ATXN2; (-) strand; PAM type: YTN; PAM sequence: TTT
ttttctgagtctggctaaag

SEQ ID NO: 64840 - DNA, 20 bp, Artificial Sequence
  Description of Artificial Sequence: Synthetic oligonucleotide
  Target: ATXN2; (-) strand; PAM type: YTN; PAM sequence: TTT
tttttctgagtctggctaaa

SEQ ID NO: 64841 - DNA, 20 bp, Artificial Sequence
  Description of Artificial Sequence: Synthetic oligonucleotide
  Target: ATXN2; (-) strand; PAM type: YTN; PAM sequence: CTT
ttttttctgagtctggctaa

SEQ ID NO: 64842 - DNA, 20 bp, Artificial Sequence
  Description of Artificial Sequence: Synthetic oligonucleotide
  Target: ATXN2; (-) strand; PAM type: YTN; PAM sequence: CTC
ttttttttctgagtctggct

SEQ ID NO: 64843 - DNA, 20 bp, Artificial Sequence
  Description of Artificial Sequence: Synthetic oligonucleotide
  Target: ATXN2; (-) strand; PAM type: YTN; PAM sequence: TTC
tcttttttttctgagtctgg

SEQ ID NO: 64844 - DNA, 20 bp, Artificial Sequence
  Description of Artificial Sequence: Synthetic oligonucleotide
  Target: ATXN2; (-) strand; PAM type: YTN; PAM sequence: TTT
ctcttttttttctgagtctg

SEQ ID NO: 64845 - DNA, 20 bp, Artificial Sequence
  Description of Artificial Sequence: Synthetic oligonucleotide
  Target: ATXN2; (-) strand; PAM type: YTN; PAM sequence: TTT
tctcttttttttctgagtct

SEQ ID NO: 64846 - DNA, 20 bp, Artificial Sequence
  Description of Artificial Sequence: Synthetic oligonucleotide
  Target: ATXN2; (-) strand; PAM type: YTN; PAM sequence: TTG
ggttttctcttttttttctg

SEQ ID NO: 64847 - DNA, 20 bp, Artificial Sequence
  Description of Artificial Sequence: Synthetic oligonucleotide
  Target: ATXN2; (-) strand; PAM type: YTN; PAM sequence: TTT
gggttttctcttttttttct

SEQ ID NO: 64848 - DNA, 20 bp, Artificial Sequence
  Description of Artificial Sequence: Synthetic oligonucleotide
  Target: ATXN2; (-) strand; PAM type: YTN; PAM sequence: TTA
tttgggttttctcttttttt

SEQ ID NO: 64849 - DNA, 20 bp, Artificial Sequence
  Description of Artificial Sequence: Synthetic oligonucleotide
  Target: ATXN2; (-) strand; PAM type: YTN; PAM sequence: TTA
ttatttgggttttctctttt

SEQ ID NO: 64850 - DNA, 20 bp, Artificial Sequence
  Description of Artificial Sequence: Synthetic oligonucleotide
  Target: ATXN2; (-) strand; PAM type: YTN; PAM sequence: TTT
attatttgggttttctcttt

SEQ ID NO: 64851 - DNA, 20 bp, Artificial Sequence
  Description of Artificial Sequence: Synthetic oligonucleotide
  Target: ATXN2; (-) strand; PAM type: YTN; PAM sequence: TTT
tattatttgggttttctctt

SEQ ID NO: 64852 - DNA, 20 bp, Artificial Sequence
  Description of Artificial Sequence: Synthetic oligonucleotide
  Target: ATXN2; (-) strand; PAM type: YTN; PAM sequence: CTC
attttattatttgggttttc

SEQ ID NO: 64853 - DNA, 20 bp, Artificial Sequence
  Description of Artificial Sequence: Synthetic oligonucleotide
  Target: ATXN2; (-) strand; PAM type: YTN; PAM sequence: CTC
tcattttattatttgggttt

SEQ ID NO: 64854 - DNA, 20 bp, Artificial Sequence
  Description of Artificial Sequence: Synthetic oligonucleotide
  Target: ATXN2; (-) strand; PAM type: YTN; PAM sequence: TTC
atctctcattttattatttg

SEQ ID NO: 64855 - DNA, 20 bp, Artificial Sequence
  Description of Artificial Sequence: Synthetic oligonucleotide
  Target: ATXN2; (-) strand; PAM type: YTN; PAM sequence: TTT
catctctcattttattattt

SEQ ID NO: 64856 - DNA, 20 bp, Artificial Sequence
  Description of Artificial Sequence: Synthetic oligonucleotide
  Target: ATXN2; (-) strand; PAM type: YTN; PAM sequence: TTT
tcatctctcattttattatt

SEQ ID NO: 64857 - DNA, 20 bp, Artificial Sequence
  Description of Artificial Sequence: Synthetic oligonucleotide
  Target: ATXN2; (-) strand; PAM type: YTN; PAM sequence: TTT
ttcatctctcattttattat

SEQ ID NO: 64858 - DNA, 20 bp, Artificial Sequence
  Description of Artificial Sequence: Synthetic oligonucleotide
  Target: ATXN2; (-) strand; PAM type: YTN; PAM sequence: CTT
tttcatctctcattttatta

SEQ ID NO: 64859 - DNA, 20 bp, Artificial Sequence
  Description of Artificial Sequence: Synthetic oligonucleotide
  Target: ATXN2; (-) strand; PAM type: YTN; PAM sequence: CTC
ctttttcatctctcatttta

SEQ ID NO: 64860 - DNA, 20 bp, Artificial Sequence
  Description of Artificial Sequence: Synthetic oligonucleotide
  Target: ATXN2; (-) strand; PAM type: YTN; PAM sequence: TTA
taatgtctcctttttcatct

SEQ ID NO: 64861 - DNA, 20 bp, Artificial Sequence
  Description of Artificial Sequence: Synthetic oligonucleotide
  Target: ATXN2; (-) strand; PAM type: YTN; PAM sequence: TTC
ggtggtaacaattataatgt

SEQ ID NO: 64862 - DNA, 20 bp, Artificial Sequence
  Description of Artificial Sequence: Synthetic oligonucleotide
  Target: ATXN2; (-) strand; PAM type: YTN; PAM sequence: TTT
cggtggtaacaattataatg

SEQ ID NO: 64863 - DNA, 20 bp, Artificial Sequence
  Description of Artificial Sequence: Synthetic oligonucleotide
  Target: ATXN2; (-) strand; PAM type: YTN; PAM sequence: TTG
aatttcggtggtaacaatta

SEQ ID NO: 64864 - DNA, 20 bp, Artificial Sequence
  Description of Artificial Sequence: Synthetic oligonucleotide
  Target: ATXN2; (-) strand; PAM type: YTN; PAM sequence: TTT
gaatttcggtggtaacaatt

SEQ ID NO: 64865 - DNA, 20 bp, Artificial Sequence
  Description of Artificial Sequence: Synthetic oligonucleotide
  Target: ATXN2; (-) strand; PAM type: YTN; PAM sequence: CTT
tgaatttcggtggtaacaat

SEQ ID NO: 64866 - DNA, 20 bp, Artificial Sequence
  Description of Artificial Sequence: Synthetic oligonucleotide
  Target: ATXN2; (-) strand; PAM type: YTN; PAM sequence: CTA
atgatcctttgaatttcggt

SEQ ID NO: 64867 - DNA, 20 bp, Artificial Sequence
  Description of Artificial Sequence: Synthetic oligonucleotide
  Target: ATXN2; (-) strand; PAM type: YTN; PAM sequence: CTC
taatgatcctttgaatttcg

SEQ ID NO: 64868 - DNA, 20 bp, Artificial Sequence
  Description of Artificial Sequence: Synthetic oligonucleotide
  Target: ATXN2; (-) strand; PAM type: YTN; PAM sequence: CTC
atagtagtctctaatgatcc

SEQ ID NO: 64869 - DNA, 20 bp, Artificial Sequence
  Description of Artificial Sequence: Synthetic oligonucleotide
  Target: ATXN2; (-) strand; PAM type: YTN; PAM sequence: TTC
caatgtatcagcatatagat

SEQ ID NO: 64870 - DNA, 20 bp, Artificial Sequence
  Description of Artificial Sequence: Synthetic oligonucleotide
  Target: ATXN2; (-) strand; PAM type: YTN; PAM sequence: TTT
ccaatgtatcagcatataga

SEQ ID NO: 64871 - DNA, 20 bp, Artificial Sequence
  Description of Artificial Sequence: Synthetic oligonucleotide
  Target: ATXN2; (-) strand; PAM type: YTN; PAM sequence: TTT
tccaatgtatcagcatatag

SEQ ID NO: 64872 - DNA, 20 bp, Artificial Sequence
  Description of Artificial Sequence: Synthetic oligonucleotide
  Target: ATXN2; (-) strand; PAM type: YTN; PAM sequence: TTC
aaggttttccaatgtatcag

SEQ ID NO: 64873 - DNA, 20 bp, Artificial Sequence
  Description of Artificial Sequence: Synthetic oligonucleotide
  Target: ATXN2; (-) strand; PAM type: YTN; PAM sequence: CTT
caaggttttccaatgtatca

SEQ ID NO: 64874 - DNA, 20 bp, Artificial Sequence
  Description of Artificial Sequence: Synthetic oligonucleotide
  Target: ATXN2; (-) strand; PAM type: YTN; PAM sequence: TTC
ttcaaggttttccaatgtat

SEQ ID NO: 64875 - DNA, 20 bp, Artificial Sequence
  Description of Artificial Sequence: Synthetic oligonucleotide
  Target: ATXN2; (-) strand; PAM type: YTN; PAM sequence: TTT
cttcaaggttttccaatgta

SEQ ID NO: 64876 - DNA, 20 bp, Artificial Sequence
  Description of Artificial Sequence: Synthetic oligonucleotide
  Target: ATXN2; (-) strand; PAM type: YTN; PAM sequence: TTA
tccatttcttcaaggttttc

SEQ ID NO: 64877 - DNA, 20 bp, Artificial Sequence
  Description of Artificial Sequence: Synthetic oligonucleotide
  Target: ATXN2; (-) strand; PAM type: YTN; PAM sequence: TTT
atccatttcttcaaggtttt

SEQ ID NO: 64878 - DNA, 20 bp, Artificial Sequence
  Description of Artificial Sequence: Synthetic oligonucleotide
  Target: ATXN2; (-) strand; PAM type: YTN; PAM sequence: CTA
ggaatttatccatttcttca

SEQ ID NO: 64879 - DNA, 20 bp, Artificial Sequence
  Description of Artificial Sequence: Synthetic oligonucleotide
  Target: ATXN2; (-) strand; PAM type: YTN; PAM sequence: TTG
tatgtgtctaggaatttatc

SEQ ID NO: 64880 - DNA, 20 bp, Artificial Sequence
  Description of Artificial Sequence: Synthetic oligonucleotide
  Target: ATXN2; (-) strand; PAM type: YTN; PAM sequence: TTG
gtaggttgtatgtgtctagg

SEQ ID NO: 64881 - DNA, 20 bp, Artificial Sequence
  Description of Artificial Sequence: Synthetic oligonucleotide
  Target: ATXN2; (-) strand; PAM type: YTN; PAM sequence: CTT
ggtaggttgtatgtgtctag

SEQ ID NO: 64882 - DNA, 20 bp, Artificial Sequence
  Description of Artificial Sequence: Synthetic oligonucleotide
  Target: ATXN2; (-) strand; PAM type: YTN; PAM sequence: TTC
agtcttggtaggttgtatgt

SEQ ID NO: 64883 - DNA, 20 bp, Artificial Sequence
  Description of Artificial Sequence: Synthetic oligonucleotide
  Target: ATXN2; (-) strand; PAM type: YTN; PAM sequence: TTG
tggttcagtcttggtaggtt

SEQ ID NO: 64884 - DNA, 20 bp, Artificial Sequence
  Description of Artificial Sequence: Synthetic oligonucleotide
  Target: ATXN2; (-) strand; PAM type: YTN; PAM sequence: TTT
gtggttcagtcttggtaggt

SEQ ID NO: 64885 - DNA, 20 bp, Artificial Sequence
  Description of Artificial Sequence: Synthetic oligonucleotide
  Target: ATXN2; (-) strand; PAM type: YTN; PAM sequence: CTT
tgtggttcagtcttggtagg

SEQ ID NO: 64886 - DNA, 20 bp, Artificial Sequence
  Description of Artificial Sequence: Synthetic oligonucleotide
  Target: ATXN2; (-) strand; PAM type: YTN; PAM sequence: TTC
tttgtggttcagtcttggta

SEQ ID NO: 64887 - DNA, 20 bp, Artificial Sequence
  Description of Artificial Sequence: Synthetic oligonucleotide
  Target: ATXN2; (-) strand; PAM type: YTN; PAM sequence: TTT
ctttgtggttcagtcttggt

SEQ ID NO: 64888 - DNA, 20 bp, Artificial Sequence
  Description of Artificial Sequence: Synthetic oligonucleotide
  Target: ATXN2; (-) strand; PAM type: YTN; PAM sequence: TTG
gatttctttgtggttcagtc

SEQ ID NO: 64889 - DNA, 20 bp, Artificial Sequence
  Description of Artificial Sequence: Synthetic oligonucleotide
  Target: ATXN2; (-) strand; PAM type: YTN; PAM sequence: TTT
ggatttctttgtggttcagt

SEQ ID NO: 64890 - DNA, 20 bp, Artificial Sequence
  Description of Artificial Sequence: Synthetic oligonucleotide
  Target: ATXN2; (-) strand; PAM type: YTN; PAM sequence: TTT
tggatttctttgtggttcag

SEQ ID NO: 64891 - DNA, 20 bp, Artificial Sequence
  Description of Artificial Sequence: Synthetic oligonucleotide
  Target: ATXN2; (-) strand; PAM type: YTN; PAM sequence: TTG
ggttttggatttctttgtgg

SEQ ID NO: 64892 - DNA, 20 bp, Artificial Sequence
  Description of Artificial Sequence: Synthetic oligonucleotide
  Target: ATXN2; (-) strand; PAM type: YTN; PAM sequence: TTT
gggttttggatttctttgtg

SEQ ID NO: 64893 - DNA, 20 bp, Artificial Sequence
  Description of Artificial Sequence: Synthetic oligonucleotide
  Target: ATXN2; (-) strand; PAM type: YTN; PAM sequence: TTG
tatttgggttttggatttct

SEQ ID NO: 64894 - DNA, 20 bp, Artificial Sequence
  Description of Artificial Sequence: Synthetic oligonucleotide
  Target: ATXN2; (-) strand; PAM type: YTN; PAM sequence: TTA
ttgtatttgggttttggatt

SEQ ID NO: 64895 - DNA, 20 bp, Artificial Sequence
  Description of Artificial Sequence: Synthetic oligonucleotide
  Target: ATXN2; (-) strand; PAM type: YTN; PAM sequence: TTG
ttattgtatttgggttttgg

SEQ ID NO: 64896 - DNA, 20 bp, Artificial Sequence
  Description of Artificial Sequence: Synthetic oligonucleotide
  Target: ATXN2; (-) strand; PAM type: YTN; PAM sequence: CTT
gttattgtatttgggttttg

SEQ ID NO: 64897 - DNA, 20 bp, Artificial Sequence
  Description of Artificial Sequence: Synthetic oligonucleotide
  Target: ATXN2; (-) strand; PAM type: YTN; PAM sequence: TTA
cttgttattgtatttgggtt

SEQ ID NO: 64898 - DNA, 20 bp, Artificial Sequence
  Description of Artificial Sequence: Synthetic oligonucleotide
  Target: ATXN2; (-) strand; PAM type: YTN; PAM sequence: CTC
gttacttgttattgtatttg

SEQ ID NO: 64899 - DNA, 20 bp, Artificial Sequence
  Description of Artificial Sequence: Synthetic oligonucleotide
  Target: ATXN2; (-) strand; PAM type: YTN; PAM sequence: TTG
gtctcgttacttgttattgt

SEQ ID NO: 64900 - DNA, 20 bp, Artificial Sequence
  Description of Artificial Sequence: Synthetic oligonucleotide
  Target: ATXN2; (-) strand; PAM type: YTN; PAM sequence: TTA
ttggtctcgttacttgttat

SEQ ID NO: 64901 - DNA, 20 bp, Artificial Sequence
  Description of Artificial Sequence: Synthetic oligonucleotide
  Target: ATXN2; (-) strand; PAM type: YTN; PAM sequence: TTG
ttattggtctcgttacttgt

SEQ ID NO: 64902 - DNA, 20 bp, Artificial Sequence
  Description of Artificial Sequence: Synthetic oligonucleotide
  Target: ATXN2; (-) strand; PAM type: YTN; PAM sequence: CTT
gttattggtctcgttacttg

SEQ ID NO: 64903 - DNA, 20 bp, Artificial Sequence
  Description of Artificial Sequence: Synthetic oligonucleotide
  Target: ATXN2; (-) strand; PAM type: YTN; PAM sequence: TTA
cttgttattggtctcgttac

SEQ ID NO: 64904 - DNA, 20 bp, Artificial Sequence
  Description of Artificial Sequence: Synthetic oligonucleotide
  Target: ATXN2; (-) strand; PAM type: YTN; PAM sequence: CTC
gttacttgttattggtctcg

SEQ ID NO: 64905 - DNA, 20 bp, Artificial Sequence
  Description of Artificial Sequence: Synthetic oligonucleotide
  Target: ATXN2; (-) strand; PAM type: YTN; PAM sequence: TTG
atctcgttacttgttattgg

SEQ ID NO: 64906 - DNA, 20 bp, Artificial Sequence
  Description of Artificial Sequence: Synthetic oligonucleotide
  Target: ATXN2; (-) strand; PAM type: YTN; PAM sequence: TTT
gatctcgttacttgttattg

SEQ ID NO: 64907 - DNA, 20 bp, Artificial Sequence
  Description of Artificial Sequence: Synthetic oligonucleotide
  Target: ATXN2; (-) strand; PAM type: YTN; PAM sequence: CTT
tgatctcgttacttgttatt

SEQ ID NO: 64908 - DNA, 20 bp, Artificial Sequence
  Description of Artificial Sequence: Synthetic oligonucleotide
  Target: ATXN2; (-) strand; PAM type: YTN; PAM sequence: TTA
tagctttgatctcgttactt

SEQ ID NO: 64909 - DNA, 20 bp, Artificial Sequence
  Description of Artificial Sequence: Synthetic oligonucleotide
  Target: ATXN2; (-) strand; PAM type: YTN; PAM sequence: CTT
atagctttgatctcgttact

SEQ ID NO: 64910 - DNA, 20 bp, Artificial Sequence
  Description of Artificial Sequence: Synthetic oligonucleotide
  Target: ATXN2; (-) strand; PAM type: YTN; PAM sequence: TTC
ttatagctttgatctcgtta

SEQ ID NO: 64911 - DNA, 20 bp, Artificial Sequence
  Description of Artificial Sequence: Synthetic oligonucleotide
  Target: ATXN2; (-) strand; PAM type: YTN; PAM sequence: TTT
cttatagctttgatctcgtt

SEQ ID NO: 64912 - DNA, 20 bp, Artificial Sequence
  Description of Artificial Sequence: Synthetic oligonucleotide
  Target: ATXN2; (-) strand; PAM type: YTN; PAM sequence: CTA
tttcttatagctttgatctc

SEQ ID NO: 64913 - DNA, 20 bp, Artificial Sequence
  Description of Artificial Sequence: Synthetic oligonucleotide
  Target: ATXN2; (-) strand; PAM type: YTN; PAM sequence: CTG
ggagactatttcttatagct

SEQ ID NO: 64914 - DNA, 20 bp, Artificial Sequence
  Description of Artificial Sequence: Synthetic oligonucleotide
  Target: ATXN2; (-) strand; PAM type: YTN; PAM sequence: TTG
ctgggagactatttcttata

SEQ ID NO: 64915 - DNA, 20 bp, Artificial Sequence
  Description of Artificial Sequence: Synthetic oligonucleotide
  Target: ATXN2; (-) strand; PAM type: YTN; PAM sequence: TTT
gctgggagactatttcttat

SEQ ID NO: 64916 - DNA, 20 bp, Artificial Sequence
  Description of Artificial Sequence: Synthetic oligonucleotide
  Target: ATXN2; (-) strand; PAM type: YTN; PAM sequence: CTT
tgctgggagactatttctta

SEQ ID NO: 64917 - DNA, 20 bp, Artificial Sequence
  Description of Artificial Sequence: Synthetic oligonucleotide
  Target: ATXN2; (-) strand; PAM type: YTN; PAM sequence: TTC
tttgctgggagactatttct

SEQ ID NO: 64918 - DNA, 20 bp, Artificial Sequence
  Description of Artificial Sequence: Synthetic oligonucleotide
  Target: ATXN2; (-) strand; PAM type: YTN; PAM sequence: TTT
ctttgctgggagactatttc

SEQ ID NO: 64919 - DNA, 20 bp, Artificial Sequence
  Description of Artificial Sequence: Synthetic oligonucleotide
  Target: ATXN2; (-) strand; PAM type: YTN; PAM sequence: TTT
tctttgctgggagactattt

SEQ ID NO: 64920 - DNA, 20 bp, Artificial Sequence
  Description of Artificial Sequence: Synthetic oligonucleotide
  Target: ATXN2; (-) strand; PAM type: YTN; PAM sequence: CTT
ttctttgctgggagactatt

SEQ ID NO: 64921 - DNA, 20 bp, Artificial Sequence
  Description of Artificial Sequence: Synthetic oligonucleotide
  Target: ATXN2; (-) strand; PAM type: YTN; PAM sequence: TTC
agcagtgaagccatcaggtc

SEQ ID NO: 64922 - DNA, 20 bp, Artificial Sequence
  Description of Artificial Sequence: Synthetic oligonucleotide
  Target: ATXN2; (-) strand; PAM type: YTN; PAM sequence: TTA
gtagaattcagcagtgaagc

SEQ ID NO: 64923 - DNA, 20 bp, Artificial Sequence
  Description of Artificial Sequence: Synthetic oligonucleotide
  Target: ATXN2; (-) strand; PAM type: YTN; PAM sequence: TTT
agtagaattcagcagtgaag

SEQ ID NO: 64924 - DNA, 20 bp, Artificial Sequence
  Description of Artificial Sequence: Synthetic oligonucleotide
  Target: ATXN2; (-) strand; PAM type: YTN; PAM sequence: TTA
aaggtttagtagaattcagc

SEQ ID NO: 64925 - DNA, 20 bp, Artificial Sequence
  Description of Artificial Sequence: Synthetic oligonucleotide
  Target: ATXN2; (-) strand; PAM type: YTN; PAM sequence: TTT
aaaggtttagtagaattcag

SEQ ID NO: 64926 - DNA, 20 bp, Artificial Sequence
  Description of Artificial Sequence: Synthetic oligonucleotide
  Target: ATXN2; (-) strand; PAM type: YTN; PAM sequence: CTT
taaaggtttagtagaattca

SEQ ID NO: 64927 - DNA, 20 bp, Artificial Sequence
  Description of Artificial Sequence: Synthetic oligonucleotide
  Target: ATXN2; (-) strand; PAM type: YTN; PAM sequence: TTC
tttaaaggtttagtagaatt

SEQ ID NO: 64928 - DNA, 20 bp, Artificial Sequence
  Description of Artificial Sequence: Synthetic oligonucleotide
  Target: ATXN2; (-) strand; PAM type: YTN; PAM sequence: CTT
ctttaaaggtttagtagaat

SEQ ID NO: 64929 - DNA, 20 bp, Artificial Sequence
  Description of Artificial Sequence: Synthetic oligonucleotide
  Target: ATXN2; (-) strand; PAM type: YTN; PAM sequence: TTC
ttctttaaaggtttagtaga

SEQ ID NO: 64930 - DNA, 20 bp, Artificial Sequence
  Description of Artificial Sequence: Synthetic oligonucleotide
  Target: ATXN2; (-) strand; PAM type: YTN; PAM sequence: TTA
gttcttctttaaaggtttag

SEQ ID NO: 64931 - DNA, 20 bp, Artificial Sequence
  Description of Artificial Sequence: Synthetic oligonucleotide
  Target: ATXN2; (-) strand; PAM type: YTN; PAM sequence: TTG
gtattagttcttctttaaag

SEQ ID NO: 64932 - DNA, 20 bp, Artificial Sequence
  Description of Artificial Sequence: Synthetic oligonucleotide
  Target: ATXN2; (-) strand; PAM type: YTN; PAM sequence: TTG
agtaggattggtattagttc

SEQ ID NO: 64933 - DNA, 20 bp, Artificial Sequence
  Description of Artificial Sequence: Synthetic oligonucleotide
  Target: ATXN2; (-) strand; PAM type: YTN; PAM sequence: TTT
gagtaggattggtattagtt

SEQ ID NO: 64934 - DNA, 20 bp, Artificial Sequence
  Description of Artificial Sequence: Synthetic oligonucleotide
  Target: ATXN2; (-) strand; PAM type: YTN; PAM sequence: TTG
gaatagtttgagtaggattg

SEQ ID NO: 64935 - DNA, 20 bp, Artificial Sequence
  Description of Artificial Sequence: Synthetic oligonucleotide
  Target: ATXN2; (-) strand; PAM type: YTN; PAM sequence: TTG
tgttggaatagtttgagtag

SEQ ID NO: 64936 - DNA, 20 bp, Artificial Sequence
  Description of Artificial Sequence: Synthetic oligonucleotide
  Target: ATXN2; (-) strand; PAM type: YTN; PAM sequence: CTG
tattgtgttggaatagtttg

SEQ ID NO: 64937 - DNA, 20 bp, Artificial Sequence
  Description of Artificial Sequence: Synthetic oligonucleotide
  Target: ATXN2; (-) strand; PAM type: YTN; PAM sequence: TTC
ctgtattgtgttggaatagt

SEQ ID NO: 64938 - DNA, 20 bp, Artificial Sequence
  Description of Artificial Sequence: Synthetic oligonucleotide
  Target: ATXN2; (-) strand; PAM type: YTN; PAM sequence: CTT
cctgtattgtgttggaatag

SEQ ID NO: 64939 - DNA, 20 bp, Artificial Sequence
  Description of Artificial Sequence: Synthetic oligonucleotide
  Target: ATXN2; (-) strand; PAM type: YTN; PAM sequence: CTC
ttcctgtattgtgttggaat

SEQ ID NO: 64940 - DNA, 20 bp, Artificial Sequence
  Description of Artificial Sequence: Synthetic oligonucleotide
  Target: ATXN2; (-) strand; PAM type: YTN; PAM sequence: TTC
cctcttcctgtattgtgttg

SEQ ID NO: 64941 - DNA, 20 bp, Artificial Sequence
  Description of Artificial Sequence: Synthetic oligonucleotide
  Target: ATXN2; (-) strand; PAM type: YTN; PAM sequence: TTA
gaagtattccctcttcctgt

SEQ ID NO: 64942 - DNA, 20 bp, Artificial Sequence
  Description of Artificial Sequence: Synthetic oligonucleotide
  Target: ATXN2; (-) strand; PAM type: YTN; PAM sequence: TTT
agaagtattccctcttcctg

SEQ ID NO: 64943 - DNA, 20 bp, Artificial Sequence
  Description of Artificial Sequence: Synthetic oligonucleotide
  Target: ATXN2; (-) strand; PAM type: YTN; PAM sequence: TTG
tagaatgagtttagaagtat

SEQ ID NO: 64944 - DNA, 20 bp, Artificial Sequence
  Description of Artificial Sequence: Synthetic oligonucleotide
  Target: ATXN2; (-) strand; PAM type: YTN; PAM sequence: CTT
gtagaatgagtttagaagta

SEQ ID NO: 64945 - DNA, 20 bp, Artificial Sequence
  Description of Artificial Sequence: Synthetic oligonucleotide
  Target: ATXN2; (-) strand; PAM type: YTN; PAM sequence: TTG
tatagggtaatagtggcctt

SEQ ID NO: 64946 - DNA, 20 bp, Artificial Sequence
  Description of Artificial Sequence: Synthetic oligonucleotide
  Target: ATXN2; (-) strand; PAM type: YTN; PAM sequence: TTT
gtatagggtaatagtggcct

SEQ ID NO: 64947 - DNA, 20 bp, Artificial Sequence
  Description of Artificial Sequence: Synthetic oligonucleotide
  Target: ATXN2; (-) strand; PAM type: YTN; PAM sequence: TTT
tgtatagggtaatagtggcc

SEQ ID NO: 64948 - DNA, 20 bp, Artificial Sequence
  Description of Artificial Sequence: Synthetic oligonucleotide
  Target: ATXN2; (-) strand; PAM type: YTN; PAM sequence: TTG
gttttgtatagggtaatagt

SEQ ID NO: 64949 - DNA, 20 bp, Artificial Sequence
  Description of Artificial Sequence: Synthetic oligonucleotide
  Target: ATXN2; (-) strand; PAM type: YTN; PAM sequence: TTT
ggttttgtatagggtaatag

SEQ ID NO: 64950 - DNA, 20 bp, Artificial Sequence
  Description of Artificial Sequence: Synthetic oligonucleotide
  Target: ATXN2; (-) strand; PAM type: YTN; PAM sequence: CTT
tggttttgtatagggtaata

SEQ ID NO: 64951 - DNA, 20 bp, Artificial Sequence
  Description of Artificial Sequence: Synthetic oligonucleotide
  Target: ATXN2; (-) strand; PAM type: YTN; PAM sequence: TTG
atgtgtcctttggttttgta

SEQ ID NO: 64952 - DNA, 20 bp, Artificial Sequence
  Description of Artificial Sequence: Synthetic oligonucleotide
  Target: ATXN2; (-) strand; PAM type: YTN; PAM sequence: TTT
gatgtgtcctttggttttgt

SEQ ID NO: 64953 - DNA, 20 bp, Artificial Sequence
  Description of Artificial Sequence: Synthetic oligonucleotide
  Target: ATXN2; (-) strand; PAM type: YTN; PAM sequence: TTT
tgatgtgtcctttggttttg

SEQ ID NO: 64954 - DNA, 20 bp, Artificial Sequence
  Description of Artificial Sequence: Synthetic oligonucleotide
  Target: ATXN2; (-) strand; PAM type: YTN; PAM sequence: TTT
ttgatgtgtcctttggtttt

SEQ ID NO: 64955 - DNA, 20 bp, Artificial Sequence
  Description of Artificial Sequence: Synthetic oligonucleotide
  Target: ATXN2; (-) strand; PAM type: YTN; PAM sequence: CTT
tttgatgtgtcctttggttt

SEQ ID NO: 64956 - DNA, 20 bp, Artificial Sequence
  Description of Artificial Sequence: Synthetic oligonucleotide
  Target: ATXN2; (-) strand; PAM type: YTN; PAM sequence: TTC
cctttttgatgtgtcctttg

SEQ ID NO: 64957 - DNA, 20 bp, Artificial Sequence
  Description of Artificial Sequence: Synthetic oligonucleotide
  Target: ATXN2; (-) strand; PAM type: YTN; PAM sequence: TTT
ccctttttgatgtgtccttt

SEQ ID NO: 64958 - DNA, 20 bp, Artificial Sequence
  Description of Artificial Sequence: Synthetic oligonucleotide
  Target: ATXN2; (-) strand; PAM type: YTN; PAM sequence: TTT
tccctttttgatgtgtcctt

SEQ ID NO: 64959 - DNA, 20 bp, Artificial Sequence
  Description of Artificial Sequence: Synthetic oligonucleotide
  Target: ATXN2; (-) strand; PAM type: YTN; PAM sequence: CTA
gttttccctttttgatgtgt

SEQ ID NO: 64960 - DNA, 20 bp, Artificial Sequence
  Description of Artificial Sequence: Synthetic oligonucleotide
  Target: ATXN2; (-) strand; PAM type: YTN; PAM sequence: TTC
tagttttccctttttgatgt

SEQ ID NO: 64961 - DNA, 20 bp, Artificial Sequence
  Description of Artificial Sequence: Synthetic oligonucleotide
  Target: ATXN2; (-) strand; PAM type: YTN; PAM sequence: CTT
ctagttttccctttttgatg

SEQ ID NO: 64962 - DNA, 20 bp, Artificial Sequence
  Description of Artificial Sequence: Synthetic oligonucleotide
  Target: ATXN2; (-) strand; PAM type: YTN; PAM sequence: CTG
gcttctagttttcccttttt

SEQ ID NO: 64963 - DNA, 20 bp, Artificial Sequence
  Description of Artificial Sequence: Synthetic oligonucleotide
  Target: ATXN2; (-) strand; PAM type: YTN; PAM sequence: TTC
agagacactggcttctagtt

SEQ ID NO: 64964 - DNA, 20 bp, Artificial Sequence
  Description of Artificial Sequence: Synthetic oligonucleotide
  Target: ATXN2; (-) strand; PAM type: YTN; PAM sequence: CTT
cagagacactggcttctagt

SEQ ID NO: 64965 - DNA, 20 bp, Artificial Sequence
  Description of Artificial Sequence: Synthetic oligonucleotide
  Target: ATXN2; (-) strand; PAM type: YTN; PAM sequence: TTC
ttcagagacactggcttcta

SEQ ID NO: 64966 - DNA, 20 bp, Artificial Sequence
  Description of Artificial Sequence: Synthetic oligonucleotide
  Target: ATXN2; (-) strand; PAM type: YTN; PAM sequence: TTG
cataatgttcttcagagaca

SEQ ID NO: 64967 - DNA, 20 bp, Artificial Sequence
  Description of Artificial Sequence: Synthetic oligonucleotide
  Target: ATXN2; (-) strand; PAM type: YTN; PAM sequence: TTT
gcataatgttcttcagagac

SEQ ID NO: 64968 - DNA, 20 bp, Artificial Sequence
  Description of Artificial Sequence: Synthetic oligonucleotide
  Target: ATXN2; (-) strand; PAM type: YTN; PAM sequence: TTT
tgcataatgttcttcagaga

SEQ ID NO: 64969 - DNA, 20 bp, Artificial Sequence
  Description of Artificial Sequence: Synthetic oligonucleotide
  Target: ATXN2; (-) strand; PAM type: YTN; PAM sequence: TTT
ttgcataatgttcttcagag

SEQ ID NO: 64970 - DNA, 20 bp, Artificial Sequence
  Description of Artificial Sequence: Synthetic oligonucleotide
  Target: ATXN2; (-) strand; PAM type: YTN; PAM sequence: TTG
aggatttttgcataatgttc

SEQ ID NO: 64971 - DNA, 20 bp, Artificial Sequence
  Description of Artificial Sequence: Synthetic oligonucleotide
  Target: ATXN2; (-) strand; PAM type: YTN; PAM sequence: TTA
tattgaggatttttgcataa

SEQ ID NO: 64972 - DNA, 20 bp, Artificial Sequence
  Description of Artificial Sequence: Synthetic oligonucleotide
  Target: ATXN2; (-) strand; PAM type: YTN; PAM sequence: CTA
gtattatattgaggattttt

SEQ ID NO: 64973 - DNA, 20 bp, Artificial Sequence
  Description of Artificial Sequence: Synthetic oligonucleotide
  Target: ATXN2; (-) strand; PAM type: YTN; PAM sequence: TTG
ctagtattatattgaggatt

SEQ ID NO: 64974 - DNA, 20 bp, Artificial Sequence
  Description of Artificial Sequence: Synthetic oligonucleotide
  Target: ATXN2; (-) strand; PAM type: YTN; PAM sequence: TTT
gctagtattatattgaggat

SEQ ID NO: 64975 - DNA, 20 bp, Artificial Sequence
  Description of Artificial Sequence: Synthetic oligonucleotide
  Target: ATXN2; (-) strand; PAM type: YTN; PAM sequence: TTC
ggtttgctagtattatattg

SEQ ID NO: 64976 - DNA, 20 bp, Artificial Sequence
  Description of Artificial Sequence: Synthetic oligonucleotide
  Target: ATXN2; (-) strand; PAM type: YTN; PAM sequence: CTG
aattcggtttgctagtatta

SEQ ID NO: 64977 - DNA, 20 bp, Artificial Sequence
  Description of Artificial Sequence: Synthetic oligonucleotide
  Target: ATXN2; (-) strand; PAM type: YTN; PAM sequence: TTA
ctgaattcggtttgctagta

SEQ ID NO: 64978 - DNA, 20 bp, Artificial Sequence
  Description of Artificial Sequence: Synthetic oligonucleotide
  Target: ATXN2; (-) strand; PAM type: YTN; PAM sequence: TTA
atgtgttactgaattcggtt

SEQ ID NO: 64979 - DNA, 20 bp, Artificial Sequence
  Description of Artificial Sequence: Synthetic oligonucleotide
  Target: ATXN2; (-) strand; PAM type: YTN; PAM sequence: TTT
aatgtgttactgaattcggt

SEQ ID NO: 64980 - DNA, 20 bp, Artificial Sequence
  Description of Artificial Sequence: Synthetic oligonucleotide
  Target: ATXN2; (-) strand; PAM type: YTN; PAM sequence: TTT
taatgtgttactgaattcgg

SEQ ID NO: 64981 - DNA, 20 bp, Artificial Sequence
  Description of Artificial Sequence: Synthetic oligonucleotide
  Target: ATXN2; (-) strand; PAM type: YTN; PAM sequence: TTT
ttaatgtgttactgaattcg

SEQ ID NO: 64982 - DNA, 20 bp, Artificial Sequence
  Description of Artificial Sequence: Synthetic oligonucleotide
  Target: ATXN2; (-) strand; PAM type: YTN; PAM sequence: CTT
tttaatgtgttactgaattc

SEQ ID NO: 64983 - DNA, 20 bp, Artificial Sequence
  Description of Artificial Sequence: Synthetic oligonucleotide
  Target: ATXN2; (-) strand; PAM type: YTN; PAM sequence: TTA
gtcatgatgaatgatctttt

SEQ ID NO: 64984 - DNA, 20 bp, Artificial Sequence
  Description of Artificial Sequence: Synthetic oligonucleotide
  Target: ATXN2; (-) strand; PAM type: YTN; PAM sequence: CTT
agtcatgatgaatgatcttt

SEQ ID NO: 64985 - DNA, 20 bp, Artificial Sequence
  Description of Artificial Sequence: Synthetic oligonucleotide
  Target: ATXN2; (-) strand; PAM type: YTN; PAM sequence: CTG
ggatgaatcccacttagtca

SEQ ID NO: 64986 - DNA, 20 bp, Artificial Sequence
  Description of Artificial Sequence: Synthetic oligonucleotide
  Target: ATXN2; (-) strand; PAM type: YTN; PAM sequence: TTG
catccctgggatgaatccca

SEQ ID NO: 64987 - DNA, 20 bp, Artificial Sequence
  Description of Artificial Sequence: Synthetic oligonucleotide
  Target: ATXN2; (-) strand; PAM type: YTN; PAM sequence: CTT
gcatccctgggatgaatccc

SEQ ID NO: 64988 - DNA, 20 bp, Artificial Sequence
  Description of Artificial Sequence: Synthetic oligonucleotide
  Target: ATXN2; (-) strand; PAM type: YTN; PAM sequence: TTG
cgtatgtcgaaccatccttg

SEQ ID NO: 64989 - DNA, 20 bp, Artificial Sequence
  Description of Artificial Sequence: Synthetic oligonucleotide
  Target: ATXN2; (-) strand; PAM type: YTN; PAM sequence: TTT
gcgtatgtcgaaccatcctt

SEQ ID NO: 64990 - DNA, 20 bp, Artificial Sequence
  Description of Artificial Sequence: Synthetic oligonucleotide
  Target: ATXN2; (-) strand; PAM type: YTN; PAM sequence: TTG
atttgcgtatgtcgaaccat

SEQ ID NO: 64991 - DNA, 20 bp, Artificial Sequence
  Description of Artificial Sequence: Synthetic oligonucleotide
  Target: ATXN2; (-) strand; PAM type: YTN; PAM sequence: TTA
ttgatttgcgtatgtcgaac

SEQ ID NO: 64992 - DNA, 20 bp, Artificial Sequence
  Description of Artificial Sequence: Synthetic oligonucleotide
  Target: ATXN2; (-) strand; PAM type: YTN; PAM sequence: TTT
attgatttgcgtatgtcgaa

SEQ ID NO: 64993 - DNA, 20 bp, Artificial Sequence
  Description of Artificial Sequence: Synthetic oligonucleotide
  Target: ATXN2; (-) strand; PAM type: YTN; PAM sequence: TTA
agatgtaccatgtttattga

SEQ ID NO: 64994 - DNA, 20 bp, Artificial Sequence
  Description of Artificial Sequence: Synthetic oligonucleotide
  Target: ATXN2; (-) strand; PAM type: YTN; PAM sequence: CTG
ttaagatgtaccatgtttat

SEQ ID NO: 64995 - DNA, 20 bp, Artificial Sequence
  Description of Artificial Sequence: Synthetic oligonucleotide
  Target: ATXN2; (-) strand; PAM type: YTN; PAM sequence: TTC
tgttaagatgtaccatgttt

SEQ ID NO: 64996 - DNA, 20 bp, Artificial Sequence
  Description of Artificial Sequence: Synthetic oligonucleotide
  Target: ATXN2; (-) strand; PAM type: YTN; PAM sequence: TTA
ttctgttaagatgtaccatg

SEQ ID NO: 64997 - DNA, 20 bp, Artificial Sequence
  Description of Artificial Sequence: Synthetic oligonucleotide
  Target: ATXN2; (-) strand; PAM type: YTN; PAM sequence: TTT
attctgttaagatgtaccat

SEQ ID NO: 64998 - DNA, 20 bp, Artificial Sequence
  Description of Artificial Sequence: Synthetic oligonucleotide
  Target: ATXN2; (-) strand; PAM type: YTN; PAM sequence: TTT
tattctgttaagatgtacca

SEQ ID NO: 64999 - DNA, 20 bp, Artificial Sequence
  Description of Artificial Sequence: Synthetic oligonucleotide
  Target: ATXN2; (-) strand; PAM type: YTN; PAM sequence: CTT
ttattctgttaagatgtacc

SEQ ID NO: 65000 - DNA, 20 bp, Artificial Sequence
  Description of Artificial Sequence: Synthetic oligonucleotide
  Target: ATXN2; (-) strand; PAM type: YTN; PAM sequence: TTG
tcttttattctgttaagatg

SEQ ID NO: 65001 - DNA, 20 bp, Artificial Sequence
  Description of Artificial Sequence: Synthetic oligonucleotide
  Target: ATXN2; (-) strand; PAM type: YTN; PAM sequence: TTT
gtcttttattctgttaagat

SEQ ID NO: 65002 - DNA, 20 bp, Artificial Sequence
  Description of Artificial Sequence: Synthetic oligonucleotide
  Target: ATXN2; (-) strand; PAM type: YTN; PAM sequence: CTT
tgtcttttattctgttaaga

SEQ ID NO: 65003 - DNA, 20 bp, Artificial Sequence
  Description of Artificial Sequence: Synthetic oligonucleotide
  Target: ATXN2; (-) strand; PAM type: YTN; PAM sequence: TTA
gtctttgtcttttattctgt

SEQ ID NO: 65004 - DNA, 20 bp, Artificial Sequence
  Description of Artificial Sequence: Synthetic oligonucleotide
  Target: ATXN2; (-) strand; PAM type: YTN; PAM sequence: TTT
agtctttgtcttttattctg

SEQ ID NO: 65005 - DNA, 20 bp, Artificial Sequence
  Description of Artificial Sequence: Synthetic oligonucleotide
  Target: ATXN2; (-) strand; PAM type: YTN; PAM sequence: TTT
tagtctttgtcttttattct

SEQ ID NO: 65006 - DNA, 20 bp, Artificial Sequence
  Description of Artificial Sequence: Synthetic oligonucleotide
  Target: ATXN2; (-) strand; PAM type: YTN; PAM sequence: TTT
ttagtctttgtcttttattc

SEQ ID NO: 65007 - DNA, 20 bp, Artificial Sequence
  Description of Artificial Sequence: Synthetic oligonucleotide
  Target: ATXN2; (-) strand; PAM type: YTN; PAM sequence: TTT
tttagtctttgtcttttatt

SEQ ID NO: 65008 - DNA, 20 bp, Artificial Sequence
  Description of Artificial Sequence: Synthetic oligonucleotide
  Target: ATXN2; (-) strand; PAM type: YTN; PAM sequence: TTA
tatcatacacagtataaata

SEQ ID NO: 65009 - DNA, 20 bp, Artificial Sequence
  Description of Artificial Sequence: Synthetic oligonucleotide
  Target: ATXN2; (-) strand; PAM type: YTN; PAM sequence: TTT
atatcatacacagtataaat

SEQ ID NO: 65010 - DNA, 20 bp, Artificial Sequence
  Description of Artificial Sequence: Synthetic oligonucleotide
  Target: ATXN2; (-) strand; PAM type: YTN; PAM sequence: TTA
tatcatgtgatatatattta

SEQ ID NO: 65011 - DNA, 20 bp, Artificial Sequence
  Description of Artificial Sequence: Synthetic oligonucleotide
  Target: ATXN2; (-) strand; PAM type: YTN; PAM sequence: TTT
atatcatgtgatatatattt

SEQ ID NO: 65012 - DNA, 20 bp, Artificial Sequence
  Description of Artificial Sequence: Synthetic oligonucleotide
  Target: ATXN2; (-) strand; PAM type: YTN; PAM sequence: TTA
tatatttatatcatgtgata

SEQ ID NO: 65013 - DNA, 20 bp, Artificial Sequence
  Description of Artificial Sequence: Synthetic oligonucleotide
  Target: ATXN2; (-) strand; PAM type: YTN; PAM sequence: TTA
tgtgatataaattatatatt

SEQ ID NO: 65014 - DNA, 20 bp, Artificial Sequence
  Description of Artificial Sequence: Synthetic oligonucleotide
  Target: ATXN2; (-) strand; PAM type: YTN; PAM sequence: TTT
atgtgatataaattatatat

SEQ ID NO: 65015 - DNA, 20 bp, Artificial Sequence
  Description of Artificial Sequence: Synthetic oligonucleotide
  Target: ATXN2; (-) strand; PAM type: YTN; PAM sequence: TTT
tatgtgatataaattatata

SEQ ID NO: 65016 - DNA, 20 bp, Artificial Sequence
  Description of Artificial Sequence: Synthetic oligonucleotide
  Target: ATXN2; (-) strand; PAM type: YTN; PAM sequence: TTA
atcataaggggatgtggcat

SEQ ID NO: 65017 - DNA, 20 bp, Artificial Sequence
  Description of Artificial Sequence: Synthetic oligonucleotide
  Target: ATXN2; (-) strand; PAM type: YTN; PAM sequence: TTT
aatcataaggggatgtggca

SEQ ID NO: 65018 - DNA, 20 bp, Artificial Sequence
  Description of Artificial Sequence: Synthetic oligonucleotide
  Target: ATXN2; (-) strand; PAM type: YTN; PAM sequence: TTT
taatcataaggggatgtggc

SEQ ID NO: 65019 - DNA, 20 bp, Artificial Sequence
  Description of Artificial Sequence: Synthetic oligonucleotide
  Target: ATXN2; (-) strand; PAM type: YTN; PAM sequence: TTA
caggcgtgagccaccacgcc

SEQ ID NO: 65020 - DNA, 20 bp, Artificial Sequence
  Description of Artificial Sequence: Synthetic oligonucleotide
  Target: ATXN2; (-) strand; PAM type: YTN; PAM sequence: CTG
ggattacaggcgtgagccac

SEQ ID NO: 65021 - DNA, 20 bp, Artificial Sequence
  Description of Artificial Sequence: Synthetic oligonucleotide
  Target: ATXN2; (-) strand; PAM type: YTN; PAM sequence: CTC
ccaaagtgctgggattacag

SEQ ID NO: 65022 - DNA, 20 bp, Artificial Sequence
  Description of Artificial Sequence: Synthetic oligonucleotide
  Target: ATXN2; (-) strand; PAM type: YTN; PAM sequence: CTC
agcctcccaaagtgctggga

SEQ ID NO: 65023 - DNA, 20 bp, Artificial Sequence
  Description of Artificial Sequence: Synthetic oligonucleotide
  Target: ATXN2; (-) strand; PAM type: YTN; PAM sequence: CTG
cccgtctcagcctcccaaag

SEQ ID NO: 65024 - DNA, 20 bp, Artificial Sequence
  Description of Artificial Sequence: Synthetic oligonucleotide
  Target: ATXN2; (-) strand; PAM type: YTN; PAM sequence: CTC
atgatctgcccgtctcagcc

SEQ ID NO: 65025 - DNA, 20 bp, Artificial Sequence
  Description of Artificial Sequence: Synthetic oligonucleotide
  Target: ATXN2; (-) strand; PAM type: YTN; PAM sequence: CTG
acctcatgatctgcccgtct

SEQ ID NO: 65026 - DNA, 20 bp, Artificial Sequence
  Description of Artificial Sequence: Synthetic oligonucleotide
  Target: ATXN2; (-) strand; PAM type: YTN; PAM sequence: CTC
ctgacctcatgatctgcccg

SEQ ID NO: 65027 - DNA, 20 bp, Artificial Sequence
  Description of Artificial Sequence: Synthetic oligonucleotide
  Target: ATXN2; (-) strand; PAM type: YTN; PAM sequence: CTC
gaactcctgacctcatgatc

SEQ ID NO: 65028 - DNA, 20 bp, Artificial Sequence
  Description of Artificial Sequence: Synthetic oligonucleotide
  Target: ATXN2; (-) strand; PAM type: YTN; PAM sequence: TTA
gccaggatggtctcgaactc

SEQ ID NO: 65029 - DNA, 20 bp, Artificial Sequence
  Description of Artificial Sequence: Synthetic oligonucleotide
  Target: ATXN2; (-) strand; PAM type: YTN; PAM sequence: TTC
accgtgttagccaggatggt

SEQ ID NO: 65030 - DNA, 20 bp, Artificial Sequence
  Description of Artificial Sequence: Synthetic oligonucleotide
  Target: ATXN2; (-) strand; PAM type: YTN; PAM sequence: TTT
caccgtgttagccaggatgg

SEQ ID NO: 65031 - DNA, 20 bp, Artificial Sequence
  Description of Artificial Sequence: Synthetic oligonucleotide
  Target: ATXN2; (-) strand; PAM type: YTN; PAM sequence: TTA
gtagagacggggtttcaccg

SEQ ID NO: 65032 - DNA, 20 bp, Artificial Sequence
  Description of Artificial Sequence: Synthetic oligonucleotide
  Target: ATXN2; (-) strand; PAM type: YTN; PAM sequence: TTT
agtagagacggggtttcacc

SEQ ID NO: 65033 - DNA, 20 bp, Artificial Sequence
  Description of Artificial Sequence: Synthetic oligonucleotide
  Target: ATXN2; (-) strand; PAM type: YTN; PAM sequence: TTT
tagtagagacggggtttcac

SEQ ID NO: 65034 - DNA, 20 bp, Artificial Sequence
  Description of Artificial Sequence: Synthetic oligonucleotide
  Target: ATXN2; (-) strand; PAM type: YTN; PAM sequence: TTT
ttagtagagacggggtttca

SEQ ID NO: 65035 - DNA, 20 bp, Artificial Sequence
  Description of Artificial Sequence: Synthetic oligonucleotide
  Target: ATXN2; (-) strand; PAM type: YTN; PAM sequence: TTG
tatttttagtagagacgggg

SEQ ID NO: 65036 - DNA, 20 bp, Artificial Sequence
  Description of Artificial Sequence: Synthetic oligonucleotide
  Target: ATXN2; (-) strand; PAM type: YTN; PAM sequence: TTT
gtatttttagtagagacggg

SEQ ID NO: 65037 - DNA, 20 bp, Artificial Sequence
  Description of Artificial Sequence: Synthetic oligonucleotide
  Target: ATXN2; (-) strand; PAM type: YTN; PAM sequence: TTT
tgtatttttagtagagacgg

SEQ ID NO: 65038 - DNA, 20 bp, Artificial Sequence
  Description of Artificial Sequence: Synthetic oligonucleotide
  Target: ATXN2; (-) strand; PAM type: YTN; PAM sequence: TTT
ttgtatttttagtagagacg

SEQ ID NO: 65039 - DNA, 20 bp, Artificial Sequence
  Description of Artificial Sequence: Synthetic oligonucleotide
  Target: ATXN2; (-) strand; PAM type: YTN; PAM sequence: TTT
tttgtatttttagtagagac

SEQ ID NO: 65040 - DNA, 20 bp, Artificial Sequence
  Description of Artificial Sequence: Synthetic oligonucleotide
  Target: ATXN2; (-) strand; PAM type: YTN; PAM sequence: CTA
attttttgtatttttagtag

SEQ ID NO: 65041 - DNA, 20 bp, Artificial Sequence
  Description of Artificial Sequence: Synthetic oligonucleotide
  Target: ATXN2; (-) strand; PAM type: YTN; PAM sequence: CTA
acacgcccggctaatttttt

SEQ ID NO: 65042 - DNA, 20 bp, Artificial Sequence
  Description of Artificial Sequence: Synthetic oligonucleotide
  Target: ATXN2; (-) strand; PAM type: YTN; PAM sequence: CTA
caggtgtccgctaacacgcc

SEQ ID NO: 65043 - DNA, 20 bp, Artificial Sequence
  Description of Artificial Sequence: Synthetic oligonucleotide
  Target: ATXN2; (-) strand; PAM type: YTN; PAM sequence: CTG
ggactacaggtgtccgctaa

SEQ ID NO: 65044 - DNA, 20 bp, Artificial Sequence
  Description of Artificial Sequence: Synthetic oligonucleotide
  Target: ATXN2; (-) strand; PAM type: YTN; PAM sequence: CTC
ccgagtagctgggactacag

SEQ ID NO: 65045 - DNA, 20 bp, Artificial Sequence
  Description of Artificial Sequence: Synthetic oligonucleotide
  Target: ATXN2; (-) strand; PAM type: YTN; PAM sequence: CTC
agcctcccgagtagctggga

SEQ ID NO: 65046 - DNA, 20 bp, Artificial Sequence
  Description of Artificial Sequence: Synthetic oligonucleotide
  Target: ATXN2; (-) strand; PAM type: YTN; PAM sequence: CTG
cctcagcctcccgagtagct

SEQ ID NO: 65047 - DNA, 20 bp, Artificial Sequence
  Description of Artificial Sequence: Synthetic oligonucleotide
  Target: ATXN2; (-) strand; PAM type: YTN; PAM sequence: CTC
ctgcctcagcctcccgagta

SEQ ID NO: 65048 - DNA, 20 bp, Artificial Sequence
  Description of Artificial Sequence: Synthetic oligonucleotide
  Target: ATXN2; (-) strand; PAM type: YTN; PAM sequence: TTC
tcctgcctcagcctcccgag

SEQ ID NO: 65049 - DNA, 20 bp, Artificial Sequence
  Description of Artificial Sequence: Synthetic oligonucleotide
  Target: ATXN2; (-) strand; PAM type: YTN; PAM sequence: TTC
atgccgttctcctgcctcag

SEQ ID NO: 65050 - DNA, 20 bp, Artificial Sequence
  Description of Artificial Sequence: Synthetic oligonucleotide
  Target: ATXN2; (-) strand; PAM type: YTN; PAM sequence: CTG
ggttcatgccgttctcctgc

SEQ ID NO: 65051 - DNA, 20 bp, Artificial Sequence
  Description of Artificial Sequence: Synthetic oligonucleotide
  Target: ATXN2; (-) strand; PAM type: YTN; PAM sequence: CTC
ctgggttcatgccgttctcc

SEQ ID NO: 65052 - DNA, 20 bp, Artificial Sequence
  Description of Artificial Sequence: Synthetic oligonucleotide
  Target: ATXN2; (-) strand; PAM type: YTN; PAM sequence: CTC
cacctcctgggttcatgccg

SEQ ID NO: 65053 - DNA, 20 bp, Artificial Sequence
  Description of Artificial Sequence: Synthetic oligonucleotide
  Target: ATXN2; (-) strand; PAM type: YTN; PAM sequence: CTG
caagctccacctcctgggtt

SEQ ID NO: 65054 - DNA, 20 bp, Artificial Sequence
  Description of Artificial Sequence: Synthetic oligonucleotide
  Target: ATXN2; (-) strand; PAM type: YTN; PAM sequence: CTC
actgcaagctccacctcctg

SEQ ID NO: 65055 - DNA, 20 bp, Artificial Sequence
  Description of Artificial Sequence: Synthetic oligonucleotide
  Target: ATXN2; (-) strand; PAM type: YTN; PAM sequence: TTG
gctcactgcaagctccacct

SEQ ID NO: 65056 - DNA, 20 bp, Artificial Sequence
  Description of Artificial Sequence: Synthetic oligonucleotide
  Target: ATXN2; (-) strand; PAM type: YTN; PAM sequence: CTG
gagtgcagtggcgcaatgtt

SEQ ID NO: 65057 - DNA, 20 bp, Artificial Sequence
  Description of Artificial Sequence: Synthetic oligonucleotide
  Target: ATXN2; (-) strand; PAM type: YTN; PAM sequence: CTG
tcacccaggctggagtgcag

SEQ ID NO: 65058 - DNA, 20 bp, Artificial Sequence
  Description of Artificial Sequence: Synthetic oligonucleotide
  Target: ATXN2; (-) strand; PAM type: YTN; PAM sequence: CTC
tgtcacccaggctggagtgc

SEQ ID NO: 65059 - DNA, 20 bp, Artificial Sequence
  Description of Artificial Sequence: Synthetic oligonucleotide
  Target: ATXN2; (-) strand; PAM type: YTN; PAM sequence: CTC
actctgtcacccaggctgga

SEQ ID NO: 65060 - DNA, 20 bp, Artificial Sequence
  Description of Artificial Sequence: Synthetic oligonucleotide
  Target: ATXN2; (-) strand; PAM type: YTN; PAM sequence: TTG
agatggagtctcactctgtc

SEQ ID NO: 65061 - DNA, 20 bp, Artificial Sequence
  Description of Artificial Sequence: Synthetic oligonucleotide
  Target: ATXN2; (-) strand; PAM type: YTN; PAM sequence: TTT
gagatggagtctcactctgt

SEQ ID NO: 65062 - DNA, 20 bp, Artificial Sequence
  Description of Artificial Sequence: Synthetic oligonucleotide
  Target: ATXN2; (-) strand; PAM type: YTN; PAM sequence: TTT
tgagatggagtctcactctg

SEQ ID NO: 65063 - DNA, 20 bp, Artificial Sequence
  Description of Artificial Sequence: Synthetic oligonucleotide
  Target: ATXN2; (-) strand; PAM type: YTN; PAM sequence: TTT
ttgagatggagtctcactct

SEQ ID NO: 65064 - DNA, 20 bp, Artificial Sequence
  Description of Artificial Sequence: Synthetic oligonucleotide
  Target: ATXN2; (-) strand; PAM type: YTN; PAM sequence: TTG
tttttgagatggagtctcac

SEQ ID NO: 65065 - DNA, 20 bp, Artificial Sequence
  Description of Artificial Sequence: Synthetic oligonucleotide
  Target: ATXN2; (-) strand; PAM type: YTN; PAM sequence: TTT
gtttttgagatggagtctca

SEQ ID NO: 65066 - DNA, 20 bp, Artificial Sequence
  Description of Artificial Sequence: Synthetic oligonucleotide
  Target: ATXN2; (-) strand; PAM type: YTN; PAM sequence: TTG
tttgtttttgagatggagtc

SEQ ID NO: 65067 - DNA, 20 bp, Artificial Sequence
  Description of Artificial Sequence: Synthetic oligonucleotide
  Target: ATXN2; (-) strand; PAM type: YTN; PAM sequence: TTT
gtttgtttttgagatggagt

SEQ ID NO: 65068 - DNA, 20 bp, Artificial Sequence
  Description of Artificial Sequence: Synthetic oligonucleotide
  Target: ATXN2; (-) strand; PAM type: YTN; PAM sequence: TTG
tttgtttgtttttgagatgg

SEQ ID NO: 65069 - DNA, 20 bp, Artificial Sequence
  Description of Artificial Sequence: Synthetic oligonucleotide
  Target: ATXN2; (-) strand; PAM type: YTN; PAM sequence: TTT
gtttgtttgtttttgagatg

SEQ ID NO: 65070 - DNA, 20 bp, Artificial Sequence
  Description of Artificial Sequence: Synthetic oligonucleotide
  Target: ATXN2; (-) strand; PAM type: YTN; PAM sequence: TTT
tgtttgtttgtttttgagat

SEQ ID NO: 65071 - DNA, 20 bp, Artificial Sequence
  Description of Artificial Sequence: Synthetic oligonucleotide
  Target: ATXN2; (-) strand; PAM type: YTN; PAM sequence: TTT
ttgtttgtttgtttttgaga

SEQ ID NO: 65072 - DNA, 20 bp, Artificial Sequence
  Description of Artificial Sequence: Synthetic oligonucleotide
  Target: ATXN2; (-) strand; PAM type: YTN; PAM sequence: TTT
tttgtttgtttgtttttgag

SEQ ID NO: 65073 - DNA, 20 bp, Artificial Sequence
  Description of Artificial Sequence: Synthetic oligonucleotide
  Target: ATXN2; (-) strand; PAM type: YTN; PAM sequence: TTT
ttttgtttgtttgtttttga

SEQ ID NO: 65074 - DNA, 20 bp, Artificial Sequence
  Description of Artificial Sequence: Synthetic oligonucleotide
  Target: ATXN2; (-) strand; PAM type: YTN; PAM sequence: TTG
gggtttttttgtttgtttgt

SEQ ID NO: 65075 - DNA, 20 bp, Artificial Sequence
  Description of Artificial Sequence: Synthetic oligonucleotide
  Target: ATXN2; (-) strand; PAM type: YTN; PAM sequence: TTT
ggggtttttttgtttgtttg

SEQ ID NO: 65076 - DNA, 20 bp, Artificial Sequence
  Description of Artificial Sequence: Synthetic oligonucleotide
  Target: ATXN2; (-) strand; PAM type: YTN; PAM sequence: CTT
tggggtttttttgtttgttt

SEQ ID NO: 65077 - DNA, 20 bp, Artificial Sequence
  Description of Artificial Sequence: Synthetic oligonucleotide
  Target: ATXN2; (-) strand; PAM type: YTN; PAM sequence: TTC
tttggggtttttttgtttgt

SEQ ID NO: 65078 - DNA, 20 bp, Artificial Sequence
  Description of Artificial Sequence: Synthetic oligonucleotide
  Target: ATXN2; (-) strand; PAM type: YTN; PAM sequence: CTA
tacccagttctttggggttt

SEQ ID NO: 65079 - DNA, 20 bp, Artificial Sequence
  Description of Artificial Sequence: Synthetic oligonucleotide
  Target: ATXN2; (-) strand; PAM type: YTN; PAM sequence: TTC
tatacccagttctttggggt

SEQ ID NO: 65080 - DNA, 20 bp, Artificial Sequence
  Description of Artificial Sequence: Synthetic oligonucleotide
  Target: ATXN2; (-) strand; PAM type: YTN; PAM sequence: CTT
ctatacccagttctttgggg

SEQ ID NO: 65081 - DNA, 20 bp, Artificial Sequence
  Description of Artificial Sequence: Synthetic oligonucleotide
  Target: ATXN2; (-) strand; PAM type: YTN; PAM sequence: TTC
cttctatacccagttctttg

SEQ ID NO: 65082 - DNA, 20 bp, Artificial Sequence
  Description of Artificial Sequence: Synthetic oligonucleotide
  Target: ATXN2; (-) strand; PAM type: YTN; PAM sequence: TTG
aggtatattccttctatacc

SEQ ID NO: 65083 - DNA, 20 bp, Artificial Sequence
  Description of Artificial Sequence: Synthetic oligonucleotide
  Target: ATXN2; (-) strand; PAM type: YTN; PAM sequence: TTG
ttgaggtatattccttctat

SEQ ID NO: 65084 - DNA, 20 bp, Artificial Sequence
  Description of Artificial Sequence: Synthetic oligonucleotide
  Target: ATXN2; (-) strand; PAM type: YTN; PAM sequence: TTT
gttgaggtatattccttcta

SEQ ID NO: 65085 - DNA, 20 bp, Artificial Sequence
  Description of Artificial Sequence: Synthetic oligonucleotide
  Target: ATXN2; (-) strand; PAM type: YTN; PAM sequence: TTT
tgttgaggtatattccttct

SEQ ID NO: 65086 - DNA, 20 bp, Artificial Sequence
  Description of Artificial Sequence: Synthetic oligonucleotide
  Target: ATXN2; (-) strand; PAM type: YTN; PAM sequence: CTG
ttttgttgaggtatattcct

SEQ ID NO: 65087 - DNA, 20 bp, Artificial Sequence
  Description of Artificial Sequence: Synthetic oligonucleotide
  Target: ATXN2; (-) strand; PAM type: YTN; PAM sequence: TTC
tgttttgttgaggtatattc

SEQ ID NO: 65088 - DNA, 20 bp, Artificial Sequence
  Description of Artificial Sequence: Synthetic oligonucleotide
  Target: ATXN2; (-) strand; PAM type: YTN; PAM sequence: CTT
ctgttttgttgaggtatatt

SEQ ID NO: 65089 - DNA, 20 bp, Artificial Sequence
  Description of Artificial Sequence: Synthetic oligonucleotide
  Target: ATXN2; (-) strand; PAM type: YTN; PAM sequence: CTG
tcatatatggcttctgtttt

SEQ ID NO: 65090 - DNA, 20 bp, Artificial Sequence
  Description of Artificial Sequence: Synthetic oligonucleotide
  Target: ATXN2; (-) strand; PAM type: YTN; PAM sequence: TTA
tgggtctgtcatatatggct

SEQ ID NO: 65091 - DNA, 20 bp, Artificial Sequence
  Description of Artificial Sequence: Synthetic oligonucleotide
  Target: ATXN2; (-) strand; PAM type: YTN; PAM sequence: CTA
gttatgggtctgtcatatat

SEQ ID NO: 65092 - DNA, 20 bp, Artificial Sequence
  Description of Artificial Sequence: Synthetic oligonucleotide
  Target: ATXN2; (-) strand; PAM type: YTN; PAM sequence: TTC
agtatggtactagttatggg

SEQ ID NO: 65093 - DNA, 20 bp, Artificial Sequence
  Description of Artificial Sequence: Synthetic oligonucleotide
  Target: ATXN2; (-) strand; PAM type: YTN; PAM sequence: TTT
cagtatggtactagttatgg

SEQ ID NO: 65094 - DNA, 20 bp, Artificial Sequence
  Description of Artificial Sequence: Synthetic oligonucleotide
  Target: ATXN2; (-) strand; PAM type: YTN; PAM sequence: TTT
tcagtatggtactagttatg

SEQ ID NO: 65095 - DNA, 20 bp, Artificial Sequence
  Description of Artificial Sequence: Synthetic oligonucleotide
  Target: ATXN2; (-) strand; PAM type: YTN; PAM sequence: CTT
ttcagtatggtactagttat

SEQ ID NO: 65096 - DNA, 20 bp, Artificial Sequence
  Description of Artificial Sequence: Synthetic oligonucleotide
  Target: ATXN2; (-) strand; PAM type: YTN; PAM sequence: TTC
ccttttcagtatggtactag

SEQ ID NO: 65097 - DNA, 20 bp, Artificial Sequence
  Description of Artificial Sequence: Synthetic oligonucleotide
  Target: ATXN2; (-) strand; PAM type: YTN; PAM sequence: TTT
cccttttcagtatggtacta

SEQ ID NO: 65098 - DNA, 20 bp, Artificial Sequence
  Description of Artificial Sequence: Synthetic oligonucleotide
  Target: ATXN2; (-) strand; PAM type: YTN; PAM sequence: TTT
tcccttttcagtatggtact

SEQ ID NO: 65099 - DNA, 20 bp, Artificial Sequence
  Description of Artificial Sequence: Synthetic oligonucleotide
  Target: ATXN2; (-) strand; PAM type: YTN; PAM sequence: TTT
ttcccttttcagtatggtac

SEQ ID NO: 65100 - DNA, 20 bp, Artificial Sequence
  Description of Artificial Sequence: Synthetic oligonucleotide
  Target: ATXN2; (-) strand; PAM type: YTN; PAM sequence: TTC
agtttttcccttttcagtat

SEQ ID NO: 65101 - DNA, 20 bp, Artificial Sequence
  Description of Artificial Sequence: Synthetic oligonucleotide
  Target: ATXN2; (-) strand; PAM type: YTN; PAM sequence: TTT
cagtttttcccttttcagta

SEQ ID NO: 65102 - DNA, 20 bp, Artificial Sequence
  Description of Artificial Sequence: Synthetic oligonucleotide
  Target: ATXN2; (-) strand; PAM type: YTN; PAM sequence: CTT
tcagtttttcccttttcagt

SEQ ID NO: 65103 - DNA, 20 bp, Artificial Sequence
  Description of Artificial Sequence: Synthetic oligonucleotide
  Target: ATXN2; (-) strand; PAM type: YTN; PAM sequence: TTA
gaggaaagcctttcagtttt

SEQ ID NO: 65104 - DNA, 20 bp, Artificial Sequence
  Description of Artificial Sequence: Synthetic oligonucleotide
  Target: ATXN2; (-) strand; PAM type: YTN; PAM sequence: CTT
agaggaaagcctttcagttt

SEQ ID NO: 65105 - DNA, 20 bp, Artificial Sequence
  Description of Artificial Sequence: Synthetic oligonucleotide
  Target: ATXN2; (-) strand; PAM type: YTN; PAM sequence: TTC
cagatcttagaggaaagcct

SEQ ID NO: 65106 - DNA, 20 bp, Artificial Sequence
  Description of Artificial Sequence: Synthetic oligonucleotide
  Target: ATXN2; (-) strand; PAM type: YTN; PAM sequence: TTG
ttccagatcttagaggaaag

SEQ ID NO: 65107 - DNA, 20 bp, Artificial Sequence
  Description of Artificial Sequence: Synthetic oligonucleotide
  Target: ATXN2; (-) strand; PAM type: YTN; PAM sequence: CTT
gttccagatcttagaggaaa

SEQ ID NO: 65108 - DNA, 20 bp, Artificial Sequence
  Description of Artificial Sequence: Synthetic oligonucleotide
  Target: ATXN2; (-) strand; PAM type: YTN; PAM sequence: TTG
tcttgttccagatcttagag

SEQ ID NO: 65109 - DNA, 20 bp, Artificial Sequence
  Description of Artificial Sequence: Synthetic oligonucleotide
  Target: ATXN2; (-) strand; PAM type: YTN; PAM sequence: CTT
gtcttgttccagatcttaga

SEQ ID NO: 65110 - DNA, 20 bp, Artificial Sequence
  Description of Artificial Sequence: Synthetic oligonucleotide
  Target: ATXN2; (-) strand; PAM type: YTN; PAM sequence: TTG
aataacaatggtgaaagtgg

SEQ ID NO: 65111 - DNA, 20 bp, Artificial Sequence
  Description of Artificial Sequence: Synthetic oligonucleotide
  Target: ATXN2; (-) strand; PAM type: YTN; PAM sequence: TTA
tgttgaataacaatggtgaa

SEQ ID NO: 65112 - DNA, 20 bp, Artificial Sequence
  Description of Artificial Sequence: Synthetic oligonucleotide
  Target: ATXN2; (-) strand; PAM type: YTN; PAM sequence: TTC
cgagtattatgttgaataac

SEQ ID NO: 65113 - DNA, 20 bp, Artificial Sequence
  Description of Artificial Sequence: Synthetic oligonucleotide
  Target: ATXN2; (-) strand; PAM type: YTN; PAM sequence: CTT
ccgagtattatgttgaataa

SEQ ID NO: 65114 - DNA, 20 bp, Artificial Sequence
  Description of Artificial Sequence: Synthetic oligonucleotide
  Target: ATXN2; (-) strand; PAM type: YTN; PAM sequence: TTA
ggacttccgagtattatgtt

SEQ ID NO: 65115 - DNA, 20 bp, Artificial Sequence
  Description of Artificial Sequence: Synthetic oligonucleotide
  Target: ATXN2; (-) strand; PAM type: YTN; PAM sequence: CTC
caattaggacttccgagtat

SEQ ID NO: 65116 - DNA, 20 bp, Artificial Sequence
  Description of Artificial Sequence: Synthetic oligonucleotide
  Target: ATXN2; (-) strand; PAM type: YTN; PAM sequence: TTG
ctccaattaggacttccgag

SEQ ID NO: 65117 - DNA, 20 bp, Artificial Sequence
  Description of Artificial Sequence: Synthetic oligonucleotide
  Target: ATXN2; (-) strand; PAM type: YTN; PAM sequence: CTG
attgctccaattaggacttc

SEQ ID NO: 65118 - DNA, 20 bp, Artificial Sequence
  Description of Artificial Sequence: Synthetic oligonucleotide
  Target: ATXN2; (-) strand; PAM type: YTN; PAM sequence: TTG
tctgattgctccaattagga

SEQ ID NO: 65119 - DNA, 20 bp, Artificial Sequence
  Description of Artificial Sequence: Synthetic oligonucleotide
  Target: ATXN2; (-) strand; PAM type: YTN; PAM sequence: CTG
ttgtctgattgctccaatta

SEQ ID NO: 65120 - DNA, 20 bp, Artificial Sequence
  Description of Artificial Sequence: Synthetic oligonucleotide
  Target: ATXN2; (-) strand; PAM type: YTN; PAM sequence: TTC
tgttgtctgattgctccaat

SEQ ID NO: 65121 - DNA, 20 bp, Artificial Sequence
  Description of Artificial Sequence: Synthetic oligonucleotide
  Target: ATXN2; (-) strand; PAM type: YTN; PAM sequence: TTT
ctgttgtctgattgctccaa

SEQ ID NO: 65122 - DNA, 20 bp, Artificial Sequence
  Description of Artificial Sequence: Synthetic oligonucleotide
  Target: ATXN2; (-) strand; PAM type: YTN; PAM sequence: CTT
tctgttgtctgattgctcca

SEQ ID NO: 65123 - DNA, 20 bp, Artificial Sequence
  Description of Artificial Sequence: Synthetic oligonucleotide
  Target: ATXN2; (-) strand; PAM type: YTN; PAM sequence: TTC
tttctgttgtctgattgctc

SEQ ID NO: 65124 - DNA, 20 bp, Artificial Sequence
  Description of Artificial Sequence: Synthetic oligonucleotide
  Target: ATXN2; (-) strand; PAM type: YTN; PAM sequence: TTT
ctttctgttgtctgattgct

SEQ ID NO: 65125 - DNA, 20 bp, Artificial Sequence
  Description of Artificial Sequence: Synthetic oligonucleotide
  Target: ATXN2; (-) strand; PAM type: YTN; PAM sequence: TTA
tttctttctgttgtctgatt

SEQ ID NO: 65126 - DNA, 20 bp, Artificial Sequence
  Description of Artificial Sequence: Synthetic oligonucleotide
  Target: ATXN2; (-) strand; PAM type: YTN; PAM sequence: TTT
atttctttctgttgtctgat

SEQ ID NO: 65127 - DNA, 20 bp, Artificial Sequence
  Description of Artificial Sequence: Synthetic oligonucleotide
  Target: ATXN2; (-) strand; PAM type: YTN; PAM sequence: TTT
tatttctttctgttgtctga

SEQ ID NO: 65128 - DNA, 20 bp, Artificial Sequence
  Description of Artificial Sequence: Synthetic oligonucleotide
  Target: ATXN2; (-) strand; PAM type: YTN; PAM sequence: TTT
ttatttctttctgttgtctg

SEQ ID NO: 65129 - DNA, 20 bp, Artificial Sequence
  Description of Artificial Sequence: Synthetic oligonucleotide
  Target: ATXN2; (-) strand; PAM type: YTN; PAM sequence: CTT
tttatttctttctgttgtct

SEQ ID NO: 65130 - DNA, 20 bp, Artificial Sequence
  Description of Artificial Sequence: Synthetic oligonucleotide
  Target: ATXN2; (-) strand; PAM type: YTN; PAM sequence: TTC
cagtgtggatgctttttatt

SEQ ID NO: 65131 - DNA, 20 bp, Artificial Sequence
  Description of Artificial Sequence: Synthetic oligonucleotide
  Target: ATXN2; (-) strand; PAM type: YTN; PAM sequence: TTC
cattccagtgtggatgcttt

SEQ ID NO: 65132 - DNA, 20 bp, Artificial Sequence
  Description of Artificial Sequence: Synthetic oligonucleotide
  Target: ATXN2; (-) strand; PAM type: YTN; PAM sequence: CTT
ccattccagtgtggatgctt

SEQ ID NO: 65133 - DNA, 20 bp, Artificial Sequence
  Description of Artificial Sequence: Synthetic oligonucleotide
  Target: ATXN2; (-) strand; PAM type: YTN; PAM sequence: TTC
ttccattccagtgtggatgc

SEQ ID NO: 65134 - DNA, 20 bp, Artificial Sequence
  Description of Artificial Sequence: Synthetic oligonucleotide
  Target: ATXN2; (-) strand; PAM type: YTN; PAM sequence: CTT
cttccattccagtgtggatg

SEQ ID NO: 65135 - DNA, 20 bp, Artificial Sequence
  Description of Artificial Sequence: Synthetic oligonucleotide
  Target: ATXN2; (-) strand; PAM type: YTN; PAM sequence: TTG
acttcttccattccagtgtg

SEQ ID NO: 65136 - DNA, 20 bp, Artificial Sequence
  Description of Artificial Sequence: Synthetic oligonucleotide
  Target: ATXN2; (-) strand; PAM type: YTN; PAM sequence: TTT
gacttcttccattccagtgt

SEQ ID NO: 65137 - DNA, 20 bp, Artificial Sequence
  Description of Artificial Sequence: Synthetic oligonucleotide
  Target: ATXN2; (-) strand; PAM type: YTN; PAM sequence: CTG
caaacaaggataatttgact

SEQ ID NO: 65138 - DNA, 20 bp, Artificial Sequence
  Description of Artificial Sequence: Synthetic oligonucleotide
  Target: ATXN2; (-) strand; PAM type: YTN; PAM sequence: TTA
tctgcaaacaaggataattt

SEQ ID NO: 65139 - DNA, 20 bp, Artificial Sequence
  Description of Artificial Sequence: Synthetic oligonucleotide
  Target: ATXN2; (-) strand; PAM type: YTN; PAM sequence: TTC
caaatgtaagatcatattat

SEQ ID NO: 65140 - DNA, 20 bp, Artificial Sequence
  Description of Artificial Sequence: Synthetic oligonucleotide
  Target: ATXN2; (-) strand; PAM type: YTN; PAM sequence: TTT
ccaaatgtaagatcatatta

SEQ ID NO: 65141 - DNA, 20 bp, Artificial Sequence
  Description of Artificial Sequence: Synthetic oligonucleotide
  Target: ATXN2; (-) strand; PAM type: YTN; PAM sequence: TTT
tccaaatgtaagatcatatt

SEQ ID NO: 65142 - DNA, 20 bp, Artificial Sequence
  Description of Artificial Sequence: Synthetic oligonucleotide
  Target: ATXN2; (-) strand; PAM type: YTN; PAM sequence: TTT
ttccaaatgtaagatcatat

SEQ ID NO: 65143 - DNA, 20 bp, Artificial Sequence
  Description of Artificial Sequence: Synthetic oligonucleotide
  Target: ATXN2; (-) strand; PAM type: YTN; PAM sequence: CTA
ggtttttccaaatgtaagat

SEQ ID NO: 65144 - DNA, 20 bp, Artificial Sequence
  Description of Artificial Sequence: Synthetic oligonucleotide
  Target: ATXN2; (-) strand; PAM type: YTN; PAM sequence: TTG
gagtctaggtttttccaaat

SEQ ID NO: 65145 - DNA, 20 bp, Artificial Sequence
  Description of Artificial Sequence: Synthetic oligonucleotide
  Target: ATXN2; (-) strand; PAM type: YTN; PAM sequence: TTT
ggagtctaggtttttccaaa

SEQ ID NO: 65146 - DNA, 20 bp, Artificial Sequence
  Description of Artificial Sequence: Synthetic oligonucleotide
  Target: ATXN2; (-) strand; PAM type: YTN; PAM sequence: TTT
tggagtctaggtttttccaa

SEQ ID NO: 65147 - DNA, 20 bp, Artificial Sequence
  Description of Artificial Sequence: Synthetic oligonucleotide
  Target: ATXN2; (-) strand; PAM type: YTN; PAM sequence: TTT
ttggagtctaggtttttcca

SEQ ID NO: 65148 - DNA, 20 bp, Artificial Sequence
  Description of Artificial Sequence: Synthetic oligonucleotide
  Target: ATXN2; (-) strand; PAM type: YTN; PAM sequence: TTT
tttggagtctaggtttttcc

SEQ ID NO: 65149 - DNA, 20 bp, Artificial Sequence
  Description of Artificial Sequence: Synthetic oligonucleotide
  Target: ATXN2; (-) strand; PAM type: YTN; PAM sequence: CTT
ttttggagtctaggtttttc

SEQ ID NO: 65150 - DNA, 20 bp, Artificial Sequence
  Description of Artificial Sequence: Synthetic oligonucleotide
  Target: ATXN2; (-) strand; PAM type: YTN; PAM sequence: TTC
ttttttggagtctaggtttt

SEQ ID NO: 65151 - DNA, 20 bp, Artificial Sequence
  Description of Artificial Sequence: Synthetic oligonucleotide
  Target: ATXN2; (-) strand; PAM type: YTN; PAM sequence: TTT
cttttttggagtctaggttt

SEQ ID NO: 65152 - DNA, 20 bp, Artificial Sequence
  Description of Artificial Sequence: Synthetic oligonucleotide
  Target: ATXN2; (-) strand; PAM type: YTN; PAM sequence: TTT
tcttttttggagtctaggtt

SEQ ID NO: 65153 - DNA, 20 bp, Artificial Sequence
  Description of Artificial Sequence: Synthetic oligonucleotide
  Target: ATXN2; (-) strand; PAM type: YTN; PAM sequence: TTT
ttcttttttggagtctaggt

SEQ ID NO: 65154 - DNA, 20 bp, Artificial Sequence
  Description of Artificial Sequence: Synthetic oligonucleotide
  Target: ATXN2; (-) strand; PAM type: YTN; PAM sequence: CTA
ataggtttttcttttttgga

SEQ ID NO: 65155 - DNA, 20 bp, Artificial Sequence
  Description of Artificial Sequence: Synthetic oligonucleotide
  Target: ATXN2; (-) strand; PAM type: YTN; PAM sequence: TTC
taataggtttttcttttttg

SEQ ID NO: 65156 - DNA, 20 bp, Artificial Sequence
  Description of Artificial Sequence: Synthetic oligonucleotide
  Target: ATXN2; (-) strand; PAM type: YTN; PAM sequence: TTG
tcagttctaataggtttttc

SEQ ID NO: 65157 - DNA, 20 bp, Artificial Sequence
  Description of Artificial Sequence: Synthetic oligonucleotide
  Target: ATXN2; (-) strand; PAM type: YTN; PAM sequence: TTT
gtcagttctaataggttttt

SEQ ID NO: 65158 - DNA, 20 bp, Artificial Sequence
  Description of Artificial Sequence: Synthetic oligonucleotide
  Target: ATXN2; (-) strand; PAM type: YTN; PAM sequence: TTG
tttgtcagttctaataggtt

SEQ ID NO: 65159 - DNA, 20 bp, Artificial Sequence
  Description of Artificial Sequence: Synthetic oligonucleotide
  Target: ATXN2; (-) strand; PAM type: YTN; PAM sequence: TTT
gtttgtcagttctaataggt

SEQ ID NO: 65160 - DNA, 20 bp, Artificial Sequence
  Description of Artificial Sequence: Synthetic oligonucleotide
  Target: ATXN2; (-) strand; PAM type: YTN; PAM sequence: CTG
aatttgtttgtcagttctaa

SEQ ID NO: 65161 - DNA, 20 bp, Artificial Sequence
  Description of Artificial Sequence: Synthetic oligonucleotide
  Target: ATXN2; (-) strand; PAM type: YTN; PAM sequence: TTA
ctgaatttgtttgtcagttc

SEQ ID NO: 65162 - DNA, 20 bp, Artificial Sequence
  Description of Artificial Sequence: Synthetic oligonucleotide
  Target: ATXN2; (-) strand; PAM type: YTN; PAM sequence: TTT
actgaatttgtttgtcagtt

SEQ ID NO: 65163 - DNA, 20 bp, Artificial Sequence
  Description of Artificial Sequence: Synthetic oligonucleotide
  Target: ATXN2; (-) strand; PAM type: YTN; PAM sequence: TTT
tactgaatttgtttgtcagt

SEQ ID NO: 65164 - DNA, 20 bp, Artificial Sequence
  Description of Artificial Sequence: Synthetic oligonucleotide
  Target: ATXN2; (-) strand; PAM type: YTN; PAM sequence: CTG
caattttactgaatttgttt

SEQ ID NO: 65165 - DNA, 20 bp, Artificial Sequence
  Description of Artificial Sequence: Synthetic oligonucleotide
  Target: ATXN2; (-) strand; PAM type: YTN; PAM sequence: TTG
tatcctgcaattttactgaa

SEQ ID NO: 65166 - DNA, 20 bp, Artificial Sequence
  Description of Artificial Sequence: Synthetic oligonucleotide
  Target: ATXN2; (-) strand; PAM type: YTN; PAM sequence: TTT
gtatcctgcaattttactga

SEQ ID NO: 65167 - DNA, 20 bp, Artificial Sequence
  Description of Artificial Sequence: Synthetic oligonucleotide
  Target: ATXN2; (-) strand; PAM type: YTN; PAM sequence: TTT
tgtatcctgcaattttactg

SEQ ID NO: 65168 - DNA, 20 bp, Artificial Sequence
  Description of Artificial Sequence: Synthetic oligonucleotide
  Target: ATXN2; (-) strand; PAM type: YTN; PAM sequence: TTT
ttgtatcctgcaattttact

SEQ ID NO: 65169 - DNA, 20 bp, Artificial Sequence
  Description of Artificial Sequence: Synthetic oligonucleotide
  Target: ATXN2; (-) strand; PAM type: YTN; PAM sequence: TTG
atttttgtatcctgcaattt

SEQ ID NO: 65170 - DNA, 20 bp, Artificial Sequence
  Description of Artificial Sequence: Synthetic oligonucleotide
  Target: ATXN2; (-) strand; PAM type: YTN; PAM sequence: TTG
tgtgttgatttttgtatcct

SEQ ID NO: 65171 - DNA, 20 bp, Artificial Sequence
  Description of Artificial Sequence: Synthetic oligonucleotide
  Target: ATXN2; (-) strand; PAM type: YTN; PAM sequence: TTT
gtgtgttgatttttgtatcc

SEQ ID NO: 65172 - DNA, 20 bp, Artificial Sequence
  Description of Artificial Sequence: Synthetic oligonucleotide
  Target: ATXN2; (-) strand; PAM type: YTN; PAM sequence: TTT
tgtgtgttgatttttgtatc

SEQ ID NO: 65173 - DNA, 20 bp, Artificial Sequence
  Description of Artificial Sequence: Synthetic oligonucleotide
  Target: ATXN2; (-) strand; PAM type: YTN; PAM sequence: TTT
ttgtgtgttgatttttgtat

SEQ ID NO: 65174 - DNA, 20 bp, Artificial Sequence
  Description of Artificial Sequence: Synthetic oligonucleotide
  Target: ATXN2; (-) strand; PAM type: YTN; PAM sequence: CTG
atttttgtgtgttgattttt

SEQ ID NO: 65175 - DNA, 20 bp, Artificial Sequence
  Description of Artificial Sequence: Synthetic oligonucleotide
  Target: ATXN2; (-) strand; PAM type: YTN; PAM sequence: CTC
ctgatttttgtgtgttgatt

SEQ ID NO: 65176 - DNA, 20 bp, Artificial Sequence
  Description of Artificial Sequence: Synthetic oligonucleotide
  Target: ATXN2; (-) strand; PAM type: YTN; PAM sequence: TTA
aatataaaaatgctcctgat

SEQ ID NO: 65177 - DNA, 20 bp, Artificial Sequence
  Description of Artificial Sequence: Synthetic oligonucleotide
  Target: ATXN2; (-) strand; PAM type: YTN; PAM sequence: CTG
ttaaatataaaaatgctcct

SEQ ID NO: 65178 - DNA, 20 bp, Artificial Sequence
  Description of Artificial Sequence: Synthetic oligonucleotide
  Target: ATXN2; (-) strand; PAM type: YTN; PAM sequence: TTG
ctgttaaatataaaaatgct

SEQ ID NO: 65179 - DNA, 20 bp, Artificial Sequence
  Description of Artificial Sequence: Synthetic oligonucleotide
  Target: ATXN2; (-) strand; PAM type: YTN; PAM sequence: TTT
gctgttaaatataaaaatgc

SEQ ID NO: 65180 - DNA, 20 bp, Artificial Sequence
  Description of Artificial Sequence: Synthetic oligonucleotide
  Target: ATXN2; (-) strand; PAM type: YTN; PAM sequence: TTG
tttgctgttaaatataaaaa

SEQ ID NO: 65181 - DNA, 20 bp, Artificial Sequence
  Description of Artificial Sequence: Synthetic oligonucleotide
  Target: ATXN2; (-) strand; PAM type: YTN; PAM sequence: TTC
agattgtttgctgttaaata

SEQ ID NO: 65182 - DNA, 20 bp, Artificial Sequence
  Description of Artificial Sequence: Synthetic oligonucleotide
  Target: ATXN2; (-) strand; PAM type: YTN; PAM sequence: TTT
cagattgtttgctgttaaat

SEQ ID NO: 65183 - DNA, 20 bp, Artificial Sequence
  Description of Artificial Sequence: Synthetic oligonucleotide
  Target: ATXN2; (-) strand; PAM type: YTN; PAM sequence: TTT
tcagattgtttgctgttaaa

SEQ ID NO: 65184 - DNA, 20 bp, Artificial Sequence
  Description of Artificial Sequence: Synthetic oligonucleotide
  Target: ATXN2; (-) strand; PAM type: YTN; PAM sequence: TTT
ttcagattgtttgctgttaa

SEQ ID NO: 65185 - DNA, 20 bp, Artificial Sequence
  Description of Artificial Sequence: Synthetic oligonucleotide
  Target: ATXN2; (-) strand; PAM type: YTN; PAM sequence: TTA
aaaaatttttcagattgttt

SEQ ID NO: 65186 - DNA, 20 bp, Artificial Sequence
  Description of Artificial Sequence: Synthetic oligonucleotide
  Target: ATXN2; (-) strand; PAM type: YTN; PAM sequence: TTT
aaaaaatttttcagattgtt

SEQ ID NO: 65187 - DNA, 20 bp, Artificial Sequence
  Description of Artificial Sequence: Synthetic oligonucleotide
  Target: ATXN2; (-) strand; PAM type: YTN; PAM sequence: TTG
cgtttaaaaaatttttcaga

SEQ ID NO: 65188 - DNA, 20 bp, Artificial Sequence
  Description of Artificial Sequence: Synthetic oligonucleotide
  Target: ATXN2; (-) strand; PAM type: YTN; PAM sequence: TTG
taaatgggattgcgtttaaa

SEQ ID NO: 65189 - DNA, 20 bp, Artificial Sequence
  Description of Artificial Sequence: Synthetic oligonucleotide
  Target: ATXN2; (-) strand; PAM type: YTN; PAM sequence: CTA
ttgtaaatgggattgcgttt

SEQ ID NO: 65190 - DNA, 20 bp, Artificial Sequence
  Description of Artificial Sequence: Synthetic oligonucleotide
  Target: ATXN2; (-) strand; PAM type: YTN; PAM sequence: TTG
tagctattgtaaatgggatt

SEQ ID NO: 65191 - DNA, 20 bp, Artificial Sequence
  Description of Artificial Sequence: Synthetic oligonucleotide
  Target: ATXN2; (-) strand; PAM type: YTN; PAM sequence: TTT
gtagctattgtaaatgggat

SEQ ID NO: 65192 - DNA, 20 bp, Artificial Sequence
  Description of Artificial Sequence: Synthetic oligonucleotide
  Target: ATXN2; (-) strand; PAM type: YTN; PAM sequence: TTA
tatttgtagctattgtaaat

SEQ ID NO: 65193 - DNA, 20 bp, Artificial Sequence
  Description of Artificial Sequence: Synthetic oligonucleotide
  Target: ATXN2; (-) strand; PAM type: YTN; PAM sequence: TTA
ttatatttgtagctattgta

SEQ ID NO: 65194 - DNA, 20 bp, Artificial Sequence
  Description of Artificial Sequence: Synthetic oligonucleotide
  Target: ATXN2; (-) strand; PAM type: YTN; PAM sequence: TTT
attatatttgtagctattgt

SEQ ID NO: 65195 - DNA, 20 bp, Artificial Sequence
  Description of Artificial Sequence: Synthetic oligonucleotide
  Target: ATXN2; (-) strand; PAM type: YTN; PAM sequence: TTT
tattatatttgtagctattg

SEQ ID NO: 65196 - DNA, 20 bp, Artificial Sequence
  Description of Artificial Sequence: Synthetic oligonucleotide
  Target: ATXN2; (-) strand; PAM type: YTN; PAM sequence: CTA
agtattttattatatttgta

SEQ ID NO: 65197 - DNA, 20 bp, Artificial Sequence
  Description of Artificial Sequence: Synthetic oligonucleotide
  Target: ATXN2; (-) strand; PAM type: YTN; PAM sequence: TTC
ctaagtattttattatattt

SEQ ID NO: 65198 - DNA, 20 bp, Artificial Sequence
  Description of Artificial Sequence: Synthetic oligonucleotide
  Target: ATXN2; (-) strand; PAM type: YTN; PAM sequence: TTA
ttcctaagtattttattata

SEQ ID NO: 65199 - DNA, 20 bp, Artificial Sequence
  Description of Artificial Sequence: Synthetic oligonucleotide
  Target: ATXN2; (-) strand; PAM type: YTN; PAM sequence: TTT
attcctaagtattttattat

SEQ ID NO: 65200 - DNA, 20 bp, Artificial Sequence
  Description of Artificial Sequence: Synthetic oligonucleotide
  Target: ATXN2; (-) strand; PAM type: YTN; PAM sequence: TTA
agtttattcctaagtatttt

SEQ ID NO: 65201 - DNA, 20 bp, Artificial Sequence
  Description of Artificial Sequence: Synthetic oligonucleotide
  Target: ATXN2; (-) strand; PAM type: YTN; PAM sequence: TTG
gttaagtttattcctaagta

SEQ ID NO: 65202 - DNA, 20 bp, Artificial Sequence
  Description of Artificial Sequence: Synthetic oligonucleotide
  Target: ATXN2; (-) strand; PAM type: YTN; PAM sequence: TTT
ggttaagtttattcctaagt

SEQ ID NO: 65203 - DNA, 20 bp, Artificial Sequence
  Description of Artificial Sequence: Synthetic oligonucleotide
  Target: ATXN2; (-) strand; PAM type: YTN; PAM sequence: CTC
atttggttaagtttattcct

SEQ ID NO: 65204 - DNA, 20 bp, Artificial Sequence
  Description of Artificial Sequence: Synthetic oligonucleotide
  Target: ATXN2; (-) strand; PAM type: YTN; PAM sequence: TTA
ctcatttggttaagtttatt

SEQ ID NO: 65205 - DNA, 20 bp, Artificial Sequence
  Description of Artificial Sequence: Synthetic oligonucleotide
  Target: ATXN2; (-) strand; PAM type: YTN; PAM sequence: TTT
actcatttggttaagtttat

SEQ ID NO: 65206 - DNA, 20 bp, Artificial Sequence
  Description of Artificial Sequence: Synthetic oligonucleotide
  Target: ATXN2; (-) strand; PAM type: YTN; PAM sequence: TTT
tactcatttggttaagttta

SEQ ID NO: 65207 - DNA, 20 bp, Artificial Sequence
  Description of Artificial Sequence: Synthetic oligonucleotide
  Target: ATXN2; (-) strand; PAM type: YTN; PAM sequence: CTT
ttactcatttggttaagttt

SEQ ID NO: 65208 - DNA, 20 bp, Artificial Sequence
  Description of Artificial Sequence: Synthetic oligonucleotide
  Target: ATXN2; (-) strand; PAM type: YTN; PAM sequence: TTA
tagaaatcttttactcattt

SEQ ID NO: 65209 - DNA, 20 bp, Artificial Sequence
  Description of Artificial Sequence: Synthetic oligonucleotide
  Target: ATXN2; (-) strand; PAM type: YTN; PAM sequence: TTG
tcattatagaaatcttttac

SEQ ID NO: 65210 - DNA, 20 bp, Artificial Sequence
  Description of Artificial Sequence: Synthetic oligonucleotide
  Target: ATXN2; (-) strand; PAM type: YTN; PAM sequence: TTA
aagttgtcattatagaaatc

SEQ ID NO: 65211 - DNA, 20 bp, Artificial Sequence
  Description of Artificial Sequence: Synthetic oligonucleotide
  Target: ATXN2; (-) strand; PAM type: YTN; PAM sequence: TTT
aaagttgtcattatagaaat

SEQ ID NO: 65212 - DNA, 20 bp, Artificial Sequence
  Description of Artificial Sequence: Synthetic oligonucleotide
  Target: ATXN2; (-) strand; PAM type: YTN; PAM sequence: TTT
taaagttgtcattatagaaa

SEQ ID NO: 65213 - DNA, 20 bp, Artificial Sequence
  Description of Artificial Sequence: Synthetic oligonucleotide
  Target: ATXN2; (-) strand; PAM type: YTN; PAM sequence: TTC
agtgttttaaagttgtcatt

SEQ ID NO: 65214 - DNA, 20 bp, Artificial Sequence
  Description of Artificial Sequence: Synthetic oligonucleotide
  Target: ATXN2; (-) strand; PAM type: YTN; PAM sequence: TTT
cagtgttttaaagttgtcat

SEQ ID NO: 65215 - DNA, 20 bp, Artificial Sequence
  Description of Artificial Sequence: Synthetic oligonucleotide
  Target: ATXN2; (-) strand; PAM type: YTN; PAM sequence: CTG
tgtcatcaatttcagtgttt

SEQ ID NO: 65216 - DNA, 20 bp, Artificial Sequence
  Description of Artificial Sequence: Synthetic oligonucleotide
  Target: ATXN2; (-) strand; PAM type: YTN; PAM sequence: TTC
tgtgtcatcaatttcagtgt

SEQ ID NO: 65217 - DNA, 20 bp, Artificial Sequence
  Description of Artificial Sequence: Synthetic oligonucleotide
  Target: ATXN2; (-) strand; PAM type: YTN; PAM sequence: TTT
ctgtgtcatcaatttcagtg

SEQ ID NO: 65218 - DNA, 20 bp, Artificial Sequence
  Description of Artificial Sequence: Synthetic oligonucleotide
  Target: ATXN2; (-) strand; PAM type: YTN; PAM sequence: TTT
tctgtgtcatcaatttcagt

SEQ ID NO: 65219 - DNA, 20 bp, Artificial Sequence
  Description of Artificial Sequence: Synthetic oligonucleotide
  Target: ATXN2; (-) strand; PAM type: YTN; PAM sequence: TTT
ttctgtgtcatcaatttcag

SEQ ID NO: 65220 - DNA, 20 bp, Artificial Sequence
  Description of Artificial Sequence: Synthetic oligonucleotide
  Target: ATXN2; (-) strand; PAM type: YTN; PAM sequence: TTT
tttctgtgtcatcaatttca

SEQ ID NO: 65221 - DNA, 20 bp, Artificial Sequence
  Description of Artificial Sequence: Synthetic oligonucleotide
  Target: ATXN2; (-) strand; PAM type: YTN; PAM sequence: TTC
atgttttttctgtgtcatca

SEQ ID NO: 65222 - DNA, 20 bp, Artificial Sequence
  Description of Artificial Sequence: Synthetic oligonucleotide
  Target: ATXN2; (-) strand; PAM type: YTN; PAM sequence: TTT
catgttttttctgtgtcatc

SEQ ID NO: 65223 - DNA, 20 bp, Artificial Sequence
  Description of Artificial Sequence: Synthetic oligonucleotide
  Target: ATXN2; (-) strand; PAM type: YTN; PAM sequence: TTT
tcatgttttttctgtgtcat

SEQ ID NO: 65224 - DNA, 20 bp, Artificial Sequence
  Description of Artificial Sequence: Synthetic oligonucleotide
  Target: ATXN2; (-) strand; PAM type: YTN; PAM sequence: CTT
ttcatgttttttctgtgtca

SEQ ID NO: 65225 - DNA, 20 bp, Artificial Sequence
  Description of Artificial Sequence: Synthetic oligonucleotide
  Target: ATXN2; (-) strand; PAM type: YTN; PAM sequence: CTC
ttttcatgttttttctgtgt

SEQ ID NO: 65226 - DNA, 20 bp, Artificial Sequence
  Description of Artificial Sequence: Synthetic oligonucleotide
  Target: ATXN2; (-) strand; PAM type: YTN; PAM sequence: CTA
atccataaacatggaatctc

SEQ ID NO: 65227 - DNA, 20 bp, Artificial Sequence
  Description of Artificial Sequence: Synthetic oligonucleotide
  Target: ATXN2; (-) strand; PAM type: YTN; PAM sequence: TTC
taatccataaacatggaatc

SEQ ID NO: 65228 - DNA, 20 bp, Artificial Sequence
  Description of Artificial Sequence: Synthetic oligonucleotide
  Target: ATXN2; (-) strand; PAM type: YTN; PAM sequence: CTT
ctaatccataaacatggaat

SEQ ID NO: 65229 - DNA, 20 bp, Artificial Sequence
  Description of Artificial Sequence: Synthetic oligonucleotide
  Target: ATXN2; (-) strand; PAM type: YTN; PAM sequence: TTC
ttctaatccataaacatgga

SEQ ID NO: 65230 - DNA, 20 bp, Artificial Sequence
  Description of Artificial Sequence: Synthetic oligonucleotide
  Target: ATXN2; (-) strand; PAM type: YTN; PAM sequence: TTA
attcttctaatccataaaca

SEQ ID NO: 65231 - DNA, 20 bp, Artificial Sequence
  Description of Artificial Sequence: Synthetic oligonucleotide
  Target: ATXN2; (-) strand; PAM type: YTN; PAM sequence: TTA
gcaatattaattcttctaat

SEQ ID NO: 65232 - DNA, 20 bp, Artificial Sequence
  Description of Artificial Sequence: Synthetic oligonucleotide
  Target: ATXN2; (-) strand; PAM type: YTN; PAM sequence: TTT
agcaatattaattcttctaa

SEQ ID NO: 65233 - DNA, 20 bp, Artificial Sequence
  Description of Artificial Sequence: Synthetic oligonucleotide
  Target: ATXN2; (-) strand; PAM type: YTN; PAM sequence: TTT
tagcaatattaattcttcta

SEQ ID NO: 65234 - DNA, 20 bp, Artificial Sequence
  Description of Artificial Sequence: Synthetic oligonucleotide
  Target: ATXN2; (-) strand; PAM type: YTN; PAM sequence: TTA
tcaacattttagcaatatta

SEQ ID NO: 65235 - DNA, 20 bp, Artificial Sequence
  Description of Artificial Sequence: Synthetic oligonucleotide
  Target: ATXN2; (-) strand; PAM type: YTN; PAM sequence: TTG
agtattatcaacattttagc

SEQ ID NO: 65236 - DNA, 20 bp, Artificial Sequence
  Description of Artificial Sequence: Synthetic oligonucleotide
  Target: ATXN2; (-) strand; PAM type: YTN; PAM sequence: TTT
gagtattatcaacattttag

SEQ ID NO: 65237 - DNA, 20 bp, Artificial Sequence
  Description of Artificial Sequence: Synthetic oligonucleotide
  Target: ATXN2; (-) strand; PAM type: YTN; PAM sequence: CTT
tgagtattatcaacatttta

SEQ ID NO: 65238 - DNA, 20 bp, Artificial Sequence
  Description of Artificial Sequence: Synthetic oligonucleotide
  Target: ATXN2; (-) strand; PAM type: YTN; PAM sequence: TTG
ctttgagtattatcaacatt

SEQ ID NO: 65239 - DNA, 20 bp, Artificial Sequence
  Description of Artificial Sequence: Synthetic oligonucleotide
  Target: ATXN2; (-) strand; PAM type: YTN; PAM sequence: CTG
tagattgctttgagtattat

SEQ ID NO: 65240 - DNA, 20 bp, Artificial Sequence
  Description of Artificial Sequence: Synthetic oligonucleotide
  Target: ATXN2; (-) strand; PAM type: YTN; PAM sequence: CTG
aatctgtagattgctttgag

SEQ ID NO: 65241 - DNA, 20 bp, Artificial Sequence
  Description of Artificial Sequence: Synthetic oligonucleotide
  Target: ATXN2; (-) strand; PAM type: YTN; PAM sequence: TTG
cactgaatctgtagattgct

SEQ ID NO: 65242 - DNA, 20 bp, Artificial Sequence
  Description of Artificial Sequence: Synthetic oligonucleotide
  Target: ATXN2; (-) strand; PAM type: YTN; PAM sequence: TTG
atagggattgcactgaatct

SEQ ID NO: 65243 - DNA, 20 bp, Artificial Sequence
  Description of Artificial Sequence: Synthetic oligonucleotide
  Target: ATXN2; (-) strand; PAM type: YTN; PAM sequence: TTT
gatagggattgcactgaatc

SEQ ID NO: 65244 - DNA, 20 bp, Artificial Sequence
  Description of Artificial Sequence: Synthetic oligonucleotide
  Target: ATXN2; (-) strand; PAM type: YTN; PAM sequence: TTT
tgatagggattgcactgaat

SEQ ID NO: 65245 - DNA, 20 bp, Artificial Sequence
  Description of Artificial Sequence: Synthetic oligonucleotide
  Target: ATXN2; (-) strand; PAM type: YTN; PAM sequence: TTG
gtattttgatagggattgca

SEQ ID NO: 65246 - DNA, 20 bp, Artificial Sequence
  Description of Artificial Sequence: Synthetic oligonucleotide
  Target: ATXN2; (-) strand; PAM type: YTN; PAM sequence: CTG
tgaggaatgtcattggtatt

SEQ ID NO: 65247 - DNA, 20 bp, Artificial Sequence
  Description of Artificial Sequence: Synthetic oligonucleotide
  Target: ATXN2; (-) strand; PAM type: YTN; PAM sequence: TTC
tgtgaggaatgtcattggta

SEQ ID NO: 65248 - DNA, 20 bp, Artificial Sequence
  Description of Artificial Sequence: Synthetic oligonucleotide
  Target: ATXN2; (-) strand; PAM type: YTN; PAM sequence: CTT
ctgtgaggaatgtcattggt

SEQ ID NO: 65249 - DNA, 20 bp, Artificial Sequence
  Description of Artificial Sequence: Synthetic oligonucleotide
  Target: ATXN2; (-) strand; PAM type: YTN; PAM sequence: CTA
cttctgtgaggaatgtcatt

SEQ ID NO: 65250 - DNA, 20 bp, Artificial Sequence
  Description of Artificial Sequence: Synthetic oligonucleotide
  Target: ATXN2; (-) strand; PAM type: YTN; PAM sequence: TTG
tctacttctgtgaggaatgt

SEQ ID NO: 65251 - DNA, 20 bp, Artificial Sequence
  Description of Artificial Sequence: Synthetic oligonucleotide
  Target: ATXN2; (-) strand; PAM type: YTN; PAM sequence: TTT
gtctacttctgtgaggaatg

SEQ ID NO: 65252 - DNA, 20 bp, Artificial Sequence
  Description of Artificial Sequence: Synthetic oligonucleotide
  Target: ATXN2; (-) strand; PAM type: YTN; PAM sequence: TTT
tgtctacttctgtgaggaat

SEQ ID NO: 65253 - DNA, 20 bp, Artificial Sequence
  Description of Artificial Sequence: Synthetic oligonucleotide
  Target: ATXN2; (-) strand; PAM type: YTN; PAM sequence: TTT
ttgtctacttctgtgaggaa

SEQ ID NO: 65254 - DNA, 20 bp, Artificial Sequence
  Description of Artificial Sequence: Synthetic oligonucleotide
  Target: ATXN2; (-) strand; PAM type: YTN; PAM sequence: TTA
tttttgtctacttctgtgag

SEQ ID NO: 65255 - DNA, 20 bp, Artificial Sequence
  Description of Artificial Sequence: Synthetic oligonucleotide
  Target: ATXN2; (-) strand; PAM type: YTN; PAM sequence: TTA
gaattatttttgtctacttc

SEQ ID NO: 65256 - DNA, 20 bp, Artificial Sequence
  Description of Artificial Sequence: Synthetic oligonucleotide
  Target: ATXN2; (-) strand; PAM type: YTN; PAM sequence: TTT
agaattatttttgtctactt

SEQ ID NO: 65257 - DNA, 20 bp, Artificial Sequence
  Description of Artificial Sequence: Synthetic oligonucleotide
  Target: ATXN2; (-) strand; PAM type: YTN; PAM sequence: TTT
tagaattatttttgtctact

SEQ ID NO: 65258 - DNA, 20 bp, Artificial Sequence
  Description of Artificial Sequence: Synthetic oligonucleotide
  Target: ATXN2; (-) strand; PAM type: YTN; PAM sequence: CTA
caaattttagaattattttt

SEQ ID NO: 65259 - DNA, 20 bp, Artificial Sequence
  Description of Artificial Sequence: Synthetic oligonucleotide
  Target: ATXN2; (-) strand; PAM type: YTN; PAM sequence: TTC
cctacaaattttagaattat

SEQ ID NO: 65260 - DNA, 20 bp, Artificial Sequence
  Description of Artificial Sequence: Synthetic oligonucleotide
  Target: ATXN2; (-) strand; PAM type: YTN; PAM sequence: TTG
tggttccctacaaattttag

SEQ ID NO: 65261 - DNA, 20 bp, Artificial Sequence
  Description of Artificial Sequence: Synthetic oligonucleotide
  Target: ATXN2; (-) strand; PAM type: YTN; PAM sequence: TTT
gtggttccctacaaatttta

SEQ ID NO: 65262 - DNA, 20 bp, Artificial Sequence
  Description of Artificial Sequence: Synthetic oligonucleotide
  Target: ATXN2; (-) strand; PAM type: YTN; PAM sequence: TTT
tgtggttccctacaaatttt

SEQ ID NO: 65263 - DNA, 20 bp, Artificial Sequence
  Description of Artificial Sequence: Synthetic oligonucleotide
  Target: ATXN2; (-) strand; PAM type: YTN; PAM sequence: CTT
ttgtggttccctacaaattt

SEQ ID NO: 65264 - DNA, 20 bp, Artificial Sequence
  Description of Artificial Sequence: Synthetic oligonucleotide
  Target: ATXN2; (-) strand; PAM type: YTN; PAM sequence: TTG
ggccttttgtggttccctac

SEQ ID NO: 65265 - DNA, 20 bp, Artificial Sequence
  Description of Artificial Sequence: Synthetic oligonucleotide
  Target: ATXN2; (-) strand; PAM type: YTN; PAM sequence: TTT
gggccttttgtggttcccta

SEQ ID NO: 65266 - DNA, 20 bp, Artificial Sequence
  Description of Artificial Sequence: Synthetic oligonucleotide
  Target: ATXN2; (-) strand; PAM type: YTN; PAM sequence: TTT
tgggccttttgtggttccct

SEQ ID NO: 65267 - DNA, 20 bp, Artificial Sequence
  Description of Artificial Sequence: Synthetic oligonucleotide
  Target: ATXN2; (-) strand; PAM type: YTN; PAM sequence: CTT
ttgggccttttgtggttccc

SEQ ID NO: 65268 - DNA, 20 bp, Artificial Sequence
  Description of Artificial Sequence: Synthetic oligonucleotide
  Target: ATXN2; (-) strand; PAM type: YTN; PAM sequence: CTC
ttttgggccttttgtggttc

SEQ ID NO: 65269 - DNA, 20 bp, Artificial Sequence
  Description of Artificial Sequence: Synthetic oligonucleotide
  Target: ATXN2; (-) strand; PAM type: YTN; PAM sequence: TTG
ctcttttgggccttttgtgg

SEQ ID NO: 65270 - DNA, 20 bp, Artificial Sequence
  Description of Artificial Sequence: Synthetic oligonucleotide
  Target: ATXN2; (-) strand; PAM type: YTN; PAM sequence: TTT
gctcttttgggccttttgtg

SEQ ID NO: 65271 - DNA, 20 bp, Artificial Sequence
  Description of Artificial Sequence: Synthetic oligonucleotide
  Target: ATXN2; (-) strand; PAM type: YTN; PAM sequence: TTT
tgctcttttgggccttttgt

SEQ ID NO: 65272 - DNA, 20 bp, Artificial Sequence
  Description of Artificial Sequence: Synthetic oligonucleotide
  Target: ATXN2; (-) strand; PAM type: YTN; PAM sequence: CTT
ttgctcttttgggccttttg

SEQ ID NO: 65273 - DNA, 20 bp, Artificial Sequence
  Description of Artificial Sequence: Synthetic oligonucleotide
  Target: ATXN2; (-) strand; PAM type: YTN; PAM sequence: CTC
agtatggcttttgctctttt

SEQ ID NO: 65274 - DNA, 20 bp, Artificial Sequence
  Description of Artificial Sequence: Synthetic oligonucleotide
  Target: ATXN2; (-) strand; PAM type: YTN; PAM sequence: TTG
ctcagtatggcttttgctct

SEQ ID NO: 65275 - DNA, 20 bp, Artificial Sequence
  Description of Artificial Sequence: Synthetic oligonucleotide
  Target: ATXN2; (-) strand; PAM type: YTN; PAM sequence: TTT
gctcagtatggcttttgctc

SEQ ID NO: 65276 - DNA, 20 bp, Artificial Sequence
  Description of Artificial Sequence: Synthetic oligonucleotide
  Target: ATXN2; (-) strand; PAM type: YTN; PAM sequence: TTT
tgctcagtatggcttttgct

SEQ ID NO: 65277 - DNA, 20 bp, Artificial Sequence
  Description of Artificial Sequence: Synthetic oligonucleotide
  Target: ATXN2; (-) strand; PAM type: YTN; PAM sequence: TTC
attttgctcagtatggcttt

SEQ ID NO: 65278 - DNA, 20 bp, Artificial Sequence
  Description of Artificial Sequence: Synthetic oligonucleotide
  Target: ATXN2; (-) strand; PAM type: YTN; PAM sequence: TTG
ttcattttgctcagtatggc

SEQ ID NO: 65279 - DNA, 20 bp, Artificial Sequence
  Description of Artificial Sequence: Synthetic oligonucleotide
  Target: ATXN2; (-) strand; PAM type: YTN; PAM sequence: TTT
gttcattttgctcagtatgg

SEQ ID NO: 65280 - DNA, 20 bp, Artificial Sequence
  Description of Artificial Sequence: Synthetic oligonucleotide
  Target: ATXN2; (-) strand; PAM type: YTN; PAM sequence: TTT
tgttcattttgctcagtatg

SEQ ID NO: 65281 - DNA, 20 bp, Artificial Sequence
  Description of Artificial Sequence: Synthetic oligonucleotide
  Target: ATXN2; (-) strand; PAM type: YTN; PAM sequence: CTC
ccgttttgttcattttgctc

SEQ ID NO: 65282 - DNA, 20 bp, Artificial Sequence
  Description of Artificial Sequence: Synthetic oligonucleotide
  Target: ATXN2; (-) strand; PAM type: YTN; PAM sequence: TTC
ctcccgttttgttcattttg

SEQ ID NO: 65283 - DNA, 20 bp, Artificial Sequence
  Description of Artificial Sequence: Synthetic oligonucleotide
  Target: ATXN2; (-) strand; PAM type: YTN; PAM sequence: TTG
aagtcagataatgattcctc

SEQ ID NO: 65284 - DNA, 20 bp, Artificial Sequence
  Description of Artificial Sequence: Synthetic oligonucleotide
  Target: ATXN2; (-) strand; PAM type: YTN; PAM sequence: TTT
gaagtcagataatgattcct

SEQ ID NO: 65285 - DNA, 20 bp, Artificial Sequence
  Description of Artificial Sequence: Synthetic oligonucleotide
  Target: ATXN2; (-) strand; PAM type: YTN; PAM sequence: TTA
caataatttgaagtcagata

SEQ ID NO: 65286 - DNA, 20 bp, Artificial Sequence
  Description of Artificial Sequence: Synthetic oligonucleotide
  Target: ATXN2; (-) strand; PAM type: YTN; PAM sequence: TTG
gttacaataatttgaagtca

SEQ ID NO: 65287 - DNA, 20 bp, Artificial Sequence
  Description of Artificial Sequence: Synthetic oligonucleotide
  Target: ATXN2; (-) strand; PAM type: YTN; PAM sequence: TTT
ggttacaataatttgaagtc

SEQ ID NO: 65288 - DNA, 20 bp, Artificial Sequence
  Description of Artificial Sequence: Synthetic oligonucleotide
  Target: ATXN2; (-) strand; PAM type: YTN; PAM sequence: TTT
tggttacaataatttgaagt

SEQ ID NO: 65289 - DNA, 20 bp, Artificial Sequence
  Description of Artificial Sequence: Synthetic oligonucleotide
  Target: ATXN2; (-) strand; PAM type: YTN; PAM sequence: TTA
tgccagtaccatgccatttt

SEQ ID NO: 65290 - DNA, 20 bp, Artificial Sequence
  Description of Artificial Sequence: Synthetic oligonucleotide
  Target: ATXN2; (-) strand; PAM type: YTN; PAM sequence: TTT
atgccagtaccatgccattt

SEQ ID NO: 65291 - DNA, 20 bp, Artificial Sequence
  Description of Artificial Sequence: Synthetic oligonucleotide
  Target: ATXN2; (-) strand; PAM type: YTN; PAM sequence: TTT
tatgccagtaccatgccatt

SEQ ID NO: 65292 - DNA, 20 bp, Artificial Sequence
  Description of Artificial Sequence: Synthetic oligonucleotide
  Target: ATXN2; (-) strand; PAM type: YTN; PAM sequence: TTT
ttatgccagtaccatgccat

SEQ ID NO: 65293 - DNA, 20 bp, Artificial Sequence
  Description of Artificial Sequence: Synthetic oligonucleotide
  Target: ATXN2; (-) strand; PAM type: YTN; PAM sequence: TTT
tttatgccagtaccatgcca

SEQ ID NO: 65294 - DNA, 20 bp, Artificial Sequence
  Description of Artificial Sequence: Synthetic oligonucleotide
  Target: ATXN2; (-) strand; PAM type: YTN; PAM sequence: TTT
ttttatgccagtaccatgcc

SEQ ID NO: 65295 - DNA, 20 bp, Artificial Sequence
  Description of Artificial Sequence: Synthetic oligonucleotide
  Target: ATXN2; (-) strand; PAM type: YTN; PAM sequence: CTT
tttttatgccagtaccatgc

SEQ ID NO: 65296 - DNA, 20 bp, Artificial Sequence
  Description of Artificial Sequence: Synthetic oligonucleotide
  Target: ATXN2; (-) strand; PAM type: YTN; PAM sequence: CTA
tatctttttttatgccagta

SEQ ID NO: 65297 - DNA, 20 bp, Artificial Sequence
  Description of Artificial Sequence: Synthetic oligonucleotide
  Target: ATXN2; (-) strand; PAM type: YTN; PAM sequence: TTG
atctatatctttttttatgc

SEQ ID NO: 65298 - DNA, 20 bp, Artificial Sequence
  Description of Artificial Sequence: Synthetic oligonucleotide
  Target: ATXN2; (-) strand; PAM type: YTN; PAM sequence: TTC
attgatctatatcttttttt

SEQ ID NO: 65299 - DNA, 20 bp, Artificial Sequence
  Description of Artificial Sequence: Synthetic oligonucleotide
  Target: ATXN2; (-) strand; PAM type: YTN; PAM sequence: TTT
cattgatctatatctttttt

SEQ ID NO: 65300 - DNA, 20 bp, Artificial Sequence
  Description of Artificial Sequence: Synthetic oligonucleotide
  Target: ATXN2; (-) strand; PAM type: YTN; PAM sequence: CTG
tttcattgatctatatcttt

SEQ ID NO: 65301 - DNA, 20 bp, Artificial Sequence
  Description of Artificial Sequence: Synthetic oligonucleotide
  Target: ATXN2; (-) strand; PAM type: YTN; PAM sequence: TTC
tgtttcattgatctatatct

SEQ ID NO: 65302 - DNA, 20 bp, Artificial Sequence
  Description of Artificial Sequence: Synthetic oligonucleotide
  Target: ATXN2; (-) strand; PAM type: YTN; PAM sequence: CTG
ttctgtttcattgatctata

SEQ ID NO: 65303 - DNA, 20 bp, Artificial Sequence
  Description of Artificial Sequence: Synthetic oligonucleotide
  Target: ATXN2; (-) strand; PAM type: YTN; PAM sequence: CTC
tgttctgtttcattgatcta

SEQ ID NO: 65304 - DNA, 20 bp, Artificial Sequence
  Description of Artificial Sequence: Synthetic oligonucleotide
  Target: ATXN2; (-) strand; PAM type: YTN; PAM sequence: TTC
tctgttctgtttcattgatc

SEQ ID NO: 65305 - DNA, 20 bp, Artificial Sequence
  Description of Artificial Sequence: Synthetic oligonucleotide
  Target: ATXN2; (-) strand; PAM type: YTN; PAM sequence: CTG
agttctctgttctgtttcat

SEQ ID NO: 65306 - DNA, 20 bp, Artificial Sequence
  Description of Artificial Sequence: Synthetic oligonucleotide
  Target: ATXN2; (-) strand; PAM type: YTN; PAM sequence: TTC
tgagttctctgttctgtttc

SEQ ID NO: 65307 - DNA, 20 bp, Artificial Sequence
  Description of Artificial Sequence: Synthetic oligonucleotide
  Target: ATXN2; (-) strand; PAM type: YTN; PAM sequence: TTT
ctgagttctctgttctgttt

SEQ ID NO: 65308 - DNA, 20 bp, Artificial Sequence
  Description of Artificial Sequence: Synthetic oligonucleotide
  Target: ATXN2; (-) strand; PAM type: YTN; PAM sequence: TTC
atttctgagttctctgttct

SEQ ID NO: 65309 - DNA, 20 bp, Artificial Sequence
  Description of Artificial Sequence: Synthetic oligonucleotide
  Target: ATXN2; (-) strand; PAM type: YTN; PAM sequence: TTA
gacgtatggattcatttctg

SEQ ID NO: 65310 - DNA, 20 bp, Artificial Sequence
  Description of Artificial Sequence: Synthetic oligonucleotide
  Target: ATXN2; (-) strand; PAM type: YTN; PAM sequence: CTT
agacgtatggattcatttct

SEQ ID NO: 65311 - DNA, 20 bp, Artificial Sequence
  Description of Artificial Sequence: Synthetic oligonucleotide
  Target: ATXN2; (-) strand; PAM type: YTN; PAM sequence: TTC
acttagacgtatggattcat

SEQ ID NO: 65312 - DNA, 20 bp, Artificial Sequence
  Description of Artificial Sequence: Synthetic oligonucleotide
  Target: ATXN2; (-) strand; PAM type: YTN; PAM sequence: TTG
tggaaaatgagttcacttag

SEQ ID NO: 65313 - DNA, 20 bp, Artificial Sequence
  Description of Artificial Sequence: Synthetic oligonucleotide
  Target: ATXN2; (-) strand; PAM type: YTN; PAM sequence: TTT
gtggaaaatgagttcactta

SEQ ID NO: 65314 - DNA, 20 bp, Artificial Sequence
  Description of Artificial Sequence: Synthetic oligonucleotide
  Target: ATXN2; (-) strand; PAM type: YTN; PAM sequence: CTT
tgtggaaaatgagttcactt

SEQ ID NO: 65315 - DNA, 20 bp, Artificial Sequence
  Description of Artificial Sequence: Synthetic oligonucleotide
  Target: ATXN2; (-) strand; PAM type: YTN; PAM sequence: TTC
tttgtggaaaatgagttcac

SEQ ID NO: 65316 - DNA, 20 bp, Artificial Sequence
  Description of Artificial Sequence: Synthetic oligonucleotide
  Target: ATXN2; (-) strand; PAM type: YTN; PAM sequence: CTT
ctttgtggaaaatgagttca

SEQ ID NO: 65317 - DNA, 20 bp, Artificial Sequence
  Description of Artificial Sequence: Synthetic oligonucleotide
  Target: ATXN2; (-) strand; PAM type: YTN; PAM sequence: TTC
atggcttctttgtggaaaat

SEQ ID NO: 65318 - DNA, 20 bp, Artificial Sequence
  Description of Artificial Sequence: Synthetic oligonucleotide
  Target: ATXN2; (-) strand; PAM type: YTN; PAM sequence: TTC
cccagtgtatgttcatggct

SEQ ID NO: 65319 - DNA, 20 bp, Artificial Sequence
  Description of Artificial Sequence: Synthetic oligonucleotide
  Target: ATXN2; (-) strand; PAM type: YTN; PAM sequence: TTT
ccccagtgtatgttcatggc

SEQ ID NO: 65320 - DNA, 20 bp, Artificial Sequence
  Description of Artificial Sequence: Synthetic oligonucleotide
  Target: ATXN2; (-) strand; PAM type: YTN; PAM sequence: CTT
tccccagtgtatgttcatgg

SEQ ID NO: 65321 - DNA, 20 bp, Artificial Sequence
  Description of Artificial Sequence: Synthetic oligonucleotide
  Target: ATXN2; (-) strand; PAM type: YTN; PAM sequence: CTG
tcctttccccagtgtatgtt

SEQ ID NO: 65322 - DNA, 20 bp, Artificial Sequence
  Description of Artificial Sequence: Synthetic oligonucleotide
  Target: ATXN2; (-) strand; PAM type: YTN; PAM sequence: TTG
aagagactgtcctttcccca

SEQ ID NO: 65323 - DNA, 20 bp, Artificial Sequence
  Description of Artificial Sequence: Synthetic oligonucleotide
  Target: ATXN2; (-) strand; PAM type: YTN; PAM sequence: TTA
ttgaagagactgtcctttcc

SEQ ID NO: 65324 - DNA, 20 bp, Artificial Sequence
  Description of Artificial Sequence: Synthetic oligonucleotide
  Target: ATXN2; (-) strand; PAM type: YTN; PAM sequence: TTT
attgaagagactgtcctttc

SEQ ID NO: 65325 - DNA, 20 bp, Artificial Sequence
  Description of Artificial Sequence: Synthetic oligonucleotide
  Target: ATXN2; (-) strand; PAM type: YTN; PAM sequence: TTC
ccagcaccatttattgaaga

SEQ ID NO: 65326 - DNA, 20 bp, Artificial Sequence
  Description of Artificial Sequence: Synthetic oligonucleotide
  Target: ATXN2; (-) strand; PAM type: YTN; PAM sequence: TTT
cccagcaccatttattgaag

SEQ ID NO: 65327 - DNA, 20 bp, Artificial Sequence
  Description of Artificial Sequence: Synthetic oligonucleotide
  Target: ATXN2; (-) strand; PAM type: YTN; PAM sequence: TTT
tcccagcaccatttattgaa

SEQ ID NO: 65328 - DNA, 20 bp, Artificial Sequence
  Description of Artificial Sequence: Synthetic oligonucleotide
  Target: ATXN2; (-) strand; PAM type: YTN; PAM sequence: CTG
catatggatatccagttttc

SEQ ID NO: 65329 - DNA, 20 bp, Artificial Sequence
  Description of Artificial Sequence: Synthetic oligonucleotide
  Target: ATXN2; (-) strand; PAM type: YTN; PAM sequence: TTC
tgcatatggatatccagttt

SEQ ID NO: 65330 - DNA, 20 bp, Artificial Sequence
  Description of Artificial Sequence: Synthetic oligonucleotide
  Target: ATXN2; (-) strand; PAM type: YTN; PAM sequence: CTT
ctgcatatggatatccagtt

SEQ ID NO: 65331 - DNA, 20 bp, Artificial Sequence
  Description of Artificial Sequence: Synthetic oligonucleotide
  Target: ATXN2; (-) strand; PAM type: YTN; PAM sequence: TTC
ttctgcatatggatatccag

SEQ ID NO: 65332 - DNA, 20 bp, Artificial Sequence
  Description of Artificial Sequence: Synthetic oligonucleotide
  Target: ATXN2; (-) strand; PAM type: YTN; PAM sequence: TTC
attcttctgcatatggatat

SEQ ID NO: 65333 - DNA, 20 bp, Artificial Sequence
  Description of Artificial Sequence: Synthetic oligonucleotide
  Target: ATXN2; (-) strand; PAM type: YTN; PAM sequence: TTT
cattcttctgcatatggata

SEQ ID NO: 65334 - DNA, 20 bp, Artificial Sequence
  Description of Artificial Sequence: Synthetic oligonucleotide
  Target: ATXN2; (-) strand; PAM type: YTN; PAM sequence: CTG
gtttcattcttctgcatatg

SEQ ID NO: 65335 - DNA, 20 bp, Artificial Sequence
  Description of Artificial Sequence: Synthetic oligonucleotide
  Target: ATXN2; (-) strand; PAM type: YTN; PAM sequence: TTA
atatggtgggacacaggggt

SEQ ID NO: 65336 - DNA, 20 bp, Artificial Sequence
  Description of Artificial Sequence: Synthetic oligonucleotide
  Target: ATXN2; (-) strand; PAM type: YTN; PAM sequence: TTT
aatatggtgggacacagggg

SEQ ID NO: 65337 - DNA, 20 bp, Artificial Sequence
  Description of Artificial Sequence: Synthetic oligonucleotide
  Target: ATXN2; (-) strand; PAM type: YTN; PAM sequence: TTT
taatatggtgggacacaggg

SEQ ID NO: 65338 - DNA, 20 bp, Artificial Sequence
  Description of Artificial Sequence: Synthetic oligonucleotide
  Target: ATXN2; (-) strand; PAM type: YTN; PAM sequence: TTT
ttaatatggtgggacacagg

SEQ ID NO: 65339 - DNA, 20 bp, Artificial Sequence
  Description of Artificial Sequence: Synthetic oligonucleotide
  Target: ATXN2; (-) strand; PAM type: YTN; PAM sequence: TTT
tttaatatggtgggacacag

SEQ ID NO: 65340 - DNA, 20 bp, Artificial Sequence
  Description of Artificial Sequence: Synthetic oligonucleotide
  Target: ATXN2; (-) strand; PAM type: YTN; PAM sequence: TTT
ttttaatatggtgggacaca

SEQ ID NO: 65341 - DNA, 20 bp, Artificial Sequence
  Description of Artificial Sequence: Synthetic oligonucleotide
  Target: ATXN2; (-) strand; PAM type: YTN; PAM sequence: TTT
tttttaatatggtgggacac

SEQ ID NO: 65342 - DNA, 20 bp, Artificial Sequence
  Description of Artificial Sequence: Synthetic oligonucleotide
  Target: ATXN2; (-) strand; PAM type: YTN; PAM sequence: TTT
ttttttaatatggtgggaca

SEQ ID NO: 65343 - DNA, 20 bp, Artificial Sequence
  Description of Artificial Sequence: Synthetic oligonucleotide
  Target: ATXN2; (-) strand; PAM type: YTN; PAM sequence: TTG
atttttttttaatatggtgg

SEQ ID NO: 65344 - DNA, 20 bp, Artificial Sequence
  Description of Artificial Sequence: Synthetic oligonucleotide
  Target: ATXN2; (-) strand; PAM type: YTN; PAM sequence: TTT
gatttttttttaatatggtg

SEQ ID NO: 65345 - DNA, 20 bp, Artificial Sequence
  Description of Artificial Sequence: Synthetic oligonucleotide
  Target: ATXN2; (-) strand; PAM type: YTN; PAM sequence: TTG
atttgatttttttttaatat

SEQ ID NO: 65346 - DNA, 20 bp, Artificial Sequence
  Description of Artificial Sequence: Synthetic oligonucleotide
  Target: ATXN2; (-) strand; PAM type: YTN; PAM sequence: TTT
gatttgatttttttttaata

SEQ ID NO: 65347 - DNA, 20 bp, Artificial Sequence
  Description of Artificial Sequence: Synthetic oligonucleotide
  Target: ATXN2; (-) strand; PAM type: YTN; PAM sequence: TTT
tgatttgatttttttttaat

SEQ ID NO: 65348 - DNA, 20 bp, Artificial Sequence
  Description of Artificial Sequence: Synthetic oligonucleotide
  Target: ATXN2; (-) strand; PAM type: YTN; PAM sequence: TTA
gtccattttgatttgatttt

SEQ ID NO: 65349 - DNA, 20 bp, Artificial Sequence
  Description of Artificial Sequence: Synthetic oligonucleotide
  Target: ATXN2; (-) strand; PAM type: YTN; PAM sequence: TTT
agtccattttgatttgattt

SEQ ID NO: 65350 - DNA, 20 bp, Artificial Sequence
  Description of Artificial Sequence: Synthetic oligonucleotide
  Target: ATXN2; (-) strand; PAM type: YTN; PAM sequence: CTT
tagtccattttgatttgatt

SEQ ID NO: 65351 - DNA, 20 bp, Artificial Sequence
  Description of Artificial Sequence: Synthetic oligonucleotide
  Target: ATXN2; (-) strand; PAM type: YTN; PAM sequence: TTA
aatctttagtccattttgat

SEQ ID NO: 65352 - DNA, 20 bp, Artificial Sequence
  Description of Artificial Sequence: Synthetic oligonucleotide
  Target: ATXN2; (-) strand; PAM type: YTN; PAM sequence: TTT
aaatctttagtccattttga

SEQ ID NO: 65353 - DNA, 20 bp, Artificial Sequence
  Description of Artificial Sequence: Synthetic oligonucleotide
  Target: ATXN2; (-) strand; PAM type: YTN; PAM sequence: TTA
gatttaaatctttagtccat

SEQ ID NO: 65354 - DNA, 20 bp, Artificial Sequence
  Description of Artificial Sequence: Synthetic oligonucleotide
  Target: ATXN2; (-) strand; PAM type: YTN; PAM sequence: CTT
agatttaaatctttagtcca

SEQ ID NO: 65355 - DNA, 20 bp, Artificial Sequence
  Description of Artificial Sequence: Synthetic oligonucleotide
  Target: ATXN2; (-) strand; PAM type: YTN; PAM sequence: TTG
aggtcttagatttaaatctt

SEQ ID NO: 65356 - DNA, 20 bp, Artificial Sequence
  Description of Artificial Sequence: Synthetic oligonucleotide
  Target: ATXN2; (-) strand; PAM type: YTN; PAM sequence: TTT
gaggtcttagatttaaatct

SEQ ID NO: 65357 - DNA, 20 bp, Artificial Sequence
  Description of Artificial Sequence: Synthetic oligonucleotide
  Target: ATXN2; (-) strand; PAM type: YTN; PAM sequence: TTC
atagtttgaggtcttagatt

SEQ ID NO: 65358 - DNA, 20 bp, Artificial Sequence
  Description of Artificial Sequence: Synthetic oligonucleotide
  Target: ATXN2; (-) strand; PAM type: YTN; PAM sequence: TTT
catagtttgaggtcttagat

SEQ ID NO: 65359 - DNA, 20 bp, Artificial Sequence
  Description of Artificial Sequence: Synthetic oligonucleotide
  Target: ATXN2; (-) strand; PAM type: YTN; PAM sequence: TTA
gtagtttcatagtttgaggt

SEQ ID NO: 65360 - DNA, 20 bp, Artificial Sequence
  Description of Artificial Sequence: Synthetic oligonucleotide
  Target: ATXN2; (-) strand; PAM type: YTN; PAM sequence: TTT
agtagtttcatagtttgagg

SEQ ID NO: 65361 - DNA, 20 bp, Artificial Sequence
  Description of Artificial Sequence: Synthetic oligonucleotide
  Target: ATXN2; (-) strand; PAM type: YTN; PAM sequence: TTT
tagtagtttcatagtttgag

SEQ ID NO: 65362 - DNA, 20 bp, Artificial Sequence
  Description of Artificial Sequence: Synthetic oligonucleotide
  Target: ATXN2; (-) strand; PAM type: YTN; PAM sequence: CTT
ttagtagtttcatagtttga

SEQ ID NO: 65363 - DNA, 20 bp, Artificial Sequence
  Description of Artificial Sequence: Synthetic oligonucleotide
  Target: ATXN2; (-) strand; PAM type: YTN; PAM sequence: TTC
ttttagtagtttcatagttt

SEQ ID NO: 65364 - DNA, 20 bp, Artificial Sequence
  Description of Artificial Sequence: Synthetic oligonucleotide
  Target: ATXN2; (-) strand; PAM type: YTN; PAM sequence: TTT
cttttagtagtttcatagtt

SEQ ID NO: 65365 - DNA, 20 bp, Artificial Sequence
  Description of Artificial Sequence: Synthetic oligonucleotide
  Target: ATXN2; (-) strand; PAM type: YTN; PAM sequence: TTT
tcttttagtagtttcatagt

SEQ ID NO: 65366 - DNA, 20 bp, Artificial Sequence
  Description of Artificial Sequence: Synthetic oligonucleotide
  Target: ATXN2; (-) strand; PAM type: YTN; PAM sequence: TTA
atgttttcttttagtagttt

SEQ ID NO: 65367 - DNA, 20 bp, Artificial Sequence
  Description of Artificial Sequence: Synthetic oligonucleotide
  Target: ATXN2; (-) strand; PAM type: YTN; PAM sequence: TTT
aatgttttcttttagtagtt

SEQ ID NO: 65368 - DNA, 20 bp, Artificial Sequence
  Description of Artificial Sequence: Synthetic oligonucleotide
  Target: ATXN2; (-) strand; PAM type: YTN; PAM sequence: CTG
ggagtttaatgttttctttt

SEQ ID NO: 65369 - DNA, 20 bp, Artificial Sequence
  Description of Artificial Sequence: Synthetic oligonucleotide
  Target: ATXN2; (-) strand; PAM type: YTN; PAM sequence: TTG
cccagagtaatgtccctggg

SEQ ID NO: 65370 - DNA, 20 bp, Artificial Sequence
  Description of Artificial Sequence: Synthetic oligonucleotide
  Target: ATXN2; (-) strand; PAM type: YTN; PAM sequence: TTT
gcccagagtaatgtccctgg

SEQ ID NO: 65371 - DNA, 20 bp, Artificial Sequence
  Description of Artificial Sequence: Synthetic oligonucleotide
  Target: ATXN2; (-) strand; PAM type: YTN; PAM sequence: CTT
tgcccagagtaatgtccctg

SEQ ID NO: 65372 - DNA, 20 bp, Artificial Sequence
  Description of Artificial Sequence: Synthetic oligonucleotide
  Target: ATXN2; (-) strand; PAM type: YTN; PAM sequence: CTC
aagaaatctttgcccagagt

SEQ ID NO: 65373 - DNA, 20 bp, Artificial Sequence
  Description of Artificial Sequence: Synthetic oligonucleotide
  Target: ATXN2; (-) strand; PAM type: YTN; PAM sequence: TTA
ctcaagaaatctttgcccag

SEQ ID NO: 65374 - DNA, 20 bp, Artificial Sequence
  Description of Artificial Sequence: Synthetic oligonucleotide
  Target: ATXN2; (-) strand; PAM type: YTN; PAM sequence: TTG
gggtattactcaagaaatct

SEQ ID NO: 65375 - DNA, 20 bp, Artificial Sequence
  Description of Artificial Sequence: Synthetic oligonucleotide
  Target: ATXN2; (-) strand; PAM type: YTN; PAM sequence: TTT
ggggtattactcaagaaatc

SEQ ID NO: 65376 - DNA, 20 bp, Artificial Sequence
  Description of Artificial Sequence: Synthetic oligonucleotide
  Target: ATXN2; (-) strand; PAM type: YTN; PAM sequence: TTT
tggggtattactcaagaaat

SEQ ID NO: 65377 - DNA, 20 bp, Artificial Sequence
  Description of Artificial Sequence: Synthetic oligonucleotide
  Target: ATXN2; (-) strand; PAM type: YTN; PAM sequence: CTT
ttggggtattactcaagaaa

SEQ ID NO: 65378 - DNA, 20 bp, Artificial Sequence
  Description of Artificial Sequence: Synthetic oligonucleotide
  Target: ATXN2; (-) strand; PAM type: YTN; PAM sequence: CTG
tacttttggggtattactca

SEQ ID NO: 65379 - DNA, 20 bp, Artificial Sequence
  Description of Artificial Sequence: Synthetic oligonucleotide
  Target: ATXN2; (-) strand; PAM type: YTN; PAM sequence: TTG
cctgtacttttggggtatta

SEQ ID NO: 65380 - DNA, 20 bp, Artificial Sequence
  Description of Artificial Sequence: Synthetic oligonucleotide
  Target: ATXN2; (-) strand; PAM type: YTN; PAM sequence: TTG
gttgcctgtacttttggggt

SEQ ID NO: 65381 - DNA, 20 bp, Artificial Sequence
  Description of Artificial Sequence: Synthetic oligonucleotide
  Target: ATXN2; (-) strand; PAM type: YTN; PAM sequence: TTT
ggttgcctgtacttttgggg

SEQ ID NO: 65382 - DNA, 20 bp, Artificial Sequence
  Description of Artificial Sequence: Synthetic oligonucleotide
  Target: ATXN2; (-) strand; PAM type: YTN; PAM sequence: CTT
tggttgcctgtacttttggg

SEQ ID NO: 65383 - DNA, 20 bp, Artificial Sequence
  Description of Artificial Sequence: Synthetic oligonucleotide
  Target: ATXN2; (-) strand; PAM type: YTN; PAM sequence: TTG
ctttggttgcctgtactttt

SEQ ID NO: 65384 - DNA, 20 bp, Artificial Sequence
  Description of Artificial Sequence: Synthetic oligonucleotide
  Target: ATXN2; (-) strand; PAM type: YTN; PAM sequence: TTT
gctttggttgcctgtacttt

SEQ ID NO: 65385 - DNA, 20 bp, Artificial Sequence
  Description of Artificial Sequence: Synthetic oligonucleotide
  Target: ATXN2; (-) strand; PAM type: YTN; PAM sequence: CTT
tgctttggttgcctgtactt

SEQ ID NO: 65386 - DNA, 20 bp, Artificial Sequence
  Description of Artificial Sequence: Synthetic oligonucleotide
  Target: ATXN2; (-) strand; PAM type: YTN; PAM sequence: TTG
tccatctttgctttggttgc

SEQ ID NO: 65387 - DNA, 20 bp, Artificial Sequence
  Description of Artificial Sequence: Synthetic oligonucleotide
  Target: ATXN2; (-) strand; PAM type: YTN; PAM sequence: TTT
gtccatctttgctttggttg

SEQ ID NO: 65388 - DNA, 20 bp, Artificial Sequence
  Description of Artificial Sequence: Synthetic oligonucleotide
  Target: ATXN2; (-) strand; PAM type: YTN; PAM sequence: TTG
atgtgatcccatttgtccat

SEQ ID NO: 65389 - DNA, 20 bp, Artificial Sequence
  Description of Artificial Sequence: Synthetic oligonucleotide
  Target: ATXN2; (-) strand; PAM type: YTN; PAM sequence: CTT
gatgtgatcccatttgtcca

SEQ ID NO: 65390 - DNA, 20 bp, Artificial Sequence
  Description of Artificial Sequence: Synthetic oligonucleotide
  Target: ATXN2; (-) strand; PAM type: YTN; PAM sequence: TTA
acttgatgtgatcccatttg

SEQ ID NO: 65391 - DNA, 20 bp, Artificial Sequence
  Description of Artificial Sequence: Synthetic oligonucleotide
  Target: ATXN2; (-) strand; PAM type: YTN; PAM sequence: TTT
aacttgatgtgatcccattt

SEQ ID NO: 65392 - DNA, 20 bp, Artificial Sequence
  Description of Artificial Sequence: Synthetic oligonucleotide
  Target: ATXN2; (-) strand; PAM type: YTN; PAM sequence: TTT
taacttgatgtgatcccatt

SEQ ID NO: 65393 - DNA, 20 bp, Artificial Sequence
  Description of Artificial Sequence: Synthetic oligonucleotide
  Target: ATXN2; (-) strand; PAM type: YTN; PAM sequence: TTT
ttaacttgatgtgatcccat

SEQ ID NO: 65394 - DNA, 20 bp, Artificial Sequence
  Description of Artificial Sequence: Synthetic oligonucleotide
  Target: ATXN2; (-) strand; PAM type: YTN; PAM sequence: CTT
tttaacttgatgtgatccca

SEQ ID NO: 65395 - DNA, 20 bp, Artificial Sequence
  Description of Artificial Sequence: Synthetic oligonucleotide
  Target: ATXN2; (-) strand; PAM type: YTN; PAM sequence: CTG
tgcagaagctttttaacttg

SEQ ID NO: 65396 - DNA, 20 bp, Artificial Sequence
  Description of Artificial Sequence: Synthetic oligonucleotide
  Target: ATXN2; (-) strand; PAM type: YTN; PAM sequence: TTG
ctgtgcagaagctttttaac

SEQ ID NO: 65397 - DNA, 20 bp, Artificial Sequence
  Description of Artificial Sequence: Synthetic oligonucleotide
  Target: ATXN2; (-) strand; PAM type: YTN; PAM sequence: TTT
gctgtgcagaagctttttaa

SEQ ID NO: 65398 - DNA, 20 bp, Artificial Sequence
  Description of Artificial Sequence: Synthetic oligonucleotide
  Target: ATXN2; (-) strand; PAM type: YTN; PAM sequence: CTT
tgctgtgcagaagcttttta

SEQ ID NO: 65399 - DNA, 20 bp, Artificial Sequence
  Description of Artificial Sequence: Synthetic oligonucleotide
  Target: ATXN2; (-) strand; PAM type: YTN; PAM sequence: TTC
ctttgctgtgcagaagcttt

SEQ ID NO: 65400 - DNA, 20 bp, Artificial Sequence
  Description of Artificial Sequence: Synthetic oligonucleotide
  Target: ATXN2; (-) strand; PAM type: YTN; PAM sequence: TTT
cctttgctgtgcagaagctt

SEQ ID NO: 65401 - DNA, 20 bp, Artificial Sequence
  Description of Artificial Sequence: Synthetic oligonucleotide
  Target: ATXN2; (-) strand; PAM type: YTN; PAM sequence: TTG
atggtttcctttgctgtgca

SEQ ID NO: 65402 - DNA, 20 bp, Artificial Sequence
  Description of Artificial Sequence: Synthetic oligonucleotide
  Target: ATXN2; (-) strand; PAM type: YTN; PAM sequence: TTG
ttgatggtttcctttgctgt

SEQ ID NO: 65403 - DNA, 20 bp, Artificial Sequence
  Description of Artificial Sequence: Synthetic oligonucleotide
  Target: ATXN2; (-) strand; PAM type: YTN; PAM sequence: TTT
gttgatggtttcctttgctg

SEQ ID NO: 65404 - DNA, 20 bp, Artificial Sequence
  Description of Artificial Sequence: Synthetic oligonucleotide
  Target: ATXN2; (-) strand; PAM type: YTN; PAM sequence: CTT
tgttgatggtttcctttgct

SEQ ID NO: 65405 - DNA, 20 bp, Artificial Sequence
  Description of Artificial Sequence: Synthetic oligonucleotide
  Target: ATXN2; (-) strand; PAM type: YTN; PAM sequence: TTC
actttgttgatggtttcctt

SEQ ID NO: 65406 - DNA, 20 bp, Artificial Sequence
  Description of Artificial Sequence: Synthetic oligonucleotide
  Target: ATXN2; (-) strand; PAM type: YTN; PAM sequence: CTT
cactttgttgatggtttcct

SEQ ID NO: 65407 - DNA, 20 bp, Artificial Sequence
  Description of Artificial Sequence: Synthetic oligonucleotide
  Target: ATXN2; (-) strand; PAM type: YTN; PAM sequence: CTC
ttcactttgttgatggtttc

SEQ ID NO: 65408 - DNA, 20 bp, Artificial Sequence
  Description of Artificial Sequence: Synthetic oligonucleotide
  Target: ATXN2; (-) strand; PAM type: YTN; PAM sequence: CTG
tctcttcactttgttgatgg

SEQ ID NO: 65409 - DNA, 20 bp, Artificial Sequence
  Description of Artificial Sequence: Synthetic oligonucleotide
  Target: ATXN2; (-) strand; PAM type: YTN; PAM sequence: CTG
tgggctgtctcttcactttg

SEQ ID NO: 65410 - DNA, 20 bp, Artificial Sequence
  Description of Artificial Sequence: Synthetic oligonucleotide
  Target: ATXN2; (-) strand; PAM type: YTN; PAM sequence: TTC
tgtgggctgtctcttcactt

SEQ ID NO: 65411 - DNA, 20 bp, Artificial Sequence
  Description of Artificial Sequence: Synthetic oligonucleotide
  Target: ATXN2; (-) strand; PAM type: YTN; PAM sequence: CTC
ccattctgtgggctgtctct

SEQ ID NO: 65412 - DNA, 20 bp, Artificial Sequence
  Description of Artificial Sequence: Synthetic oligonucleotide
  Target: ATXN2; (-) strand; PAM type: YTN; PAM sequence: TTC
tcccattctgtgggctgtct

SEQ ID NO: 65413 - DNA, 20 bp, Artificial Sequence
  Description of Artificial Sequence: Synthetic oligonucleotide
  Target: ATXN2; (-) strand; PAM type: YTN; PAM sequence: TTT
ctcccattctgtgggctgtc

SEQ ID NO: 65414 - DNA, 20 bp, Artificial Sequence
  Description of Artificial Sequence: Synthetic oligonucleotide
  Target: ATXN2; (-) strand; PAM type: YTN; PAM sequence: TTT
tctcccattctgtgggctgt

SEQ ID NO: 65415 - DNA, 20 bp, Artificial Sequence
  Description of Artificial Sequence: Synthetic oligonucleotide
  Target: ATXN2; (-) strand; PAM type: YTN; PAM sequence: TTG
caaatattttctcccattct

SEQ ID NO: 65416 - DNA, 20 bp, Artificial Sequence
  Description of Artificial Sequence: Synthetic oligonucleotide
  Target: ATXN2; (-) strand; PAM type: YTN; PAM sequence: TTT
gcaaatattttctcccattc

SEQ ID NO: 65417 - DNA, 20 bp, Artificial Sequence
  Description of Artificial Sequence: Synthetic oligonucleotide
  Target: ATXN2; (-) strand; PAM type: YTN; PAM sequence: TTG
tcagatgagtagtttgcaaa

SEQ ID NO: 65418 - DNA, 20 bp, Artificial Sequence
  Description of Artificial Sequence: Synthetic oligonucleotide
  Target: ATXN2; (-) strand; PAM type: YTN; PAM sequence: CTT
gtcagatgagtagtttgcaa

SEQ ID NO: 65419 - DNA, 20 bp, Artificial Sequence
  Description of Artificial Sequence: Synthetic oligonucleotide
  Target: ATXN2; (-) strand; PAM type: YTN; PAM sequence: TTG
atcccttgtcagatgagtag

SEQ ID NO: 65420 - DNA, 20 bp, Artificial Sequence
  Description of Artificial Sequence: Synthetic oligonucleotide
  Target: ATXN2; (-) strand; PAM type: YTN; PAM sequence: TTA
ttgatcccttgtcagatgag

SEQ ID NO: 65421 - DNA, 20 bp, Artificial Sequence
  Description of Artificial Sequence: Synthetic oligonucleotide
  Target: ATXN2; (-) strand; PAM type: YTN; PAM sequence: CTG
gttattgatcccttgtcaga

SEQ ID NO: 65422 - DNA, 20 bp, Artificial Sequence
  Description of Artificial Sequence: Synthetic oligonucleotide
  Target: ATXN2; (-) strand; PAM type: YTN; PAM sequence: TTC
tggttattgatcccttgtca

SEQ ID NO: 65423 - DNA, 20 bp, Artificial Sequence
  Description of Artificial Sequence: Synthetic oligonucleotide
  Target: ATXN2; (-) strand; PAM type: YTN; PAM sequence: TTA
tattctggttattgatccct

SEQ ID NO: 65424 - DNA, 20 bp, Artificial Sequence
  Description of Artificial Sequence: Synthetic oligonucleotide
  Target: ATXN2; (-) strand; PAM type: YTN; PAM sequence: TTT
atattctggttattgatccc

SEQ ID NO: 65425 - DNA, 20 bp, Artificial Sequence
  Description of Artificial Sequence: Synthetic oligonucleotide
  Target: ATXN2; (-) strand; PAM type: YTN; PAM sequence: TTT
tatattctggttattgatcc

SEQ ID NO: 65426 - DNA, 20 bp, Artificial Sequence
  Description of Artificial Sequence: Synthetic oligonucleotide
  Target: ATXN2; (-) strand; PAM type: YTN; PAM sequence: CTT
ttatattctggttattgatc

SEQ ID NO: 65427 - DNA, 20 bp, Artificial Sequence
  Description of Artificial Sequence: Synthetic oligonucleotide
  Target: ATXN2; (-) strand; PAM type: YTN; PAM sequence: TTG
agtgccttttatattctggt

SEQ ID NO: 65428 - DNA, 20 bp, Artificial Sequence
  Description of Artificial Sequence: Synthetic oligonucleotide
  Target: ATXN2; (-) strand; PAM type: YTN; PAM sequence: CTT
gagtgccttttatattctgg

SEQ ID NO: 65429 - DNA, 20 bp, Artificial Sequence
  Description of Artificial Sequence: Synthetic oligonucleotide
  Target: ATXN2; (-) strand; PAM type: YTN; PAM sequence: TTG
cttgagtgccttttatattc

SEQ ID NO: 65430 - DNA, 20 bp, Artificial Sequence
  Description of Artificial Sequence: Synthetic oligonucleotide
  Target: ATXN2; (-) strand; PAM type: YTN; PAM sequence: CTA
tggagttgcttgagtgcctt

SEQ ID NO: 65431 - DNA, 20 bp, Artificial Sequence
  Description of Artificial Sequence: Synthetic oligonucleotide
  Target: ATXN2; (-) strand; PAM type: YTN; PAM sequence: TTC
cctatggagttgcttgagtg

SEQ ID NO: 65432 - DNA, 20 bp, Artificial Sequence
  Description of Artificial Sequence: Synthetic oligonucleotide
  Target: ATXN2; (-) strand; PAM type: YTN; PAM sequence: TTT
ccctatggagttgcttgagt

SEQ ID NO: 65433 - DNA, 20 bp, Artificial Sequence
  Description of Artificial Sequence: Synthetic oligonucleotide
  Target: ATXN2; (-) strand; PAM type: YTN; PAM sequence: TTT
tccctatggagttgcttgag

SEQ ID NO: 65434 - DNA, 20 bp, Artificial Sequence
  Description of Artificial Sequence: Synthetic oligonucleotide
  Target: ATXN2; (-) strand; PAM type: YTN; PAM sequence: CTA
aaattttccctatggagttg

SEQ ID NO: 65435 - DNA, 20 bp, Artificial Sequence
  Description of Artificial Sequence: Synthetic oligonucleotide
  Target: ATXN2; (-) strand; PAM type: YTN; PAM sequence: TTA
ctaaaattttccctatggag

SEQ ID NO: 65436 - DNA, 20 bp, Artificial Sequence
  Description of Artificial Sequence: Synthetic oligonucleotide
  Target: ATXN2; (-) strand; PAM type: YTN; PAM sequence: TTG
agttactaaaattttcccta

SEQ ID NO: 65437 - DNA, 20 bp, Artificial Sequence
  Description of Artificial Sequence: Synthetic oligonucleotide
  Target: ATXN2; (-) strand; PAM type: YTN; PAM sequence: TTA
attgagttactaaaattttc

SEQ ID NO: 65438 - DNA, 20 bp, Artificial Sequence
  Description of Artificial Sequence: Synthetic oligonucleotide
  Target: ATXN2; (-) strand; PAM type: YTN; PAM sequence: TTT
aattgagttactaaaatttt

SEQ ID NO: 65439 - DNA, 20 bp, Artificial Sequence
  Description of Artificial Sequence: Synthetic oligonucleotide
  Target: ATXN2; (-) strand; PAM type: YTN; PAM sequence: TTT
taattgagttactaaaattt

SEQ ID NO: 65440 - DNA, 20 bp, Artificial Sequence
  Description of Artificial Sequence: Synthetic oligonucleotide
  Target: ATXN2; (-) strand; PAM type: YTN; PAM sequence: TTT
ttaattgagttactaaaatt

SEQ ID NO: 65441 - DNA, 20 bp, Artificial Sequence
  Description of Artificial Sequence: Synthetic oligonucleotide
  Target: ATXN2; (-) strand; PAM type: YTN; PAM sequence: TTG
cccatttttaattgagttac

SEQ ID NO: 65442 - DNA, 20 bp, Artificial Sequence
  Description of Artificial Sequence: Synthetic oligonucleotide
  Target: ATXN2; (-) strand; PAM type: YTN; PAM sequence: TTT
gcccatttttaattgagtta

SEQ ID NO: 65443 - DNA, 20 bp, Artificial Sequence
  Description of Artificial Sequence: Synthetic oligonucleotide
  Target: ATXN2; (-) strand; PAM type: YTN; PAM sequence: TTT
tgcccatttttaattgagtt

SEQ ID NO: 65444 - DNA, 20 bp, Artificial Sequence
  Description of Artificial Sequence: Synthetic oligonucleotide
  Target: ATXN2; (-) strand; PAM type: YTN; PAM sequence: CTT
ttgcccatttttaattgagt

SEQ ID NO: 65445 - DNA, 20 bp, Artificial Sequence
  Description of Artificial Sequence: Synthetic oligonucleotide
  Target: ATXN2; (-) strand; PAM type: YTN; PAM sequence: TTC
agatcttttgcccattttta

SEQ ID NO: 65446 - DNA, 20 bp, Artificial Sequence
  Description of Artificial Sequence: Synthetic oligonucleotide
  Target: ATXN2; (-) strand; PAM type: YTN; PAM sequence: CTA
ttcagatcttttgcccattt

SEQ ID NO: 65447 - DNA, 20 bp, Artificial Sequence
  Description of Artificial Sequence: Synthetic oligonucleotide
  Target: ATXN2; (-) strand; PAM type: YTN; PAM sequence: TTG
agaaatgtctattcagatct

SEQ ID NO: 65448 - DNA, 20 bp, Artificial Sequence
  Description of Artificial Sequence: Synthetic oligonucleotide
  Target: ATXN2; (-) strand; PAM type: YTN; PAM sequence: TTT
gagaaatgtctattcagatc

SEQ ID NO: 65449 - DNA, 20 bp, Artificial Sequence
  Description of Artificial Sequence: Synthetic oligonucleotide
  Target: ATXN2; (-) strand; PAM type: YTN; PAM sequence: TTT
tgagaaatgtctattcagat

SEQ ID NO: 65450 - DNA, 20 bp, Artificial Sequence
  Description of Artificial Sequence: Synthetic oligonucleotide
  Target: ATXN2; (-) strand; PAM type: YTN; PAM sequence: CTT
ttgagaaatgtctattcaga

SEQ ID NO: 65451 - DNA, 20 bp, Artificial Sequence
  Description of Artificial Sequence: Synthetic oligonucleotide
  Target: ATXN2; (-) strand; PAM type: YTN; PAM sequence: CTG
tatgtcgtcttttgagaaat

SEQ ID NO: 65452 - DNA, 20 bp, Artificial Sequence
  Description of Artificial Sequence: Synthetic oligonucleotide
  Target: ATXN2; (-) strand; PAM type: YTN; PAM sequence: CTG
cgcccagcctgtatgtcgtc

SEQ ID NO: 65453 - DNA, 20 bp, Artificial Sequence
  Description of Artificial Sequence: Synthetic oligonucleotide
  Target: ATXN2; (-) strand; PAM type: YTN; PAM sequence: CTG
ctgcgcccagcctgtatgtc

SEQ ID NO: 65454 - DNA, 20 bp, Artificial Sequence
  Description of Artificial Sequence: Synthetic oligonucleotide
  Target: ATXN2; (-) strand; PAM type: YTN; PAM sequence: TTA
caggcgtgagctgctgcgcc

SEQ ID NO: 65455 - DNA, 20 bp, Artificial Sequence
  Description of Artificial Sequence: Synthetic oligonucleotide
  Target: ATXN2; (-) strand; PAM type: YTN; PAM sequence: CTA
ggattacaggcgtgagctgc

SEQ ID NO: 65456 - DNA, 20 bp, Artificial Sequence
  Description of Artificial Sequence: Synthetic oligonucleotide
  Target: ATXN2; (-) strand; PAM type: YTN; PAM sequence: CTC
ccaaagtgctaggattacag

SEQ ID NO: 65457 - DNA, 20 bp, Artificial Sequence
  Description of Artificial Sequence: Synthetic oligonucleotide
  Target: ATXN2; (-) strand; PAM type: YTN; PAM sequence: CTC
agcctcccaaagtgctagga

SEQ ID NO: 65458 - DNA, 20 bp, Artificial Sequence
  Description of Artificial Sequence: Synthetic oligonucleotide
  Target: ATXN2; (-) strand; PAM type: YTN; PAM sequence: CTG
cctcagcctcccaaagtgct

SEQ ID NO: 65459 - DNA, 20 bp, Artificial Sequence
  Description of Artificial Sequence: Synthetic oligonucleotide
  Target: ATXN2; (-) strand; PAM type: YTN; PAM sequence: TTA
cctgcctcagcctcccaaag

SEQ ID NO: 65460 - DNA, 20 bp, Artificial Sequence
  Description of Artificial Sequence: Synthetic oligonucleotide
  Target: ATXN2; (-) strand; PAM type: YTN; PAM sequence: TTT
acctgcctcagcctcccaaa

SEQ ID NO: 65461 - DNA, 20 bp, Artificial Sequence
  Description of Artificial Sequence: Synthetic oligonucleotide
  Target: ATXN2; (-) strand; PAM type: YTN; PAM sequence: CTC
aggtgatttacctgcctcag

SEQ ID NO: 65462 - DNA, 20 bp, Artificial Sequence
  Description of Artificial Sequence: Synthetic oligonucleotide
  Target: ATXN2; (-) strand; PAM type: YTN; PAM sequence: CTA
acctcaggtgatttacctgc

SEQ ID NO: 65463 - DNA, 20 bp, Artificial Sequence
  Description of Artificial Sequence: Synthetic oligonucleotide
  Target: ATXN2; (-) strand; PAM type: YTN; PAM sequence: CTC
ctaacctcaggtgatttacc

SEQ ID NO: 65464 - DNA, 20 bp, Artificial Sequence
  Description of Artificial Sequence: Synthetic oligonucleotide
  Target: ATXN2; (-) strand; PAM type: YTN; PAM sequence: TTG
aactcctaacctcaggtgat

SEQ ID NO: 65465 - DNA, 20 bp, Artificial Sequence
  Description of Artificial Sequence: Synthetic oligonucleotide
  Target: ATXN2; (-) strand; PAM type: YTN; PAM sequence: CTT
gaactcctaacctcaggtga

SEQ ID NO: 65466 - DNA, 20 bp, Artificial Sequence
  Description of Artificial Sequence: Synthetic oligonucleotide
  Target: ATXN2; (-) strand; PAM type: YTN; PAM sequence: CTG
gtcttgaactcctaacctca

SEQ ID NO: 65467 - DNA, 20 bp, Artificial Sequence
  Description of Artificial Sequence: Synthetic oligonucleotide
  Target: ATXN2; (-) strand; PAM type: YTN; PAM sequence: TTG
cccaggctggtcttgaactc

SEQ ID NO: 65468 - DNA, 20 bp, Artificial Sequence
  Description of Artificial Sequence: Synthetic oligonucleotide
  Target: ATXN2; (-) strand; PAM type: YTN; PAM sequence: TTG
ttgcccaggctggtcttgaa

SEQ ID NO: 65469 - DNA, 20 bp, Artificial Sequence
  Description of Artificial Sequence: Synthetic oligonucleotide
  Target: ATXN2; (-) strand; PAM type: YTN; PAM sequence: CTT
gttgcccaggctggtcttga

SEQ ID NO: 65470 - DNA, 20 bp, Artificial Sequence
  Description of Artificial Sequence: Synthetic oligonucleotide
  Target: ATXN2; (-) strand; PAM type: YTN; PAM sequence: CTC
cttgttgcccaggctggtct

SEQ ID NO: 65471 - DNA, 20 bp, Artificial Sequence
  Description of Artificial Sequence: Synthetic oligonucleotide
  Target: ATXN2; (-) strand; PAM type: YTN; PAM sequence: TTC
tccttgttgcccaggctggt

SEQ ID NO: 65472 - DNA, 20 bp, Artificial Sequence
  Description of Artificial Sequence: Synthetic oligonucleotide
  Target: ATXN2; (-) strand; PAM type: YTN; PAM sequence: TTT
ctccttgttgcccaggctgg

SEQ ID NO: 65473 - DNA, 20 bp, Artificial Sequence
  Description of Artificial Sequence: Synthetic oligonucleotide
  Target: ATXN2; (-) strand; PAM type: YTN; PAM sequence: TTA
gtagagacgggatttctcct

SEQ ID NO: 65474 - DNA, 20 bp, Artificial Sequence
  Description of Artificial Sequence: Synthetic oligonucleotide
  Target: ATXN2; (-) strand; PAM type: YTN; PAM sequence: TTT
agtagagacgggatttctcc

SEQ ID NO: 65475 - DNA, 20 bp, Artificial Sequence
  Description of Artificial Sequence: Synthetic oligonucleotide
  Target: ATXN2; (-) strand; PAM type: YTN; PAM sequence: TTT
tagtagagacgggatttctc

SEQ ID NO: 65476 - DNA, 20 bp, Artificial Sequence
  Description of Artificial Sequence: Synthetic oligonucleotide
  Target: ATXN2; (-) strand; PAM type: YTN; PAM sequence: TTT
ttagtagagacgggatttct

SEQ ID NO: 65477 - DNA, 20 bp, Artificial Sequence
  Description of Artificial Sequence: Synthetic oligonucleotide
  Target: ATXN2; (-) strand; PAM type: YTN; PAM sequence: TTG
tatttttagtagagacggga

SEQ ID NO: 65478 - DNA, 20 bp, Artificial Sequence
  Description of Artificial Sequence: Synthetic oligonucleotide
  Target: ATXN2; (-) strand; PAM type: YTN; PAM sequence: TTT
gtatttttagtagagacggg

SEQ ID NO: 65479 - DNA, 20 bp, Artificial Sequence
  Description of Artificial Sequence: Synthetic oligonucleotide
  Target: ATXN2; (-) strand; PAM type: YTN; PAM sequence: TTT
tgtatttttagtagagacgg

SEQ ID NO: 65480 - DNA, 20 bp, Artificial Sequence
  Description of Artificial Sequence: Synthetic oligonucleotide
  Target: ATXN2; (-) strand; PAM type: YTN; PAM sequence: TTT
ttgtatttttagtagagacg

SEQ ID NO: 65481 - DNA, 20 bp, Artificial Sequence
  Description of Artificial Sequence: Synthetic oligonucleotide
  Target: ATXN2; (-) strand; PAM type: YTN; PAM sequence: CTA
atttttgtatttttagtaga

SEQ ID NO: 65482 - DNA, 20 bp, Artificial Sequence
  Description of Artificial Sequence: Synthetic oligonucleotide
  Target: ATXN2; (-) strand; PAM type: YTN; PAM sequence: CTG
cctaatttttgtatttttag

SEQ ID NO: 65483 - DNA, 20 bp, Artificial Sequence
  Description of Artificial Sequence: Synthetic oligonucleotide
  Target: ATXN2; (-) strand; PAM type: YTN; PAM sequence: CTG
ccaccatgtctgcctaattt

SEQ ID NO: 65484 - DNA, 20 bp, Artificial Sequence
  Description of Artificial Sequence: Synthetic oligonucleotide
  Target: ATXN2; (-) strand; PAM type: YTN; PAM sequence: CTC
ctgccaccatgtctgcctaa

SEQ ID NO: 65485 - DNA, 20 bp, Artificial Sequence
  Description of Artificial Sequence: Synthetic oligonucleotide
  Target: ATXN2; (-) strand; PAM type: YTN; PAM sequence: CTG
cctcctgccaccatgtctgc

SEQ ID NO: 65486 - DNA, 20 bp, Artificial Sequence
  Description of Artificial Sequence: Synthetic oligonucleotide
  Target: ATXN2; (-) strand; PAM type: YTN; PAM sequence: CTC
ctgcctcctgccaccatgtc

SEQ ID NO: 65487 - DNA, 20 bp, Artificial Sequence
  Description of Artificial Sequence: Synthetic oligonucleotide
  Target: ATXN2; (-) strand; PAM type: YTN; PAM sequence: TTC
tcctgcctcctgccaccatg

SEQ ID NO: 65488 - DNA, 20 bp, Artificial Sequence
  Description of Artificial Sequence: Synthetic oligonucleotide
  Target: ATXN2; (-) strand; PAM type: YTN; PAM sequence: TTC
aagcaattctcctgcctcct

SEQ ID NO: 65489 - DNA, 20 bp, Artificial Sequence
  Description of Artificial Sequence: Synthetic oligonucleotide
  Target: ATXN2; (-) strand; PAM type: YTN; PAM sequence: CTC
ccggattcaagcaattctcc

SEQ ID NO: 65490 - DNA, 20 bp, Artificial Sequence
  Description of Artificial Sequence: Synthetic oligonucleotide
  Target: ATXN2; (-) strand; PAM type: YTN; PAM sequence: CTA
cacctcccggattcaagcaa

SEQ ID NO: 65491 - DNA, 20 bp, Artificial Sequence
  Description of Artificial Sequence: Synthetic oligonucleotide
  Target: ATXN2; (-) strand; PAM type: YTN; PAM sequence: CTG
cgccctacacctcccggatt

SEQ ID NO: 65492 - DNA, 20 bp, Artificial Sequence
  Description of Artificial Sequence: Synthetic oligonucleotide
  Target: ATXN2; (-) strand; PAM type: YTN; PAM sequence: CTC
actgcgccctacacctcccg

SEQ ID NO: 65493 - DNA, 20 bp, Artificial Sequence
  Description of Artificial Sequence: Synthetic oligonucleotide
  Target: ATXN2; (-) strand; PAM type: YTN; PAM sequence: TTG
gctcactgcgccctacacct

SEQ ID NO: 65494 - DNA, 20 bp, Artificial Sequence
  Description of Artificial Sequence: Synthetic oligonucleotide
  Target: ATXN2; (-) strand; PAM type: YTN; PAM sequence: CTT
ggctcactgcgccctacacc

SEQ ID NO: 65495 - DNA, 20 bp, Artificial Sequence
  Description of Artificial Sequence: Synthetic oligonucleotide
  Target: ATXN2; (-) strand; PAM type: YTN; PAM sequence: CTG
gagcgtagtggtgtgatctt

SEQ ID NO: 65496 - DNA, 20 bp, Artificial Sequence
  Description of Artificial Sequence: Synthetic oligonucleotide
  Target: ATXN2; (-) strand; PAM type: YTN; PAM sequence: TTG
cccaggctggagcgtagtgg

SEQ ID NO: 65497 - DNA, 20 bp, Artificial Sequence
  Description of Artificial Sequence: Synthetic oligonucleotide
  Target: ATXN2; (-) strand; PAM type: YTN; PAM sequence: TTG
ttgcccaggctggagcgtag

SEQ ID NO: 65498 - DNA, 20 bp, Artificial Sequence
  Description of Artificial Sequence: Synthetic oligonucleotide
  Target: ATXN2; (-) strand; PAM type: YTN; PAM sequence: TTT
gttgcccaggctggagcgta

SEQ ID NO: 65499 - DNA, 20 bp, Artificial Sequence
  Description of Artificial Sequence: Synthetic oligonucleotide
  Target: ATXN2; (-) strand; PAM type: YTN; PAM sequence: CTT
tgttgcccaggctggagcgt

SEQ ID NO: 65500 - DNA, 20 bp, Artificial Sequence
  Description of Artificial Sequence: Synthetic oligonucleotide
  Target: ATXN2; (-) strand; PAM type: YTN; PAM sequence: CTC
actttgttgcccaggctgga

SEQ ID NO: 65501 - DNA, 20 bp, Artificial Sequence
  Description of Artificial Sequence: Synthetic oligonucleotide
  Target: ATXN2; (-) strand; PAM type: YTN; PAM sequence: TTG
agacagagtctcactttgtt

SEQ ID NO: 65502 - DNA, 20 bp, Artificial Sequence
  Description of Artificial Sequence: Synthetic oligonucleotide
  Target: ATXN2; (-) strand; PAM type: YTN; PAM sequence: TTT
gagacagagtctcactttgt

SEQ ID NO: 65503 - DNA, 20 bp, Artificial Sequence
  Description of Artificial Sequence: Synthetic oligonucleotide
  Target: ATXN2; (-) strand; PAM type: YTN; PAM sequence: TTT
tgagacagagtctcactttg

SEQ ID NO: 65504 - DNA, 20 bp, Artificial Sequence
  Description of Artificial Sequence: Synthetic oligonucleotide
  Target: ATXN2; (-) strand; PAM type: YTN; PAM sequence: TTT
ttgagacagagtctcacttt

SEQ ID NO: 65505 - DNA, 20 bp, Artificial Sequence
  Description of Artificial Sequence: Synthetic oligonucleotide
  Target: ATXN2; (-) strand; PAM type: YTN; PAM sequence: TTG
tttttgagacagagtctcac

SEQ ID NO: 65506 - DNA, 20 bp, Artificial Sequence
  Description of Artificial Sequence: Synthetic oligonucleotide
  Target: ATXN2; (-) strand; PAM type: YTN; PAM sequence: TTT
gtttttgagacagagtctca

SEQ ID NO: 65507 - DNA, 20 bp, Artificial Sequence
  Description of Artificial Sequence: Synthetic oligonucleotide
  Target: ATXN2; (-) strand; PAM type: YTN; PAM sequence: TTT
tgtttttgagacagagtctc

SEQ ID NO: 65508 - DNA, 20 bp, Artificial Sequence
  Description of Artificial Sequence: Synthetic oligonucleotide
  Target: ATXN2; (-) strand; PAM type: YTN; PAM sequence: TTG
ttttgtttttgagacagagt

SEQ ID NO: 65509 - DNA, 20 bp, Artificial Sequence
  Description of Artificial Sequence: Synthetic oligonucleotide
  Target: ATXN2; (-) strand; PAM type: YTN; PAM sequence: TTT
gttttgtttttgagacagag

SEQ ID NO: 65510 - DNA, 20 bp, Artificial Sequence
  Description of Artificial Sequence: Synthetic oligonucleotide
  Target: ATXN2; (-) strand; PAM type: YTN; PAM sequence: TTT
tgttttgtttttgagacaga

SEQ ID NO: 65511 - DNA, 20 bp, Artificial Sequence
  Description of Artificial Sequence: Synthetic oligonucleotide
  Target: ATXN2; (-) strand; PAM type: YTN; PAM sequence: TTG
ttttgttttgtttttgagac

SEQ ID NO: 65512 - DNA, 20 bp, Artificial Sequence
  Description of Artificial Sequence: Synthetic oligonucleotide
  Target: ATXN2; (-) strand; PAM type: YTN; PAM sequence: TTT
gttttgttttgtttttgaga

SEQ ID NO: 65513 - DNA, 20 bp, Artificial Sequence
  Description of Artificial Sequence: Synthetic oligonucleotide
  Target: ATXN2; (-) strand; PAM type: YTN; PAM sequence: TTT
tgttttgttttgtttttgag

SEQ ID NO: 65514 - DNA, 20 bp, Artificial Sequence
  Description of Artificial Sequence: Synthetic oligonucleotide
  Target: ATXN2; (-) strand; PAM type: YTN; PAM sequence: TTT
ttgttttgttttgtttttga

SEQ ID NO: 65515 - DNA, 20 bp, Artificial Sequence
  Description of Artificial Sequence: Synthetic oligonucleotide
  Target: ATXN2; (-) strand; PAM type: YTN; PAM sequence: TTT
tttgttttgttttgtttttg

SEQ ID NO: 65516 - DNA, 20 bp, Artificial Sequence
  Description of Artificial Sequence: Synthetic oligonucleotide
  Target: ATXN2; (-) strand; PAM type: YTN; PAM sequence: TTT
ttttgttttgttttgttttt

SEQ ID NO: 65517 - DNA, 20 bp, Artificial Sequence
  Description of Artificial Sequence: Synthetic oligonucleotide
  Target: ATXN2; (-) strand; PAM type: YTN; PAM sequence: TTT
tttttgttttgttttgtttt

SEQ ID NO: 65518 - DNA, 20 bp, Artificial Sequence
  Description of Artificial Sequence: Synthetic oligonucleotide
  Target: ATXN2; (-) strand; PAM type: YTN; PAM sequence: TTT
ttttttgttttgttttgttt

SEQ ID NO: 65519 - DNA, 20 bp, Artificial Sequence
  Description of Artificial Sequence: Synthetic oligonucleotide
  Target: ATXN2; (-) strand; PAM type: YTN; PAM sequence: TTT
tttttttgttttgttttgtt

SEQ ID NO: 65520 - DNA, 20 bp, Artificial Sequence
  Description of Artificial Sequence: Synthetic oligonucleotide
  Target: ATXN2; (-) strand; PAM type: YTN; PAM sequence: CTT
ttttttttgttttgttttgt

SEQ ID NO: 65521 - DNA, 20 bp, Artificial Sequence
  Description of Artificial Sequence: Synthetic oligonucleotide
  Target: ATXN2; (-) strand; PAM type: YTN; PAM sequence: TTC
cttttttttttgttttgttt

SEQ ID NO: 65522 - DNA, 20 bp, Artificial Sequence
  Description of Artificial Sequence: Synthetic oligonucleotide
  Target: ATXN2; (-) strand; PAM type: YTN; PAM sequence: CTT
ccttttttttttgttttgtt

SEQ ID NO: 65523 - DNA, 20 bp, Artificial Sequence
  Description of Artificial Sequence: Synthetic oligonucleotide
  Target: ATXN2; (-) strand; PAM type: YTN; PAM sequence: TTG
tatgtcttcctttttttttt

SEQ ID NO: 65524 - DNA, 20 bp, Artificial Sequence
  Description of Artificial Sequence: Synthetic oligonucleotide
  Target: ATXN2; (-) strand; PAM type: YTN; PAM sequence: CTT
gtatgtcttccttttttttt

SEQ ID NO: 65525 - DNA, 20 bp, Artificial Sequence
  Description of Artificial Sequence: Synthetic oligonucleotide
  Target: ATXN2; (-) strand; PAM type: YTN; PAM sequence: CTG
gccttgtatgtcttcctttt

SEQ ID NO: 65526 - DNA, 20 bp, Artificial Sequence
  Description of Artificial Sequence: Synthetic oligonucleotide
  Target: ATXN2; (-) strand; PAM type: YTN; PAM sequence: CTG
cacctggccttgtatgtctt

SEQ ID NO: 65527 - DNA, 20 bp, Artificial Sequence
  Description of Artificial Sequence: Synthetic oligonucleotide
  Target: ATXN2; (-) strand; PAM type: YTN; PAM sequence: TTG
tgagccactgcacctggcct

SEQ ID NO: 65528 - DNA, 20 bp, Artificial Sequence
  Description of Artificial Sequence: Synthetic oligonucleotide
  Target: ATXN2; (-) strand; PAM type: YTN; PAM sequence: TTA
tagttgtgagccactgcacc

SEQ ID NO: 65529 - DNA, 20 bp, Artificial Sequence
  Description of Artificial Sequence: Synthetic oligonucleotide
  Target: ATXN2; (-) strand; PAM type: YTN; PAM sequence: CTG
aaattatagttgtgagccac

SEQ ID NO: 65530 - DNA, 20 bp, Artificial Sequence
  Description of Artificial Sequence: Synthetic oligonucleotide
  Target: ATXN2; (-) strand; PAM type: YTN; PAM sequence: TTC
ccaaaatgctgaaattatag

SEQ ID NO: 65531 - DNA, 20 bp, Artificial Sequence
  Description of Artificial Sequence: Synthetic oligonucleotide
  Target: ATXN2; (-) strand; PAM type: YTN; PAM sequence: CTT
cccaaaatgctgaaattata

SEQ ID NO: 65532 - DNA, 20 bp, Artificial Sequence
  Description of Artificial Sequence: Synthetic oligonucleotide
  Target: ATXN2; (-) strand; PAM type: YTN; PAM sequence: TTG
gcttcccaaaatgctgaaat

SEQ ID NO: 65533 - DNA, 20 bp, Artificial Sequence
  Description of Artificial Sequence: Synthetic oligonucleotide
  Target: ATXN2; (-) strand; PAM type: YTN; PAM sequence: CTT
ggcttcccaaaatgctgaaa

SEQ ID NO: 65534 - DNA, 20 bp, Artificial Sequence
  Description of Artificial Sequence: Synthetic oligonucleotide
  Target: ATXN2; (-) strand; PAM type: YTN; PAM sequence: CTC
ccaccttggcttcccaaaat

SEQ ID NO: 65535 - DNA, 20 bp, Artificial Sequence
  Description of Artificial Sequence: Synthetic oligonucleotide
  Target: ATXN2; (-) strand; PAM type: YTN; PAM sequence: CTC
aagcaatcctcccaccttgg

SEQ ID NO: 65536 - DNA, 20 bp, Artificial Sequence
  Description of Artificial Sequence: Synthetic oligonucleotide
  Target: ATXN2; (-) strand; PAM type: YTN; PAM sequence: CTG
ggctcaagcaatcctcccac

SEQ ID NO: 65537 - DNA, 20 bp, Artificial Sequence
  Description of Artificial Sequence: Synthetic oligonucleotide
  Target: ATXN2; (-) strand; PAM type: YTN; PAM sequence: CTC
ctgggctcaagcaatcctcc

SEQ ID NO: 65538 - DNA, 20 bp, Artificial Sequence
  Description of Artificial Sequence: Synthetic oligonucleotide
  Target: ATXN2; (-) strand; PAM type: YTN; PAM sequence: CTC
gaactcctgggctcaagcaa

SEQ ID NO: 65539 - DNA, 20 bp, Artificial Sequence
  Description of Artificial Sequence: Synthetic oligonucleotide
  Target: ATXN2; (-) strand; PAM type: YTN; PAM sequence: CTG
gtctcgaactcctgggctca

SEQ ID NO: 65540 - DNA, 20 bp, Artificial Sequence
  Description of Artificial Sequence: Synthetic oligonucleotide
  Target: ATXN2; (-) strand; PAM type: YTN; PAM sequence: TTG
gcccaggctggtctcgaact

SEQ ID NO: 65541 - DNA, 20 bp, Artificial Sequence
  Description of Artificial Sequence: Synthetic oligonucleotide
  Target: ATXN2; (-) strand; PAM type: YTN; PAM sequence: TTT
ggcccaggctggtctcgaac

SEQ ID NO: 65542 - DNA, 20 bp, Artificial Sequence
  Description of Artificial Sequence: Synthetic oligonucleotide
  Target: ATXN2; (-) strand; PAM type: YTN; PAM sequence: CTG
tttggcccaggctggtctcg

SEQ ID NO: 65543 - DNA, 20 bp, Artificial Sequence
  Description of Artificial Sequence: Synthetic oligonucleotide
  Target: ATXN2; (-) strand; PAM type: YTN; PAM sequence: TTG
ctgtttggcccaggctggtc

SEQ ID NO: 65544 - DNA, 20 bp, Artificial Sequence
  Description of Artificial Sequence: Synthetic oligonucleotide
  Target: ATXN2; (-) strand; PAM type: YTN; PAM sequence: CTT
gctgtttggcccaggctggt

SEQ ID NO: 65545 - DNA, 20 bp, Artificial Sequence
  Description of Artificial Sequence: Synthetic oligonucleotide
  Target: ATXN2; (-) strand; PAM type: YTN; PAM sequence: TTC
ataaataacgatgaggtctt

SEQ ID NO: 65546 - DNA, 20 bp, Artificial Sequence
  Description of Artificial Sequence: Synthetic oligonucleotide
  Target: ATXN2; (-) strand; PAM type: YTN; PAM sequence: TTG
ccattcataaataacgatga

SEQ ID NO: 65547 - DNA, 20 bp, Artificial Sequence
  Description of Artificial Sequence: Synthetic oligonucleotide
  Target: ATXN2; (-) strand; PAM type: YTN; PAM sequence: TTT
gccattcataaataacgatg

SEQ ID NO: 65548 - DNA, 20 bp, Artificial Sequence
  Description of Artificial Sequence: Synthetic oligonucleotide
  Target: ATXN2; (-) strand; PAM type: YTN; PAM sequence: CTG
tttgccattcataaataacg

SEQ ID NO: 65549 - DNA, 20 bp, Artificial Sequence
  Description of Artificial Sequence: Synthetic oligonucleotide
  Target: ATXN2; (-) strand; PAM type: YTN; PAM sequence: TTC
atatacctgtttgccattca

SEQ ID NO: 65550 - DNA, 20 bp, Artificial Sequence
  Description of Artificial Sequence: Synthetic oligonucleotide
  Target: ATXN2; (-) strand; PAM type: YTN; PAM sequence: TTT
catatacctgtttgccattc

SEQ ID NO: 65551 - DNA, 20 bp, Artificial Sequence
  Description of Artificial Sequence: Synthetic oligonucleotide
  Target: ATXN2; (-) strand; PAM type: YTN; PAM sequence: CTT
tcatatacctgtttgccatt

SEQ ID NO: 65552 - DNA, 20 bp, Artificial Sequence
  Description of Artificial Sequence: Synthetic oligonucleotide
  Target: ATXN2; (-) strand; PAM type: YTN; PAM sequence: TTG
aatacctttcatatacctgt

SEQ ID NO: 65553 - DNA, 20 bp, Artificial Sequence
  Description of Artificial Sequence: Synthetic oligonucleotide
  Target: ATXN2; (-) strand; PAM type: YTN; PAM sequence: CTG
gtgatcagtagtattgaata

SEQ ID NO: 65554 - DNA, 20 bp, Artificial Sequence
  Description of Artificial Sequence: Synthetic oligonucleotide
  Target: ATXN2; (-) strand; PAM type: YTN; PAM sequence: TTC
tggtgatcagtagtattgaa

SEQ ID NO: 65555 - DNA, 20 bp, Artificial Sequence
  Description of Artificial Sequence: Synthetic oligonucleotide
  Target: ATXN2; (-) strand; PAM type: YTN; PAM sequence: TTT
ctggtgatcagtagtattga

SEQ ID NO: 65556 - DNA, 20 bp, Artificial Sequence
  Description of Artificial Sequence: Synthetic oligonucleotide
  Target: ATXN2; (-) strand; PAM type: YTN; PAM sequence: TTT
tctggtgatcagtagtattg

SEQ ID NO: 65557 - DNA, 20 bp, Artificial Sequence
  Description of Artificial Sequence: Synthetic oligonucleotide
  Target: ATXN2; (-) strand; PAM type: YTN; PAM sequence: TTT
ttctggtgatcagtagtatt

SEQ ID NO: 65558 - DNA, 20 bp, Artificial Sequence
  Description of Artificial Sequence: Synthetic oligonucleotide
  Target: ATXN2; (-) strand; PAM type: YTN; PAM sequence: TTC
catttttctggtgatcagta

SEQ ID NO: 65559 - DNA, 20 bp, Artificial Sequence
  Description of Artificial Sequence: Synthetic oligonucleotide
  Target: ATXN2; (-) strand; PAM type: YTN; PAM sequence: TTT
ccatttttctggtgatcagt

SEQ ID NO: 65560 - DNA, 20 bp, Artificial Sequence
  Description of Artificial Sequence: Synthetic oligonucleotide
  Target: ATXN2; (-) strand; PAM type: YTN; PAM sequence: TTA
atttccatttttctggtgat

SEQ ID NO: 65561 - DNA, 20 bp, Artificial Sequence
  Description of Artificial Sequence: Synthetic oligonucleotide
  Target: ATXN2; (-) strand; PAM type: YTN; PAM sequence: TTT
aatttccatttttctggtga

SEQ ID NO: 65562 - DNA, 20 bp, Artificial Sequence
  Description of Artificial Sequence: Synthetic oligonucleotide
  Target: ATXN2; (-) strand; PAM type: YTN; PAM sequence: TTT
taatttccatttttctggtg

SEQ ID NO: 65563 - DNA, 20 bp, Artificial Sequence
  Description of Artificial Sequence: Synthetic oligonucleotide
  Target: ATXN2; (-) strand; PAM type: YTN; PAM sequence: TTG
tagttttaatttccattttt

SEQ ID NO: 65564 - DNA, 20 bp, Artificial Sequence
  Description of Artificial Sequence: Synthetic oligonucleotide
  Target: ATXN2; (-) strand; PAM type: YTN; PAM sequence: TTG
ttgtagttttaatttccatt

SEQ ID NO: 65565 - DNA, 20 bp, Artificial Sequence
  Description of Artificial Sequence: Synthetic oligonucleotide
  Target: ATXN2; (-) strand; PAM type: YTN; PAM sequence: CTT
gttgtagttttaatttccat

SEQ ID NO: 65566 - DNA, 20 bp, Artificial Sequence
  Description of Artificial Sequence: Synthetic oligonucleotide
  Target: ATXN2; (-) strand; PAM type: YTN; PAM sequence: CTG
gggtgagatgatatcttgtt

SEQ ID NO: 65567 - DNA, 20 bp, Artificial Sequence
  Description of Artificial Sequence: Synthetic oligonucleotide
  Target: ATXN2; (-) strand; PAM type: YTN; PAM sequence: TTA
actggggtgagatgatatct

SEQ ID NO: 65568 - DNA, 20 bp, Artificial Sequence
  Description of Artificial Sequence: Synthetic oligonucleotide
  Target: ATXN2; (-) strand; PAM type: YTN; PAM sequence: TTT
aactggggtgagatgatatc

SEQ ID NO: 65569 - DNA, 20 bp, Artificial Sequence
  Description of Artificial Sequence: Synthetic oligonucleotide
  Target: ATXN2; (-) strand; PAM type: YTN; PAM sequence: TTT
taactggggtgagatgatat

SEQ ID NO: 65570 - DNA, 20 bp, Artificial Sequence
  Description of Artificial Sequence: Synthetic oligonucleotide
  Target: ATXN2; (-) strand; PAM type: YTN; PAM sequence: TTG
gataaaagccattttaactg

SEQ ID NO: 65571 - DNA, 20 bp, Artificial Sequence
  Description of Artificial Sequence: Synthetic oligonucleotide
  Target: ATXN2; (-) strand; PAM type: YTN; PAM sequence: TTT
ggataaaagccattttaact

SEQ ID NO: 65572 - DNA, 20 bp, Artificial Sequence
  Description of Artificial Sequence: Synthetic oligonucleotide
  Target: ATXN2; (-) strand; PAM type: YTN; PAM sequence: TTT
tggataaaagccattttaac

SEQ ID NO: 65573 - DNA, 20 bp, Artificial Sequence
  Description of Artificial Sequence: Synthetic oligonucleotide
  Target: ATXN2; (-) strand; PAM type: YTN; PAM sequence: CTT
ttggataaaagccattttaa

SEQ ID NO: 65574 - DNA, 20 bp, Artificial Sequence
  Description of Artificial Sequence: Synthetic oligonucleotide
  Target: ATXN2; (-) strand; PAM type: YTN; PAM sequence: CTG
tcttttggataaaagccatt

SEQ ID NO: 65575 - DNA, 20 bp, Artificial Sequence
  Description of Artificial Sequence: Synthetic oligonucleotide
  Target: ATXN2; (-) strand; PAM type: YTN; PAM sequence: TTG
cctgtcttttggataaaagc

SEQ ID NO: 65576 - DNA, 20 bp, Artificial Sequence
  Description of Artificial Sequence: Synthetic oligonucleotide
  Target: ATXN2; (-) strand; PAM type: YTN; PAM sequence: TTA
ttgcctgtcttttggataaa

SEQ ID NO: 65577 - DNA, 20 bp, Artificial Sequence
  Description of Artificial Sequence: Synthetic oligonucleotide
  Target: ATXN2; (-) strand; PAM type: YTN; PAM sequence: TTG
ttattgcctgtcttttggat

SEQ ID NO: 65578 - DNA, 20 bp, Artificial Sequence
  Description of Artificial Sequence: Synthetic oligonucleotide
  Target: ATXN2; (-) strand; PAM type: YTN; PAM sequence: TTT
gttattgcctgtcttttgga

SEQ ID NO: 65579 - DNA, 20 bp, Artificial Sequence
  Description of Artificial Sequence: Synthetic oligonucleotide
  Target: ATXN2; (-) strand; PAM type: YTN; PAM sequence: TTA
ccagcatttgttattgcctg

SEQ ID NO: 65580 - DNA, 20 bp, Artificial Sequence
  Description of Artificial Sequence: Synthetic oligonucleotide
  Target: ATXN2; (-) strand; PAM type: YTN; PAM sequence: TTA
tccacatcgttaccagcatt

SEQ ID NO: 65581 - DNA, 20 bp, Artificial Sequence
  Description of Artificial Sequence: Synthetic oligonucleotide
  Target: ATXN2; (-) strand; PAM type: YTN; PAM sequence: TTT
atccacatcgttaccagcat

SEQ ID NO: 65582 - DNA, 20 bp, Artificial Sequence
  Description of Artificial Sequence: Synthetic oligonucleotide
  Target: ATXN2; (-) strand; PAM type: YTN; PAM sequence: CTT
tatccacatcgttaccagca

SEQ ID NO: 65583 - DNA, 20 bp, Artificial Sequence
  Description of Artificial Sequence: Synthetic oligonucleotide
  Target: ATXN2; (-) strand; PAM type: YTN; PAM sequence: TTC
ccctttatccacatcgttac

SEQ ID NO: 65584 - DNA, 20 bp, Artificial Sequence
  Description of Artificial Sequence: Synthetic oligonucleotide
  Target: ATXN2; (-) strand; PAM type: YTN; PAM sequence: TTA
catgtccaccaacagtgtgt

SEQ ID NO: 65585 - DNA, 20 bp, Artificial Sequence
  Description of Artificial Sequence: Synthetic oligonucleotide
  Target: ATXN2; (-) strand; PAM type: YTN; PAM sequence: TTT
acatgtccaccaacagtgtg

SEQ ID NO: 65586 - DNA, 20 bp, Artificial Sequence
  Description of Artificial Sequence: Synthetic oligonucleotide
  Target: ATXN2; (-) strand; PAM type: YTN; PAM sequence: TTA
ccaatttacatgtccaccaa

SEQ ID NO: 65587 - DNA, 20 bp, Artificial Sequence
  Description of Artificial Sequence: Synthetic oligonucleotide
  Target: ATXN2; (-) strand; PAM type: YTN; PAM sequence: TTT
accaatttacatgtccacca

SEQ ID NO: 65588 - DNA, 20 bp, Artificial Sequence
  Description of Artificial Sequence: Synthetic oligonucleotide
  Target: ATXN2; (-) strand; PAM type: YTN; PAM sequence: TTT
taccaatttacatgtccacc

SEQ ID NO: 65589 - DNA, 20 bp, Artificial Sequence
  Description of Artificial Sequence: Synthetic oligonucleotide
  Target: ATXN2; (-) strand; PAM type: YTN; PAM sequence: CTC
catagtggttttaccaattt

SEQ ID NO: 65590 - DNA, 20 bp, Artificial Sequence
  Description of Artificial Sequence: Synthetic oligonucleotide
  Target: ATXN2; (-) strand; PAM type: YTN; PAM sequence: TTC
tccatagtggttttaccaat

SEQ ID NO: 65591 - DNA, 20 bp, Artificial Sequence
  Description of Artificial Sequence: Synthetic oligonucleotide
  Target: ATXN2; (-) strand; PAM type: YTN; PAM sequence: CTG
ttctccatagtggttttacc

SEQ ID NO: 65592 - DNA, 20 bp, Artificial Sequence
  Description of Artificial Sequence: Synthetic oligonucleotide
  Target: ATXN2; (-) strand; PAM type: YTN; PAM sequence: TTC
catactgttctccatagtgg

SEQ ID NO: 65593 - DNA, 20 bp, Artificial Sequence
  Description of Artificial Sequence: Synthetic oligonucleotide
  Target: ATXN2; (-) strand; PAM type: YTN; PAM sequence: TTT
ccatactgttctccatagtg

SEQ ID NO: 65594 - DNA, 20 bp, Artificial Sequence
  Description of Artificial Sequence: Synthetic oligonucleotide
  Target: ATXN2; (-) strand; PAM type: YTN; PAM sequence: TTG
aggaatttccatactgttct

SEQ ID NO: 65595 - DNA, 20 bp, Artificial Sequence
  Description of Artificial Sequence: Synthetic oligonucleotide
  Target: ATXN2; (-) strand; PAM type: YTN; PAM sequence: TTT
gaggaatttccatactgttc

SEQ ID NO: 65596 - DNA, 20 bp, Artificial Sequence
  Description of Artificial Sequence: Synthetic oligonucleotide
  Target: ATXN2; (-) strand; PAM type: YTN; PAM sequence: TTT
tgaggaatttccatactgtt

SEQ ID NO: 65597 - DNA, 20 bp, Artificial Sequence
  Description of Artificial Sequence: Synthetic oligonucleotide
  Target: ATXN2; (-) strand; PAM type: YTN; PAM sequence: TTT
ttgaggaatttccatactgt

SEQ ID NO: 65598 - DNA, 20 bp, Artificial Sequence
  Description of Artificial Sequence: Synthetic oligonucleotide
  Target: ATXN2; (-) strand; PAM type: YTN; PAM sequence: TTT
tttgaggaatttccatactg

SEQ ID NO: 65599 - DNA, 20 bp, Artificial Sequence
  Description of Artificial Sequence: Synthetic oligonucleotide
  Target: ATXN2; (-) strand; PAM type: YTN; PAM sequence: TTA
gttttttgaggaatttccat

SEQ ID NO: 65600 - DNA, 20 bp, Artificial Sequence
  Description of Artificial Sequence: Synthetic oligonucleotide
  Target: ATXN2; (-) strand; PAM type: YTN; PAM sequence: TTT
agttttttgaggaatttcca

SEQ ID NO: 65601 - DNA, 20 bp, Artificial Sequence
  Description of Artificial Sequence: Synthetic oligonucleotide
  Target: ATXN2; (-) strand; PAM type: YTN; PAM sequence: TTT
tagttttttgaggaatttcc

SEQ ID NO: 65602 - DNA, 20 bp, Artificial Sequence
  Description of Artificial Sequence: Synthetic oligonucleotide
  Target: ATXN2; (-) strand; PAM type: YTN; PAM sequence: TTT
ttagttttttgaggaatttc

SEQ ID NO: 65603 - DNA, 20 bp, Artificial Sequence
  Description of Artificial Sequence: Synthetic oligonucleotide
  Target: ATXN2; (-) strand; PAM type: YTN; PAM sequence: CTA
tttttagttttttgaggaat

SEQ ID NO: 65604 - DNA, 20 bp, Artificial Sequence
  Description of Artificial Sequence: Synthetic oligonucleotide
  Target: ATXN2; (-) strand; PAM type: YTN; PAM sequence: CTC
tatttttagttttttgagga

SEQ ID NO: 65605 - DNA, 20 bp, Artificial Sequence
  Description of Artificial Sequence: Synthetic oligonucleotide
  Target: ATXN2; (-) strand; PAM type: YTN; PAM sequence: CTG
gatcatatggtagctctatt

SEQ ID NO: 65606 - DNA, 20 bp, Artificial Sequence
  Description of Artificial Sequence: Synthetic oligonucleotide
  Target: ATXN2; (-) strand; PAM type: YTN; PAM sequence: TTG
ctggatcatatggtagctct

SEQ ID NO: 65607 - DNA, 20 bp, Artificial Sequence
  Description of Artificial Sequence: Synthetic oligonucleotide
  Target: ATXN2; (-) strand; PAM type: YTN; PAM sequence: CTA
gcagtgcaattgctggatca

SEQ ID NO: 65608 - DNA, 20 bp, Artificial Sequence
  Description of Artificial Sequence: Synthetic oligonucleotide
  Target: ATXN2; (-) strand; PAM type: YTN; PAM sequence: CTG
agtatatacctagcagtgca

SEQ ID NO: 65609 - DNA, 20 bp, Artificial Sequence
  Description of Artificial Sequence: Synthetic oligonucleotide
  Target: ATXN2; (-) strand; PAM type: YTN; PAM sequence: TTC
tgagtatatacctagcagtg

SEQ ID NO: 65610 - DNA, 20 bp, Artificial Sequence
  Description of Artificial Sequence: Synthetic oligonucleotide
  Target: ATXN2; (-) strand; PAM type: YTN; PAM sequence: TTT
ctgagtatatacctagcagt

SEQ ID NO: 65611 - DNA, 20 bp, Artificial Sequence
  Description of Artificial Sequence: Synthetic oligonucleotide
  Target: ATXN2; (-) strand; PAM type: YTN; PAM sequence: CTT
tctgagtatatacctagcag

SEQ ID NO: 65612 - DNA, 20 bp, Artificial Sequence
  Description of Artificial Sequence: Synthetic oligonucleotide
  Target: ATXN2; (-) strand; PAM type: YTN; PAM sequence: TTC
ctttctgagtatatacctag

SEQ ID NO: 65613 - DNA, 20 bp, Artificial Sequence
  Description of Artificial Sequence: Synthetic oligonucleotide
  Target: ATXN2; (-) strand; PAM type: YTN; PAM sequence: TTT
cctttctgagtatataccta

SEQ ID NO: 65614 - DNA, 20 bp, Artificial Sequence
  Description of Artificial Sequence: Synthetic oligonucleotide
  Target: ATXN2; (-) strand; PAM type: YTN; PAM sequence: CTG
atttcctttctgagtatata

SEQ ID NO: 65615 - DNA, 20 bp, Artificial Sequence
  Description of Artificial Sequence: Synthetic oligonucleotide
  Target: ATXN2; (-) strand; PAM type: YTN; PAM sequence: TTC
aataaactgatttcctttct

SEQ ID NO: 65616 - DNA, 20 bp, Artificial Sequence
  Description of Artificial Sequence: Synthetic oligonucleotide
  Target: ATXN2; (-) strand; PAM type: YTN; PAM sequence: CTT
caataaactgatttcctttc

SEQ ID NO: 65617 - DNA, 20 bp, Artificial Sequence
  Description of Artificial Sequence: Synthetic oligonucleotide
  Target: ATXN2; (-) strand; PAM type: YTN; PAM sequence: TTC
cttcaataaactgatttcct

SEQ ID NO: 65618 - DNA, 20 bp, Artificial Sequence
  Description of Artificial Sequence: Synthetic oligonucleotide
  Target: ATXN2; (-) strand; PAM type: YTN; PAM sequence: TTG
tgtatatagtgccgtagtaa

SEQ ID NO: 65619 - DNA, 20 bp, Artificial Sequence
  Description of Artificial Sequence: Synthetic oligonucleotide
  Target: ATXN2; (-) strand; PAM type: YTN; PAM sequence: CTG
ttgtgtatatagtgccgtag

SEQ ID NO: 65620 - DNA, 20 bp, Artificial Sequence
  Description of Artificial Sequence: Synthetic oligonucleotide
  Target: ATXN2; (-) strand; PAM type: YTN; PAM sequence: TTG
gctgttgtgtatatagtgcc

SEQ ID NO: 65621 - DNA, 20 bp, Artificial Sequence
  Description of Artificial Sequence: Synthetic oligonucleotide
  Target: ATXN2; (-) strand; PAM type: YTN; PAM sequence: CTT
ggctgttgtgtatatagtgc

SEQ ID NO: 65622 - DNA, 20 bp, Artificial Sequence
  Description of Artificial Sequence: Synthetic oligonucleotide
  Target: ATXN2; (-) strand; PAM type: YTN; PAM sequence: TTC
caaatcttggctgttgtgta

SEQ ID NO: 65623 - DNA, 20 bp, Artificial Sequence
  Description of Artificial Sequence: Synthetic oligonucleotide
  Target: ATXN2; (-) strand; PAM type: YTN; PAM sequence: TTG
attccaaatcttggctgttg

SEQ ID NO: 65624 - DNA, 20 bp, Artificial Sequence
  Description of Artificial Sequence: Synthetic oligonucleotide
  Target: ATXN2; (-) strand; PAM type: YTN; PAM sequence: CTG
tcagtggacacgtaggttga

SEQ ID NO: 65625 - DNA, 20 bp, Artificial Sequence
  Description of Artificial Sequence: Synthetic oligonucleotide
  Target: ATXN2; (-) strand; PAM type: YTN; PAM sequence: TTG
tctgtcagtggacacgtagg

SEQ ID NO: 65626 - DNA, 20 bp, Artificial Sequence
  Description of Artificial Sequence: Synthetic oligonucleotide
  Target: ATXN2; (-) strand; PAM type: YTN; PAM sequence: TTT
gtctgtcagtggacacgtag

SEQ ID NO: 65627 - DNA, 20 bp, Artificial Sequence
  Description of Artificial Sequence: Synthetic oligonucleotide
  Target: ATXN2; (-) strand; PAM type: YTN; PAM sequence: CTC
catttgtctgtcagtggaca

SEQ ID NO: 65628 - DNA, 20 bp, Artificial Sequence
  Description of Artificial Sequence: Synthetic oligonucleotide
  Target: ATXN2; (-) strand; PAM type: YTN; PAM sequence: TTC
tccatttgtctgtcagtgga

SEQ ID NO: 65629 - DNA, 20 bp, Artificial Sequence
  Description of Artificial Sequence: Synthetic oligonucleotide
  Target: ATXN2; (-) strand; PAM type: YTN; PAM sequence: TTT
ctccatttgtctgtcagtgg

SEQ ID NO: 65630 - DNA, 20 bp, Artificial Sequence
  Description of Artificial Sequence: Synthetic oligonucleotide
  Target: ATXN2; (-) strand; PAM type: YTN; PAM sequence: CTT
tctccatttgtctgtcagtg

SEQ ID NO: 65631 - DNA, 20 bp, Artificial Sequence
  Description of Artificial Sequence: Synthetic oligonucleotide
  Target: ATXN2; (-) strand; PAM type: YTN; PAM sequence: TTC
tttctccatttgtctgtcag

SEQ ID NO: 65632 - DNA, 20 bp, Artificial Sequence
  Description of Artificial Sequence: Synthetic oligonucleotide
  Target: ATXN2; (-) strand; PAM type: YTN; PAM sequence: TTT
ctttctccatttgtctgtca

SEQ ID NO: 65633 - DNA, 20 bp, Artificial Sequence
  Description of Artificial Sequence: Synthetic oligonucleotide
  Target: ATXN2; (-) strand; PAM type: YTN; PAM sequence: TTT
tctttctccatttgtctgtc

SEQ ID NO: 65634 - DNA, 20 bp, Artificial Sequence
  Description of Artificial Sequence: Synthetic oligonucleotide
  Target: ATXN2; (-) strand; PAM type: YTN; PAM sequence: TTG
tgtatatataccacattttc

SEQ ID NO: 65635 - DNA, 20 bp, Artificial Sequence
  Description of Artificial Sequence: Synthetic oligonucleotide
  Target: ATXN2; (-) strand; PAM type: YTN; PAM sequence: CTA
ttgtgtatatataccacatt

SEQ ID NO: 65636 - DNA, 20 bp, Artificial Sequence
  Description of Artificial Sequence: Synthetic oligonucleotide
  Target: ATXN2; (-) strand; PAM type: YTN; PAM sequence: CTG
aatggtaatctattgtgtat

SEQ ID NO: 65637 - DNA, 20 bp, Artificial Sequence
  Description of Artificial Sequence: Synthetic oligonucleotide
  Target: ATXN2; (-) strand; PAM type: YTN; PAM sequence: TTA
tggctgaatggtaatctatt

SEQ ID NO: 65638 - DNA, 20 bp, Artificial Sequence
  Description of Artificial Sequence: Synthetic oligonucleotide
  Target: ATXN2; (-) strand; PAM type: YTN; PAM sequence: TTT
atggctgaatggtaatctat

SEQ ID NO: 65639 - DNA, 20 bp, Artificial Sequence
  Description of Artificial Sequence: Synthetic oligonucleotide
  Target: ATXN2; (-) strand; PAM type: YTN; PAM sequence: TTT
tatggctgaatggtaatcta

SEQ ID NO: 65640 - DNA, 20 bp, Artificial Sequence
  Description of Artificial Sequence: Synthetic oligonucleotide
  Target: ATXN2; (-) strand; PAM type: YTN; PAM sequence: TTT
ttatggctgaatggtaatct

SEQ ID NO: 65641 - DNA, 20 bp, Artificial Sequence
  Description of Artificial Sequence: Synthetic oligonucleotide
  Target: ATXN2; (-) strand; PAM type: YTN; PAM sequence: TTT
tttatggctgaatggtaatc

SEQ ID NO: 65642 - DNA, 20 bp, Artificial Sequence
  Description of Artificial Sequence: Synthetic oligonucleotide
  Target: ATXN2; (-) strand; PAM type: YTN; PAM sequence: CTT
ttttatggctgaatggtaat

SEQ ID NO: 65643 - DNA, 20 bp, Artificial Sequence
  Description of Artificial Sequence: Synthetic oligonucleotide
  Target: ATXN2; (-) strand; PAM type: YTN; PAM sequence: TTC
ttttttatggctgaatggta

SEQ ID NO: 65644 - DNA, 20 bp, Artificial Sequence
  Description of Artificial Sequence: Synthetic oligonucleotide
  Target: ATXN2; (-) strand; PAM type: YTN; PAM sequence: CTC
attcttttttatggctgaat

SEQ ID NO: 65645 - DNA, 20 bp, Artificial Sequence
  Description of Artificial Sequence: Synthetic oligonucleotide
  Target: ATXN2; (-) strand; PAM type: YTN; PAM sequence: CTG
caaatgacaggatctcattc

SEQ ID NO: 65646 - DNA, 20 bp, Artificial Sequence
  Description of Artificial Sequence: Synthetic oligonucleotide
  Target: ATXN2; (-) strand; PAM type: YTN; PAM sequence: TTG
ctgcaaatgacaggatctca

SEQ ID NO: 65647 - DNA, 20 bp, Artificial Sequence
  Description of Artificial Sequence: Synthetic oligonucleotide
  Target: ATXN2; (-) strand; PAM type: YTN; PAM sequence: CTA
cattgctgcaaatgacagga

SEQ ID NO: 65648 - DNA, 20 bp, Artificial Sequence
  Description of Artificial Sequence: Synthetic oligonucleotide
  Target: ATXN2; (-) strand; PAM type: YTN; PAM sequence: CTC
cagtgccatctacattgctg

SEQ ID NO: 65649 - DNA, 20 bp, Artificial Sequence
  Description of Artificial Sequence: Synthetic oligonucleotide
  Target: ATXN2; (-) strand; PAM type: YTN; PAM sequence: TTA
acataatgtcctccagtgcc

SEQ ID NO: 65650 - DNA, 20 bp, Artificial Sequence
  Description of Artificial Sequence: Synthetic oligonucleotide
  Target: ATXN2; (-) strand; PAM type: YTN; PAM sequence: CTT
aacataatgtcctccagtgc

SEQ ID NO: 65651 - DNA, 20 bp, Artificial Sequence
  Description of Artificial Sequence: Synthetic oligonucleotide
  Target: ATXN2; (-) strand; PAM type: YTN; PAM sequence: TTA
cttaacataatgtcctccag

SEQ ID NO: 65652 - DNA, 20 bp, Artificial Sequence
  Description of Artificial Sequence: Synthetic oligonucleotide
  Target: ATXN2; (-) strand; PAM type: YTN; PAM sequence: TTT
acttaacataatgtcctcca

SEQ ID NO: 65653 - DNA, 20 bp, Artificial Sequence
  Description of Artificial Sequence: Synthetic oligonucleotide
  Target: ATXN2; (-) strand; PAM type: YTN; PAM sequence: TTT
tacttaacataatgtcctcc

SEQ ID NO: 65654 - DNA, 20 bp, Artificial Sequence
  Description of Artificial Sequence: Synthetic oligonucleotide
  Target: ATXN2; (-) strand; PAM type: YTN; PAM sequence: TTA
ttttacttaacataatgtcc

SEQ ID NO: 65655 - DNA, 20 bp, Artificial Sequence
  Description of Artificial Sequence: Synthetic oligonucleotide
  Target: ATXN2; (-) strand; PAM type: YTN; PAM sequence: CTT
attttacttaacataatgtc

SEQ ID NO: 65656 - DNA, 20 bp, Artificial Sequence
  Description of Artificial Sequence: Synthetic oligonucleotide
  Target: ATXN2; (-) strand; PAM type: YTN; PAM sequence: CTG
gcttattttacttaacataa

SEQ ID NO: 65657 - DNA, 20 bp, Artificial Sequence
  Description of Artificial Sequence: Synthetic oligonucleotide
  Target: ATXN2; (-) strand; PAM type: YTN; PAM sequence: CTG
tccctggcttattttactta

SEQ ID NO: 65658 - DNA, 20 bp, Artificial Sequence
  Description of Artificial Sequence: Synthetic oligonucleotide
  Target: ATXN2; (-) strand; PAM type: YTN; PAM sequence: TTC
tgtccctggcttattttact

SEQ ID NO: 65659 - DNA, 20 bp, Artificial Sequence
  Description of Artificial Sequence: Synthetic oligonucleotide
  Target: ATXN2; (-) strand; PAM type: YTN; PAM sequence: TTT
ctgtccctggcttattttac

SEQ ID NO: 65660 - DNA, 20 bp, Artificial Sequence
  Description of Artificial Sequence: Synthetic oligonucleotide
  Target: ATXN2; (-) strand; PAM type: YTN; PAM sequence: CTT
tctgtccctggcttatttta

SEQ ID NO: 65661 - DNA, 20 bp, Artificial Sequence
  Description of Artificial Sequence: Synthetic oligonucleotide
  Target: ATXN2; (-) strand; PAM type: YTN; PAM sequence: TTA
tctttctgtccctggcttat

SEQ ID NO: 65662 - DNA, 20 bp, Artificial Sequence
  Description of Artificial Sequence: Synthetic oligonucleotide
  Target: ATXN2; (-) strand; PAM type: YTN; PAM sequence: TTT
atctttctgtccctggctta

SEQ ID NO: 65663 - DNA, 20 bp, Artificial Sequence
  Description of Artificial Sequence: Synthetic oligonucleotide
  Target: ATXN2; (-) strand; PAM type: YTN; PAM sequence: CTG
caaacgagtaagaatatgca

SEQ ID NO: 65664 - DNA, 20 bp, Artificial Sequence
  Description of Artificial Sequence: Synthetic oligonucleotide
  Target: ATXN2; (-) strand; PAM type: YTN; PAM sequence: TTA
gtgcctgcaaacgagtaaga

SEQ ID NO: 65665 - DNA, 20 bp, Artificial Sequence
  Description of Artificial Sequence: Synthetic oligonucleotide
  Target: ATXN2; (-) strand; PAM type: YTN; PAM sequence: TTT
agtgcctgcaaacgagtaag

SEQ ID NO: 65666 - DNA, 20 bp, Artificial Sequence
  Description of Artificial Sequence: Synthetic oligonucleotide
  Target: ATXN2; (-) strand; PAM type: YTN; PAM sequence: TTT
tagtgcctgcaaacgagtaa

SEQ ID NO: 65667 - DNA, 20 bp, Artificial Sequence
  Description of Artificial Sequence: Synthetic oligonucleotide
  Target: ATXN2; (-) strand; PAM type: YTN; PAM sequence: TTT
ttagtgcctgcaaacgagta

SEQ ID NO: 65668 - DNA, 20 bp, Artificial Sequence
  Description of Artificial Sequence: Synthetic oligonucleotide
  Target: ATXN2; (-) strand; PAM type: YTN; PAM sequence: TTA
tttttagtgcctgcaaacga

SEQ ID NO: 65669 - DNA, 20 bp, Artificial Sequence
  Description of Artificial Sequence: Synthetic oligonucleotide
  Target: ATXN2; (-) strand; PAM type: YTN; PAM sequence: TTT
atttttagtgcctgcaaacg

SEQ ID NO: 65670 - DNA, 20 bp, Artificial Sequence
  Description of Artificial Sequence: Synthetic oligonucleotide
  Target: ATXN2; (-) strand; PAM type: YTN; PAM sequence: TTT
tatttttagtgcctgcaaac

SEQ ID NO: 65671 - DNA, 20 bp, Artificial Sequence
  Description of Artificial Sequence: Synthetic oligonucleotide
  Target: ATXN2; (-) strand; PAM type: YTN; PAM sequence: TTT
ttatttttagtgcctgcaaa

SEQ ID NO: 65672 - DNA, 20 bp, Artificial Sequence
  Description of Artificial Sequence: Synthetic oligonucleotide
  Target: ATXN2; (-) strand; PAM type: YTN; PAM sequence: TTG
tttttatttttagtgcctgc

SEQ ID NO: 65673 - DNA, 20 bp, Artificial Sequence
  Description of Artificial Sequence: Synthetic oligonucleotide
  Target: ATXN2; (-) strand; PAM type: YTN; PAM sequence: TTC
aattgtttttatttttagtg

SEQ ID NO: 65674 - DNA, 20 bp, Artificial Sequence
  Description of Artificial Sequence: Synthetic oligonucleotide
  Target: ATXN2; (-) strand; PAM type: YTN; PAM sequence: CTC
catgtgttcaattgttttta

SEQ ID NO: 65675 - DNA, 20 bp, Artificial Sequence
  Description of Artificial Sequence: Synthetic oligonucleotide
  Target: ATXN2; (-) strand; PAM type: YTN; PAM sequence: CTA
tctccatgtgttcaattgtt

SEQ ID NO: 65676 - DNA, 20 bp, Artificial Sequence
  Description of Artificial Sequence: Synthetic oligonucleotide
  Target: ATXN2; (-) strand; PAM type: YTN; PAM sequence: CTG
ctatctccatgtgttcaatt

SEQ ID NO: 65677 - DNA, 20 bp, Artificial Sequence
  Description of Artificial Sequence: Synthetic oligonucleotide
  Target: ATXN2; (-) strand; PAM type: YTN; PAM sequence: TTC
tgctatctccatgtgttcaa

SEQ ID NO: 65678 - DNA, 20 bp, Artificial Sequence
  Description of Artificial Sequence: Synthetic oligonucleotide
  Target: ATXN2; (-) strand; PAM type: YTN; PAM sequence: CTG
gtaaccattctgctatctcc

SEQ ID NO: 65679 - DNA, 20 bp, Artificial Sequence
  Description of Artificial Sequence: Synthetic oligonucleotide
  Target: ATXN2; (-) strand; PAM type: YTN; PAM sequence: TTC
tggtaaccattctgctatct

SEQ ID NO: 65680 - DNA, 20 bp, Artificial Sequence
  Description of Artificial Sequence: Synthetic oligonucleotide
  Target: ATXN2; (-) strand; PAM type: YTN; PAM sequence: CTT
ctggtaaccattctgctatc

SEQ ID NO: 65681 - DNA, 20 bp, Artificial Sequence
  Description of Artificial Sequence: Synthetic oligonucleotide
  Target: ATXN2; (-) strand; PAM type: YTN; PAM sequence: TTC
ccaacttctggtaaccattc

SEQ ID NO: 65682 - DNA, 20 bp, Artificial Sequence
  Description of Artificial Sequence: Synthetic oligonucleotide
  Target: ATXN2; (-) strand; PAM type: YTN; PAM sequence: CTT
cccaacttctggtaaccatt

SEQ ID NO: 65683 - DNA, 20 bp, Artificial Sequence
  Description of Artificial Sequence: Synthetic oligonucleotide
  Target: ATXN2; (-) strand; PAM type: YTN; PAM sequence: TTA
cccttcccaacttctggtaa

SEQ ID NO: 65684 - DNA, 20 bp, Artificial Sequence
  Description of Artificial Sequence: Synthetic oligonucleotide
  Target: ATXN2; (-) strand; PAM type: YTN; PAM sequence: CTC
cccattacccttcccaactt

SEQ ID NO: 65685 - DNA, 20 bp, Artificial Sequence
  Description of Artificial Sequence: Synthetic oligonucleotide
  Target: ATXN2; (-) strand; PAM type: YTN; PAM sequence: TTC
tccccattacccttcccaac

SEQ ID NO: 65686 - DNA, 20 bp, Artificial Sequence
  Description of Artificial Sequence: Synthetic oligonucleotide
  Target: ATXN2; (-) strand; PAM type: YTN; PAM sequence: CTT
ctccccattacccttcccaa

SEQ ID NO: 65687 - DNA, 20 bp, Artificial Sequence
  Description of Artificial Sequence: Synthetic oligonucleotide
  Target: ATXN2; (-) strand; PAM type: YTN; PAM sequence: TTC
ttctccccattacccttccc

SEQ ID NO: 65688 - DNA, 20 bp, Artificial Sequence
  Description of Artificial Sequence: Synthetic oligonucleotide
  Target: ATXN2; (-) strand; PAM type: YTN; PAM sequence: CTT
cttctccccattacccttcc

SEQ ID NO: 65689 - DNA, 20 bp, Artificial Sequence
  Description of Artificial Sequence: Synthetic oligonucleotide
  Target: ATXN2; (-) strand; PAM type: YTN; PAM sequence: TTC
ccttcttctccccattaccc

SEQ ID NO: 65690 - DNA, 20 bp, Artificial Sequence
  Description of Artificial Sequence: Synthetic oligonucleotide
  Target: ATXN2; (-) strand; PAM type: YTN; PAM sequence: TTT
cccttcttctccccattacc

SEQ ID NO: 65691 - DNA, 20 bp, Artificial Sequence
  Description of Artificial Sequence: Synthetic oligonucleotide
  Target: ATXN2; (-) strand; PAM type: YTN; PAM sequence: CTC
atttcccttcttctccccat

SEQ ID NO: 65692 - DNA, 20 bp, Artificial Sequence
  Description of Artificial Sequence: Synthetic oligonucleotide
  Target: ATXN2; (-) strand; PAM type: YTN; PAM sequence: CTA
atcacctcatttcccttctt

SEQ ID NO: 65693 - DNA, 20 bp, Artificial Sequence
  Description of Artificial Sequence: Synthetic oligonucleotide
  Target: ATXN2; (-) strand; PAM type: YTN; PAM sequence: TTG
cacccactaatcacctcatt

SEQ ID NO: 65694 - DNA, 20 bp, Artificial Sequence
  Description of Artificial Sequence: Synthetic oligonucleotide
  Target: ATXN2; (-) strand; PAM type: YTN; PAM sequence: TTT
gcacccactaatcacctcat

SEQ ID NO: 65695 - DNA, 20 bp, Artificial Sequence
  Description of Artificial Sequence: Synthetic oligonucleotide
  Target: ATXN2; (-) strand; PAM type: YTN; PAM sequence: CTT
tgcacccactaatcacctca

SEQ ID NO: 65696 - DNA, 20 bp, Artificial Sequence
  Description of Artificial Sequence: Synthetic oligonucleotide
  Target: ATXN2; (-) strand; PAM type: YTN; PAM sequence: TTC
tttgcacccactaatcacct

SEQ ID NO: 65697 - DNA, 20 bp, Artificial Sequence
  Description of Artificial Sequence: Synthetic oligonucleotide
  Target: ATXN2; (-) strand; PAM type: YTN; PAM sequence: TTT
ctttgcacccactaatcacc

SEQ ID NO: 65698 - DNA, 20 bp, Artificial Sequence
  Description of Artificial Sequence: Synthetic oligonucleotide
  Target: ATXN2; (-) strand; PAM type: YTN; PAM sequence: TTT
tctttgcacccactaatcac

SEQ ID NO: 65699 - DNA, 20 bp, Artificial Sequence
  Description of Artificial Sequence: Synthetic oligonucleotide
  Target: ATXN2; (-) strand; PAM type: YTN; PAM sequence: CTA
aattttctttgcacccacta

SEQ ID NO: 65700 - DNA, 20 bp, Artificial Sequence
  Description of Artificial Sequence: Synthetic oligonucleotide
  Target: ATXN2; (-) strand; PAM type: YTN; PAM sequence: TTC
taaattttctttgcacccac

SEQ ID NO: 65701 - DNA, 20 bp, Artificial Sequence
  Description of Artificial Sequence: Synthetic oligonucleotide
  Target: ATXN2; (-) strand; PAM type: YTN; PAM sequence: TTT
ctaaattttctttgcaccca

SEQ ID NO: 65702 - DNA, 20 bp, Artificial Sequence
  Description of Artificial Sequence: Synthetic oligonucleotide
  Target: ATXN2; (-) strand; PAM type: YTN; PAM sequence: CTT
tctaaattttctttgcaccc

SEQ ID NO: 65703 - DNA, 20 bp, Artificial Sequence
  Description of Artificial Sequence: Synthetic oligonucleotide
  Target: ATXN2; (-) strand; PAM type: YTN; PAM sequence: TTC
tttctaaattttctttgcac

SEQ ID NO: 65704 - DNA, 20 bp, Artificial Sequence
  Description of Artificial Sequence: Synthetic oligonucleotide
  Target: ATXN2; (-) strand; PAM type: YTN; PAM sequence: TTC
gttctttctaaattttcttt

SEQ ID NO: 65705 - DNA, 20 bp, Artificial Sequence
  Description of Artificial Sequence: Synthetic oligonucleotide
  Target: ATXN2; (-) strand; PAM type: YTN; PAM sequence: TTA
ttcgttctttctaaattttc

SEQ ID NO: 65706 - DNA, 20 bp, Artificial Sequence
  Description of Artificial Sequence: Synthetic oligonucleotide
  Target: ATXN2; (-) strand; PAM type: YTN; PAM sequence: CTT
attcgttctttctaaatttt

SEQ ID NO: 65707 - DNA, 20 bp, Artificial Sequence
  Description of Artificial Sequence: Synthetic oligonucleotide
  Target: ATXN2; (-) strand; PAM type: YTN; PAM sequence: TTC
ttattcgttctttctaaatt

SEQ ID NO: 65708 - DNA, 20 bp, Artificial Sequence
  Description of Artificial Sequence: Synthetic oligonucleotide
  Target: ATXN2; (-) strand; PAM type: YTN; PAM sequence: CTG
cagagttcttattcgttctt

SEQ ID NO: 65709 - DNA, 20 bp, Artificial Sequence
  Description of Artificial Sequence: Synthetic oligonucleotide
  Target: ATXN2; (-) strand; PAM type: YTN; PAM sequence: CTC
cggtcctgcagagttcttat

SEQ ID NO: 65710 - DNA, 20 bp, Artificial Sequence
  Description of Artificial Sequence: Synthetic oligonucleotide
  Target: ATXN2; (-) strand; PAM type: YTN; PAM sequence: CTG
cctccggtcctgcagagttc

SEQ ID NO: 65711 - DNA, 20 bp, Artificial Sequence
  Description of Artificial Sequence: Synthetic oligonucleotide
  Target: ATXN2; (-) strand; PAM type: YTN; PAM sequence: TTC
tgcctccggtcctgcagagt

SEQ ID NO: 65712 - DNA, 20 bp, Artificial Sequence
  Description of Artificial Sequence: Synthetic oligonucleotide
  Target: ATXN2; (-) strand; PAM type: YTN; PAM sequence: TTT
ctgcctccggtcctgcagag

SEQ ID NO: 65713 - DNA, 20 bp, Artificial Sequence
  Description of Artificial Sequence: Synthetic oligonucleotide
  Target: ATXN2; (-) strand; PAM type: YTN; PAM sequence: TTC
atttctgcctccggtcctgc

SEQ ID NO: 65714 - DNA, 20 bp, Artificial Sequence
  Description of Artificial Sequence: Synthetic oligonucleotide
  Target: ATXN2; (-) strand; PAM type: YTN; PAM sequence: TTT
catttctgcctccggtcctg

SEQ ID NO: 65715 - DNA, 20 bp, Artificial Sequence
  Description of Artificial Sequence: Synthetic oligonucleotide
  Target: ATXN2; (-) strand; PAM type: YTN; PAM sequence: TTT
tcatttctgcctccggtcct

SEQ ID NO: 65716 - DNA, 20 bp, Artificial Sequence
  Description of Artificial Sequence: Synthetic oligonucleotide
  Target: ATXN2; (-) strand; PAM type: YTN; PAM sequence: TTT
ttcatttctgcctccggtcc

SEQ ID NO: 65717 - DNA, 20 bp, Artificial Sequence
  Description of Artificial Sequence: Synthetic oligonucleotide
  Target: ATXN2; (-) strand; PAM type: YTN; PAM sequence: CTT
tttcatttctgcctccggtc

SEQ ID NO: 65718 - DNA, 20 bp, Artificial Sequence
  Description of Artificial Sequence: Synthetic oligonucleotide
  Target: ATXN2; (-) strand; PAM type: YTN; PAM sequence: TTA
atatctttttcatttctgcc

SEQ ID NO: 65719 - DNA, 20 bp, Artificial Sequence
  Description of Artificial Sequence: Synthetic oligonucleotide
  Target: ATXN2; (-) strand; PAM type: YTN; PAM sequence: TTT
aatatctttttcatttctgc

SEQ ID NO: 65720 - DNA, 20 bp, Artificial Sequence
  Description of Artificial Sequence: Synthetic oligonucleotide
  Target: ATXN2; (-) strand; PAM type: YTN; PAM sequence: TTT
taatatctttttcatttctg

SEQ ID NO: 65721 - DNA, 20 bp, Artificial Sequence
  Description of Artificial Sequence: Synthetic oligonucleotide
  Target: ATXN2; (-) strand; PAM type: YTN; PAM sequence: TTA
aatcattttaatatcttttt

SEQ ID NO: 65722 - DNA, 20 bp, Artificial Sequence
  Description of Artificial Sequence: Synthetic oligonucleotide
  Target: ATXN2; (-) strand; PAM type: YTN; PAM sequence: TTT
aaatcattttaatatctttt

SEQ ID NO: 65723 - DNA, 20 bp, Artificial Sequence
  Description of Artificial Sequence: Synthetic oligonucleotide
  Target: ATXN2; (-) strand; PAM type: YTN; PAM sequence: TTT
taaatcattttaatatcttt

SEQ ID NO: 65724 - DNA, 20 bp, Artificial Sequence
  Description of Artificial Sequence: Synthetic oligonucleotide
  Target: ATXN2; (-) strand; PAM type: YTN; PAM sequence: TTA
ttttaaatcattttaatatc

SEQ ID NO: 65725 - DNA, 20 bp, Artificial Sequence
  Description of Artificial Sequence: Synthetic oligonucleotide
  Target: ATXN2; (-) strand; PAM type: YTN; PAM sequence: TTA
aaattattttaaatcatttt

SEQ ID NO: 65726 - DNA, 20 bp, Artificial Sequence
  Description of Artificial Sequence: Synthetic oligonucleotide
  Target: ATXN2; (-) strand; PAM type: YTN; PAM sequence: TTT
aaaattattttaaatcattt

SEQ ID NO: 65727 - DNA, 20 bp, Artificial Sequence
  Description of Artificial Sequence: Synthetic oligonucleotide
  Target: ATXN2; (-) strand; PAM type: YTN; PAM sequence: CTT
taaaattattttaaatcatt

SEQ ID NO: 65728 - DNA, 20 bp, Artificial Sequence
  Description of Artificial Sequence: Synthetic oligonucleotide
  Target: ATXN2; (-) strand; PAM type: YTN; PAM sequence: TTG
caggcgtgagccaccgtgcc

SEQ ID NO: 65729 - DNA, 20 bp, Artificial Sequence
  Description of Artificial Sequence: Synthetic oligonucleotide
  Target: ATXN2; (-) strand; PAM type: YTN; PAM sequence: CTG
gggttgcaggcgtgagccac

SEQ ID NO: 65730 - DNA, 20 bp, Artificial Sequence
  Description of Artificial Sequence: Synthetic oligonucleotide
  Target: ATXN2; (-) strand; PAM type: YTN; PAM sequence: CTC
ccaaagtgctggggttgcag

SEQ ID NO: 65731 - DNA, 20 bp, Artificial Sequence
  Description of Artificial Sequence: Synthetic oligonucleotide
  Target: ATXN2; (-) strand; PAM type: YTN; PAM sequence: CTG
ccacagcctcccaaagtgct

SEQ ID NO: 65732 - DNA, 20 bp, Artificial Sequence
  Description of Artificial Sequence: Synthetic oligonucleotide
  Target: ATXN2; (-) strand; PAM type: YTN; PAM sequence: TTG
tgatccggctgccacagcct

SEQ ID NO: 65733 - DNA, 20 bp, Artificial Sequence
  Description of Artificial Sequence: Synthetic oligonucleotide
  Target: ATXN2; (-) strand; PAM type: YTN; PAM sequence: CTT
gtgatccggctgccacagcc

SEQ ID NO: 65734 - DNA, 20 bp, Artificial Sequence
  Description of Artificial Sequence: Synthetic oligonucleotide
  Target: ATXN2; (-) strand; PAM type: YTN; PAM sequence: TTG
accttgtgatccggctgcca

SEQ ID NO: 65735 - DNA, 20 bp, Artificial Sequence
  Description of Artificial Sequence: Synthetic oligonucleotide
  Target: ATXN2; (-) strand; PAM type: YTN; PAM sequence: CTT
gaccttgtgatccggctgcc

SEQ ID NO: 65736 - DNA, 20 bp, Artificial Sequence
  Description of Artificial Sequence: Synthetic oligonucleotide
  Target: ATXN2; (-) strand; PAM type: YTN; PAM sequence: CTC
ttgaccttgtgatccggctg

SEQ ID NO: 65737 - DNA, 20 bp, Artificial Sequence
  Description of Artificial Sequence: Synthetic oligonucleotide
  Target: ATXN2; (-) strand; PAM type: YTN; PAM sequence: TTG
atctcttgaccttgtgatcc

SEQ ID NO: 65738 - DNA, 20 bp, Artificial Sequence
  Description of Artificial Sequence: Synthetic oligonucleotide
  Target: ATXN2; (-) strand; PAM type: YTN; PAM sequence: CTT
gatctcttgaccttgtgatc

SEQ ID NO: 65739 - DNA, 20 bp, Artificial Sequence
  Description of Artificial Sequence: Synthetic oligonucleotide
  Target: ATXN2; (-) strand; PAM type: YTN; PAM sequence: CTG
ggatggtcttgatctcttga

SEQ ID NO: 65740 - DNA, 20 bp, Artificial Sequence
  Description of Artificial Sequence: Synthetic oligonucleotide
  Target: ATXN2; (-) strand; PAM type: YTN; PAM sequence: TTG
gctgggatggtcttgatctc

SEQ ID NO: 65741 - DNA, 20 bp, Artificial Sequence
  Description of Artificial Sequence: Synthetic oligonucleotide
  Target: ATXN2; (-) strand; PAM type: YTN; PAM sequence: CTA
tgttggctgggatggtcttg

SEQ ID NO: 65742 - DNA, 20 bp, Artificial Sequence
  Description of Artificial Sequence: Synthetic oligonucleotide
  Target: ATXN2; (-) strand; PAM type: YTN; PAM sequence: TTC
actatgttggctgggatggt

SEQ ID NO: 65743 - DNA, 20 bp, Artificial Sequence
  Description of Artificial Sequence: Synthetic oligonucleotide
  Target: ATXN2; (-) strand; PAM type: YTN; PAM sequence: TTT
cactatgttggctgggatgg

SEQ ID NO: 65744 - DNA, 20 bp, Artificial Sequence
  Description of Artificial Sequence: Synthetic oligonucleotide
  Target: ATXN2; (-) strand; PAM type: YTN; PAM sequence: TTA
gtagagacggggtttcacta

SEQ ID NO: 65745 - DNA, 20 bp, Artificial Sequence
  Description of Artificial Sequence: Synthetic oligonucleotide
  Target: ATXN2; (-) strand; PAM type: YTN; PAM sequence: TTT
agtagagacggggtttcact

SEQ ID NO: 65746 - DNA, 20 bp, Artificial Sequence
  Description of Artificial Sequence: Synthetic oligonucleotide
  Target: ATXN2; (-) strand; PAM type: YTN; PAM sequence: TTT
tagtagagacggggtttcac

SEQ ID NO: 65747 - DNA, 20 bp, Artificial Sequence
  Description of Artificial Sequence: Synthetic oligonucleotide
  Target: ATXN2; (-) strand; PAM type: YTN; PAM sequence: TTT
ttagtagagacggggtttca

SEQ ID NO: 65748 - DNA, 20 bp, Artificial Sequence
  Description of Artificial Sequence: Synthetic oligonucleotide
  Target: ATXN2; (-) strand; PAM type: YTN; PAM sequence: TTG
tatttttagtagagacgggg

SEQ ID NO: 65749 - DNA, 20 bp, Artificial Sequence
  Description of Artificial Sequence: Synthetic oligonucleotide
  Target: ATXN2; (-) strand; PAM type: YTN; PAM sequence: TTT
gtatttttagtagagacggg

SEQ ID NO: 65750 - DNA, 20 bp, Artificial Sequence
  Description of Artificial Sequence: Synthetic oligonucleotide
  Target: ATXN2; (-) strand; PAM type: YTN; PAM sequence: TTT
tgtatttttagtagagacgg

SEQ ID NO: 65751 - DNA, 20 bp, Artificial Sequence
  Description of Artificial Sequence: Synthetic oligonucleotide
  Target: ATXN2; (-) strand; PAM type: YTN; PAM sequence: TTT
ttgtatttttagtagagacg

SEQ ID NO: 65752 - DNA, 20 bp, Artificial Sequence
  Description of Artificial Sequence: Synthetic oligonucleotide
  Target: ATXN2; (-) strand; PAM type: YTN; PAM sequence: CTA
atttttgtatttttagtaga

SEQ ID NO: 65753 - DNA, 20 bp, Artificial Sequence
  Description of Artificial Sequence: Synthetic oligonucleotide
  Target: ATXN2; (-) strand; PAM type: YTN; PAM sequence: CTA
caggcacgtgccaccacgcc

SEQ ID NO: 65754 - DNA, 20 bp, Artificial Sequence
  Description of Artificial Sequence: Synthetic oligonucleotide
  Target: ATXN2; (-) strand; PAM type: YTN; PAM sequence: CTG
gaactacaggcacgtgccac

SEQ ID NO: 65755 - DNA, 20 bp, Artificial Sequence
  Description of Artificial Sequence: Synthetic oligonucleotide
  Target: ATXN2; (-) strand; PAM type: YTN; PAM sequence: CTA
gctggaactacaggcacgtg

SEQ ID NO: 65756 - DNA, 20 bp, Artificial Sequence
  Description of Artificial Sequence: Synthetic oligonucleotide
  Target: ATXN2; (-) strand; PAM type: YTN; PAM sequence: CTG
actagctggaactacaggca

SEQ ID NO: 65757 - DNA, 20 bp, Artificial Sequence
  Description of Artificial Sequence: Synthetic oligonucleotide
  Target: ATXN2; (-) strand; PAM type: YTN; PAM sequence: CTC
ctgactagctggaactacag

SEQ ID NO: 65758 - DNA, 20 bp, Artificial Sequence
  Description of Artificial Sequence: Synthetic oligonucleotide
  Target: ATXN2; (-) strand; PAM type: YTN; PAM sequence: CTC
agcctcctgactagctggaa

SEQ ID NO: 65759 - DNA, 20 bp, Artificial Sequence
  Description of Artificial Sequence: Synthetic oligonucleotide
  Target: ATXN2; (-) strand; PAM type: YTN; PAM sequence: CTG
cctcagcctcctgactagct

SEQ ID NO: 65760 - DNA, 20 bp, Artificial Sequence
  Description of Artificial Sequence: Synthetic oligonucleotide
  Target: ATXN2; (-) strand; PAM type: YTN; PAM sequence: CTC
ctgcctcagcctcctgacta

SEQ ID NO: 65761 - DNA, 20 bp, Artificial Sequence
  Description of Artificial Sequence: Synthetic oligonucleotide
  Target: ATXN2; (-) strand; PAM type: YTN; PAM sequence: TTC
tcctgcctcagcctcctgac

SEQ ID NO: 65762 - DNA, 20 bp, Artificial Sequence
  Description of Artificial Sequence: Synthetic oligonucleotide
  Target: ATXN2; (-) strand; PAM type: YTN; PAM sequence: TTC
aagtgattctcctgcctcag

SEQ ID NO: 65763 - DNA, 20 bp, Artificial Sequence
  Description of Artificial Sequence: Synthetic oligonucleotide
  Target: ATXN2; (-) strand; PAM type: YTN; PAM sequence: CTC
cagggttcaagtgattctcc

SEQ ID NO: 65764 - DNA, 20 bp, Artificial Sequence
  Description of Artificial Sequence: Synthetic oligonucleotide
  Target: ATXN2; (-) strand; PAM type: YTN; PAM sequence: CTC
cgcctccagggttcaagtga

SEQ ID NO: 65765 - DNA, 20 bp, Artificial Sequence
  Description of Artificial Sequence: Synthetic oligonucleotide
  Target: ATXN2; (-) strand; PAM type: YTN; PAM sequence: CTG
caacctccgcctccagggtt

SEQ ID NO: 65766 - DNA, 20 bp, Artificial Sequence
  Description of Artificial Sequence: Synthetic oligonucleotide
  Target: ATXN2; (-) strand; PAM type: YTN; PAM sequence: CTC
actgcaacctccgcctccag

SEQ ID NO: 65767 - DNA, 20 bp, Artificial Sequence
  Description of Artificial Sequence: Synthetic oligonucleotide
  Target: ATXN2; (-) strand; PAM type: YTN; PAM sequence: CTC
aactcactgcaacctccgcc

SEQ ID NO: 65768 - DNA, 20 bp, Artificial Sequence
  Description of Artificial Sequence: Synthetic oligonucleotide
  Target: ATXN2; (-) strand; PAM type: YTN; PAM sequence: CTG
gagtgcggtggcgcagtctc

SEQ ID NO: 65769 - DNA, 20 bp, Artificial Sequence
  Description of Artificial Sequence: Synthetic oligonucleotide
  Target: ATXN2; (-) strand; PAM type: YTN; PAM sequence: CTG
tcgccaggctggagtgcggt

SEQ ID NO: 65770 - DNA, 20 bp, Artificial Sequence
  Description of Artificial Sequence: Synthetic oligonucleotide
  Target: ATXN2; (-) strand; PAM type: YTN; PAM sequence: CTC
tgtcgccaggctggagtgcg

SEQ ID NO: 65771 - DNA, 20 bp, Artificial Sequence
  Description of Artificial Sequence: Synthetic oligonucleotide
  Target: ATXN2; (-) strand; PAM type: YTN; PAM sequence: CTC
actctgtcgccaggctggag

SEQ ID NO: 65772 - DNA, 20 bp, Artificial Sequence
  Description of Artificial Sequence: Synthetic oligonucleotide
  Target: ATXN2; (-) strand; PAM type: YTN; PAM sequence: TTA
gacggagtctcactctgtcg

SEQ ID NO: 65773 - DNA, 20 bp, Artificial Sequence
  Description of Artificial Sequence: Synthetic oligonucleotide
  Target: ATXN2; (-) strand; PAM type: YTN; PAM sequence: TTT
agacggagtctcactctgtc

SEQ ID NO: 65774 - DNA, 20 bp, Artificial Sequence
  Description of Artificial Sequence: Synthetic oligonucleotide
  Target: ATXN2; (-) strand; PAM type: YTN; PAM sequence: TTT
tagacggagtctcactctgt

SEQ ID NO: 65775 - DNA, 20 bp, Artificial Sequence
  Description of Artificial Sequence: Synthetic oligonucleotide
  Target: ATXN2; (-) strand; PAM type: YTN; PAM sequence: TTT
ttagacggagtctcactctg

SEQ ID NO: 65776 - DNA, 20 bp, Artificial Sequence
  Description of Artificial Sequence: Synthetic oligonucleotide
  Target: ATXN2; (-) strand; PAM type: YTN; PAM sequence: TTA
tttttagacggagtctcact

SEQ ID NO: 65777 - DNA, 20 bp, Artificial Sequence
  Description of Artificial Sequence: Synthetic oligonucleotide
  Target: ATXN2; (-) strand; PAM type: YTN; PAM sequence: TTT
atttttagacggagtctcac

SEQ ID NO: 65778 - DNA, 20 bp, Artificial Sequence
  Description of Artificial Sequence: Synthetic oligonucleotide
  Target: ATXN2; (-) strand; PAM type: YTN; PAM sequence: TTA
tttatttttagacggagtct

SEQ ID NO: 65779 - DNA, 20 bp, Artificial Sequence
  Description of Artificial Sequence: Synthetic oligonucleotide
  Target: ATXN2; (-) strand; PAM type: YTN; PAM sequence: TTT
atttatttttagacggagtc

SEQ ID NO: 65780 - DNA, 20 bp, Artificial Sequence
  Description of Artificial Sequence: Synthetic oligonucleotide
  Target: ATXN2; (-) strand; PAM type: YTN; PAM sequence: TTA
tttatttatttttagacgga

SEQ ID NO: 65781 - DNA, 20 bp, Artificial Sequence
  Description of Artificial Sequence: Synthetic oligonucleotide
  Target: ATXN2; (-) strand; PAM type: YTN; PAM sequence: TTT
atttatttatttttagacgg

SEQ ID NO: 65782 - DNA, 20 bp, Artificial Sequence
  Description of Artificial Sequence: Synthetic oligonucleotide
  Target: ATXN2; (-) strand; PAM type: YTN; PAM sequence: TTT
tatttatttatttttagacg

SEQ ID NO: 65783 - DNA, 20 bp, Artificial Sequence
  Description of Artificial Sequence: Synthetic oligonucleotide
  Target: ATXN2; (-) strand; PAM type: YTN; PAM sequence: TTA
ttttatttatttatttttag

SEQ ID NO: 65784 - DNA, 20 bp, Artificial Sequence
  Description of Artificial Sequence: Synthetic oligonucleotide
  Target: ATXN2; (-) strand; PAM type: YTN; PAM sequence: CTT
attttatttatttattttta

SEQ ID NO: 65785 - DNA, 20 bp, Artificial Sequence
  Description of Artificial Sequence: Synthetic oligonucleotide
  Target: ATXN2; (-) strand; PAM type: YTN; PAM sequence: TTA
aacttattttatttatttat

SEQ ID NO: 65786 - DNA, 20 bp, Artificial Sequence
  Description of Artificial Sequence: Synthetic oligonucleotide
  Target: ATXN2; (-) strand; PAM type: YTN; PAM sequence: TTT
aaacttattttatttattta

SEQ ID NO: 65787 - DNA, 20 bp, Artificial Sequence
  Description of Artificial Sequence: Synthetic oligonucleotide
  Target: ATXN2; (-) strand; PAM type: YTN; PAM sequence: TTT
taaacttattttatttattt

SEQ ID NO: 65788 - DNA, 20 bp, Artificial Sequence
  Description of Artificial Sequence: Synthetic oligonucleotide
  Target: ATXN2; (-) strand; PAM type: YTN; PAM sequence: TTA
aattttaaacttattttatt

SEQ ID NO: 65789 - DNA, 20 bp, Artificial Sequence
  Description of Artificial Sequence: Synthetic oligonucleotide
  Target: ATXN2; (-) strand; PAM type: YTN; PAM sequence: TTT
aaattttaaacttattttat

SEQ ID NO: 65790 - DNA, 20 bp, Artificial Sequence
  Description of Artificial Sequence: Synthetic oligonucleotide
  Target: ATXN2; (-) strand; PAM type: YTN; PAM sequence: TTT
taaattttaaacttatttta

SEQ ID NO: 65791 - DNA, 20 bp, Artificial Sequence
  Description of Artificial Sequence: Synthetic oligonucleotide
  Target: ATXN2; (-) strand; PAM type: YTN; PAM sequence: TTT
ttaaattttaaacttatttt

SEQ ID NO: 65792 - DNA, 20 bp, Artificial Sequence
  Description of Artificial Sequence: Synthetic oligonucleotide
  Target: ATXN2; (-) strand; PAM type: YTN; PAM sequence: CTT
tttaaattttaaacttattt

SEQ ID NO: 65793 - DNA, 20 bp, Artificial Sequence
  Description of Artificial Sequence: Synthetic oligonucleotide
  Target: ATXN2; (-) strand; PAM type: YTN; PAM sequence: TTA
actttttaaattttaaactt

SEQ ID NO: 65794 - DNA, 20 bp, Artificial Sequence
  Description of Artificial Sequence: Synthetic oligonucleotide
  Target: ATXN2; (-) strand; PAM type: YTN; PAM sequence: TTT
aactttttaaattttaaact

SEQ ID NO: 65795 - DNA, 20 bp, Artificial Sequence
  Description of Artificial Sequence: Synthetic oligonucleotide
  Target: ATXN2; (-) strand; PAM type: YTN; PAM sequence: TTA
tttaactttttaaattttaa

SEQ ID NO: 65796 - DNA, 20 bp, Artificial Sequence
  Description of Artificial Sequence: Synthetic oligonucleotide
  Target: ATXN2; (-) strand; PAM type: YTN; PAM sequence: TTT
atttaactttttaaatttta

SEQ ID NO: 65797 - DNA, 20 bp, Artificial Sequence
  Description of Artificial Sequence: Synthetic oligonucleotide
  Target: ATXN2; (-) strand; PAM type: YTN; PAM sequence: CTT
tatttaactttttaaatttt

SEQ ID NO: 65798 - DNA, 20 bp, Artificial Sequence
  Description of Artificial Sequence: Synthetic oligonucleotide
  Target: ATXN2; (-) strand; PAM type: YTN; PAM sequence: TTC
tttatttaactttttaaatt

SEQ ID NO: 65799 - DNA, 20 bp, Artificial Sequence
  Description of Artificial Sequence: Synthetic oligonucleotide
  Target: ATXN2; (-) strand; PAM type: YTN; PAM sequence: TTC
attctttatttaacttttta

SEQ ID NO: 65800 - DNA, 20 bp, Artificial Sequence
  Description of Artificial Sequence: Synthetic oligonucleotide
  Target: ATXN2; (-) strand; PAM type: YTN; PAM sequence: TTA
ttcattctttatttaacttt

SEQ ID NO: 65801 - DNA, 20 bp, Artificial Sequence
  Description of Artificial Sequence: Synthetic oligonucleotide
  Target: ATXN2; (-) strand; PAM type: YTN; PAM sequence: CTT
attcattctttatttaactt

SEQ ID NO: 65802 - DNA, 20 bp, Artificial Sequence
  Description of Artificial Sequence: Synthetic oligonucleotide
  Target: ATXN2; (-) strand; PAM type: YTN; PAM sequence: CTA
gatcttattcattctttatt

SEQ ID NO: 65803 - DNA, 20 bp, Artificial Sequence
  Description of Artificial Sequence: Synthetic oligonucleotide
  Target: ATXN2; (-) strand; PAM type: YTN; PAM sequence: TTG
tcaaatactagatcttattc

SEQ ID NO: 65804 - DNA, 20 bp, Artificial Sequence
  Description of Artificial Sequence: Synthetic oligonucleotide
  Target: ATXN2; (-) strand; PAM type: YTN; PAM sequence: TTG
ttgtcaaatactagatctta

SEQ ID NO: 65805 - DNA, 20 bp, Artificial Sequence
  Description of Artificial Sequence: Synthetic oligonucleotide
  Target: ATXN2; (-) strand; PAM type: YTN; PAM sequence: TTT
gttgtcaaatactagatctt

SEQ ID NO: 65806 - DNA, 20 bp, Artificial Sequence
  Description of Artificial Sequence: Synthetic oligonucleotide
  Target: ATXN2; (-) strand; PAM type: YTN; PAM sequence: CTT
tgttgtcaaatactagatct

SEQ ID NO: 65807 - DNA, 20 bp, Artificial Sequence
  Description of Artificial Sequence: Synthetic oligonucleotide
  Target: ATXN2; (-) strand; PAM type: YTN; PAM sequence: CTG
ctttgttgtcaaatactaga

SEQ ID NO: 65808 - DNA, 20 bp, Artificial Sequence
  Description of Artificial Sequence: Synthetic oligonucleotide
  Target: ATXN2; (-) strand; PAM type: YTN; PAM sequence: CTG
tagtcaccctgctttgttgt

SEQ ID NO: 65809 - DNA, 20 bp, Artificial Sequence
  Description of Artificial Sequence: Synthetic oligonucleotide
  Target: ATXN2; (-) strand; PAM type: YTN; PAM sequence: CTG
actgtagtcaccctgctttg

SEQ ID NO: 65810 - DNA, 20 bp, Artificial Sequence
  Description of Artificial Sequence: Synthetic oligonucleotide
  Target: ATXN2; (-) strand; PAM type: YTN; PAM sequence: TTA
atgctgactgtagtcaccct

SEQ ID NO: 65811 - DNA, 20 bp, Artificial Sequence
  Description of Artificial Sequence: Synthetic oligonucleotide
  Target: ATXN2; (-) strand; PAM type: YTN; PAM sequence: CTA
aaaagtacaacaaattaatg

SEQ ID NO: 65812 - DNA, 20 bp, Artificial Sequence
  Description of Artificial Sequence: Synthetic oligonucleotide
  Target: ATXN2; (-) strand; PAM type: YTN; PAM sequence: TTC
taaaaagtacaacaaattaa

SEQ ID NO: 65813 - DNA, 20 bp, Artificial Sequence
  Description of Artificial Sequence: Synthetic oligonucleotide
  Target: ATXN2; (-) strand; PAM type: YTN; PAM sequence: TTA
ttctaaaaagtacaacaaat

SEQ ID NO: 65814 - DNA, 20 bp, Artificial Sequence
  Description of Artificial Sequence: Synthetic oligonucleotide
  Target: ATXN2; (-) strand; PAM type: YTN; PAM sequence: CTC
agttattctaaaaagtacaa

SEQ ID NO: 65815 - DNA, 20 bp, Artificial Sequence
  Description of Artificial Sequence: Synthetic oligonucleotide
  Target: ATXN2; (-) strand; PAM type: YTN; PAM sequence: CTC
cctcagttattctaaaaagt

SEQ ID NO: 65816 - DNA, 20 bp, Artificial Sequence
  Description of Artificial Sequence: Synthetic oligonucleotide
  Target: ATXN2; (-) strand; PAM type: YTN; PAM sequence: TTG
tactccctcagttattctaa

SEQ ID NO: 65817 - DNA, 20 bp, Artificial Sequence
  Description of Artificial Sequence: Synthetic oligonucleotide
  Target: ATXN2; (-) strand; PAM type: YTN; PAM sequence: TTG
caattgtactccctcagtta

SEQ ID NO: 65818 - DNA, 20 bp, Artificial Sequence
  Description of Artificial Sequence: Synthetic oligonucleotide
  Target: ATXN2; (-) strand; PAM type: YTN; PAM sequence: TTG
tgtaatgaacgttgcaattg

SEQ ID NO: 65819 - DNA, 20 bp, Artificial Sequence
  Description of Artificial Sequence: Synthetic oligonucleotide
  Target: ATXN2; (-) strand; PAM type: YTN; PAM sequence: TTT
gtgtaatgaacgttgcaatt

SEQ ID NO: 65820 - DNA, 20 bp, Artificial Sequence
  Description of Artificial Sequence: Synthetic oligonucleotide
  Target: ATXN2; (-) strand; PAM type: YTN; PAM sequence: CTT
tgtgtaatgaacgttgcaat

SEQ ID NO: 65821 - DNA, 20 bp, Artificial Sequence
  Description of Artificial Sequence: Synthetic oligonucleotide
  Target: ATXN2; (-) strand; PAM type: YTN; PAM sequence: TTC
tttgtgtaatgaacgttgca

SEQ ID NO: 65822 - DNA, 20 bp, Artificial Sequence
  Description of Artificial Sequence: Synthetic oligonucleotide
  Target: ATXN2; (-) strand; PAM type: YTN; PAM sequence: TTT
ctttgtgtaatgaacgttgc

SEQ ID NO: 65823 - DNA, 20 bp, Artificial Sequence
  Description of Artificial Sequence: Synthetic oligonucleotide
  Target: ATXN2; (-) strand; PAM type: YTN; PAM sequence: TTC
atcatttctttgtgtaatga

SEQ ID NO: 65824 - DNA, 20 bp, Artificial Sequence
  Description of Artificial Sequence: Synthetic oligonucleotide
  Target: ATXN2; (-) strand; PAM type: YTN; PAM sequence: TTA
gggtaaatggggtatccatc

SEQ ID NO: 65825 - DNA, 20 bp, Artificial Sequence
  Description of Artificial Sequence: Synthetic oligonucleotide
  Target: ATXN2; (-) strand; PAM type: YTN; PAM sequence: TTA
gataaaggcatataatgtgt

SEQ ID NO: 65826 - DNA, 20 bp, Artificial Sequence
  Description of Artificial Sequence: Synthetic oligonucleotide
  Target: ATXN2; (-) strand; PAM type: YTN; PAM sequence: TTT
agataaaggcatataatgtg

SEQ ID NO: 65827 - DNA, 20 bp, Artificial Sequence
  Description of Artificial Sequence: Synthetic oligonucleotide
  Target: ATXN2; (-) strand; PAM type: YTN; PAM sequence: CTG
tgagatatttagataaaggc

SEQ ID NO: 65828 - DNA, 20 bp, Artificial Sequence
  Description of Artificial Sequence: Synthetic oligonucleotide
  Target: ATXN2; (-) strand; PAM type: YTN; PAM sequence: TTC
atagggtctgtgagatattt

SEQ ID NO: 65829 - DNA, 20 bp, Artificial Sequence
  Description of Artificial Sequence: Synthetic oligonucleotide
  Target: ATXN2; (-) strand; PAM type: YTN; PAM sequence: TTA
ttcatagggtctgtgagata

SEQ ID NO: 65830 - DNA, 20 bp, Artificial Sequence
  Description of Artificial Sequence: Synthetic oligonucleotide
  Target: ATXN2; (-) strand; PAM type: YTN; PAM sequence: TTA
tgggtacatagtagacgtat

SEQ ID NO: 65831 - DNA, 20 bp, Artificial Sequence
  Description of Artificial Sequence: Synthetic oligonucleotide
  Target: ATXN2; (-) strand; PAM type: YTN; PAM sequence: TTT
atgggtacatagtagacgta

SEQ ID NO: 65832 - DNA, 20 bp, Artificial Sequence
  Description of Artificial Sequence: Synthetic oligonucleotide
  Target: ATXN2; (-) strand; PAM type: YTN; PAM sequence: TTT
tatgggtacatagtagacgt

SEQ ID NO: 65833 - DNA, 20 bp, Artificial Sequence
  Description of Artificial Sequence: Synthetic oligonucleotide
  Target: ATXN2; (-) strand; PAM type: YTN; PAM sequence: TTT
ttatgggtacatagtagacg

SEQ ID NO: 65834 - DNA, 20 bp, Artificial Sequence
  Description of Artificial Sequence: Synthetic oligonucleotide
  Target: ATXN2; (-) strand; PAM type: YTN; PAM sequence: TTT
tttatgggtacatagtagac

SEQ ID NO: 65835 - DNA, 20 bp, Artificial Sequence
  Description of Artificial Sequence: Synthetic oligonucleotide
  Target: ATXN2; (-) strand; PAM type: YTN; PAM sequence: TTT
ttttatgggtacatagtaga

SEQ ID NO: 65836 - DNA, 20 bp, Artificial Sequence
  Description of Artificial Sequence: Synthetic oligonucleotide
  Target: ATXN2; (-) strand; PAM type: YTN; PAM sequence: TTA
tttttttatgggtacatagt

SEQ ID NO: 65837 - DNA, 20 bp, Artificial Sequence
  Description of Artificial Sequence: Synthetic oligonucleotide
  Target: ATXN2; (-) strand; PAM type: YTN; PAM sequence: TTT
atttttttatgggtacatag

SEQ ID NO: 65838 - DNA, 20 bp, Artificial Sequence
  Description of Artificial Sequence: Synthetic oligonucleotide
  Target: ATXN2; (-) strand; PAM type: YTN; PAM sequence: TTT
tatttttttatgggtacata

SEQ ID NO: 65839 - DNA, 20 bp, Artificial Sequence
  Description of Artificial Sequence: Synthetic oligonucleotide
  Target: ATXN2; (-) strand; PAM type: YTN; PAM sequence: TTT
ttatttttttatgggtacat

SEQ ID NO: 65840 - DNA, 20 bp, Artificial Sequence
  Description of Artificial Sequence: Synthetic oligonucleotide
  Target: ATXN2; (-) strand; PAM type: YTN; PAM sequence: TTA
aaggtttttatttttttatg

SEQ ID NO: 65841 - DNA, 20 bp, Artificial Sequence
  Description of Artificial Sequence: Synthetic oligonucleotide
  Target: ATXN2; (-) strand; PAM type: YTN; PAM sequence: TTT
aaaggtttttatttttttat

SEQ ID NO: 65842 - DNA, 20 bp, Artificial Sequence
  Description of Artificial Sequence: Synthetic oligonucleotide
  Target: ATXN2; (-) strand; PAM type: YTN; PAM sequence: CTT
taaaggtttttattttttta

SEQ ID NO: 65843 - DNA, 20 bp, Artificial Sequence
  Description of Artificial Sequence: Synthetic oligonucleotide
  Target: ATXN2; (-) strand; PAM type: YTN; PAM sequence: CTA
ctttaaaggtttttattttt

SEQ ID NO: 65844 - DNA, 20 bp, Artificial Sequence
  Description of Artificial Sequence: Synthetic oligonucleotide
  Target: ATXN2; (-) strand; PAM type: YTN; PAM sequence: TTG
cagtctactttaaaggtttt

SEQ ID NO: 65845 - DNA, 20 bp, Artificial Sequence
  Description of Artificial Sequence: Synthetic oligonucleotide
  Target: ATXN2; (-) strand; PAM type: YTN; PAM sequence: TTT
gcagtctactttaaaggttt

SEQ ID NO: 65846 - DNA, 20 bp, Artificial Sequence
  Description of Artificial Sequence: Synthetic oligonucleotide
  Target: ATXN2; (-) strand; PAM type: YTN; PAM sequence: TTT
tgcagtctactttaaaggtt

SEQ ID NO: 65847 - DNA, 20 bp, Artificial Sequence
  Description of Artificial Sequence: Synthetic oligonucleotide
  Target: ATXN2; (-) strand; PAM type: YTN; PAM sequence: TTG
gttttgcagtctactttaaa

SEQ ID NO: 65848 - DNA, 20 bp, Artificial Sequence
  Description of Artificial Sequence: Synthetic oligonucleotide
  Target: ATXN2; (-) strand; PAM type: YTN; PAM sequence: CTT
ggttttgcagtctactttaa

SEQ ID NO: 65849 - DNA, 20 bp, Artificial Sequence
  Description of Artificial Sequence: Synthetic oligonucleotide
  Target: ATXN2; (-) strand; PAM type: YTN; PAM sequence: TTG
atggtccttggttttgcagt

SEQ ID NO: 65850 - DNA, 20 bp, Artificial Sequence
  Description of Artificial Sequence: Synthetic oligonucleotide
  Target: ATXN2; (-) strand; PAM type: YTN; PAM sequence: TTT
gatggtccttggttttgcag

SEQ ID NO: 65851 - DNA, 20 bp, Artificial Sequence
  Description of Artificial Sequence: Synthetic oligonucleotide
  Target: ATXN2; (-) strand; PAM type: YTN; PAM sequence: TTT
tgatggtccttggttttgca

SEQ ID NO: 65852 - DNA, 20 bp, Artificial Sequence
  Description of Artificial Sequence: Synthetic oligonucleotide
  Target: ATXN2; (-) strand; PAM type: YTN; PAM sequence: TTT
ttgatggtccttggttttgc

SEQ ID NO: 65853 - DNA, 20 bp, Artificial Sequence
  Description of Artificial Sequence: Synthetic oligonucleotide
  Target: ATXN2; (-) strand; PAM type: YTN; PAM sequence: CTT
tttgatggtccttggttttg

SEQ ID NO: 65854 - DNA, 20 bp, Artificial Sequence
  Description of Artificial Sequence: Synthetic oligonucleotide
  Target: ATXN2; (-) strand; PAM type: YTN; PAM sequence: TTC
tttttgatggtccttggttt

SEQ ID NO: 65855 - DNA, 20 bp, Artificial Sequence
  Description of Artificial Sequence: Synthetic oligonucleotide
  Target: ATXN2; (-) strand; PAM type: YTN; PAM sequence: CTG
ttctttttgatggtccttgg

SEQ ID NO: 65856 - DNA, 20 bp, Artificial Sequence
  Description of Artificial Sequence: Synthetic oligonucleotide
  Target: ATXN2; (-) strand; PAM type: YTN; PAM sequence: TTC
tgttctttttgatggtcctt

SEQ ID NO: 65857 - DNA, 20 bp, Artificial Sequence
  Description of Artificial Sequence: Synthetic oligonucleotide
  Target: ATXN2; (-) strand; PAM type: YTN; PAM sequence: CTT
ctgttctttttgatggtcct

SEQ ID NO: 65858 - DNA, 20 bp, Artificial Sequence
  Description of Artificial Sequence: Synthetic oligonucleotide
  Target: ATXN2; (-) strand; PAM type: YTN; PAM sequence: TTG
tcttctgttctttttgatgg

SEQ ID NO: 65859 - DNA, 20 bp, Artificial Sequence
  Description of Artificial Sequence: Synthetic oligonucleotide
  Target: ATXN2; (-) strand; PAM type: YTN; PAM sequence: TTT
gtcttctgttctttttgatg

SEQ ID NO: 65860 - DNA, 20 bp, Artificial Sequence
  Description of Artificial Sequence: Synthetic oligonucleotide
  Target: ATXN2; (-) strand; PAM type: YTN; PAM sequence: CTT
tgtcttctgttctttttgat

SEQ ID NO: 65861 - DNA, 20 bp, Artificial Sequence
  Description of Artificial Sequence: Synthetic oligonucleotide
  Target: ATXN2; (-) strand; PAM type: YTN; PAM sequence: CTA
atatctttgtcttctgttct

SEQ ID NO: 65862 - DNA, 20 bp, Artificial Sequence
  Description of Artificial Sequence: Synthetic oligonucleotide
  Target: ATXN2; (-) strand; PAM type: YTN; PAM sequence: TTG
ctaatatctttgtcttctgt

SEQ ID NO: 65863 - DNA, 20 bp, Artificial Sequence
  Description of Artificial Sequence: Synthetic oligonucleotide
  Target: ATXN2; (-) strand; PAM type: YTN; PAM sequence: TTT
gctaatatctttgtcttctg

SEQ ID NO: 65864 - DNA, 20 bp, Artificial Sequence
  Description of Artificial Sequence: Synthetic oligonucleotide
  Target: ATXN2; (-) strand; PAM type: YTN; PAM sequence: TTT
tgctaatatctttgtcttct

SEQ ID NO: 65865 - DNA, 20 bp, Artificial Sequence
  Description of Artificial Sequence: Synthetic oligonucleotide
  Target: ATXN2; (-) strand; PAM type: YTN; PAM sequence: TTA
ttttgctaatatctttgtct

SEQ ID NO: 65866 - DNA, 20 bp, Artificial Sequence
  Description of Artificial Sequence: Synthetic oligonucleotide
  Target: ATXN2; (-) strand; PAM type: YTN; PAM sequence: CTT
attttgctaatatctttgtc

SEQ ID NO: 65867 - DNA, 20 bp, Artificial Sequence
  Description of Artificial Sequence: Synthetic oligonucleotide
  Target: ATXN2; (-) strand; PAM type: YTN; PAM sequence: CTC
atcacttattttgctaatat

SEQ ID NO: 65868 - DNA, 20 bp, Artificial Sequence
  Description of Artificial Sequence: Synthetic oligonucleotide
  Target: ATXN2; (-) strand; PAM type: YTN; PAM sequence: TTA
aaaacctcatcacttatttt

SEQ ID NO: 65869 - DNA, 20 bp, Artificial Sequence
  Description of Artificial Sequence: Synthetic oligonucleotide
  Target: ATXN2; (-) strand; PAM type: YTN; PAM sequence: CTT
aaaaacctcatcacttattt

SEQ ID NO: 65870 - DNA, 20 bp, Artificial Sequence
  Description of Artificial Sequence: Synthetic oligonucleotide
  Target: ATXN2; (-) strand; PAM type: YTN; PAM sequence: CTG
caaacttaaaaacctcatca

SEQ ID NO: 65871 - DNA, 20 bp, Artificial Sequence
  Description of Artificial Sequence: Synthetic oligonucleotide
  Target: ATXN2; (-) strand; PAM type: YTN; PAM sequence: CTG
gtctgcaaacttaaaaacct

SEQ ID NO: 65872 - DNA, 20 bp, Artificial Sequence
  Description of Artificial Sequence: Synthetic oligonucleotide
  Target: ATXN2; (-) strand; PAM type: YTN; PAM sequence: TTC
tggtctgcaaacttaaaaac

SEQ ID NO: 65873 - DNA, 20 bp, Artificial Sequence
  Description of Artificial Sequence: Synthetic oligonucleotide
  Target: ATXN2; (-) strand; PAM type: YTN; PAM sequence: TTT
ctggtctgcaaacttaaaaa

SEQ ID NO: 65874 - DNA, 20 bp, Artificial Sequence
  Description of Artificial Sequence: Synthetic oligonucleotide
  Target: ATXN2; (-) strand; PAM type: YTN; PAM sequence: TTT
tctggtctgcaaacttaaaa

SEQ ID NO: 65875 - DNA, 20 bp, Artificial Sequence
  Description of Artificial Sequence: Synthetic oligonucleotide
  Target: ATXN2; (-) strand; PAM type: YTN; PAM sequence: TTT
ttctggtctgcaaacttaaa

SEQ ID NO: 65876 - DNA, 20 bp, Artificial Sequence
  Description of Artificial Sequence: Synthetic oligonucleotide
  Target: ATXN2; (-) strand; PAM type: YTN; PAM sequence: TTT
tttctggtctgcaaacttaa

SEQ ID NO: 65877 - DNA, 20 bp, Artificial Sequence
  Description of Artificial Sequence: Synthetic oligonucleotide
  Target: ATXN2; (-) strand; PAM type: YTN; PAM sequence: TTA
ttttttctggtctgcaaact

SEQ ID NO: 65878 - DNA, 20 bp, Artificial Sequence
  Description of Artificial Sequence: Synthetic oligonucleotide
  Target: ATXN2; (-) strand; PAM type: YTN; PAM sequence: TTT
attttttctggtctgcaaac

SEQ ID NO: 65879 - DNA, 20 bp, Artificial Sequence
  Description of Artificial Sequence: Synthetic oligonucleotide
  Target: ATXN2; (-) strand; PAM type: YTN; PAM sequence: TTT
tattttttctggtctgcaaa

SEQ ID NO: 65880 - DNA, 20 bp, Artificial Sequence
  Description of Artificial Sequence: Synthetic oligonucleotide
  Target: ATXN2; (-) strand; PAM type: YTN; PAM sequence: TTC
agccagtggtagcattttat

SEQ ID NO: 65881 - DNA, 20 bp, Artificial Sequence
  Description of Artificial Sequence: Synthetic oligonucleotide
  Target: ATXN2; (-) strand; PAM type: YTN; PAM sequence: CTT
cagccagtggtagcatttta

SEQ ID NO: 65882 - DNA, 20 bp, Artificial Sequence
  Description of Artificial Sequence: Synthetic oligonucleotide
  Target: ATXN2; (-) strand; PAM type: YTN; PAM sequence: TTA
aatcatcttcagccagtggt

SEQ ID NO: 65883 - DNA, 20 bp, Artificial Sequence
  Description of Artificial Sequence: Synthetic oligonucleotide
  Target: ATXN2; (-) strand; PAM type: YTN; PAM sequence: CTT
aaatcatcttcagccagtgg

SEQ ID NO: 65884 - DNA, 20 bp, Artificial Sequence
  Description of Artificial Sequence: Synthetic oligonucleotide
  Target: ATXN2; (-) strand; PAM type: YTN; PAM sequence: TTG
tagaggatgccatcttaaat

SEQ ID NO: 65885 - DNA, 20 bp, Artificial Sequence
  Description of Artificial Sequence: Synthetic oligonucleotide
  Target: ATXN2; (-) strand; PAM type: YTN; PAM sequence: TTT
gtagaggatgccatcttaaa

SEQ ID NO: 65886 - DNA, 20 bp, Artificial Sequence
  Description of Artificial Sequence: Synthetic oligonucleotide
  Target: ATXN2; (-) strand; PAM type: YTN; PAM sequence: TTT
tgtagaggatgccatcttaa

SEQ ID NO: 65887 - DNA, 20 bp, Artificial Sequence
  Description of Artificial Sequence: Synthetic oligonucleotide
  Target: ATXN2; (-) strand; PAM type: YTN; PAM sequence: CTT
ttgtagaggatgccatctta

SEQ ID NO: 65888 - DNA, 20 bp, Artificial Sequence
  Description of Artificial Sequence: Synthetic oligonucleotide
  Target: ATXN2; (-) strand; PAM type: YTN; PAM sequence: TTC
ttttgtagaggatgccatct

SEQ ID NO: 65889 - DNA, 20 bp, Artificial Sequence
  Description of Artificial Sequence: Synthetic oligonucleotide
  Target: ATXN2; (-) strand; PAM type: YTN; PAM sequence: TTT
cttttgtagaggatgccatc

SEQ ID NO: 65890 - DNA, 20 bp, Artificial Sequence
  Description of Artificial Sequence: Synthetic oligonucleotide
  Target: ATXN2; (-) strand; PAM type: YTN; PAM sequence: CTT
tcttttgtagaggatgccat

SEQ ID NO: 65891 - DNA, 20 bp, Artificial Sequence
  Description of Artificial Sequence: Synthetic oligonucleotide
  Target: ATXN2; (-) strand; PAM type: YTN; PAM sequence: TTC
tttcttttgtagaggatgcc

SEQ ID NO: 65892 - DNA, 20 bp, Artificial Sequence
  Description of Artificial Sequence: Synthetic oligonucleotide
  Target: ATXN2; (-) strand; PAM type: YTN; PAM sequence: TTT
ctttcttttgtagaggatgc

SEQ ID NO: 65893 - DNA, 20 bp, Artificial Sequence
  Description of Artificial Sequence: Synthetic oligonucleotide
  Target: ATXN2; (-) strand; PAM type: YTN; PAM sequence: TTT
tctttcttttgtagaggatg

SEQ ID NO: 65894 - DNA, 20 bp, Artificial Sequence
  Description of Artificial Sequence: Synthetic oligonucleotide
  Target: ATXN2; (-) strand; PAM type: YTN; PAM sequence: CTG
ttttctttcttttgtagagg

SEQ ID NO: 65895 - DNA, 20 bp, Artificial Sequence
  Description of Artificial Sequence: Synthetic oligonucleotide
  Target: ATXN2; (-) strand; PAM type: YTN; PAM sequence: TTC
ctgttttctttcttttgtag

SEQ ID NO: 65896 - DNA, 20 bp, Artificial Sequence
  Description of Artificial Sequence: Synthetic oligonucleotide
  Target: ATXN2; (-) strand; PAM type: YTN; PAM sequence: TTC
agccattcctgttttctttc

SEQ ID NO: 65897 - DNA, 20 bp, Artificial Sequence
  Description of Artificial Sequence: Synthetic oligonucleotide
  Target: ATXN2; (-) strand; PAM type: YTN; PAM sequence: TTT
cagccattcctgttttcttt

SEQ ID NO: 65898 - DNA, 20 bp, Artificial Sequence
  Description of Artificial Sequence: Synthetic oligonucleotide
  Target: ATXN2; (-) strand; PAM type: YTN; PAM sequence: TTT
tcagccattcctgttttctt

SEQ ID NO: 65899 - DNA, 20 bp, Artificial Sequence
  Description of Artificial Sequence: Synthetic oligonucleotide
  Target: ATXN2; (-) strand; PAM type: YTN; PAM sequence: TTT
ttcagccattcctgttttct

SEQ ID NO: 65900 - DNA, 20 bp, Artificial Sequence
  Description of Artificial Sequence: Synthetic oligonucleotide
  Target: ATXN2; (-) strand; PAM type: YTN; PAM sequence: TTT
tttcagccattcctgttttc

SEQ ID NO: 65901 - DNA, 20 bp, Artificial Sequence
  Description of Artificial Sequence: Synthetic oligonucleotide
  Target: ATXN2; (-) strand; PAM type: YTN; PAM sequence: CTT
ttttcagccattcctgtttt

SEQ ID NO: 65902 - DNA, 20 bp, Artificial Sequence
  Description of Artificial Sequence: Synthetic oligonucleotide
  Target: ATXN2; (-) strand; PAM type: YTN; PAM sequence: CTC
ccccttttttcagccattcc

SEQ ID NO: 65903 - DNA, 20 bp, Artificial Sequence
  Description of Artificial Sequence: Synthetic oligonucleotide
  Target: ATXN2; (-) strand; PAM type: YTN; PAM sequence: TTG
ctcccccttttttcagccat

SEQ ID NO: 65904 - DNA, 20 bp, Artificial Sequence
  Description of Artificial Sequence: Synthetic oligonucleotide
  Target: ATXN2; (-) strand; PAM type: YTN; PAM sequence: CTT
gctcccccttttttcagcca

SEQ ID NO: 65905 - DNA, 20 bp, Artificial Sequence
  Description of Artificial Sequence: Synthetic oligonucleotide
  Target: ATXN2; (-) strand; PAM type: YTN; PAM sequence: TTG
tacttgctcccccttttttc

SEQ ID NO: 65906 - DNA, 20 bp, Artificial Sequence
  Description of Artificial Sequence: Synthetic oligonucleotide
  Target: ATXN2; (-) strand; PAM type: YTN; PAM sequence: CTT
gtacttgctccccctttttt

SEQ ID NO: 65907 - DNA, 20 bp, Artificial Sequence
  Description of Artificial Sequence: Synthetic oligonucleotide
  Target: ATXN2; (-) strand; PAM type: YTN; PAM sequence: TTG
cttgtacttgctcccccttt

SEQ ID NO: 65908 - DNA, 20 bp, Artificial Sequence
  Description of Artificial Sequence: Synthetic oligonucleotide
  Target: ATXN2; (-) strand; PAM type: YTN; PAM sequence: TTG
ttgcttgtacttgctccccc

SEQ ID NO: 65909 - DNA, 20 bp, Artificial Sequence
  Description of Artificial Sequence: Synthetic oligonucleotide
  Target: ATXN2; (-) strand; PAM type: YTN; PAM sequence: TTT
gttgcttgtacttgctcccc

SEQ ID NO: 65910 - DNA, 20 bp, Artificial Sequence
  Description of Artificial Sequence: Synthetic oligonucleotide
  Target: ATXN2; (-) strand; PAM type: YTN; PAM sequence: TTT
tgttgcttgtacttgctccc

SEQ ID NO: 65911 - DNA, 20 bp, Artificial Sequence
  Description of Artificial Sequence: Synthetic oligonucleotide
  Target: ATXN2; (-) strand; PAM type: YTN; PAM sequence: TTT
ttgttgcttgtacttgctcc

SEQ ID NO: 65912 - DNA, 20 bp, Artificial Sequence
  Description of Artificial Sequence: Synthetic oligonucleotide
  Target: ATXN2; (-) strand; PAM type: YTN; PAM sequence: CTG
tttttgttgcttgtacttgc

SEQ ID NO: 65913 - DNA, 20 bp, Artificial Sequence
  Description of Artificial Sequence: Synthetic oligonucleotide
  Target: ATXN2; (-) strand; PAM type: YTN; PAM sequence: TTC
tgtttttgttgcttgtactt

SEQ ID NO: 65914 - DNA, 20 bp, Artificial Sequence
  Description of Artificial Sequence: Synthetic oligonucleotide
  Target: ATXN2; (-) strand; PAM type: YTN; PAM sequence: TTA
ggttctgtttttgttgcttg

SEQ ID NO: 65915 - DNA, 20 bp, Artificial Sequence
  Description of Artificial Sequence: Synthetic oligonucleotide
  Target: ATXN2; (-) strand; PAM type: YTN; PAM sequence: CTT
aggttctgtttttgttgctt

SEQ ID NO: 65916 - DNA, 20 bp, Artificial Sequence
  Description of Artificial Sequence: Synthetic oligonucleotide
  Target: ATXN2; (-) strand; PAM type: YTN; PAM sequence: CTG
tggcttaggttctgtttttg

SEQ ID NO: 65917 - DNA, 20 bp, Artificial Sequence
  Description of Artificial Sequence: Synthetic oligonucleotide
  Target: ATXN2; (-) strand; PAM type: YTN; PAM sequence: CTA
acctgtggcttaggttctgt

SEQ ID NO: 65918 - DNA, 20 bp, Artificial Sequence
  Description of Artificial Sequence: Synthetic oligonucleotide
  Target: ATXN2; (-) strand; PAM type: YTN; PAM sequence: TTG
tcctaacctgtggcttaggt

SEQ ID NO: 65919 - DNA, 20 bp, Artificial Sequence
  Description of Artificial Sequence: Synthetic oligonucleotide
  Target: ATXN2; (-) strand; PAM type: YTN; PAM sequence: TTA
ggtccgttgtcctaacctgt

SEQ ID NO: 65920 - DNA, 20 bp, Artificial Sequence
  Description of Artificial Sequence: Synthetic oligonucleotide
  Target: ATXN2; (-) strand; PAM type: YTN; PAM sequence: CTT
aggtccgttgtcctaacctg

SEQ ID NO: 65921 - DNA, 20 bp, Artificial Sequence
  Description of Artificial Sequence: Synthetic oligonucleotide
  Target: ATXN2; (-) strand; PAM type: YTN; PAM sequence: CTG
tggcttaggtccgttgtcct

SEQ ID NO: 65922 - DNA, 20 bp, Artificial Sequence
  Description of Artificial Sequence: Synthetic oligonucleotide
  Target: ATXN2; (-) strand; PAM type: YTN; PAM sequence: CTG
gggctgtggcttaggtccgt

SEQ ID NO: 65923 - DNA, 20 bp, Artificial Sequence
  Description of Artificial Sequence: Synthetic oligonucleotide
  Target: ATXN2; (-) strand; PAM type: YTN; PAM sequence: CTC
accacctggggctgtggctt

SEQ ID NO: 65924 - DNA, 20 bp, Artificial Sequence
  Description of Artificial Sequence: Synthetic oligonucleotide
  Target: ATXN2; (-) strand; PAM type: YTN; PAM sequence: TTC
tcaccacctggggctgtggc

SEQ ID NO: 65925 - DNA, 20 bp, Artificial Sequence
  Description of Artificial Sequence: Synthetic oligonucleotide
  Target: ATXN2; (-) strand; PAM type: YTN; PAM sequence: TTT
ctcaccacctggggctgtgg

SEQ ID NO: 65926 - DNA, 20 bp, Artificial Sequence
  Description of Artificial Sequence: Synthetic oligonucleotide
  Target: ATXN2; (-) strand; PAM type: YTN; PAM sequence: TTG
tttctcaccacctggggctg

SEQ ID NO: 65927 - DNA, 20 bp, Artificial Sequence
  Description of Artificial Sequence: Synthetic oligonucleotide
  Target: ATXN2; (-) strand; PAM type: YTN; PAM sequence: CTT
gtttctcaccacctggggct

SEQ ID NO: 65928 - DNA, 20 bp, Artificial Sequence
  Description of Artificial Sequence: Synthetic oligonucleotide
  Target: ATXN2; (-) strand; PAM type: YTN; PAM sequence: TTA
gcttgtttctcaccacctgg

SEQ ID NO: 65929 - DNA, 20 bp, Artificial Sequence
  Description of Artificial Sequence: Synthetic oligonucleotide
  Target: ATXN2; (-) strand; PAM type: YTN; PAM sequence: TTT
agcttgtttctcaccacctg

SEQ ID NO: 65930 - DNA, 20 bp, Artificial Sequence
  Description of Artificial Sequence: Synthetic oligonucleotide
  Target: ATXN2; (-) strand; PAM type: YTN; PAM sequence: CTT
tagcttgtttctcaccacct

SEQ ID NO: 65931 - DNA, 20 bp, Artificial Sequence
  Description of Artificial Sequence: Synthetic oligonucleotide
  Target: ATXN2; (-) strand; PAM type: YTN; PAM sequence: CTC
tttagcttgtttctcaccac

SEQ ID NO: 65932 - DNA, 20 bp, Artificial Sequence
  Description of Artificial Sequence: Synthetic oligonucleotide
  Target: ATXN2; (-) strand; PAM type: YTN; PAM sequence: TTC
tctttagcttgtttctcacc

SEQ ID NO: 65933 - DNA, 20 bp, Artificial Sequence
  Description of Artificial Sequence: Synthetic oligonucleotide
  Target: ATXN2; (-) strand; PAM type: YTN; PAM sequence: TTT
ctctttagcttgtttctcac

SEQ ID NO: 65934 - DNA, 20 bp, Artificial Sequence
  Description of Artificial Sequence: Synthetic oligonucleotide
  Target: ATXN2; (-) strand; PAM type: YTN; PAM sequence: CTG
tgtaggtttctctttagctt

SEQ ID NO: 65935 - DNA, 20 bp, Artificial Sequence
  Description of Artificial Sequence: Synthetic oligonucleotide
  Target: ATXN2; (-) strand; PAM type: YTN; PAM sequence: TTG
gctgtgtaggtttctcttta

SEQ ID NO: 65936 - DNA, 20 bp, Artificial Sequence
  Description of Artificial Sequence: Synthetic oligonucleotide
  Target: ATXN2; (-) strand; PAM type: YTN; PAM sequence: TTT
ggctgtgtaggtttctcttt

SEQ ID NO: 65937 - DNA, 20 bp, Artificial Sequence
  Description of Artificial Sequence: Synthetic oligonucleotide
  Target: ATXN2; (-) strand; PAM type: YTN; PAM sequence: TTT
tggctgtgtaggtttctctt

SEQ ID NO: 65938 - DNA, 20 bp, Artificial Sequence
  Description of Artificial Sequence: Synthetic oligonucleotide
  Target: ATXN2; (-) strand; PAM type: YTN; PAM sequence: TTT
ttggctgtgtaggtttctct

SEQ ID NO: 65939 - DNA, 20 bp, Artificial Sequence
  Description of Artificial Sequence: Synthetic oligonucleotide
  Target: ATXN2; (-) strand; PAM type: YTN; PAM sequence: CTT
tttggctgtgtaggtttctc

SEQ ID NO: 65940 - DNA, 20 bp, Artificial Sequence
  Description of Artificial Sequence: Synthetic oligonucleotide
  Target: ATXN2; (-) strand; PAM type: YTN; PAM sequence: TTA
aggcaacctttttggctgtg

SEQ ID NO: 65941 - DNA, 20 bp, Artificial Sequence
  Description of Artificial Sequence: Synthetic oligonucleotide
  Target: ATXN2; (-) strand; PAM type: YTN; PAM sequence: TTT
aaggcaacctttttggctgt

SEQ ID NO: 65942 - DNA, 20 bp, Artificial Sequence
  Description of Artificial Sequence: Synthetic oligonucleotide
  Target: ATXN2; (-) strand; PAM type: YTN; PAM sequence: TTT
taaggcaacctttttggctg

SEQ ID NO: 65943 - DNA, 20 bp, Artificial Sequence
  Description of Artificial Sequence: Synthetic oligonucleotide
  Target: ATXN2; (-) strand; PAM type: YTN; PAM sequence: CTA
attttaaggcaacctttttg

SEQ ID NO: 65944 - DNA, 20 bp, Artificial Sequence
  Description of Artificial Sequence: Synthetic oligonucleotide
  Target: ATXN2; (-) strand; PAM type: YTN; PAM sequence: CTC
taattttaaggcaacctttt

SEQ ID NO: 65945 - DNA, 20 bp, Artificial Sequence
  Description of Artificial Sequence: Synthetic oligonucleotide
  Target: ATXN2; (-) strand; PAM type: YTN; PAM sequence: CTC
tctaattttaaggcaacctt

SEQ ID NO: 65946 - DNA, 20 bp, Artificial Sequence
  Description of Artificial Sequence: Synthetic oligonucleotide
  Target: ATXN2; (-) strand; PAM type: YTN; PAM sequence: TTG
gctctctaattttaaggcaa

SEQ ID NO: 65947 - DNA, 20 bp, Artificial Sequence
  Description of Artificial Sequence: Synthetic oligonucleotide
  Target: ATXN2; (-) strand; PAM type: YTN; PAM sequence: CTT
ggctctctaattttaaggca

SEQ ID NO: 65948 - DNA, 20 bp, Artificial Sequence
  Description of Artificial Sequence: Synthetic oligonucleotide
  Target: ATXN2; (-) strand; PAM type: YTN; PAM sequence: CTG
aagaggtatcttggctctct

SEQ ID NO: 65949 - DNA, 20 bp, Artificial Sequence
  Description of Artificial Sequence: Synthetic oligonucleotide
  Target: ATXN2; (-) strand; PAM type: YTN; PAM sequence: CTG
aggctgaagaggtatcttgg

SEQ ID NO: 65950 - DNA, 20 bp, Artificial Sequence
  Description of Artificial Sequence: Synthetic oligonucleotide
  Target: ATXN2; (-) strand; PAM type: YTN; PAM sequence: CTA
tactgaggctgaagaggtat

SEQ ID NO: 65951 - DNA, 20 bp, Artificial Sequence
  Description of Artificial Sequence: Synthetic oligonucleotide
  Target: ATXN2; (-) strand; PAM type: YTN; PAM sequence: TTG
cctatactgaggctgaagag

SEQ ID NO: 65952 - DNA, 20 bp, Artificial Sequence
  Description of Artificial Sequence: Synthetic oligonucleotide
  Target: ATXN2; (-) strand; PAM type: YTN; PAM sequence: TTT
gcctatactgaggctgaaga

SEQ ID NO: 65953 - DNA, 20 bp, Artificial Sequence
  Description of Artificial Sequence: Synthetic oligonucleotide
  Target: ATXN2; (-) strand; PAM type: YTN; PAM sequence: TTG
gtttgcctatactgaggctg

SEQ ID NO: 65954 - DNA, 20 bp, Artificial Sequence
  Description of Artificial Sequence: Synthetic oligonucleotide
  Target: ATXN2; (-) strand; PAM type: YTN; PAM sequence: TTG
aaattggtttgcctatactg

SEQ ID NO: 65955 - DNA, 20 bp, Artificial Sequence
  Description of Artificial Sequence: Synthetic oligonucleotide
  Target: ATXN2; (-) strand; PAM type: YTN; PAM sequence: TTG
gtaatgaaaccattgaaatt

SEQ ID NO: 65956 - DNA, 20 bp, Artificial Sequence
  Description of Artificial Sequence: Synthetic oligonucleotide
  Target: ATXN2; (-) strand; PAM type: YTN; PAM sequence: CTT
ggtaatgaaaccattgaaat

SEQ ID NO: 65957 - DNA, 20 bp, Artificial Sequence
  Description of Artificial Sequence: Synthetic oligonucleotide
  Target: ATXN2; (-) strand; PAM type: YTN; PAM sequence: TTG
ccatgacaccaagagccttg

SEQ ID NO: 65958 - DNA, 20 bp, Artificial Sequence
  Description of Artificial Sequence: Synthetic oligonucleotide
  Target: ATXN2; (-) strand; PAM type: YTN; PAM sequence: TTT
gccatgacaccaagagcctt

SEQ ID NO: 65959 - DNA, 20 bp, Artificial Sequence
  Description of Artificial Sequence: Synthetic oligonucleotide
  Target: ATXN2; (-) strand; PAM type: YTN; PAM sequence: CTG
tttgccatgacaccaagagc

SEQ ID NO: 65960 - DNA, 20 bp, Artificial Sequence
  Description of Artificial Sequence: Synthetic oligonucleotide
  Target: ATXN2; (-) strand; PAM type: YTN; PAM sequence: TTG
cataatgctgtttgccatga

SEQ ID NO: 65961 - DNA, 20 bp, Artificial Sequence
  Description of Artificial Sequence: Synthetic oligonucleotide
  Target: ATXN2; (-) strand; PAM type: YTN; PAM sequence: TTG
cgatgcgccagagttgcata

SEQ ID NO: 65962 - DNA, 20 bp, Artificial Sequence
  Description of Artificial Sequence: Synthetic oligonucleotide
  Target: ATXN2; (-) strand; PAM type: YTN; PAM sequence: CTT
gcgatgcgccagagttgcat

SEQ ID NO: 65963 - DNA, 20 bp, Artificial Sequence
  Description of Artificial Sequence: Synthetic oligonucleotide
  Target: ATXN2; (-) strand; PAM type: YTN; PAM sequence: TTG
gtaatgcagtaaagcttgcg

SEQ ID NO: 65964 - DNA, 20 bp, Artificial Sequence
  Description of Artificial Sequence: Synthetic oligonucleotide
  Target: ATXN2; (-) strand; PAM type: YTN; PAM sequence: CTA
tattggtaatgcagtaaagc

SEQ ID NO: 65965 - DNA, 20 bp, Artificial Sequence
  Description of Artificial Sequence: Synthetic oligonucleotide
  Target: ATXN2; (-) strand; PAM type: YTN; PAM sequence: TTA
gctatattggtaatgcagta

SEQ ID NO: 65966 - DNA, 20 bp, Artificial Sequence
  Description of Artificial Sequence: Synthetic oligonucleotide
  Target: ATXN2; (-) strand; PAM type: YTN; PAM sequence: TTT
agctatattggtaatgcagt

SEQ ID NO: 65967 - DNA, 20 bp, Artificial Sequence
  Description of Artificial Sequence: Synthetic oligonucleotide
  Target: ATXN2; (-) strand; PAM type: YTN; PAM sequence: CTT
tagctatattggtaatgcag

SEQ ID NO: 65968 - DNA, 20 bp, Artificial Sequence
  Description of Artificial Sequence: Synthetic oligonucleotide
  Target: ATXN2; (-) strand; PAM type: YTN; PAM sequence: CTC
tttagctatattggtaatgc

SEQ ID NO: 65969 - DNA, 20 bp, Artificial Sequence
  Description of Artificial Sequence: Synthetic oligonucleotide
  Target: ATXN2; (-) strand; PAM type: YTN; PAM sequence: TTG
actctttagctatattggta

SEQ ID NO: 65970 - DNA, 20 bp, Artificial Sequence
  Description of Artificial Sequence: Synthetic oligonucleotide
  Target: ATXN2; (-) strand; PAM type: YTN; PAM sequence: CTT
gactctttagctatattggt

SEQ ID NO: 65971 - DNA, 20 bp, Artificial Sequence
  Description of Artificial Sequence: Synthetic oligonucleotide
  Target: ATXN2; (-) strand; PAM type: YTN; PAM sequence: TTA
gccacttgactctttagcta

SEQ ID NO: 65972 - DNA, 20 bp, Artificial Sequence
  Description of Artificial Sequence: Synthetic oligonucleotide
  Target: ATXN2; (-) strand; PAM type: YTN; PAM sequence: CTT
agccacttgactctttagct

SEQ ID NO: 65973 - DNA, 20 bp, Artificial Sequence
  Description of Artificial Sequence: Synthetic oligonucleotide
  Target: ATXN2; (-) strand; PAM type: YTN; PAM sequence: TTG
cccttagccacttgactctt

SEQ ID NO: 65974 - DNA, 20 bp, Artificial Sequence
  Description of Artificial Sequence: Synthetic oligonucleotide
  Target: ATXN2; (-) strand; PAM type: YTN; PAM sequence: TTT
gcccttagccacttgactct

SEQ ID NO: 65975 - DNA, 20 bp, Artificial Sequence
  Description of Artificial Sequence: Synthetic oligonucleotide
  Target: ATXN2; (-) strand; PAM type: YTN; PAM sequence: CTG
tcaacatttgcccttagcca

SEQ ID NO: 65976 - DNA, 20 bp, Artificial Sequence
  Description of Artificial Sequence: Synthetic oligonucleotide
  Target: ATXN2; (-) strand; PAM type: YTN; PAM sequence: TTG
ccagtgtgcccacataaata

SEQ ID NO: 65977 - DNA, 20 bp, Artificial Sequence
  Description of Artificial Sequence: Synthetic oligonucleotide
  Target: ATXN2; (-) strand; PAM type: YTN; PAM sequence: TTA
aattgccagtgtgcccacat

SEQ ID NO: 65978 - DNA, 20 bp, Artificial Sequence
  Description of Artificial Sequence: Synthetic oligonucleotide
  Target: ATXN2; (-) strand; PAM type: YTN; PAM sequence: CTT
aaattgccagtgtgcccaca

SEQ ID NO: 65979 - DNA, 20 bp, Artificial Sequence
  Description of Artificial Sequence: Synthetic oligonucleotide
  Target: ATXN2; (-) strand; PAM type: YTN; PAM sequence: CTA
catcgtgacttaaattgcca

SEQ ID NO: 65980 - DNA, 20 bp, Artificial Sequence
  Description of Artificial Sequence: Synthetic oligonucleotide
  Target: ATXN2; (-) strand; PAM type: YTN; PAM sequence: TTC
ctacatcgtgacttaaattg

SEQ ID NO: 65981 - DNA, 20 bp, Artificial Sequence
  Description of Artificial Sequence: Synthetic oligonucleotide
  Target: ATXN2; (-) strand; PAM type: YTN; PAM sequence: TTA
agtagtaagttcctacatcg

SEQ ID NO: 65982 - DNA, 20 bp, Artificial Sequence
  Description of Artificial Sequence: Synthetic oligonucleotide
  Target: ATXN2; (-) strand; PAM type: YTN; PAM sequence: TTT
aagtagtaagttcctacatc

SEQ ID NO: 65983 - DNA, 20 bp, Artificial Sequence
  Description of Artificial Sequence: Synthetic oligonucleotide
  Target: ATXN2; (-) strand; PAM type: YTN; PAM sequence: TTG
tgaacaaatgaaagtttaag

SEQ ID NO: 65984 - DNA, 20 bp, Artificial Sequence
  Description of Artificial Sequence: Synthetic oligonucleotide
  Target: ATXN2; (-) strand; PAM type: YTN; PAM sequence: TTT
gtgaacaaatgaaagtttaa

SEQ ID NO: 65985 - DNA, 20 bp, Artificial Sequence
  Description of Artificial Sequence: Synthetic oligonucleotide
  Target: ATXN2; (-) strand; PAM type: YTN; PAM sequence: TTT
tgtgaacaaatgaaagttta

SEQ ID NO: 65986 - DNA, 20 bp, Artificial Sequence
  Description of Artificial Sequence: Synthetic oligonucleotide
  Target: ATXN2; (-) strand; PAM type: YTN; PAM sequence: TTT
ttgtgaacaaatgaaagttt

SEQ ID NO: 65987 - DNA, 20 bp, Artificial Sequence
  Description of Artificial Sequence: Synthetic oligonucleotide
  Target: ATXN2; (-) strand; PAM type: YTN; PAM sequence: CTA
aagatttttgtgaacaaatg

SEQ ID NO: 65988 - DNA, 20 bp, Artificial Sequence
  Description of Artificial Sequence: Synthetic oligonucleotide
  Target: ATXN2; (-) strand; PAM type: YTN; PAM sequence: CTA
ctaaagatttttgtgaacaa

SEQ ID NO: 65989 - DNA, 20 bp, Artificial Sequence
  Description of Artificial Sequence: Synthetic oligonucleotide
  Target: ATXN2; (-) strand; PAM type: YTN; PAM sequence: CTC
tactaaagatttttgtgaac

SEQ ID NO: 65990 - DNA, 20 bp, Artificial Sequence
  Description of Artificial Sequence: Synthetic oligonucleotide
  Target: ATXN2; (-) strand; PAM type: YTN; PAM sequence: TTA
tgtggatcgcctctactaaa

SEQ ID NO: 65991 - DNA, 20 bp, Artificial Sequence
  Description of Artificial Sequence: Synthetic oligonucleotide
  Target: ATXN2; (-) strand; PAM type: YTN; PAM sequence: CTG
ttatgtggatcgcctctact

SEQ ID NO: 65992 - DNA, 20 bp, Artificial Sequence
  Description of Artificial Sequence: Synthetic oligonucleotide
  Target: ATXN2; (-) strand; PAM type: YTN; PAM sequence: TTG
gtctgttatgtggatcgcct

SEQ ID NO: 65993 - DNA, 20 bp, Artificial Sequence
  Description of Artificial Sequence: Synthetic oligonucleotide
  Target: ATXN2; (-) strand; PAM type: YTN; PAM sequence: TTG
gcaatatatatagttggtct

SEQ ID NO: 65994 - DNA, 20 bp, Artificial Sequence
  Description of Artificial Sequence: Synthetic oligonucleotide
  Target: ATXN2; (-) strand; PAM type: YTN; PAM sequence: CTT
ggcaatatatatagttggtc

SEQ ID NO: 65995 - DNA, 20 bp, Artificial Sequence
  Description of Artificial Sequence: Synthetic oligonucleotide
  Target: ATXN2; (-) strand; PAM type: YTN; PAM sequence: CTC
cgaagtccttggcaatatat

SEQ ID NO: 65996 - DNA, 20 bp, Artificial Sequence
  Description of Artificial Sequence: Synthetic oligonucleotide
  Target: ATXN2; (-) strand; PAM type: YTN; PAM sequence: TTA
aactccgaagtccttggcaa

SEQ ID NO: 65997 - DNA, 20 bp, Artificial Sequence
  Description of Artificial Sequence: Synthetic oligonucleotide
  Target: ATXN2; (-) strand; PAM type: YTN; PAM sequence: TTA
tgataattaaactccgaagt

SEQ ID NO: 65998 - DNA, 20 bp, Artificial Sequence
  Description of Artificial Sequence: Synthetic oligonucleotide
  Target: ATXN2; (-) strand; PAM type: YTN; PAM sequence: CTT
atgataattaaactccgaag

SEQ ID NO: 65999 - DNA, 20 bp, Artificial Sequence
  Description of Artificial Sequence: Synthetic oligonucleotide
  Target: ATXN2; (-) strand; PAM type: YTN; PAM sequence: CTC
ttatgataattaaactccga

SEQ ID NO: 66000 - DNA, 20 bp, Artificial Sequence
  Description of Artificial Sequence: Synthetic oligonucleotide
  Target: ATXN2; (-) strand; PAM type: YTN; PAM sequence: CTC
aagaactcttatgataatta

SEQ ID NO: 66001 - DNA, 20 bp, Artificial Sequence
  Description of Artificial Sequence: Synthetic oligonucleotide
  Target: ATXN2; (-) strand; PAM type: YTN; PAM sequence: TTC
actcaagaactcttatgata

SEQ ID NO: 66002 - DNA, 20 bp, Artificial Sequence
  Description of Artificial Sequence: Synthetic oligonucleotide
  Target: ATXN2; (-) strand; PAM type: YTN; PAM sequence: CTT
cactcaagaactcttatgat

SEQ ID NO: 66003 - DNA, 20 bp, Artificial Sequence
  Description of Artificial Sequence: Synthetic oligonucleotide
  Target: ATXN2; (-) strand; PAM type: YTN; PAM sequence: TTG
ccttcactcaagaactctta

SEQ ID NO: 66004 - DNA, 20 bp, Artificial Sequence
  Description of Artificial Sequence: Synthetic oligonucleotide
  Target: ATXN2; (-) strand; PAM type: YTN; PAM sequence: TTT
gccttcactcaagaactctt

SEQ ID NO: 66005 - DNA, 20 bp, Artificial Sequence
  Description of Artificial Sequence: Synthetic oligonucleotide
  Target: ATXN2; (-) strand; PAM type: YTN; PAM sequence: TTT
tgccttcactcaagaactct

SEQ ID NO: 66006 - DNA, 20 bp, Artificial Sequence
  Description of Artificial Sequence: Synthetic oligonucleotide
  Target: ATXN2; (-) strand; PAM type: YTN; PAM sequence: TTT
ttgccttcactcaagaactc

SEQ ID NO: 66007 - DNA, 20 bp, Artificial Sequence
  Description of Artificial Sequence: Synthetic oligonucleotide
  Target: ATXN2; (-) strand; PAM type: YTN; PAM sequence: CTG
atttttgccttcactcaaga

SEQ ID NO: 66008 - DNA, 20 bp, Artificial Sequence
  Description of Artificial Sequence: Synthetic oligonucleotide
  Target: ATXN2; (-) strand; PAM type: YTN; PAM sequence: TTG
taagaaaaagcaacaccaaa

SEQ ID NO: 66009 - DNA, 20 bp, Artificial Sequence
  Description of Artificial Sequence: Synthetic oligonucleotide
  Target: ATXN2; (-) strand; PAM type: YTN; PAM sequence: TTG
acattgtaagaaaaagcaac

SEQ ID NO: 66010 - DNA, 20 bp, Artificial Sequence
  Description of Artificial Sequence: Synthetic oligonucleotide
  Target: ATXN2; (-) strand; PAM type: YTN; PAM sequence: TTT
gacattgtaagaaaaagcaa

SEQ ID NO: 66011 - DNA, 20 bp, Artificial Sequence
  Description of Artificial Sequence: Synthetic oligonucleotide
  Target: ATXN2; (-) strand; PAM type: YTN; PAM sequence: TTG
gaaaaaaaaaaaaaagtgtc

SEQ ID NO: 66012 - DNA, 20 bp, Artificial Sequence
  Description of Artificial Sequence: Synthetic oligonucleotide
  Target: ATXN2; (-) strand; PAM type: YTN; PAM sequence: TTT
ggaaaaaaaaaaaaaagtgt

SEQ ID NO: 66013 - DNA, 20 bp, Artificial Sequence
  Description of Artificial Sequence: Synthetic oligonucleotide
  Target: ATXN2; (-) strand; PAM type: YTN; PAM sequence: CTG
tttggaaaaaaaaaaaaaag

SEQ ID NO: 66014 - DNA, 20 bp, Artificial Sequence
  Description of Artificial Sequence: Synthetic oligonucleotide
  Target: ATXN2; (-) strand; PAM type: YTN; PAM sequence: CTG
ggcaacggagtcagaccctg

SEQ ID NO: 66015 - DNA, 20 bp, Artificial Sequence
  Description of Artificial Sequence: Synthetic oligonucleotide
  Target: ATXN2; (-) strand; PAM type: YTN; PAM sequence: CTC
cagtctgggcaacggagtca

SEQ ID NO: 66016 - DNA, 20 bp, Artificial Sequence
  Description of Artificial Sequence: Synthetic oligonucleotide
  Target: ATXN2; (-) strand; PAM type: YTN; PAM sequence: CTG
cgctccagtctgggcaacgg

SEQ ID NO: 66017 - DNA, 20 bp, Artificial Sequence
  Description of Artificial Sequence: Synthetic oligonucleotide
  Target: ATXN2; (-) strand; PAM type: YTN; PAM sequence: TTG
caccactgcgctccagtctg

SEQ ID NO: 66018 - DNA, 20 bp, Artificial Sequence
  Description of Artificial Sequence: Synthetic oligonucleotide
  Target: ATXN2; (-) strand; PAM type: YTN; PAM sequence: CTT
gcaccactgcgctccagtct

SEQ ID NO: 66019 - DNA, 20 bp, Artificial Sequence
  Description of Artificial Sequence: Synthetic oligonucleotide
  Target: ATXN2; (-) strand; PAM type: YTN; PAM sequence: TTG
cagtgaggtgagcttgcacc

SEQ ID NO: 66020 - DNA, 20 bp, Artificial Sequence
  Description of Artificial Sequence: Synthetic oligonucleotide
  Target: ATXN2; (-) strand; PAM type: YTN; PAM sequence: CTG
ggagatggaggttgcagtga

SEQ ID NO: 66021 - DNA, 20 bp, Artificial Sequence
  Description of Artificial Sequence: Synthetic oligonucleotide
  Target: ATXN2; (-) strand; PAM type: YTN; PAM sequence: TTG
agcctgggagatggaggttg

SEQ ID NO: 66022 - DNA, 20 bp, Artificial Sequence
  Description of Artificial Sequence: Synthetic oligonucleotide
  Target: ATXN2; (-) strand; PAM type: YTN; PAM sequence: CTT
gagcctgggagatggaggtt

SEQ ID NO: 66023 - DNA, 20 bp, Artificial Sequence
  Description of Artificial Sequence: Synthetic oligonucleotide
  Target: ATXN2; (-) strand; PAM type: YTN; PAM sequence: CTG
aggtgggagaatcacttgag

SEQ ID NO: 66024 - DNA, 20 bp, Artificial Sequence
  Description of Artificial Sequence: Synthetic oligonucleotide
  Target: ATXN2; (-) strand; PAM type: YTN; PAM sequence: CTC
aggaggctgaggtgggagaa

SEQ ID NO: 66025 - DNA, 20 bp, Artificial Sequence
  Description of Artificial Sequence: Synthetic oligonucleotide
  Target: ATXN2; (-) strand; PAM type: YTN; PAM sequence: CTA
ctcaggaggctgaggtggga

SEQ ID NO: 66026 - DNA, 20 bp, Artificial Sequence
  Description of Artificial Sequence: Synthetic oligonucleotide
  Target: ATXN2; (-) strand; PAM type: YTN; PAM sequence: CTA
atagtaccagctactcagga

SEQ ID NO: 66027 - DNA, 20 bp, Artificial Sequence
  Description of Artificial Sequence: Synthetic oligonucleotide
  Target: ATXN2; (-) strand; PAM type: YTN; PAM sequence: TTA
gccaggtgtggtggcacatg

SEQ ID NO: 66028 - DNA, 20 bp, Artificial Sequence
  Description of Artificial Sequence: Synthetic oligonucleotide
  Target: ATXN2; (-) strand; PAM type: YTN; PAM sequence: CTA
caaaaaaatacacacattag

SEQ ID NO: 66029 - DNA, 20 bp, Artificial Sequence
  Description of Artificial Sequence: Synthetic oligonucleotide
  Target: ATXN2; (-) strand; PAM type: YTN; PAM sequence: TTC
tacaaaaaaatacacacatt

SEQ ID NO: 66030 - DNA, 20 bp, Artificial Sequence
  Description of Artificial Sequence: Synthetic oligonucleotide
  Target: ATXN2; (-) strand; PAM type: YTN; PAM sequence: TTT
ctacaaaaaaatacacacat

SEQ ID NO: 66031 - DNA, 20 bp, Artificial Sequence
  Description of Artificial Sequence: Synthetic oligonucleotide
  Target: ATXN2; (-) strand; PAM type: YTN; PAM sequence: CTG
tttctacaaaaaaatacaca

SEQ ID NO: 66032 - DNA, 20 bp, Artificial Sequence
  Description of Artificial Sequence: Synthetic oligonucleotide
  Target: ATXN2; (-) strand; PAM type: YTN; PAM sequence: CTG
ggtaacatggtaaaaccctg

SEQ ID NO: 66033 - DNA, 20 bp, Artificial Sequence
  Description of Artificial Sequence: Synthetic oligonucleotide
  Target: ATXN2; (-) strand; PAM type: YTN; PAM sequence: TTA
aagaccaacctgggtaacat

SEQ ID NO: 66034 - DNA, 20 bp, Artificial Sequence
  Description of Artificial Sequence: Synthetic oligonucleotide
  Target: ATXN2; (-) strand; PAM type: YTN; PAM sequence: CTC
aggcattaaagaccaacctg

SEQ ID NO: 66035 - DNA, 20 bp, Artificial Sequence
  Description of Artificial Sequence: Synthetic oligonucleotide
  Target: ATXN2; (-) strand; PAM type: YTN; PAM sequence: TTG
agctcaggcattaaagacca

SEQ ID NO: 66036 - DNA, 20 bp, Artificial Sequence
  Description of Artificial Sequence: Synthetic oligonucleotide
  Target: ATXN2; (-) strand; PAM type: YTN; PAM sequence: CTT
gagctcaggcattaaagacc

SEQ ID NO: 66037 - DNA, 20 bp, Artificial Sequence
  Description of Artificial Sequence: Synthetic oligonucleotide
  Target: ATXN2; (-) strand; PAM type: YTN; PAM sequence: CTG
agacaggtggatagcttgag

SEQ ID NO: 66038 - DNA, 20 bp, Artificial Sequence
  Description of Artificial Sequence: Synthetic oligonucleotide
  Target: ATXN2; (-) strand; PAM type: YTN; PAM sequence: TTG
ggaggctgagacaggtggat

SEQ ID NO: 66039 - DNA, 20 bp, Artificial Sequence
  Description of Artificial Sequence: Synthetic oligonucleotide
  Target: ATXN2; (-) strand; PAM type: YTN; PAM sequence: TTT
gggaggctgagacaggtgga

SEQ ID NO: 66040 - DNA, 20 bp, Artificial Sequence
  Description of Artificial Sequence: Synthetic oligonucleotide
  Target: ATXN2; (-) strand; PAM type: YTN; PAM sequence: CTT
tgggaggctgagacaggtgg

SEQ ID NO: 66041 - DNA, 20 bp, Artificial Sequence
  Description of Artificial Sequence: Synthetic oligonucleotide
  Target: ATXN2; (-) strand; PAM type: YTN; PAM sequence: TTA
gcactttgggaggctgagac

SEQ ID NO: 66042 - DNA, 20 bp, Artificial Sequence
  Description of Artificial Sequence: Synthetic oligonucleotide
  Target: ATXN2; (-) strand; PAM type: YTN; PAM sequence: CTT
agcactttgggaggctgaga

SEQ ID NO: 66043 - DNA, 20 bp, Artificial Sequence
  Description of Artificial Sequence: Synthetic oligonucleotide
  Target: ATXN2; (-) strand; PAM type: YTN; PAM sequence: CTG
aatcttagcactttgggagg

SEQ ID NO: 66044 - DNA, 20 bp, Artificial Sequence
  Description of Artificial Sequence: Synthetic oligonucleotide
  Target: ATXN2; (-) strand; PAM type: YTN; PAM sequence: CTC
atgcctgaatcttagcactt

SEQ ID NO: 66045 - DNA, 20 bp, Artificial Sequence
  Description of Artificial Sequence: Synthetic oligonucleotide
  Target: ATXN2; (-) strand; PAM type: YTN; PAM sequence: CTG
gacaggtacagtggctcatg

SEQ ID NO: 66046 - DNA, 20 bp, Artificial Sequence
  Description of Artificial Sequence: Synthetic oligonucleotide
  Target: ATXN2; (-) strand; PAM type: YTN; PAM sequence: TTA
gaacagtgtctggacaggta

SEQ ID NO: 66047 - DNA, 20 bp, Artificial Sequence
  Description of Artificial Sequence: Synthetic oligonucleotide
  Target: ATXN2; (-) strand; PAM type: YTN; PAM sequence: TTT
agaacagtgtctggacaggt

SEQ ID NO: 66048 - DNA, 20 bp, Artificial Sequence
  Description of Artificial Sequence: Synthetic oligonucleotide
  Target: ATXN2; (-) strand; PAM type: YTN; PAM sequence: CTA
taaatagtttagaacagtgt

SEQ ID NO: 66049 - DNA, 20 bp, Artificial Sequence
  Description of Artificial Sequence: Synthetic oligonucleotide
  Target: ATXN2; (-) strand; PAM type: YTN; PAM sequence: CTA
aatgaataagtctataaata

SEQ ID NO: 66050 - DNA, 20 bp, Artificial Sequence
  Description of Artificial Sequence: Synthetic oligonucleotide
  Target: ATXN2; (-) strand; PAM type: YTN; PAM sequence: TTG
tgaagactaaatgaataagt

SEQ ID NO: 66051 - DNA, 20 bp, Artificial Sequence
  Description of Artificial Sequence: Synthetic oligonucleotide
  Target: ATXN2; (-) strand; PAM type: YTN; PAM sequence: CTG
ttgtgaagactaaatgaata

SEQ ID NO: 66052 - DNA, 20 bp, Artificial Sequence
  Description of Artificial Sequence: Synthetic oligonucleotide
  Target: ATXN2; (-) strand; PAM type: YTN; PAM sequence: CTA
catcaaatagggctgttgtg

SEQ ID NO: 66053 - DNA, 20 bp, Artificial Sequence
  Description of Artificial Sequence: Synthetic oligonucleotide
  Target: ATXN2; (-) strand; PAM type: YTN; PAM sequence: TTG
taagatggcaataatagtat

SEQ ID NO: 66054 - DNA, 20 bp, Artificial Sequence
  Description of Artificial Sequence: Synthetic oligonucleotide
  Target: ATXN2; (-) strand; PAM type: YTN; PAM sequence: TTT
gtaagatggcaataatagta

SEQ ID NO: 66055 - DNA, 20 bp, Artificial Sequence
  Description of Artificial Sequence: Synthetic oligonucleotide
  Target: ATXN2; (-) strand; PAM type: YTN; PAM sequence: CTA
tttgtaagatggcaataata

SEQ ID NO: 66056 - DNA, 20 bp, Artificial Sequence
  Description of Artificial Sequence: Synthetic oligonucleotide
  Target: ATXN2; (-) strand; PAM type: YTN; PAM sequence: TTG
ctatttgtaagatggcaata

SEQ ID NO: 66057 - DNA, 20 bp, Artificial Sequence
  Description of Artificial Sequence: Synthetic oligonucleotide
  Target: ATXN2; (-) strand; PAM type: YTN; PAM sequence: CTT
gctatttgtaagatggcaat

SEQ ID NO: 66058 - DNA, 20 bp, Artificial Sequence
  Description of Artificial Sequence: Synthetic oligonucleotide
  Target: ATXN2; (-) strand; PAM type: YTN; PAM sequence: CTA
gtggacttgctatttgtaag

SEQ ID NO: 66059 - DNA, 20 bp, Artificial Sequence
  Description of Artificial Sequence: Synthetic oligonucleotide
  Target: ATXN2; (-) strand; PAM type: YTN; PAM sequence: TTC
agataccaactagtggactt

SEQ ID NO: 66060 - DNA, 20 bp, Artificial Sequence
  Description of Artificial Sequence: Synthetic oligonucleotide
  Target: ATXN2; (-) strand; PAM type: YTN; PAM sequence: CTA
tattcagataccaactagtg

SEQ ID NO: 66061 - DNA, 20 bp, Artificial Sequence
  Description of Artificial Sequence: Synthetic oligonucleotide
  Target: ATXN2; (-) strand; PAM type: YTN; PAM sequence: TTC
caatacagcagagtgctata

SEQ ID NO: 66062 - DNA, 20 bp, Artificial Sequence
  Description of Artificial Sequence: Synthetic oligonucleotide
  Target: ATXN2; (-) strand; PAM type: YTN; PAM sequence: TTA
gaacaatatattccaataca

SEQ ID NO: 66063 - DNA, 20 bp, Artificial Sequence
  Description of Artificial Sequence: Synthetic oligonucleotide
  Target: ATXN2; (-) strand; PAM type: YTN; PAM sequence: TTC
catatatagcaatatagcat

SEQ ID NO: 66064 - DNA, 20 bp, Artificial Sequence
  Description of Artificial Sequence: Synthetic oligonucleotide
  Target: ATXN2; (-) strand; PAM type: YTN; PAM sequence: CTA
tattccatatatagcaatat

SEQ ID NO: 66065 - DNA, 20 bp, Artificial Sequence
  Description of Artificial Sequence: Synthetic oligonucleotide
  Target: ATXN2; (-) strand; PAM type: YTN; PAM sequence: TTA
gtatagtgcagagaggaaat

SEQ ID NO: 66066 - DNA, 20 bp, Artificial Sequence
  Description of Artificial Sequence: Synthetic oligonucleotide
  Target: ATXN2; (-) strand; PAM type: YTN; PAM sequence: TTT
agtatagtgcagagaggaaa

SEQ ID NO: 66067 - DNA, 20 bp, Artificial Sequence
  Description of Artificial Sequence: Synthetic oligonucleotide
  Target: ATXN2; (-) strand; PAM type: YTN; PAM sequence: TTA
gatttagtatagtgcagaga

SEQ ID NO: 66068 - DNA, 20 bp, Artificial Sequence
  Description of Artificial Sequence: Synthetic oligonucleotide
  Target: ATXN2; (-) strand; PAM type: YTN; PAM sequence: TTC
cattagatttagtatagtgc

SEQ ID NO: 66069 - DNA, 20 bp, Artificial Sequence
  Description of Artificial Sequence: Synthetic oligonucleotide
  Target: ATXN2; (-) strand; PAM type: YTN; PAM sequence: TTT
ccattagatttagtatagtg

SEQ ID NO: 66070 - DNA, 20 bp, Artificial Sequence
  Description of Artificial Sequence: Synthetic oligonucleotide
  Target: ATXN2; (-) strand; PAM type: YTN; PAM sequence: TTT
tccattagatttagtatagt

SEQ ID NO: 66071 - DNA, 20 bp, Artificial Sequence
  Description of Artificial Sequence: Synthetic oligonucleotide
  Target: ATXN2; (-) strand; PAM type: YTN; PAM sequence: TTA
agttttccattagatttagt

SEQ ID NO: 66072 - DNA, 20 bp, Artificial Sequence
  Description of Artificial Sequence: Synthetic oligonucleotide
  Target: ATXN2; (-) strand; PAM type: YTN; PAM sequence: CTT
aagttttccattagatttag

SEQ ID NO: 66073 - DNA, 20 bp, Artificial Sequence
  Description of Artificial Sequence: Synthetic oligonucleotide
  Target: ATXN2; (-) strand; PAM type: YTN; PAM sequence: CTC
caaaaaaaagaaaaaaaaag

SEQ ID NO: 66074 - DNA, 20 bp, Artificial Sequence
  Description of Artificial Sequence: Synthetic oligonucleotide
  Target: ATXN2; (-) strand; PAM type: YTN; PAM sequence: CTC
cgtctccaaaaaaaagaaaa

SEQ ID NO: 66075 - DNA, 20 bp, Artificial Sequence
  Description of Artificial Sequence: Synthetic oligonucleotide
  Target: ATXN2; (-) strand; PAM type: YTN; PAM sequence: CTG
ggcaataagagcgaaactcc

SEQ ID NO: 66076 - DNA, 20 bp, Artificial Sequence
  Description of Artificial Sequence: Synthetic oligonucleotide
  Target: ATXN2; (-) strand; PAM type: YTN; PAM sequence: CTC
cagcctgggcaataagagcg

SEQ ID NO: 66077 - DNA, 20 bp, Artificial Sequence
  Description of Artificial Sequence: Synthetic oligonucleotide
  Target: ATXN2; (-) strand; PAM type: YTN; PAM sequence: CTG
cactccagcctgggcaataa

SEQ ID NO: 66078 - DNA, 20 bp, Artificial Sequence
  Description of Artificial Sequence: Synthetic oligonucleotide
  Target: ATXN2; (-) strand; PAM type: YTN; PAM sequence: TTA
agatcgtgccgctgcactcc

SEQ ID NO: 66079 - DNA, 20 bp, Artificial Sequence
  Description of Artificial Sequence: Synthetic oligonucleotide
  Target: ATXN2; (-) strand; PAM type: YTN; PAM sequence: TTG
ccatgagttaagatcgtgcc

SEQ ID NO: 66080 - DNA, 20 bp, Artificial Sequence
  Description of Artificial Sequence: Synthetic oligonucleotide
  Target: ATXN2; (-) strand; PAM type: YTN; PAM sequence: TTG
aacccgggaggcggtggttg

SEQ ID NO: 66081 - DNA, 20 bp, Artificial Sequence
  Description of Artificial Sequence: Synthetic oligonucleotide
  Target: ATXN2; (-) strand; PAM type: YTN; PAM sequence: CTT
gaacccgggaggcggtggtt

SEQ ID NO: 66082 - DNA, 20 bp, Artificial Sequence
  Description of Artificial Sequence: Synthetic oligonucleotide
  Target: ATXN2; (-) strand; PAM type: YTN; PAM sequence: CTG
aggcaggagaaatgcttgaa

SEQ ID NO: 66083 - DNA, 20 bp, Artificial Sequence
  Description of Artificial Sequence: Synthetic oligonucleotide
  Target: ATXN2; (-) strand; PAM type: YTN; PAM sequence: CTC
gcaagactgaggcaggagaa

SEQ ID NO: 66084 - DNA, 20 bp, Artificial Sequence
  Description of Artificial Sequence: Synthetic oligonucleotide
  Target: ATXN2; (-) strand; PAM type: YTN; PAM sequence: CTA
ctcgcaagactgaggcagga

SEQ ID NO: 66085 - DNA, 20 bp, Artificial Sequence
  Description of Artificial Sequence: Synthetic oligonucleotide
  Target: ATXN2; (-) strand; PAM type: YTN; PAM sequence: CTG
taatcccagctactcgcaag

SEQ ID NO: 66086 - DNA, 20 bp, Artificial Sequence
  Description of Artificial Sequence: Synthetic oligonucleotide
  Target: ATXN2; (-) strand; PAM type: YTN; PAM sequence: TTA
gccaggcgtggtggcaggtg

SEQ ID NO: 66087 - DNA, 20 bp, Artificial Sequence
  Description of Artificial Sequence: Synthetic oligonucleotide
  Target: ATXN2; (-) strand; PAM type: YTN; PAM sequence: CTA
aaaatacaaaaaattagcca

SEQ ID NO: 66088 - DNA, 20 bp, Artificial Sequence
  Description of Artificial Sequence: Synthetic oligonucleotide
  Target: ATXN2; (-) strand; PAM type: YTN; PAM sequence: CTA
ctaaaaatacaaaaaattag

SEQ ID NO: 66089 - DNA, 20 bp, Artificial Sequence
  Description of Artificial Sequence: Synthetic oligonucleotide
  Target: ATXN2; (-) strand; PAM type: YTN; PAM sequence: CTC
tactaaaaatacaaaaaatt

SEQ ID NO: 66090 - DNA, 20 bp, Artificial Sequence
  Description of Artificial Sequence: Synthetic oligonucleotide
  Target: ATXN2; (-) strand; PAM type: YTN; PAM sequence: CTG
gccgacatgatgaaacccca

SEQ ID NO: 66091 - DNA, 20 bp, Artificial Sequence
  Description of Artificial Sequence: Synthetic oligonucleotide
  Target: ATXN2; (-) strand; PAM type: YTN; PAM sequence: TTC
cagaccagcctggccgacat

SEQ ID NO: 66092 - DNA, 20 bp, Artificial Sequence
  Description of Artificial Sequence: Synthetic oligonucleotide
  Target: ATXN2; (-) strand; PAM type: YTN; PAM sequence: CTG
aggtcaggagttccagacca

SEQ ID NO: 66093 - DNA, 20 bp, Artificial Sequence
  Description of Artificial Sequence: Synthetic oligonucleotide
  Target: ATXN2; (-) strand; PAM type: YTN; PAM sequence: CTG
aggtggatggatcagctgag

SEQ ID NO: 66094 - DNA, 20 bp, Artificial Sequence
  Description of Artificial Sequence: Synthetic oligonucleotide
  Target: ATXN2; (-) strand; PAM type: YTN; PAM sequence: TTG
ggaggctgaggtggatggat

SEQ ID NO: 66095 - DNA, 20 bp, Artificial Sequence
  Description of Artificial Sequence: Synthetic oligonucleotide
  Target: ATXN2; (-) strand; PAM type: YTN; PAM sequence: TTT
gggaggctgaggtggatgga

SEQ ID NO: 66096 - DNA, 20 bp, Artificial Sequence
  Description of Artificial Sequence: Synthetic oligonucleotide
  Target: ATXN2; (-) strand; PAM type: YTN; PAM sequence: CTT
tgggaggctgaggtggatgg

SEQ ID NO: 66097 - DNA, 20 bp, Artificial Sequence
  Description of Artificial Sequence: Synthetic oligonucleotide
  Target: ATXN2; (-) strand; PAM type: YTN; PAM sequence: CTG
taatcccagcactttgggag

SEQ ID NO: 66098 - DNA, 20 bp, Artificial Sequence
  Description of Artificial Sequence: Synthetic oligonucleotide
  Target: ATXN2; (-) strand; PAM type: YTN; PAM sequence: CTC
ctgtaatcccagcactttgg

SEQ ID NO: 66099 - DNA, 20 bp, Artificial Sequence
  Description of Artificial Sequence: Synthetic oligonucleotide
  Target: ATXN2; (-) strand; PAM type: YTN; PAM sequence: CTC
actcctgtaatcccagcact

SEQ ID NO: 66100 - DNA, 20 bp, Artificial Sequence
  Description of Artificial Sequence: Synthetic oligonucleotide
  Target: ATXN2; (-) strand; PAM type: YTN; PAM sequence: CTG
ggcatgatggctcactcctg

SEQ ID NO: 66101 - DNA, 20 bp, Artificial Sequence
  Description of Artificial Sequence: Synthetic oligonucleotide
  Target: ATXN2; (-) strand; PAM type: YTN; PAM sequence: CTG
ctgggcatgatggctcactc

SEQ ID NO: 66102 - DNA, 20 bp, Artificial Sequence
  Description of Artificial Sequence: Synthetic oligonucleotide
  Target: ATXN2; (-) strand; PAM type: YTN; PAM sequence: TTC
tgctgggcatgatggctcac

SEQ ID NO: 66103 - DNA, 20 bp, Artificial Sequence
  Description of Artificial Sequence: Synthetic oligonucleotide
  Target: ATXN2; (-) strand; PAM type: YTN; PAM sequence: TTT
ctgctgggcatgatggctca

SEQ ID NO: 66104 - DNA, 20 bp, Artificial Sequence
  Description of Artificial Sequence: Synthetic oligonucleotide
  Target: ATXN2; (-) strand; PAM type: YTN; PAM sequence: TTT
tctgctgggcatgatggctc

SEQ ID NO: 66105 - DNA, 20 bp, Artificial Sequence
  Description of Artificial Sequence: Synthetic oligonucleotide
  Target: ATXN2; (-) strand; PAM type: YTN; PAM sequence: TTC
agttttctgctgggcatgat

SEQ ID NO: 66106 - DNA, 20 bp, Artificial Sequence
  Description of Artificial Sequence: Synthetic oligonucleotide
  Target: ATXN2; (-) strand; PAM type: YTN; PAM sequence: TTT
cagttttctgctgggcatga

SEQ ID NO: 66107 - DNA, 20 bp, Artificial Sequence
  Description of Artificial Sequence: Synthetic oligonucleotide
  Target: ATXN2; (-) strand; PAM type: YTN; PAM sequence: TTC
atgtggagtcacataagaat

SEQ ID NO: 66108 - DNA, 20 bp, Artificial Sequence
  Description of Artificial Sequence: Synthetic oligonucleotide
  Target: ATXN2; (-) strand; PAM type: YTN; PAM sequence: TTT
catgtggagtcacataagaa

SEQ ID NO: 66109 - DNA, 20 bp, Artificial Sequence
  Description of Artificial Sequence: Synthetic oligonucleotide
  Target: ATXN2; (-) strand; PAM type: YTN; PAM sequence: TTG
taccatttcatgtggagtca

SEQ ID NO: 66110 - DNA, 20 bp, Artificial Sequence
  Description of Artificial Sequence: Synthetic oligonucleotide
  Target: ATXN2; (-) strand; PAM type: YTN; PAM sequence: TTG
tacagagtatgtacaatggt

SEQ ID NO: 66111 - DNA, 20 bp, Artificial Sequence
  Description of Artificial Sequence: Synthetic oligonucleotide
  Target: ATXN2; (-) strand; PAM type: YTN; PAM sequence: CTA
gcaaaatatagatgacccag

SEQ ID NO: 66112 - DNA, 20 bp, Artificial Sequence
  Description of Artificial Sequence: Synthetic oligonucleotide
  Target: ATXN2; (-) strand; PAM type: YTN; PAM sequence: TTA
ctagcaaaatatagatgacc

SEQ ID NO: 66113 - DNA, 20 bp, Artificial Sequence
  Description of Artificial Sequence: Synthetic oligonucleotide
  Target: ATXN2; (-) strand; PAM type: YTN; PAM sequence: CTT
actagcaaaatatagatgac

SEQ ID NO: 66114 - DNA, 20 bp, Artificial Sequence
  Description of Artificial Sequence: Synthetic oligonucleotide
  Target: ATXN2; (-) strand; PAM type: YTN; PAM sequence: TTC
ttactagcaaaatatagatg

SEQ ID NO: 66115 - DNA, 20 bp, Artificial Sequence
  Description of Artificial Sequence: Synthetic oligonucleotide
  Target: ATXN2; (-) strand; PAM type: YTN; PAM sequence: TTC
attcttactagcaaaatata

SEQ ID NO: 66116 - DNA, 20 bp, Artificial Sequence
  Description of Artificial Sequence: Synthetic oligonucleotide
  Target: ATXN2; (-) strand; PAM type: YTN; PAM sequence: TTC
aatacatgttcattcttact

SEQ ID NO: 66117 - DNA, 20 bp, Artificial Sequence
  Description of Artificial Sequence: Synthetic oligonucleotide
  Target: ATXN2; (-) strand; PAM type: YTN; PAM sequence: CTA
gcacatggtatgtattcaat

SEQ ID NO: 66118 - DNA, 20 bp, Artificial Sequence
  Description of Artificial Sequence: Synthetic oligonucleotide
  Target: ATXN2; (-) strand; PAM type: YTN; PAM sequence: TTA
gcatagtgcctagcacatgg

SEQ ID NO: 66119 - DNA, 20 bp, Artificial Sequence
  Description of Artificial Sequence: Synthetic oligonucleotide
  Target: ATXN2; (-) strand; PAM type: YTN; PAM sequence: TTT
agcatagtgcctagcacatg

SEQ ID NO: 66120 - DNA, 20 bp, Artificial Sequence
  Description of Artificial Sequence: Synthetic oligonucleotide
  Target: ATXN2; (-) strand; PAM type: YTN; PAM sequence: CTA
taaagtgtttagcatagtgc

SEQ ID NO: 66121 - DNA, 20 bp, Artificial Sequence
  Description of Artificial Sequence: Synthetic oligonucleotide
  Target: ATXN2; (-) strand; PAM type: YTN; PAM sequence: TTG
cctataaagtgtttagcata

SEQ ID NO: 66122 - DNA, 20 bp, Artificial Sequence
  Description of Artificial Sequence: Synthetic oligonucleotide
  Target: ATXN2; (-) strand; PAM type: YTN; PAM sequence: CTC
gatgagatattgcctataaa

SEQ ID NO: 66123 - DNA, 20 bp, Artificial Sequence
  Description of Artificial Sequence: Synthetic oligonucleotide
  Target: ATXN2; (-) strand; PAM type: YTN; PAM sequence: CTG
tgagagctcgatgagatatt

SEQ ID NO: 66124 - DNA, 20 bp, Artificial Sequence
  Description of Artificial Sequence: Synthetic oligonucleotide
  Target: ATXN2; (-) strand; PAM type: YTN; PAM sequence: TTC
ctgtgagagctcgatgagat

SEQ ID NO: 66125 - DNA, 20 bp, Artificial Sequence
  Description of Artificial Sequence: Synthetic oligonucleotide
  Target: ATXN2; (-) strand; PAM type: YTN; PAM sequence: TTC
atagtgttcctgtgagagct

SEQ ID NO: 66126 - DNA, 20 bp, Artificial Sequence
  Description of Artificial Sequence: Synthetic oligonucleotide
  Target: ATXN2; (-) strand; PAM type: YTN; PAM sequence: CTT
catagtgttcctgtgagagc

SEQ ID NO: 66127 - DNA, 20 bp, Artificial Sequence
  Description of Artificial Sequence: Synthetic oligonucleotide
  Target: ATXN2; (-) strand; PAM type: YTN; PAM sequence: CTG
cttcatagtgttcctgtgag

SEQ ID NO: 66128 - DNA, 20 bp, Artificial Sequence
  Description of Artificial Sequence: Synthetic oligonucleotide
  Target: ATXN2; (-) strand; PAM type: YTN; PAM sequence: TTA
gaacctgcttcatagtgttc

SEQ ID NO: 66129 - DNA, 20 bp, Artificial Sequence
  Description of Artificial Sequence: Synthetic oligonucleotide
  Target: ATXN2; (-) strand; PAM type: YTN; PAM sequence: TTT
agaacctgcttcatagtgtt

SEQ ID NO: 66130 - DNA, 20 bp, Artificial Sequence
  Description of Artificial Sequence: Synthetic oligonucleotide
  Target: ATXN2; (-) strand; PAM type: YTN; PAM sequence: TTT
tagaacctgcttcatagtgt

SEQ ID NO: 66131 - DNA, 20 bp, Artificial Sequence
  Description of Artificial Sequence: Synthetic oligonucleotide
  Target: ATXN2; (-) strand; PAM type: YTN; PAM sequence: TTA
attttagaacctgcttcata

SEQ ID NO: 66132 - DNA, 20 bp, Artificial Sequence
  Description of Artificial Sequence: Synthetic oligonucleotide
  Target: ATXN2; (-) strand; PAM type: YTN; PAM sequence: TTC
ccccaagccaaaatgggtta

SEQ ID NO: 66133 - DNA, 20 bp, Artificial Sequence
  Description of Artificial Sequence: Synthetic oligonucleotide
  Target: ATXN2; (-) strand; PAM type: YTN; PAM sequence: CTT
cccccaagccaaaatgggtt

SEQ ID NO: 66134 - DNA, 20 bp, Artificial Sequence
  Description of Artificial Sequence: Synthetic oligonucleotide
  Target: ATXN2; (-) strand; PAM type: YTN; PAM sequence: CTA
cttcccccaagccaaaatgg

SEQ ID NO: 66135 - DNA, 20 bp, Artificial Sequence
  Description of Artificial Sequence: Synthetic oligonucleotide
  Target: ATXN2; (-) strand; PAM type: YTN; PAM sequence: CTA
tctacttcccccaagccaaa

SEQ ID NO: 66136 - DNA, 20 bp, Artificial Sequence
  Description of Artificial Sequence: Synthetic oligonucleotide
  Target: ATXN2; (-) strand; PAM type: YTN; PAM sequence: TTG
tggcatgctatctacttccc

SEQ ID NO: 66137 - DNA, 20 bp, Artificial Sequence
  Description of Artificial Sequence: Synthetic oligonucleotide
  Target: ATXN2; (-) strand; PAM type: YTN; PAM sequence: CTA
tacatcatgtgcgtaacatt

SEQ ID NO: 66138 - DNA, 20 bp, Artificial Sequence
  Description of Artificial Sequence: Synthetic oligonucleotide
  Target: ATXN2; (-) strand; PAM type: YTN; PAM sequence: CTC
tatacatcatgtgcgtaaca

SEQ ID NO: 66139 - DNA, 20 bp, Artificial Sequence
  Description of Artificial Sequence: Synthetic oligonucleotide
  Target: ATXN2; (-) strand; PAM type: YTN; PAM sequence: TTG
gcctctatacatcatgtgcg

SEQ ID NO: 66140 - DNA, 20 bp, Artificial Sequence
  Description of Artificial Sequence: Synthetic oligonucleotide
  Target: ATXN2; (-) strand; PAM type: YTN; PAM sequence: TTG
aatgttggcctctatacatc

SEQ ID NO: 66141 - DNA, 20 bp, Artificial Sequence
  Description of Artificial Sequence: Synthetic oligonucleotide
  Target: ATXN2; (-) strand; PAM type: YTN; PAM sequence: TTT
gaatgttggcctctatacat

SEQ ID NO: 66142 - DNA, 20 bp, Artificial Sequence
  Description of Artificial Sequence: Synthetic oligonucleotide
  Target: ATXN2; (-) strand; PAM type: YTN; PAM sequence: CTA
ggtttgaatgttggcctcta

SEQ ID NO: 66143 - DNA, 20 bp, Artificial Sequence
  Description of Artificial Sequence: Synthetic oligonucleotide
  Target: ATXN2; (-) strand; PAM type: YTN; PAM sequence: TTA
gaggtaaatggacctaggtt

SEQ ID NO: 66144 - DNA, 20 bp, Artificial Sequence
  Description of Artificial Sequence: Synthetic oligonucleotide
  Target: ATXN2; (-) strand; PAM type: YTN; PAM sequence: TTT
agaggtaaatggacctaggt

SEQ ID NO: 66145 - DNA, 20 bp, Artificial Sequence
  Description of Artificial Sequence: Synthetic oligonucleotide
  Target: ATXN2; (-) strand; PAM type: YTN; PAM sequence: TTT
tagaggtaaatggacctagg

SEQ ID NO: 66146 - DNA, 20 bp, Artificial Sequence
  Description of Artificial Sequence: Synthetic oligonucleotide
  Target: ATXN2; (-) strand; PAM type: YTN; PAM sequence: TTA
ataatgtgggttttagaggt

SEQ ID NO: 66147 - DNA, 20 bp, Artificial Sequence
  Description of Artificial Sequence: Synthetic oligonucleotide
  Target: ATXN2; (-) strand; PAM type: YTN; PAM sequence: TTG
ggttaataatgtgggtttta

SEQ ID NO: 66148 - DNA, 20 bp, Artificial Sequence
  Description of Artificial Sequence: Synthetic oligonucleotide
  Target: ATXN2; (-) strand; PAM type: YTN; PAM sequence: TTT
gggttaataatgtgggtttt

SEQ ID NO: 66149 - DNA, 20 bp, Artificial Sequence
  Description of Artificial Sequence: Synthetic oligonucleotide
  Target: ATXN2; (-) strand; PAM type: YTN; PAM sequence: TTT
tgggttaataatgtgggttt

SEQ ID NO: 66150 - DNA, 20 bp, Artificial Sequence
  Description of Artificial Sequence: Synthetic oligonucleotide
  Target: ATXN2; (-) strand; PAM type: YTN; PAM sequence: CTG
ttttgggttaataatgtggg

SEQ ID NO: 66151 - DNA, 20 bp, Artificial Sequence
  Description of Artificial Sequence: Synthetic oligonucleotide
  Target: ATXN2; (-) strand; PAM type: YTN; PAM sequence: TTG
atctgttttgggttaataat

SEQ ID NO: 66152 - DNA, 20 bp, Artificial Sequence
  Description of Artificial Sequence: Synthetic oligonucleotide
  Target: ATXN2; (-) strand; PAM type: YTN; PAM sequence: TTT
gatctgttttgggttaataa

SEQ ID NO: 66153 - DNA, 20 bp, Artificial Sequence
  Description of Artificial Sequence: Synthetic oligonucleotide
  Target: ATXN2; (-) strand; PAM type: YTN; PAM sequence: CTA
gtaatttgatctgttttggg

SEQ ID NO: 66154 - DNA, 20 bp, Artificial Sequence
  Description of Artificial Sequence: Synthetic oligonucleotide
  Target: ATXN2; (-) strand; PAM type: YTN; PAM sequence: TTG
ctagtaatttgatctgtttt

SEQ ID NO: 66155 - DNA, 20 bp, Artificial Sequence
  Description of Artificial Sequence: Synthetic oligonucleotide
  Target: ATXN2; (-) strand; PAM type: YTN; PAM sequence: TTG
tgtaagaattgctagtaatt

SEQ ID NO: 66156 - DNA, 20 bp, Artificial Sequence
  Description of Artificial Sequence: Synthetic oligonucleotide
  Target: ATXN2; (-) strand; PAM type: YTN; PAM sequence: TTT
gtgtaagaattgctagtaat

SEQ ID NO: 66157 - DNA, 20 bp, Artificial Sequence
  Description of Artificial Sequence: Synthetic oligonucleotide
  Target: ATXN2; (-) strand; PAM type: YTN; PAM sequence: TTA
tttgtgtaagaattgctagt

SEQ ID NO: 66158 - DNA, 20 bp, Artificial Sequence
  Description of Artificial Sequence: Synthetic oligonucleotide
  Target: ATXN2; (-) strand; PAM type: YTN; PAM sequence: TTT
atttgtgtaagaattgctag

SEQ ID NO: 66159 - DNA, 20 bp, Artificial Sequence
  Description of Artificial Sequence: Synthetic oligonucleotide
  Target: ATXN2; (-) strand; PAM type: YTN; PAM sequence: CTT
tatttgtgtaagaattgcta

SEQ ID NO: 66160 - DNA, 20 bp, Artificial Sequence
  Description of Artificial Sequence: Synthetic oligonucleotide
  Target: ATXN2; (-) strand; PAM type: YTN; PAM sequence: CTG
atagctttatttgtgtaaga

SEQ ID NO: 66161 - DNA, 20 bp, Artificial Sequence
  Description of Artificial Sequence: Synthetic oligonucleotide
  Target: ATXN2; (-) strand; PAM type: YTN; PAM sequence: TTG
agccatatgcagagtgctga

SEQ ID NO: 66162 - DNA, 20 bp, Artificial Sequence
  Description of Artificial Sequence: Synthetic oligonucleotide
  Target: ATXN2; (-) strand; PAM type: YTN; PAM sequence: TTT
gagccatatgcagagtgctg

SEQ ID NO: 66163 - DNA, 20 bp, Artificial Sequence
  Description of Artificial Sequence: Synthetic oligonucleotide
  Target: ATXN2; (-) strand; PAM type: YTN; PAM sequence: TTT
tgagccatatgcagagtgct

SEQ ID NO: 66164 - DNA, 20 bp, Artificial Sequence
  Description of Artificial Sequence: Synthetic oligonucleotide
  Target: ATXN2; (-) strand; PAM type: YTN; PAM sequence: CTT
ttgagccatatgcagagtgc

SEQ ID NO: 66165 - DNA, 20 bp, Artificial Sequence
  Description of Artificial Sequence: Synthetic oligonucleotide
  Target: ATXN2; (-) strand; PAM type: YTN; PAM sequence: TTC
ccttttgagccatatgcaga

SEQ ID NO: 66166 - DNA, 20 bp, Artificial Sequence
  Description of Artificial Sequence: Synthetic oligonucleotide
  Target: ATXN2; (-) strand; PAM type: YTN; PAM sequence: CTT
cccttttgagccatatgcag

SEQ ID NO: 66167 - DNA, 20 bp, Artificial Sequence
  Description of Artificial Sequence: Synthetic oligonucleotide
  Target: ATXN2; (-) strand; PAM type: YTN; PAM sequence: TTC
cttcccttttgagccatatg

SEQ ID NO: 66168 - DNA, 20 bp, Artificial Sequence
  Description of Artificial Sequence: Synthetic oligonucleotide
  Target: ATXN2; (-) strand; PAM type: YTN; PAM sequence: TTG
ttccttcccttttgagccat

SEQ ID NO: 66169 - DNA, 20 bp, Artificial Sequence
  Description of Artificial Sequence: Synthetic oligonucleotide
  Target: ATXN2; (-) strand; PAM type: YTN; PAM sequence: TTG
ttgttccttcccttttgagc

SEQ ID NO: 66170 - DNA, 20 bp, Artificial Sequence
  Description of Artificial Sequence: Synthetic oligonucleotide
  Target: ATXN2; (-) strand; PAM type: YTN; PAM sequence: TTT
gttgttccttcccttttgag

SEQ ID NO: 66171 - DNA, 20 bp, Artificial Sequence
  Description of Artificial Sequence: Synthetic oligonucleotide
  Target: ATXN2; (-) strand; PAM type: YTN; PAM sequence: TTG
tgtgtttgttgttccttccc

SEQ ID NO: 66172 - DNA, 20 bp, Artificial Sequence
  Description of Artificial Sequence: Synthetic oligonucleotide
  Target: ATXN2; (-) strand; PAM type: YTN; PAM sequence: CTT
gtgtgtttgttgttccttcc

SEQ ID NO: 66173 - DNA, 20 bp, Artificial Sequence
  Description of Artificial Sequence: Synthetic oligonucleotide
  Target: ATXN2; (-) strand; PAM type: YTN; PAM sequence: TTA
ggcagaaatagaaatacctt

SEQ ID NO: 66174 - DNA, 20 bp, Artificial Sequence
  Description of Artificial Sequence: Synthetic oligonucleotide
  Target: ATXN2; (-) strand; PAM type: YTN; PAM sequence: TTT
aggcagaaatagaaatacct

SEQ ID NO: 66175 - DNA, 20 bp, Artificial Sequence
  Description of Artificial Sequence: Synthetic oligonucleotide
  Target: ATXN2; (-) strand; PAM type: YTN; PAM sequence: TTC
atttaggcagaaatagaaat

SEQ ID NO: 66176 - DNA, 20 bp, Artificial Sequence
  Description of Artificial Sequence: Synthetic oligonucleotide
  Target: ATXN2; (-) strand; PAM type: YTN; PAM sequence: CTT
catttaggcagaaatagaaa

SEQ ID NO: 66177 - DNA, 20 bp, Artificial Sequence
  Description of Artificial Sequence: Synthetic oligonucleotide
  Target: ATXN2; (-) strand; PAM type: YTN; PAM sequence: CTG
tagtccttcatttaggcaga

SEQ ID NO: 66178 - DNA, 20 bp, Artificial Sequence
  Description of Artificial Sequence: Synthetic oligonucleotide
  Target: ATXN2; (-) strand; PAM type: YTN; PAM sequence: TTC
acaaatatctgtagtccttc

SEQ ID NO: 66179 - DNA, 20 bp, Artificial Sequence
  Description of Artificial Sequence: Synthetic oligonucleotide
  Target: ATXN2; (-) strand; PAM type: YTN; PAM sequence: TTG
ttcacaaatatctgtagtcc

SEQ ID NO: 66180 - DNA, 20 bp, Artificial Sequence
  Description of Artificial Sequence: Synthetic oligonucleotide
  Target: ATXN2; (-) strand; PAM type: YTN; PAM sequence: TTT
gttcacaaatatctgtagtc

SEQ ID NO: 66181 - DNA, 20 bp, Artificial Sequence
  Description of Artificial Sequence: Synthetic oligonucleotide
  Target: ATXN2; (-) strand; PAM type: YTN; PAM sequence: CTG
catttgttcacaaatatctg

SEQ ID NO: 66182 - DNA, 20 bp, Artificial Sequence
  Description of Artificial Sequence: Synthetic oligonucleotide
  Target: ATXN2; (-) strand; PAM type: YTN; PAM sequence: CTC
atagccccaaactgcatttg

SEQ ID NO: 66183 - DNA, 20 bp, Artificial Sequence
  Description of Artificial Sequence: Synthetic oligonucleotide
  Target: ATXN2; (-) strand; PAM type: YTN; PAM sequence: TTC
atgacatgctcatagcccca

SEQ ID NO: 66184 - DNA, 20 bp, Artificial Sequence
  Description of Artificial Sequence: Synthetic oligonucleotide
  Target: ATXN2; (-) strand; PAM type: YTN; PAM sequence: CTT
catgacatgctcatagcccc

SEQ ID NO: 66185 - DNA, 20 bp, Artificial Sequence
  Description of Artificial Sequence: Synthetic oligonucleotide
  Target: ATXN2; (-) strand; PAM type: YTN; PAM sequence: CTA
acttcatgacatgctcatag

SEQ ID NO: 66186 - DNA, 20 bp, Artificial Sequence
  Description of Artificial Sequence: Synthetic oligonucleotide
  Target: ATXN2; (-) strand; PAM type: YTN; PAM sequence: TTA
gagctaacttcatgacatgc

SEQ ID NO: 66187 - DNA, 20 bp, Artificial Sequence
  Description of Artificial Sequence: Synthetic oligonucleotide
  Target: ATXN2; (-) strand; PAM type: YTN; PAM sequence: TTC
attagagctaacttcatgac

SEQ ID NO: 66188 - DNA, 20 bp, Artificial Sequence
  Description of Artificial Sequence: Synthetic oligonucleotide
  Target: ATXN2; (-) strand; PAM type: YTN; PAM sequence: CTG
tcagtcagtgattcattaga

SEQ ID NO: 66189 - DNA, 20 bp, Artificial Sequence
  Description of Artificial Sequence: Synthetic oligonucleotide
  Target: ATXN2; (-) strand; PAM type: YTN; PAM sequence: CTG
cactgtcagtcagtgattca

SEQ ID NO: 66190 - DNA, 20 bp, Artificial Sequence
  Description of Artificial Sequence: Synthetic oligonucleotide
  Target: ATXN2; (-) strand; PAM type: YTN; PAM sequence: CTA
atgcatagtgcatgctgcac

SEQ ID NO: 66191 - DNA, 20 bp, Artificial Sequence
  Description of Artificial Sequence: Synthetic oligonucleotide
  Target: ATXN2; (-) strand; PAM type: YTN; PAM sequence: TTG
aatagtaactaatgcatagt

SEQ ID NO: 66192 - DNA, 20 bp, Artificial Sequence
  Description of Artificial Sequence: Synthetic oligonucleotide
  Target: ATXN2; (-) strand; PAM type: YTN; PAM sequence: TTT
gaatagtaactaatgcatag

SEQ ID NO: 66193 - DNA, 20 bp, Artificial Sequence
  Description of Artificial Sequence: Synthetic oligonucleotide
  Target: ATXN2; (-) strand; PAM type: YTN; PAM sequence: CTT
tgaatagtaactaatgcata

SEQ ID NO: 66194 - DNA, 20 bp, Artificial Sequence
  Description of Artificial Sequence: Synthetic oligonucleotide
  Target: ATXN2; (-) strand; PAM type: YTN; PAM sequence: CTA
gcagtgctttgaatagtaac

SEQ ID NO: 66195 - DNA, 20 bp, Artificial Sequence
  Description of Artificial Sequence: Synthetic oligonucleotide
  Target: ATXN2; (-) strand; PAM type: YTN; PAM sequence: TTC
tagcagtgctttgaatagta

SEQ ID NO: 66196 - DNA, 20 bp, Artificial Sequence
  Description of Artificial Sequence: Synthetic oligonucleotide
  Target: ATXN2; (-) strand; PAM type: YTN; PAM sequence: CTT
ctagcagtgctttgaatagt

SEQ ID NO: 66197 - DNA, 20 bp, Artificial Sequence
  Description of Artificial Sequence: Synthetic oligonucleotide
  Target: ATXN2; (-) strand; PAM type: YTN; PAM sequence: TTA
agcttctagcagtgctttga

SEQ ID NO: 66198 - DNA, 20 bp, Artificial Sequence
  Description of Artificial Sequence: Synthetic oligonucleotide
  Target: ATXN2; (-) strand; PAM type: YTN; PAM sequence: TTT
aagcttctagcagtgctttg

SEQ ID NO: 66199 - DNA, 20 bp, Artificial Sequence
  Description of Artificial Sequence: Synthetic oligonucleotide
  Target: ATXN2; (-) strand; PAM type: YTN; PAM sequence: CTG
gtgtttaagcttctagcagt

SEQ ID NO: 66200 - DNA, 20 bp, Artificial Sequence
  Description of Artificial Sequence: Synthetic oligonucleotide
  Target: ATXN2; (-) strand; PAM type: YTN; PAM sequence: CTG
accatctggtgtttaagctt

SEQ ID NO: 66201 - DNA, 20 bp, Artificial Sequence
  Description of Artificial Sequence: Synthetic oligonucleotide
  Target: ATXN2; (-) strand; PAM type: YTN; PAM sequence: CTA
gtaagtaagagggctgacca

SEQ ID NO: 66202 - DNA, 20 bp, Artificial Sequence
  Description of Artificial Sequence: Synthetic oligonucleotide
  Target: ATXN2; (-) strand; PAM type: YTN; PAM sequence: CTC
acatggctagtaagtaagag

SEQ ID NO: 66203 - DNA, 20 bp, Artificial Sequence
  Description of Artificial Sequence: Synthetic oligonucleotide
  Target: ATXN2; (-) strand; PAM type: YTN; PAM sequence: CTG
cccaaactcacatggctagt

SEQ ID NO: 66204 - DNA, 20 bp, Artificial Sequence
  Description of Artificial Sequence: Synthetic oligonucleotide
  Target: ATXN2; (-) strand; PAM type: YTN; PAM sequence: TTA
agtaatctgcccaaactcac

SEQ ID NO: 66205 - DNA, 20 bp, Artificial Sequence
  Description of Artificial Sequence: Synthetic oligonucleotide
  Target: ATXN2; (-) strand; PAM type: YTN; PAM sequence: TTG
ggcaaagagaagttaagtaa

SEQ ID NO: 66206 - DNA, 20 bp, Artificial Sequence
  Description of Artificial Sequence: Synthetic oligonucleotide
  Target: ATXN2; (-) strand; PAM type: YTN; PAM sequence: CTT
gggcaaagagaagttaagta

SEQ ID NO: 66207 - DNA, 20 bp, Artificial Sequence
  Description of Artificial Sequence: Synthetic oligonucleotide
  Target: ATXN2; (-) strand; PAM type: YTN; PAM sequence: TTA
ggcagcttgggcaaagagaa

SEQ ID NO: 66208 - DNA, 20 bp, Artificial Sequence
  Description of Artificial Sequence: Synthetic oligonucleotide
  Target: ATXN2; (-) strand; PAM type: YTN; PAM sequence: CTG
tgtatattaggcagcttggg

SEQ ID NO: 66209 - DNA, 20 bp, Artificial Sequence
  Description of Artificial Sequence: Synthetic oligonucleotide
  Target: ATXN2; (-) strand; PAM type: YTN; PAM sequence: CTG
cactgtgtatattaggcagc

SEQ ID NO: 66210 - DNA, 20 bp, Artificial Sequence
  Description of Artificial Sequence: Synthetic oligonucleotide
  Target: ATXN2; (-) strand; PAM type: YTN; PAM sequence: TTG
tatctgcactgtgtatatta

SEQ ID NO: 66211 - DNA, 20 bp, Artificial Sequence
  Description of Artificial Sequence: Synthetic oligonucleotide
  Target: ATXN2; (-) strand; PAM type: YTN; PAM sequence: TTT
gtatctgcactgtgtatatt

SEQ ID NO: 66212 - DNA, 20 bp, Artificial Sequence
  Description of Artificial Sequence: Synthetic oligonucleotide
  Target: ATXN2; (-) strand; PAM type: YTN; PAM sequence: CTG
tttgtatctgcactgtgtat

SEQ ID NO: 66213 - DNA, 20 bp, Artificial Sequence
  Description of Artificial Sequence: Synthetic oligonucleotide
  Target: ATXN2; (-) strand; PAM type: YTN; PAM sequence: TTC
tgtttgtatctgcactgtgt

SEQ ID NO: 66214 - DNA, 20 bp, Artificial Sequence
  Description of Artificial Sequence: Synthetic oligonucleotide
  Target: ATXN2; (-) strand; PAM type: YTN; PAM sequence: CTG
tcaagcaagttctgtttgta

SEQ ID NO: 66215 - DNA, 20 bp, Artificial Sequence
  Description of Artificial Sequence: Synthetic oligonucleotide
  Target: ATXN2; (-) strand; PAM type: YTN; PAM sequence: CTC
tgtcaagcaagttctgtttg

SEQ ID NO: 66216 - DNA, 20 bp, Artificial Sequence
  Description of Artificial Sequence: Synthetic oligonucleotide
  Target: ATXN2; (-) strand; PAM type: YTN; PAM sequence: CTA
acatctctgtcaagcaagtt

SEQ ID NO: 66217 - DNA, 20 bp, Artificial Sequence
  Description of Artificial Sequence: Synthetic oligonucleotide
  Target: ATXN2; (-) strand; PAM type: YTN; PAM sequence: TTG
tctaacatctctgtcaagca

SEQ ID NO: 66218 - DNA, 20 bp, Artificial Sequence
  Description of Artificial Sequence: Synthetic oligonucleotide
  Target: ATXN2; (-) strand; PAM type: YTN; PAM sequence: CTT
gtctaacatctctgtcaagc

SEQ ID NO: 66219 - DNA, 20 bp, Artificial Sequence
  Description of Artificial Sequence: Synthetic oligonucleotide
  Target: ATXN2; (-) strand; PAM type: YTN; PAM sequence: TTA
aatcttgtctaacatctctg

SEQ ID NO: 66220 - DNA, 20 bp, Artificial Sequence
  Description of Artificial Sequence: Synthetic oligonucleotide
  Target: ATXN2; (-) strand; PAM type: YTN; PAM sequence: TTG
tatgttaaatcttgtctaac

SEQ ID NO: 66221 - DNA, 20 bp, Artificial Sequence
  Description of Artificial Sequence: Synthetic oligonucleotide
  Target: ATXN2; (-) strand; PAM type: YTN; PAM sequence: CTT
gtatgttaaatcttgtctaa

SEQ ID NO: 66222 - DNA, 20 bp, Artificial Sequence
  Description of Artificial Sequence: Synthetic oligonucleotide
  Target: ATXN2; (-) strand; PAM type: YTN; PAM sequence: TTC
atgcttgtatgttaaatctt

SEQ ID NO: 66223 - DNA, 20 bp, Artificial Sequence
  Description of Artificial Sequence: Synthetic oligonucleotide
  Target: ATXN2; (-) strand; PAM type: YTN; PAM sequence: CTT
catgcttgtatgttaaatct

SEQ ID NO: 66224 - DNA, 20 bp, Artificial Sequence
  Description of Artificial Sequence: Synthetic oligonucleotide
  Target: ATXN2; (-) strand; PAM type: YTN; PAM sequence: TTC
ttcatgcttgtatgttaaat

SEQ ID NO: 66225 - DNA, 20 bp, Artificial Sequence
  Description of Artificial Sequence: Synthetic oligonucleotide
  Target: ATXN2; (-) strand; PAM type: YTN; PAM sequence: CTG
ttcttcatgcttgtatgtta

SEQ ID NO: 66226 - DNA, 20 bp, Artificial Sequence
  Description of Artificial Sequence: Synthetic oligonucleotide
  Target: ATXN2; (-) strand; PAM type: YTN; PAM sequence: CTG
tgtaccagatgctgttcttc

SEQ ID NO: 66227 - DNA, 20 bp, Artificial Sequence
  Description of Artificial Sequence: Synthetic oligonucleotide
  Target: ATXN2; (-) strand; PAM type: YTN; PAM sequence: TTC
ctgtgtaccagatgctgttc

SEQ ID NO: 66228 - DNA, 20 bp, Artificial Sequence
  Description of Artificial Sequence: Synthetic oligonucleotide
  Target: ATXN2; (-) strand; PAM type: YTN; PAM sequence: TTT
cctgtgtaccagatgctgtt

SEQ ID NO: 66229 - DNA, 20 bp, Artificial Sequence
  Description of Artificial Sequence: Synthetic oligonucleotide
  Target: ATXN2; (-) strand; PAM type: YTN; PAM sequence: TTG
cgtatttcctgtgtaccaga

SEQ ID NO: 66230 - DNA, 20 bp, Artificial Sequence
  Description of Artificial Sequence: Synthetic oligonucleotide
  Target: ATXN2; (-) strand; PAM type: YTN; PAM sequence: TTA
ttgcgtatttcctgtgtacc

SEQ ID NO: 66231 - DNA, 20 bp, Artificial Sequence
  Description of Artificial Sequence: Synthetic oligonucleotide
  Target: ATXN2; (-) strand; PAM type: YTN; PAM sequence: TTT
attgcgtatttcctgtgtac

SEQ ID NO: 66232 - DNA, 20 bp, Artificial Sequence
  Description of Artificial Sequence: Synthetic oligonucleotide
  Target: ATXN2; (-) strand; PAM type: YTN; PAM sequence: TTT
tattgcgtatttcctgtgta

SEQ ID NO: 66233 - DNA, 20 bp, Artificial Sequence
  Description of Artificial Sequence: Synthetic oligonucleotide
  Target: ATXN2; (-) strand; PAM type: YTN; PAM sequence: TTA
tgttttattgcgtatttcct

SEQ ID NO: 66234 - DNA, 20 bp, Artificial Sequence
  Description of Artificial Sequence: Synthetic oligonucleotide
  Target: ATXN2; (-) strand; PAM type: YTN; PAM sequence: CTT
atgttttattgcgtatttcc

SEQ ID NO: 66235 - DNA, 20 bp, Artificial Sequence
  Description of Artificial Sequence: Synthetic oligonucleotide
  Target: ATXN2; (-) strand; PAM type: YTN; PAM sequence: CTC
ttatgttttattgcgtattt

SEQ ID NO: 66236 - DNA, 20 bp, Artificial Sequence
  Description of Artificial Sequence: Synthetic oligonucleotide
  Target: ATXN2; (-) strand; PAM type: YTN; PAM sequence: TTC
tcttatgttttattgcgtat

SEQ ID NO: 66237 - DNA, 20 bp, Artificial Sequence
  Description of Artificial Sequence: Synthetic oligonucleotide
  Target: ATXN2; (-) strand; PAM type: YTN; PAM sequence: TTA
ttctcttatgttttattgcg

SEQ ID NO: 66238 - DNA, 20 bp, Artificial Sequence
  Description of Artificial Sequence: Synthetic oligonucleotide
  Target: ATXN2; (-) strand; PAM type: YTN; PAM sequence: TTC
agataatataatgttattct

SEQ ID NO: 66239 - DNA, 20 bp, Artificial Sequence
  Description of Artificial Sequence: Synthetic oligonucleotide
  Target: ATXN2; (-) strand; PAM type: YTN; PAM sequence: CTT
cagataatataatgttattc

SEQ ID NO: 66240 - DNA, 20 bp, Artificial Sequence
  Description of Artificial Sequence: Synthetic oligonucleotide
  Target: ATXN2; (-) strand; PAM type: YTN; PAM sequence: CTC
ttcagataatataatgttat

SEQ ID NO: 66241 - DNA, 20 bp, Artificial Sequence
  Description of Artificial Sequence: Synthetic oligonucleotide
  Target: ATXN2; (-) strand; PAM type: YTN; PAM sequence: TTC
tcttcagataatataatgtt

SEQ ID NO: 66242 - DNA, 20 bp, Artificial Sequence
  Description of Artificial Sequence: Synthetic oligonucleotide
  Target: ATXN2; (-) strand; PAM type: YTN; PAM sequence: TTG
ttctcttcagataatataat

SEQ ID NO: 66243 - DNA, 20 bp, Artificial Sequence
  Description of Artificial Sequence: Synthetic oligonucleotide
  Target: ATXN2; (-) strand; PAM type: YTN; PAM sequence: CTA
attgttctcttcagataata

SEQ ID NO: 66244 - DNA, 20 bp, Artificial Sequence
  Description of Artificial Sequence: Synthetic oligonucleotide
  Target: ATXN2; (-) strand; PAM type: YTN; PAM sequence: TTC
taattgttctcttcagataa

SEQ ID NO: 66245 - DNA, 20 bp, Artificial Sequence
  Description of Artificial Sequence: Synthetic oligonucleotide
  Target: ATXN2; (-) strand; PAM type: YTN; PAM sequence: TTT
ctaattgttctcttcagata

SEQ ID NO: 66246 - DNA, 20 bp, Artificial Sequence
  Description of Artificial Sequence: Synthetic oligonucleotide
  Target: ATXN2; (-) strand; PAM type: YTN; PAM sequence: CTT
tctaattgttctcttcagat

SEQ ID NO: 66247 - DNA, 20 bp, Artificial Sequence
  Description of Artificial Sequence: Synthetic oligonucleotide
  Target: ATXN2; (-) strand; PAM type: YTN; PAM sequence: TTA
aaaaaaaataaaagagtgaa

SEQ ID NO: 66248 - DNA, 20 bp, Artificial Sequence
  Description of Artificial Sequence: Synthetic oligonucleotide
  Target: ATXN2; (-) strand; PAM type: YTN; PAM sequence: TTA
attaaaaaaaaataaaagag

SEQ ID NO: 66249 - DNA, 20 bp, Artificial Sequence
  Description of Artificial Sequence: Synthetic oligonucleotide
  Target: ATXN2; (-) strand; PAM type: YTN; PAM sequence: TTT
aattaaaaaaaaataaaaga

SEQ ID NO: 66250 - DNA, 20 bp, Artificial Sequence
  Description of Artificial Sequence: Synthetic oligonucleotide
  Target: ATXN2; (-) strand; PAM type: YTN; PAM sequence: TTT
taattaaaaaaaaataaaag

SEQ ID NO: 66251 - DNA, 20 bp, Artificial Sequence
  Description of Artificial Sequence: Synthetic oligonucleotide
  Target: ATXN2; (-) strand; PAM type: YTN; PAM sequence: TTA
aattttaattaaaaaaaaat

SEQ ID NO: 66252 - DNA, 20 bp, Artificial Sequence
  Description of Artificial Sequence: Synthetic oligonucleotide
  Target: ATXN2; (-) strand; PAM type: YTN; PAM sequence: CTT
aaattttaattaaaaaaaaa

SEQ ID NO: 66253 - DNA, 20 bp, Artificial Sequence
  Description of Artificial Sequence: Synthetic oligonucleotide
  Target: ATXN2; (-) strand; PAM type: YTN; PAM sequence: CTC
aaagaaaaaaaaagagagtg

SEQ ID NO: 66254 - DNA, 20 bp, Artificial Sequence
  Description of Artificial Sequence: Synthetic oligonucleotide
  Target: ATXN2; (-) strand; PAM type: YTN; PAM sequence: CTG
tctcaaagaaaaaaaaagag

SEQ ID NO: 66255 - DNA, 20 bp, Artificial Sequence
  Description of Artificial Sequence: Synthetic oligonucleotide
  Target: ATXN2; (-) strand; PAM type: YTN; PAM sequence: TTG
catcagtgggcgacagagcg

SEQ ID NO: 66256 - DNA, 20 bp, Artificial Sequence
  Description of Artificial Sequence: Synthetic oligonucleotide
  Target: ATXN2; (-) strand; PAM type: YTN; PAM sequence: TTG
cagtgatccgagattgcatc

SEQ ID NO: 66257 - DNA, 20 bp, Artificial Sequence
  Description of Artificial Sequence: Synthetic oligonucleotide
  Target: ATXN2; (-) strand; PAM type: YTN; PAM sequence: TTG
aatccaggaggtggaggttg

SEQ ID NO: 66258 - DNA, 20 bp, Artificial Sequence
  Description of Artificial Sequence: Synthetic oligonucleotide
  Target: ATXN2; (-) strand; PAM type: YTN; PAM sequence: CTT
gaatccaggaggtggaggtt

SEQ ID NO: 66259 - DNA, 20 bp, Artificial Sequence
  Description of Artificial Sequence: Synthetic oligonucleotide
  Target: ATXN2; (-) strand; PAM type: YTN; PAM sequence: CTG
aggcaggagaatcacttgaa

SEQ ID NO: 66260 - DNA, 20 bp, Artificial Sequence
  Description of Artificial Sequence: Synthetic oligonucleotide
  Target: ATXN2; (-) strand; PAM type: YTN; PAM sequence: CTC
aggaggctgaggcaggagaa

SEQ ID NO: 66261 - DNA, 20 bp, Artificial Sequence
  Description of Artificial Sequence: Synthetic oligonucleotide
  Target: ATXN2; (-) strand; PAM type: YTN; PAM sequence: CTA
ctcaggaggctgaggcagga

SEQ ID NO: 66262 - DNA, 20 bp, Artificial Sequence
  Description of Artificial Sequence: Synthetic oligonucleotide
  Target: ATXN2; (-) strand; PAM type: YTN; PAM sequence: CTG
taatcccagctactcaggag

SEQ ID NO: 66263 - DNA, 20 bp, Artificial Sequence
  Description of Artificial Sequence: Synthetic oligonucleotide
  Target: ATXN2; (-) strand; PAM type: YTN; PAM sequence: TTA
gccgggcatggtggcacatg

SEQ ID NO: 66264 - DNA, 20 bp, Artificial Sequence
  Description of Artificial Sequence: Synthetic oligonucleotide
  Target: ATXN2; (-) strand; PAM type: YTN; PAM sequence: TTA
aaaatatataaattagccgg

SEQ ID NO: 66265 - DNA, 20 bp, Artificial Sequence
  Description of Artificial Sequence: Synthetic oligonucleotide
  Target: ATXN2; (-) strand; PAM type: YTN; PAM sequence: TTA
ttaaaaatatataaattagc

SEQ ID NO: 66266 - DNA, 20 bp, Artificial Sequence
  Description of Artificial Sequence: Synthetic oligonucleotide
  Target: ATXN2; (-) strand; PAM type: YTN; PAM sequence: TTT
attaaaaatatataaattag

SEQ ID NO: 66267 - DNA, 20 bp, Artificial Sequence
  Description of Artificial Sequence: Synthetic oligonucleotide
  Target: ATXN2; (-) strand; PAM type: YTN; PAM sequence: CTT
tattaaaaatatataaatta

SEQ ID NO: 66268 - DNA, 20 bp, Artificial Sequence
  Description of Artificial Sequence: Synthetic oligonucleotide
  Target: ATXN2; (-) strand; PAM type: YTN; PAM sequence: CTA
tctttattaaaaatatataa

SEQ ID NO: 66269 - DNA, 20 bp, Artificial Sequence
  Description of Artificial Sequence: Synthetic oligonucleotide
  Target: ATXN2; (-) strand; PAM type: YTN; PAM sequence: CTG
gataacatggcgaaacccta

SEQ ID NO: 66270 - DNA, 20 bp, Artificial Sequence
  Description of Artificial Sequence: Synthetic oligonucleotide
  Target: ATXN2; (-) strand; PAM type: YTN; PAM sequence: TTG
agaccagcctggataacatg

SEQ ID NO: 66271 - DNA, 20 bp, Artificial Sequence
  Description of Artificial Sequence: Synthetic oligonucleotide
  Target: ATXN2; (-) strand; PAM type: YTN; PAM sequence: TTT
gagaccagcctggataacat

SEQ ID NO: 66272 - DNA, 20 bp, Artificial Sequence
  Description of Artificial Sequence: Synthetic oligonucleotide
  Target: ATXN2; (-) strand; PAM type: YTN; PAM sequence: TTG
aggtcaggagtttgagacca

SEQ ID NO: 66273 - DNA, 20 bp, Artificial Sequence
  Description of Artificial Sequence: Synthetic oligonucleotide
  Target: ATXN2; (-) strand; PAM type: YTN; PAM sequence: CTT
gaggtcaggagtttgagacc

SEQ ID NO: 66274 - DNA, 20 bp, Artificial Sequence
  Description of Artificial Sequence: Synthetic oligonucleotide
  Target: ATXN2; (-) strand; PAM type: YTN; PAM sequence: CTG
aggcgggtggatcacttgag

SEQ ID NO: 66275 - DNA, 20 bp, Artificial Sequence
  Description of Artificial Sequence: Synthetic oligonucleotide
  Target: ATXN2; (-) strand; PAM type: YTN; PAM sequence: TTG
ggaggctgaggcgggtggat

SEQ ID NO: 66276 - DNA, 20 bp, Artificial Sequence
  Description of Artificial Sequence: Synthetic oligonucleotide
  Target: ATXN2; (-) strand; PAM type: YTN; PAM sequence: TTT
gggaggctgaggcgggtgga

SEQ ID NO: 66277 - DNA, 20 bp, Artificial Sequence
  Description of Artificial Sequence: Synthetic oligonucleotide
  Target: ATXN2; (-) strand; PAM type: YTN; PAM sequence: CTT
tgggaggctgaggcgggtgg

SEQ ID NO: 66278 - DNA, 20 bp, Artificial Sequence
  Description of Artificial Sequence: Synthetic oligonucleotide
  Target: ATXN2; (-) strand; PAM type: YTN; PAM sequence: CTA
acactttgggaggctgaggc

SEQ ID NO: 66279 - DNA, 20 bp, Artificial Sequence
  Description of Artificial Sequence: Synthetic oligonucleotide
  Target: ATXN2; (-) strand; PAM type: YTN; PAM sequence: CTA
taatcctaacactttgggag

SEQ ID NO: 66280 - DNA, 20 bp, Artificial Sequence
  Description of Artificial Sequence: Synthetic oligonucleotide
  Target: ATXN2; (-) strand; PAM type: YTN; PAM sequence: CTG
atacctataatcctaacact

SEQ ID NO: 66281 - DNA, 20 bp, Artificial Sequence
  Description of Artificial Sequence: Synthetic oligonucleotide
  Target: ATXN2; (-) strand; PAM type: YTN; PAM sequence: TTA
aaaaatgagagtgggccggg

SEQ ID NO: 66282 - DNA, 20 bp, Artificial Sequence
  Description of Artificial Sequence: Synthetic oligonucleotide
  Target: ATXN2; (-) strand; PAM type: YTN; PAM sequence: TTT
aaaaaatgagagtgggccgg

SEQ ID NO: 66283 - DNA, 20 bp, Artificial Sequence
  Description of Artificial Sequence: Synthetic oligonucleotide
  Target: ATXN2; (-) strand; PAM type: YTN; PAM sequence: TTT
taaaaaatgagagtgggccg

SEQ ID NO: 66284 - DNA, 20 bp, Artificial Sequence
  Description of Artificial Sequence: Synthetic oligonucleotide
  Target: ATXN2; (-) strand; PAM type: YTN; PAM sequence: TTT
ttaaaaaatgagagtgggcc

SEQ ID NO: 66285 - DNA, 20 bp, Artificial Sequence
  Description of Artificial Sequence: Synthetic oligonucleotide
  Target: ATXN2; (-) strand; PAM type: YTN; PAM sequence: TTG
atccataggggcataccagg

SEQ ID NO: 66286 - DNA, 20 bp, Artificial Sequence
  Description of Artificial Sequence: Synthetic oligonucleotide
  Target: ATXN2; (-) strand; PAM type: YTN; PAM sequence: CTT
gatccataggggcataccag

SEQ ID NO: 66287 - DNA, 20 bp, Artificial Sequence
  Description of Artificial Sequence: Synthetic oligonucleotide
  Target: ATXN2; (-) strand; PAM type: YTN; PAM sequence: CTC
cttgatccataggggcatac

SEQ ID NO: 66288 - DNA, 20 bp, Artificial Sequence
  Description of Artificial Sequence: Synthetic oligonucleotide
  Target: ATXN2; (-) strand; PAM type: YTN; PAM sequence: CTA
ataactccttgatccatagg

SEQ ID NO: 66289 - DNA, 20 bp, Artificial Sequence
  Description of Artificial Sequence: Synthetic oligonucleotide
  Target: ATXN2; (-) strand; PAM type: YTN; PAM sequence: TTA
ctaataactccttgatccat

SEQ ID NO: 66290 - DNA, 20 bp, Artificial Sequence
  Description of Artificial Sequence: Synthetic oligonucleotide
  Target: ATXN2; (-) strand; PAM type: YTN; PAM sequence: CTT
actaataactccttgatcca

SEQ ID NO: 66291 - DNA, 20 bp, Artificial Sequence
  Description of Artificial Sequence: Synthetic oligonucleotide
  Target: ATXN2; (-) strand; PAM type: YTN; PAM sequence: CTC
ttactaataactccttgatc

SEQ ID NO: 66292 - DNA, 20 bp, Artificial Sequence
  Description of Artificial Sequence: Synthetic oligonucleotide
  Target: ATXN2; (-) strand; PAM type: YTN; PAM sequence: TTA
gcctcttactaataactcct

SEQ ID NO: 66293 - DNA, 20 bp, Artificial Sequence
  Description of Artificial Sequence: Synthetic oligonucleotide
  Target: ATXN2; (-) strand; PAM type: YTN; PAM sequence: TTT
agcctcttactaataactcc

SEQ ID NO: 66294 - DNA, 20 bp, Artificial Sequence
  Description of Artificial Sequence: Synthetic oligonucleotide
  Target: ATXN2; (-) strand; PAM type: YTN; PAM sequence: TTA
tttagcctcttactaataac

SEQ ID NO: 66295 - DNA, 20 bp, Artificial Sequence
  Description of Artificial Sequence: Synthetic oligonucleotide
  Target: ATXN2; (-) strand; PAM type: YTN; PAM sequence: CTG
aataaccaaatgtattattt

SEQ ID NO: 66296 - DNA, 20 bp, Artificial Sequence
  Description of Artificial Sequence: Synthetic oligonucleotide
  Target: ATXN2; (-) strand; PAM type: YTN; PAM sequence: TTA
ggtgcctgaataaccaaatg

SEQ ID NO: 66297 - DNA, 20 bp, Artificial Sequence
  Description of Artificial Sequence: Synthetic oligonucleotide
  Target: ATXN2; (-) strand; PAM type: YTN; PAM sequence: TTT
aggtgcctgaataaccaaat

SEQ ID NO: 66298 - DNA, 20 bp, Artificial Sequence
  Description of Artificial Sequence: Synthetic oligonucleotide
  Target: ATXN2; (-) strand; PAM type: YTN; PAM sequence: TTT
taggtgcctgaataaccaaa

SEQ ID NO: 66299 - DNA, 20 bp, Artificial Sequence
  Description of Artificial Sequence: Synthetic oligonucleotide
  Target: ATXN2; (-) strand; PAM type: YTN; PAM sequence: CTT
ttaggtgcctgaataaccaa

SEQ ID NO: 66300 - DNA, 20 bp, Artificial Sequence
  Description of Artificial Sequence: Synthetic oligonucleotide
  Target: ATXN2; (-) strand; PAM type: YTN; PAM sequence: CTA
cttttaggtgcctgaataac

SEQ ID NO: 66301 - DNA, 20 bp, Artificial Sequence
  Description of Artificial Sequence: Synthetic oligonucleotide
  Target: ATXN2; (-) strand; PAM type: YTN; PAM sequence: TTA
ctacttttaggtgcctgaat

SEQ ID NO: 66302 - DNA, 20 bp, Artificial Sequence
  Description of Artificial Sequence: Synthetic oligonucleotide
  Target: ATXN2; (-) strand; PAM type: YTN; PAM sequence: CTT
actacttttaggtgcctgaa

SEQ ID NO: 66303 - DNA, 20 bp, Artificial Sequence
  Description of Artificial Sequence: Synthetic oligonucleotide
  Target: ATXN2; (-) strand; PAM type: YTN; PAM sequence: TTA
gtcttactacttttaggtgc

SEQ ID NO: 66304 - DNA, 20 bp, Artificial Sequence
  Description of Artificial Sequence: Synthetic oligonucleotide
  Target: ATXN2; (-) strand; PAM type: YTN; PAM sequence: TTT
agtcttactacttttaggtg

SEQ ID NO: 66305 - DNA, 20 bp, Artificial Sequence
  Description of Artificial Sequence: Synthetic oligonucleotide
  Target: ATXN2; (-) strand; PAM type: YTN; PAM sequence: TTT
tagtcttactacttttaggt

SEQ ID NO: 66306 - DNA, 20 bp, Artificial Sequence
  Description of Artificial Sequence: Synthetic oligonucleotide
  Target: ATXN2; (-) strand; PAM type: YTN; PAM sequence: TTA
ggagttttagtcttactact

SEQ ID NO: 66307 - DNA, 20 bp, Artificial Sequence
  Description of Artificial Sequence: Synthetic oligonucleotide
  Target: ATXN2; (-) strand; PAM type: YTN; PAM sequence: TTT
aggagttttagtcttactac

SEQ ID NO: 66308 - DNA, 20 bp, Artificial Sequence
  Description of Artificial Sequence: Synthetic oligonucleotide
  Target: ATXN2; (-) strand; PAM type: YTN; PAM sequence: CTT
taggagttttagtcttacta

SEQ ID NO: 66309 - DNA, 20 bp, Artificial Sequence
  Description of Artificial Sequence: Synthetic oligonucleotide
  Target: ATXN2; (-) strand; PAM type: YTN; PAM sequence: CTC
tttaggagttttagtcttac

SEQ ID NO: 66310 - DNA, 20 bp, Artificial Sequence
  Description of Artificial Sequence: Synthetic oligonucleotide
  Target: ATXN2; (-) strand; PAM type: YTN; PAM sequence: TTA
tctctttaggagttttagtc

SEQ ID NO: 66311 - DNA, 20 bp, Artificial Sequence
  Description of Artificial Sequence: Synthetic oligonucleotide
  Target: ATXN2; (-) strand; PAM type: YTN; PAM sequence: CTT
atctctttaggagttttagt

SEQ ID NO: 66312 - DNA, 20 bp, Artificial Sequence
  Description of Artificial Sequence: Synthetic oligonucleotide
  Target: ATXN2; (-) strand; PAM type: YTN; PAM sequence: TTC
caagaaggagcaacataaaa

SEQ ID NO: 66313 - DNA, 20 bp, Artificial Sequence
  Description of Artificial Sequence: Synthetic oligonucleotide
  Target: ATXN2; (-) strand; PAM type: YTN; PAM sequence: TTA
aattccaagaaggagcaaca

SEQ ID NO: 66314 - DNA, 20 bp, Artificial Sequence
  Description of Artificial Sequence: Synthetic oligonucleotide
  Target: ATXN2; (-) strand; PAM type: YTN; PAM sequence: CTT
aaattccaagaaggagcaac

SEQ ID NO: 66315 - DNA, 20 bp, Artificial Sequence
  Description of Artificial Sequence: Synthetic oligonucleotide
  Target: ATXN2; (-) strand; PAM type: YTN; PAM sequence: TTG
acttaaattccaagaaggag

SEQ ID NO: 66316 - DNA, 20 bp, Artificial Sequence
  Description of Artificial Sequence: Synthetic oligonucleotide
  Target: ATXN2; (-) strand; PAM type: YTN; PAM sequence: CTT
gacttaaattccaagaagga

SEQ ID NO: 66317 - DNA, 20 bp, Artificial Sequence
  Description of Artificial Sequence: Synthetic oligonucleotide
  Target: ATXN2; (-) strand; PAM type: YTN; PAM sequence: TTA
atgcttgacttaaattccaa

SEQ ID NO: 66318 - DNA, 20 bp, Artificial Sequence
  Description of Artificial Sequence: Synthetic oligonucleotide
  Target: ATXN2; (-) strand; PAM type: YTN; PAM sequence: TTC
attaatgcttgacttaaatt

SEQ ID NO: 66319 - DNA, 20 bp, Artificial Sequence
  Description of Artificial Sequence: Synthetic oligonucleotide
  Target: ATXN2; (-) strand; PAM type: YTN; PAM sequence: CTT
cattaatgcttgacttaaat

SEQ ID NO: 66320 - DNA, 20 bp, Artificial Sequence
  Description of Artificial Sequence: Synthetic oligonucleotide
  Target: ATXN2; (-) strand; PAM type: YTN; PAM sequence: CTG
taaaccttcattaatgcttg

SEQ ID NO: 66321 - DNA, 20 bp, Artificial Sequence
  Description of Artificial Sequence: Synthetic oligonucleotide
  Target: ATXN2; (-) strand; PAM type: YTN; PAM sequence: TTC
tgtaaaccttcattaatgct

SEQ ID NO: 66322 - DNA, 20 bp, Artificial Sequence
  Description of Artificial Sequence: Synthetic oligonucleotide
  Target: ATXN2; (-) strand; PAM type: YTN; PAM sequence: TTT
ctgtaaaccttcattaatgc

SEQ ID NO: 66323 - DNA, 20 bp, Artificial Sequence
  Description of Artificial Sequence: Synthetic oligonucleotide
  Target: ATXN2; (-) strand; PAM type: YTN; PAM sequence: CTT
tctgtaaaccttcattaatg

SEQ ID NO: 66324 - DNA, 20 bp, Artificial Sequence
  Description of Artificial Sequence: Synthetic oligonucleotide
  Target: ATXN2; (-) strand; PAM type: YTN; PAM sequence: CTA
tcagcacaactttctgtaaa

SEQ ID NO: 66325 - DNA, 20 bp, Artificial Sequence
  Description of Artificial Sequence: Synthetic oligonucleotide
  Target: ATXN2; (-) strand; PAM type: YTN; PAM sequence: TTA
gctatcagcacaactttctg

SEQ ID NO: 66326 - DNA, 20 bp, Artificial Sequence
  Description of Artificial Sequence: Synthetic oligonucleotide
  Target: ATXN2; (-) strand; PAM type: YTN; PAM sequence: TTT
agctatcagcacaactttct

SEQ ID NO: 66327 - DNA, 20 bp, Artificial Sequence
  Description of Artificial Sequence: Synthetic oligonucleotide
  Target: ATXN2; (-) strand; PAM type: YTN; PAM sequence: TTT
tagctatcagcacaactttc

SEQ ID NO: 66328 - DNA, 20 bp, Artificial Sequence
  Description of Artificial Sequence: Synthetic oligonucleotide
  Target: ATXN2; (-) strand; PAM type: YTN; PAM sequence: TTA
gcagaaaacattttagctat

SEQ ID NO: 66329 - DNA, 20 bp, Artificial Sequence
  Description of Artificial Sequence: Synthetic oligonucleotide
  Target: ATXN2; (-) strand; PAM type: YTN; PAM sequence: TTC
agttagcagaaaacatttta

SEQ ID NO: 66330 - DNA, 20 bp, Artificial Sequence
  Description of Artificial Sequence: Synthetic oligonucleotide
  Target: ATXN2; (-) strand; PAM type: YTN; PAM sequence: TTT
cagttagcagaaaacatttt

SEQ ID NO: 66331 - DNA, 20 bp, Artificial Sequence
  Description of Artificial Sequence: Synthetic oligonucleotide
  Target: ATXN2; (-) strand; PAM type: YTN; PAM sequence: TTT
tcagttagcagaaaacattt

SEQ ID NO: 66332 - DNA, 20 bp, Artificial Sequence
  Description of Artificial Sequence: Synthetic oligonucleotide
  Target: ATXN2; (-) strand; PAM type: YTN; PAM sequence: TTT
ttcagttagcagaaaacatt

SEQ ID NO: 66333 - DNA, 20 bp, Artificial Sequence
  Description of Artificial Sequence: Synthetic oligonucleotide
  Target: ATXN2; (-) strand; PAM type: YTN; PAM sequence: CTT
tttcagttagcagaaaacat

SEQ ID NO: 66334 - DNA, 20 bp, Artificial Sequence
  Description of Artificial Sequence: Synthetic oligonucleotide
  Target: ATXN2; (-) strand; PAM type: YTN; PAM sequence: CTG
tactttttcagttagcagaa

SEQ ID NO: 66335 - DNA, 20 bp, Artificial Sequence
  Description of Artificial Sequence: Synthetic oligonucleotide
  Target: ATXN2; (-) strand; PAM type: YTN; PAM sequence: TTA
aaaggctgtactttttcagt

SEQ ID NO: 66336 - DNA, 20 bp, Artificial Sequence
  Description of Artificial Sequence: Synthetic oligonucleotide
  Target: ATXN2; (-) strand; PAM type: YTN; PAM sequence: TTT
aaaaggctgtactttttcag

SEQ ID NO: 66337 - DNA, 20 bp, Artificial Sequence
  Description of Artificial Sequence: Synthetic oligonucleotide
  Target: ATXN2; (-) strand; PAM type: YTN; PAM sequence: TTT
taaaaggctgtactttttca

SEQ ID NO: 66338 - DNA, 20 bp, Artificial Sequence
  Description of Artificial Sequence: Synthetic oligonucleotide
  Target: ATXN2; (-) strand; PAM type: YTN; PAM sequence: CTG
tattttaaaaggctgtactt

SEQ ID NO: 66339 - DNA, 20 bp, Artificial Sequence
  Description of Artificial Sequence: Synthetic oligonucleotide
  Target: ATXN2; (-) strand; PAM type: YTN; PAM sequence: TTA
ctgtattttaaaaggctgta

SEQ ID NO: 66340 - DNA, 20 bp, Artificial Sequence
  Description of Artificial Sequence: Synthetic oligonucleotide
  Target: ATXN2; (-) strand; PAM type: YTN; PAM sequence: TTA
gagttactgtattttaaaag

SEQ ID NO: 66341 - DNA, 20 bp, Artificial Sequence
  Description of Artificial Sequence: Synthetic oligonucleotide
  Target: ATXN2; (-) strand; PAM type: YTN; PAM sequence: TTG
attagagttactgtatttta

SEQ ID NO: 66342 - DNA, 20 bp, Artificial Sequence
  Description of Artificial Sequence: Synthetic oligonucleotide
  Target: ATXN2; (-) strand; PAM type: YTN; PAM sequence: CTT
gattagagttactgtatttt

SEQ ID NO: 66343 - DNA, 20 bp, Artificial Sequence
  Description of Artificial Sequence: Synthetic oligonucleotide
  Target: ATXN2; (-) strand; PAM type: YTN; PAM sequence: CTG
tcttgattagagttactgta

SEQ ID NO: 66344 - DNA, 20 bp, Artificial Sequence
  Description of Artificial Sequence: Synthetic oligonucleotide
  Target: ATXN2; (-) strand; PAM type: YTN; PAM sequence: TTA
tggcagtaccatactgtctt

SEQ ID NO: 66345 - DNA, 20 bp, Artificial Sequence
  Description of Artificial Sequence: Synthetic oligonucleotide
  Target: ATXN2; (-) strand; PAM type: YTN; PAM sequence: CTT
atggcagtaccatactgtct

SEQ ID NO: 66346 - DNA, 20 bp, Artificial Sequence
  Description of Artificial Sequence: Synthetic oligonucleotide
  Target: ATXN2; (-) strand; PAM type: YTN; PAM sequence: TTA
tccttatggcagtaccatac

SEQ ID NO: 66347 - DNA, 20 bp, Artificial Sequence
  Description of Artificial Sequence: Synthetic oligonucleotide
  Target: ATXN2; (-) strand; PAM type: YTN; PAM sequence: CTT
atccttatggcagtaccata

SEQ ID NO: 66348 - DNA, 20 bp, Artificial Sequence
  Description of Artificial Sequence: Synthetic oligonucleotide
  Target: ATXN2; (-) strand; PAM type: YTN; PAM sequence: CTA
tgtcttatccttatggcagt

SEQ ID NO: 66349 - DNA, 20 bp, Artificial Sequence
  Description of Artificial Sequence: Synthetic oligonucleotide
  Target: ATXN2; (-) strand; PAM type: YTN; PAM sequence: CTC
tatgtcttatccttatggca

SEQ ID NO: 66350 - DNA, 20 bp, Artificial Sequence
  Description of Artificial Sequence: Synthetic oligonucleotide
  Target: ATXN2; (-) strand; PAM type: YTN; PAM sequence: CTG
aatctctatgtcttatcctt

SEQ ID NO: 66351 - DNA, 20 bp, Artificial Sequence
  Description of Artificial Sequence: Synthetic oligonucleotide
  Target: ATXN2; (-) strand; PAM type: YTN; PAM sequence: CTC
cactgaatctctatgtctta

SEQ ID NO: 66352 - DNA, 20 bp, Artificial Sequence
  Description of Artificial Sequence: Synthetic oligonucleotide
  Target: ATXN2; (-) strand; PAM type: YTN; PAM sequence: TTG
tcctccactgaatctctatg

SEQ ID NO: 66353 - DNA, 20 bp, Artificial Sequence
  Description of Artificial Sequence: Synthetic oligonucleotide
  Target: ATXN2; (-) strand; PAM type: YTN; PAM sequence: CTG
aattgtcctccactgaatct

SEQ ID NO: 66354 - DNA, 20 bp, Artificial Sequence
  Description of Artificial Sequence: Synthetic oligonucleotide
  Target: ATXN2; (-) strand; PAM type: YTN; PAM sequence: CTC
tgaattgtcctccactgaat

SEQ ID NO: 66355 - DNA, 20 bp, Artificial Sequence
  Description of Artificial Sequence: Synthetic oligonucleotide
  Target: ATXN2; (-) strand; PAM type: YTN; PAM sequence: CTG
gactctgaattgtcctccac

SEQ ID NO: 66356 - DNA, 20 bp, Artificial Sequence
  Description of Artificial Sequence: Synthetic oligonucleotide
  Target: ATXN2; (-) strand; PAM type: YTN; PAM sequence: TTA
ctggactctgaattgtcctc

SEQ ID NO: 66357 - DNA, 20 bp, Artificial Sequence
  Description of Artificial Sequence: Synthetic oligonucleotide
  Target: ATXN2; (-) strand; PAM type: YTN; PAM sequence: TTA
ttactggactctgaattgtc

SEQ ID NO: 66358 - DNA, 20 bp, Artificial Sequence
  Description of Artificial Sequence: Synthetic oligonucleotide
  Target: ATXN2; (-) strand; PAM type: YTN; PAM sequence: TTT
attactggactctgaattgt

SEQ ID NO: 66359 - DNA, 20 bp, Artificial Sequence
  Description of Artificial Sequence: Synthetic oligonucleotide
  Target: ATXN2; (-) strand; PAM type: YTN; PAM sequence: CTA
caaatgtgaaagtttattac

SEQ ID NO: 66360 - DNA, 20 bp, Artificial Sequence
  Description of Artificial Sequence: Synthetic oligonucleotide
  Target: ATXN2; (-) strand; PAM type: YTN; PAM sequence: TTG
actacaaatgtgaaagttta

SEQ ID NO: 66361 - DNA, 20 bp, Artificial Sequence
  Description of Artificial Sequence: Synthetic oligonucleotide
  Target: ATXN2; (-) strand; PAM type: YTN; PAM sequence: CTG
ttgactacaaatgtgaaagt

SEQ ID NO: 66362 - DNA, 20 bp, Artificial Sequence
  Description of Artificial Sequence: Synthetic oligonucleotide
  Target: ATXN2; (-) strand; PAM type: YTN; PAM sequence: TTG
gaagtctgttgactacaaat

SEQ ID NO: 66363 - DNA, 20 bp, Artificial Sequence
  Description of Artificial Sequence: Synthetic oligonucleotide
  Target: ATXN2; (-) strand; PAM type: YTN; PAM sequence: TTG
ttggaagtctgttgactaca

SEQ ID NO: 66364 - DNA, 20 bp, Artificial Sequence
  Description of Artificial Sequence: Synthetic oligonucleotide
  Target: ATXN2; (-) strand; PAM type: YTN; PAM sequence: CTT
gttggaagtctgttgactac

SEQ ID NO: 66365 - DNA, 20 bp, Artificial Sequence
  Description of Artificial Sequence: Synthetic oligonucleotide
  Target: ATXN2; (-) strand; PAM type: YTN; PAM sequence: TTC
acatgcttgttggaagtctg

SEQ ID NO: 66366 - DNA, 20 bp, Artificial Sequence
  Description of Artificial Sequence: Synthetic oligonucleotide
  Target: ATXN2; (-) strand; PAM type: YTN; PAM sequence: CTT
cacatgcttgttggaagtct

SEQ ID NO: 66367 - DNA, 20 bp, Artificial Sequence
  Description of Artificial Sequence: Synthetic oligonucleotide
  Target: ATXN2; (-) strand; PAM type: YTN; PAM sequence: TTA
tcttcacatgcttgttggaa

SEQ ID NO: 66368 - DNA, 20 bp, Artificial Sequence
  Description of Artificial Sequence: Synthetic oligonucleotide
  Target: ATXN2; (-) strand; PAM type: YTN; PAM sequence: TTG
aattatcttcacatgcttgt

SEQ ID NO: 66369 - DNA, 20 bp, Artificial Sequence
  Description of Artificial Sequence: Synthetic oligonucleotide
  Target: ATXN2; (-) strand; PAM type: YTN; PAM sequence: CTC
cattgaattatcttcacatg

SEQ ID NO: 66370 - DNA, 20 bp, Artificial Sequence
  Description of Artificial Sequence: Synthetic oligonucleotide
  Target: ATXN2; (-) strand; PAM type: YTN; PAM sequence: TTC
ctccattgaattatcttcac

SEQ ID NO: 66371 - DNA, 20 bp, Artificial Sequence
  Description of Artificial Sequence: Synthetic oligonucleotide
  Target: ATXN2; (-) strand; PAM type: YTN; PAM sequence: TTT
cctccattgaattatcttca

SEQ ID NO: 66372 - DNA, 20 bp, Artificial Sequence
  Description of Artificial Sequence: Synthetic oligonucleotide
  Target: ATXN2; (-) strand; PAM type: YTN; PAM sequence: CTT
tcctccattgaattatcttc

SEQ ID NO: 66373 - DNA, 20 bp, Artificial Sequence
  Description of Artificial Sequence: Synthetic oligonucleotide
  Target: ATXN2; (-) strand; PAM type: YTN; PAM sequence: TTC
tttcctccattgaattatct

SEQ ID NO: 66374 - DNA, 20 bp, Artificial Sequence
  Description of Artificial Sequence: Synthetic oligonucleotide
  Target: ATXN2; (-) strand; PAM type: YTN; PAM sequence: CTA
ttctttcctccattgaatta

SEQ ID NO: 66375 - DNA, 20 bp, Artificial Sequence
  Description of Artificial Sequence: Synthetic oligonucleotide
  Target: ATXN2; (-) strand; PAM type: YTN; PAM sequence: CTC
aaaaaaaagactattctttc

SEQ ID NO: 66376 - DNA, 20 bp, Artificial Sequence
  Description of Artificial Sequence: Synthetic oligonucleotide
  Target: ATXN2; (-) strand; PAM type: YTN; PAM sequence: CTC
catctcaaaaaaaagactat

SEQ ID NO: 66377 - DNA, 20 bp, Artificial Sequence
  Description of Artificial Sequence: Synthetic oligonucleotide
  Target: ATXN2; (-) strand; PAM type: YTN; PAM sequence: CTC
cagtgtgggcgacagagtga

SEQ ID NO: 66378 - DNA, 20 bp, Artificial Sequence
  Description of Artificial Sequence: Synthetic oligonucleotide
  Target: ATXN2; (-) strand; PAM type: YTN; PAM sequence: CTG
agatcatgcactccagtgtg

SEQ ID NO: 66379 - DNA, 20 bp, Artificial Sequence
  Description of Artificial Sequence: Synthetic oligonucleotide
  Target: ATXN2; (-) strand; PAM type: YTN; PAM sequence: TTG
cagtgagctgagatcatgca

SEQ ID NO: 66380 - DNA, 20 bp, Artificial Sequence
  Description of Artificial Sequence: Synthetic oligonucleotide
  Target: ATXN2; (-) strand; PAM type: YTN; PAM sequence: TTG
aacccaggaggtagaggttg

SEQ ID NO: 66381 - DNA, 20 bp, Artificial Sequence
  Description of Artificial Sequence: Synthetic oligonucleotide
  Target: ATXN2; (-) strand; PAM type: YTN; PAM sequence: CTT
gaacccaggaggtagaggtt

SEQ ID NO: 66382 - DNA, 20 bp, Artificial Sequence
  Description of Artificial Sequence: Synthetic oligonucleotide
  Target: ATXN2; (-) strand; PAM type: YTN; PAM sequence: TTC
gcttgaacccaggaggtaga

SEQ ID NO: 66383 - DNA, 20 bp, Artificial Sequence
  Description of Artificial Sequence: Synthetic oligonucleotide
  Target: ATXN2; (-) strand; PAM type: YTN; PAM sequence: CTG
aggcaggagattcgcttgaa

SEQ ID NO: 66384 - DNA, 20 bp, Artificial Sequence
  Description of Artificial Sequence: Synthetic oligonucleotide
  Target: ATXN2; (-) strand; PAM type: YTN; PAM sequence: CTG
tagtggctgaggcaggagat

SEQ ID NO: 66385 - DNA, 20 bp, Artificial Sequence
  Description of Artificial Sequence: Synthetic oligonucleotide
  Target: ATXN2; (-) strand; PAM type: YTN; PAM sequence: CTA
ctgtagtggctgaggcagga

SEQ ID NO: 66386 - DNA, 20 bp, Artificial Sequence
  Description of Artificial Sequence: Synthetic oligonucleotide
  Target: ATXN2; (-) strand; PAM type: YTN; PAM sequence: CTA
gtcccactactgtagtggct

SEQ ID NO: 66387 - DNA, 20 bp, Artificial Sequence
  Description of Artificial Sequence: Synthetic oligonucleotide
  Target: ATXN2; (-) strand; PAM type: YTN; PAM sequence: CTG
tagtctagtcccactactgt

SEQ ID NO: 66388 - DNA, 20 bp, Artificial Sequence
  Description of Artificial Sequence: Synthetic oligonucleotide
  Target: ATXN2; (-) strand; PAM type: YTN; PAM sequence: CTG
ggtgtggtggcgcacacctg

SEQ ID NO: 66389 - DNA, 20 bp, Artificial Sequence
  Description of Artificial Sequence: Synthetic oligonucleotide
  Target: ATXN2; (-) strand; PAM type: YTN; PAM sequence: TTA
cctgggtgtggtggcgcaca

SEQ ID NO: 66390 - DNA, 20 bp, Artificial Sequence
  Description of Artificial Sequence: Synthetic oligonucleotide
  Target: ATXN2; (-) strand; PAM type: YTN; PAM sequence: CTA
aaaatacaaaaattacctgg

SEQ ID NO: 66391 - DNA, 20 bp, Artificial Sequence
  Description of Artificial Sequence: Synthetic oligonucleotide
  Target: ATXN2; (-) strand; PAM type: YTN; PAM sequence: CTA
ctaaaaatacaaaaattacc

SEQ ID NO: 66392 - DNA, 20 bp, Artificial Sequence
  Description of Artificial Sequence: Synthetic oligonucleotide
  Target: ATXN2; (-) strand; PAM type: YTN; PAM sequence: CTG
accaaatggtgaaaccgcat

SEQ ID NO: 66393 - DNA, 20 bp, Artificial Sequence
  Description of Artificial Sequence: Synthetic oligonucleotide
  Target: ATXN2; (-) strand; PAM type: YTN; PAM sequence: TTC
gaaaccagtctgaccaaatg

SEQ ID NO: 66394 - DNA, 20 bp, Artificial Sequence
  Description of Artificial Sequence: Synthetic oligonucleotide
  Target: ATXN2; (-) strand; PAM type: YTN; PAM sequence: TTG
ggagtcccaagcaggcagat

SEQ ID NO: 66395 - DNA, 20 bp, Artificial Sequence
  Description of Artificial Sequence: Synthetic oligonucleotide
  Target: ATXN2; (-) strand; PAM type: YTN; PAM sequence: TTT
gggagtcccaagcaggcaga

SEQ ID NO: 66396 - DNA, 20 bp, Artificial Sequence
  Description of Artificial Sequence: Synthetic oligonucleotide
  Target: ATXN2; (-) strand; PAM type: YTN; PAM sequence: CTT
tgggagtcccaagcaggcag

SEQ ID NO: 66397 - DNA, 20 bp, Artificial Sequence
  Description of Artificial Sequence: Synthetic oligonucleotide
  Target: ATXN2; (-) strand; PAM type: YTN; PAM sequence: CTG
taatcccagcactttgggag

SEQ ID NO: 66398 - DNA, 20 bp, Artificial Sequence
  Description of Artificial Sequence: Synthetic oligonucleotide
  Target: ATXN2; (-) strand; PAM type: YTN; PAM sequence: CTC
aacgcctgtaatcccagcac

SEQ ID NO: 66399 - DNA, 20 bp, Artificial Sequence
  Description of Artificial Sequence: Synthetic oligonucleotide
  Target: ATXN2; (-) strand; PAM type: YTN; PAM sequence: CTC
tcaacgcctgtaatcccagc

SEQ ID NO: 66400 - DNA, 20 bp, Artificial Sequence
  Description of Artificial Sequence: Synthetic oligonucleotide
  Target: ATXN2; (-) strand; PAM type: YTN; PAM sequence: TTG
gccaggcacagtggctctca

SEQ ID NO: 66401 - DNA, 20 bp, Artificial Sequence
  Description of Artificial Sequence: Synthetic oligonucleotide
  Target: ATXN2; (-) strand; PAM type: YTN; PAM sequence: CTT
ggccaggcacagtggctctc

SEQ ID NO: 66402 - DNA, 20 bp, Artificial Sequence
  Description of Artificial Sequence: Synthetic oligonucleotide
  Target: ATXN2; (-) strand; PAM type: YTN; PAM sequence: TTC
ttggccaggcacagtggctc

SEQ ID NO: 66403 - DNA, 20 bp, Artificial Sequence
  Description of Artificial Sequence: Synthetic oligonucleotide
  Target: ATXN2; (-) strand; PAM type: YTN; PAM sequence: CTA
ttcttggccaggcacagtgg

SEQ ID NO: 66404 - DNA, 20 bp, Artificial Sequence
  Description of Artificial Sequence: Synthetic oligonucleotide
  Target: ATXN2; (-) strand; PAM type: YTN; PAM sequence: TTA
aaaagactattcttggccag

SEQ ID NO: 66405 - DNA, 20 bp, Artificial Sequence
  Description of Artificial Sequence: Synthetic oligonucleotide
  Target: ATXN2; (-) strand; PAM type: YTN; PAM sequence: CTG
ttaaaaagactattcttggc

SEQ ID NO: 66406 - DNA, 20 bp, Artificial Sequence
  Description of Artificial Sequence: Synthetic oligonucleotide
  Target: ATXN2; (-) strand; PAM type: YTN; PAM sequence: TTG
tcccagcaccatctgttaaa

SEQ ID NO: 66407 - DNA, 20 bp, Artificial Sequence
  Description of Artificial Sequence: Synthetic oligonucleotide
  Target: ATXN2; (-) strand; PAM type: YTN; PAM sequence: TTA
gttgtcccagcaccatctgt

SEQ ID NO: 66408 - DNA, 20 bp, Artificial Sequence
  Description of Artificial Sequence: Synthetic oligonucleotide
  Target: ATXN2; (-) strand; PAM type: YTN; PAM sequence: TTC
cgtatgtaggtattagttgt

SEQ ID NO: 66409 - DNA, 20 bp, Artificial Sequence
  Description of Artificial Sequence: Synthetic oligonucleotide
  Target: ATXN2; (-) strand; PAM type: YTN; PAM sequence: CTT
ccgtatgtaggtattagttg

SEQ ID NO: 66410 - DNA, 20 bp, Artificial Sequence
  Description of Artificial Sequence: Synthetic oligonucleotide
  Target: ATXN2; (-) strand; PAM type: YTN; PAM sequence: TTC
ttccgtatgtaggtattagt

SEQ ID NO: 66411 - DNA, 20 bp, Artificial Sequence
  Description of Artificial Sequence: Synthetic oligonucleotide
  Target: ATXN2; (-) strand; PAM type: YTN; PAM sequence: TTC
attcttccgtatgtaggtat

SEQ ID NO: 66412 - DNA, 20 bp, Artificial Sequence
  Description of Artificial Sequence: Synthetic oligonucleotide
  Target: ATXN2; (-) strand; PAM type: YTN; PAM sequence: TTC
agattcattcttccgtatgt

SEQ ID NO: 66413 - DNA, 20 bp, Artificial Sequence
  Description of Artificial Sequence: Synthetic oligonucleotide
  Target: ATXN2; (-) strand; PAM type: YTN; PAM sequence: CTG
tgtaagttcagattcattct

SEQ ID NO: 66414 - DNA, 20 bp, Artificial Sequence
  Description of Artificial Sequence: Synthetic oligonucleotide
  Target: ATXN2; (-) strand; PAM type: YTN; PAM sequence: TTA
ctgtgtaagttcagattcat

SEQ ID NO: 66415 - DNA, 20 bp, Artificial Sequence
  Description of Artificial Sequence: Synthetic oligonucleotide
  Target: ATXN2; (-) strand; PAM type: YTN; PAM sequence: TTT
actgtgtaagttcagattca

SEQ ID NO: 66416 - DNA, 20 bp, Artificial Sequence
  Description of Artificial Sequence: Synthetic oligonucleotide
  Target: ATXN2; (-) strand; PAM type: YTN; PAM sequence: TTT
tactgtgtaagttcagattc

SEQ ID NO: 66417 - DNA, 20 bp, Artificial Sequence
  Description of Artificial Sequence: Synthetic oligonucleotide
  Target: ATXN2; (-) strand; PAM type: YTN; PAM sequence: TTT
ttactgtgtaagttcagatt

SEQ ID NO: 66418 - DNA, 20 bp, Artificial Sequence
  Description of Artificial Sequence: Synthetic oligonucleotide
  Target: ATXN2; (-) strand; PAM type: YTN; PAM sequence: TTA
taaccatttttactgtgtaa

SEQ ID NO: 66419 - DNA, 20 bp, Artificial Sequence
  Description of Artificial Sequence: Synthetic oligonucleotide
  Target: ATXN2; (-) strand; PAM type: YTN; PAM sequence: CTT
ataaccatttttactgtgta

SEQ ID NO: 66420 - DNA, 20 bp, Artificial Sequence
  Description of Artificial Sequence: Synthetic oligonucleotide
  Target: ATXN2; (-) strand; PAM type: YTN; PAM sequence: TTG
acacataaccatacacttat

SEQ ID NO: 66421 - DNA, 20 bp, Artificial Sequence
  Description of Artificial Sequence: Synthetic oligonucleotide
  Target: ATXN2; (-) strand; PAM type: YTN; PAM sequence: CTA
attgacacataaccatacac

SEQ ID NO: 66422 - DNA, 20 bp, Artificial Sequence
  Description of Artificial Sequence: Synthetic oligonucleotide
  Target: ATXN2; (-) strand; PAM type: YTN; PAM sequence: TTC
taattgacacataaccatac

SEQ ID NO: 66423 - DNA, 20 bp, Artificial Sequence
  Description of Artificial Sequence: Synthetic oligonucleotide
  Target: ATXN2; (-) strand; PAM type: YTN; PAM sequence: TTT
ctaattgacacataaccata

SEQ ID NO: 66424 - DNA, 20 bp, Artificial Sequence
  Description of Artificial Sequence: Synthetic oligonucleotide
  Target: ATXN2; (-) strand; PAM type: YTN; PAM sequence: TTA
tttctaattgacacataacc

SEQ ID NO: 66425 - DNA, 20 bp, Artificial Sequence
  Description of Artificial Sequence: Synthetic oligonucleotide
  Target: ATXN2; (-) strand; PAM type: YTN; PAM sequence: TTT
atttctaattgacacataac

SEQ ID NO: 66426 - DNA, 20 bp, Artificial Sequence
  Description of Artificial Sequence: Synthetic oligonucleotide
  Target: ATXN2; (-) strand; PAM type: YTN; PAM sequence: TTT
tatttctaattgacacataa

SEQ ID NO: 66427 - DNA, 20 bp, Artificial Sequence
  Description of Artificial Sequence: Synthetic oligonucleotide
  Target: ATXN2; (-) strand; PAM type: YTN; PAM sequence: TTT
ttatttctaattgacacata

SEQ ID NO: 66428 - DNA, 20 bp, Artificial Sequence
  Description of Artificial Sequence: Synthetic oligonucleotide
  Target: ATXN2; (-) strand; PAM type: YTN; PAM sequence: TTT
tttatttctaattgacacat

SEQ ID NO: 66429 - DNA, 20 bp, Artificial Sequence
  Description of Artificial Sequence: Synthetic oligonucleotide
  Target: ATXN2; (-) strand; PAM type: YTN; PAM sequence: TTA
attttttatttctaattgac

SEQ ID NO: 66430 - DNA, 20 bp, Artificial Sequence
  Description of Artificial Sequence: Synthetic oligonucleotide
  Target: ATXN2; (-) strand; PAM type: YTN; PAM sequence: TTA
tattaattttttatttctaa

SEQ ID NO: 66431 - DNA, 20 bp, Artificial Sequence
  Description of Artificial Sequence: Synthetic oligonucleotide
  Target: ATXN2; (-) strand; PAM type: YTN; PAM sequence: TTT
atattaattttttatttcta

SEQ ID NO: 66432 - DNA, 20 bp, Artificial Sequence
  Description of Artificial Sequence: Synthetic oligonucleotide
  Target: ATXN2; (-) strand; PAM type: YTN; PAM sequence: CTT
tatattaattttttatttct

SEQ ID NO: 66433 - DNA, 20 bp, Artificial Sequence
  Description of Artificial Sequence: Synthetic oligonucleotide
  Target: ATXN2; (-) strand; PAM type: YTN; PAM sequence: TTC
tttatattaattttttattt

SEQ ID NO: 66434 - DNA, 20 bp, Artificial Sequence
  Description of Artificial Sequence: Synthetic oligonucleotide
  Target: ATXN2; (-) strand; PAM type: YTN; PAM sequence: TTC
attctttatattaatttttt

SEQ ID NO: 66435 - DNA, 20 bp, Artificial Sequence
  Description of Artificial Sequence: Synthetic oligonucleotide
  Target: ATXN2; (-) strand; PAM type: YTN; PAM sequence: TTC
aaattcattctttatattaa

SEQ ID NO: 66436 - DNA, 20 bp, Artificial Sequence
  Description of Artificial Sequence: Synthetic oligonucleotide
  Target: ATXN2; (-) strand; PAM type: YTN; PAM sequence: TTA
atatagcataaggtggggtt

SEQ ID NO: 66437 - DNA, 20 bp, Artificial Sequence
  Description of Artificial Sequence: Synthetic oligonucleotide
  Target: ATXN2; (-) strand; PAM type: YTN; PAM sequence: TTT
aatatagcataaggtggggt

SEQ ID NO: 66438 - DNA, 20 bp, Artificial Sequence
  Description of Artificial Sequence: Synthetic oligonucleotide
  Target: ATXN2; (-) strand; PAM type: YTN; PAM sequence: TTA
tttaatatagcataaggtgg

SEQ ID NO: 66439 - DNA, 20 bp, Artificial Sequence
  Description of Artificial Sequence: Synthetic oligonucleotide
  Target: ATXN2; (-) strand; PAM type: YTN; PAM sequence: TTG
agcagttatttaatatagca

SEQ ID NO: 66440 - DNA, 20 bp, Artificial Sequence
  Description of Artificial Sequence: Synthetic oligonucleotide
  Target: ATXN2; (-) strand; PAM type: YTN; PAM sequence: TTT
gagcagttatttaatatagc

SEQ ID NO: 66441 - DNA, 20 bp, Artificial Sequence
  Description of Artificial Sequence: Synthetic oligonucleotide
  Target: ATXN2; (-) strand; PAM type: YTN; PAM sequence: TTT
tgagcagttatttaatatag

SEQ ID NO: 66442 - DNA, 20 bp, Artificial Sequence
  Description of Artificial Sequence: Synthetic oligonucleotide
  Target: ATXN2; (-) strand; PAM type: YTN; PAM sequence: CTC
agcccattttgagcagttat

SEQ ID NO: 66443 - DNA, 20 bp, Artificial Sequence
  Description of Artificial Sequence: Synthetic oligonucleotide
  Target: ATXN2; (-) strand; PAM type: YTN; PAM sequence: TTG
gtgctcagcccattttgagc

SEQ ID NO: 66444 - DNA, 20 bp, Artificial Sequence
  Description of Artificial Sequence: Synthetic oligonucleotide
  Target: ATXN2; (-) strand; PAM type: YTN; PAM sequence: CTT
ggtgctcagcccattttgag

SEQ ID NO: 66445 - DNA, 20 bp, Artificial Sequence
  Description of Artificial Sequence: Synthetic oligonucleotide
  Target: ATXN2; (-) strand; PAM type: YTN; PAM sequence: TTA
aaaaaggtcataggagagtg

SEQ ID NO: 66446 - DNA, 20 bp, Artificial Sequence
  Description of Artificial Sequence: Synthetic oligonucleotide
  Target: ATXN2; (-) strand; PAM type: YTN; PAM sequence: TTA
aaaaattaaaaaaggtcata

SEQ ID NO: 66447 - DNA, 20 bp, Artificial Sequence
  Description of Artificial Sequence: Synthetic oligonucleotide
  Target: ATXN2; (-) strand; PAM type: YTN; PAM sequence: TTA
ttaaaaaattaaaaaaggtc

SEQ ID NO: 66448 - DNA, 20 bp, Artificial Sequence
  Description of Artificial Sequence: Synthetic oligonucleotide
  Target: ATXN2; (-) strand; PAM type: YTN; PAM sequence: TTG
ttattaaaaaattaaaaaag

SEQ ID NO: 66449 - DNA, 20 bp, Artificial Sequence
  Description of Artificial Sequence: Synthetic oligonucleotide
  Target: ATXN2; (-) strand; PAM type: YTN; PAM sequence: TTA
agtgaaacaaattgttatta

SEQ ID NO: 66450 - DNA, 20 bp, Artificial Sequence
  Description of Artificial Sequence: Synthetic oligonucleotide
  Target: ATXN2; (-) strand; PAM type: YTN; PAM sequence: TTT
aagtgaaacaaattgttatt

SEQ ID NO: 66451 - DNA, 20 bp, Artificial Sequence
  Description of Artificial Sequence: Synthetic oligonucleotide
  Target: ATXN2; (-) strand; PAM type: YTN; PAM sequence: TTT
taagtgaaacaaattgttat

SEQ ID NO: 66452 - DNA, 20 bp, Artificial Sequence
  Description of Artificial Sequence: Synthetic oligonucleotide
  Target: ATXN2; (-) strand; PAM type: YTN; PAM sequence: TTT
ttaagtgaaacaaattgtta

SEQ ID NO: 66453 - DNA, 20 bp, Artificial Sequence
  Description of Artificial Sequence: Synthetic oligonucleotide
  Target: ATXN2; (-) strand; PAM type: YTN; PAM sequence: TTT
tttaagtgaaacaaattgtt

SEQ ID NO: 66454 - DNA, 20 bp, Artificial Sequence
  Description of Artificial Sequence: Synthetic oligonucleotide
  Target: ATXN2; (-) strand; PAM type: YTN; PAM sequence: TTT
ttttaagtgaaacaaattgt

SEQ ID NO: 66455 - DNA, 20 bp, Artificial Sequence
  Description of Artificial Sequence: Synthetic oligonucleotide
  Target: ATXN2; (-) strand; PAM type: YTN; PAM sequence: TTT
tttttaagtgaaacaaattg

SEQ ID NO: 66456 - DNA, 20 bp, Artificial Sequence
  Description of Artificial Sequence: Synthetic oligonucleotide
  Target: ATXN2; (-) strand; PAM type: YTN; PAM sequence: TTG
attttttttaagtgaaacaa

SEQ ID NO: 66457 - DNA, 20 bp, Artificial Sequence
  Description of Artificial Sequence: Synthetic oligonucleotide
  Target: ATXN2; (-) strand; PAM type: YTN; PAM sequence: TTT
gattttttttaagtgaaaca

SEQ ID NO: 66458 - DNA, 20 bp, Artificial Sequence
  Description of Artificial Sequence: Synthetic oligonucleotide
  Target: ATXN2; (-) strand; PAM type: YTN; PAM sequence: TTA
tgagaataacatttgatttt

SEQ ID NO: 66459 - DNA, 20 bp, Artificial Sequence
  Description of Artificial Sequence: Synthetic oligonucleotide
  Target: ATXN2; (-) strand; PAM type: YTN; PAM sequence: CTA
taacaatattatgagaataa

SEQ ID NO: 66460 - DNA, 20 bp, Artificial Sequence
  Description of Artificial Sequence: Synthetic oligonucleotide
  Target: ATXN2; (-) strand; PAM type: YTN; PAM sequence: TTC
ctataacaatattatgagaa

SEQ ID NO: 66461 - DNA, 20 bp, Artificial Sequence
  Description of Artificial Sequence: Synthetic oligonucleotide
  Target: ATXN2; (-) strand; PAM type: YTN; PAM sequence: TTT
cctataacaatattatgaga

SEQ ID NO: 66462 - DNA, 20 bp, Artificial Sequence
  Description of Artificial Sequence: Synthetic oligonucleotide
  Target: ATXN2; (-) strand; PAM type: YTN; PAM sequence: CTT
tcctataacaatattatgag

SEQ ID NO: 66463 - DNA, 20 bp, Artificial Sequence
  Description of Artificial Sequence: Synthetic oligonucleotide
  Target: ATXN2; (-) strand; PAM type: YTN; PAM sequence: CTG
gatcgggacccctttcctat

SEQ ID NO: 66464 - DNA, 20 bp, Artificial Sequence
  Description of Artificial Sequence: Synthetic oligonucleotide
  Target: ATXN2; (-) strand; PAM type: YTN; PAM sequence: CTG
ggggtctggatcgggacccc

SEQ ID NO: 66465 - DNA, 20 bp, Artificial Sequence
  Description of Artificial Sequence: Synthetic oligonucleotide
  Target: ATXN2; (-) strand; PAM type: YTN; PAM sequence: CTC
tgggggtctggatcgggacc

SEQ ID NO: 66466 - DNA, 20 bp, Artificial Sequence
  Description of Artificial Sequence: Synthetic oligonucleotide
  Target: ATXN2; (-) strand; PAM type: YTN; PAM sequence: CTC
tctgggggtctggatcggga

SEQ ID NO: 66467 - DNA, 20 bp, Artificial Sequence
  Description of Artificial Sequence: Synthetic oligonucleotide
  Target: ATXN2; (-) strand; PAM type: YTN; PAM sequence: TTG
tgcaagatccaagagccctc

SEQ ID NO: 66468 - DNA, 20 bp, Artificial Sequence
  Description of Artificial Sequence: Synthetic oligonucleotide
  Target: ATXN2; (-) strand; PAM type: YTN; PAM sequence: CTT
gtgcaagatccaagagccct

SEQ ID NO: 66469 - DNA, 20 bp, Artificial Sequence
  Description of Artificial Sequence: Synthetic oligonucleotide
  Target: ATXN2; (-) strand; PAM type: YTN; PAM sequence: TTC
ttgtgcaagatccaagagcc

SEQ ID NO: 66470 - DNA, 20 bp, Artificial Sequence
  Description of Artificial Sequence: Synthetic oligonucleotide
  Target: ATXN2; (-) strand; PAM type: YTN; PAM sequence: TTT
cttgtgcaagatccaagagc

SEQ ID NO: 66471 - DNA, 20 bp, Artificial Sequence
  Description of Artificial Sequence: Synthetic oligonucleotide
  Target: ATXN2; (-) strand; PAM type: YTN; PAM sequence: CTT
tcttgtgcaagatccaagag

SEQ ID NO: 66472 - DNA, 20 bp, Artificial Sequence
  Description of Artificial Sequence: Synthetic oligonucleotide
  Target: ATXN2; (-) strand; PAM type: YTN; PAM sequence: TTC
tttcttgtgcaagatccaag

SEQ ID NO: 66473 - DNA, 20 bp, Artificial Sequence
  Description of Artificial Sequence: Synthetic oligonucleotide
  Target: ATXN2; (-) strand; PAM type: YTN; PAM sequence: CTG
aattctttcttgtgcaagat

SEQ ID NO: 66474 - DNA, 20 bp, Artificial Sequence
  Description of Artificial Sequence: Synthetic oligonucleotide
  Target: ATXN2; (-) strand; PAM type: YTN; PAM sequence: CTC
gccctgaattctttcttgtg

SEQ ID NO: 66475 - DNA, 20 bp, Artificial Sequence
  Description of Artificial Sequence: Synthetic oligonucleotide
  Target: ATXN2; (-) strand; PAM type: YTN; PAM sequence: CTG
cggactcgccctgaattctt

SEQ ID NO: 66476 - DNA, 20 bp, Artificial Sequence
  Description of Artificial Sequence: Synthetic oligonucleotide
  Target: ATXN2; (-) strand; PAM type: YTN; PAM sequence: TTG
cactgcggactcgccctgaa

SEQ ID NO: 66477 - DNA, 20 bp, Artificial Sequence
  Description of Artificial Sequence: Synthetic oligonucleotide
  Target: ATXN2; (-) strand; PAM type: YTN; PAM sequence: CTT
gcactgcggactcgccctga

SEQ ID NO: 66478 - DNA, 20 bp, Artificial Sequence
  Description of Artificial Sequence: Synthetic oligonucleotide
  Target: ATXN2; (-) strand; PAM type: YTN; PAM sequence: TTC
accttgcactgcggactcgc

SEQ ID NO: 66479 - DNA, 20 bp, Artificial Sequence
  Description of Artificial Sequence: Synthetic oligonucleotide
  Target: ATXN2; (-) strand; PAM type: YTN; PAM sequence: TTT
caccttgcactgcggactcg

SEQ ID NO: 66480 - DNA, 20 bp, Artificial Sequence
  Description of Artificial Sequence: Synthetic oligonucleotide
  Target: ATXN2; (-) strand; PAM type: YTN; PAM sequence: CTT
tcaccttgcactgcggactc

SEQ ID NO: 66481 - DNA, 20 bp, Artificial Sequence
  Description of Artificial Sequence: Synthetic oligonucleotide
  Target: ATXN2; (-) strand; PAM type: YTN; PAM sequence: TTG
ctttcaccttgcactgcgga

SEQ ID NO: 66482 - DNA, 20 bp, Artificial Sequence
  Description of Artificial Sequence: Synthetic oligonucleotide
  Target: ATXN2; (-) strand; PAM type: YTN; PAM sequence: CTC
ccaaagtgaaaaattgcttt

SEQ ID NO: 66483 - DNA, 20 bp, Artificial Sequence
  Description of Artificial Sequence: Synthetic oligonucleotide
  Target: ATXN2; (-) strand; PAM type: YTN; PAM sequence: CTC
agcctcccaaagtgaaaaat

SEQ ID NO: 66484 - DNA, 20 bp, Artificial Sequence
  Description of Artificial Sequence: Synthetic oligonucleotide
  Target: ATXN2; (-) strand; PAM type: YTN; PAM sequence: CTC
aagtgacacgcccacctcag

SEQ ID NO: 66485 - DNA, 20 bp, Artificial Sequence
  Description of Artificial Sequence: Synthetic oligonucleotide
  Target: ATXN2; (-) strand; PAM type: YTN; PAM sequence: TTG
gactcaagtgacacgcccac

SEQ ID NO: 66486 - DNA, 20 bp, Artificial Sequence
  Description of Artificial Sequence: Synthetic oligonucleotide
  Target: ATXN2; (-) strand; PAM type: YTN; PAM sequence: CTT
ggactcaagtgacacgccca

SEQ ID NO: 66487 - DNA, 20 bp, Artificial Sequence
  Description of Artificial Sequence: Synthetic oligonucleotide
  Target: ATXN2; (-) strand; PAM type: YTN; PAM sequence: CTC
aaacacttggactcaagtga

SEQ ID NO: 66488 - DNA, 20 bp, Artificial Sequence
  Description of Artificial Sequence: Synthetic oligonucleotide
  Target: ATXN2; (-) strand; PAM type: YTN; PAM sequence: CTG
gtctcaaacacttggactca

SEQ ID NO: 66489 - DNA, 20 bp, Artificial Sequence
  Description of Artificial Sequence: Synthetic oligonucleotide
  Target: ATXN2; (-) strand; PAM type: YTN; PAM sequence: TTG
cccaggctggtctcaaacac

SEQ ID NO: 66490 - DNA, 20 bp, Artificial Sequence
  Description of Artificial Sequence: Synthetic oligonucleotide
  Target: ATXN2; (-) strand; PAM type: YTN; PAM sequence: TTC
gccatgttgcccaggctggt

SEQ ID NO: 66491 - DNA, 20 bp, Artificial Sequence
  Description of Artificial Sequence: Synthetic oligonucleotide
  Target: ATXN2; (-) strand; PAM type: YTN; PAM sequence: TTT
cgccatgttgcccaggctgg

SEQ ID NO: 66492 - DNA, 20 bp, Artificial Sequence
  Description of Artificial Sequence: Synthetic oligonucleotide
  Target: ATXN2; (-) strand; PAM type: YTN; PAM sequence: TTG
tagagacagaatttcgccat

SEQ ID NO: 66493 - DNA, 20 bp, Artificial Sequence
  Description of Artificial Sequence: Synthetic oligonucleotide
  Target: ATXN2; (-) strand; PAM type: YTN; PAM sequence: TTT
gtagagacagaatttcgcca

SEQ ID NO: 66494 - DNA, 20 bp, Artificial Sequence
  Description of Artificial Sequence: Synthetic oligonucleotide
  Target: ATXN2; (-) strand; PAM type: YTN; PAM sequence: TTT
tgtagagacagaatttcgcc

SEQ ID NO: 66495 - DNA, 20 bp, Artificial Sequence
  Description of Artificial Sequence: Synthetic oligonucleotide
  Target: ATXN2; (-) strand; PAM type: YTN; PAM sequence: TTT
ttgtagagacagaatttcgc

SEQ ID NO: 66496 - DNA, 20 bp, Artificial Sequence
  Description of Artificial Sequence: Synthetic oligonucleotide
  Target: ATXN2; (-) strand; PAM type: YTN; PAM sequence: TTT
tttgtagagacagaatttcg

SEQ ID NO: 66497 - DNA, 20 bp, Artificial Sequence
  Description of Artificial Sequence: Synthetic oligonucleotide
  Target: ATXN2; (-) strand; PAM type: YTN; PAM sequence: TTT
ttttgtagagacagaatttc

SEQ ID NO: 66498 - DNA, 20 bp, Artificial Sequence
  Description of Artificial Sequence: Synthetic oligonucleotide
  Target: ATXN2; (-) strand; PAM type: YTN; PAM sequence: TTG
tatttttttgtagagacaga

SEQ ID NO: 66499 - DNA, 20 bp, Artificial Sequence
  Description of Artificial Sequence: Synthetic oligonucleotide
  Target: ATXN2; (-) strand; PAM type: YTN; PAM sequence: TTT
gtatttttttgtagagacag

SEQ ID NO: 66500 - DNA, 20 bp, Artificial Sequence
  Description of Artificial Sequence: Synthetic oligonucleotide
  Target: ATXN2; (-) strand; PAM type: YTN; PAM sequence: TTT
tgtatttttttgtagagaca

SEQ ID NO: 66501 - DNA, 20 bp, Artificial Sequence
  Description of Artificial Sequence: Synthetic oligonucleotide
  Target: ATXN2; (-) strand; PAM type: YTN; PAM sequence: CTT
ttgtatttttttgtagagac

SEQ ID NO: 66502 - DNA, 20 bp, Artificial Sequence
  Description of Artificial Sequence: Synthetic oligonucleotide
  Target: ATXN2; (-) strand; PAM type: YTN; PAM sequence: TTA
ataacttttgtatttttttg

SEQ ID NO: 66503 - DNA, 20 bp, Artificial Sequence
  Description of Artificial Sequence: Synthetic oligonucleotide
  Target: ATXN2; (-) strand; PAM type: YTN; PAM sequence: CTA
ttaataacttttgtattttt

SEQ ID NO: 66504 - DNA, 20 bp, Artificial Sequence
  Description of Artificial Sequence: Synthetic oligonucleotide
  Target: ATXN2; (-) strand; PAM type: YTN; PAM sequence: TTG
ctattaataacttttgtatt

SEQ ID NO: 66505 - DNA, 20 bp, Artificial Sequence
  Description of Artificial Sequence: Synthetic oligonucleotide
  Target: ATXN2; (-) strand; PAM type: YTN; PAM sequence: CTT
gctattaataacttttgtat

SEQ ID NO: 66506 - DNA, 20 bp, Artificial Sequence
  Description of Artificial Sequence: Synthetic oligonucleotide
  Target: ATXN2; (-) strand; PAM type: YTN; PAM sequence: CTA
caggtgtgcaccaccacacc

SEQ ID NO: 66507 - DNA, 20 bp, Artificial Sequence
  Description of Artificial Sequence: Synthetic oligonucleotide
  Target: ATXN2; (-) strand; PAM type: YTN; PAM sequence: CTG
gtactacaggtgtgcaccac

SEQ ID NO: 66508 - DNA, 20 bp, Artificial Sequence
  Description of Artificial Sequence: Synthetic oligonucleotide
  Target: ATXN2; (-) strand; PAM type: YTN; PAM sequence: CTC
aaatgagtagctggtactac

SEQ ID NO: 66509 - DNA, 20 bp, Artificial Sequence
  Description of Artificial Sequence: Synthetic oligonucleotide
  Target: ATXN2; (-) strand; PAM type: YTN; PAM sequence: CTG
ggctcaaatgagtagctggt

SEQ ID NO: 66510 - DNA, 20 bp, Artificial Sequence
  Description of Artificial Sequence: Synthetic oligonucleotide
  Target: ATXN2; (-) strand; PAM type: YTN; PAM sequence: CTC
ctgggctcaaatgagtagct

SEQ ID NO: 66511 - DNA, 20 bp, Artificial Sequence
  Description of Artificial Sequence: Synthetic oligonucleotide
  Target: ATXN2; (-) strand; PAM type: YTN; PAM sequence: CTC
agcctcctgggctcaaatga

SEQ ID NO: 66512 - DNA, 20 bp, Artificial Sequence
  Description of Artificial Sequence: Synthetic oligonucleotide
  Target: ATXN2; (-) strand; PAM type: YTN; PAM sequence: CTC
acagcagcctcagcctcctg

SEQ ID NO: 66513 - DNA, 20 bp, Artificial Sequence
  Description of Artificial Sequence: Synthetic oligonucleotide
  Target: ATXN2; (-) strand; PAM type: YTN; PAM sequence: TTG
gctcacagcagcctcagcct

SEQ ID NO: 66514 - DNA, 20 bp, Artificial Sequence
  Description of Artificial Sequence: Synthetic oligonucleotide
  Target: ATXN2; (-) strand; PAM type: YTN; PAM sequence: CTT
ggctcacagcagcctcagcc

SEQ ID NO: 66515 - DNA, 20 bp, Artificial Sequence
  Description of Artificial Sequence: Synthetic oligonucleotide
  Target: ATXN2; (-) strand; PAM type: YTN; PAM sequence: CTG
gagggcagtggtgcaatctt

SEQ ID NO: 66516 - DNA, 20 bp, Artificial Sequence
  Description of Artificial Sequence: Synthetic oligonucleotide
  Target: ATXN2; (-) strand; PAM type: YTN; PAM sequence: TTA
ggctggagggcagtggtgca

SEQ ID NO: 66517 - DNA, 20 bp, Artificial Sequence
  Description of Artificial Sequence: Synthetic oligonucleotide
  Target: ATXN2; (-) strand; PAM type: YTN; PAM sequence: CTT
aggctggagggcagtggtgc

SEQ ID NO: 66518 - DNA, 20 bp, Artificial Sequence
  Description of Artificial Sequence: Synthetic oligonucleotide
  Target: ATXN2; (-) strand; PAM type: YTN; PAM sequence: TTG
cttaggctggagggcagtgg

SEQ ID NO: 66519 - DNA, 20 bp, Artificial Sequence
  Description of Artificial Sequence: Synthetic oligonucleotide
  Target: ATXN2; (-) strand; PAM type: YTN; PAM sequence: TTT
gcttaggctggagggcagtg

SEQ ID NO: 66520 - DNA, 20 bp, Artificial Sequence
  Description of Artificial Sequence: Synthetic oligonucleotide
  Target: ATXN2; (-) strand; PAM type: YTN; PAM sequence: TTT
tgcttaggctggagggcagt

SEQ ID NO: 66521 - DNA, 20 bp, Artificial Sequence
  Description of Artificial Sequence: Synthetic oligonucleotide
  Target: ATXN2; (-) strand; PAM type: YTN; PAM sequence: CTT
ttgcttaggctggagggcag

SEQ ID NO: 66522 - DNA, 20 bp, Artificial Sequence
  Description of Artificial Sequence: Synthetic oligonucleotide
  Target: ATXN2; (-) strand; PAM type: YTN; PAM sequence: CTC
ttttgcttaggctggagggc

SEQ ID NO: 66523 - DNA, 20 bp, Artificial Sequence
  Description of Artificial Sequence: Synthetic oligonucleotide
  Target: ATXN2; (-) strand; PAM type: YTN; PAM sequence: CTC
gctcttttgcttaggctgga

SEQ ID NO: 66524 - DNA, 20 bp, Artificial Sequence
  Description of Artificial Sequence: Synthetic oligonucleotide
  Target: ATXN2; (-) strand; PAM type: YTN; PAM sequence: TTG
acacagaatctcgctctttt

SEQ ID NO: 66525 - DNA, 20 bp, Artificial Sequence
  Description of Artificial Sequence: Synthetic oligonucleotide
  Target: ATXN2; (-) strand; PAM type: YTN; PAM sequence: TTT
gacacagaatctcgctcttt

SEQ ID NO: 66526 - DNA, 20 bp, Artificial Sequence
  Description of Artificial Sequence: Synthetic oligonucleotide
  Target: ATXN2; (-) strand; PAM type: YTN; PAM sequence: TTT
tgacacagaatctcgctctt

SEQ ID NO: 66527 - DNA, 20 bp, Artificial Sequence
  Description of Artificial Sequence: Synthetic oligonucleotide
  Target: ATXN2; (-) strand; PAM type: YTN; PAM sequence: CTT
ttgacacagaatctcgctct

SEQ ID NO: 66528 - DNA, 20 bp, Artificial Sequence
  Description of Artificial Sequence: Synthetic oligonucleotide
  Target: ATXN2; (-) strand; PAM type: YTN; PAM sequence: TTC
ttttgacacagaatctcgct

SEQ ID NO: 66529 - DNA, 20 bp, Artificial Sequence
  Description of Artificial Sequence: Synthetic oligonucleotide
  Target: ATXN2; (-) strand; PAM type: YTN; PAM sequence: TTT
cttttgacacagaatctcgc

SEQ ID NO: 66530 - DNA, 20 bp, Artificial Sequence
  Description of Artificial Sequence: Synthetic oligonucleotide
  Target: ATXN2; (-) strand; PAM type: YTN; PAM sequence: TTT
tcttttgacacagaatctcg

SEQ ID NO: 66531 - DNA, 20 bp, Artificial Sequence
  Description of Artificial Sequence: Synthetic oligonucleotide
  Target: ATXN2; (-) strand; PAM type: YTN; PAM sequence: TTT
ttcttttgacacagaatctc

SEQ ID NO: 66532 - DNA, 20 bp, Artificial Sequence
  Description of Artificial Sequence: Synthetic oligonucleotide
  Target: ATXN2; (-) strand; PAM type: YTN; PAM sequence: TTT
tttcttttgacacagaatct

SEQ ID NO: 66533 - DNA, 20 bp, Artificial Sequence
  Description of Artificial Sequence: Synthetic oligonucleotide
  Target: ATXN2; (-) strand; PAM type: YTN; PAM sequence: TTT
ttttcttttgacacagaatc

SEQ ID NO: 66534 - DNA, 20 bp, Artificial Sequence
  Description of Artificial Sequence: Synthetic oligonucleotide
  Target: ATXN2; (-) strand; PAM type: YTN; PAM sequence: TTT
tttttcttttgacacagaat

SEQ ID NO: 66535 - DNA, 20 bp, Artificial Sequence
  Description of Artificial Sequence: Synthetic oligonucleotide
  Target: ATXN2; (-) strand; PAM type: YTN; PAM sequence: TTT
ttttttcttttgacacagaa

SEQ ID NO: 66536 - DNA, 20 bp, Artificial Sequence
  Description of Artificial Sequence: Synthetic oligonucleotide
  Target: ATXN2; (-) strand; PAM type: YTN; PAM sequence: CTT
tttttttcttttgacacaga

SEQ ID NO: 66537 - DNA, 20 bp, Artificial Sequence
  Description of Artificial Sequence: Synthetic oligonucleotide
  Target: ATXN2; (-) strand; PAM type: YTN; PAM sequence: TTG
gagcaactttttttttcttt

SEQ ID NO: 66538 - DNA, 20 bp, Artificial Sequence
  Description of Artificial Sequence: Synthetic oligonucleotide
  Target: ATXN2; (-) strand; PAM type: YTN; PAM sequence: TTT
ggagcaactttttttttctt

SEQ ID NO: 66539 - DNA, 20 bp, Artificial Sequence
  Description of Artificial Sequence: Synthetic oligonucleotide
  Target: ATXN2; (-) strand; PAM type: YTN; PAM sequence: TTA
gaggtgtgatccatttggag

SEQ ID NO: 66540 - DNA, 20 bp, Artificial Sequence
  Description of Artificial Sequence: Synthetic oligonucleotide
  Target: ATXN2; (-) strand; PAM type: YTN; PAM sequence: TTT
agaggtgtgatccatttgga

SEQ ID NO: 66541 - DNA, 20 bp, Artificial Sequence
  Description of Artificial Sequence: Synthetic oligonucleotide
  Target: ATXN2; (-) strand; PAM type: YTN; PAM sequence: TTA
catttagaggtgtgatccat

SEQ ID NO: 66542 - DNA, 20 bp, Artificial Sequence
  Description of Artificial Sequence: Synthetic oligonucleotide
  Target: ATXN2; (-) strand; PAM type: YTN; PAM sequence: TTA
agaattacatttagaggtgt

SEQ ID NO: 66543 - DNA, 20 bp, Artificial Sequence
  Description of Artificial Sequence: Synthetic oligonucleotide
  Target: ATXN2; (-) strand; PAM type: YTN; PAM sequence: TTT
aagaattacatttagaggtg

SEQ ID NO: 66544 - DNA, 20 bp, Artificial Sequence
  Description of Artificial Sequence: Synthetic oligonucleotide
  Target: ATXN2; (-) strand; PAM type: YTN; PAM sequence: TTT
taagaattacatttagaggt

SEQ ID NO: 66545 - DNA, 20 bp, Artificial Sequence
  Description of Artificial Sequence: Synthetic oligonucleotide
  Target: ATXN2; (-) strand; PAM type: YTN; PAM sequence: TTT
ttaagaattacatttagagg

SEQ ID NO: 66546 - DNA, 20 bp, Artificial Sequence
  Description of Artificial Sequence: Synthetic oligonucleotide
  Target: ATXN2; (-) strand; PAM type: YTN; PAM sequence: TTT
tttaagaattacatttagag

SEQ ID NO: 66547 - DNA, 20 bp, Artificial Sequence
  Description of Artificial Sequence: Synthetic oligonucleotide
  Target: ATXN2; (-) strand; PAM type: YTN; PAM sequence: TTT
ttttaagaattacatttaga

SEQ ID NO: 66548 - DNA, 20 bp, Artificial Sequence
  Description of Artificial Sequence: Synthetic oligonucleotide
  Target: ATXN2; (-) strand; PAM type: YTN; PAM sequence: CTG
ggtttttttaagaattacat

SEQ ID NO: 66549 - DNA, 20 bp, Artificial Sequence
  Description of Artificial Sequence: Synthetic oligonucleotide
  Target: ATXN2; (-) strand; PAM type: YTN; PAM sequence: TTC
tgggtttttttaagaattac

SEQ ID NO: 66550 - DNA, 20 bp, Artificial Sequence
  Description of Artificial Sequence: Synthetic oligonucleotide
  Target: ATXN2; (-) strand; PAM type: YTN; PAM sequence: CTT
ctgggtttttttaagaatta

SEQ ID NO: 66551 - DNA, 20 bp, Artificial Sequence
  Description of Artificial Sequence: Synthetic oligonucleotide
  Target: ATXN2; (-) strand; PAM type: YTN; PAM sequence: CTC
ttctgggtttttttaagaat

SEQ ID NO: 66552 - DNA, 20 bp, Artificial Sequence
  Description of Artificial Sequence: Synthetic oligonucleotide
  Target: ATXN2; (-) strand; PAM type: YTN; PAM sequence: TTA
ctcttctgggtttttttaag

SEQ ID NO: 66553 - DNA, 20 bp, Artificial Sequence
  Description of Artificial Sequence: Synthetic oligonucleotide
  Target: ATXN2; (-) strand; PAM type: YTN; PAM sequence: TTA
ttactcttctgggttttttt

SEQ ID NO: 66554 - DNA, 20 bp, Artificial Sequence
  Description of Artificial Sequence: Synthetic oligonucleotide
  Target: ATXN2; (-) strand; PAM type: YTN; PAM sequence: TTT
attactcttctgggtttttt

SEQ ID NO: 66555 - DNA, 20 bp, Artificial Sequence
  Description of Artificial Sequence: Synthetic oligonucleotide
  Target: ATXN2; (-) strand; PAM type: YTN; PAM sequence: TTA
aggtttattactcttctggg

SEQ ID NO: 66556 - DNA, 20 bp, Artificial Sequence
  Description of Artificial Sequence: Synthetic oligonucleotide
  Target: ATXN2; (-) strand; PAM type: YTN; PAM sequence: TTC
atcaatcattaaggtttatt

SEQ ID NO: 66557 - DNA, 20 bp, Artificial Sequence
  Description of Artificial Sequence: Synthetic oligonucleotide
  Target: ATXN2; (-) strand; PAM type: YTN; PAM sequence: TTT
catcaatcattaaggtttat

SEQ ID NO: 66558 - DNA, 20 bp, Artificial Sequence
  Description of Artificial Sequence: Synthetic oligonucleotide
  Target: ATXN2; (-) strand; PAM type: YTN; PAM sequence: CTG
tttcatcaatcattaaggtt

SEQ ID NO: 66559 - DNA, 20 bp, Artificial Sequence
  Description of Artificial Sequence: Synthetic oligonucleotide
  Target: ATXN2; (-) strand; PAM type: YTN; PAM sequence: CTA
agaaaatactgtttcatcaa

SEQ ID NO: 66560 - DNA, 20 bp, Artificial Sequence
  Description of Artificial Sequence: Synthetic oligonucleotide
  Target: ATXN2; (-) strand; PAM type: YTN; PAM sequence: TTG
gtgtcgtatctaagaaaata

SEQ ID NO: 66561 - DNA, 20 bp, Artificial Sequence
  Description of Artificial Sequence: Synthetic oligonucleotide
  Target: ATXN2; (-) strand; PAM type: YTN; PAM sequence: TTT
ggtgtcgtatctaagaaaat

SEQ ID NO: 66562 - DNA, 20 bp, Artificial Sequence
  Description of Artificial Sequence: Synthetic oligonucleotide
  Target: ATXN2; (-) strand; PAM type: YTN; PAM sequence: TTT
tggtgtcgtatctaagaaaa

SEQ ID NO: 66563 - DNA, 20 bp, Artificial Sequence
  Description of Artificial Sequence: Synthetic oligonucleotide
  Target: ATXN2; (-) strand; PAM type: YTN; PAM sequence: CTT
ttggtgtcgtatctaagaaa

SEQ ID NO: 66564 - DNA, 20 bp, Artificial Sequence
  Description of Artificial Sequence: Synthetic oligonucleotide
  Target: ATXN2; (-) strand; PAM type: YTN; PAM sequence: TTG
aagtaagcttttggtgtcgt

SEQ ID NO: 66565 - DNA, 20 bp, Artificial Sequence
  Description of Artificial Sequence: Synthetic oligonucleotide
  Target: ATXN2; (-) strand; PAM type: YTN; PAM sequence: TTT
gaagtaagcttttggtgtcg

SEQ ID NO: 66566 - DNA, 20 bp, Artificial Sequence
  Description of Artificial Sequence: Synthetic oligonucleotide
  Target: ATXN2; (-) strand; PAM type: YTN; PAM sequence: TTT
tgaagtaagcttttggtgtc

SEQ ID NO: 66567 - DNA, 20 bp, Artificial Sequence
  Description of Artificial Sequence: Synthetic oligonucleotide
  Target: ATXN2; (-) strand; PAM type: YTN; PAM sequence: CTG
attttgaagtaagcttttgg

SEQ ID NO: 66568 - DNA, 20 bp, Artificial Sequence
  Description of Artificial Sequence: Synthetic oligonucleotide
  Target: ATXN2; (-) strand; PAM type: YTN; PAM sequence: TTA
tctgattttgaagtaagctt

SEQ ID NO: 66569 - DNA, 20 bp, Artificial Sequence
  Description of Artificial Sequence: Synthetic oligonucleotide
  Target: ATXN2; (-) strand; PAM type: YTN; PAM sequence: TTT
atctgattttgaagtaagct

SEQ ID NO: 66570 - DNA, 20 bp, Artificial Sequence
  Description of Artificial Sequence: Synthetic oligonucleotide
  Target: ATXN2; (-) strand; PAM type: YTN; PAM sequence: TTG
atgaagtccaatttatctga

SEQ ID NO: 66571 - DNA, 20 bp, Artificial Sequence
  Description of Artificial Sequence: Synthetic oligonucleotide
  Target: ATXN2; (-) strand; PAM type: YTN; PAM sequence: TTT
gatgaagtccaatttatctg

SEQ ID NO: 66572 - DNA, 20 bp, Artificial Sequence
  Description of Artificial Sequence: Synthetic oligonucleotide
  Target: ATXN2; (-) strand; PAM type: YTN; PAM sequence: TTT
tgatgaagtccaatttatct

SEQ ID NO: 66573 - DNA, 20 bp, Artificial Sequence
  Description of Artificial Sequence: Synthetic oligonucleotide
  Target: ATXN2; (-) strand; PAM type: YTN; PAM sequence: TTA
attttgatgaagtccaattt

SEQ ID NO: 66574 - DNA, 20 bp, Artificial Sequence
  Description of Artificial Sequence: Synthetic oligonucleotide
  Target: ATXN2; (-) strand; PAM type: YTN; PAM sequence: TTT
aattttgatgaagtccaatt

SEQ ID NO: 66575 - DNA, 20 bp, Artificial Sequence
  Description of Artificial Sequence: Synthetic oligonucleotide
  Target: ATXN2; (-) strand; PAM type: YTN; PAM sequence: TTT
taattttgatgaagtccaat

SEQ ID NO: 66576 - DNA, 20 bp, Artificial Sequence
  Description of Artificial Sequence: Synthetic oligonucleotide
  Target: ATXN2; (-) strand; PAM type: YTN; PAM sequence: TTT
ttaattttgatgaagtccaa

SEQ ID NO: 66577 - DNA, 20 bp, Artificial Sequence
  Description of Artificial Sequence: Synthetic oligonucleotide
  Target: ATXN2; (-) strand; PAM type: YTN; PAM sequence: TTG
aagcacaaaaatttttaatt

SEQ ID NO: 66578 - DNA, 20 bp, Artificial Sequence
  Description of Artificial Sequence: Synthetic oligonucleotide
  Target: ATXN2; (-) strand; PAM type: YTN; PAM sequence: CTT
gaagcacaaaaatttttaat

SEQ ID NO: 66579 - DNA, 20 bp, Artificial Sequence
  Description of Artificial Sequence: Synthetic oligonucleotide
  Target: ATXN2; (-) strand; PAM type: YTN; PAM sequence: TTC
atcccttgaagcacaaaaat

SEQ ID NO: 66580 - DNA, 20 bp, Artificial Sequence
  Description of Artificial Sequence: Synthetic oligonucleotide
  Target: ATXN2; (-) strand; PAM type: YTN; PAM sequence: TTT
catcccttgaagcacaaaaa

SEQ ID NO: 66581 - DNA, 20 bp, Artificial Sequence
  Description of Artificial Sequence: Synthetic oligonucleotide
  Target: ATXN2; (-) strand; PAM type: YTN; PAM sequence: TTT
tcatcccttgaagcacaaaa

SEQ ID NO: 66582 - DNA, 20 bp, Artificial Sequence
  Description of Artificial Sequence: Synthetic oligonucleotide
  Target: ATXN2; (-) strand; PAM type: YTN; PAM sequence: TTT
ttcatcccttgaagcacaaa

SEQ ID NO: 66583 - DNA, 20 bp, Artificial Sequence
  Description of Artificial Sequence: Synthetic oligonucleotide
  Target: ATXN2; (-) strand; PAM type: YTN; PAM sequence: CTT
tttcatcccttgaagcacaa

SEQ ID NO: 66584 - DNA, 20 bp, Artificial Sequence
  Description of Artificial Sequence: Synthetic oligonucleotide
  Target: ATXN2; (-) strand; PAM type: YTN; PAM sequence: TTA
ctttttcatcccttgaagca

SEQ ID NO: 66585 - DNA, 20 bp, Artificial Sequence
  Description of Artificial Sequence: Synthetic oligonucleotide
  Target: ATXN2; (-) strand; PAM type: YTN; PAM sequence: TTT
actttttcatcccttgaagc

SEQ ID NO: 66586 - DNA, 20 bp, Artificial Sequence
  Description of Artificial Sequence: Synthetic oligonucleotide
  Target: ATXN2; (-) strand; PAM type: YTN; PAM sequence: TTT
tactttttcatcccttgaag

SEQ ID NO: 66587 - DNA, 20 bp, Artificial Sequence
  Description of Artificial Sequence: Synthetic oligonucleotide
  Target: ATXN2; (-) strand; PAM type: YTN; PAM sequence: TTT
ttactttttcatcccttgaa

SEQ ID NO: 66588 - DNA, 20 bp, Artificial Sequence
  Description of Artificial Sequence: Synthetic oligonucleotide
  Target: ATXN2; (-) strand; PAM type: YTN; PAM sequence: CTT
tttactttttcatcccttga

SEQ ID NO: 66589 - DNA, 20 bp, Artificial Sequence
  Description of Artificial Sequence: Synthetic oligonucleotide
  Target: ATXN2; (-) strand; PAM type: YTN; PAM sequence: TTG
tctttttactttttcatccc

SEQ ID NO: 66590 - DNA, 20 bp, Artificial Sequence
  Description of Artificial Sequence: Synthetic oligonucleotide
  Target: ATXN2; (-) strand; PAM type: YTN; PAM sequence: TTG
gttgtctttttactttttca

SEQ ID NO: 66591 - DNA, 20 bp, Artificial Sequence
  Description of Artificial Sequence: Synthetic oligonucleotide
  Target: ATXN2; (-) strand; PAM type: YTN; PAM sequence: CTG
ttggttgtctttttactttt

SEQ ID NO: 66592 - DNA, 20 bp, Artificial Sequence
  Description of Artificial Sequence: Synthetic oligonucleotide
  Target: ATXN2; (-) strand; PAM type: YTN; PAM sequence: TTC
tgttggttgtctttttactt

SEQ ID NO: 66593 - DNA, 20 bp, Artificial Sequence
  Description of Artificial Sequence: Synthetic oligonucleotide
  Target: ATXN2; (-) strand; PAM type: YTN; PAM sequence: CTG
ttctgttggttgtcttttta

SEQ ID NO: 66594 - DNA, 20 bp, Artificial Sequence
  Description of Artificial Sequence: Synthetic oligonucleotide
  Target: ATXN2; (-) strand; PAM type: YTN; PAM sequence: CTC
ctgttctgttggttgtcttt

SEQ ID NO: 66595 - DNA, 20 bp, Artificial Sequence
  Description of Artificial Sequence: Synthetic oligonucleotide
  Target: ATXN2; (-) strand; PAM type: YTN; PAM sequence: TTC
tcctgttctgttggttgtct

SEQ ID NO: 66596 - DNA, 20 bp, Artificial Sequence
  Description of Artificial Sequence: Synthetic oligonucleotide
  Target: ATXN2; (-) strand; PAM type: YTN; PAM sequence: TTT
ctcctgttctgttggttgtc

SEQ ID NO: 66597 - DNA, 20 bp, Artificial Sequence
  Description of Artificial Sequence: Synthetic oligonucleotide
  Target: ATXN2; (-) strand; PAM type: YTN; PAM sequence: TTT
tctcctgttctgttggttgt

SEQ ID NO: 66598 - DNA, 20 bp, Artificial Sequence
  Description of Artificial Sequence: Synthetic oligonucleotide
  Target: ATXN2; (-) strand; PAM type: YTN; PAM sequence: TTG
caaatgttttctcctgttct

SEQ ID NO: 66599 - DNA, 20 bp, Artificial Sequence
  Description of Artificial Sequence: Synthetic oligonucleotide
  Target: ATXN2; (-) strand; PAM type: YTN; PAM sequence: TTT
gcaaatgttttctcctgttc

SEQ ID NO: 66600 - DNA, 20 bp, Artificial Sequence
  Description of Artificial Sequence: Synthetic oligonucleotide
  Target: ATXN2; (-) strand; PAM type: YTN; PAM sequence: TTA
gatacatggtttgcaaatgt

SEQ ID NO: 66601 - DNA, 20 bp, Artificial Sequence
  Description of Artificial Sequence: Synthetic oligonucleotide
  Target: ATXN2; (-) strand; PAM type: YTN; PAM sequence: CTG
ttagatacatggtttgcaaa

SEQ ID NO: 66602 - DNA, 20 bp, Artificial Sequence
  Description of Artificial Sequence: Synthetic oligonucleotide
  Target: ATXN2; (-) strand; PAM type: YTN; PAM sequence: TTG
tgtgtacaagtccctgttag

SEQ ID NO: 66603 - DNA, 20 bp, Artificial Sequence
  Description of Artificial Sequence: Synthetic oligonucleotide
  Target: ATXN2; (-) strand; PAM type: YTN; PAM sequence: TTA
tatattgtgtgtacaagtcc

SEQ ID NO: 66604 - DNA, 20 bp, Artificial Sequence
  Description of Artificial Sequence: Synthetic oligonucleotide
  Target: ATXN2; (-) strand; PAM type: YTN; PAM sequence: TTT
atatattgtgtgtacaagtc

SEQ ID NO: 66605 - DNA, 20 bp, Artificial Sequence
  Description of Artificial Sequence: Synthetic oligonucleotide
  Target: ATXN2; (-) strand; PAM type: YTN; PAM sequence: CTT
tatatattgtgtgtacaagt

SEQ ID NO: 66606 - DNA, 20 bp, Artificial Sequence
  Description of Artificial Sequence: Synthetic oligonucleotide
  Target: ATXN2; (-) strand; PAM type: YTN; PAM sequence: TTC
tttatatattgtgtgtacaa

SEQ ID NO: 66607 - DNA, 20 bp, Artificial Sequence
  Description of Artificial Sequence: Synthetic oligonucleotide
  Target: ATXN2; (-) strand; PAM type: YTN; PAM sequence: TTG
tgggagttctttatatattg

SEQ ID NO: 66608 - DNA, 20 bp, Artificial Sequence
  Description of Artificial Sequence: Synthetic oligonucleotide
  Target: ATXN2; (-) strand; PAM type: YTN; PAM sequence: TTG
ggttgtgggagttctttata

SEQ ID NO: 66609 - DNA, 20 bp, Artificial Sequence
  Description of Artificial Sequence: Synthetic oligonucleotide
  Target: ATXN2; (-) strand; PAM type: YTN; PAM sequence: TTA
ttgggttgtgggagttcttt

SEQ ID NO: 66610 - DNA, 20 bp, Artificial Sequence
  Description of Artificial Sequence: Synthetic oligonucleotide
  Target: ATXN2; (-) strand; PAM type: YTN; PAM sequence: TTA
ttattgggttgtgggagttc

SEQ ID NO: 66611 - DNA, 20 bp, Artificial Sequence
  Description of Artificial Sequence: Synthetic oligonucleotide
  Target: ATXN2; (-) strand; PAM type: YTN; PAM sequence: TTT
attattgggttgtgggagtt

SEQ ID NO: 66612 - DNA, 20 bp, Artificial Sequence
  Description of Artificial Sequence: Synthetic oligonucleotide
  Target: ATXN2; (-) strand; PAM type: YTN; PAM sequence: TTT
tattattgggttgtgggagt

SEQ ID NO: 66613 - DNA, 20 bp, Artificial Sequence
  Description of Artificial Sequence: Synthetic oligonucleotide
  Target: ATXN2; (-) strand; PAM type: YTN; PAM sequence: TTT
ttattattgggttgtgggag

SEQ ID NO: 66614 - DNA, 20 bp, Artificial Sequence
  Description of Artificial Sequence: Synthetic oligonucleotide
  Target: ATXN2; (-) strand; PAM type: YTN; PAM sequence: CTT
tttattattgggttgtggga

SEQ ID NO: 66615 - DNA, 20 bp, Artificial Sequence
  Description of Artificial Sequence: Synthetic oligonucleotide
  Target: ATXN2; (-) strand; PAM type: YTN; PAM sequence: TTG
tctttttattattgggttgt

SEQ ID NO: 66616 - DNA, 20 bp, Artificial Sequence
  Description of Artificial Sequence: Synthetic oligonucleotide
  Target: ATXN2; (-) strand; PAM type: YTN; PAM sequence: TTG
agttgtctttttattattgg

SEQ ID NO: 66617 - DNA, 20 bp, Artificial Sequence
  Description of Artificial Sequence: Synthetic oligonucleotide
  Target: ATXN2; (-) strand; PAM type: YTN; PAM sequence: TTA
aaaattgagttgtcttttta

SEQ ID NO: 66618 - DNA, 20 bp, Artificial Sequence
  Description of Artificial Sequence: Synthetic oligonucleotide
  Target: ATXN2; (-) strand; PAM type: YTN; PAM sequence: TTT
aaaaattgagttgtcttttt

SEQ ID NO: 66619 - DNA, 20 bp, Artificial Sequence
  Description of Artificial Sequence: Synthetic oligonucleotide
  Target: ATXN2; (-) strand; PAM type: YTN; PAM sequence: TTT
taaaaattgagttgtctttt

SEQ ID NO: 66620 - DNA, 20 bp, Artificial Sequence
  Description of Artificial Sequence: Synthetic oligonucleotide
  Target: ATXN2; (-) strand; PAM type: YTN; PAM sequence: TTA
cccattttaaaaattgagtt

SEQ ID NO: 66621 - DNA, 20 bp, Artificial Sequence
  Description of Artificial Sequence: Synthetic oligonucleotide
  Target: ATXN2; (-) strand; PAM type: YTN; PAM sequence: TTT
acccattttaaaaattgagt

SEQ ID NO: 66622 - DNA, 20 bp, Artificial Sequence
  Description of Artificial Sequence: Synthetic oligonucleotide
  Target: ATXN2; (-) strand; PAM type: YTN; PAM sequence: CTT
tacccattttaaaaattgag

SEQ ID NO: 66623 - DNA, 20 bp, Artificial Sequence
  Description of Artificial Sequence: Synthetic oligonucleotide
  Target: ATXN2; (-) strand; PAM type: YTN; PAM sequence: TTC
aaatctttacccattttaaa

SEQ ID NO: 66624 - DNA, 20 bp, Artificial Sequence
  Description of Artificial Sequence: Synthetic oligonucleotide
  Target: ATXN2; (-) strand; PAM type: YTN; PAM sequence: CTG
ttcaaatctttacccatttt

SEQ ID NO: 66625 - DNA, 20 bp, Artificial Sequence
  Description of Artificial Sequence: Synthetic oligonucleotide
  Target: ATXN2; (-) strand; PAM type: YTN; PAM sequence: TTG
atgtctgttcaaatctttac

SEQ ID NO: 66626 - DNA, 20 bp, Artificial Sequence
  Description of Artificial Sequence: Synthetic oligonucleotide
  Target: ATXN2; (-) strand; PAM type: YTN; PAM sequence: TTG
gattgatgtctgttcaaatc

SEQ ID NO: 66627 - DNA, 20 bp, Artificial Sequence
  Description of Artificial Sequence: Synthetic oligonucleotide
  Target: ATXN2; (-) strand; PAM type: YTN; PAM sequence: TTT
ggattgatgtctgttcaaat

SEQ ID NO: 66628 - DNA, 20 bp, Artificial Sequence
  Description of Artificial Sequence: Synthetic oligonucleotide
  Target: ATXN2; (-) strand; PAM type: YTN; PAM sequence: CTT
tggattgatgtctgttcaaa

SEQ ID NO: 66629 - DNA, 20 bp, Artificial Sequence
  Description of Artificial Sequence: Synthetic oligonucleotide
  Target: ATXN2; (-) strand; PAM type: YTN; PAM sequence: TTC
tttggattgatgtctgttca

SEQ ID NO: 66630 - DNA, 20 bp, Artificial Sequence
  Description of Artificial Sequence: Synthetic oligonucleotide
  Target: ATXN2; (-) strand; PAM type: YTN; PAM sequence: CTT
ctttggattgatgtctgttc

SEQ ID NO: 66631 - DNA, 20 bp, Artificial Sequence
  Description of Artificial Sequence: Synthetic oligonucleotide
  Target: ATXN2; (-) strand; PAM type: YTN; PAM sequence: TTA
tatatcttctttggattgat

SEQ ID NO: 66632 - DNA, 20 bp, Artificial Sequence
  Description of Artificial Sequence: Synthetic oligonucleotide
  Target: ATXN2; (-) strand; PAM type: YTN; PAM sequence: TTT
atatatcttctttggattga

SEQ ID NO: 66633 - DNA, 20 bp, Artificial Sequence
  Description of Artificial Sequence: Synthetic oligonucleotide
  Target: ATXN2; (-) strand; PAM type: YTN; PAM sequence: TTG
gccatttatatatcttcttt

SEQ ID NO: 66634 - DNA, 20 bp, Artificial Sequence
  Description of Artificial Sequence: Synthetic oligonucleotide
  Target: ATXN2; (-) strand; PAM type: YTN; PAM sequence: TTA
ttggccatttatatatcttc

SEQ ID NO: 66635 - DNA, 20 bp, Artificial Sequence
  Description of Artificial Sequence: Synthetic oligonucleotide
  Target: ATXN2; (-) strand; PAM type: YTN; PAM sequence: TTT
attggccatttatatatctt

SEQ ID NO: 66636 - DNA, 20 bp, Artificial Sequence
  Description of Artificial Sequence: Synthetic oligonucleotide
  Target: ATXN2; (-) strand; PAM type: YTN; PAM sequence: TTG
tgtttattggccatttatat

SEQ ID NO: 66637 - DNA, 20 bp, Artificial Sequence
  Description of Artificial Sequence: Synthetic oligonucleotide
  Target: ATXN2; (-) strand; PAM type: YTN; PAM sequence: TTT
gtgtttattggccatttata

SEQ ID NO: 66638 - DNA, 20 bp, Artificial Sequence
  Description of Artificial Sequence: Synthetic oligonucleotide
  Target: ATXN2; (-) strand; PAM type: YTN; PAM sequence: TTT
tgtgtttattggccatttat

SEQ ID NO: 66639 - DNA, 20 bp, Artificial Sequence
  Description of Artificial Sequence: Synthetic oligonucleotide
  Target: ATXN2; (-) strand; PAM type: YTN; PAM sequence: CTT
ttgtgtttattggccattta

SEQ ID NO: 66640 - DNA, 20 bp, Artificial Sequence
  Description of Artificial Sequence: Synthetic oligonucleotide
  Target: ATXN2; (-) strand; PAM type: YTN; PAM sequence: TTG
aacatcttttgtgtttattg

SEQ ID NO: 66641 - DNA, 20 bp, Artificial Sequence
  Description of Artificial Sequence: Synthetic oligonucleotide
  Target: ATXN2; (-) strand; PAM type: YTN; PAM sequence: CTA
atgatgttgaacatcttttg

SEQ ID NO: 66642 - DNA, 20 bp, Artificial Sequence
  Description of Artificial Sequence: Synthetic oligonucleotide
  Target: ATXN2; (-) strand; PAM type: YTN; PAM sequence: TTC
atggctaatgatgttgaaca

SEQ ID NO: 66643 - DNA, 20 bp, Artificial Sequence
  Description of Artificial Sequence: Synthetic oligonucleotide
  Target: ATXN2; (-) strand; PAM type: YTN; PAM sequence: TTT
catggctaatgatgttgaac

SEQ ID NO: 66644 - DNA, 20 bp, Artificial Sequence
  Description of Artificial Sequence: Synthetic oligonucleotide
  Target: ATXN2; (-) strand; PAM type: YTN; PAM sequence: CTT
tcatggctaatgatgttgaa

SEQ ID NO: 66645 - DNA, 20 bp, Artificial Sequence
  Description of Artificial Sequence: Synthetic oligonucleotide
  Target: ATXN2; (-) strand; PAM type: YTN; PAM sequence: TTC
tttcatggctaatgatgttg

SEQ ID NO: 66646 - DNA, 20 bp, Artificial Sequence
  Description of Artificial Sequence: Synthetic oligonucleotide
  Target: ATXN2; (-) strand; PAM type: YTN; PAM sequence: TTA
atgtgcagttctttcatggc

SEQ ID NO: 66647 - DNA, 20 bp, Artificial Sequence
  Description of Artificial Sequence: Synthetic oligonucleotide
  Target: ATXN2; (-) strand; PAM type: YTN; PAM sequence: TTT
aatgtgcagttctttcatgg

SEQ ID NO: 66648 - DNA, 20 bp, Artificial Sequence
  Description of Artificial Sequence: Synthetic oligonucleotide
  Target: ATXN2; (-) strand; PAM type: YTN; PAM sequence: CTT
taatgtgcagttctttcatg

SEQ ID NO: 66649 - DNA, 20 bp, Artificial Sequence
  Description of Artificial Sequence: Synthetic oligonucleotide
  Target: ATXN2; (-) strand; PAM type: YTN; PAM sequence: TTG
tggctttaatgtgcagttct

SEQ ID NO: 66650 - DNA, 20 bp, Artificial Sequence
  Description of Artificial Sequence: Synthetic oligonucleotide
  Target: ATXN2; (-) strand; PAM type: YTN; PAM sequence: CTC
attgtggctttaatgtgcag

SEQ ID NO: 66651 - DNA, 20 bp, Artificial Sequence
  Description of Artificial Sequence: Synthetic oligonucleotide
  Target: ATXN2; (-) strand; PAM type: YTN; PAM sequence: TTA
acctcattgtggctttaatg

SEQ ID NO: 66652 - DNA, 20 bp, Artificial Sequence
  Description of Artificial Sequence: Synthetic oligonucleotide
  Target: ATXN2; (-) strand; PAM type: YTN; PAM sequence: TTG
tgggtgtgaagtgttaacct

SEQ ID NO: 66653 - DNA, 20 bp, Artificial Sequence
  Description of Artificial Sequence: Synthetic oligonucleotide
  Target: ATXN2; (-) strand; PAM type: YTN; PAM sequence: CTT
gtgggtgtgaagtgttaacc

SEQ ID NO: 66654 - DNA, 20 bp, Artificial Sequence
  Description of Artificial Sequence: Synthetic oligonucleotide
  Target: ATXN2; (-) strand; PAM type: YTN; PAM sequence: TTA
tagtcatccttgtgggtgtg

SEQ ID NO: 66655 - DNA, 20 bp, Artificial Sequence
  Description of Artificial Sequence: Synthetic oligonucleotide
  Target: ATXN2; (-) strand; PAM type: YTN; PAM sequence: TTG
attatagtcatccttgtggg

SEQ ID NO: 66656 - DNA, 20 bp, Artificial Sequence
  Description of Artificial Sequence: Synthetic oligonucleotide
  Target: ATXN2; (-) strand; PAM type: YTN; PAM sequence: TTT
gattatagtcatccttgtgg

SEQ ID NO: 66657 - DNA, 20 bp, Artificial Sequence
  Description of Artificial Sequence: Synthetic oligonucleotide
  Target: ATXN2; (-) strand; PAM type: YTN; PAM sequence: TTT
tgattatagtcatccttgtg

SEQ ID NO: 66658 - DNA, 20 bp, Artificial Sequence
  Description of Artificial Sequence: Synthetic oligonucleotide
  Target: ATXN2; (-) strand; PAM type: YTN; PAM sequence: TTT
ttgattatagtcatccttgt

SEQ ID NO: 66659 - DNA, 20 bp, Artificial Sequence
  Description of Artificial Sequence: Synthetic oligonucleotide
  Target: ATXN2; (-) strand; PAM type: YTN; PAM sequence: TTT
tttgattatagtcatccttg

SEQ ID NO: 66660 - DNA, 20 bp, Artificial Sequence
  Description of Artificial Sequence: Synthetic oligonucleotide
  Target: ATXN2; (-) strand; PAM type: YTN; PAM sequence: CTT
ttttgattatagtcatcctt

SEQ ID NO: 66661 - DNA, 20 bp, Artificial Sequence
  Description of Artificial Sequence: Synthetic oligonucleotide
  Target: ATXN2; (-) strand; PAM type: YTN; PAM sequence: TTG
tcttttttgattatagtcat

SEQ ID NO: 66662 - DNA, 20 bp, Artificial Sequence
  Description of Artificial Sequence: Synthetic oligonucleotide
  Target: ATXN2; (-) strand; PAM type: YTN; PAM sequence: CTT
gtcttttttgattatagtca

SEQ ID NO: 66663 - DNA, 20 bp, Artificial Sequence
  Description of Artificial Sequence: Synthetic oligonucleotide
  Target: ATXN2; (-) strand; PAM type: YTN; PAM sequence: TTG
tcttgtcttttttgattata

SEQ ID NO: 66664 - DNA, 20 bp, Artificial Sequence
  Description of Artificial Sequence: Synthetic oligonucleotide
  Target: ATXN2; (-) strand; PAM type: YTN; PAM sequence: TTA
ttgtcttgtcttttttgatt

SEQ ID NO: 66665 - DNA, 20 bp, Artificial Sequence
  Description of Artificial Sequence: Synthetic oligonucleotide
  Target: ATXN2; (-) strand; PAM type: YTN; PAM sequence: CTT
attgtcttgtcttttttgat

SEQ ID NO: 66666 - DNA, 20 bp, Artificial Sequence
  Description of Artificial Sequence: Synthetic oligonucleotide
  Target: ATXN2; (-) strand; PAM type: YTN; PAM sequence: CTA
acacttattgtcttgtcttt

SEQ ID NO: 66667 - DNA, 20 bp, Artificial Sequence
  Description of Artificial Sequence: Synthetic oligonucleotide
  Target: ATXN2; (-) strand; PAM type: YTN; PAM sequence: TTG
ctaacacttattgtcttgtc

SEQ ID NO: 66668 - DNA, 20 bp, Artificial Sequence
  Description of Artificial Sequence: Synthetic oligonucleotide
  Target: ATXN2; (-) strand; PAM type: YTN; PAM sequence: CTT
gctaacacttattgtcttgt

SEQ ID NO: 66669 - DNA, 20 bp, Artificial Sequence
  Description of Artificial Sequence: Synthetic oligonucleotide
  Target: ATXN2; (-) strand; PAM type: YTN; PAM sequence: CTC
cacatccttgctaacactta

SEQ ID NO: 66670 - DNA, 20 bp, Artificial Sequence
  Description of Artificial Sequence: Synthetic oligonucleotide
  Target: ATXN2; (-) strand; PAM type: YTN; PAM sequence: TTC
tccacatccttgctaacact

SEQ ID NO: 66671 - DNA, 20 bp, Artificial Sequence
  Description of Artificial Sequence: Synthetic oligonucleotide
  Target: ATXN2; (-) strand; PAM type: YTN; PAM sequence: TTT
ctccacatccttgctaacac

SEQ ID NO: 66672 - DNA, 20 bp, Artificial Sequence
  Description of Artificial Sequence: Synthetic oligonucleotide
  Target: ATXN2; (-) strand; PAM type: YTN; PAM sequence: CTG
tttctccacatccttgctaa

SEQ ID NO: 66673 - DNA, 20 bp, Artificial Sequence
  Description of Artificial Sequence: Synthetic oligonucleotide
  Target: ATXN2; (-) strand; PAM type: YTN; PAM sequence: TTC
tgtttctccacatccttgct

SEQ ID NO: 66674 - DNA, 20 bp, Artificial Sequence
  Description of Artificial Sequence: Synthetic oligonucleotide
  Target: ATXN2; (-) strand; PAM type: YTN; PAM sequence: TTT
ctgtttctccacatccttgc

SEQ ID NO: 66675 - DNA, 20 bp, Artificial Sequence
  Description of Artificial Sequence: Synthetic oligonucleotide
  Target: ATXN2; (-) strand; PAM type: YTN; PAM sequence: TTC
ccaccagcagggtatgaggg

SEQ ID NO: 66676 - DNA, 20 bp, Artificial Sequence
  Description of Artificial Sequence: Synthetic oligonucleotide
  Target: ATXN2; (-) strand; PAM type: YTN; PAM sequence: TTA
cattcccaccagcagggtat

SEQ ID NO: 66677 - DNA, 20 bp, Artificial Sequence
  Description of Artificial Sequence: Synthetic oligonucleotide
  Target: ATXN2; (-) strand; PAM type: YTN; PAM sequence: TTT
acattcccaccagcagggta

SEQ ID NO: 66678 - DNA, 20 bp, Artificial Sequence
  Description of Artificial Sequence: Synthetic oligonucleotide
  Target: ATXN2; (-) strand; PAM type: YTN; PAM sequence: TTT
tacattcccaccagcagggt

SEQ ID NO: 66679 - DNA, 20 bp, Artificial Sequence
  Description of Artificial Sequence: Synthetic oligonucleotide
  Target: ATXN2; (-) strand; PAM type: YTN; PAM sequence: CTA
ttttacattcccaccagcag

SEQ ID NO: 66680 - DNA, 20 bp, Artificial Sequence
  Description of Artificial Sequence: Synthetic oligonucleotide
  Target: ATXN2; (-) strand; PAM type: YTN; PAM sequence: CTA
cactattttacattcccacc

SEQ ID NO: 66681 - DNA, 20 bp, Artificial Sequence
  Description of Artificial Sequence: Synthetic oligonucleotide
  Target: ATXN2; (-) strand; PAM type: YTN; PAM sequence: TTG
ccaagatatctacactattt

SEQ ID NO: 66682 - DNA, 20 bp, Artificial Sequence
  Description of Artificial Sequence: Synthetic oligonucleotide
  Target: ATXN2; (-) strand; PAM type: YTN; PAM sequence: TTT
gccaagatatctacactatt

SEQ ID NO: 66683 - DNA, 20 bp, Artificial Sequence
  Description of Artificial Sequence: Synthetic oligonucleotide
  Target: ATXN2; (-) strand; PAM type: YTN; PAM sequence: CTA
tttgccaagatatctacact

SEQ ID NO: 66684 - DNA, 20 bp, Artificial Sequence
  Description of Artificial Sequence: Synthetic oligonucleotide
  Target: ATXN2; (-) strand; PAM type: YTN; PAM sequence: CTA
ccaagctatttgccaagata

SEQ ID NO: 66685 - DNA, 20 bp, Artificial Sequence
  Description of Artificial Sequence: Synthetic oligonucleotide
  Target: ATXN2; (-) strand; PAM type: YTN; PAM sequence: TTG
aggaactaccaagctatttg

SEQ ID NO: 66686 - DNA, 20 bp, Artificial Sequence
  Description of Artificial Sequence: Synthetic oligonucleotide
  Target: ATXN2; (-) strand; PAM type: YTN; PAM sequence: TTT
gaggaactaccaagctattt

SEQ ID NO: 66687 - DNA, 20 bp, Artificial Sequence
  Description of Artificial Sequence: Synthetic oligonucleotide
  Target: ATXN2; (-) strand; PAM type: YTN; PAM sequence: TTT
tgaggaactaccaagctatt

SEQ ID NO: 66688 - DNA, 20 bp, Artificial Sequence
  Description of Artificial Sequence: Synthetic oligonucleotide
  Target: ATXN2; (-) strand; PAM type: YTN; PAM sequence: CTT
ttgaggaactaccaagctat

SEQ ID NO: 66689 - DNA, 20 bp, Artificial Sequence
  Description of Artificial Sequence: Synthetic oligonucleotide
  Target: ATXN2; (-) strand; PAM type: YTN; PAM sequence: TTA
accttttgaggaactaccaa

SEQ ID NO: 66690 - DNA, 20 bp, Artificial Sequence
  Description of Artificial Sequence: Synthetic oligonucleotide
  Target: ATXN2; (-) strand; PAM type: YTN; PAM sequence: TTT
aaccttttgaggaactacca

SEQ ID NO: 66691 - DNA, 20 bp, Artificial Sequence
  Description of Artificial Sequence: Synthetic oligonucleotide
  Target: ATXN2; (-) strand; PAM type: YTN; PAM sequence: CTG
tgtttaaccttttgaggaac

SEQ ID NO: 66692 - DNA, 20 bp, Artificial Sequence
  Description of Artificial Sequence: Synthetic oligonucleotide
  Target: ATXN2; (-) strand; PAM type: YTN; PAM sequence: CTG
ggtcatatggcaactgtgtt

SEQ ID NO: 66693 - DNA, 20 bp, Artificial Sequence
  Description of Artificial Sequence: Synthetic oligonucleotide
  Target: ATXN2; (-) strand; PAM type: YTN; PAM sequence: TTG
ctgggtcatatggcaactgt

SEQ ID NO: 66694 - DNA, 20 bp, Artificial Sequence
  Description of Artificial Sequence: Synthetic oligonucleotide
  Target: ATXN2; (-) strand; PAM type: YTN; PAM sequence: TTG
aattgctgggtcatatggca

SEQ ID NO: 66695 - DNA, 20 bp, Artificial Sequence
  Description of Artificial Sequence: Synthetic oligonucleotide
  Target: ATXN2; (-) strand; PAM type: YTN; PAM sequence: CTA
ggagttgaattgctgggtca

SEQ ID NO: 66696 - DNA, 20 bp, Artificial Sequence
  Description of Artificial Sequence: Synthetic oligonucleotide
  Target: ATXN2; (-) strand; PAM type: YTN; PAM sequence: CTA
cctaggagttgaattgctgg

SEQ ID NO: 66697 - DNA, 20 bp, Artificial Sequence
  Description of Artificial Sequence: Synthetic oligonucleotide
  Target: ATXN2; (-) strand; PAM type: YTN; PAM sequence: TTG
tgtacctacctaggagttga

SEQ ID NO: 66698 - DNA, 20 bp, Artificial Sequence
  Description of Artificial Sequence: Synthetic oligonucleotide
  Target: ATXN2; (-) strand; PAM type: YTN; PAM sequence: TTT
gtgtacctacctaggagttg

SEQ ID NO: 66699 - DNA, 20 bp, Artificial Sequence
  Description of Artificial Sequence: Synthetic oligonucleotide
  Target: ATXN2; (-) strand; PAM type: YTN; PAM sequence: TTT
tgtgtacctacctaggagtt

SEQ ID NO: 66700 - DNA, 20 bp, Artificial Sequence
  Description of Artificial Sequence: Synthetic oligonucleotide
  Target: ATXN2; (-) strand; PAM type: YTN; PAM sequence: CTT
ttgtgtacctacctaggagt

SEQ ID NO: 66701 - DNA, 20 bp, Artificial Sequence
  Description of Artificial Sequence: Synthetic oligonucleotide
  Target: ATXN2; (-) strand; PAM type: YTN; PAM sequence: TTC
ttttgtgtacctacctagga

SEQ ID NO: 66702 - DNA, 20 bp, Artificial Sequence
  Description of Artificial Sequence: Synthetic oligonucleotide
  Target: ATXN2; (-) strand; PAM type: YTN; PAM sequence: TTT
cttttgtgtacctacctagg

SEQ ID NO: 66703 - DNA, 20 bp, Artificial Sequence
  Description of Artificial Sequence: Synthetic oligonucleotide
  Target: ATXN2; (-) strand; PAM type: YTN; PAM sequence: TTC
atttcttttgtgtacctacc

SEQ ID NO: 66704 - DNA, 20 bp, Artificial Sequence
  Description of Artificial Sequence: Synthetic oligonucleotide
  Target: ATXN2; (-) strand; PAM type: YTN; PAM sequence: TTT
catttcttttgtgtacctac

SEQ ID NO: 66705 - DNA, 20 bp, Artificial Sequence
  Description of Artificial Sequence: Synthetic oligonucleotide
  Target: ATXN2; (-) strand; PAM type: YTN; PAM sequence: TTT
tcatttcttttgtgtaccta

SEQ ID NO: 66706 - DNA, 20 bp, Artificial Sequence
  Description of Artificial Sequence: Synthetic oligonucleotide
  Target: ATXN2; (-) strand; PAM type: YTN; PAM sequence: CTT
ttcatttcttttgtgtacct

SEQ ID NO: 66707 - DNA, 20 bp, Artificial Sequence
  Description of Artificial Sequence: Synthetic oligonucleotide
  Target: ATXN2; (-) strand; PAM type: YTN; PAM sequence: CTA
tcttttcatttcttttgtgt

SEQ ID NO: 66708 - DNA, 20 bp, Artificial Sequence
  Description of Artificial Sequence: Synthetic oligonucleotide
  Target: ATXN2; (-) strand; PAM type: YTN; PAM sequence: CTC
gtcctatcttttcatttctt

SEQ ID NO: 66709 - DNA, 20 bp, Artificial Sequence
  Description of Artificial Sequence: Synthetic oligonucleotide
  Target: ATXN2; (-) strand; PAM type: YTN; PAM sequence: TTC
tcgtcctatcttttcatttc

SEQ ID NO: 66710 - DNA, 20 bp, Artificial Sequence
  Description of Artificial Sequence: Synthetic oligonucleotide
  Target: ATXN2; (-) strand; PAM type: YTN; PAM sequence: TTT
ctcgtcctatcttttcattt

SEQ ID NO: 66711 - DNA, 20 bp, Artificial Sequence
  Description of Artificial Sequence: Synthetic oligonucleotide
  Target: ATXN2; (-) strand; PAM type: YTN; PAM sequence: TTT
tctcgtcctatcttttcatt

SEQ ID NO: 66712 - DNA, 20 bp, Artificial Sequence
  Description of Artificial Sequence: Synthetic oligonucleotide
  Target: ATXN2; (-) strand; PAM type: YTN; PAM sequence: TTT
ttctcgtcctatcttttcat

SEQ ID NO: 66713 - DNA, 20 bp, Artificial Sequence
  Description of Artificial Sequence: Synthetic oligonucleotide
  Target: ATXN2; (-) strand; PAM type: YTN; PAM sequence: TTT
tttctcgtcctatcttttca

SEQ ID NO: 66714 - DNA, 20 bp, Artificial Sequence
  Description of Artificial Sequence: Synthetic oligonucleotide
  Target: ATXN2; (-) strand; PAM type: YTN; PAM sequence: TTT
ttttctcgtcctatcttttc

SEQ ID NO: 66715 - DNA, 20 bp, Artificial Sequence
  Description of Artificial Sequence: Synthetic oligonucleotide
  Target: ATXN2; (-) strand; PAM type: YTN; PAM sequence: CTG
ccacaaacatgagtgtgcag

SEQ ID NO: 66716 - DNA, 20 bp, Artificial Sequence
  Description of Artificial Sequence: Synthetic oligonucleotide
  Target: ATXN2; (-) strand; PAM type: YTN; PAM sequence: CTG
aataacactgccacaaacat

SEQ ID NO: 66717 - DNA, 20 bp, Artificial Sequence
  Description of Artificial Sequence: Synthetic oligonucleotide
  Target: ATXN2; (-) strand; PAM type: YTN; PAM sequence: TTC
tgaataacactgccacaaac

SEQ ID NO: 66718 - DNA, 20 bp, Artificial Sequence
  Description of Artificial Sequence: Synthetic oligonucleotide
  Target: ATXN2; (-) strand; PAM type: YTN; PAM sequence: CTA
ttctgaataacactgccaca

SEQ ID NO: 66719 - DNA, 20 bp, Artificial Sequence
  Description of Artificial Sequence: Synthetic oligonucleotide
  Target: ATXN2; (-) strand; PAM type: YTN; PAM sequence: TTG
actattctgaataacactgc

SEQ ID NO: 66720 - DNA, 20 bp, Artificial Sequence
  Description of Artificial Sequence: Synthetic oligonucleotide
  Target: ATXN2; (-) strand; PAM type: YTN; PAM sequence: TTT
gactattctgaataacactg

SEQ ID NO: 66721 - DNA, 20 bp, Artificial Sequence
  Description of Artificial Sequence: Synthetic oligonucleotide
  Target: ATXN2; (-) strand; PAM type: YTN; PAM sequence: CTG
tttgactattctgaataaca

SEQ ID NO: 66722 - DNA, 20 bp, Artificial Sequence
  Description of Artificial Sequence: Synthetic oligonucleotide
  Target: ATXN2; (-) strand; PAM type: YTN; PAM sequence: CTC
actgtttgactattctgaat

SEQ ID NO: 66723 - DNA, 20 bp, Artificial Sequence
  Description of Artificial Sequence: Synthetic oligonucleotide
  Target: ATXN2; (-) strand; PAM type: YTN; PAM sequence: TTC
tcactgtttgactattctga

SEQ ID NO: 66724 - DNA, 20 bp, Artificial Sequence
  Description of Artificial Sequence: Synthetic oligonucleotide
  Target: ATXN2; (-) strand; PAM type: YTN; PAM sequence: TTG
tggtgttctcactgtttgac

SEQ ID NO: 66725 - DNA, 20 bp, Artificial Sequence
  Description of Artificial Sequence: Synthetic oligonucleotide
  Target: ATXN2; (-) strand; PAM type: YTN; PAM sequence: TTT
gtggtgttctcactgtttga

SEQ ID NO: 66726 - DNA, 20 bp, Artificial Sequence
  Description of Artificial Sequence: Synthetic oligonucleotide
  Target: ATXN2; (-) strand; PAM type: YTN; PAM sequence: CTA
tttgtggtgttctcactgtt

SEQ ID NO: 66727 - DNA, 20 bp, Artificial Sequence
  Description of Artificial Sequence: Synthetic oligonucleotide
  Target: ATXN2; (-) strand; PAM type: YTN; PAM sequence: TTG
tagctatttgtggtgttctc

SEQ ID NO: 66728 - DNA, 20 bp, Artificial Sequence
  Description of Artificial Sequence: Synthetic oligonucleotide
  Target: ATXN2; (-) strand; PAM type: YTN; PAM sequence: TTT
gtagctatttgtggtgttct

SEQ ID NO: 66729 - DNA, 20 bp, Artificial Sequence
  Description of Artificial Sequence: Synthetic oligonucleotide
  Target: ATXN2; (-) strand; PAM type: YTN; PAM sequence: TTA
atcagtttgtagctatttgt

SEQ ID NO: 66730 - DNA, 20 bp, Artificial Sequence
  Description of Artificial Sequence: Synthetic oligonucleotide
  Target: ATXN2; (-) strand; PAM type: YTN; PAM sequence: TTA
tccattaatcagtttgtagc

SEQ ID NO: 66731 - DNA, 20 bp, Artificial Sequence
  Description of Artificial Sequence: Synthetic oligonucleotide
  Target: ATXN2; (-) strand; PAM type: YTN; PAM sequence: TTT
atccattaatcagtttgtag

SEQ ID NO: 66732 - DNA, 20 bp, Artificial Sequence
  Description of Artificial Sequence: Synthetic oligonucleotide
  Target: ATXN2; (-) strand; PAM type: YTN; PAM sequence: TTG
tttatccattaatcagtttg

SEQ ID NO: 66733 - DNA, 20 bp, Artificial Sequence
  Description of Artificial Sequence: Synthetic oligonucleotide
  Target: ATXN2; (-) strand; PAM type: YTN; PAM sequence: TTT
gtttatccattaatcagttt

SEQ ID NO: 66734 - DNA, 20 bp, Artificial Sequence
  Description of Artificial Sequence: Synthetic oligonucleotide
  Target: ATXN2; (-) strand; PAM type: YTN; PAM sequence: TTT
tgtttatccattaatcagtt

SEQ ID NO: 66735 - DNA, 20 bp, Artificial Sequence
  Description of Artificial Sequence: Synthetic oligonucleotide
  Target: ATXN2; (-) strand; PAM type: YTN; PAM sequence: TTG
atgtggataataccacattt

SEQ ID NO: 66736 - DNA, 20 bp, Artificial Sequence
  Description of Artificial Sequence: Synthetic oligonucleotide
  Target: ATXN2; (-) strand; PAM type: YTN; PAM sequence: CTT
gatgtggataataccacatt

SEQ ID NO: 66737 - DNA, 20 bp, Artificial Sequence
  Description of Artificial Sequence: Synthetic oligonucleotide
  Target: ATXN2; (-) strand; PAM type: YTN; PAM sequence: TTC
cttgatgtggataataccac

SEQ ID NO: 66738 - DNA, 20 bp, Artificial Sequence
  Description of Artificial Sequence: Synthetic oligonucleotide
  Target: ATXN2; (-) strand; PAM type: YTN; PAM sequence: CTA
atattccttgatgtggataa

SEQ ID NO: 66739 - DNA, 20 bp, Artificial Sequence
  Description of Artificial Sequence: Synthetic oligonucleotide
  Target: ATXN2; (-) strand; PAM type: YTN; PAM sequence: CTG
actaatattccttgatgtgg

SEQ ID NO: 66740 - DNA, 20 bp, Artificial Sequence
  Description of Artificial Sequence: Synthetic oligonucleotide
  Target: ATXN2; (-) strand; PAM type: YTN; PAM sequence: TTG
tgactgactaatattccttg

SEQ ID NO: 66741 - DNA, 20 bp, Artificial Sequence
  Description of Artificial Sequence: Synthetic oligonucleotide
  Target: ATXN2; (-) strand; PAM type: YTN; PAM sequence: TTT
gtgactgactaatattcctt

SEQ ID NO: 66742 - DNA, 20 bp, Artificial Sequence
  Description of Artificial Sequence: Synthetic oligonucleotide
  Target: ATXN2; (-) strand; PAM type: YTN; PAM sequence: TTT
tgtgactgactaatattcct

SEQ ID NO: 66743 - DNA, 20 bp, Artificial Sequence
  Description of Artificial Sequence: Synthetic oligonucleotide
  Target: ATXN2; (-) strand; PAM type: YTN; PAM sequence: TTT
ttgtgactgactaatattcc

SEQ ID NO: 66744 - DNA, 20 bp, Artificial Sequence
  Description of Artificial Sequence: Synthetic oligonucleotide
  Target: ATXN2; (-) strand; PAM type: YTN; PAM sequence: CTT
tttgtgactgactaatattc

SEQ ID NO: 66745 - DNA, 20 bp, Artificial Sequence
  Description of Artificial Sequence: Synthetic oligonucleotide
  Target: ATXN2; (-) strand; PAM type: YTN; PAM sequence: TTC
tttttgtgactgactaatat

SEQ ID NO: 66746 - DNA, 20 bp, Artificial Sequence
  Description of Artificial Sequence: Synthetic oligonucleotide
  Target: ATXN2; (-) strand; PAM type: YTN; PAM sequence: TTT
ctttttgtgactgactaata

SEQ ID NO: 66747 - DNA, 20 bp, Artificial Sequence
  Description of Artificial Sequence: Synthetic oligonucleotide
  Target: ATXN2; (-) strand; PAM type: YTN; PAM sequence: TTC
atttctttttgtgactgact

SEQ ID NO: 66748 - DNA, 20 bp, Artificial Sequence
  Description of Artificial Sequence: Synthetic oligonucleotide
  Target: ATXN2; (-) strand; PAM type: YTN; PAM sequence: CTT
catttctttttgtgactgac

SEQ ID NO: 66749 - DNA, 20 bp, Artificial Sequence
  Description of Artificial Sequence: Synthetic oligonucleotide
  Target: ATXN2; (-) strand; PAM type: YTN; PAM sequence: TTC
agtacttcatttctttttgt

SEQ ID NO: 66750 - DNA, 20 bp, Artificial Sequence
  Description of Artificial Sequence: Synthetic oligonucleotide
  Target: ATXN2; (-) strand; PAM type: YTN; PAM sequence: TTT
cagtacttcatttctttttg

SEQ ID NO: 66751 - DNA, 20 bp, Artificial Sequence
  Description of Artificial Sequence: Synthetic oligonucleotide
  Target: ATXN2; (-) strand; PAM type: YTN; PAM sequence: TTG
gagcatgtttcagtacttca

SEQ ID NO: 66752 - DNA, 20 bp, Artificial Sequence
  Description of Artificial Sequence: Synthetic oligonucleotide
  Target: ATXN2; (-) strand; PAM type: YTN; PAM sequence: TTC
atccatgttggagcatgttt

SEQ ID NO: 66753 - DNA, 20 bp, Artificial Sequence
  Description of Artificial Sequence: Synthetic oligonucleotide
  Target: ATXN2; (-) strand; PAM type: YTN; PAM sequence: TTA
taaaagttcatccatgttgg

SEQ ID NO: 66754 - DNA, 20 bp, Artificial Sequence
  Description of Artificial Sequence: Synthetic oligonucleotide
  Target: ATXN2; (-) strand; PAM type: YTN; PAM sequence: CTC
agagtagtgttataaaagtt

SEQ ID NO: 66755 - DNA, 20 bp, Artificial Sequence
  Description of Artificial Sequence: Synthetic oligonucleotide
  Target: ATXN2; (-) strand; PAM type: YTN; PAM sequence: TTC
actcagagtagtgttataaa

SEQ ID NO: 66756 - DNA, 20 bp, Artificial Sequence
  Description of Artificial Sequence: Synthetic oligonucleotide
  Target: ATXN2; (-) strand; PAM type: YTN; PAM sequence: TTT
cactcagagtagtgttataa

SEQ ID NO: 66757 - DNA, 20 bp, Artificial Sequence
  Description of Artificial Sequence: Synthetic oligonucleotide
  Target: ATXN2; (-) strand; PAM type: YTN; PAM sequence: CTT
tcactcagagtagtgttata

SEQ ID NO: 66758 - DNA, 20 bp, Artificial Sequence
  Description of Artificial Sequence: Synthetic oligonucleotide
  Target: ATXN2; (-) strand; PAM type: YTN; PAM sequence: TTC
tttcactcagagtagtgtta

SEQ ID NO: 66759 - DNA, 20 bp, Artificial Sequence
  Description of Artificial Sequence: Synthetic oligonucleotide
  Target: ATXN2; (-) strand; PAM type: YTN; PAM sequence: CTT
ctttcactcagagtagtgtt

SEQ ID NO: 66760 - DNA, 20 bp, Artificial Sequence
  Description of Artificial Sequence: Synthetic oligonucleotide
  Target: ATXN2; (-) strand; PAM type: YTN; PAM sequence: CTG
gcttctttcactcagagtag

SEQ ID NO: 66761 - DNA, 20 bp, Artificial Sequence
  Description of Artificial Sequence: Synthetic oligonucleotide
  Target: ATXN2; (-) strand; PAM type: YTN; PAM sequence: TTA
tgactggcttctttcactca

SEQ ID NO: 66762 - DNA, 20 bp, Artificial Sequence
  Description of Artificial Sequence: Synthetic oligonucleotide
  Target: ATXN2; (-) strand; PAM type: YTN; PAM sequence: TTT
atgactggcttctttcactc

SEQ ID NO: 66763 - DNA, 20 bp, Artificial Sequence
  Description of Artificial Sequence: Synthetic oligonucleotide
  Target: ATXN2; (-) strand; PAM type: YTN; PAM sequence: TTT
tatgactggcttctttcact

SEQ ID NO: 66764 - DNA, 20 bp, Artificial Sequence
  Description of Artificial Sequence: Synthetic oligonucleotide
  Target: ATXN2; (-) strand; PAM type: YTN; PAM sequence: CTT
ttatgactggcttctttcac

SEQ ID NO: 66765 - DNA, 20 bp, Artificial Sequence
  Description of Artificial Sequence: Synthetic oligonucleotide
  Target: ATXN2; (-) strand; PAM type: YTN; PAM sequence: TTC
atacaaatggaataataaaa

SEQ ID NO: 66766 - DNA, 20 bp, Artificial Sequence
  Description of Artificial Sequence: Synthetic oligonucleotide
  Target: ATXN2; (-) strand; PAM type: YTN; PAM sequence: TTT
catacaaatggaataataaa

SEQ ID NO: 66767 - DNA, 20 bp, Artificial Sequence
  Description of Artificial Sequence: Synthetic oligonucleotide
  Target: ATXN2; (-) strand; PAM type: YTN; PAM sequence: TTC
catttcatacaaatggaata

SEQ ID NO: 66768 - DNA, 20 bp, Artificial Sequence
  Description of Artificial Sequence: Synthetic oligonucleotide
  Target: ATXN2; (-) strand; PAM type: YTN; PAM sequence: TTG
gggcaaattccatttcatac

SEQ ID NO: 66769 - DNA, 20 bp, Artificial Sequence
  Description of Artificial Sequence: Synthetic oligonucleotide
  Target: ATXN2; (-) strand; PAM type: YTN; PAM sequence: TTT
ggggcaaattccatttcata

SEQ ID NO: 66770 - DNA, 20 bp, Artificial Sequence
  Description of Artificial Sequence: Synthetic oligonucleotide
  Target: ATXN2; (-) strand; PAM type: YTN; PAM sequence: TTA
tttggggcaaattccatttc

SEQ ID NO: 66771 - DNA, 20 bp, Artificial Sequence
  Description of Artificial Sequence: Synthetic oligonucleotide
  Target: ATXN2; (-) strand; PAM type: YTN; PAM sequence: CTT
atttggggcaaattccattt

SEQ ID NO: 66772 - DNA, 20 bp, Artificial Sequence
  Description of Artificial Sequence: Synthetic oligonucleotide
  Target: ATXN2; (-) strand; PAM type: YTN; PAM sequence: CTA
tggatgggcttatttggggc

SEQ ID NO: 66773 - DNA, 20 bp, Artificial Sequence
  Description of Artificial Sequence: Synthetic oligonucleotide
  Target: ATXN2; (-) strand; PAM type: YTN; PAM sequence: CTC
tatggatgggcttatttggg

SEQ ID NO: 66774 - DNA, 20 bp, Artificial Sequence
  Description of Artificial Sequence: Synthetic oligonucleotide
  Target: ATXN2; (-) strand; PAM type: YTN; PAM sequence: CTG
tctctatggatgggcttatt

SEQ ID NO: 66775 - DNA, 20 bp, Artificial Sequence
  Description of Artificial Sequence: Synthetic oligonucleotide
  Target: ATXN2; (-) strand; PAM type: YTN; PAM sequence: TTC
tgtctctatggatgggctta

SEQ ID NO: 66776 - DNA, 20 bp, Artificial Sequence
  Description of Artificial Sequence: Synthetic oligonucleotide
  Target: ATXN2; (-) strand; PAM type: YTN; PAM sequence: TTT
ctgtctctatggatgggctt

SEQ ID NO: 66777 - DNA, 20 bp, Artificial Sequence
  Description of Artificial Sequence: Synthetic oligonucleotide
  Target: ATXN2; (-) strand; PAM type: YTN; PAM sequence: CTT
tctgtctctatggatgggct

SEQ ID NO: 66778 - DNA, 20 bp, Artificial Sequence
  Description of Artificial Sequence: Synthetic oligonucleotide
  Target: ATXN2; (-) strand; PAM type: YTN; PAM sequence: CTA
ctttctgtctctatggatgg

SEQ ID NO: 66779 - DNA, 20 bp, Artificial Sequence
  Description of Artificial Sequence: Synthetic oligonucleotide
  Target: ATXN2; (-) strand; PAM type: YTN; PAM sequence: TTA
atctactttctgtctctatg

SEQ ID NO: 66780 - DNA, 20 bp, Artificial Sequence
  Description of Artificial Sequence: Synthetic oligonucleotide
  Target: ATXN2; (-) strand; PAM type: YTN; PAM sequence: CTA
agcaaccgttaatctacttt

SEQ ID NO: 66781 - DNA, 20 bp, Artificial Sequence
  Description of Artificial Sequence: Synthetic oligonucleotide
  Target: ATXN2; (-) strand; PAM type: YTN; PAM sequence: CTC
ccaaccctaagcaaccgtta

SEQ ID NO: 66782 - DNA, 20 bp, Artificial Sequence
  Description of Artificial Sequence: Synthetic oligonucleotide
  Target: ATXN2; (-) strand; PAM type: YTN; PAM sequence: CTA
ctcccaaccctaagcaaccg

SEQ ID NO: 66783 - DNA, 20 bp, Artificial Sequence
  Description of Artificial Sequence: Synthetic oligonucleotide
  Target: ATXN2; (-) strand; PAM type: YTN; PAM sequence: TTC
ccctactcccaaccctaagc

SEQ ID NO: 66784 - DNA, 20 bp, Artificial Sequence
  Description of Artificial Sequence: Synthetic oligonucleotide
  Target: ATXN2; (-) strand; PAM type: YTN; PAM sequence: TTT
cccctactcccaaccctaag

SEQ ID NO: 66785 - DNA, 20 bp, Artificial Sequence
  Description of Artificial Sequence: Synthetic oligonucleotide
  Target: ATXN2; (-) strand; PAM type: YTN; PAM sequence: CTT
tcccctactcccaaccctaa

SEQ ID NO: 66786 - DNA, 20 bp, Artificial Sequence
  Description of Artificial Sequence: Synthetic oligonucleotide
  Target: ATXN2; (-) strand; PAM type: YTN; PAM sequence: CTC
tttcccctactcccaaccct

SEQ ID NO: 66787 - DNA, 20 bp, Artificial Sequence
  Description of Artificial Sequence: Synthetic oligonucleotide
  Target: ATXN2; (-) strand; PAM type: YTN; PAM sequence: TTC
tctttcccctactcccaacc

SEQ ID NO: 66788 - DNA, 20 bp, Artificial Sequence
  Description of Artificial Sequence: Synthetic oligonucleotide
  Target: ATXN2; (-) strand; PAM type: YTN; PAM sequence: CTT
ctctttcccctactcccaac

SEQ ID NO: 66789 - DNA, 20 bp, Artificial Sequence
  Description of Artificial Sequence: Synthetic oligonucleotide
  Target: ATXN2; (-) strand; PAM type: YTN; PAM sequence: CTC
cagcccttctctttccccta

SEQ ID NO: 66790 - DNA, 20 bp, Artificial Sequence
  Description of Artificial Sequence: Synthetic oligonucleotide
  Target: ATXN2; (-) strand; PAM type: YTN; PAM sequence: TTG
cctccagcccttctctttcc

SEQ ID NO: 66791 - DNA, 20 bp, Artificial Sequence
  Description of Artificial Sequence: Synthetic oligonucleotide
  Target: ATXN2; (-) strand; PAM type: YTN; PAM sequence: TTT
gcctccagcccttctctttc

SEQ ID NO: 66792 - DNA, 20 bp, Artificial Sequence
  Description of Artificial Sequence: Synthetic oligonucleotide
  Target: ATXN2; (-) strand; PAM type: YTN; PAM sequence: TTC
cacatttgcctccagccctt

SEQ ID NO: 66793 - DNA, 20 bp, Artificial Sequence
  Description of Artificial Sequence: Synthetic oligonucleotide
  Target: ATXN2; (-) strand; PAM type: YTN; PAM sequence: TTA
gcagtcgttccacatttgcc

SEQ ID NO: 66794 - DNA, 20 bp, Artificial Sequence
  Description of Artificial Sequence: Synthetic oligonucleotide
  Target: ATXN2; (-) strand; PAM type: YTN; PAM sequence: TTT
agcagtcgttccacatttgc

SEQ ID NO: 66795 - DNA, 20 bp, Artificial Sequence
  Description of Artificial Sequence: Synthetic oligonucleotide
  Target: ATXN2; (-) strand; PAM type: YTN; PAM sequence: TTC
acccccaaaagaaaccccgt

SEQ ID NO: 66796 - DNA, 20 bp, Artificial Sequence
  Description of Artificial Sequence: Synthetic oligonucleotide
  Target: ATXN2; (-) strand; PAM type: YTN; PAM sequence: CTT
cacccccaaaagaaaccccg

SEQ ID NO: 66797 - DNA, 20 bp, Artificial Sequence
  Description of Artificial Sequence: Synthetic oligonucleotide
  Target: ATXN2; (-) strand; PAM type: YTN; PAM sequence: CTC
ttcacccccaaaagaaaccc

SEQ ID NO: 66798 - DNA, 20 bp, Artificial Sequence
  Description of Artificial Sequence: Synthetic oligonucleotide
  Target: ATXN2; (-) strand; PAM type: YTN; PAM sequence: TTA
aaacatactcttcaccccca

SEQ ID NO: 66799 - DNA, 20 bp, Artificial Sequence
  Description of Artificial Sequence: Synthetic oligonucleotide
  Target: ATXN2; (-) strand; PAM type: YTN; PAM sequence: TTT
aaaacatactcttcaccccc

SEQ ID NO: 66800 - DNA, 20 bp, Artificial Sequence
  Description of Artificial Sequence: Synthetic oligonucleotide
  Target: ATXN2; (-) strand; PAM type: YTN; PAM sequence: TTT
taaaacatactcttcacccc

SEQ ID NO: 66801 - DNA, 20 bp, Artificial Sequence
  Description of Artificial Sequence: Synthetic oligonucleotide
  Target: ATXN2; (-) strand; PAM type: YTN; PAM sequence: TTG
attttaaaacatactcttca

SEQ ID NO: 66802 - DNA, 20 bp, Artificial Sequence
  Description of Artificial Sequence: Synthetic oligonucleotide
  Target: ATXN2; (-) strand; PAM type: YTN; PAM sequence: CTC
agttgattttaaaacatact

SEQ ID NO: 66803 - DNA, 20 bp, Artificial Sequence
  Description of Artificial Sequence: Synthetic oligonucleotide
  Target: ATXN2; (-) strand; PAM type: YTN; PAM sequence: TTC
tcagttgattttaaaacata

SEQ ID NO: 66804 - DNA, 20 bp, Artificial Sequence
  Description of Artificial Sequence: Synthetic oligonucleotide
  Target: ATXN2; (-) strand; PAM type: YTN; PAM sequence: CTT
ctcagttgattttaaaacat

SEQ ID NO: 66805 - DNA, 20 bp, Artificial Sequence
  Description of Artificial Sequence: Synthetic oligonucleotide
  Target: ATXN2; (-) strand; PAM type: YTN; PAM sequence: TTG
tacaaccgtcttctcagttg

SEQ ID NO: 66806 - DNA, 20 bp, Artificial Sequence
  Description of Artificial Sequence: Synthetic oligonucleotide
  Target: ATXN2; (-) strand; PAM type: YTN; PAM sequence: TTC
acaatgttgtacaaccgtct

SEQ ID NO: 66807 - DNA, 20 bp, Artificial Sequence
  Description of Artificial Sequence: Synthetic oligonucleotide
  Target: ATXN2; (-) strand; PAM type: YTN; PAM sequence: TTA
aaatattcacaatgttgtac

SEQ ID NO: 66808 - DNA, 20 bp, Artificial Sequence
  Description of Artificial Sequence: Synthetic oligonucleotide
  Target: ATXN2; (-) strand; PAM type: YTN; PAM sequence: TTT
aaaatattcacaatgttgta

SEQ ID NO: 66809 - DNA, 20 bp, Artificial Sequence
  Description of Artificial Sequence: Synthetic oligonucleotide
  Target: ATXN2; (-) strand; PAM type: YTN; PAM sequence: TTT
taaaatattcacaatgttgt

SEQ ID NO: 66810 - DNA, 20 bp, Artificial Sequence
  Description of Artificial Sequence: Synthetic oligonucleotide
  Target: ATXN2; (-) strand; PAM type: YTN; PAM sequence: TTT
ttaaaatattcacaatgttg

SEQ ID NO: 66811 - DNA, 20 bp, Artificial Sequence
  Description of Artificial Sequence: Synthetic oligonucleotide
  Target: ATXN2; (-) strand; PAM type: YTN; PAM sequence: TTA
aagtgtataaatcagtggtt

SEQ ID NO: 66812 - DNA, 20 bp, Artificial Sequence
  Description of Artificial Sequence: Synthetic oligonucleotide
  Target: ATXN2; (-) strand; PAM type: YTN; PAM sequence: TTT
aaagtgtataaatcagtggt

SEQ ID NO: 66813 - DNA, 20 bp, Artificial Sequence
  Description of Artificial Sequence: Synthetic oligonucleotide
  Target: ATXN2; (-) strand; PAM type: YTN; PAM sequence: TTA
catatataaatcaaccattt

SEQ ID NO: 66814 - DNA, 20 bp, Artificial Sequence
  Description of Artificial Sequence: Synthetic oligonucleotide
  Target: ATXN2; (-) strand; PAM type: YTN; PAM sequence: TTT
acatatataaatcaaccatt

SEQ ID NO: 66815 - DNA, 20 bp, Artificial Sequence
  Description of Artificial Sequence: Synthetic oligonucleotide
  Target: ATXN2; (-) strand; PAM type: YTN; PAM sequence: TTA
atgagatataatttacatat

SEQ ID NO: 66816 - DNA, 20 bp, Artificial Sequence
  Description of Artificial Sequence: Synthetic oligonucleotide
  Target: ATXN2; (-) strand; PAM type: YTN; PAM sequence: TTT
aatgagatataatttacata

SEQ ID NO: 66817 - DNA, 20 bp, Artificial Sequence
  Description of Artificial Sequence: Synthetic oligonucleotide
  Target: ATXN2; (-) strand; PAM type: YTN; PAM sequence: TTT
taatgagatataatttacat

SEQ ID NO: 66818 - DNA, 20 bp, Artificial Sequence
  Description of Artificial Sequence: Synthetic oligonucleotide
  Target: ATXN2; (-) strand; PAM type: YTN; PAM sequence: TTT
ttaatgagatataatttaca

SEQ ID NO: 66819 - DNA, 20 bp, Artificial Sequence
  Description of Artificial Sequence: Synthetic oligonucleotide
  Target: ATXN2; (-) strand; PAM type: YTN; PAM sequence: TTA
aagtgtataaatcagtggtt

SEQ ID NO: 66820 - DNA, 20 bp, Artificial Sequence
  Description of Artificial Sequence: Synthetic oligonucleotide
  Target: ATXN2; (-) strand; PAM type: YTN; PAM sequence: TTT
aaagtgtataaatcagtggt

SEQ ID NO: 66821 - DNA, 20 bp, Artificial Sequence
  Description of Artificial Sequence: Synthetic oligonucleotide
  Target: ATXN2; (-) strand; PAM type: YTN; PAM sequence: TTA
catatataaataaaccgttt

SEQ ID NO: 66822 - DNA, 20 bp, Artificial Sequence
  Description of Artificial Sequence: Synthetic oligonucleotide
  Target: ATXN2; (-) strand; PAM type: YTN; PAM sequence: TTT
acatatataaataaaccgtt

SEQ ID NO: 66823 - DNA, 20 bp, Artificial Sequence
  Description of Artificial Sequence: Synthetic oligonucleotide
  Target: ATXN2; (-) strand; PAM type: YTN; PAM sequence: TTG
agatataatttacatatata

SEQ ID NO: 66824 - DNA, 20 bp, Artificial Sequence
  Description of Artificial Sequence: Synthetic oligonucleotide
  Target: ATXN2; (-) strand; PAM type: YTN; PAM sequence: TTA
ttgagatataatttacatat

SEQ ID NO: 66825 - DNA, 20 bp, Artificial Sequence
  Description of Artificial Sequence: Synthetic oligonucleotide
  Target: ATXN2; (-) strand; PAM type: YTN; PAM sequence: TTT
attgagatataatttacata

SEQ ID NO: 66826 - DNA, 20 bp, Artificial Sequence
  Description of Artificial Sequence: Synthetic oligonucleotide
  Target: ATXN2; (-) strand; PAM type: YTN; PAM sequence: CTT
tattgagatataatttacat

SEQ ID NO: 66827 - DNA, 20 bp, Artificial Sequence
  Description of Artificial Sequence: Synthetic oligonucleotide
  Target: ATXN2; (-) strand; PAM type: YTN; PAM sequence: TTA
taacagctttattgagatat

SEQ ID NO: 66828 - DNA, 20 bp, Artificial Sequence
  Description of Artificial Sequence: Synthetic oligonucleotide
  Target: ATXN2; (-) strand; PAM type: YTN; PAM sequence: TTT
ataacagctttattgagata

SEQ ID NO: 66829 - DNA, 20 bp, Artificial Sequence
  Description of Artificial Sequence: Synthetic oligonucleotide
  Target: ATXN2; (-) strand; PAM type: YTN; PAM sequence: TTT
tataacagctttattgagat

SEQ ID NO: 66830 - DNA, 20 bp, Artificial Sequence
  Description of Artificial Sequence: Synthetic oligonucleotide
  Target: ATXN2; (-) strand; PAM type: YTN; PAM sequence: TTT
ttataacagctttattgaga

SEQ ID NO: 66831 - DNA, 20 bp, Artificial Sequence
  Description of Artificial Sequence: Synthetic oligonucleotide
  Target: ATXN2; (-) strand; PAM type: YTN; PAM sequence: TTA
gcatgtttttataacagctt

SEQ ID NO: 66832 - DNA, 20 bp, Artificial Sequence
  Description of Artificial Sequence: Synthetic oligonucleotide
  Target: ATXN2; (-) strand; PAM type: YTN; PAM sequence: TTG
aagcatgtgaattagcatgt

SEQ ID NO: 66833 - DNA, 20 bp, Artificial Sequence
  Description of Artificial Sequence: Synthetic oligonucleotide
  Target: ATXN2; (-) strand; PAM type: YTN; PAM sequence: TTT
gaagcatgtgaattagcatg

SEQ ID NO: 66834 - DNA, 20 bp, Artificial Sequence
  Description of Artificial Sequence: Synthetic oligonucleotide
  Target: ATXN2; (-) strand; PAM type: YTN; PAM sequence: CTT
tgaagcatgtgaattagcat

SEQ ID NO: 66835 - DNA, 20 bp, Artificial Sequence
  Description of Artificial Sequence: Synthetic oligonucleotide
  Target: ATXN2; (-) strand; PAM type: YTN; PAM sequence: CTA
ctttgaagcatgtgaattag

SEQ ID NO: 66836 - DNA, 20 bp, Artificial Sequence
  Description of Artificial Sequence: Synthetic oligonucleotide
  Target: ATXN2; (-) strand; PAM type: YTN; PAM sequence: TTC
tactttgaagcatgtgaatt

SEQ ID NO: 66837 - DNA, 20 bp, Artificial Sequence
  Description of Artificial Sequence: Synthetic oligonucleotide
  Target: ATXN2; (-) strand; PAM type: YTN; PAM sequence: TTT
ctactttgaagcatgtgaat

SEQ ID NO: 66838 - DNA, 20 bp, Artificial Sequence
  Description of Artificial Sequence: Synthetic oligonucleotide
  Target: ATXN2; (-) strand; PAM type: YTN; PAM sequence: CTC
atgaagaaaaaacatttcta

SEQ ID NO: 66839 - DNA, 20 bp, Artificial Sequence
  Description of Artificial Sequence: Synthetic oligonucleotide
  Target: ATXN2; (-) strand; PAM type: YTN; PAM sequence: TTA
atatctcatgaagaaaaaac

SEQ ID NO: 66840 - DNA, 20 bp, Artificial Sequence
  Description of Artificial Sequence: Synthetic oligonucleotide
  Target: ATXN2; (-) strand; PAM type: YTN; PAM sequence: TTT
aatatctcatgaagaaaaaa

SEQ ID NO: 66841 - DNA, 20 bp, Artificial Sequence
  Description of Artificial Sequence: Synthetic oligonucleotide
  Target: ATXN2; (-) strand; PAM type: YTN; PAM sequence: TTG
aatttaatatctcatgaaga

SEQ ID NO: 66842 - DNA, 20 bp, Artificial Sequence
  Description of Artificial Sequence: Synthetic oligonucleotide
  Target: ATXN2; (-) strand; PAM type: YTN; PAM sequence: TTG
gattgaatttaatatctcat

SEQ ID NO: 66843 - DNA, 20 bp, Artificial Sequence
  Description of Artificial Sequence: Synthetic oligonucleotide
  Target: ATXN2; (-) strand; PAM type: YTN; PAM sequence: CTT
ggattgaatttaatatctca

SEQ ID NO: 66844 - DNA, 20 bp, Artificial Sequence
  Description of Artificial Sequence: Synthetic oligonucleotide
  Target: ATXN2; (-) strand; PAM type: YTN; PAM sequence: CTA
cacttggattgaatttaata

SEQ ID NO: 66845 - DNA, 20 bp, Artificial Sequence
  Description of Artificial Sequence: Synthetic oligonucleotide
  Target: ATXN2; (-) strand; PAM type: YTN; PAM sequence: TTA
tactacacttggattgaatt

SEQ ID NO: 66846 - DNA, 20 bp, Artificial Sequence
  Description of Artificial Sequence: Synthetic oligonucleotide
  Target: ATXN2; (-) strand; PAM type: YTN; PAM sequence: CTT
atactacacttggattgaat

SEQ ID NO: 66847 - DNA, 20 bp, Artificial Sequence
  Description of Artificial Sequence: Synthetic oligonucleotide
  Target: ATXN2; (-) strand; PAM type: YTN; PAM sequence: CTC
ttatactacacttggattga

SEQ ID NO: 66848 - DNA, 20 bp, Artificial Sequence
  Description of Artificial Sequence: Synthetic oligonucleotide
  Target: ATXN2; (-) strand; PAM type: YTN; PAM sequence: CTC
ctcttatactacacttggat

SEQ ID NO: 66849 - DNA, 20 bp, Artificial Sequence
  Description of Artificial Sequence: Synthetic oligonucleotide
  Target: ATXN2; (-) strand; PAM type: YTN; PAM sequence: TTC
agtctcctcttatactacac

SEQ ID NO: 66850 - DNA, 20 bp, Artificial Sequence
  Description of Artificial Sequence: Synthetic oligonucleotide
  Target: ATXN2; (-) strand; PAM type: YTN; PAM sequence: TTA
acatcattcagtctcctctt

SEQ ID NO: 66851 - DNA, 20 bp, Artificial Sequence
  Description of Artificial Sequence: Synthetic oligonucleotide
  Target: ATXN2; (-) strand; PAM type: YTN; PAM sequence: TTT
aacatcattcagtctcctct

SEQ ID NO: 66852 - DNA, 20 bp, Artificial Sequence
  Description of Artificial Sequence: Synthetic oligonucleotide
  Target: ATXN2; (-) strand; PAM type: YTN; PAM sequence: TTT
taacatcattcagtctcctc

SEQ ID NO: 66853 - DNA, 20 bp, Artificial Sequence
  Description of Artificial Sequence: Synthetic oligonucleotide
  Target: ATXN2; (-) strand; PAM type: YTN; PAM sequence: TTT
ttaacatcattcagtctcct

SEQ ID NO: 66854 - DNA, 20 bp, Artificial Sequence
  Description of Artificial Sequence: Synthetic oligonucleotide
  Target: ATXN2; (-) strand; PAM type: YTN; PAM sequence: TTT
tttaacatcattcagtctcc

SEQ ID NO: 66855 - DNA, 20 bp, Artificial Sequence
  Description of Artificial Sequence: Synthetic oligonucleotide
  Target: ATXN2; (-) strand; PAM type: YTN; PAM sequence: TTT
ttttaacatcattcagtctc

SEQ ID NO: 66856 - DNA, 20 bp, Artificial Sequence
  Description of Artificial Sequence: Synthetic oligonucleotide
  Target: ATXN2; (-) strand; PAM type: YTN; PAM sequence: TTT
tttttaacatcattcagtct

SEQ ID NO: 66857 - DNA, 20 bp, Artificial Sequence
  Description of Artificial Sequence: Synthetic oligonucleotide
  Target: ATXN2; (-) strand; PAM type: YTN; PAM sequence: TTA
ttttttttaacatcattcag

SEQ ID NO: 66858 - DNA, 20 bp, Artificial Sequence
  Description of Artificial Sequence: Synthetic oligonucleotide
  Target: ATXN2; (-) strand; PAM type: YTN; PAM sequence: CTC
agcattattttttttaacat

SEQ ID NO: 66859 - DNA, 20 bp, Artificial Sequence
  Description of Artificial Sequence: Synthetic oligonucleotide
  Target: ATXN2; (-) strand; PAM type: YTN; PAM sequence: TTC
ctcagcattattttttttaa

SEQ ID NO: 66860 - DNA, 20 bp, Artificial Sequence
  Description of Artificial Sequence: Synthetic oligonucleotide
  Target: ATXN2; (-) strand; PAM type: YTN; PAM sequence: TTT
cctcagcattatttttttta

SEQ ID NO: 66861 - DNA, 20 bp, Artificial Sequence
  Description of Artificial Sequence: Synthetic oligonucleotide
  Target: ATXN2; (-) strand; PAM type: YTN; PAM sequence: TTT
tcctcagcattatttttttt

SEQ ID NO: 66862 - DNA, 20 bp, Artificial Sequence
  Description of Artificial Sequence: Synthetic oligonucleotide
  Target: ATXN2; (-) strand; PAM type: YTN; PAM sequence: TTT
ttcctcagcattattttttt

SEQ ID NO: 66863 - DNA, 20 bp, Artificial Sequence
  Description of Artificial Sequence: Synthetic oligonucleotide
  Target: ATXN2; (-) strand; PAM type: YTN; PAM sequence: TTT
tttcctcagcattatttttt

SEQ ID NO: 66864 - DNA, 20 bp, Artificial Sequence
  Description of Artificial Sequence: Synthetic oligonucleotide
  Target: ATXN2; (-) strand; PAM type: YTN; PAM sequence: TTG
aattttttcctcagcattat

SEQ ID NO: 66865 - DNA, 20 bp, Artificial Sequence
  Description of Artificial Sequence: Synthetic oligonucleotide
  Target: ATXN2; (-) strand; PAM type: YTN; PAM sequence: TTT
gaattttttcctcagcatta

SEQ ID NO: 66866 - DNA, 20 bp, Artificial Sequence
  Description of Artificial Sequence: Synthetic oligonucleotide
  Target: ATXN2; (-) strand; PAM type: YTN; PAM sequence: TTC
cccatttgaattttttcctc

SEQ ID NO: 66867 - DNA, 20 bp, Artificial Sequence
  Description of Artificial Sequence: Synthetic oligonucleotide
  Target: ATXN2; (-) strand; PAM type: YTN; PAM sequence: CTT
ccccatttgaattttttcct

SEQ ID NO: 66868 - DNA, 20 bp, Artificial Sequence
  Description of Artificial Sequence: Synthetic oligonucleotide
  Target: ATXN2; (-) strand; PAM type: YTN; PAM sequence: TTC
ttccccatttgaattttttc

SEQ ID NO: 66869 - DNA, 20 bp, Artificial Sequence
  Description of Artificial Sequence: Synthetic oligonucleotide
  Target: ATXN2; (-) strand; PAM type: YTN; PAM sequence: CTG
taggtattcttccccatttg

SEQ ID NO: 66870 - DNA, 20 bp, Artificial Sequence
  Description of Artificial Sequence: Synthetic oligonucleotide
  Target: ATXN2; (-) strand; PAM type: YTN; PAM sequence: TTG
ctgtaggtattcttccccat

SEQ ID NO: 66871 - DNA, 20 bp, Artificial Sequence
  Description of Artificial Sequence: Synthetic oligonucleotide
  Target: ATXN2; (-) strand; PAM type: YTN; PAM sequence: CTT
gctgtaggtattcttcccca

SEQ ID NO: 66872 - DNA, 20 bp, Artificial Sequence
  Description of Artificial Sequence: Synthetic oligonucleotide
  Target: ATXN2; (-) strand; PAM type: YTN; PAM sequence: CTC
ggcatcagagggagaccgtg

SEQ ID NO: 66873 - DNA, 20 bp, Artificial Sequence
  Description of Artificial Sequence: Synthetic oligonucleotide
  Target: ATXN2; (-) strand; PAM type: YTN; PAM sequence: TTC
ggctcggcatcagagggaga

SEQ ID NO: 66874 - DNA, 20 bp, Artificial Sequence
  Description of Artificial Sequence: Synthetic oligonucleotide
  Target: ATXN2; (-) strand; PAM type: YTN; PAM sequence: CTT
cggctcggcatcagagggag

SEQ ID NO: 66875 - DNA, 20 bp, Artificial Sequence
  Description of Artificial Sequence: Synthetic oligonucleotide
  Target: ATXN2; (-) strand; PAM type: YTN; PAM sequence: CTA
gcttcggctcggcatcagag

SEQ ID NO: 66876 - DNA, 20 bp, Artificial Sequence
  Description of Artificial Sequence: Synthetic oligonucleotide
  Target: ATXN2; (-) strand; PAM type: YTN; PAM sequence: TTG
cagtgagccgagatggcagc

SEQ ID NO: 66877 - DNA, 20 bp, Artificial Sequence
  Description of Artificial Sequence: Synthetic oligonucleotide
  Target: ATXN2; (-) strand; PAM type: YTN; PAM sequence: CTG
aggcaggagaatcaggcagg

SEQ ID NO: 66878 - DNA, 20 bp, Artificial Sequence
  Description of Artificial Sequence: Synthetic oligonucleotide
  Target: ATXN2; (-) strand; PAM type: YTN; PAM sequence: CTA
ggcaggctgaggcaggagaa

SEQ ID NO: 66879 - DNA, 20 bp, Artificial Sequence
  Description of Artificial Sequence: Synthetic oligonucleotide
  Target: ATXN2; (-) strand; PAM type: YTN; PAM sequence: CTG
caatcacaggcactaggcag

SEQ ID NO: 66880 - DNA, 20 bp, Artificial Sequence
  Description of Artificial Sequence: Synthetic oligonucleotide
  Target: ATXN2; (-) strand; PAM type: YTN; PAM sequence: CTC
caccaaaaaaatacgaaaac

SEQ ID NO: 66881 - DNA, 20 bp, Artificial Sequence
  Description of Artificial Sequence: Synthetic oligonucleotide
  Target: ATXN2; (-) strand; PAM type: YTN; PAM sequence: CTG
gagaccagcccggccaacac

SEQ ID NO: 66882 - DNA, 20 bp, Artificial Sequence
  Description of Artificial Sequence: Synthetic oligonucleotide
  Target: ATXN2; (-) strand; PAM type: YTN; PAM sequence: TTA
ggagctggagaccagcccgg

SEQ ID NO: 66883 - DNA, 20 bp, Artificial Sequence
  Description of Artificial Sequence: Synthetic oligonucleotide
  Target: ATXN2; (-) strand; PAM type: YTN; PAM sequence: CTC
gcggttaggagctggagacc

SEQ ID NO: 66884 - DNA, 20 bp, Artificial Sequence
  Description of Artificial Sequence: Synthetic oligonucleotide
  Target: ATXN2; (-) strand; PAM type: YTN; PAM sequence: CTG
gcagatcactcgcggttagg

SEQ ID NO: 66885 - DNA, 20 bp, Artificial Sequence
  Description of Artificial Sequence: Synthetic oligonucleotide
  Target: ATXN2; (-) strand; PAM type: YTN; PAM sequence: CTC
gggaggccgaggctggcaga

SEQ ID NO: 66886 - DNA, 20 bp, Artificial Sequence
  Description of Artificial Sequence: Synthetic oligonucleotide
  Target: ATXN2; (-) strand; PAM type: YTN; PAM sequence: CTG
caatcccggcacctcgggag

SEQ ID NO: 66887 - DNA, 20 bp, Artificial Sequence
  Description of Artificial Sequence: Synthetic oligonucleotide
  Target: ATXN2; (-) strand; PAM type: YTN; PAM sequence: CTC
cgtctgcaatcccggcacct

SEQ ID NO: 66888 - DNA, 20 bp, Artificial Sequence
  Description of Artificial Sequence: Synthetic oligonucleotide
  Target: ATXN2; (-) strand; PAM type: YTN; PAM sequence: CTG
agtgaacgagactccgtctg

SEQ ID NO: 66889 - DNA, 20 bp, Artificial Sequence
  Description of Artificial Sequence: Synthetic oligonucleotide
  Target: ATXN2; (-) strand; PAM type: YTN; PAM sequence: TTG
agcactgagtgaacgagact

SEQ ID NO: 66890 - DNA, 20 bp, Artificial Sequence
  Description of Artificial Sequence: Synthetic oligonucleotide
  Target: ATXN2; (-) strand; PAM type: YTN; PAM sequence: CTG
ggcaccattgagcactgagt

SEQ ID NO: 66891 - DNA, 20 bp, Artificial Sequence
  Description of Artificial Sequence: Synthetic oligonucleotide
  Target: ATXN2; (-) strand; PAM type: YTN; PAM sequence: CTC
cagcctgggcaccattgagc

SEQ ID NO: 66892 - DNA, 20 bp, Artificial Sequence
  Description of Artificial Sequence: Synthetic oligonucleotide
  Target: ATXN2; (-) strand; PAM type: YTN; PAM sequence: CTG
cactccagcctgggcaccat

SEQ ID NO: 66893 - DNA, 20 bp, Artificial Sequence
  Description of Artificial Sequence: Synthetic oligonucleotide
  Target: ATXN2; (-) strand; PAM type: YTN; PAM sequence: TTG
tagcgagccgagatcacgcc

SEQ ID NO: 66894 - DNA, 20 bp, Artificial Sequence
  Description of Artificial Sequence: Synthetic oligonucleotide
  Target: ATXN2; (-) strand; PAM type: YTN; PAM sequence: CTG
ggaggtggaggttgtagcga

SEQ ID NO: 66895 - DNA, 20 bp, Artificial Sequence
  Description of Artificial Sequence: Synthetic oligonucleotide
  Target: ATXN2; (-) strand; PAM type: YTN; PAM sequence: TTG
ggaggccaaggcaggtggct

SEQ ID NO: 66896 - DNA, 20 bp, Artificial Sequence
  Description of Artificial Sequence: Synthetic oligonucleotide
  Target: ATXN2; (-) strand; PAM type: YTN; PAM sequence: TTT
gggaggccaaggcaggtggc

SEQ ID NO: 66897 - DNA, 20 bp, Artificial Sequence
  Description of Artificial Sequence: Synthetic oligonucleotide
  Target: ATXN2; (-) strand; PAM type: YTN; PAM sequence: CTT
tgggaggccaaggcaggtgg

SEQ ID NO: 66898 - DNA, 20 bp, Artificial Sequence
  Description of Artificial Sequence: Synthetic oligonucleotide
  Target: ATXN2; (-) strand; PAM type: YTN; PAM sequence: CTC
ggcactttgggaggccaagg

SEQ ID NO: 66899 - DNA, 20 bp, Artificial Sequence
  Description of Artificial Sequence: Synthetic oligonucleotide
  Target: ATXN2; (-) strand; PAM type: YTN; PAM sequence: CTG
caatctcggcactttgggag

SEQ ID NO: 66900 - DNA, 20 bp, Artificial Sequence
  Description of Artificial Sequence: Synthetic oligonucleotide
  Target: ATXN2; (-) strand; PAM type: YTN; PAM sequence: TTC
ccagacggggtggcggccgg

SEQ ID NO: 66901 - DNA, 20 bp, Artificial Sequence
  Description of Artificial Sequence: Synthetic oligonucleotide
  Target: ATXN2; (-) strand; PAM type: YTN; PAM sequence: CTT
cccagacggggtggcggccg

SEQ ID NO: 66902 - DNA, 20 bp, Artificial Sequence
  Description of Artificial Sequence: Synthetic oligonucleotide
  Target: ATXN2; (-) strand; PAM type: YTN; PAM sequence: CTC
acttcccagacggggtggcg

SEQ ID NO: 66903 - DNA, 20 bp, Artificial Sequence
  Description of Artificial Sequence: Synthetic oligonucleotide
  Target: ATXN2; (-) strand; PAM type: YTN; PAM sequence: CTC
ctcacttcccagacggggtg

SEQ ID NO: 66904 - DNA, 20 bp, Artificial Sequence
  Description of Artificial Sequence: Synthetic oligonucleotide
  Target: ATXN2; (-) strand; PAM type: YTN; PAM sequence: CTC
acatcccagacgatgggtgg

SEQ ID NO: 66905 - DNA, 20 bp, Artificial Sequence
  Description of Artificial Sequence: Synthetic oligonucleotide
  Target: ATXN2; (-) strand; PAM type: YTN; PAM sequence: CTC
ctcacatcccagacgatggg

SEQ ID NO: 66906 - DNA, 20 bp, Artificial Sequence
  Description of Artificial Sequence: Synthetic oligonucleotide
  Target: ATXN2; (-) strand; PAM type: YTN; PAM sequence: CTG
ggcagccgggcagaggggct

SEQ ID NO: 66907 - DNA, 20 bp, Artificial Sequence
  Description of Artificial Sequence: Synthetic oligonucleotide
  Target: ATXN2; (-) strand; PAM type: YTN; PAM sequence: TTC
ccagactgggcagccgggca

SEQ ID NO: 66908 - DNA, 20 bp, Artificial Sequence
  Description of Artificial Sequence: Synthetic oligonucleotide
  Target: ATXN2; (-) strand; PAM type: YTN; PAM sequence: CTT
cccagactgggcagccgggc

SEQ ID NO: 66909 - DNA, 20 bp, Artificial Sequence
  Description of Artificial Sequence: Synthetic oligonucleotide
  Target: ATXN2; (-) strand; PAM type: YTN; PAM sequence: CTC
acttcccagactgggcagcc

SEQ ID NO: 66910 - DNA, 20 bp, Artificial Sequence
  Description of Artificial Sequence: Synthetic oligonucleotide
  Target: ATXN2; (-) strand; PAM type: YTN; PAM sequence: CTC
ctcacttcccagactgggca

SEQ ID NO: 66911 - DNA, 20 bp, Artificial Sequence
  Description of Artificial Sequence: Synthetic oligonucleotide
  Target: ATXN2; (-) strand; PAM type: YTN; PAM sequence: CTA
gacgggatggcggccgggaa

SEQ ID NO: 66912 - DNA, 20 bp, Artificial Sequence
  Description of Artificial Sequence: Synthetic oligonucleotide
  Target: ATXN2; (-) strand; PAM type: YTN; PAM sequence: TTC
ctagacgggatggcggccgg

SEQ ID NO: 66913 - DNA, 20 bp, Artificial Sequence
  Description of Artificial Sequence: Synthetic oligonucleotide
  Target: ATXN2; (-) strand; PAM type: YTN; PAM sequence: CTT
cctagacgggatggcggccg

SEQ ID NO: 66914 - DNA, 20 bp, Artificial Sequence
  Description of Artificial Sequence: Synthetic oligonucleotide
  Target: ATXN2; (-) strand; PAM type: YTN; PAM sequence: CTC
acttcctagacgggatggcg

SEQ ID NO: 66915 - DNA, 20 bp, Artificial Sequence
  Description of Artificial Sequence: Synthetic oligonucleotide
  Target: ATXN2; (-) strand; PAM type: YTN; PAM sequence: CTC
ctcacttcctagacgggatg

SEQ ID NO: 66916 - DNA, 20 bp, Artificial Sequence
  Description of Artificial Sequence: Synthetic oligonucleotide
  Target: ATXN2; (-) strand; PAM type: YTN; PAM sequence: CTC
agacgacgggtggccgggca

SEQ ID NO: 66917 - DNA, 20 bp, Artificial Sequence
  Description of Artificial Sequence: Synthetic oligonucleotide
  Target: ATXN2; (-) strand; PAM type: YTN; PAM sequence: CTC
cccacatctcagacgacggg

SEQ ID NO: 66918 - DNA, 20 bp, Artificial Sequence
  Description of Artificial Sequence: Synthetic oligonucleotide
  Target: ATXN2; (-) strand; PAM type: YTN; PAM sequence: CTC
acatcccagacggggcagcg

SEQ ID NO: 66919 - DNA, 20 bp, Artificial Sequence
  Description of Artificial Sequence: Synthetic oligonucleotide
  Target: ATXN2; (-) strand; PAM type: YTN; PAM sequence: CTC
ctcacatcccagacggggca

SEQ ID NO: 66920 - DNA, 20 bp, Artificial Sequence
  Description of Artificial Sequence: Synthetic oligonucleotide
  Target: ATXN2; (-) strand; PAM type: YTN; PAM sequence: CTC
ccagacggggtcgcggccgg

SEQ ID NO: 66921 - DNA, 20 bp, Artificial Sequence
  Description of Artificial Sequence: Synthetic oligonucleotide
  Target: ATXN2; (-) strand; PAM type: YTN; PAM sequence: CTC
acctcccagacggggtcgcg

SEQ ID NO: 66922 - DNA, 20 bp, Artificial Sequence
  Description of Artificial Sequence: Synthetic oligonucleotide
  Target: ATXN2; (-) strand; PAM type: YTN; PAM sequence: CTC
ctcacctcccagacggggtc

SEQ ID NO: 66923 - DNA, 20 bp, Artificial Sequence
  Description of Artificial Sequence: Synthetic oligonucleotide
  Target: ATXN2; (-) strand; PAM type: YTN; PAM sequence: CTC
agacggggcggccaggcaga

SEQ ID NO: 66924 - DNA, 20 bp, Artificial Sequence
  Description of Artificial Sequence: Synthetic oligonucleotide
  Target: ATXN2; (-) strand; PAM type: YTN; PAM sequence: TTC
tcagacggggcggccaggca

SEQ ID NO: 66925 - DNA, 20 bp, Artificial Sequence
  Description of Artificial Sequence: Synthetic oligonucleotide
  Target: ATXN2; (-) strand; PAM type: YTN; PAM sequence: CTT
ctcagacggggcggccaggc

SEQ ID NO: 66926 - DNA, 20 bp, Artificial Sequence
  Description of Artificial Sequence: Synthetic oligonucleotide
  Target: ATXN2; (-) strand; PAM type: YTN; PAM sequence: CTC
acttctcagacggggcggcc

SEQ ID NO: 66927 - DNA, 20 bp, Artificial Sequence
  Description of Artificial Sequence: Synthetic oligonucleotide
  Target: ATXN2; (-) strand; PAM type: YTN; PAM sequence: CTC
ctcacttctcagacggggcg

SEQ ID NO: 66928 - DNA, 20 bp, Artificial Sequence
  Description of Artificial Sequence: Synthetic oligonucleotide
  Target: ATXN2; (-) strand; PAM type: YTN; PAM sequence: CTG
ccgggcagaggggctcctca

SEQ ID NO: 66929 - DNA, 20 bp, Artificial Sequence
  Description of Artificial Sequence: Synthetic oligonucleotide
  Target: ATXN2; (-) strand; PAM type: YTN; PAM sequence: CTC
agacggggcggctgccgggc

SEQ ID NO: 66930 - DNA, 20 bp, Artificial Sequence
  Description of Artificial Sequence: Synthetic oligonucleotide
  Target: ATXN2; (-) strand; PAM type: YTN; PAM sequence: TTC
tcagacggggcggctgccgg

SEQ ID NO: 66931 - DNA, 20 bp, Artificial Sequence
  Description of Artificial Sequence: Synthetic oligonucleotide
  Target: ATXN2; (-) strand; PAM type: YTN; PAM sequence: CTT
ctcagacggggcggctgccg

SEQ ID NO: 66932 - DNA, 20 bp, Artificial Sequence
  Description of Artificial Sequence: Synthetic oligonucleotide
  Target: ATXN2; (-) strand; PAM type: YTN; PAM sequence: CTC
acttctcagacggggcggct

SEQ ID NO: 66933 - DNA, 20 bp, Artificial Sequence
  Description of Artificial Sequence: Synthetic oligonucleotide
  Target: ATXN2; (-) strand; PAM type: YTN; PAM sequence: TTC
tcacttctcagacggggcgg

SEQ ID NO: 66934 - DNA, 20 bp, Artificial Sequence
  Description of Artificial Sequence: Synthetic oligonucleotide
  Target: ATXN2; (-) strand; PAM type: YTN; PAM sequence: CTT
ctcacttctcagacggggcg

SEQ ID NO: 66935 - DNA, 20 bp, Artificial Sequence
  Description of Artificial Sequence: Synthetic oligonucleotide
  Target: ATXN2; (-) strand; PAM type: YTN; PAM sequence: CTG
ccaggcggaggggcttctca

SEQ ID NO: 66936 - DNA, 20 bp, Artificial Sequence
  Description of Artificial Sequence: Synthetic oligonucleotide
  Target: ATXN2; (-) strand; PAM type: YTN; PAM sequence: TTC
ccagacggggtggctgccag

SEQ ID NO: 66937 - DNA, 20 bp, Artificial Sequence
  Description of Artificial Sequence: Synthetic oligonucleotide
  Target: ATXN2; (-) strand; PAM type: YTN; PAM sequence: CTT
cccagacggggtggctgcca

SEQ ID NO: 66938 - DNA, 20 bp, Artificial Sequence
  Description of Artificial Sequence: Synthetic oligonucleotide
  Target: ATXN2; (-) strand; PAM type: YTN; PAM sequence: CTC
acttcccagacggggtggct

SEQ ID NO: 66939 - DNA, 20 bp, Artificial Sequence
  Description of Artificial Sequence: Synthetic oligonucleotide
  Target: ATXN2; (-) strand; PAM type: YTN; PAM sequence: CTC
ctcacttcccagacggggtg

SEQ ID NO: 66940 - DNA, 20 bp, Artificial Sequence
  Description of Artificial Sequence: Synthetic oligonucleotide
  Target: ATXN2; (-) strand; PAM type: YTN; PAM sequence: CTG
ccgggtggagatgctcctca

SEQ ID NO: 66941 - DNA, 20 bp, Artificial Sequence
  Description of Artificial Sequence: Synthetic oligonucleotide
  Target: ATXN2; (-) strand; PAM type: YTN; PAM sequence: TTG
gctgccgggtggagatgctc

SEQ ID NO: 66942 - DNA, 20 bp, Artificial Sequence
  Description of Artificial Sequence: Synthetic oligonucleotide
  Target: ATXN2; (-) strand; PAM type: YTN; PAM sequence: CTC
ccggacgggttggctgccgg

SEQ ID NO: 66943 - DNA, 20 bp, Artificial Sequence
  Description of Artificial Sequence: Synthetic oligonucleotide
  Target: ATXN2; (-) strand; PAM type: YTN; PAM sequence: CTC
cctcccggacgggttggctg

SEQ ID NO: 66944 - DNA, 20 bp, Artificial Sequence
  Description of Artificial Sequence: Synthetic oligonucleotide
  Target: ATXN2; (-) strand; PAM type: YTN; PAM sequence: CTG
acccccacctccctcccgga

SEQ ID NO: 66945 - DNA, 20 bp, Artificial Sequence
  Description of Artificial Sequence: Synthetic oligonucleotide
  Target: ATXN2; (-) strand; PAM type: YTN; PAM sequence: CTG
gccgggcgggggctgacccc

SEQ ID NO: 66946 - DNA, 20 bp, Artificial Sequence
  Description of Artificial Sequence: Synthetic oligonucleotide
  Target: ATXN2; (-) strand; PAM type: YTN; PAM sequence: CTC
ccggatggggcggctggccg

SEQ ID NO: 66947 - DNA, 20 bp, Artificial Sequence
  Description of Artificial Sequence: Synthetic oligonucleotide
  Target: ATXN2; (-) strand; PAM type: YTN; PAM sequence: CTC
cctcccggatggggcggctg

SEQ ID NO: 66948 - DNA, 20 bp, Artificial Sequence
  Description of Artificial Sequence: Synthetic oligonucleotide
  Target: ATXN2; (-) strand; PAM type: YTN; PAM sequence: CTG
accccccacctccctcccgg

SEQ ID NO: 66949 - DNA, 20 bp, Artificial Sequence
  Description of Artificial Sequence: Synthetic oligonucleotide
  Target: ATXN2; (-) strand; PAM type: YTN; PAM sequence: CTG
ggcgggggctgaccccccac

SEQ ID NO: 66950 - DNA, 20 bp, Artificial Sequence
  Description of Artificial Sequence: Synthetic oligonucleotide
  Target: ATXN2; (-) strand; PAM type: YTN; PAM sequence: CTG
gctgggcgggggctgacccc

SEQ ID NO: 66951 - DNA, 20 bp, Artificial Sequence
  Description of Artificial Sequence: Synthetic oligonucleotide
  Target: ATXN2; (-) strand; PAM type: YTN; PAM sequence: CTC
ccggacggggcggctggctg

SEQ ID NO: 66952 - DNA, 20 bp, Artificial Sequence
  Description of Artificial Sequence: Synthetic oligonucleotide
  Target: ATXN2; (-) strand; PAM type: YTN; PAM sequence: TTC
ccagaaggggcggccgggca

SEQ ID NO: 66953 - DNA, 20 bp, Artificial Sequence
  Description of Artificial Sequence: Synthetic oligonucleotide
  Target: ATXN2; (-) strand; PAM type: YTN; PAM sequence: CTT
cccagaaggggcggccgggc

SEQ ID NO: 66954 - DNA, 20 bp, Artificial Sequence
  Description of Artificial Sequence: Synthetic oligonucleotide
  Target: ATXN2; (-) strand; PAM type: YTN; PAM sequence: CTC
acttcccagaaggggcggcc

SEQ ID NO: 66955 - DNA, 20 bp, Artificial Sequence
  Description of Artificial Sequence: Synthetic oligonucleotide
  Target: ATXN2; (-) strand; PAM type: YTN; PAM sequence: CTC
ctcacttcccagaaggggcg

SEQ ID NO: 66956 - DNA, 20 bp, Artificial Sequence
  Description of Artificial Sequence: Synthetic oligonucleotide
  Target: ATXN2; (-) strand; PAM type: YTN; PAM sequence: CTC
ccagacggggtggtggccgg

SEQ ID NO: 66957 - DNA, 20 bp, Artificial Sequence
  Description of Artificial Sequence: Synthetic oligonucleotide
  Target: ATXN2; (-) strand; PAM type: YTN; PAM sequence: TTG
ggtacacctcccagacgggg

SEQ ID NO: 66958 - DNA, 20 bp, Artificial Sequence
  Description of Artificial Sequence: Synthetic oligonucleotide
  Target: ATXN2; (-) strand; PAM type: YTN; PAM sequence: CTG
ttgggtacacctcccagacg

SEQ ID NO: 66959 - DNA, 20 bp, Artificial Sequence
  Description of Artificial Sequence: Synthetic oligonucleotide
  Target: ATXN2; (-) strand; PAM type: YTN; PAM sequence: CTC
aataagctgttgggtacacc

SEQ ID NO: 66960 - DNA, 20 bp, Artificial Sequence
  Description of Artificial Sequence: Synthetic oligonucleotide
  Target: ATXN2; (-) strand; PAM type: YTN; PAM sequence: TTC
tcaataagctgttgggtaca

SEQ ID NO: 66961 - DNA, 20 bp, Artificial Sequence
  Description of Artificial Sequence: Synthetic oligonucleotide
  Target: ATXN2; (-) strand; PAM type: YTN; PAM sequence: TTG
tcatcatggcccgttctcaa

SEQ ID NO: 66962 - DNA, 20 bp, Artificial Sequence
  Description of Artificial Sequence: Synthetic oligonucleotide
  Target: ATXN2; (-) strand; PAM type: YTN; PAM sequence: TTC
cacaaagccgccattgtcat

SEQ ID NO: 66963 - DNA, 20 bp, Artificial Sequence
  Description of Artificial Sequence: Synthetic oligonucleotide
  Target: ATXN2; (-) strand; PAM type: YTN; PAM sequence: CTA
ttccacaaagccgccattgt

SEQ ID NO: 66964 - DNA, 20 bp, Artificial Sequence
  Description of Artificial Sequence: Synthetic oligonucleotide
  Target: ATXN2; (-) strand; PAM type: YTN; PAM sequence: TTC
tattccacaaagccgccatt

SEQ ID NO: 66965 - DNA, 20 bp, Artificial Sequence
  Description of Artificial Sequence: Synthetic oligonucleotide
  Target: ATXN2; (-) strand; PAM type: YTN; PAM sequence: TTT
ctattccacaaagccgccat

SEQ ID NO: 66966 - DNA, 20 bp, Artificial Sequence
  Description of Artificial Sequence: Synthetic oligonucleotide
  Target: ATXN2; (-) strand; PAM type: YTN; PAM sequence: TTT
tctattccacaaagccgcca

SEQ ID NO: 66967 - DNA, 20 bp, Artificial Sequence
  Description of Artificial Sequence: Synthetic oligonucleotide
  Target: ATXN2; (-) strand; PAM type: YTN; PAM sequence: CTT
ttctattccacaaagccgcc

SEQ ID NO: 66968 - DNA, 20 bp, Artificial Sequence
  Description of Artificial Sequence: Synthetic oligonucleotide
  Target: ATXN2; (-) strand; PAM type: YTN; PAM sequence: TTC
ccccttttctattccacaaa

SEQ ID NO: 66969 - DNA, 20 bp, Artificial Sequence
  Description of Artificial Sequence: Synthetic oligonucleotide
  Target: ATXN2; (-) strand; PAM type: YTN; PAM sequence: TTT
cccccttttctattccacaa

SEQ ID NO: 66970 - DNA, 20 bp, Artificial Sequence
  Description of Artificial Sequence: Synthetic oligonucleotide
  Target: ATXN2; (-) strand; PAM type: YTN; PAM sequence: CTT
tcccccttttctattccaca

SEQ ID NO: 66971 - DNA, 20 bp, Artificial Sequence
  Description of Artificial Sequence: Synthetic oligonucleotide
  Target: ATXN2; (-) strand; PAM type: YTN; PAM sequence: TTC
cccacctttcccccttttct

SEQ ID NO: 66972 - DNA, 20 bp, Artificial Sequence
  Description of Artificial Sequence: Synthetic oligonucleotide
  Target: ATXN2; (-) strand; PAM type: YTN; PAM sequence: TTT
ccccacctttcccccttttc

SEQ ID NO: 66973 - DNA, 20 bp, Artificial Sequence
  Description of Artificial Sequence: Synthetic oligonucleotide
  Target: ATXN2; (-) strand; PAM type: YTN; PAM sequence: TTT
tccccacctttccccctttt

SEQ ID NO: 66974 - DNA, 20 bp, Artificial Sequence
  Description of Artificial Sequence: Synthetic oligonucleotide
  Target: ATXN2; (-) strand; PAM type: YTN; PAM sequence: CTT
ttccccacctttcccccttt

SEQ ID NO: 66975 - DNA, 20 bp, Artificial Sequence
  Description of Artificial Sequence: Synthetic oligonucleotide
  Target: ATXN2; (-) strand; PAM type: YTN; PAM sequence: CTC
aatcttttccccacctttcc

SEQ ID NO: 66976 - DNA, 20 bp, Artificial Sequence
  Description of Artificial Sequence: Synthetic oligonucleotide
  Target: ATXN2; (-) strand; PAM type: YTN; PAM sequence: TTC
tcaatcttttccccaccttt

SEQ ID NO: 66977 - DNA, 20 bp, Artificial Sequence
  Description of Artificial Sequence: Synthetic oligonucleotide
  Target: ATXN2; (-) strand; PAM type: YTN; PAM sequence: TTT
ctcaatcttttccccacctt

SEQ ID NO: 66978 - DNA, 20 bp, Artificial Sequence
  Description of Artificial Sequence: Synthetic oligonucleotide
  Target: ATXN2; (-) strand; PAM type: YTN; PAM sequence: CTC
cacagacgcagcaaccatcc

SEQ ID NO: 66979 - DNA, 20 bp, Artificial Sequence
  Description of Artificial Sequence: Synthetic oligonucleotide
  Target: ATXN2; (-) strand; PAM type: YTN; PAM sequence: TTC
tccacagacgcagcaaccat

SEQ ID NO: 66980 - DNA, 20 bp, Artificial Sequence
  Description of Artificial Sequence: Synthetic oligonucleotide
  Target: ATXN2; (-) strand; PAM type: YTN; PAM sequence: TTT
ctccacagacgcagcaacca

SEQ ID NO: 66981 - DNA, 20 bp, Artificial Sequence
  Description of Artificial Sequence: Synthetic oligonucleotide
  Target: ATXN2; (-) strand; PAM type: YTN; PAM sequence: CTT
tctccacagacgcagcaacc

SEQ ID NO: 66982 - DNA, 20 bp, Artificial Sequence
  Description of Artificial Sequence: Synthetic oligonucleotide
  Target: ATXN2; (-) strand; PAM type: YTN; PAM sequence: TTC
tttctccacagacgcagcaa

SEQ ID NO: 66983 - DNA, 20 bp, Artificial Sequence
  Description of Artificial Sequence: Synthetic oligonucleotide
  Target: ATXN2; (-) strand; PAM type: YTN; PAM sequence: CTT
ctttctccacagacgcagca

SEQ ID NO: 66984 - DNA, 20 bp, Artificial Sequence
  Description of Artificial Sequence: Synthetic oligonucleotide
  Target: ATXN2; (-) strand; PAM type: YTN; PAM sequence: CTA
cttctttctccacagacgca

SEQ ID NO: 66985 - DNA, 20 bp, Artificial Sequence
  Description of Artificial Sequence: Synthetic oligonucleotide
  Target: ATXN2; (-) strand; PAM type: YTN; PAM sequence: CTA
ccatgtctacttctttctcc

SEQ ID NO: 66986 - DNA, 20 bp, Artificial Sequence
  Description of Artificial Sequence: Synthetic oligonucleotide
  Target: ATXN2; (-) strand; PAM type: YTN; PAM sequence: TTA
gtacagaacaaaatgaaaag

SEQ ID NO: 66987 - DNA, 20 bp, Artificial Sequence
  Description of Artificial Sequence: Synthetic oligonucleotide
  Target: ATXN2; (-) strand; PAM type: YTN; PAM sequence: CTT
agtacagaacaaaatgaaaa

SEQ ID NO: 66988 - DNA, 20 bp, Artificial Sequence
  Description of Artificial Sequence: Synthetic oligonucleotide
  Target: ATXN2; (-) strand; PAM type: YTN; PAM sequence: TTC
ttagtacagaacaaaatgaa

SEQ ID NO: 66989 - DNA, 20 bp, Artificial Sequence
  Description of Artificial Sequence: Synthetic oligonucleotide
  Target: ATXN2; (-) strand; PAM type: YTN; PAM sequence: TTT
cttagtacagaacaaaatga

SEQ ID NO: 66990 - DNA, 20 bp, Artificial Sequence
  Description of Artificial Sequence: Synthetic oligonucleotide
  Target: ATXN2; (-) strand; PAM type: YTN; PAM sequence: CTT
tcttagtacagaacaaaatg

SEQ ID NO: 66991 - DNA, 20 bp, Artificial Sequence
  Description of Artificial Sequence: Synthetic oligonucleotide
  Target: ATXN2; (-) strand; PAM type: YTN; PAM sequence: TTG
ggggtaaggtcatagatcaa

SEQ ID NO: 66992 - DNA, 20 bp, Artificial Sequence
  Description of Artificial Sequence: Synthetic oligonucleotide
  Target: ATXN2; (-) strand; PAM type: YTN; PAM sequence: TTC
agagagcacagggttggggg

SEQ ID NO: 66993 - DNA, 20 bp, Artificial Sequence
  Description of Artificial Sequence: Synthetic oligonucleotide
  Target: ATXN2; (-) strand; PAM type: YTN; PAM sequence: TTT
cagagagcacagggttgggg

SEQ ID NO: 66994 - DNA, 20 bp, Artificial Sequence
  Description of Artificial Sequence: Synthetic oligonucleotide
  Target: ATXN2; (-) strand; PAM type: YTN; PAM sequence: CTG
agtgacacagcacatgtttc

SEQ ID NO: 66995 - DNA, 20 bp, Artificial Sequence
  Description of Artificial Sequence: Synthetic oligonucleotide
  Target: ATXN2; (-) strand; PAM type: YTN; PAM sequence: TTA
accctgagtgacacagcaca

SEQ ID NO: 66996 - DNA, 20 bp, Artificial Sequence
  Description of Artificial Sequence: Synthetic oligonucleotide
  Target: ATXN2; (-) strand; PAM type: YTN; PAM sequence: TTT
aaccctgagtgacacagcac

SEQ ID NO: 66997 - DNA, 20 bp, Artificial Sequence
  Description of Artificial Sequence: Synthetic oligonucleotide
  Target: ATXN2; (-) strand; PAM type: YTN; PAM sequence: TTA
atccatttaaccctgagtga

SEQ ID NO: 66998 - DNA, 20 bp, Artificial Sequence
  Description of Artificial Sequence: Synthetic oligonucleotide
  Target: ATXN2; (-) strand; PAM type: YTN; PAM sequence: CTT
aatccatttaaccctgagtg

SEQ ID NO: 66999 - DNA, 20 bp, Artificial Sequence
  Description of Artificial Sequence: Synthetic oligonucleotide
  Target: ATXN2; (-) strand; PAM type: YTN; PAM sequence: TTG
caccgcccttaatccattta

SEQ ID NO: 67000 - DNA, 20 bp, Artificial Sequence
  Description of Artificial Sequence: Synthetic oligonucleotide
  Target: ATXN2; (-) strand; PAM type: YTN; PAM sequence: CTT
gcaccgcccttaatccattt

SEQ ID NO: 67001 - DNA, 20 bp, Artificial Sequence
  Description of Artificial Sequence: Synthetic oligonucleotide
  Target: ATXN2; (-) strand; PAM type: YTN; PAM sequence: TTA
acaaagcacatcttgcaccg

SEQ ID NO: 67002 - DNA, 20 bp, Artificial Sequence
  Description of Artificial Sequence: Synthetic oligonucleotide
  Target: ATXN2; (-) strand; PAM type: YTN; PAM sequence: TTT
aacaaagcacatcttgcacc

SEQ ID NO: 67003 - DNA, 20 bp, Artificial Sequence
  Description of Artificial Sequence: Synthetic oligonucleotide
  Target: ATXN2; (-) strand; PAM type: YTN; PAM sequence: CTG
tttaacaaagcacatcttgc

SEQ ID NO: 67004 - DNA, 20 bp, Artificial Sequence
  Description of Artificial Sequence: Synthetic oligonucleotide
  Target: ATXN2; (-) strand; PAM type: YTN; PAM sequence: TTC
aagcatctgtttaacaaagc

SEQ ID NO: 67005 - DNA, 20 bp, Artificial Sequence
  Description of Artificial Sequence: Synthetic oligonucleotide
  Target: ATXN2; (-) strand; PAM type: YTN; PAM sequence: CTT
caagcatctgtttaacaaag

SEQ ID NO: 67006 - DNA, 20 bp, Artificial Sequence
  Description of Artificial Sequence: Synthetic oligonucleotide
  Target: ATXN2; (-) strand; PAM type: YTN; PAM sequence: CTG
ccttcaagcatctgtttaac

SEQ ID NO: 67007 - DNA, 20 bp, Artificial Sequence
  Description of Artificial Sequence: Synthetic oligonucleotide
  Target: ATXN2; (-) strand; PAM type: YTN; PAM sequence: TTA
acgagcatgctgccttcaag

SEQ ID NO: 67008 - DNA, 20 bp, Artificial Sequence
  Description of Artificial Sequence: Synthetic oligonucleotide
  Target: ATXN2; (-) strand; PAM type: YTN; PAM sequence: CTT
aacgagcatgctgccttcaa

SEQ ID NO: 67009 - DNA, 20 bp, Artificial Sequence
  Description of Artificial Sequence: Synthetic oligonucleotide
  Target: ATXN2; (-) strand; PAM type: YTN; PAM sequence: CTC
ttaacgagcatgctgccttc

SEQ ID NO: 67010 - DNA, 20 bp, Artificial Sequence
  Description of Artificial Sequence: Synthetic oligonucleotide
  Target: ATXN2; (-) strand; PAM type: YTN; PAM sequence: TTA
gggagtggtgatgactctta

SEQ ID NO: 67011 - DNA, 20 bp, Artificial Sequence
  Description of Artificial Sequence: Synthetic oligonucleotide
  Target: ATXN2; (-) strand; PAM type: YTN; PAM sequence: TTG
agattagggagtggtgatga

SEQ ID NO: 67012 - DNA, 20 bp, Artificial Sequence
  Description of Artificial Sequence: Synthetic oligonucleotide
  Target: ATXN2; (-) strand; PAM type: YTN; PAM sequence: CTT
gagattagggagtggtgatg

SEQ ID NO: 67013 - DNA, 20 bp, Artificial Sequence
  Description of Artificial Sequence: Synthetic oligonucleotide
  Target: ATXN2; (-) strand; PAM type: YTN; PAM sequence: CTG
ggtacttgagattagggagt

SEQ ID NO: 67014 - DNA, 20 bp, Artificial Sequence
  Description of Artificial Sequence: Synthetic oligonucleotide
  Target: ATXN2; (-) strand; PAM type: YTN; PAM sequence: TTG
tgtccctgggtacttgagat

SEQ ID NO: 67015 - DNA, 20 bp, Artificial Sequence
  Description of Artificial Sequence: Synthetic oligonucleotide
  Target: ATXN2; (-) strand; PAM type: YTN; PAM sequence: TTT
gtgtccctgggtacttgaga

SEQ ID NO: 67016 - DNA, 20 bp, Artificial Sequence
  Description of Artificial Sequence: Synthetic oligonucleotide
  Target: ATXN2; (-) strand; PAM type: YTN; PAM sequence: TTC
cgcagtgtttgtgtccctgg

SEQ ID NO: 67017 - DNA, 20 bp, Artificial Sequence
  Description of Artificial Sequence: Synthetic oligonucleotide
  Target: ATXN2; (-) strand; PAM type: YTN; PAM sequence: CTT
ccgcagtgtttgtgtccctg

SEQ ID NO: 67018 - DNA, 20 bp, Artificial Sequence
  Description of Artificial Sequence: Synthetic oligonucleotide
  Target: ATXN2; (-) strand; PAM type: YTN; PAM sequence: CTG
cggccttccgcagtgtttgt

SEQ ID NO: 67019 - DNA, 20 bp, Artificial Sequence
  Description of Artificial Sequence: Synthetic oligonucleotide
  Target: ATXN2; (-) strand; PAM type: YTN; PAM sequence: CTA
ggcagaggaccctgcggcct

SEQ ID NO: 67020 - DNA, 20 bp, Artificial Sequence
  Description of Artificial Sequence: Synthetic oligonucleotide
  Target: ATXN2; (-) strand; PAM type: YTN; PAM sequence: TTC
ctaggcagaggaccctgcgg

SEQ ID NO: 67021 - DNA, 20 bp, Artificial Sequence
  Description of Artificial Sequence: Synthetic oligonucleotide
  Target: ATXN2; (-) strand; PAM type: YTN; PAM sequence: TTT
cctaggcagaggaccctgcg

SEQ ID NO: 67022 - DNA, 20 bp, Artificial Sequence
  Description of Artificial Sequence: Synthetic oligonucleotide
  Target: ATXN2; (-) strand; PAM type: YTN; PAM sequence: TTT
tcctaggcagaggaccctgc

SEQ ID NO: 67023 - DNA, 20 bp, Artificial Sequence
  Description of Artificial Sequence: Synthetic oligonucleotide
  Target: ATXN2; (-) strand; PAM type: YTN; PAM sequence: CTG
gttttcctaggcagaggacc

SEQ ID NO: 67024 - DNA, 20 bp, Artificial Sequence
  Description of Artificial Sequence: Synthetic oligonucleotide
  Target: ATXN2; (-) strand; PAM type: YTN; PAM sequence: CTC
tggttttcctaggcagagga

SEQ ID NO: 67025 - DNA, 20 bp, Artificial Sequence
  Description of Artificial Sequence: Synthetic oligonucleotide
  Target: ATXN2; (-) strand; PAM type: YTN; PAM sequence: TTG
gcagggtcataggacaatag

SEQ ID NO: 67026 - DNA, 20 bp, Artificial Sequence
  Description of Artificial Sequence: Synthetic oligonucleotide
  Target: ATXN2; (-) strand; PAM type: YTN; PAM sequence: TTT
ggcagggtcataggacaata

SEQ ID NO: 67027 - DNA, 20 bp, Artificial Sequence
  Description of Artificial Sequence: Synthetic oligonucleotide
  Target: ATXN2; (-) strand; PAM type: YTN; PAM sequence: CTC
gcagagggggatttggcagg

SEQ ID NO: 67028 - DNA, 20 bp, Artificial Sequence
  Description of Artificial Sequence: Synthetic oligonucleotide
  Target: ATXN2; (-) strand; PAM type: YTN; PAM sequence: TTC
tcgcagagggggatttggca

SEQ ID NO: 67029 - DNA, 20 bp, Artificial Sequence
  Description of Artificial Sequence: Synthetic oligonucleotide
  Target: ATXN2; (-) strand; PAM type: YTN; PAM sequence: TTT
ctcgcagagggggatttggc

SEQ ID NO: 67030 - DNA, 20 bp, Artificial Sequence
  Description of Artificial Sequence: Synthetic oligonucleotide
  Target: ATXN2; (-) strand; PAM type: YTN; PAM sequence: TTG
ggtgtttctcgcagaggggg

SEQ ID NO: 67031 - DNA, 20 bp, Artificial Sequence
  Description of Artificial Sequence: Synthetic oligonucleotide
  Target: ATXN2; (-) strand; PAM type: YTN; PAM sequence: CTT
gggtgtttctcgcagagggg

SEQ ID NO: 67032 - DNA, 20 bp, Artificial Sequence
  Description of Artificial Sequence: Synthetic oligonucleotide
  Target: ATXN2; (-) strand; PAM type: YTN; PAM sequence: TTC
ttgggtgtttctcgcagagg

SEQ ID NO: 67033 - DNA, 20 bp, Artificial Sequence
  Description of Artificial Sequence: Synthetic oligonucleotide
  Target: ATXN2; (-) strand; PAM type: YTN; PAM sequence: TTG
atcattcttgggtgtttctc

SEQ ID NO: 67034 - DNA, 20 bp, Artificial Sequence
  Description of Artificial Sequence: Synthetic oligonucleotide
  Target: ATXN2; (-) strand; PAM type: YTN; PAM sequence: TTA
attgatcattcttgggtgtt

SEQ ID NO: 67035 - DNA, 20 bp, Artificial Sequence
  Description of Artificial Sequence: Synthetic oligonucleotide
  Target: ATXN2; (-) strand; PAM type: YTN; PAM sequence: TTT
aattgatcattcttgggtgt

SEQ ID NO: 67036 - DNA, 20 bp, Artificial Sequence
  Description of Artificial Sequence: Synthetic oligonucleotide
  Target: ATXN2; (-) strand; PAM type: YTN; PAM sequence: TTT
taattgatcattcttgggtg

SEQ ID NO: 67037 - DNA, 20 bp, Artificial Sequence
  Description of Artificial Sequence: Synthetic oligonucleotide
  Target: ATXN2; (-) strand; PAM type: YTN; PAM sequence: TTT
ttaattgatcattcttgggt

SEQ ID NO: 67038 - DNA, 20 bp, Artificial Sequence
  Description of Artificial Sequence: Synthetic oligonucleotide
  Target: ATXN2; (-) strand; PAM type: YTN; PAM sequence: TTT
tttaattgatcattcttggg

SEQ ID NO: 67039 - DNA, 20 bp, Artificial Sequence
  Description of Artificial Sequence: Synthetic oligonucleotide
  Target: ATXN2; (-) strand; PAM type: YTN; PAM sequence: TTT
ttttaattgatcattcttgg

SEQ ID NO: 67040 - DNA, 20 bp, Artificial Sequence
  Description of Artificial Sequence: Synthetic oligonucleotide
  Target: ATXN2; (-) strand; PAM type: YTN; PAM sequence: TTT
tttttaattgatcattcttg

SEQ ID NO: 67041 - DNA, 20 bp, Artificial Sequence
  Description of Artificial Sequence: Synthetic oligonucleotide
  Target: ATXN2; (-) strand; PAM type: YTN; PAM sequence: TTT
ttttttaattgatcattctt

SEQ ID NO: 67042 - DNA, 20 bp, Artificial Sequence
  Description of Artificial Sequence: Synthetic oligonucleotide
  Target: ATXN2; (-) strand; PAM type: YTN; PAM sequence: TTT
tttttttaattgatcattct

SEQ ID NO: 67043 - DNA, 20 bp, Artificial Sequence
  Description of Artificial Sequence: Synthetic oligonucleotide
  Target: ATXN2; (-) strand; PAM type: YTN; PAM sequence: TTT
ttttttttaattgatcattc

SEQ ID NO: 67044 - DNA, 20 bp, Artificial Sequence
  Description of Artificial Sequence: Synthetic oligonucleotide
  Target: ATXN2; (-) strand; PAM type: YTN; PAM sequence: TTT
tttttttttaattgatcatt

SEQ ID NO: 67045 - DNA, 20 bp, Artificial Sequence
  Description of Artificial Sequence: Synthetic oligonucleotide
  Target: ATXN2; (-) strand; PAM type: YTN; PAM sequence: TTT
ttttttttttaattgatcat

SEQ ID NO: 67046 - DNA, 20 bp, Artificial Sequence
  Description of Artificial Sequence: Synthetic oligonucleotide
  Target: ATXN2; (-) strand; PAM type: YTN; PAM sequence: TTT
tttttttttttaattgatca

SEQ ID NO: 67047 - DNA, 20 bp, Artificial Sequence
  Description of Artificial Sequence: Synthetic oligonucleotide
  Target: ATXN2; (-) strand; PAM type: YTN; PAM sequence: CTT
ttttttttttttaattgatc

SEQ ID NO: 67048 - DNA, 20 bp, Artificial Sequence
  Description of Artificial Sequence: Synthetic oligonucleotide
  Target: ATXN2; (-) strand; PAM type: YTN; PAM sequence: CTA
taaagtcttttttttttttt

SEQ ID NO: 67049 - DNA, 20 bp, Artificial Sequence
  Description of Artificial Sequence: Synthetic oligonucleotide
  Target: ATXN2; (-) strand; PAM type: YTN; PAM sequence: TTG
ctataaagtctttttttttt

SEQ ID NO: 67050 - DNA, 20 bp, Artificial Sequence
  Description of Artificial Sequence: Synthetic oligonucleotide
  Target: ATXN2; (-) strand; PAM type: YTN; PAM sequence: TTT
gctataaagtcttttttttt

SEQ ID NO: 67051 - DNA, 20 bp, Artificial Sequence
  Description of Artificial Sequence: Synthetic oligonucleotide
  Target: ATXN2; (-) strand; PAM type: YTN; PAM sequence: TTA
aatttgctataaagtctttt

SEQ ID NO: 67052 - DNA, 20 bp, Artificial Sequence
  Description of Artificial Sequence: Synthetic oligonucleotide
  Target: ATXN2; (-) strand; PAM type: YTN; PAM sequence: CTT
aaatttgctataaagtcttt

SEQ ID NO: 67053 - DNA, 20 bp, Artificial Sequence
  Description of Artificial Sequence: Synthetic oligonucleotide
  Target: ATXN2; (-) strand; PAM type: YTN; PAM sequence: TTG
cataatcttaaatttgctat

SEQ ID NO: 67054 - DNA, 20 bp, Artificial Sequence
  Description of Artificial Sequence: Synthetic oligonucleotide
  Target: ATXN2; (-) strand; PAM type: YTN; PAM sequence: TTT
gcataatcttaaatttgcta

SEQ ID NO: 67055 - DNA, 20 bp, Artificial Sequence
  Description of Artificial Sequence: Synthetic oligonucleotide
  Target: ATXN2; (-) strand; PAM type: YTN; PAM sequence: TTT
tgcataatcttaaatttgct

SEQ ID NO: 67056 - DNA, 20 bp, Artificial Sequence
  Description of Artificial Sequence: Synthetic oligonucleotide
  Target: ATXN2; (-) strand; PAM type: YTN; PAM sequence: CTG
tgagcaatagatgatatttt

SEQ ID NO: 67057 - DNA, 20 bp, Artificial Sequence
  Description of Artificial Sequence: Synthetic oligonucleotide
  Target: ATXN2; (-) strand; PAM type: YTN; PAM sequence: CTG
catatgaatatatctgtgag

SEQ ID NO: 67058 - DNA, 20 bp, Artificial Sequence
  Description of Artificial Sequence: Synthetic oligonucleotide
  Target: ATXN2; (-) strand; PAM type: YTN; PAM sequence: TTA
tactgcatatgaatatatct

SEQ ID NO: 67059 - DNA, 20 bp, Artificial Sequence
  Description of Artificial Sequence: Synthetic oligonucleotide
  Target: ATXN2; (-) strand; PAM type: YTN; PAM sequence: TTT
atactgcatatgaatatatc

SEQ ID NO: 67060 - DNA, 20 bp, Artificial Sequence
  Description of Artificial Sequence: Synthetic oligonucleotide
  Target: ATXN2; (-) strand; PAM type: YTN; PAM sequence: TTA
tatttatactgcatatgaat

SEQ ID NO: 67061 - DNA, 20 bp, Artificial Sequence
  Description of Artificial Sequence: Synthetic oligonucleotide
  Target: ATXN2; (-) strand; PAM type: YTN; PAM sequence: TTT
atatttatactgcatatgaa

SEQ ID NO: 67062 - DNA, 20 bp, Artificial Sequence
  Description of Artificial Sequence: Synthetic oligonucleotide
  Target: ATXN2; (-) strand; PAM type: YTN; PAM sequence: CTT
tatatttatactgcatatga

SEQ ID NO: 67063 - DNA, 20 bp, Artificial Sequence
  Description of Artificial Sequence: Synthetic oligonucleotide
  Target: ATXN2; (-) strand; PAM type: YTN; PAM sequence: TTC
tttatatttatactgcatat

SEQ ID NO: 67064 - DNA, 20 bp, Artificial Sequence
  Description of Artificial Sequence: Synthetic oligonucleotide
  Target: ATXN2; (-) strand; PAM type: YTN; PAM sequence: CTG
tgcagttctttatatttata

SEQ ID NO: 67065 - DNA, 20 bp, Artificial Sequence
  Description of Artificial Sequence: Synthetic oligonucleotide
  Target: ATXN2; (-) strand; PAM type: YTN; PAM sequence: TTC
tgtgcagttctttatattta

SEQ ID NO: 67066 - DNA, 20 bp, Artificial Sequence
  Description of Artificial Sequence: Synthetic oligonucleotide
  Target: ATXN2; (-) strand; PAM type: YTN; PAM sequence: TTT
ctgtgcagttctttatattt

SEQ ID NO: 67067 - DNA, 20 bp, Artificial Sequence
  Description of Artificial Sequence: Synthetic oligonucleotide
  Target: ATXN2; (-) strand; PAM type: YTN; PAM sequence: TTT
tctgtgcagttctttatatt

SEQ ID NO: 67068 - DNA, 20 bp, Artificial Sequence
  Description of Artificial Sequence: Synthetic oligonucleotide
  Target: ATXN2; (-) strand; PAM type: YTN; PAM sequence: CTT
ttctgtgcagttctttatat

SEQ ID NO: 67069 - DNA, 20 bp, Artificial Sequence
  Description of Artificial Sequence: Synthetic oligonucleotide
  Target: ATXN2; (-) strand; PAM type: YTN; PAM sequence: TTC
ttttctgtgcagttctttat

SEQ ID NO: 67070 - DNA, 20 bp, Artificial Sequence
  Description of Artificial Sequence: Synthetic oligonucleotide
  Target: ATXN2; (-) strand; PAM type: YTN; PAM sequence: TTT
cttttctgtgcagttcttta

SEQ ID NO: 67071 - DNA, 20 bp, Artificial Sequence
  Description of Artificial Sequence: Synthetic oligonucleotide
  Target: ATXN2; (-) strand; PAM type: YTN; PAM sequence: TTC
caaaaggaagggtttctttt

SEQ ID NO: 67072 - DNA, 20 bp, Artificial Sequence
  Description of Artificial Sequence: Synthetic oligonucleotide
  Target: ATXN2; (-) strand; PAM type: YTN; PAM sequence: CTT
ccaaaaggaagggtttcttt

SEQ ID NO: 67073 - DNA, 20 bp, Artificial Sequence
  Description of Artificial Sequence: Synthetic oligonucleotide
  Target: ATXN2; (-) strand; PAM type: YTN; PAM sequence: TTC
cttccaaaaggaagggtttc

SEQ ID NO: 67074 - DNA, 20 bp, Artificial Sequence
  Description of Artificial Sequence: Synthetic oligonucleotide
  Target: ATXN2; (-) strand; PAM type: YTN; PAM sequence: TTT
ccttccaaaaggaagggttt

SEQ ID NO: 67075 - DNA, 20 bp, Artificial Sequence
  Description of Artificial Sequence: Synthetic oligonucleotide
  Target: ATXN2; (-) strand; PAM type: YTN; PAM sequence: CTG
tttccttccaaaaggaaggg

SEQ ID NO: 67076 - DNA, 20 bp, Artificial Sequence
  Description of Artificial Sequence: Synthetic oligonucleotide
  Target: ATXN2; (-) strand; PAM type: YTN; PAM sequence: TTC
cccctgtttccttccaaaag

SEQ ID NO: 67077 - DNA, 20 bp, Artificial Sequence
  Description of Artificial Sequence: Synthetic oligonucleotide
  Target: ATXN2; (-) strand; PAM type: YTN; PAM sequence: CTT
ccccctgtttccttccaaaa

SEQ ID NO: 67078 - DNA, 20 bp, Artificial Sequence
  Description of Artificial Sequence: Synthetic oligonucleotide
  Target: ATXN2; (-) strand; PAM type: YTN; PAM sequence: CTG
cttccccctgtttccttcca

SEQ ID NO: 67079 - DNA, 20 bp, Artificial Sequence
  Description of Artificial Sequence: Synthetic oligonucleotide
  Target: ATXN2; (-) strand; PAM type: YTN; PAM sequence: CTC
agctgcttccccctgtttcc

SEQ ID NO: 67080 - DNA, 20 bp, Artificial Sequence
  Description of Artificial Sequence: Synthetic oligonucleotide
  Target: ATXN2; (-) strand; PAM type: YTN; PAM sequence: CTC
ctcagctgcttccccctgtt

SEQ ID NO: 67081 - DNA, 20 bp, Artificial Sequence
  Description of Artificial Sequence: Synthetic oligonucleotide
  Target: ATXN2; (-) strand; PAM type: YTN; PAM sequence: CTG
cccctcctcagctgcttccc

SEQ ID NO: 67082 - DNA, 20 bp, Artificial Sequence
  Description of Artificial Sequence: Synthetic oligonucleotide
  Target: ATXN2; (-) strand; PAM type: YTN; PAM sequence: TTA
tgtatctgcccctcctcagc

SEQ ID NO: 67083 - DNA, 20 bp, Artificial Sequence
  Description of Artificial Sequence: Synthetic oligonucleotide
  Target: ATXN2; (-) strand; PAM type: YTN; PAM sequence: CTT
atgtatctgcccctcctcag

SEQ ID NO: 67084 - DNA, 20 bp, Artificial Sequence
  Description of Artificial Sequence: Synthetic oligonucleotide
  Target: ATXN2; (-) strand; PAM type: YTN; PAM sequence: CTC
ttatgtatctgcccctcctc

SEQ ID NO: 67085 - DNA, 20 bp, Artificial Sequence
  Description of Artificial Sequence: Synthetic oligonucleotide
  Target: ATXN2; (-) strand; PAM type: YTN; PAM sequence: CTC
ctcttatgtatctgcccctc

SEQ ID NO: 67086 - DNA, 20 bp, Artificial Sequence
  Description of Artificial Sequence: Synthetic oligonucleotide
  Target: ATXN2; (-) strand; PAM type: YTN; PAM sequence: TTA
aactcctcttatgtatctgc

SEQ ID NO: 67087 - DNA, 20 bp, Artificial Sequence
  Description of Artificial Sequence: Synthetic oligonucleotide
  Target: ATXN2; (-) strand; PAM type: YTN; PAM sequence: CTA
acacagttaaactcctctta

SEQ ID NO: 67088 - DNA, 20 bp, Artificial Sequence
  Description of Artificial Sequence: Synthetic oligonucleotide
  Target: ATXN2; (-) strand; PAM type: YTN; PAM sequence: TTC
taacacagttaaactcctct

SEQ ID NO: 67089 - DNA, 20 bp, Artificial Sequence
  Description of Artificial Sequence: Synthetic oligonucleotide
  Target: ATXN2; (-) strand; PAM type: YTN; PAM sequence: TTA
gtaaataaagcattctaaca

SEQ ID NO: 67090 - DNA, 20 bp, Artificial Sequence
  Description of Artificial Sequence: Synthetic oligonucleotide
  Target: ATXN2; (-) strand; PAM type: YTN; PAM sequence: CTT
agtaaataaagcattctaac

SEQ ID NO: 67091 - DNA, 20 bp, Artificial Sequence
  Description of Artificial Sequence: Synthetic oligonucleotide
  Target: ATXN2; (-) strand; PAM type: YTN; PAM sequence: CTA
cccagcttagtaaataaagc

SEQ ID NO: 67092 - DNA, 20 bp, Artificial Sequence
  Description of Artificial Sequence: Synthetic oligonucleotide
  Target: ATXN2; (-) strand; PAM type: YTN; PAM sequence: TTG
aatatgatcatgtgcccact

SEQ ID NO: 67093 - DNA, 20 bp, Artificial Sequence
  Description of Artificial Sequence: Synthetic oligonucleotide
  Target: ATXN2; (-) strand; PAM type: YTN; PAM sequence: TTA
acacatacaaatgatacaaa

SEQ ID NO: 67094 - DNA, 20 bp, Artificial Sequence
  Description of Artificial Sequence: Synthetic oligonucleotide
  Target: ATXN2; (-) strand; PAM type: YTN; PAM sequence: TTA
aacaatagttaacacataca

SEQ ID NO: 67095 - DNA, 20 bp, Artificial Sequence
  Description of Artificial Sequence: Synthetic oligonucleotide
  Target: ATXN2; (-) strand; PAM type: YTN; PAM sequence: TTG
ttaaacaatagttaacacat

SEQ ID NO: 67096 - DNA, 20 bp, Artificial Sequence
  Description of Artificial Sequence: Synthetic oligonucleotide
  Target: ATXN2; (-) strand; PAM type: YTN; PAM sequence: TTT
gttaaacaatagttaacaca

SEQ ID NO: 67097 - DNA, 20 bp, Artificial Sequence
  Description of Artificial Sequence: Synthetic oligonucleotide
  Target: ATXN2; (-) strand; PAM type: YTN; PAM sequence: TTC
aatttgttaaacaatagtta

SEQ ID NO: 67098 - DNA, 20 bp, Artificial Sequence
  Description of Artificial Sequence: Synthetic oligonucleotide
  Target: ATXN2; (-) strand; PAM type: YTN; PAM sequence: TTT
caatttgttaaacaatagtt

SEQ ID NO: 67099 - DNA, 20 bp, Artificial Sequence
  Description of Artificial Sequence: Synthetic oligonucleotide
  Target: ATXN2; (-) strand; PAM type: YTN; PAM sequence: TTT
tcaatttgttaaacaatagt

SEQ ID NO: 67100 - DNA, 20 bp, Artificial Sequence
  Description of Artificial Sequence: Synthetic oligonucleotide
  Target: ATXN2; (-) strand; PAM type: YTN; PAM sequence: TTT
ttcaatttgttaaacaatag

SEQ ID NO: 67101 - DNA, 20 bp, Artificial Sequence
  Description of Artificial Sequence: Synthetic oligonucleotide
  Target: ATXN2; (-) strand; PAM type: YTN; PAM sequence: CTC
aaaaaaaaaaaaaaaaaaaa

SEQ ID NO: 67102 - DNA, 20 bp, Artificial Sequence
  Description of Artificial Sequence: Synthetic oligonucleotide
  Target: ATXN2; (-) strand; PAM type: YTN; PAM sequence: CTG
catctcaaaaaaaaaaaaaa

SEQ ID NO: 67103 - DNA, 20 bp, Artificial Sequence
  Description of Artificial Sequence: Synthetic oligonucleotide
  Target: ATXN2; (-) strand; PAM type: YTN; PAM sequence: CTG
ggcgacagagcaagactgca

SEQ ID NO: 67104 - DNA, 20 bp, Artificial Sequence
  Description of Artificial Sequence: Synthetic oligonucleotide
  Target: ATXN2; (-) strand; PAM type: YTN; PAM sequence: CTC
catcctgggcgacagagcaa

SEQ ID NO: 67105 - DNA, 20 bp, Artificial Sequence
  Description of Artificial Sequence: Synthetic oligonucleotide
  Target: ATXN2; (-) strand; PAM type: YTN; PAM sequence: CTC
cactccatcctgggcgacag

SEQ ID NO: 67106 - DNA, 20 bp, Artificial Sequence
  Description of Artificial Sequence: Synthetic oligonucleotide
  Target: ATXN2; (-) strand; PAM type: YTN; PAM sequence: TTG
cagtgagccgagatcacacc

SEQ ID NO: 67107 - DNA, 20 bp, Artificial Sequence
  Description of Artificial Sequence: Synthetic oligonucleotide
  Target: ATXN2; (-) strand; PAM type: YTN; PAM sequence: TTG
aacccaggagacagaggttg

SEQ ID NO: 67108 - DNA, 20 bp, Artificial Sequence
  Description of Artificial Sequence: Synthetic oligonucleotide
  Target: ATXN2; (-) strand; PAM type: YTN; PAM sequence: CTT
gaacccaggagacagaggtt

SEQ ID NO: 67109 - DNA, 20 bp, Artificial Sequence
  Description of Artificial Sequence: Synthetic oligonucleotide
  Target: ATXN2; (-) strand; PAM type: YTN; PAM sequence: CTG
aggcaggataatcgcttgaa

SEQ ID NO: 67110 - DNA, 20 bp, Artificial Sequence
  Description of Artificial Sequence: Synthetic oligonucleotide
  Target: ATXN2; (-) strand; PAM type: YTN; PAM sequence: TTG
gcaggctgaggcaggataat

SEQ ID NO: 67111 - DNA, 20 bp, Artificial Sequence
  Description of Artificial Sequence: Synthetic oligonucleotide
  Target: ATXN2; (-) strand; PAM type: YTN; PAM sequence: CTT
ggcaggctgaggcaggataa

SEQ ID NO: 67112 - DNA, 20 bp, Artificial Sequence
  Description of Artificial Sequence: Synthetic oligonucleotide
  Target: ATXN2; (-) strand; PAM type: YTN; PAM sequence: CTA
cttggcaggctgaggcagga

SEQ ID NO: 67113 - DNA, 20 bp, Artificial Sequence
  Description of Artificial Sequence: Synthetic oligonucleotide
  Target: ATXN2; (-) strand; PAM type: YTN; PAM sequence: TTG
taatcccagctacttggcag

SEQ ID NO: 67114 - DNA, 20 bp, Artificial Sequence
  Description of Artificial Sequence: Synthetic oligonucleotide
  Target: ATXN2; (-) strand; PAM type: YTN; PAM sequence: CTT
gtaatcccagctacttggca

SEQ ID NO: 67115 - DNA, 20 bp, Artificial Sequence
  Description of Artificial Sequence: Synthetic oligonucleotide
  Target: ATXN2; (-) strand; PAM type: YTN; PAM sequence: CTA
ggcatggtggcgcacacttg

SEQ ID NO: 67116 - DNA, 20 bp, Artificial Sequence
  Description of Artificial Sequence: Synthetic oligonucleotide
  Target: ATXN2; (-) strand; PAM type: YTN; PAM sequence: TTA
gctaggcatggtggcgcaca

SEQ ID NO: 67117 - DNA, 20 bp, Artificial Sequence
  Description of Artificial Sequence: Synthetic oligonucleotide
  Target: ATXN2; (-) strand; PAM type: YTN; PAM sequence: TTG
accaaaaatagaaaaattag

SEQ ID NO: 67118 - DNA, 20 bp, Artificial Sequence
  Description of Artificial Sequence: Synthetic oligonucleotide
  Target: ATXN2; (-) strand; PAM type: YTN; PAM sequence: CTT
gaccaaaaatagaaaaatta

SEQ ID NO: 67119 - DNA, 20 bp, Artificial Sequence
  Description of Artificial Sequence: Synthetic oligonucleotide
  Target: ATXN2; (-) strand; PAM type: YTN; PAM sequence: CTG
tcttgaccaaaaatagaaaa

SEQ ID NO: 67120 - DNA, 20 bp, Artificial Sequence
  Description of Artificial Sequence: Synthetic oligonucleotide
  Target: ATXN2; (-) strand; PAM type: YTN; PAM sequence: CTG
gtcaacatggtgaaaccctg

SEQ ID NO: 67121 - DNA, 20 bp, Artificial Sequence
  Description of Artificial Sequence: Synthetic oligonucleotide
  Target: ATXN2; (-) strand; PAM type: YTN; PAM sequence: TTC
gagaccagcctggtcaacat

SEQ ID NO: 67122 - DNA, 20 bp, Artificial Sequence
  Description of Artificial Sequence: Synthetic oligonucleotide
  Target: ATXN2; (-) strand; PAM type: YTN; PAM sequence: CTA
aggtcaggagttcgagacca

SEQ ID NO: 67123 - DNA, 20 bp, Artificial Sequence
  Description of Artificial Sequence: Synthetic oligonucleotide
  Target: ATXN2; (-) strand; PAM type: YTN; PAM sequence: TTG
ggaggccgaggtgggcagat

SEQ ID NO: 67124 - DNA, 20 bp, Artificial Sequence
  Description of Artificial Sequence: Synthetic oligonucleotide
  Target: ATXN2; (-) strand; PAM type: YTN; PAM sequence: TTT
gggaggccgaggtgggcaga

SEQ ID NO: 67125 - DNA, 20 bp, Artificial Sequence
  Description of Artificial Sequence: Synthetic oligonucleotide
  Target: ATXN2; (-) strand; PAM type: YTN; PAM sequence: CTT
tgggaggccgaggtgggcag

SEQ ID NO: 67126 - DNA, 20 bp, Artificial Sequence
  Description of Artificial Sequence: Synthetic oligonucleotide
  Target: ATXN2; (-) strand; PAM type: YTN; PAM sequence: CTA
gcactttgggaggccgaggt

SEQ ID NO: 67127 - DNA, 20 bp, Artificial Sequence
  Description of Artificial Sequence: Synthetic oligonucleotide
  Target: ATXN2; (-) strand; PAM type: YTN; PAM sequence: CTG
taatcctagcactttgggag

SEQ ID NO: 67128 - DNA, 20 bp, Artificial Sequence
  Description of Artificial Sequence: Synthetic oligonucleotide
  Target: ATXN2; (-) strand; PAM type: YTN; PAM sequence: CTC
acacctgtaatcctagcact

SEQ ID NO: 67129 - DNA, 20 bp, Artificial Sequence
  Description of Artificial Sequence: Synthetic oligonucleotide
  Target: ATXN2; (-) strand; PAM type: YTN; PAM sequence: TTG
gcgggcacggtggctcacac

SEQ ID NO: 67130 - DNA, 20 bp, Artificial Sequence
  Description of Artificial Sequence: Synthetic oligonucleotide
  Target: ATXN2; (-) strand; PAM type: YTN; PAM sequence: TTG
ttggcgggcacggtggctca

SEQ ID NO: 67131 - DNA, 20 bp, Artificial Sequence
  Description of Artificial Sequence: Synthetic oligonucleotide
  Target: ATXN2; (-) strand; PAM type: YTN; PAM sequence: TTT
gttggcgggcacggtggctc

SEQ ID NO: 67132 - DNA, 20 bp, Artificial Sequence
  Description of Artificial Sequence: Synthetic oligonucleotide
  Target: ATXN2; (-) strand; PAM type: YTN; PAM sequence: TTC
atttgttggcgggcacggtg

SEQ ID NO: 67133 - DNA, 20 bp, Artificial Sequence
  Description of Artificial Sequence: Synthetic oligonucleotide
  Target: ATXN2; (-) strand; PAM type: YTN; PAM sequence: TTT
catttgttggcgggcacggt

SEQ ID NO: 67134 - DNA, 20 bp, Artificial Sequence
  Description of Artificial Sequence: Synthetic oligonucleotide
  Target: ATXN2; (-) strand; PAM type: YTN; PAM sequence: TTT
tcatttgttggcgggcacgg

SEQ ID NO: 67135 - DNA, 20 bp, Artificial Sequence
  Description of Artificial Sequence: Synthetic oligonucleotide
  Target: ATXN2; (-) strand; PAM type: YTN; PAM sequence: CTA
agttttcatttgttggcggg

SEQ ID NO: 67136 - DNA, 20 bp, Artificial Sequence
  Description of Artificial Sequence: Synthetic oligonucleotide
  Target: ATXN2; (-) strand; PAM type: YTN; PAM sequence: TTA
acctaagttttcatttgttg

SEQ ID NO: 67137 - DNA, 20 bp, Artificial Sequence
  Description of Artificial Sequence: Synthetic oligonucleotide
  Target: ATXN2; (-) strand; PAM type: YTN; PAM sequence: TTG
ttaacctaagttttcatttg

SEQ ID NO: 67138 - DNA, 20 bp, Artificial Sequence
  Description of Artificial Sequence: Synthetic oligonucleotide
  Target: ATXN2; (-) strand; PAM type: YTN; PAM sequence: TTA
acagttgttaacctaagttt

SEQ ID NO: 67139 - DNA, 20 bp, Artificial Sequence
  Description of Artificial Sequence: Synthetic oligonucleotide
  Target: ATXN2; (-) strand; PAM type: YTN; PAM sequence: CTA
ttaacagttgttaacctaag

SEQ ID NO: 67140 - DNA, 20 bp, Artificial Sequence
  Description of Artificial Sequence: Synthetic oligonucleotide
  Target: ATXN2; (-) strand; PAM type: YTN; PAM sequence: TTA
atgctattaacagttgttaa

SEQ ID NO: 67141 - DNA, 20 bp, Artificial Sequence
  Description of Artificial Sequence: Synthetic oligonucleotide
  Target: ATXN2; (-) strand; PAM type: YTN; PAM sequence: TTT
aatgctattaacagttgtta

SEQ ID NO: 67142 - DNA, 20 bp, Artificial Sequence
  Description of Artificial Sequence: Synthetic oligonucleotide
  Target: ATXN2; (-) strand; PAM type: YTN; PAM sequence: CTT
taatgctattaacagttgtt

SEQ ID NO: 67143 - DNA, 20 bp, Artificial Sequence
  Description of Artificial Sequence: Synthetic oligonucleotide
  Target: ATXN2; (-) strand; PAM type: YTN; PAM sequence: TTC
agctttaatgctattaacag

SEQ ID NO: 67144 - DNA, 20 bp, Artificial Sequence
  Description of Artificial Sequence: Synthetic oligonucleotide
  Target: ATXN2; (-) strand; PAM type: YTN; PAM sequence: CTA
ttcagctttaatgctattaa

SEQ ID NO: 67145 - DNA, 20 bp, Artificial Sequence
  Description of Artificial Sequence: Synthetic oligonucleotide
  Target: ATXN2; (-) strand; PAM type: YTN; PAM sequence: TTA
gcacatgtatctattcagct

SEQ ID NO: 67146 - DNA, 20 bp, Artificial Sequence
  Description of Artificial Sequence: Synthetic oligonucleotide
  Target: ATXN2; (-) strand; PAM type: YTN; PAM sequence: TTT
agcacatgtatctattcagc

SEQ ID NO: 67147 - DNA, 20 bp, Artificial Sequence
  Description of Artificial Sequence: Synthetic oligonucleotide
  Target: ATXN2; (-) strand; PAM type: YTN; PAM sequence: CTT
tagcacatgtatctattcag

SEQ ID NO: 67148 - DNA, 20 bp, Artificial Sequence
  Description of Artificial Sequence: Synthetic oligonucleotide
  Target: ATXN2; (-) strand; PAM type: YTN; PAM sequence: TTC
atactttagcacatgtatct

SEQ ID NO: 67149 - DNA, 20 bp, Artificial Sequence
  Description of Artificial Sequence: Synthetic oligonucleotide
  Target: ATXN2; (-) strand; PAM type: YTN; PAM sequence: TTT
catactttagcacatgtatc

SEQ ID NO: 67150 - DNA, 20 bp, Artificial Sequence
  Description of Artificial Sequence: Synthetic oligonucleotide
  Target: ATXN2; (-) strand; PAM type: YTN; PAM sequence: TTA
tttcatactttagcacatgt

SEQ ID NO: 67151 - DNA, 20 bp, Artificial Sequence
  Description of Artificial Sequence: Synthetic oligonucleotide
  Target: ATXN2; (-) strand; PAM type: YTN; PAM sequence: TTA
ttatttcatactttagcaca

SEQ ID NO: 67152 - DNA, 20 bp, Artificial Sequence
  Description of Artificial Sequence: Synthetic oligonucleotide
  Target: ATXN2; (-) strand; PAM type: YTN; PAM sequence: CTT
attatttcatactttagcac

SEQ ID NO: 67153 - DNA, 20 bp, Artificial Sequence
  Description of Artificial Sequence: Synthetic oligonucleotide
  Target: ATXN2; (-) strand; PAM type: YTN; PAM sequence: CTA
cttattatttcatactttag

SEQ ID NO: 67154 - DNA, 20 bp, Artificial Sequence
  Description of Artificial Sequence: Synthetic oligonucleotide
  Target: ATXN2; (-) strand; PAM type: YTN; PAM sequence: TTC
aaaatactacttattatttc

SEQ ID NO: 67155 - DNA, 20 bp, Artificial Sequence
  Description of Artificial Sequence: Synthetic oligonucleotide
  Target: ATXN2; (-) strand; PAM type: YTN; PAM sequence: TTG
gtaacattcaaaatactact

SEQ ID NO: 67156 - DNA, 20 bp, Artificial Sequence
  Description of Artificial Sequence: Synthetic oligonucleotide
  Target: ATXN2; (-) strand; PAM type: YTN; PAM sequence: TTA
ttggtaacattcaaaatact

SEQ ID NO: 67157 - DNA, 20 bp, Artificial Sequence
  Description of Artificial Sequence: Synthetic oligonucleotide
  Target: ATXN2; (-) strand; PAM type: YTN; PAM sequence: CTT
attggtaacattcaaaatac

SEQ ID NO: 67158 - DNA, 20 bp, Artificial Sequence
  Description of Artificial Sequence: Synthetic oligonucleotide
  Target: ATXN2; (-) strand; PAM type: YTN; PAM sequence: TTG
acttattggtaacattcaaa

SEQ ID NO: 67159 - DNA, 20 bp, Artificial Sequence
  Description of Artificial Sequence: Synthetic oligonucleotide
  Target: ATXN2; (-) strand; PAM type: YTN; PAM sequence: CTT
gacttattggtaacattcaa

SEQ ID NO: 67160 - DNA, 20 bp, Artificial Sequence
  Description of Artificial Sequence: Synthetic oligonucleotide
  Target: ATXN2; (-) strand; PAM type: YTN; PAM sequence: TTC
ttgacttattggtaacattc

SEQ ID NO: 67161 - DNA, 20 bp, Artificial Sequence
  Description of Artificial Sequence: Synthetic oligonucleotide
  Target: ATXN2; (-) strand; PAM type: YTN; PAM sequence: TTC
attcttgacttattggtaac

SEQ ID NO: 67162 - DNA, 20 bp, Artificial Sequence
  Description of Artificial Sequence: Synthetic oligonucleotide
  Target: ATXN2; (-) strand; PAM type: YTN; PAM sequence: CTT
cattcttgacttattggtaa

SEQ ID NO: 67163 - DNA, 20 bp, Artificial Sequence
  Description of Artificial Sequence: Synthetic oligonucleotide
  Target: ATXN2; (-) strand; PAM type: YTN; PAM sequence: TTA
acaatagcttcattcttgac

SEQ ID NO: 67164 - DNA, 20 bp, Artificial Sequence
  Description of Artificial Sequence: Synthetic oligonucleotide
  Target: ATXN2; (-) strand; PAM type: YTN; PAM sequence: CTA
aatgttaacaatagcttcat

SEQ ID NO: 67165 - DNA, 20 bp, Artificial Sequence
  Description of Artificial Sequence: Synthetic oligonucleotide
  Target: ATXN2; (-) strand; PAM type: YTN; PAM sequence: TTC
taaatgttaacaatagcttc

SEQ ID NO: 67166 - DNA, 20 bp, Artificial Sequence
  Description of Artificial Sequence: Synthetic oligonucleotide
  Target: ATXN2; (-) strand; PAM type: YTN; PAM sequence: TTT
ctaaatgttaacaatagctt

SEQ ID NO: 67167 - DNA, 20 bp, Artificial Sequence
  Description of Artificial Sequence: Synthetic oligonucleotide
  Target: ATXN2; (-) strand; PAM type: YTN; PAM sequence: CTT
tctaaatgttaacaatagct

SEQ ID NO: 67168 - DNA, 20 bp, Artificial Sequence
  Description of Artificial Sequence: Synthetic oligonucleotide
  Target: ATXN2; (-) strand; PAM type: YTN; PAM sequence: TTA
gctttctaaatgttaacaat

SEQ ID NO: 67169 - DNA, 20 bp, Artificial Sequence
  Description of Artificial Sequence: Synthetic oligonucleotide
  Target: ATXN2; (-) strand; PAM type: YTN; PAM sequence: TTT
agctttctaaatgttaacaa

SEQ ID NO: 67170 - DNA, 20 bp, Artificial Sequence
  Description of Artificial Sequence: Synthetic oligonucleotide
  Target: ATXN2; (-) strand; PAM type: YTN; PAM sequence: TTT
tagctttctaaatgttaaca

SEQ ID NO: 67171 - DNA, 20 bp, Artificial Sequence
  Description of Artificial Sequence: Synthetic oligonucleotide
  Target: ATXN2; (-) strand; PAM type: YTN; PAM sequence: CTG
tgttttagctttctaaatgt

SEQ ID NO: 67172 - DNA, 20 bp, Artificial Sequence
  Description of Artificial Sequence: Synthetic oligonucleotide
  Target: ATXN2; (-) strand; PAM type: YTN; PAM sequence: CTC
agcctgtgttttagctttct

SEQ ID NO: 67173 - DNA, 20 bp, Artificial Sequence
  Description of Artificial Sequence: Synthetic oligonucleotide
  Target: ATXN2; (-) strand; PAM type: YTN; PAM sequence: TTC
ctcagcctgtgttttagctt

SEQ ID NO: 67174 - DNA, 20 bp, Artificial Sequence
  Description of Artificial Sequence: Synthetic oligonucleotide
  Target: ATXN2; (-) strand; PAM type: YTN; PAM sequence: TTT
cctcagcctgtgttttagct

SEQ ID NO: 67175 - DNA, 20 bp, Artificial Sequence
  Description of Artificial Sequence: Synthetic oligonucleotide
  Target: ATXN2; (-) strand; PAM type: YTN; PAM sequence: CTT
tcctcagcctgtgttttagc

SEQ ID NO: 67176 - DNA, 20 bp, Artificial Sequence
  Description of Artificial Sequence: Synthetic oligonucleotide
  Target: ATXN2; (-) strand; PAM type: YTN; PAM sequence: TTA
aaggatgagtgaaccaaagg

SEQ ID NO: 67177 - DNA, 20 bp, Artificial Sequence
  Description of Artificial Sequence: Synthetic oligonucleotide
  Target: ATXN2; (-) strand; PAM type: YTN; PAM sequence: CTG
aattaaaggatgagtgaacc

SEQ ID NO: 67178 - DNA, 20 bp, Artificial Sequence
  Description of Artificial Sequence: Synthetic oligonucleotide
  Target: ATXN2; (-) strand; PAM type: YTN; PAM sequence: TTA
aaaaaagtagctgaattaaa

SEQ ID NO: 67179 - DNA, 20 bp, Artificial Sequence
  Description of Artificial Sequence: Synthetic oligonucleotide
  Target: ATXN2; (-) strand; PAM type: YTN; PAM sequence: TTT
aaaaaaagtagctgaattaa

SEQ ID NO: 67180 - DNA, 20 bp, Artificial Sequence
  Description of Artificial Sequence: Synthetic oligonucleotide
  Target: ATXN2; (-) strand; PAM type: YTN; PAM sequence: TTT
taaaaaaagtagctgaatta

SEQ ID NO: 67181 - DNA, 20 bp, Artificial Sequence
  Description of Artificial Sequence: Synthetic oligonucleotide
  Target: ATXN2; (-) strand; PAM type: YTN; PAM sequence: CTT
ttaaaaaaagtagctgaatt

SEQ ID NO: 67182 - DNA, 20 bp, Artificial Sequence
  Description of Artificial Sequence: Synthetic oligonucleotide
  Target: ATXN2; (-) strand; PAM type: YTN; PAM sequence: CTA
aataccagccttttaaaaaa

SEQ ID NO: 67183 - DNA, 20 bp, Artificial Sequence
  Description of Artificial Sequence: Synthetic oligonucleotide
  Target: ATXN2; (-) strand; PAM type: YTN; PAM sequence: TTA
gaaaggaaaatctaaatacc

SEQ ID NO: 67184 - DNA, 20 bp, Artificial Sequence
  Description of Artificial Sequence: Synthetic oligonucleotide
  Target: ATXN2; (-) strand; PAM type: YTN; PAM sequence: CTT
agaaaggaaaatctaaatac

SEQ ID NO: 67185 - DNA, 20 bp, Artificial Sequence
  Description of Artificial Sequence: Synthetic oligonucleotide
  Target: ATXN2; (-) strand; PAM type: YTN; PAM sequence: TTC
ttagaaaggaaaatctaaat

SEQ ID NO: 67186 - DNA, 20 bp, Artificial Sequence
  Description of Artificial Sequence: Synthetic oligonucleotide
  Target: ATXN2; (-) strand; PAM type: YTN; PAM sequence: CTT
cttagaaaggaaaatctaaa

SEQ ID NO: 67187 - DNA, 20 bp, Artificial Sequence
  Description of Artificial Sequence: Synthetic oligonucleotide
  Target: ATXN2; (-) strand; PAM type: YTN; PAM sequence: TTA
gcttcttagaaaggaaaatc

SEQ ID NO: 67188 - DNA, 20 bp, Artificial Sequence
  Description of Artificial Sequence: Synthetic oligonucleotide
  Target: ATXN2; (-) strand; PAM type: YTN; PAM sequence: CTT
agcttcttagaaaggaaaat

SEQ ID NO: 67189 - DNA, 20 bp, Artificial Sequence
  Description of Artificial Sequence: Synthetic oligonucleotide
  Target: ATXN2; (-) strand; PAM type: YTN; PAM sequence: TTG
aaacttagcttcttagaaag

SEQ ID NO: 67190 - DNA, 20 bp, Artificial Sequence
  Description of Artificial Sequence: Synthetic oligonucleotide
  Target: ATXN2; (-) strand; PAM type: YTN; PAM sequence: CTT
gaaacttagcttcttagaaa

SEQ ID NO: 67191 - DNA, 20 bp, Artificial Sequence
  Description of Artificial Sequence: Synthetic oligonucleotide
  Target: ATXN2; (-) strand; PAM type: YTN; PAM sequence: TTC
ttgaaacttagcttcttaga

SEQ ID NO: 67192 - DNA, 20 bp, Artificial Sequence
  Description of Artificial Sequence: Synthetic oligonucleotide
  Target: ATXN2; (-) strand; PAM type: YTN; PAM sequence: CTT
cttgaaacttagcttcttag

SEQ ID NO: 67193 - DNA, 20 bp, Artificial Sequence
  Description of Artificial Sequence: Synthetic oligonucleotide
  Target: ATXN2; (-) strand; PAM type: YTN; PAM sequence: TTG
agaccaaccaataaatcttc

SEQ ID NO: 67194 - DNA, 20 bp, Artificial Sequence
  Description of Artificial Sequence: Synthetic oligonucleotide
  Target: ATXN2; (-) strand; PAM type: YTN; PAM sequence: TTT
gagaccaaccaataaatctt

SEQ ID NO: 67195 - DNA, 20 bp, Artificial Sequence
  Description of Artificial Sequence: Synthetic oligonucleotide
  Target: ATXN2; (-) strand; PAM type: YTN; PAM sequence: TTT
tgagaccaaccaataaatct

SEQ ID NO: 67196 - DNA, 20 bp, Artificial Sequence
  Description of Artificial Sequence: Synthetic oligonucleotide
  Target: ATXN2; (-) strand; PAM type: YTN; PAM sequence: CTA
taggtatcgaggtagatttt

SEQ ID NO: 67197 - DNA, 20 bp, Artificial Sequence
  Description of Artificial Sequence: Synthetic oligonucleotide
  Target: ATXN2; (-) strand; PAM type: YTN; PAM sequence: TTA
ctataggtatcgaggtagat

SEQ ID NO: 67198 - DNA, 20 bp, Artificial Sequence
  Description of Artificial Sequence: Synthetic oligonucleotide
  Target: ATXN2; (-) strand; PAM type: YTN; PAM sequence: TTT
actataggtatcgaggtaga

SEQ ID NO: 67199 - DNA, 20 bp, Artificial Sequence
  Description of Artificial Sequence: Synthetic oligonucleotide
  Target: ATXN2; (-) strand; PAM type: YTN; PAM sequence: TTA
tttactataggtatcgaggt

SEQ ID NO: 67200 - DNA, 20 bp, Artificial Sequence
  Description of Artificial Sequence: Synthetic oligonucleotide
  Target: ATXN2; (-) strand; PAM type: YTN; PAM sequence: TTG
catgttatttactataggta

SEQ ID NO: 67201 - DNA, 20 bp, Artificial Sequence
  Description of Artificial Sequence: Synthetic oligonucleotide
  Target: ATXN2; (-) strand; PAM type: YTN; PAM sequence: TTT
gcatgttatttactataggt

SEQ ID NO: 67202 - DNA, 20 bp, Artificial Sequence
  Description of Artificial Sequence: Synthetic oligonucleotide
  Target: ATXN2; (-) strand; PAM type: YTN; PAM sequence: TTT
tgcatgttatttactatagg

SEQ ID NO: 67203 - DNA, 20 bp, Artificial Sequence
  Description of Artificial Sequence: Synthetic oligonucleotide
  Target: ATXN2; (-) strand; PAM type: YTN; PAM sequence: CTT
ttgcatgttatttactatag

SEQ ID NO: 67204 - DNA, 20 bp, Artificial Sequence
  Description of Artificial Sequence: Synthetic oligonucleotide
  Target: ATXN2; (-) strand; PAM type: YTN; PAM sequence: TTC
ttttgcatgttatttactat

SEQ ID NO: 67205 - DNA, 20 bp, Artificial Sequence
  Description of Artificial Sequence: Synthetic oligonucleotide
  Target: ATXN2; (-) strand; PAM type: YTN; PAM sequence: TTC
attcttttgcatgttattta

SEQ ID NO: 67206 - DNA, 20 bp, Artificial Sequence
  Description of Artificial Sequence: Synthetic oligonucleotide
  Target: ATXN2; (-) strand; PAM type: YTN; PAM sequence: TTT
cattcttttgcatgttattt

SEQ ID NO: 67207 - DNA, 20 bp, Artificial Sequence
  Description of Artificial Sequence: Synthetic oligonucleotide
  Target: ATXN2; (-) strand; PAM type: YTN; PAM sequence: TTG
tcatttcattcttttgcatg

SEQ ID NO: 67208 - DNA, 20 bp, Artificial Sequence
  Description of Artificial Sequence: Synthetic oligonucleotide
  Target: ATXN2; (-) strand; PAM type: YTN; PAM sequence: TTG
attgtcatttcattcttttg

SEQ ID NO: 67209 - DNA, 20 bp, Artificial Sequence
  Description of Artificial Sequence: Synthetic oligonucleotide
  Target: ATXN2; (-) strand; PAM type: YTN; PAM sequence: CTT
gattgtcatttcattctttt

SEQ ID NO: 67210 - DNA, 20 bp, Artificial Sequence
  Description of Artificial Sequence: Synthetic oligonucleotide
  Target: ATXN2; (-) strand; PAM type: YTN; PAM sequence: CTC
cttgattgtcatttcattct

SEQ ID NO: 67211 - DNA, 20 bp, Artificial Sequence
  Description of Artificial Sequence: Synthetic oligonucleotide
  Target: ATXN2; (-) strand; PAM type: YTN; PAM sequence: CTC
tccttgattgtcatttcatt

SEQ ID NO: 67212 - DNA, 20 bp, Artificial Sequence
  Description of Artificial Sequence: Synthetic oligonucleotide
  Target: ATXN2; (-) strand; PAM type: YTN; PAM sequence: TTA
acatctctccttgattgtca

SEQ ID NO: 67213 - DNA, 20 bp, Artificial Sequence
  Description of Artificial Sequence: Synthetic oligonucleotide
  Target: ATXN2; (-) strand; PAM type: YTN; PAM sequence: CTT
aacatctctccttgattgtc

SEQ ID NO: 67214 - DNA, 20 bp, Artificial Sequence
  Description of Artificial Sequence: Synthetic oligonucleotide
  Target: ATXN2; (-) strand; PAM type: YTN; PAM sequence: TTA
cttaacatctctccttgatt

SEQ ID NO: 67215 - DNA, 20 bp, Artificial Sequence
  Description of Artificial Sequence: Synthetic oligonucleotide
  Target: ATXN2; (-) strand; PAM type: YTN; PAM sequence: TTT
acttaacatctctccttgat

SEQ ID NO: 67216 - DNA, 20 bp, Artificial Sequence
  Description of Artificial Sequence: Synthetic oligonucleotide
  Target: ATXN2; (-) strand; PAM type: YTN; PAM sequence: CTT
tacttaacatctctccttga

SEQ ID NO: 67217 - DNA, 20 bp, Artificial Sequence
  Description of Artificial Sequence: Synthetic oligonucleotide
  Target: ATXN2; (-) strand; PAM type: YTN; PAM sequence: TTA
gcacaggctttacttaacat

SEQ ID NO: 67218 - DNA, 20 bp, Artificial Sequence
  Description of Artificial Sequence: Synthetic oligonucleotide
  Target: ATXN2; (-) strand; PAM type: YTN; PAM sequence: CTT
agcacaggctttacttaaca

SEQ ID NO: 67219 - DNA, 20 bp, Artificial Sequence
  Description of Artificial Sequence: Synthetic oligonucleotide
  Target: ATXN2; (-) strand; PAM type: YTN; PAM sequence: CTG
tcttagcacaggctttactt

SEQ ID NO: 67220 - DNA, 20 bp, Artificial Sequence
  Description of Artificial Sequence: Synthetic oligonucleotide
  Target: ATXN2; (-) strand; PAM type: YTN; PAM sequence: CTC
tgtcttagcacaggctttac

SEQ ID NO: 67221 - DNA, 20 bp, Artificial Sequence
  Description of Artificial Sequence: Synthetic oligonucleotide
  Target: ATXN2; (-) strand; PAM type: YTN; PAM sequence: TTC
tctgtcttagcacaggcttt

SEQ ID NO: 67222 - DNA, 20 bp, Artificial Sequence
  Description of Artificial Sequence: Synthetic oligonucleotide
  Target: ATXN2; (-) strand; PAM type: YTN; PAM sequence: TTT
ctctgtcttagcacaggctt

SEQ ID NO: 67223 - DNA, 20 bp, Artificial Sequence
  Description of Artificial Sequence: Synthetic oligonucleotide
  Target: ATXN2; (-) strand; PAM type: YTN; PAM sequence: TTA
tttctctgtcttagcacagg

SEQ ID NO: 67224 - DNA, 20 bp, Artificial Sequence
  Description of Artificial Sequence: Synthetic oligonucleotide
  Target: ATXN2; (-) strand; PAM type: YTN; PAM sequence: CTG
taacattatttctctgtctt

SEQ ID NO: 67225 - DNA, 20 bp, Artificial Sequence
  Description of Artificial Sequence: Synthetic oligonucleotide
  Target: ATXN2; (-) strand; PAM type: YTN; PAM sequence: TTC
tgtaacattatttctctgtc

SEQ ID NO: 67226 - DNA, 20 bp, Artificial Sequence
  Description of Artificial Sequence: Synthetic oligonucleotide
  Target: ATXN2; (-) strand; PAM type: YTN; PAM sequence: TTT
ctgtaacattatttctctgt

SEQ ID NO: 67227 - DNA, 20 bp, Artificial Sequence
  Description of Artificial Sequence: Synthetic oligonucleotide
  Target: ATXN2; (-) strand; PAM type: YTN; PAM sequence: CTT
tctgtaacattatttctctg

SEQ ID NO: 67228 - DNA, 20 bp, Artificial Sequence
  Description of Artificial Sequence: Synthetic oligonucleotide
  Target: ATXN2; (-) strand; PAM type: YTN; PAM sequence: TTG
tggtcaaaatctttctgtaa

SEQ ID NO: 67229 - DNA, 20 bp, Artificial Sequence
  Description of Artificial Sequence: Synthetic oligonucleotide
  Target: ATXN2; (-) strand; PAM type: YTN; PAM sequence: TTG
tacacaaatatattgtggtc

SEQ ID NO: 67230 - DNA, 20 bp, Artificial Sequence
  Description of Artificial Sequence: Synthetic oligonucleotide
  Target: ATXN2; (-) strand; PAM type: YTN; PAM sequence: TTT
gtacacaaatatattgtggt

SEQ ID NO: 67231 - DNA, 20 bp, Artificial Sequence
  Description of Artificial Sequence: Synthetic oligonucleotide
  Target: ATXN2; (-) strand; PAM type: YTN; PAM sequence: CTT
tgtacacaaatatattgtgg

SEQ ID NO: 67232 - DNA, 20 bp, Artificial Sequence
  Description of Artificial Sequence: Synthetic oligonucleotide
  Target: ATXN2; (-) strand; PAM type: YTN; PAM sequence: TTA
tactttgtacacaaatatat

SEQ ID NO: 67233 - DNA, 20 bp, Artificial Sequence
  Description of Artificial Sequence: Synthetic oligonucleotide
  Target: ATXN2; (-) strand; PAM type: YTN; PAM sequence: TTT
atactttgtacacaaatata

SEQ ID NO: 67234 - DNA, 20 bp, Artificial Sequence
  Description of Artificial Sequence: Synthetic oligonucleotide
  Target: ATXN2; (-) strand; PAM type: YTN; PAM sequence: TTG
gagatttatactttgtacac

SEQ ID NO: 67235 - DNA, 20 bp, Artificial Sequence
  Description of Artificial Sequence: Synthetic oligonucleotide
  Target: ATXN2; (-) strand; PAM type: YTN; PAM sequence: CTG
aggtagttggagatttatac

SEQ ID NO: 67236 - DNA, 20 bp, Artificial Sequence
  Description of Artificial Sequence: Synthetic oligonucleotide
  Target: ATXN2; (-) strand; PAM type: YTN; PAM sequence: TTC
tgaggtagttggagatttat

SEQ ID NO: 67237 - DNA, 20 bp, Artificial Sequence
  Description of Artificial Sequence: Synthetic oligonucleotide
  Target: ATXN2; (-) strand; PAM type: YTN; PAM sequence: CTG
gtgttctgaggtagttggag

SEQ ID NO: 67238 - DNA, 20 bp, Artificial Sequence
  Description of Artificial Sequence: Synthetic oligonucleotide
  Target: ATXN2; (-) strand; PAM type: YTN; PAM sequence: CTC
tggtgttctgaggtagttgg

SEQ ID NO: 67239 - DNA, 20 bp, Artificial Sequence
  Description of Artificial Sequence: Synthetic oligonucleotide
  Target: ATXN2; (-) strand; PAM type: YTN; PAM sequence: CTG
gactctggtgttctgaggta

SEQ ID NO: 67240 - DNA, 20 bp, Artificial Sequence
  Description of Artificial Sequence: Synthetic oligonucleotide
  Target: ATXN2; (-) strand; PAM type: YTN; PAM sequence: CTA
gtgtggcaaatggaagatgt

SEQ ID NO: 67241 - DNA, 20 bp, Artificial Sequence
  Description of Artificial Sequence: Synthetic oligonucleotide
  Target: ATXN2; (-) strand; PAM type: YTN; PAM sequence: TTA
ataatctagtgtggcaaatg

SEQ ID NO: 67242 - DNA, 20 bp, Artificial Sequence
  Description of Artificial Sequence: Synthetic oligonucleotide
  Target: ATXN2; (-) strand; PAM type: YTN; PAM sequence: TTA
gtagagcaaggccaagtcat

SEQ ID NO: 67243 - DNA, 20 bp, Artificial Sequence
  Description of Artificial Sequence: Synthetic oligonucleotide
  Target: ATXN2; (-) strand; PAM type: YTN; PAM sequence: CTA
gatattagtagagcaaggcc

SEQ ID NO: 67244 - DNA, 20 bp, Artificial Sequence
  Description of Artificial Sequence: Synthetic oligonucleotide
  Target: ATXN2; (-) strand; PAM type: YTN; PAM sequence: TTC
agtgaagctagatattagta

SEQ ID NO: 67245 - DNA, 20 bp, Artificial Sequence
  Description of Artificial Sequence: Synthetic oligonucleotide
  Target: ATXN2; (-) strand; PAM type: YTN; PAM sequence: TTG
ttcagtgaagctagatatta

SEQ ID NO: 67246 - DNA, 20 bp, Artificial Sequence
  Description of Artificial Sequence: Synthetic oligonucleotide
  Target: ATXN2; (-) strand; PAM type: YTN; PAM sequence: TTT
gttcagtgaagctagatatt

SEQ ID NO: 67247 - DNA, 20 bp, Artificial Sequence
  Description of Artificial Sequence: Synthetic oligonucleotide
  Target: ATXN2; (-) strand; PAM type: YTN; PAM sequence: CTT
tgttcagtgaagctagatat

SEQ ID NO: 67248 - DNA, 20 bp, Artificial Sequence
  Description of Artificial Sequence: Synthetic oligonucleotide
  Target: ATXN2; (-) strand; PAM type: YTN; PAM sequence: TTG
tactttgttcagtgaagcta

SEQ ID NO: 67249 - DNA, 20 bp, Artificial Sequence
  Description of Artificial Sequence: Synthetic oligonucleotide
  Target: ATXN2; (-) strand; PAM type: YTN; PAM sequence: TTT
gtactttgttcagtgaagct

SEQ ID NO: 67250 - DNA, 20 bp, Artificial Sequence
  Description of Artificial Sequence: Synthetic oligonucleotide
  Target: ATXN2; (-) strand; PAM type: YTN; PAM sequence: TTG
atggtcatttgtactttgtt

SEQ ID NO: 67251 - DNA, 20 bp, Artificial Sequence
  Description of Artificial Sequence: Synthetic oligonucleotide
  Target: ATXN2; (-) strand; PAM type: YTN; PAM sequence: TTT
gatggtcatttgtactttgt

SEQ ID NO: 67252 - DNA, 20 bp, Artificial Sequence
  Description of Artificial Sequence: Synthetic oligonucleotide
  Target: ATXN2; (-) strand; PAM type: YTN; PAM sequence: CTA
tttgatggtcatttgtactt

SEQ ID NO: 67253 - DNA, 20 bp, Artificial Sequence
  Description of Artificial Sequence: Synthetic oligonucleotide
  Target: ATXN2; (-) strand; PAM type: YTN; PAM sequence: TTA
ctatttgatggtcatttgta

SEQ ID NO: 67254 - DNA, 20 bp, Artificial Sequence
  Description of Artificial Sequence: Synthetic oligonucleotide
  Target: ATXN2; (-) strand; PAM type: YTN; PAM sequence: CTT
actatttgatggtcatttgt

SEQ ID NO: 67255 - DNA, 20 bp, Artificial Sequence
  Description of Artificial Sequence: Synthetic oligonucleotide
  Target: ATXN2; (-) strand; PAM type: YTN; PAM sequence: TTG
aaaccaccatagcacagctt

SEQ ID NO: 67256 - DNA, 20 bp, Artificial Sequence
  Description of Artificial Sequence: Synthetic oligonucleotide
  Target: ATXN2; (-) strand; PAM type: YTN; PAM sequence: TTT
gaaaccaccatagcacagct

SEQ ID NO: 67257 - DNA, 20 bp, Artificial Sequence
  Description of Artificial Sequence: Synthetic oligonucleotide
  Target: ATXN2; (-) strand; PAM type: YTN; PAM sequence: CTG
acatttgaaaccaccatagc

SEQ ID NO: 67258 - DNA, 20 bp, Artificial Sequence
  Description of Artificial Sequence: Synthetic oligonucleotide
  Target: ATXN2; (-) strand; PAM type: YTN; PAM sequence: TTG
gtaacaacaatatgtaggta

SEQ ID NO: 67259 - DNA, 20 bp, Artificial Sequence
  Description of Artificial Sequence: Synthetic oligonucleotide
  Target: ATXN2; (-) strand; PAM type: YTN; PAM sequence: TTT
ggtaacaacaatatgtaggt

SEQ ID NO: 67260 - DNA, 20 bp, Artificial Sequence
  Description of Artificial Sequence: Synthetic oligonucleotide
  Target: ATXN2; (-) strand; PAM type: YTN; PAM sequence: CTA
aaatcatgagatttggtaac

SEQ ID NO: 67261 - DNA, 20 bp, Artificial Sequence
  Description of Artificial Sequence: Synthetic oligonucleotide
  Target: ATXN2; (-) strand; PAM type: YTN; PAM sequence: TTA
agtgggataactaaaatcat

SEQ ID NO: 67262 - DNA, 20 bp, Artificial Sequence
  Description of Artificial Sequence: Synthetic oligonucleotide
  Target: ATXN2; (-) strand; PAM type: YTN; PAM sequence: TTT
aagtgggataactaaaatca

SEQ ID NO: 67263 - DNA, 20 bp, Artificial Sequence
  Description of Artificial Sequence: Synthetic oligonucleotide
  Target: ATXN2; (-) strand; PAM type: YTN; PAM sequence: CTT
taagtgggataactaaaatc

SEQ ID NO: 67264 - DNA, 20 bp, Artificial Sequence
  Description of Artificial Sequence: Synthetic oligonucleotide
  Target: ATXN2; (-) strand; PAM type: YTN; PAM sequence: CTA
tcctttaagtgggataacta

SEQ ID NO: 67265 - DNA, 20 bp, Artificial Sequence
  Description of Artificial Sequence: Synthetic oligonucleotide
  Target: ATXN2; (-) strand; PAM type: YTN; PAM sequence: TTG
cctatcctttaagtgggata

SEQ ID NO: 67266 - DNA, 20 bp, Artificial Sequence
  Description of Artificial Sequence: Synthetic oligonucleotide
  Target: ATXN2; (-) strand; PAM type: YTN; PAM sequence: TTT
gcctatcctttaagtgggat

SEQ ID NO: 67267 - DNA, 20 bp, Artificial Sequence
  Description of Artificial Sequence: Synthetic oligonucleotide
  Target: ATXN2; (-) strand; PAM type: YTN; PAM sequence: CTT
tgcctatcctttaagtggga

SEQ ID NO: 67268 - DNA, 20 bp, Artificial Sequence
  Description of Artificial Sequence: Synthetic oligonucleotide
  Target: ATXN2; (-) strand; PAM type: YTN; PAM sequence: TTA
aagtggtctttgcctatcct

SEQ ID NO: 67269 - DNA, 20 bp, Artificial Sequence
  Description of Artificial Sequence: Synthetic oligonucleotide
  Target: ATXN2; (-) strand; PAM type: YTN; PAM sequence: TTT
aaagtggtctttgcctatcc

SEQ ID NO: 67270 - DNA, 20 bp, Artificial Sequence
  Description of Artificial Sequence: Synthetic oligonucleotide
  Target: ATXN2; (-) strand; PAM type: YTN; PAM sequence: TTT
taaagtggtctttgcctatc

SEQ ID NO: 67271 - DNA, 20 bp, Artificial Sequence
  Description of Artificial Sequence: Synthetic oligonucleotide
  Target: ATXN2; (-) strand; PAM type: YTN; PAM sequence: TTT
ttaaagtggtctttgcctat

SEQ ID NO: 67272 - DNA, 20 bp, Artificial Sequence
  Description of Artificial Sequence: Synthetic oligonucleotide
  Target: ATXN2; (-) strand; PAM type: YTN; PAM sequence: TTA
tgtatacagtcagaaacatc

SEQ ID NO: 67273 - DNA, 20 bp, Artificial Sequence
  Description of Artificial Sequence: Synthetic oligonucleotide
  Target: ATXN2; (-) strand; PAM type: YTN; PAM sequence: TTA
taaaaatgcgttatgtatac

SEQ ID NO: 67274 - DNA, 20 bp, Artificial Sequence
  Description of Artificial Sequence: Synthetic oligonucleotide
  Target: ATXN2; (-) strand; PAM type: YTN; PAM sequence: TTT
ataaaaatgcgttatgtata

SEQ ID NO: 67275 - DNA, 20 bp, Artificial Sequence
  Description of Artificial Sequence: Synthetic oligonucleotide
  Target: ATXN2; (-) strand; PAM type: YTN; PAM sequence: CTA
tttataaaaatgcgttatgt

SEQ ID NO: 67276 - DNA, 20 bp, Artificial Sequence
  Description of Artificial Sequence: Synthetic oligonucleotide
  Target: ATXN2; (-) strand; PAM type: YTN; PAM sequence: TTA
tctatttataaaaatgcgtt

SEQ ID NO: 67277 - DNA, 20 bp, Artificial Sequence
  Description of Artificial Sequence: Synthetic oligonucleotide
  Target: ATXN2; (-) strand; PAM type: YTN; PAM sequence: TTT
atctatttataaaaatgcgt

SEQ ID NO: 67278 - DNA, 20 bp, Artificial Sequence
  Description of Artificial Sequence: Synthetic oligonucleotide
  Target: ATXN2; (-) strand; PAM type: YTN; PAM sequence: CTA
aagatttatctatttataaa

SEQ ID NO: 67279 - DNA, 20 bp, Artificial Sequence
  Description of Artificial Sequence: Synthetic oligonucleotide
  Target: ATXN2; (-) strand; PAM type: YTN; PAM sequence: TTA
ctaaagatttatctatttat

SEQ ID NO: 67280 - DNA, 20 bp, Artificial Sequence
  Description of Artificial Sequence: Synthetic oligonucleotide
  Target: ATXN2; (-) strand; PAM type: YTN; PAM sequence: TTA
gaaaataagcattactaaag

SEQ ID NO: 67281 - DNA, 20 bp, Artificial Sequence
  Description of Artificial Sequence: Synthetic oligonucleotide
  Target: ATXN2; (-) strand; PAM type: YTN; PAM sequence: TTT
agaaaataagcattactaaa

SEQ ID NO: 67282 - DNA, 20 bp, Artificial Sequence
  Description of Artificial Sequence: Synthetic oligonucleotide
  Target: ATXN2; (-) strand; PAM type: YTN; PAM sequence: TTT
tagaaaataagcattactaa

SEQ ID NO: 67283 - DNA, 20 bp, Artificial Sequence
  Description of Artificial Sequence: Synthetic oligonucleotide
  Target: ATXN2; (-) strand; PAM type: YTN; PAM sequence: TTG
agttttagaaaataagcatt

SEQ ID NO: 67284 - DNA, 20 bp, Artificial Sequence
  Description of Artificial Sequence: Synthetic oligonucleotide
  Target: ATXN2; (-) strand; PAM type: YTN; PAM sequence: TTT
gagttttagaaaataagcat

SEQ ID NO: 67285 - DNA, 20 bp, Artificial Sequence
  Description of Artificial Sequence: Synthetic oligonucleotide
  Target: ATXN2; (-) strand; PAM type: YTN; PAM sequence: CTG
atgaatttgagttttagaaa

SEQ ID NO: 67286 - DNA, 20 bp, Artificial Sequence
  Description of Artificial Sequence: Synthetic oligonucleotide
  Target: ATXN2; (-) strand; PAM type: YTN; PAM sequence: CTA
actgatgaatttgagtttta

SEQ ID NO: 67287 - DNA, 20 bp, Artificial Sequence
  Description of Artificial Sequence: Synthetic oligonucleotide
  Target: ATXN2; (-) strand; PAM type: YTN; PAM sequence: TTG
tactaactgatgaatttgag

SEQ ID NO: 67288 - DNA, 20 bp, Artificial Sequence
  Description of Artificial Sequence: Synthetic oligonucleotide
  Target: ATXN2; (-) strand; PAM type: YTN; PAM sequence: TTA
gggtaagtattgtactaact

SEQ ID NO: 67289 - DNA, 20 bp, Artificial Sequence
  Description of Artificial Sequence: Synthetic oligonucleotide
  Target: ATXN2; (-) strand; PAM type: YTN; PAM sequence: TTT
agggtaagtattgtactaac

SEQ ID NO: 67290 - DNA, 20 bp, Artificial Sequence
  Description of Artificial Sequence: Synthetic oligonucleotide
  Target: ATXN2; (-) strand; PAM type: YTN; PAM sequence: TTT
tagggtaagtattgtactaa

SEQ ID NO: 67291 - DNA, 20 bp, Artificial Sequence
  Description of Artificial Sequence: Synthetic oligonucleotide
  Target: ATXN2; (-) strand; PAM type: YTN; PAM sequence: TTA
agaatgattttagggtaagt

SEQ ID NO: 67292 - DNA, 20 bp, Artificial Sequence
  Description of Artificial Sequence: Synthetic oligonucleotide
  Target: ATXN2; (-) strand; PAM type: YTN; PAM sequence: TTT
aagaatgattttagggtaag

SEQ ID NO: 67293 - DNA, 20 bp, Artificial Sequence
  Description of Artificial Sequence: Synthetic oligonucleotide
  Target: ATXN2; (-) strand; PAM type: YTN; PAM sequence: TTA
aagaaatttaagaatgattt

SEQ ID NO: 67294 - DNA, 20 bp, Artificial Sequence
  Description of Artificial Sequence: Synthetic oligonucleotide
  Target: ATXN2; (-) strand; PAM type: YTN; PAM sequence: TTT
aaagaaatttaagaatgatt

SEQ ID NO: 67295 - DNA, 20 bp, Artificial Sequence
  Description of Artificial Sequence: Synthetic oligonucleotide
  Target: ATXN2; (-) strand; PAM type: YTN; PAM sequence: TTG
atgatttaaagaaatttaag

SEQ ID NO: 67296 - DNA, 20 bp, Artificial Sequence
  Description of Artificial Sequence: Synthetic oligonucleotide
  Target: ATXN2; (-) strand; PAM type: YTN; PAM sequence: CTG
aacatagaaaacagattgat

SEQ ID NO: 67297 - DNA, 20 bp, Artificial Sequence
  Description of Artificial Sequence: Synthetic oligonucleotide
  Target: ATXN2; (-) strand; PAM type: YTN; PAM sequence: TTC
tgaacatagaaaacagattg

SEQ ID NO: 67298 - DNA, 20 bp, Artificial Sequence
  Description of Artificial Sequence: Synthetic oligonucleotide
  Target: ATXN2; (-) strand; PAM type: YTN; PAM sequence: TTT
ctgaacatagaaaacagatt

SEQ ID NO: 67299 - DNA, 20 bp, Artificial Sequence
  Description of Artificial Sequence: Synthetic oligonucleotide
  Target: ATXN2; (-) strand; PAM type: YTN; PAM sequence: TTG
tttctgaacatagaaaacag

SEQ ID NO: 67300 - DNA, 20 bp, Artificial Sequence
  Description of Artificial Sequence: Synthetic oligonucleotide
  Target: ATXN2; (-) strand; PAM type: YTN; PAM sequence: TTA
caggtatatcaccagttgtt

SEQ ID NO: 67301 - DNA, 20 bp, Artificial Sequence
  Description of Artificial Sequence: Synthetic oligonucleotide
  Target: ATXN2; (-) strand; PAM type: YTN; PAM sequence: TTT
acaggtatatcaccagttgt

SEQ ID NO: 67302 - DNA, 20 bp, Artificial Sequence
  Description of Artificial Sequence: Synthetic oligonucleotide
  Target: ATXN2; (-) strand; PAM type: YTN; PAM sequence: TTT
tacaggtatatcaccagttg

SEQ ID NO: 67303 - DNA, 20 bp, Artificial Sequence
  Description of Artificial Sequence: Synthetic oligonucleotide
  Target: ATXN2; (-) strand; PAM type: YTN; PAM sequence: TTA
attttacaggtatatcacca

SEQ ID NO: 67304 - DNA, 20 bp, Artificial Sequence
  Description of Artificial Sequence: Synthetic oligonucleotide
  Target: ATXN2; (-) strand; PAM type: YTN; PAM sequence: CTT
aattttacaggtatatcacc

SEQ ID NO: 67305 - DNA, 20 bp, Artificial Sequence
  Description of Artificial Sequence: Synthetic oligonucleotide
  Target: ATXN2; (-) strand; PAM type: YTN; PAM sequence: TTC
ttaattttacaggtatatca

SEQ ID NO: 67306 - DNA, 20 bp, Artificial Sequence
  Description of Artificial Sequence: Synthetic oligonucleotide
  Target: ATXN2; (-) strand; PAM type: YTN; PAM sequence: TTA
acagttcttaattttacagg

SEQ ID NO: 67307 - DNA, 20 bp, Artificial Sequence
  Description of Artificial Sequence: Synthetic oligonucleotide
  Target: ATXN2; (-) strand; PAM type: YTN; PAM sequence: CTT
aacagttcttaattttacag

SEQ ID NO: 67308 - DNA, 20 bp, Artificial Sequence
  Description of Artificial Sequence: Synthetic oligonucleotide
  Target: ATXN2; (-) strand; PAM type: YTN; PAM sequence: CTG
tgtcttaacagttcttaatt

SEQ ID NO: 67309 - DNA, 20 bp, Artificial Sequence
  Description of Artificial Sequence: Synthetic oligonucleotide
  Target: ATXN2; (-) strand; PAM type: YTN; PAM sequence: TTA
aaaataaacctgtgtcttaa

SEQ ID NO: 67310 - DNA, 20 bp, Artificial Sequence
  Description of Artificial Sequence: Synthetic oligonucleotide
  Target: ATXN2; (-) strand; PAM type: YTN; PAM sequence: TTT
aaaaataaacctgtgtctta

SEQ ID NO: 67311 - DNA, 20 bp, Artificial Sequence
  Description of Artificial Sequence: Synthetic oligonucleotide
  Target: ATXN2; (-) strand; PAM type: YTN; PAM sequence: TTA
aagtttaaaaataaacctgt

SEQ ID NO: 67312 - DNA, 20 bp, Artificial Sequence
  Description of Artificial Sequence: Synthetic oligonucleotide
  Target: ATXN2; (-) strand; PAM type: YTN; PAM sequence: CTA
aaaagaatgtgatgttaaag

SEQ ID NO: 67313 - DNA, 20 bp, Artificial Sequence
  Description of Artificial Sequence: Synthetic oligonucleotide
  Target: ATXN2; (-) strand; PAM type: YTN; PAM sequence: CTC
atactaaaaagaatgtgatg

SEQ ID NO: 67314 - DNA, 20 bp, Artificial Sequence
  Description of Artificial Sequence: Synthetic oligonucleotide
  Target: ATXN2; (-) strand; PAM type: YTN; PAM sequence: CTA
tcatctcatactaaaaagaa

SEQ ID NO: 67315 - DNA, 20 bp, Artificial Sequence
  Description of Artificial Sequence: Synthetic oligonucleotide
  Target: ATXN2; (-) strand; PAM type: YTN; PAM sequence: TTC
tatcatctcatactaaaaag

SEQ ID NO: 67316 - DNA, 20 bp, Artificial Sequence
  Description of Artificial Sequence: Synthetic oligonucleotide
  Target: ATXN2; (-) strand; PAM type: YTN; PAM sequence: TTT
ctatcatctcatactaaaaa

SEQ ID NO: 67317 - DNA, 20 bp, Artificial Sequence
  Description of Artificial Sequence: Synthetic oligonucleotide
  Target: ATXN2; (-) strand; PAM type: YTN; PAM sequence: CTA
atttctatcatctcatacta

SEQ ID NO: 67318 - DNA, 20 bp, Artificial Sequence
  Description of Artificial Sequence: Synthetic oligonucleotide
  Target: ATXN2; (-) strand; PAM type: YTN; PAM sequence: TTC
taatttctatcatctcatac

SEQ ID NO: 67319 - DNA, 20 bp, Artificial Sequence
  Description of Artificial Sequence: Synthetic oligonucleotide
  Target: ATXN2; (-) strand; PAM type: YTN; PAM sequence: TTA
ttctaatttctatcatctca

SEQ ID NO: 67320 - DNA, 20 bp, Artificial Sequence
  Description of Artificial Sequence: Synthetic oligonucleotide
  Target: ATXN2; (-) strand; PAM type: YTN; PAM sequence: CTT
attctaatttctatcatctc

SEQ ID NO: 67321 - DNA, 20 bp, Artificial Sequence
  Description of Artificial Sequence: Synthetic oligonucleotide
  Target: ATXN2; (-) strand; PAM type: YTN; PAM sequence: TTA
tatcttattctaatttctat

SEQ ID NO: 67322 - DNA, 20 bp, Artificial Sequence
  Description of Artificial Sequence: Synthetic oligonucleotide
  Target: ATXN2; (-) strand; PAM type: YTN; PAM sequence: CTT
atatcttattctaatttcta

SEQ ID NO: 67323 - DNA, 20 bp, Artificial Sequence
  Description of Artificial Sequence: Synthetic oligonucleotide
  Target: ATXN2; (-) strand; PAM type: YTN; PAM sequence: CTG
atcttatatcttattctaat

SEQ ID NO: 67324 - DNA, 20 bp, Artificial Sequence
  Description of Artificial Sequence: Synthetic oligonucleotide
  Target: ATXN2; (-) strand; PAM type: YTN; PAM sequence: TTC
tgatcttatatcttattcta

SEQ ID NO: 67325 - DNA, 20 bp, Artificial Sequence
  Description of Artificial Sequence: Synthetic oligonucleotide
  Target: ATXN2; (-) strand; PAM type: YTN; PAM sequence: TTT
ctgatcttatatcttattct

SEQ ID NO: 67326 - DNA, 20 bp, Artificial Sequence
  Description of Artificial Sequence: Synthetic oligonucleotide
  Target: ATXN2; (-) strand; PAM type: YTN; PAM sequence: TTT
tctgatcttatatcttattc

SEQ ID NO: 67327 - DNA, 20 bp, Artificial Sequence
  Description of Artificial Sequence: Synthetic oligonucleotide
  Target: ATXN2; (-) strand; PAM type: YTN; PAM sequence: TTA
ttttctgatcttatatctta

SEQ ID NO: 67328 - DNA, 20 bp, Artificial Sequence
  Description of Artificial Sequence: Synthetic oligonucleotide
  Target: ATXN2; (-) strand; PAM type: YTN; PAM sequence: TTG
aaattattttctgatcttat

SEQ ID NO: 67329 - DNA, 20 bp, Artificial Sequence
  Description of Artificial Sequence: Synthetic oligonucleotide
  Target: ATXN2; (-) strand; PAM type: YTN; PAM sequence: TTT
gaaattattttctgatctta

SEQ ID NO: 67330 - DNA, 20 bp, Artificial Sequence
  Description of Artificial Sequence: Synthetic oligonucleotide
  Target: ATXN2; (-) strand; PAM type: YTN; PAM sequence: TTA
atatttgaaattattttctg

SEQ ID NO: 67331 - DNA, 20 bp, Artificial Sequence
  Description of Artificial Sequence: Synthetic oligonucleotide
  Target: ATXN2; (-) strand; PAM type: YTN; PAM sequence: TTT
aatatttgaaattattttct

SEQ ID NO: 67332 - DNA, 20 bp, Artificial Sequence
  Description of Artificial Sequence: Synthetic oligonucleotide
  Target: ATXN2; (-) strand; PAM type: YTN; PAM sequence: TTC
caaaatccaaatttaatatt

SEQ ID NO: 67333 - DNA, 20 bp, Artificial Sequence
  Description of Artificial Sequence: Synthetic oligonucleotide
  Target: ATXN2; (-) strand; PAM type: YTN; PAM sequence: TTG
acaaattccaaaatccaaat

SEQ ID NO: 67334 - DNA, 20 bp, Artificial Sequence
  Description of Artificial Sequence: Synthetic oligonucleotide
  Target: ATXN2; (-) strand; PAM type: YTN; PAM sequence: CTT
gacaaattccaaaatccaaa

SEQ ID NO: 67335 - DNA, 20 bp, Artificial Sequence
  Description of Artificial Sequence: Synthetic oligonucleotide
  Target: ATXN2; (-) strand; PAM type: YTN; PAM sequence: TTG
cttgacaaattccaaaatcc

SEQ ID NO: 67336 - DNA, 20 bp, Artificial Sequence
  Description of Artificial Sequence: Synthetic oligonucleotide
  Target: ATXN2; (-) strand; PAM type: YTN; PAM sequence: TTG
tgatagataaatgtattgct

SEQ ID NO: 67337 - DNA, 20 bp, Artificial Sequence
  Description of Artificial Sequence: Synthetic oligonucleotide
  Target: ATXN2; (-) strand; PAM type: YTN; PAM sequence: CTA
ttgtgatagataaatgtatt

SEQ ID NO: 67338 - DNA, 20 bp, Artificial Sequence
  Description of Artificial Sequence: Synthetic oligonucleotide
  Target: ATXN2; (-) strand; PAM type: YTN; PAM sequence: TTA
ctattgtgatagataaatgt

SEQ ID NO: 67339 - DNA, 20 bp, Artificial Sequence
  Description of Artificial Sequence: Synthetic oligonucleotide
  Target: ATXN2; (-) strand; PAM type: YTN; PAM sequence: CTT
actattgtgatagataaatg

SEQ ID NO: 67340 - DNA, 20 bp, Artificial Sequence
  Description of Artificial Sequence: Synthetic oligonucleotide
  Target: ATXN2; (-) strand; PAM type: YTN; PAM sequence: TTC
ttactattgtgatagataaa

SEQ ID NO: 67341 - DNA, 20 bp, Artificial Sequence
  Description of Artificial Sequence: Synthetic oligonucleotide
  Target: ATXN2; (-) strand; PAM type: YTN; PAM sequence: CTT
cttactattgtgatagataa

SEQ ID NO: 67342 - DNA, 20 bp, Artificial Sequence
  Description of Artificial Sequence: Synthetic oligonucleotide
  Target: ATXN2; (-) strand; PAM type: YTN; PAM sequence: TTC
ttcttactattgtgatagat

SEQ ID NO: 67343 - DNA, 20 bp, Artificial Sequence
  Description of Artificial Sequence: Synthetic oligonucleotide
  Target: ATXN2; (-) strand; PAM type: YTN; PAM sequence: TTT
cttcttactattgtgataga

SEQ ID NO: 67344 - DNA, 20 bp, Artificial Sequence
  Description of Artificial Sequence: Synthetic oligonucleotide
  Target: ATXN2; (-) strand; PAM type: YTN; PAM sequence: TTC
aacatttcttcttactattg

SEQ ID NO: 67345 - DNA, 20 bp, Artificial Sequence
  Description of Artificial Sequence: Synthetic oligonucleotide
  Target: ATXN2; (-) strand; PAM type: YTN; PAM sequence: TTG
ttcaacatttcttcttacta

SEQ ID NO: 67346 - DNA, 20 bp, Artificial Sequence
  Description of Artificial Sequence: Synthetic oligonucleotide
  Target: ATXN2; (-) strand; PAM type: YTN; PAM sequence: TTT
gttcaacatttcttcttact

SEQ ID NO: 67347 - DNA, 20 bp, Artificial Sequence
  Description of Artificial Sequence: Synthetic oligonucleotide
  Target: ATXN2; (-) strand; PAM type: YTN; PAM sequence: TTT
tgttcaacatttcttcttac

SEQ ID NO: 67348 - DNA, 20 bp, Artificial Sequence
  Description of Artificial Sequence: Synthetic oligonucleotide
  Target: ATXN2; (-) strand; PAM type: YTN; PAM sequence: TTT
ttgttcaacatttcttctta

SEQ ID NO: 67349 - DNA, 20 bp, Artificial Sequence
  Description of Artificial Sequence: Synthetic oligonucleotide
  Target: ATXN2; (-) strand; PAM type: YTN; PAM sequence: TTC
atgcccatacagaatatttt

SEQ ID NO: 67350 - DNA, 20 bp, Artificial Sequence
  Description of Artificial Sequence: Synthetic oligonucleotide
  Target: ATXN2; (-) strand; PAM type: YTN; PAM sequence: TTT
catgcccatacagaatattt

SEQ ID NO: 67351 - DNA, 20 bp, Artificial Sequence
  Description of Artificial Sequence: Synthetic oligonucleotide
  Target: ATXN2; (-) strand; PAM type: YTN; PAM sequence: CTA
atttcatgcccatacagaat

SEQ ID NO: 67352 - DNA, 20 bp, Artificial Sequence
  Description of Artificial Sequence: Synthetic oligonucleotide
  Target: ATXN2; (-) strand; PAM type: YTN; PAM sequence: CTG
taggaataggaagaagtatg

SEQ ID NO: 67353 - DNA, 20 bp, Artificial Sequence
  Description of Artificial Sequence: Synthetic oligonucleotide
  Target: ATXN2; (-) strand; PAM type: YTN; PAM sequence: TTA
actgtaggaataggaagaag

SEQ ID NO: 67354 - DNA, 20 bp, Artificial Sequence
  Description of Artificial Sequence: Synthetic oligonucleotide
  Target: ATXN2; (-) strand; PAM type: YTN; PAM sequence: CTT
aactgtaggaataggaagaa

SEQ ID NO: 67355 - DNA, 20 bp, Artificial Sequence
  Description of Artificial Sequence: Synthetic oligonucleotide
  Target: ATXN2; (-) strand; PAM type: YTN; PAM sequence: TTA
agcttaactgtaggaatagg

SEQ ID NO: 67356 - DNA, 20 bp, Artificial Sequence
  Description of Artificial Sequence: Synthetic oligonucleotide
  Target: ATXN2; (-) strand; PAM type: YTN; PAM sequence: TTA
aagagtcattaagcttaact

SEQ ID NO: 67357 - DNA, 20 bp, Artificial Sequence
  Description of Artificial Sequence: Synthetic oligonucleotide
  Target: ATXN2; (-) strand; PAM type: YTN; PAM sequence: TTT
aaagagtcattaagcttaac

SEQ ID NO: 67358 - DNA, 20 bp, Artificial Sequence
  Description of Artificial Sequence: Synthetic oligonucleotide
  Target: ATXN2; (-) strand; PAM type: YTN; PAM sequence: TTA
gagtttaaagagtcattaag

SEQ ID NO: 67359 - DNA, 20 bp, Artificial Sequence
  Description of Artificial Sequence: Synthetic oligonucleotide
  Target: ATXN2; (-) strand; PAM type: YTN; PAM sequence: CTG
aaaacaaaggttagagttta

SEQ ID NO: 67360 - DNA, 20 bp, Artificial Sequence
  Description of Artificial Sequence: Synthetic oligonucleotide
  Target: ATXN2; (-) strand; PAM type: YTN; PAM sequence: CTC
aaaagctgaaaacaaaggtt

SEQ ID NO: 67361 - DNA, 20 bp, Artificial Sequence
  Description of Artificial Sequence: Synthetic oligonucleotide
  Target: ATXN2; (-) strand; PAM type: YTN; PAM sequence: TTC
tcaaaagctgaaaacaaagg

SEQ ID NO: 67362 - DNA, 20 bp, Artificial Sequence
  Description of Artificial Sequence: Synthetic oligonucleotide
  Target: ATXN2; (-) strand; PAM type: YTN; PAM sequence: CTT
ctcaaaagctgaaaacaaag

SEQ ID NO: 67363 - DNA, 20 bp, Artificial Sequence
  Description of Artificial Sequence: Synthetic oligonucleotide
  Target: ATXN2; (-) strand; PAM type: YTN; PAM sequence: CTA
gcttctcaaaagctgaaaac

SEQ ID NO: 67364 - DNA, 20 bp, Artificial Sequence
  Description of Artificial Sequence: Synthetic oligonucleotide
  Target: ATXN2; (-) strand; PAM type: YTN; PAM sequence: TTA
aacccaatgaaacatcacct

SEQ ID NO: 67365 - DNA, 20 bp, Artificial Sequence
  Description of Artificial Sequence: Synthetic oligonucleotide
  Target: ATXN2; (-) strand; PAM type: YTN; PAM sequence: CTG
cagggaataaagaaaatatt

SEQ ID NO: 67366 - DNA, 20 bp, Artificial Sequence
  Description of Artificial Sequence: Synthetic oligonucleotide
  Target: ATXN2; (-) strand; PAM type: YTN; PAM sequence: CTC
ctgcagggaataaagaaaat

SEQ ID NO: 67367 - DNA, 20 bp, Artificial Sequence
  Description of Artificial Sequence: Synthetic oligonucleotide
  Target: ATXN2; (-) strand; PAM type: YTN; PAM sequence: CTC
tcctgcagggaataaagaaa

SEQ ID NO: 67368 - DNA, 20 bp, Artificial Sequence
  Description of Artificial Sequence: Synthetic oligonucleotide
  Target: ATXN2; (-) strand; PAM type: YTN; PAM sequence: TTC
aagatcagaggcagaactct

SEQ ID NO: 67369 - DNA, 20 bp, Artificial Sequence
  Description of Artificial Sequence: Synthetic oligonucleotide
  Target: ATXN2; (-) strand; PAM type: YTN; PAM sequence: CTT
caagatcagaggcagaactc

SEQ ID NO: 67370 - DNA, 20 bp, Artificial Sequence
  Description of Artificial Sequence: Synthetic oligonucleotide
  Target: ATXN2; (-) strand; PAM type: YTN; PAM sequence: TTC
caggcttcaagatcagaggc

SEQ ID NO: 67371 - DNA, 20 bp, Artificial Sequence
  Description of Artificial Sequence: Synthetic oligonucleotide
  Target: ATXN2; (-) strand; PAM type: YTN; PAM sequence: CTA
aagattccaggcttcaagat

SEQ ID NO: 67372 - DNA, 20 bp, Artificial Sequence
  Description of Artificial Sequence: Synthetic oligonucleotide
  Target: ATXN2; (-) strand; PAM type: YTN; PAM sequence: CTA
gctaaagattccaggcttca

SEQ ID NO: 67373 - DNA, 20 bp, Artificial Sequence
  Description of Artificial Sequence: Synthetic oligonucleotide
  Target: ATXN2; (-) strand; PAM type: YTN; PAM sequence: TTC
tagctaaagattccaggctt

SEQ ID NO: 67374 - DNA, 20 bp, Artificial Sequence
  Description of Artificial Sequence: Synthetic oligonucleotide
  Target: ATXN2; (-) strand; PAM type: YTN; PAM sequence: TTT
ctagctaaagattccaggct

SEQ ID NO: 67375 - DNA, 20 bp, Artificial Sequence
  Description of Artificial Sequence: Synthetic oligonucleotide
  Target: ATXN2; (-) strand; PAM type: YTN; PAM sequence: TTT
tctagctaaagattccaggc

SEQ ID NO: 67376 - DNA, 20 bp, Artificial Sequence
  Description of Artificial Sequence: Synthetic oligonucleotide
  Target: ATXN2; (-) strand; PAM type: YTN; PAM sequence: TTG
ttttctagctaaagattcca

SEQ ID NO: 67377 - DNA, 20 bp, Artificial Sequence
  Description of Artificial Sequence: Synthetic oligonucleotide
  Target: ATXN2; (-) strand; PAM type: YTN; PAM sequence: TTA
aaaaattgttttctagctaa

SEQ ID NO: 67378 - DNA, 20 bp, Artificial Sequence
  Description of Artificial Sequence: Synthetic oligonucleotide
  Target: ATXN2; (-) strand; PAM type: YTN; PAM sequence: TTT
aaaaaattgttttctagcta

SEQ ID NO: 67379 - DNA, 20 bp, Artificial Sequence
  Description of Artificial Sequence: Synthetic oligonucleotide
  Target: ATXN2; (-) strand; PAM type: YTN; PAM sequence: TTT
taaaaaattgttttctagct

SEQ ID NO: 67380 - DNA, 20 bp, Artificial Sequence
  Description of Artificial Sequence: Synthetic oligonucleotide
  Target: ATXN2; (-) strand; PAM type: YTN; PAM sequence: TTT
ttaaaaaattgttttctagc

SEQ ID NO: 67381 - DNA, 20 bp, Artificial Sequence
  Description of Artificial Sequence: Synthetic oligonucleotide
  Target: ATXN2; (-) strand; PAM type: YTN; PAM sequence: TTT
tttaaaaaattgttttctag

SEQ ID NO: 67382 - DNA, 20 bp, Artificial Sequence
  Description of Artificial Sequence: Synthetic oligonucleotide
  Target: ATXN2; (-) strand; PAM type: YTN; PAM sequence: TTT
ttttaaaaaattgttttcta

SEQ ID NO: 67383 - DNA, 20 bp, Artificial Sequence
  Description of Artificial Sequence: Synthetic oligonucleotide
  Target: ATXN2; (-) strand; PAM type: YTN; PAM sequence: TTT
tttttaaaaaattgttttct

SEQ ID NO: 67384 - DNA, 20 bp, Artificial Sequence
  Description of Artificial Sequence: Synthetic oligonucleotide
  Target: ATXN2; (-) strand; PAM type: YTN; PAM sequence: CTG
aattttttttaaaaaattgt

SEQ ID NO: 67385 - DNA, 20 bp, Artificial Sequence
  Description of Artificial Sequence: Synthetic oligonucleotide
  Target: ATXN2; (-) strand; PAM type: YTN; PAM sequence: TTA
tctgaattttttttaaaaaa

SEQ ID NO: 67386 - DNA, 20 bp, Artificial Sequence
  Description of Artificial Sequence: Synthetic oligonucleotide
  Target: ATXN2; (-) strand; PAM type: YTN; PAM sequence: CTT
atctgaattttttttaaaaa

SEQ ID NO: 67387 - DNA, 20 bp, Artificial Sequence
  Description of Artificial Sequence: Synthetic oligonucleotide
  Target: ATXN2; (-) strand; PAM type: YTN; PAM sequence: CTA
acttatctgaatttttttta

SEQ ID NO: 67388 - DNA, 20 bp, Artificial Sequence
  Description of Artificial Sequence: Synthetic oligonucleotide
  Target: ATXN2; (-) strand; PAM type: YTN; PAM sequence: TTC
taacttatctgaattttttt

SEQ ID NO: 67389 - DNA, 20 bp, Artificial Sequence
  Description of Artificial Sequence: Synthetic oligonucleotide
  Target: ATXN2; (-) strand; PAM type: YTN; PAM sequence: TTT
ctaacttatctgaatttttt

SEQ ID NO: 67390 - DNA, 20 bp, Artificial Sequence
  Description of Artificial Sequence: Synthetic oligonucleotide
  Target: ATXN2; (-) strand; PAM type: YTN; PAM sequence: TTT
tctaacttatctgaattttt

SEQ ID NO: 67391 - DNA, 20 bp, Artificial Sequence
  Description of Artificial Sequence: Synthetic oligonucleotide
  Target: ATXN2; (-) strand; PAM type: YTN; PAM sequence: CTT
ttctaacttatctgaatttt

SEQ ID NO: 67392 - DNA, 20 bp, Artificial Sequence
  Description of Artificial Sequence: Synthetic oligonucleotide
  Target: ATXN2; (-) strand; PAM type: YTN; PAM sequence: TTG
cttttctaacttatctgaat

SEQ ID NO: 67393 - DNA, 20 bp, Artificial Sequence
  Description of Artificial Sequence: Synthetic oligonucleotide
  Target: ATXN2; (-) strand; PAM type: YTN; PAM sequence: TTT
gcttttctaacttatctgaa

SEQ ID NO: 67394 - DNA, 20 bp, Artificial Sequence
  Description of Artificial Sequence: Synthetic oligonucleotide
  Target: ATXN2; (-) strand; PAM type: YTN; PAM sequence: TTT
tgcttttctaacttatctga

SEQ ID NO: 67395 - DNA, 20 bp, Artificial Sequence
  Description of Artificial Sequence: Synthetic oligonucleotide
  Target: ATXN2; (-) strand; PAM type: YTN; PAM sequence: TTG
ttttgcttttctaacttatc

SEQ ID NO: 67396 - DNA, 20 bp, Artificial Sequence
  Description of Artificial Sequence: Synthetic oligonucleotide
  Target: ATXN2; (-) strand; PAM type: YTN; PAM sequence: CTT
gttttgcttttctaacttat

SEQ ID NO: 67397 - DNA, 20 bp, Artificial Sequence
  Description of Artificial Sequence: Synthetic oligonucleotide
  Target: ATXN2; (-) strand; PAM type: YTN; PAM sequence: TTC
ttgttttgcttttctaactt

SEQ ID NO: 67398 - DNA, 20 bp, Artificial Sequence
  Description of Artificial Sequence: Synthetic oligonucleotide
  Target: ATXN2; (-) strand; PAM type: YTN; PAM sequence: TTT
cttgttttgcttttctaact

SEQ ID NO: 67399 - DNA, 20 bp, Artificial Sequence
  Description of Artificial Sequence: Synthetic oligonucleotide
  Target: ATXN2; (-) strand; PAM type: YTN; PAM sequence: TTT
tcttgttttgcttttctaac

SEQ ID NO: 67400 - DNA, 20 bp, Artificial Sequence
  Description of Artificial Sequence: Synthetic oligonucleotide
  Target: ATXN2; (-) strand; PAM type: YTN; PAM sequence: TTC
agtgttttcttgttttgctt

SEQ ID NO: 67401 - DNA, 20 bp, Artificial Sequence
  Description of Artificial Sequence: Synthetic oligonucleotide
  Target: ATXN2; (-) strand; PAM type: YTN; PAM sequence: TTG
ttcagtgttttcttgttttg

SEQ ID NO: 67402 - DNA, 20 bp, Artificial Sequence
  Description of Artificial Sequence: Synthetic oligonucleotide
  Target: ATXN2; (-) strand; PAM type: YTN; PAM sequence: TTA
ttgttcagtgttttcttgtt

SEQ ID NO: 67403 - DNA, 20 bp, Artificial Sequence
  Description of Artificial Sequence: Synthetic oligonucleotide
  Target: ATXN2; (-) strand; PAM type: YTN; PAM sequence: TTC
caaaaacataggaaatcaaa

SEQ ID NO: 67404 - DNA, 20 bp, Artificial Sequence
  Description of Artificial Sequence: Synthetic oligonucleotide
  Target: ATXN2; (-) strand; PAM type: YTN; PAM sequence: TTT
ccaaaaacataggaaatcaa

SEQ ID NO: 67405 - DNA, 20 bp, Artificial Sequence
  Description of Artificial Sequence: Synthetic oligonucleotide
  Target: ATXN2; (-) strand; PAM type: YTN; PAM sequence: TTT
tccaaaaacataggaaatca

SEQ ID NO: 67406 - DNA, 20 bp, Artificial Sequence
  Description of Artificial Sequence: Synthetic oligonucleotide
  Target: ATXN2; (-) strand; PAM type: YTN; PAM sequence: TTA
ttttccaaaaacataggaaa

SEQ ID NO: 67407 - DNA, 20 bp, Artificial Sequence
  Description of Artificial Sequence: Synthetic oligonucleotide
  Target: ATXN2; (-) strand; PAM type: YTN; PAM sequence: TTA
aatgaaagcattattttcca

SEQ ID NO: 67408 - DNA, 20 bp, Artificial Sequence
  Description of Artificial Sequence: Synthetic oligonucleotide
  Target: ATXN2; (-) strand; PAM type: YTN; PAM sequence: TTT
aaatgaaagcattattttcc

SEQ ID NO: 67409 - DNA, 20 bp, Artificial Sequence
  Description of Artificial Sequence: Synthetic oligonucleotide
  Target: ATXN2; (-) strand; PAM type: YTN; PAM sequence: CTG
tttaaatgaaagcattattt

SEQ ID NO: 67410 - DNA, 20 bp, Artificial Sequence
  Description of Artificial Sequence: Synthetic oligonucleotide
  Target: ATXN2; (-) strand; PAM type: YTN; PAM sequence: CTC
tgtttaaatgaaagcattat

SEQ ID NO: 67411 - DNA, 20 bp, Artificial Sequence
  Description of Artificial Sequence: Synthetic oligonucleotide
  Target: ATXN2; (-) strand; PAM type: YTN; PAM sequence: CTG
caaaggaaaaaaagcctctg

SEQ ID NO: 67412 - DNA, 20 bp, Artificial Sequence
  Description of Artificial Sequence: Synthetic oligonucleotide
  Target: ATXN2; (-) strand; PAM type: YTN; PAM sequence: TTC
atatgacatctgcaaaggaa

SEQ ID NO: 67413 - DNA, 20 bp, Artificial Sequence
  Description of Artificial Sequence: Synthetic oligonucleotide
  Target: ATXN2; (-) strand; PAM type: YTN; PAM sequence: TTT
catatgacatctgcaaagga

SEQ ID NO: 67414 - DNA, 20 bp, Artificial Sequence
  Description of Artificial Sequence: Synthetic oligonucleotide
  Target: ATXN2; (-) strand; PAM type: YTN; PAM sequence: TTG
gtgtttcatatgacatctgc

SEQ ID NO: 67415 - DNA, 20 bp, Artificial Sequence
  Description of Artificial Sequence: Synthetic oligonucleotide
  Target: ATXN2; (-) strand; PAM type: YTN; PAM sequence: TTA
ttggtgtttcatatgacatc

SEQ ID NO: 67416 - DNA, 20 bp, Artificial Sequence
  Description of Artificial Sequence: Synthetic oligonucleotide
  Target: ATXN2; (-) strand; PAM type: YTN; PAM sequence: CTA
cataaataaaattattggtg

SEQ ID NO: 67417 - DNA, 20 bp, Artificial Sequence
  Description of Artificial Sequence: Synthetic oligonucleotide
  Target: ATXN2; (-) strand; PAM type: YTN; PAM sequence: CTG
ggtgtcaaatacctacataa

SEQ ID NO: 67418 - DNA, 20 bp, Artificial Sequence
  Description of Artificial Sequence: Synthetic oligonucleotide
  Target: ATXN2; (-) strand; PAM type: YTN; PAM sequence: TTC
ctgggtgtcaaatacctaca

SEQ ID NO: 67419 - DNA, 20 bp, Artificial Sequence
  Description of Artificial Sequence: Synthetic oligonucleotide
  Target: ATXN2; (-) strand; PAM type: YTN; PAM sequence: TTA
acattcctgggtgtcaaata

SEQ ID NO: 67420 - DNA, 20 bp, Artificial Sequence
  Description of Artificial Sequence: Synthetic oligonucleotide
  Target: ATXN2; (-) strand; PAM type: YTN; PAM sequence: TTA
caaaggttaacattcctggg

SEQ ID NO: 67421 - DNA, 20 bp, Artificial Sequence
  Description of Artificial Sequence: Synthetic oligonucleotide
  Target: ATXN2; (-) strand; PAM type: YTN; PAM sequence: CTG
tgttacaaaggttaacattc

SEQ ID NO: 67422 - DNA, 20 bp, Artificial Sequence
  Description of Artificial Sequence: Synthetic oligonucleotide
  Target: ATXN2; (-) strand; PAM type: YTN; PAM sequence: TTA
atatagtgtctgtgttacaa

SEQ ID NO: 67423 - DNA, 20 bp, Artificial Sequence
  Description of Artificial Sequence: Synthetic oligonucleotide
  Target: ATXN2; (-) strand; PAM type: YTN; PAM sequence: TTT
aatatagtgtctgtgttaca

SEQ ID NO: 67424 - DNA, 20 bp, Artificial Sequence
  Description of Artificial Sequence: Synthetic oligonucleotide
  Target: ATXN2; (-) strand; PAM type: YTN; PAM sequence: CTA
atttaatatagtgtctgtgt

SEQ ID NO: 67425 - DNA, 20 bp, Artificial Sequence
  Description of Artificial Sequence: Synthetic oligonucleotide
  Target: ATXN2; (-) strand; PAM type: YTN; PAM sequence: CTA
ctaatttaatatagtgtctg

SEQ ID NO: 67426 - DNA, 20 bp, Artificial Sequence
  Description of Artificial Sequence: Synthetic oligonucleotide
  Target: ATXN2; (-) strand; PAM type: YTN; PAM sequence: TTA
atactactaatttaatatag

SEQ ID NO: 67427 - DNA, 20 bp, Artificial Sequence
  Description of Artificial Sequence: Synthetic oligonucleotide
  Target: ATXN2; (-) strand; PAM type: YTN; PAM sequence: TTT
aatactactaatttaatata

SEQ ID NO: 67428 - DNA, 20 bp, Artificial Sequence
  Description of Artificial Sequence: Synthetic oligonucleotide
  Target: ATXN2; (-) strand; PAM type: YTN; PAM sequence: TTG
tttaatactactaatttaat

SEQ ID NO: 67429 - DNA, 20 bp, Artificial Sequence
  Description of Artificial Sequence: Synthetic oligonucleotide
  Target: ATXN2; (-) strand; PAM type: YTN; PAM sequence: TTG
atgttgtttaatactactaa

SEQ ID NO: 67430 - DNA, 20 bp, Artificial Sequence
  Description of Artificial Sequence: Synthetic oligonucleotide
  Target: ATXN2; (-) strand; PAM type: YTN; PAM sequence: TTT
gatgttgtttaatactacta

SEQ ID NO: 67431 - DNA, 20 bp, Artificial Sequence
  Description of Artificial Sequence: Synthetic oligonucleotide
  Target: ATXN2; (-) strand; PAM type: YTN; PAM sequence: TTT
tgatgttgtttaatactact

SEQ ID NO: 67432 - DNA, 20 bp, Artificial Sequence
  Description of Artificial Sequence: Synthetic oligonucleotide
  Target: ATXN2; (-) strand; PAM type: YTN; PAM sequence: TTA
tgtaaattttgatgttgttt

SEQ ID NO: 67433 - DNA, 20 bp, Artificial Sequence
  Description of Artificial Sequence: Synthetic oligonucleotide
  Target: ATXN2; (-) strand; PAM type: YTN; PAM sequence: TTT
atgtaaattttgatgttgtt

SEQ ID NO: 67434 - DNA, 20 bp, Artificial Sequence
  Description of Artificial Sequence: Synthetic oligonucleotide
  Target: ATXN2; (-) strand; PAM type: YTN; PAM sequence: TTA
aaagtttatgtaaattttga

SEQ ID NO: 67435 - DNA, 20 bp, Artificial Sequence
  Description of Artificial Sequence: Synthetic oligonucleotide
  Target: ATXN2; (-) strand; PAM type: YTN; PAM sequence: TTT
aaaagtttatgtaaattttg

SEQ ID NO: 67436 - DNA, 20 bp, Artificial Sequence
  Description of Artificial Sequence: Synthetic oligonucleotide
  Target: ATXN2; (-) strand; PAM type: YTN; PAM sequence: TTA
gtgcacatttaaaagtttat

SEQ ID NO: 67437 - DNA, 20 bp, Artificial Sequence
  Description of Artificial Sequence: Synthetic oligonucleotide
  Target: ATXN2; (-) strand; PAM type: YTN; PAM sequence: TTT
agtgcacatttaaaagttta

SEQ ID NO: 67438 - DNA, 20 bp, Artificial Sequence
  Description of Artificial Sequence: Synthetic oligonucleotide
  Target: ATXN2; (-) strand; PAM type: YTN; PAM sequence: TTT
tagtgcacatttaaaagttt

SEQ ID NO: 67439 - DNA, 20 bp, Artificial Sequence
  Description of Artificial Sequence: Synthetic oligonucleotide
  Target: ATXN2; (-) strand; PAM type: YTN; PAM sequence: TTT
ttagtgcacatttaaaagtt

SEQ ID NO: 67440 - DNA, 20 bp, Artificial Sequence
  Description of Artificial Sequence: Synthetic oligonucleotide
  Target: ATXN2; (-) strand; PAM type: YTN; PAM sequence: TTC
atagacaagtatttttagtg

SEQ ID NO: 67441 - DNA, 20 bp, Artificial Sequence
  Description of Artificial Sequence: Synthetic oligonucleotide
  Target: ATXN2; (-) strand; PAM type: YTN; PAM sequence: TTA
ttcatagacaagtattttta

SEQ ID NO: 67442 - DNA, 20 bp, Artificial Sequence
  Description of Artificial Sequence: Synthetic oligonucleotide
  Target: ATXN2; (-) strand; PAM type: YTN; PAM sequence: TTT
attcatagacaagtattttt

SEQ ID NO: 67443 - DNA, 20 bp, Artificial Sequence
  Description of Artificial Sequence: Synthetic oligonucleotide
  Target: ATXN2; (-) strand; PAM type: YTN; PAM sequence: TTT
tattcatagacaagtatttt

SEQ ID NO: 67444 - DNA, 20 bp, Artificial Sequence
  Description of Artificial Sequence: Synthetic oligonucleotide
  Target: ATXN2; (-) strand; PAM type: YTN; PAM sequence: TTT
ttattcatagacaagtattt

SEQ ID NO: 67445 - DNA, 20 bp, Artificial Sequence
  Description of Artificial Sequence: Synthetic oligonucleotide
  Target: ATXN2; (-) strand; PAM type: YTN; PAM sequence: TTA
tttttattcatagacaagta

SEQ ID NO: 67446 - DNA, 20 bp, Artificial Sequence
  Description of Artificial Sequence: Synthetic oligonucleotide
  Target: ATXN2; (-) strand; PAM type: YTN; PAM sequence: CTA
ggttatttttattcatagac

SEQ ID NO: 67447 - DNA, 20 bp, Artificial Sequence
  Description of Artificial Sequence: Synthetic oligonucleotide
  Target: ATXN2; (-) strand; PAM type: YTN; PAM sequence: TTC
taggttatttttattcatag

SEQ ID NO: 67448 - DNA, 20 bp, Artificial Sequence
  Description of Artificial Sequence: Synthetic oligonucleotide
  Target: ATXN2; (-) strand; PAM type: YTN; PAM sequence: TTA
tatgaaaaaattctaggtta

SEQ ID NO: 67449 - DNA, 20 bp, Artificial Sequence
  Description of Artificial Sequence: Synthetic oligonucleotide
  Target: ATXN2; (-) strand; PAM type: YTN; PAM sequence: TTA
gagggtgatattatatgaaa

SEQ ID NO: 67450 - DNA, 20 bp, Artificial Sequence
  Description of Artificial Sequence: Synthetic oligonucleotide
  Target: ATXN2; (-) strand; PAM type: YTN; PAM sequence: TTG
aatgttagagggtgatatta

SEQ ID NO: 67451 - DNA, 20 bp, Artificial Sequence
  Description of Artificial Sequence: Synthetic oligonucleotide
  Target: ATXN2; (-) strand; PAM type: YTN; PAM sequence: CTG
tgaaattgaatgttagaggg

SEQ ID NO: 67452 - DNA, 20 bp, Artificial Sequence
  Description of Artificial Sequence: Synthetic oligonucleotide
  Target: ATXN2; (-) strand; PAM type: YTN; PAM sequence: CTC
agctgtgaaattgaatgtta

SEQ ID NO: 67453 - DNA, 20 bp, Artificial Sequence
  Description of Artificial Sequence: Synthetic oligonucleotide
  Target: ATXN2; (-) strand; PAM type: YTN; PAM sequence: CTG
gatccataatctcagctgtg

SEQ ID NO: 67454 - DNA, 20 bp, Artificial Sequence
  Description of Artificial Sequence: Synthetic oligonucleotide
  Target: ATXN2; (-) strand; PAM type: YTN; PAM sequence: TTC
tggatccataatctcagctg

SEQ ID NO: 67455 - DNA, 20 bp, Artificial Sequence
  Description of Artificial Sequence: Synthetic oligonucleotide
  Target: ATXN2; (-) strand; PAM type: YTN; PAM sequence: CTT
ctggatccataatctcagct

SEQ ID NO: 67456 - DNA, 20 bp, Artificial Sequence
  Description of Artificial Sequence: Synthetic oligonucleotide
  Target: ATXN2; (-) strand; PAM type: YTN; PAM sequence: CTA
gtgagggtatgtaacaaagg

SEQ ID NO: 67457 - DNA, 20 bp, Artificial Sequence
  Description of Artificial Sequence: Synthetic oligonucleotide
  Target: ATXN2; (-) strand; PAM type: YTN; PAM sequence: TTC
tagtgagggtatgtaacaaa

SEQ ID NO: 67458 - DNA, 20 bp, Artificial Sequence
  Description of Artificial Sequence: Synthetic oligonucleotide
  Target: ATXN2; (-) strand; PAM type: YTN; PAM sequence: CTT
ctagtgagggtatgtaacaa

SEQ ID NO: 67459 - DNA, 20 bp, Artificial Sequence
  Description of Artificial Sequence: Synthetic oligonucleotide
  Target: ATXN2; (-) strand; PAM type: YTN; PAM sequence: TTA
ccccttctagtgagggtatg

SEQ ID NO: 67460 - DNA, 20 bp, Artificial Sequence
  Description of Artificial Sequence: Synthetic oligonucleotide
  Target: ATXN2; (-) strand; PAM type: YTN; PAM sequence: CTG
ttaccccttctagtgagggt

SEQ ID NO: 67461 - DNA, 20 bp, Artificial Sequence
  Description of Artificial Sequence: Synthetic oligonucleotide
  Target: ATXN2; (-) strand; PAM type: YTN; PAM sequence: CTG
catcgaacagagctgttacc

SEQ ID NO: 67462 - DNA, 20 bp, Artificial Sequence
  Description of Artificial Sequence: Synthetic oligonucleotide
  Target: ATXN2; (-) strand; PAM type: YTN; PAM sequence: CTA
gtcctgcatcgaacagagct

SEQ ID NO: 67463 - DNA, 20 bp, Artificial Sequence
  Description of Artificial Sequence: Synthetic oligonucleotide
  Target: ATXN2; (-) strand; PAM type: YTN; PAM sequence: CTG
ctagtcctgcatcgaacaga

SEQ ID NO: 67464 - DNA, 20 bp, Artificial Sequence
  Description of Artificial Sequence: Synthetic oligonucleotide
  Target: ATXN2; (-) strand; PAM type: YTN; PAM sequence: CTA
cgcctgctagtcctgcatcg

SEQ ID NO: 67465 - DNA, 20 bp, Artificial Sequence
  Description of Artificial Sequence: Synthetic oligonucleotide
  Target: ATXN2; (-) strand; PAM type: YTN; PAM sequence: CTC
ctacgcctgctagtcctgca

SEQ ID NO: 67466 - DNA, 20 bp, Artificial Sequence
  Description of Artificial Sequence: Synthetic oligonucleotide
  Target: ATXN2; (-) strand; PAM type: YTN; PAM sequence: CTG
catctcctacgcctgctagt

SEQ ID NO: 67467 - DNA, 20 bp, Artificial Sequence
  Description of Artificial Sequence: Synthetic oligonucleotide
  Target: ATXN2; (-) strand; PAM type: YTN; PAM sequence: TTC
cagctgcatctcctacgcct

SEQ ID NO: 67468 - DNA, 20 bp, Artificial Sequence
  Description of Artificial Sequence: Synthetic oligonucleotide
  Target: ATXN2; (-) strand; PAM type: YTN; PAM sequence: CTA
ttccagctgcatctcctacg

SEQ ID NO: 67469 - DNA, 20 bp, Artificial Sequence
  Description of Artificial Sequence: Synthetic oligonucleotide
  Target: ATXN2; (-) strand; PAM type: YTN; PAM sequence: TTG
ccatgcctattccagctgca

SEQ ID NO: 67470 - DNA, 20 bp, Artificial Sequence
  Description of Artificial Sequence: Synthetic oligonucleotide
  Target: ATXN2; (-) strand; PAM type: YTN; PAM sequence: CTG
ttgccatgcctattccagct

SEQ ID NO: 67471 - DNA, 20 bp, Artificial Sequence
  Description of Artificial Sequence: Synthetic oligonucleotide
  Target: ATXN2; (-) strand; PAM type: YTN; PAM sequence: CTG
aagctgttgccatgcctatt

SEQ ID NO: 67472 - DNA, 20 bp, Artificial Sequence
  Description of Artificial Sequence: Synthetic oligonucleotide
  Target: ATXN2; (-) strand; PAM type: YTN; PAM sequence: TTC
caactgaagctgttgccatg

SEQ ID NO: 67473 - DNA, 20 bp, Artificial Sequence
  Description of Artificial Sequence: Synthetic oligonucleotide
  Target: ATXN2; (-) strand; PAM type: YTN; PAM sequence: TTA
ttccaactgaagctgttgcc

SEQ ID NO: 67474 - DNA, 20 bp, Artificial Sequence
  Description of Artificial Sequence: Synthetic oligonucleotide
  Target: ATXN2; (-) strand; PAM type: YTN; PAM sequence: CTG
gtattattccaactgaagct

SEQ ID NO: 67475 - DNA, 20 bp, Artificial Sequence
  Description of Artificial Sequence: Synthetic oligonucleotide
  Target: ATXN2; (-) strand; PAM type: YTN; PAM sequence: CTC
cccaagctggtattattcca

SEQ ID NO: 67476 - DNA, 20 bp, Artificial Sequence
  Description of Artificial Sequence: Synthetic oligonucleotide
  Target: ATXN2; (-) strand; PAM type: YTN; PAM sequence: TTC
tccccaagctggtattattc

SEQ ID NO: 67477 - DNA, 20 bp, Artificial Sequence
  Description of Artificial Sequence: Synthetic oligonucleotide
  Target: ATXN2; (-) strand; PAM type: YTN; PAM sequence: CTT
ctccccaagctggtattatt

SEQ ID NO: 67478 - DNA, 20 bp, Artificial Sequence
  Description of Artificial Sequence: Synthetic oligonucleotide
  Target: ATXN2; (-) strand; PAM type: YTN; PAM sequence: TTG
cttctccccaagctggtatt

SEQ ID NO: 67479 - DNA, 20 bp, Artificial Sequence
  Description of Artificial Sequence: Synthetic oligonucleotide
  Target: ATXN2; (-) strand; PAM type: YTN; PAM sequence: CTT
gcttctccccaagctggtat

SEQ ID NO: 67480 - DNA, 20 bp, Artificial Sequence
  Description of Artificial Sequence: Synthetic oligonucleotide
  Target: ATXN2; (-) strand; PAM type: YTN; PAM sequence: TTC
ttgcttctccccaagctggt

SEQ ID NO: 67481 - DNA, 20 bp, Artificial Sequence
  Description of Artificial Sequence: Synthetic oligonucleotide
  Target: ATXN2; (-) strand; PAM type: YTN; PAM sequence: TTG
gaaatacccccagtgggcca

SEQ ID NO: 67482 - DNA, 20 bp, Artificial Sequence
  Description of Artificial Sequence: Synthetic oligonucleotide
  Target: ATXN2; (-) strand; PAM type: YTN; PAM sequence: CTC
ccagacagaacagtattgga

SEQ ID NO: 67483 - DNA, 20 bp, Artificial Sequence
  Description of Artificial Sequence: Synthetic oligonucleotide
  Target: ATXN2; (-) strand; PAM type: YTN; PAM sequence: CTC
atagacccaggtctcccaga

SEQ ID NO: 67484 - DNA, 20 bp, Artificial Sequence
  Description of Artificial Sequence: Synthetic oligonucleotide
  Target: ATXN2; (-) strand; PAM type: YTN; PAM sequence: CTA
aaactcatagacccaggtct

SEQ ID NO: 67485 - DNA, 20 bp, Artificial Sequence
  Description of Artificial Sequence: Synthetic oligonucleotide
  Target: ATXN2; (-) strand; PAM type: YTN; PAM sequence: TTA
tcccctaaaactcatagacc

SEQ ID NO: 67486 - DNA, 20 bp, Artificial Sequence
  Description of Artificial Sequence: Synthetic oligonucleotide
  Target: ATXN2; (-) strand; PAM type: YTN; PAM sequence: TTC
caagattatcccctaaaact

SEQ ID NO: 67487 - DNA, 20 bp, Artificial Sequence
  Description of Artificial Sequence: Synthetic oligonucleotide
  Target: ATXN2; (-) strand; PAM type: YTN; PAM sequence: CTA
gttccaagattatcccctaa

SEQ ID NO: 67488 - DNA, 20 bp, Artificial Sequence
  Description of Artificial Sequence: Synthetic oligonucleotide
  Target: ATXN2; (-) strand; PAM type: YTN; PAM sequence: TTC
tagttccaagattatcccct

SEQ ID NO: 67489 - DNA, 20 bp, Artificial Sequence
  Description of Artificial Sequence: Synthetic oligonucleotide
  Target: ATXN2; (-) strand; PAM type: YTN; PAM sequence: CTT
ctagttccaagattatcccc

SEQ ID NO: 67490 - DNA, 20 bp, Artificial Sequence
  Description of Artificial Sequence: Synthetic oligonucleotide
  Target: ATXN2; (-) strand; PAM type: YTN; PAM sequence: TTC
ttctagttccaagattatcc

SEQ ID NO: 67491 - DNA, 20 bp, Artificial Sequence
  Description of Artificial Sequence: Synthetic oligonucleotide
  Target: ATXN2; (-) strand; PAM type: YTN; PAM sequence: TTT
cttctagttccaagattatc

SEQ ID NO: 67492 - DNA, 20 bp, Artificial Sequence
  Description of Artificial Sequence: Synthetic oligonucleotide
  Target: ATXN2; (-) strand; PAM type: YTN; PAM sequence: CTT
tcttctagttccaagattat

SEQ ID NO: 67493 - DNA, 20 bp, Artificial Sequence
  Description of Artificial Sequence: Synthetic oligonucleotide
  Target: ATXN2; (-) strand; PAM type: YTN; PAM sequence: TTC
cctttcttctagttccaaga

SEQ ID NO: 67494 - DNA, 20 bp, Artificial Sequence
  Description of Artificial Sequence: Synthetic oligonucleotide
  Target: ATXN2; (-) strand; PAM type: YTN; PAM sequence: TTT
ccctttcttctagttccaag

SEQ ID NO: 67495 - DNA, 20 bp, Artificial Sequence
  Description of Artificial Sequence: Synthetic oligonucleotide
  Target: ATXN2; (-) strand; PAM type: YTN; PAM sequence: TTT
tccctttcttctagttccaa

SEQ ID NO: 67496 - DNA, 20 bp, Artificial Sequence
  Description of Artificial Sequence: Synthetic oligonucleotide
  Target: ATXN2; (-) strand; PAM type: YTN; PAM sequence: CTG
agaatgtaataaatacattt

SEQ ID NO: 67497 - DNA, 20 bp, Artificial Sequence
  Description of Artificial Sequence: Synthetic oligonucleotide
  Target: ATXN2; (-) strand; PAM type: YTN; PAM sequence: TTG
aactgagaatgtaataaata

SEQ ID NO: 67498 - DNA, 20 bp, Artificial Sequence
  Description of Artificial Sequence: Synthetic oligonucleotide
  Target: ATXN2; (-) strand; PAM type: YTN; PAM sequence: TTT
gaactgagaatgtaataaat

SEQ ID NO: 67499 - DNA, 20 bp, Artificial Sequence
  Description of Artificial Sequence: Synthetic oligonucleotide
  Target: ATXN2; (-) strand; PAM type: YTN; PAM sequence: TTA
ggaagtaacatttgaactga

SEQ ID NO: 67500 - DNA, 20 bp, Artificial Sequence
  Description of Artificial Sequence: Synthetic oligonucleotide
  Target: ATXN2; (-) strand; PAM type: YTN; PAM sequence: TTT
aggaagtaacatttgaactg

SEQ ID NO: 67501 - DNA, 20 bp, Artificial Sequence
  Description of Artificial Sequence: Synthetic oligonucleotide
  Target: ATXN2; (-) strand; PAM type: YTN; PAM sequence: TTT
taggaagtaacatttgaact

SEQ ID NO: 67502 - DNA, 20 bp, Artificial Sequence
  Description of Artificial Sequence: Synthetic oligonucleotide
  Target: ATXN2; (-) strand; PAM type: YTN; PAM sequence: CTT
ttaggaagtaacatttgaac

SEQ ID NO: 67503 - DNA, 20 bp, Artificial Sequence
  Description of Artificial Sequence: Synthetic oligonucleotide
  Target: ATXN2; (-) strand; PAM type: YTN; PAM sequence: CTC
ttttaggaagtaacatttga

SEQ ID NO: 67504 - DNA, 20 bp, Artificial Sequence
  Description of Artificial Sequence: Synthetic oligonucleotide
  Target: ATXN2; (-) strand; PAM type: YTN; PAM sequence: CTG
aagcctcttttaggaagtaa

SEQ ID NO: 67505 - DNA, 20 bp, Artificial Sequence
  Description of Artificial Sequence: Synthetic oligonucleotide
  Target: ATXN2; (-) strand; PAM type: YTN; PAM sequence: TTC
agagaagcctgaagcctctt

SEQ ID NO: 67506 - DNA, 20 bp, Artificial Sequence
  Description of Artificial Sequence: Synthetic oligonucleotide
  Target: ATXN2; (-) strand; PAM type: YTN; PAM sequence: CTT
cagagaagcctgaagcctct

SEQ ID NO: 67507 - DNA, 20 bp, Artificial Sequence
  Description of Artificial Sequence: Synthetic oligonucleotide
  Target: ATXN2; (-) strand; PAM type: YTN; PAM sequence: CTA
gatcttcagagaagcctgaa

SEQ ID NO: 67508 - DNA, 20 bp, Artificial Sequence
  Description of Artificial Sequence: Synthetic oligonucleotide
  Target: ATXN2; (-) strand; PAM type: YTN; PAM sequence: TTA
cctagatcttcagagaagcc

SEQ ID NO: 67509 - DNA, 20 bp, Artificial Sequence
  Description of Artificial Sequence: Synthetic oligonucleotide
  Target: ATXN2; (-) strand; PAM type: YTN; PAM sequence: TTT
acctagatcttcagagaagc

SEQ ID NO: 67510 - DNA, 20 bp, Artificial Sequence
  Description of Artificial Sequence: Synthetic oligonucleotide
  Target: ATXN2; (-) strand; PAM type: YTN; PAM sequence: TTA
tttacctagatcttcagaga

SEQ ID NO: 67511 - DNA, 20 bp, Artificial Sequence
  Description of Artificial Sequence: Synthetic oligonucleotide
  Target: ATXN2; (-) strand; PAM type: YTN; PAM sequence: TTT
atttacctagatcttcagag

SEQ ID NO: 67512 - DNA, 20 bp, Artificial Sequence
  Description of Artificial Sequence: Synthetic oligonucleotide
  Target: ATXN2; (-) strand; PAM type: YTN; PAM sequence: TTT
tatttacctagatcttcaga

SEQ ID NO: 67513 - DNA, 20 bp, Artificial Sequence
  Description of Artificial Sequence: Synthetic oligonucleotide
  Target: ATXN2; (-) strand; PAM type: YTN; PAM sequence: CTA
gagaggacagttttatttac

SEQ ID NO: 67514 - DNA, 20 bp, Artificial Sequence
  Description of Artificial Sequence: Synthetic oligonucleotide
  Target: ATXN2; (-) strand; PAM type: YTN; PAM sequence: TTG
gaaaagaaaacagtaatggg

SEQ ID NO: 67515 - DNA, 20 bp, Artificial Sequence
  Description of Artificial Sequence: Synthetic oligonucleotide
  Target: ATXN2; (-) strand; PAM type: YTN; PAM sequence: TTT
ggaaaagaaaacagtaatgg

SEQ ID NO: 67516 - DNA, 20 bp, Artificial Sequence
  Description of Artificial Sequence: Synthetic oligonucleotide
  Target: ATXN2; (-) strand; PAM type: YTN; PAM sequence: TTT
tggaaaagaaaacagtaatg

SEQ ID NO: 67517 - DNA, 20 bp, Artificial Sequence
  Description of Artificial Sequence: Synthetic oligonucleotide
  Target: ATXN2; (-) strand; PAM type: YTN; PAM sequence: CTA
acattttggaaaagaaaaca

SEQ ID NO: 67518 - DNA, 20 bp, Artificial Sequence
  Description of Artificial Sequence: Synthetic oligonucleotide
  Target: ATXN2; (-) strand; PAM type: YTN; PAM sequence: TTC
ctaacattttggaaaagaaa

SEQ ID NO: 67519 - DNA, 20 bp, Artificial Sequence
  Description of Artificial Sequence: Synthetic oligonucleotide
  Target: ATXN2; (-) strand; PAM type: YTN; PAM sequence: TTG
ccagcaaattcctaacattt

SEQ ID NO: 67520 - DNA, 20 bp, Artificial Sequence
  Description of Artificial Sequence: Synthetic oligonucleotide
  Target: ATXN2; (-) strand; PAM type: YTN; PAM sequence: TTG
attgccagcaaattcctaac

SEQ ID NO: 67521 - DNA, 20 bp, Artificial Sequence
  Description of Artificial Sequence: Synthetic oligonucleotide
  Target: ATXN2; (-) strand; PAM type: YTN; PAM sequence: TTT
gattgccagcaaattcctaa

SEQ ID NO: 67522 - DNA, 20 bp, Artificial Sequence
  Description of Artificial Sequence: Synthetic oligonucleotide
  Target: ATXN2; (-) strand; PAM type: YTN; PAM sequence: TTT
tgattgccagcaaattccta

SEQ ID NO: 67523 - DNA, 20 bp, Artificial Sequence
  Description of Artificial Sequence: Synthetic oligonucleotide
  Target: ATXN2; (-) strand; PAM type: YTN; PAM sequence: TTG
tggttttgattgccagcaaa

SEQ ID NO: 67524 - DNA, 20 bp, Artificial Sequence
  Description of Artificial Sequence: Synthetic oligonucleotide
  Target: ATXN2; (-) strand; PAM type: YTN; PAM sequence: CTT
gtggttttgattgccagcaa

SEQ ID NO: 67525 - DNA, 20 bp, Artificial Sequence
  Description of Artificial Sequence: Synthetic oligonucleotide
  Target: ATXN2; (-) strand; PAM type: YTN; PAM sequence: TTC
atatacttgtggttttgatt

SEQ ID NO: 67526 - DNA, 20 bp, Artificial Sequence
  Description of Artificial Sequence: Synthetic oligonucleotide
  Target: ATXN2; (-) strand; PAM type: YTN; PAM sequence: CTT
catatacttgtggttttgat

SEQ ID NO: 67527 - DNA, 20 bp, Artificial Sequence
  Description of Artificial Sequence: Synthetic oligonucleotide
  Target: ATXN2; (-) strand; PAM type: YTN; PAM sequence: TTC
ttcatatacttgtggttttg

SEQ ID NO: 67528 - DNA, 20 bp, Artificial Sequence
  Description of Artificial Sequence: Synthetic oligonucleotide
  Target: ATXN2; (-) strand; PAM type: YTN; PAM sequence: CTG
ttcttcatatacttgtggtt

SEQ ID NO: 67529 - DNA, 20 bp, Artificial Sequence
  Description of Artificial Sequence: Synthetic oligonucleotide
  Target: ATXN2; (-) strand; PAM type: YTN; PAM sequence: CTG
ctgttcttcatatacttgtg

SEQ ID NO: 67530 - DNA, 20 bp, Artificial Sequence
  Description of Artificial Sequence: Synthetic oligonucleotide
  Target: ATXN2; (-) strand; PAM type: YTN; PAM sequence: TTG
ctgctgttcttcatatactt

SEQ ID NO: 67531 - DNA, 20 bp, Artificial Sequence
  Description of Artificial Sequence: Synthetic oligonucleotide
  Target: ATXN2; (-) strand; PAM type: YTN; PAM sequence: TTA
gtaattgctgctgttcttca

SEQ ID NO: 67532 - DNA, 20 bp, Artificial Sequence
  Description of Artificial Sequence: Synthetic oligonucleotide
  Target: ATXN2; (-) strand; PAM type: YTN; PAM sequence: TTA
tgttagtaattgctgctgtt

SEQ ID NO: 67533 - DNA, 20 bp, Artificial Sequence
  Description of Artificial Sequence: Synthetic oligonucleotide
  Target: ATXN2; (-) strand; PAM type: YTN; PAM sequence: CTT
atgttagtaattgctgctgt

SEQ ID NO: 67534 - DNA, 20 bp, Artificial Sequence
  Description of Artificial Sequence: Synthetic oligonucleotide
  Target: ATXN2; (-) strand; PAM type: YTN; PAM sequence: TTA
ggagagaaaatcatacttat

SEQ ID NO: 67535 - DNA, 20 bp, Artificial Sequence
  Description of Artificial Sequence: Synthetic oligonucleotide
  Target: ATXN2; (-) strand; PAM type: YTN; PAM sequence: TTA
gttaggagagaaaatcatac

SEQ ID NO: 67536 - DNA, 20 bp, Artificial Sequence
  Description of Artificial Sequence: Synthetic oligonucleotide
  Target: ATXN2; (-) strand; PAM type: YTN; PAM sequence: TTT
agttaggagagaaaatcata

SEQ ID NO: 67537 - DNA, 20 bp, Artificial Sequence
  Description of Artificial Sequence: Synthetic oligonucleotide
  Target: ATXN2; (-) strand; PAM type: YTN; PAM sequence: TTG
atacatttagttaggagaga

SEQ ID NO: 67538 - DNA, 20 bp, Artificial Sequence
  Description of Artificial Sequence: Synthetic oligonucleotide
  Target: ATXN2; (-) strand; PAM type: YTN; PAM sequence: CTT
gatacatttagttaggagag

SEQ ID NO: 67539 - DNA, 20 bp, Artificial Sequence
  Description of Artificial Sequence: Synthetic oligonucleotide
  Target: ATXN2; (-) strand; PAM type: YTN; PAM sequence: CTG
aggcaggagaatcacttgat

SEQ ID NO: 67540 - DNA, 20 bp, Artificial Sequence
  Description of Artificial Sequence: Synthetic oligonucleotide
  Target: ATXN2; (-) strand; PAM type: YTN; PAM sequence: CTC
cagaggctgaggcaggagaa

SEQ ID NO: 67541 - DNA, 20 bp, Artificial Sequence
  Description of Artificial Sequence: Synthetic oligonucleotide
  Target: ATXN2; (-) strand; PAM type: YTN; PAM sequence: CTA
ctccagaggctgaggcagga

SEQ ID NO: 67542 - DNA, 20 bp, Artificial Sequence
  Description of Artificial Sequence: Synthetic oligonucleotide
  Target: ATXN2; (-) strand; PAM type: YTN; PAM sequence: TTA
atcccagctactccagaggc

SEQ ID NO: 67543 - DNA, 20 bp, Artificial Sequence
  Description of Artificial Sequence: Synthetic oligonucleotide
  Target: ATXN2; (-) strand; PAM type: YTN; PAM sequence: TTT
aatcccagctactccagagg

SEQ ID NO: 67544 - DNA, 20 bp, Artificial Sequence
  Description of Artificial Sequence: Synthetic oligonucleotide
  Target: ATXN2; (-) strand; PAM type: YTN; PAM sequence: CTT
taatcccagctactccagag

SEQ ID NO: 67545 - DNA, 20 bp, Artificial Sequence
  Description of Artificial Sequence: Synthetic oligonucleotide
  Target: ATXN2; (-) strand; PAM type: YTN; PAM sequence: TTG
tggtggcgagtgcctttaat

SEQ ID NO: 67546 - DNA, 20 bp, Artificial Sequence
  Description of Artificial Sequence: Synthetic oligonucleotide
  Target: ATXN2; (-) strand; PAM type: YTN; PAM sequence: CTG
gttgtggtggcgagtgcctt

SEQ ID NO: 67547 - DNA, 20 bp, Artificial Sequence
  Description of Artificial Sequence: Synthetic oligonucleotide
  Target: ATXN2; (-) strand; PAM type: YTN; PAM sequence: TTA
gctggttgtggtggcgagtg

SEQ ID NO: 67548 - DNA, 20 bp, Artificial Sequence
  Description of Artificial Sequence: Synthetic oligonucleotide
  Target: ATXN2; (-) strand; PAM type: YTN; PAM sequence: CTA
aaaatacaaaaaaattagct

SEQ ID NO: 67549 - DNA, 20 bp, Artificial Sequence
  Description of Artificial Sequence: Synthetic oligonucleotide
  Target: ATXN2; (-) strand; PAM type: YTN; PAM sequence: CTA
ctaaaaatacaaaaaaatta

SEQ ID NO: 67550 - DNA, 20 bp, Artificial Sequence
  Description of Artificial Sequence: Synthetic oligonucleotide
  Target: ATXN2; (-) strand; PAM type: YTN; PAM sequence: CTC
tactaaaaatacaaaaaaat

SEQ ID NO: 67551 - DNA, 20 bp, Artificial Sequence
  Description of Artificial Sequence: Synthetic oligonucleotide
  Target: ATXN2; (-) strand; PAM type: YTN; PAM sequence: CTG
gccagcatggtgaaaccccg

SEQ ID NO: 67552 - DNA, 20 bp, Artificial Sequence
  Description of Artificial Sequence: Synthetic oligonucleotide
  Target: ATXN2; (-) strand; PAM type: YTN; PAM sequence: TTG
agaccagcctggccagcatg

SEQ ID NO: 67553 - DNA, 20 bp, Artificial Sequence
  Description of Artificial Sequence: Synthetic oligonucleotide
  Target: ATXN2; (-) strand; PAM type: YTN; PAM sequence: TTT
gagaccagcctggccagcat

SEQ ID NO: 67554 - DNA, 20 bp, Artificial Sequence
  Description of Artificial Sequence: Synthetic oligonucleotide
  Target: ATXN2; (-) strand; PAM type: YTN; PAM sequence: CTG
aggtcaggagtttgagacca

SEQ ID NO: 67555 - DNA, 20 bp, Artificial Sequence
  Description of Artificial Sequence: Synthetic oligonucleotide
  Target: ATXN2; (-) strand; PAM type: YTN; PAM sequence: TTG
ggaggccaaggtaggcagat

SEQ ID NO: 67556 - DNA, 20 bp, Artificial Sequence
  Description of Artificial Sequence: Synthetic oligonucleotide
  Target: ATXN2; (-) strand; PAM type: YTN; PAM sequence: TTT
gggaggccaaggtaggcaga

SEQ ID NO: 67557 - DNA, 20 bp, Artificial Sequence
  Description of Artificial Sequence: Synthetic oligonucleotide
  Target: ATXN2; (-) strand; PAM type: YTN; PAM sequence: CTT
tgggaggccaaggtaggcag

SEQ ID NO: 67558 - DNA, 20 bp, Artificial Sequence
  Description of Artificial Sequence: Synthetic oligonucleotide
  Target: ATXN2; (-) strand; PAM type: YTN; PAM sequence: CTG
taatcccagcactttgggag

SEQ ID NO: 67559 - DNA, 20 bp, Artificial Sequence
  Description of Artificial Sequence: Synthetic oligonucleotide
  Target: ATXN2; (-) strand; PAM type: YTN; PAM sequence: CTC
atgcctgtaatcccagcact

SEQ ID NO: 67560 - DNA, 20 bp, Artificial Sequence
  Description of Artificial Sequence: Synthetic oligonucleotide
  Target: ATXN2; (-) strand; PAM type: YTN; PAM sequence: CTG
ggcatggtggctcatgcctg

SEQ ID NO: 67561 - DNA, 20 bp, Artificial Sequence
  Description of Artificial Sequence: Synthetic oligonucleotide
  Target: ATXN2; (-) strand; PAM type: YTN; PAM sequence: CTA
taaagaatgtgtagggctgg

SEQ ID NO: 67562 - DNA, 20 bp, Artificial Sequence
  Description of Artificial Sequence: Synthetic oligonucleotide
  Target: ATXN2; (-) strand; PAM type: YTN; PAM sequence: TTG
ctataaagaatgtgtagggc

SEQ ID NO: 67563 - DNA, 20 bp, Artificial Sequence
  Description of Artificial Sequence: Synthetic oligonucleotide
  Target: ATXN2; (-) strand; PAM type: YTN; PAM sequence: TTG
atgttgctataaagaatgtg

SEQ ID NO: 67564 - DNA, 20 bp, Artificial Sequence
  Description of Artificial Sequence: Synthetic oligonucleotide
  Target: ATXN2; (-) strand; PAM type: YTN; PAM sequence: CTT
gatgttgctataaagaatgt

SEQ ID NO: 67565 - DNA, 20 bp, Artificial Sequence
  Description of Artificial Sequence: Synthetic oligonucleotide
  Target: ATXN2; (-) strand; PAM type: YTN; PAM sequence: CTG
cacagtggaccttgatgttg

SEQ ID NO: 67566 - DNA, 20 bp, Artificial Sequence
  Description of Artificial Sequence: Synthetic oligonucleotide
  Target: ATXN2; (-) strand; PAM type: YTN; PAM sequence: TTA
ctgcacagtggaccttgatg

SEQ ID NO: 67567 - DNA, 20 bp, Artificial Sequence
  Description of Artificial Sequence: Synthetic oligonucleotide
  Target: ATXN2; (-) strand; PAM type: YTN; PAM sequence: TTA
attactgcacagtggacctt

SEQ ID NO: 67568 - DNA, 20 bp, Artificial Sequence
  Description of Artificial Sequence: Synthetic oligonucleotide
  Target: ATXN2; (-) strand; PAM type: YTN; PAM sequence: CTT
aattactgcacagtggacct

SEQ ID NO: 67569 - DNA, 20 bp, Artificial Sequence
  Description of Artificial Sequence: Synthetic oligonucleotide
  Target: ATXN2; (-) strand; PAM type: YTN; PAM sequence: TTC
cttaattactgcacagtgga

SEQ ID NO: 67570 - DNA, 20 bp, Artificial Sequence
  Description of Artificial Sequence: Synthetic oligonucleotide
  Target: ATXN2; (-) strand; PAM type: YTN; PAM sequence: TTT
ccttaattactgcacagtgg

SEQ ID NO: 67571 - DNA, 20 bp, Artificial Sequence
  Description of Artificial Sequence: Synthetic oligonucleotide
  Target: ATXN2; (-) strand; PAM type: YTN; PAM sequence: CTC
aagtttccttaattactgca

SEQ ID NO: 67572 - DNA, 20 bp, Artificial Sequence
  Description of Artificial Sequence: Synthetic oligonucleotide
  Target: ATXN2; (-) strand; PAM type: YTN; PAM sequence: TTG
ggtctcaagtttccttaatt

SEQ ID NO: 67573 - DNA, 20 bp, Artificial Sequence
  Description of Artificial Sequence: Synthetic oligonucleotide
  Target: ATXN2; (-) strand; PAM type: YTN; PAM sequence: CTT
gggtctcaagtttccttaat

SEQ ID NO: 67574 - DNA, 20 bp, Artificial Sequence
  Description of Artificial Sequence: Synthetic oligonucleotide
  Target: ATXN2; (-) strand; PAM type: YTN; PAM sequence: CTA
acttgggtctcaagtttcct

SEQ ID NO: 67575 - DNA, 20 bp, Artificial Sequence
  Description of Artificial Sequence: Synthetic oligonucleotide
  Target: ATXN2; (-) strand; PAM type: YTN; PAM sequence: TTG
actaacttgggtctcaagtt

SEQ ID NO: 67576 - DNA, 20 bp, Artificial Sequence
  Description of Artificial Sequence: Synthetic oligonucleotide
  Target: ATXN2; (-) strand; PAM type: YTN; PAM sequence: TTT
gactaacttgggtctcaagt

SEQ ID NO: 67577 - DNA, 20 bp, Artificial Sequence
  Description of Artificial Sequence: Synthetic oligonucleotide
  Target: ATXN2; (-) strand; PAM type: YTN; PAM sequence: TTT
tgactaacttgggtctcaag

SEQ ID NO: 67578 - DNA, 20 bp, Artificial Sequence
  Description of Artificial Sequence: Synthetic oligonucleotide
  Target: ATXN2; (-) strand; PAM type: YTN; PAM sequence: CTT
ttgactaacttgggtctcaa

SEQ ID NO: 67579 - DNA, 20 bp, Artificial Sequence
  Description of Artificial Sequence: Synthetic oligonucleotide
  Target: ATXN2; (-) strand; PAM type: YTN; PAM sequence: TTC
cccttttgactaacttgggt

SEQ ID NO: 67580 - DNA, 20 bp, Artificial Sequence
  Description of Artificial Sequence: Synthetic oligonucleotide
  Target: ATXN2; (-) strand; PAM type: YTN; PAM sequence: CTT
ccccttttgactaacttggg

SEQ ID NO: 67581 - DNA, 20 bp, Artificial Sequence
  Description of Artificial Sequence: Synthetic oligonucleotide
  Target: ATXN2; (-) strand; PAM type: YTN; PAM sequence: TTA
tcttccccttttgactaact

SEQ ID NO: 67582 - DNA, 20 bp, Artificial Sequence
  Description of Artificial Sequence: Synthetic oligonucleotide
  Target: ATXN2; (-) strand; PAM type: YTN; PAM sequence: TTA
ttatcttccccttttgacta

SEQ ID NO: 67583 - DNA, 20 bp, Artificial Sequence
  Description of Artificial Sequence: Synthetic oligonucleotide
  Target: ATXN2; (-) strand; PAM type: YTN; PAM sequence: TTT
attatcttccccttttgact

SEQ ID NO: 67584 - DNA, 20 bp, Artificial Sequence
  Description of Artificial Sequence: Synthetic oligonucleotide
  Target: ATXN2; (-) strand; PAM type: YTN; PAM sequence: TTT
tattatcttccccttttgac

SEQ ID NO: 67585 - DNA, 20 bp, Artificial Sequence
  Description of Artificial Sequence: Synthetic oligonucleotide
  Target: ATXN2; (-) strand; PAM type: YTN; PAM sequence: CTT
ttattatcttccccttttga

SEQ ID NO: 67586 - DNA, 20 bp, Artificial Sequence
  Description of Artificial Sequence: Synthetic oligonucleotide
  Target: ATXN2; (-) strand; PAM type: YTN; PAM sequence: CTG
cttttattatcttccccttt

SEQ ID NO: 67587 - DNA, 20 bp, Artificial Sequence
  Description of Artificial Sequence: Synthetic oligonucleotide
  Target: ATXN2; (-) strand; PAM type: YTN; PAM sequence: TTG
gaagtcatatgggatacaaa

SEQ ID NO: 67588 - DNA, 20 bp, Artificial Sequence
  Description of Artificial Sequence: Synthetic oligonucleotide
  Target: ATXN2; (-) strand; PAM type: YTN; PAM sequence: CTT
ggaagtcatatgggatacaa

SEQ ID NO: 67589 - DNA, 20 bp, Artificial Sequence
  Description of Artificial Sequence: Synthetic oligonucleotide
  Target: ATXN2; (-) strand; PAM type: YTN; PAM sequence: TTA
gatatatacttggaagtcat

SEQ ID NO: 67590 - DNA, 20 bp, Artificial Sequence
  Description of Artificial Sequence: Synthetic oligonucleotide
  Target: ATXN2; (-) strand; PAM type: YTN; PAM sequence: CTA
ttagatatatacttggaagt

SEQ ID NO: 67591 - DNA, 20 bp, Artificial Sequence
  Description of Artificial Sequence: Synthetic oligonucleotide
  Target: ATXN2; (-) strand; PAM type: YTN; PAM sequence: TTA
taatggtatatgaaacctat

SEQ ID NO: 67592 - DNA, 20 bp, Artificial Sequence
  Description of Artificial Sequence: Synthetic oligonucleotide
  Target: ATXN2; (-) strand; PAM type: YTN; PAM sequence: TTT
ataatggtatatgaaaccta

SEQ ID NO: 67593 - DNA, 20 bp, Artificial Sequence
  Description of Artificial Sequence: Synthetic oligonucleotide
  Target: ATXN2; (-) strand; PAM type: YTN; PAM sequence: TTA
ggtttataatggtatatgaa

SEQ ID NO: 67594 - DNA, 20 bp, Artificial Sequence
  Description of Artificial Sequence: Synthetic oligonucleotide
  Target: ATXN2; (-) strand; PAM type: YTN; PAM sequence: CTG
cagttaggtttataatggta

SEQ ID NO: 67595 - DNA, 20 bp, Artificial Sequence
  Description of Artificial Sequence: Synthetic oligonucleotide
  Target: ATXN2; (-) strand; PAM type: YTN; PAM sequence: CTC
tgcagttaggtttataatgg

SEQ ID NO: 67596 - DNA, 20 bp, Artificial Sequence
  Description of Artificial Sequence: Synthetic oligonucleotide
  Target: ATXN2; (-) strand; PAM type: YTN; PAM sequence: CTG
agctctgcagttaggtttat

SEQ ID NO: 67597 - DNA, 20 bp, Artificial Sequence
  Description of Artificial Sequence: Synthetic oligonucleotide
  Target: ATXN2; (-) strand; PAM type: YTN; PAM sequence: TTG
aatctgagctctgcagttag

SEQ ID NO: 67598 - DNA, 20 bp, Artificial Sequence
  Description of Artificial Sequence: Synthetic oligonucleotide
  Target: ATXN2; (-) strand; PAM type: YTN; PAM sequence: TTT
gaatctgagctctgcagtta

SEQ ID NO: 67599 - DNA, 20 bp, Artificial Sequence
  Description of Artificial Sequence: Synthetic oligonucleotide
  Target: ATXN2; (-) strand; PAM type: YTN; PAM sequence: CTT
tgaatctgagctctgcagtt

SEQ ID NO: 67600 - DNA, 20 bp, Artificial Sequence
  Description of Artificial Sequence: Synthetic oligonucleotide
  Target: ATXN2; (-) strand; PAM type: YTN; PAM sequence: CTA
aacctttgaatctgagctct

SEQ ID NO: 67601 - DNA, 20 bp, Artificial Sequence
  Description of Artificial Sequence: Synthetic oligonucleotide
  Target: ATXN2; (-) strand; PAM type: YTN; PAM sequence: CTC
taaacctttgaatctgagct

SEQ ID NO: 67602 - DNA, 20 bp, Artificial Sequence
  Description of Artificial Sequence: Synthetic oligonucleotide
  Target: ATXN2; (-) strand; PAM type: YTN; PAM sequence: TTC
tctaaacctttgaatctgag

SEQ ID NO: 67603 - DNA, 20 bp, Artificial Sequence
  Description of Artificial Sequence: Synthetic oligonucleotide
  Target: ATXN2; (-) strand; PAM type: YTN; PAM sequence: TTT
ctctaaacctttgaatctga

SEQ ID NO: 67604 - DNA, 20 bp, Artificial Sequence
  Description of Artificial Sequence: Synthetic oligonucleotide
  Target: ATXN2; (-) strand; PAM type: YTN; PAM sequence: TTT
tctctaaacctttgaatctg

SEQ ID NO: 67605 - DNA, 20 bp, Artificial Sequence
  Description of Artificial Sequence: Synthetic oligonucleotide
  Target: ATXN2; (-) strand; PAM type: YTN; PAM sequence: CTG
aaatgaaataatcgaaccat

SEQ ID NO: 67606 - DNA, 20 bp, Artificial Sequence
  Description of Artificial Sequence: Synthetic oligonucleotide
  Target: ATXN2; (-) strand; PAM type: YTN; PAM sequence: TTA
aaaaaaaaaaaacactgaaa

SEQ ID NO: 67607 - DNA, 20 bp, Artificial Sequence
  Description of Artificial Sequence: Synthetic oligonucleotide
  Target: ATXN2; (-) strand; PAM type: YTN; PAM sequence: CTT
aaaaaaaaaaaaacactgaa

SEQ ID NO: 67608 - DNA, 20 bp, Artificial Sequence
  Description of Artificial Sequence: Synthetic oligonucleotide
  Target: ATXN2; (-) strand; PAM type: YTN; PAM sequence: TTG
tgacttaaaaaaaaaaaaac

SEQ ID NO: 67609 - DNA, 20 bp, Artificial Sequence
  Description of Artificial Sequence: Synthetic oligonucleotide
  Target: ATXN2; (-) strand; PAM type: YTN; PAM sequence: CTT
gtgacttaaaaaaaaaaaaa

SEQ ID NO: 67610 - DNA, 20 bp, Artificial Sequence
  Description of Artificial Sequence: Synthetic oligonucleotide
  Target: ATXN2; (-) strand; PAM type: YTN; PAM sequence: TTC
cgtgacccttgtgacttaaa

SEQ ID NO: 67611 - DNA, 20 bp, Artificial Sequence
  Description of Artificial Sequence: Synthetic oligonucleotide
  Target: ATXN2; (-) strand; PAM type: YTN; PAM sequence: CTT
ccgtgacccttgtgacttaa

SEQ ID NO: 67612 - DNA, 20 bp, Artificial Sequence
  Description of Artificial Sequence: Synthetic oligonucleotide
  Target: ATXN2; (-) strand; PAM type: YTN; PAM sequence: TTC
ttccgtgacccttgtgactt

SEQ ID NO: 67613 - DNA, 20 bp, Artificial Sequence
  Description of Artificial Sequence: Synthetic oligonucleotide
  Target: ATXN2; (-) strand; PAM type: YTN; PAM sequence: TTT
cttccgtgacccttgtgact

SEQ ID NO: 67614 - DNA, 20 bp, Artificial Sequence
  Description of Artificial Sequence: Synthetic oligonucleotide
  Target: ATXN2; (-) strand; PAM type: YTN; PAM sequence: TTT
tcttccgtgacccttgtgac

SEQ ID NO: 67615 - DNA, 20 bp, Artificial Sequence
  Description of Artificial Sequence: Synthetic oligonucleotide
  Target: ATXN2; (-) strand; PAM type: YTN; PAM sequence: TTG
aataatagttttcttccgtg

SEQ ID NO: 67616 - DNA, 20 bp, Artificial Sequence
  Description of Artificial Sequence: Synthetic oligonucleotide
  Target: ATXN2; (-) strand; PAM type: YTN; PAM sequence: TTG
ttgaataatagttttcttcc

SEQ ID NO: 67617 - DNA, 20 bp, Artificial Sequence
  Description of Artificial Sequence: Synthetic oligonucleotide
  Target: ATXN2; (-) strand; PAM type: YTN; PAM sequence: TTG
gaaaaatggcagttgttgaa

SEQ ID NO: 67618 - DNA, 20 bp, Artificial Sequence
  Description of Artificial Sequence: Synthetic oligonucleotide
  Target: ATXN2; (-) strand; PAM type: YTN; PAM sequence: CTA
attggaaaaatggcagttgt

SEQ ID NO: 67619 - DNA, 20 bp, Artificial Sequence
  Description of Artificial Sequence: Synthetic oligonucleotide
  Target: ATXN2; (-) strand; PAM type: YTN; PAM sequence: TTA
ctaattggaaaaatggcagt

SEQ ID NO: 67620 - DNA, 20 bp, Artificial Sequence
  Description of Artificial Sequence: Synthetic oligonucleotide
  Target: ATXN2; (-) strand; PAM type: YTN; PAM sequence: TTT
actaattggaaaaatggcag

SEQ ID NO: 67621 - DNA, 20 bp, Artificial Sequence
  Description of Artificial Sequence: Synthetic oligonucleotide
  Target: ATXN2; (-) strand; PAM type: YTN; PAM sequence: TTT
tactaattggaaaaatggca

SEQ ID NO: 67622 - DNA, 20 bp, Artificial Sequence
  Description of Artificial Sequence: Synthetic oligonucleotide
  Target: ATXN2; (-) strand; PAM type: YTN; PAM sequence: TTT
ttactaattggaaaaatggc

SEQ ID NO: 67623 - DNA, 20 bp, Artificial Sequence
  Description of Artificial Sequence: Synthetic oligonucleotide
  Target: ATXN2; (-) strand; PAM type: YTN; PAM sequence: CTT
tttactaattggaaaaatgg

SEQ ID NO: 67624 - DNA, 20 bp, Artificial Sequence
  Description of Artificial Sequence: Synthetic oligonucleotide
  Target: ATXN2; (-) strand; PAM type: YTN; PAM sequence: CTC
tttttactaattggaaaaat

SEQ ID NO: 67625 - DNA, 20 bp, Artificial Sequence
  Description of Artificial Sequence: Synthetic oligonucleotide
  Target: ATXN2; (-) strand; PAM type: YTN; PAM sequence: TTC
tctttttactaattggaaaa

SEQ ID NO: 67626 - DNA, 20 bp, Artificial Sequence
  Description of Artificial Sequence: Synthetic oligonucleotide
  Target: ATXN2; (-) strand; PAM type: YTN; PAM sequence: TTT
ctctttttactaattggaaa

SEQ ID NO: 67627 - DNA, 20 bp, Artificial Sequence
  Description of Artificial Sequence: Synthetic oligonucleotide
  Target: ATXN2; (-) strand; PAM type: YTN; PAM sequence: TTT
tctctttttactaattggaa

SEQ ID NO: 67628 - DNA, 20 bp, Artificial Sequence
  Description of Artificial Sequence: Synthetic oligonucleotide
  Target: ATXN2; (-) strand; PAM type: YTN; PAM sequence: TTA
tagattttctctttttacta

SEQ ID NO: 67629 - DNA, 20 bp, Artificial Sequence
  Description of Artificial Sequence: Synthetic oligonucleotide
  Target: ATXN2; (-) strand; PAM type: YTN; PAM sequence: CTC
agaatagcattatagatttt

SEQ ID NO: 67630 - DNA, 20 bp, Artificial Sequence
  Description of Artificial Sequence: Synthetic oligonucleotide
  Target: ATXN2; (-) strand; PAM type: YTN; PAM sequence: TTG
gagatacactcagaatagca

SEQ ID NO: 67631 - DNA, 20 bp, Artificial Sequence
  Description of Artificial Sequence: Synthetic oligonucleotide
  Target: ATXN2; (-) strand; PAM type: YTN; PAM sequence: TTT
ggagatacactcagaatagc

SEQ ID NO: 67632 - DNA, 20 bp, Artificial Sequence
  Description of Artificial Sequence: Synthetic oligonucleotide
  Target: ATXN2; (-) strand; PAM type: YTN; PAM sequence: TTT
tggagatacactcagaatag

SEQ ID NO: 67633 - DNA, 20 bp, Artificial Sequence
  Description of Artificial Sequence: Synthetic oligonucleotide
  Target: ATXN2; (-) strand; PAM type: YTN; PAM sequence: TTA
gaagtgagagagtataagca

SEQ ID NO: 67634 - DNA, 20 bp, Artificial Sequence
  Description of Artificial Sequence: Synthetic oligonucleotide
  Target: ATXN2; (-) strand; PAM type: YTN; PAM sequence: TTG
agaataacatgattagaagt

SEQ ID NO: 67635 - DNA, 20 bp, Artificial Sequence
  Description of Artificial Sequence: Synthetic oligonucleotide
  Target: ATXN2; (-) strand; PAM type: YTN; PAM sequence: TTT
gagaataacatgattagaag

SEQ ID NO: 67636 - DNA, 20 bp, Artificial Sequence
  Description of Artificial Sequence: Synthetic oligonucleotide
  Target: ATXN2; (-) strand; PAM type: YTN; PAM sequence: TTT
tgagaataacatgattagaa

SEQ ID NO: 67637 - DNA, 20 bp, Artificial Sequence
  Description of Artificial Sequence: Synthetic oligonucleotide
  Target: ATXN2; (-) strand; PAM type: YTN; PAM sequence: CTG
gaaataaattttgagaataa

SEQ ID NO: 67638 - DNA, 20 bp, Artificial Sequence
  Description of Artificial Sequence: Synthetic oligonucleotide
  Target: ATXN2; (-) strand; PAM type: YTN; PAM sequence: TTA
gatggtctggaaataaattt

SEQ ID NO: 67639 - DNA, 20 bp, Artificial Sequence
  Description of Artificial Sequence: Synthetic oligonucleotide
  Target: ATXN2; (-) strand; PAM type: YTN; PAM sequence: CTT
agatggtctggaaataaatt

SEQ ID NO: 67640 - DNA, 20 bp, Artificial Sequence
  Description of Artificial Sequence: Synthetic oligonucleotide
  Target: ATXN2; (-) strand; PAM type: YTN; PAM sequence: TTA
cttagatggtctggaaataa

SEQ ID NO: 67641 - DNA, 20 bp, Artificial Sequence
  Description of Artificial Sequence: Synthetic oligonucleotide
  Target: ATXN2; (-) strand; PAM type: YTN; PAM sequence: TTG
acattacttagatggtctgg

SEQ ID NO: 67642 - DNA, 20 bp, Artificial Sequence
  Description of Artificial Sequence: Synthetic oligonucleotide
  Target: ATXN2; (-) strand; PAM type: YTN; PAM sequence: TTT
gacattacttagatggtctg

SEQ ID NO: 67643 - DNA, 20 bp, Artificial Sequence
  Description of Artificial Sequence: Synthetic oligonucleotide
  Target: ATXN2; (-) strand; PAM type: YTN; PAM sequence: TTT
tgacattacttagatggtct

SEQ ID NO: 67644 - DNA, 20 bp, Artificial Sequence
  Description of Artificial Sequence: Synthetic oligonucleotide
  Target: ATXN2; (-) strand; PAM type: YTN; PAM sequence: CTT
ttgacattacttagatggtc

SEQ ID NO: 67645 - DNA, 20 bp, Artificial Sequence
  Description of Artificial Sequence: Synthetic oligonucleotide
  Target: ATXN2; (-) strand; PAM type: YTN; PAM sequence: TTA
atcttttgacattacttaga

SEQ ID NO: 67646 - DNA, 20 bp, Artificial Sequence
  Description of Artificial Sequence: Synthetic oligonucleotide
  Target: ATXN2; (-) strand; PAM type: YTN; PAM sequence: CTG
ttaatcttttgacattactt

SEQ ID NO: 67647 - DNA, 20 bp, Artificial Sequence
  Description of Artificial Sequence: Synthetic oligonucleotide
  Target: ATXN2; (-) strand; PAM type: YTN; PAM sequence: TTC
tgttaatcttttgacattac

SEQ ID NO: 67648 - DNA, 20 bp, Artificial Sequence
  Description of Artificial Sequence: Synthetic oligonucleotide
  Target: ATXN2; (-) strand; PAM type: YTN; PAM sequence: CTA
ttctgttaatcttttgacat

SEQ ID NO: 67649 - DNA, 20 bp, Artificial Sequence
  Description of Artificial Sequence: Synthetic oligonucleotide
  Target: ATXN2; (-) strand; PAM type: YTN; PAM sequence: TTC
agctattctgttaatctttt

SEQ ID NO: 67650 - DNA, 20 bp, Artificial Sequence
  Description of Artificial Sequence: Synthetic oligonucleotide
  Target: ATXN2; (-) strand; PAM type: YTN; PAM sequence: CTT
cagctattctgttaatcttt

SEQ ID NO: 67651 - DNA, 20 bp, Artificial Sequence
  Description of Artificial Sequence: Synthetic oligonucleotide
  Target: ATXN2; (-) strand; PAM type: YTN; PAM sequence: CTG
cttcagctattctgttaatc

SEQ ID NO: 67652 - DNA, 20 bp, Artificial Sequence
  Description of Artificial Sequence: Synthetic oligonucleotide
  Target: ATXN2; (-) strand; PAM type: YTN; PAM sequence: TTC
aaaaaaaaaaaaaaaaatct

SEQ ID NO: 67653 - DNA, 20 bp, Artificial Sequence
  Description of Artificial Sequence: Synthetic oligonucleotide
  Target: ATXN2; (-) strand; PAM type: YTN; PAM sequence: TTT
caaaaaaaaaaaaaaaaatc

SEQ ID NO: 67654 - DNA, 20 bp, Artificial Sequence
  Description of Artificial Sequence: Synthetic oligonucleotide
  Target: ATXN2; (-) strand; PAM type: YTN; PAM sequence: CTC
catttcaaaaaaaaaaaaaa

SEQ ID NO: 67655 - DNA, 20 bp, Artificial Sequence
  Description of Artificial Sequence: Synthetic oligonucleotide
  Target: ATXN2; (-) strand; PAM type: YTN; PAM sequence: CTA
tagagtgagactccatttca

SEQ ID NO: 67656 - DNA, 20 bp, Artificial Sequence
  Description of Artificial Sequence: Synthetic oligonucleotide
  Target: ATXN2; (-) strand; PAM type: YTN; PAM sequence: CTG
ggctatagagtgagactcca

SEQ ID NO: 67657 - DNA, 20 bp, Artificial Sequence
  Description of Artificial Sequence: Synthetic oligonucleotide
  Target: ATXN2; (-) strand; PAM type: YTN; PAM sequence: CTC
cagcctgggctatagagtga

SEQ ID NO: 67658 - DNA, 20 bp, Artificial Sequence
  Description of Artificial Sequence: Synthetic oligonucleotide
  Target: ATXN2; (-) strand; PAM type: YTN; PAM sequence: CTG
cactccagcctgggctatag

SEQ ID NO: 67659 - DNA, 20 bp, Artificial Sequence
  Description of Artificial Sequence: Synthetic oligonucleotide
  Target: ATXN2; (-) strand; PAM type: YTN; PAM sequence: TTG
cggtgagcggagatcgcgcc

SEQ ID NO: 67660 - DNA, 20 bp, Artificial Sequence
  Description of Artificial Sequence: Synthetic oligonucleotide
  Target: ATXN2; (-) strand; PAM type: YTN; PAM sequence: TTG
aaccaggacccgggaggtgt

SEQ ID NO: 67661 - DNA, 20 bp, Artificial Sequence
  Description of Artificial Sequence: Synthetic oligonucleotide
  Target: ATXN2; (-) strand; PAM type: YTN; PAM sequence: CTT
gaaccaggacccgggaggtg

SEQ ID NO: 67662 - DNA, 20 bp, Artificial Sequence
  Description of Artificial Sequence: Synthetic oligonucleotide
  Target: ATXN2; (-) strand; PAM type: YTN; PAM sequence: TTG
cttgaaccaggacccgggag

SEQ ID NO: 67663 - DNA, 20 bp, Artificial Sequence
  Description of Artificial Sequence: Synthetic oligonucleotide
  Target: ATXN2; (-) strand; PAM type: YTN; PAM sequence: CTG
aggcaggagaattgcttgaa

SEQ ID NO: 67664 - DNA, 20 bp, Artificial Sequence
  Description of Artificial Sequence: Synthetic oligonucleotide
  Target: ATXN2; (-) strand; PAM type: YTN; PAM sequence: CTC
aggaggctgaggcaggagaa

SEQ ID NO: 67665 - DNA, 20 bp, Artificial Sequence
  Description of Artificial Sequence: Synthetic oligonucleotide
  Target: ATXN2; (-) strand; PAM type: YTN; PAM sequence: CTG
ctcaggaggctgaggcagga

SEQ ID NO: 67666 - DNA, 20 bp, Artificial Sequence
  Description of Artificial Sequence: Synthetic oligonucleotide
  Target: ATXN2; (-) strand; PAM type: YTN; PAM sequence: TTG
taatcccagctgctcaggag

SEQ ID NO: 67667 - DNA, 20 bp, Artificial Sequence
  Description of Artificial Sequence: Synthetic oligonucleotide
  Target: ATXN2; (-) strand; PAM type: YTN; PAM sequence: CTT
gtaatcccagctgctcagga

SEQ ID NO: 67668 - DNA, 20 bp, Artificial Sequence
  Description of Artificial Sequence: Synthetic oligonucleotide
  Target: ATXN2; (-) strand; PAM type: YTN; PAM sequence: TTC
ttgtaatcccagctgctcag

SEQ ID NO: 67669 - DNA, 20 bp, Artificial Sequence
  Description of Artificial Sequence: Synthetic oligonucleotide
  Target: ATXN2; (-) strand; PAM type: YTN; PAM sequence: TTG
tggcgcgttcttgtaatccc

SEQ ID NO: 67670 - DNA, 20 bp, Artificial Sequence
  Description of Artificial Sequence: Synthetic oligonucleotide
  Target: ATXN2; (-) strand; PAM type: YTN; PAM sequence: CTG
ggcattgtggcgcgttcttg

SEQ ID NO: 67671 - DNA, 20 bp, Artificial Sequence
  Description of Artificial Sequence: Synthetic oligonucleotide
  Target: ATXN2; (-) strand; PAM type: YTN; PAM sequence: TTA
gctgggcattgtggcgcgtt

SEQ ID NO: 67672 - DNA, 20 bp, Artificial Sequence
  Description of Artificial Sequence: Synthetic oligonucleotide
  Target: ATXN2; (-) strand; PAM type: YTN; PAM sequence: CTA
aaaatacaaaaattagctgg

SEQ ID NO: 67673 - DNA, 20 bp, Artificial Sequence
  Description of Artificial Sequence: Synthetic oligonucleotide
  Target: ATXN2; (-) strand; PAM type: YTN; PAM sequence: CTA
ctaaaaatacaaaaattagc

SEQ ID NO: 67674 - DNA, 20 bp, Artificial Sequence
  Description of Artificial Sequence: Synthetic oligonucleotide
  Target: ATXN2; (-) strand; PAM type: YTN; PAM sequence: CTC
tactaaaaatacaaaaatta

SEQ ID NO: 67675 - DNA, 20 bp, Artificial Sequence
  Description of Artificial Sequence: Synthetic oligonucleotide
  Target: ATXN2; (-) strand; PAM type: YTN; PAM sequence: CTG
gccaacatggtgaaacgtcg

SEQ ID NO: 67676 - DNA, 20 bp, Artificial Sequence
  Description of Artificial Sequence: Synthetic oligonucleotide
  Target: ATXN2; (-) strand; PAM type: YTN; PAM sequence: TTC
aacaccagcctggccaacat

SEQ ID NO: 67677 - DNA, 20 bp, Artificial Sequence
  Description of Artificial Sequence: Synthetic oligonucleotide
  Target: ATXN2; (-) strand; PAM type: YTN; PAM sequence: CTG
aggcgggtggatcacgaggt

SEQ ID NO: 67678 - DNA, 20 bp, Artificial Sequence
  Description of Artificial Sequence: Synthetic oligonucleotide
  Target: ATXN2; (-) strand; PAM type: YTN; PAM sequence: TTG
gggaggctgaggcgggtgga

SEQ ID NO: 67679 - DNA, 20 bp, Artificial Sequence
  Description of Artificial Sequence: Synthetic oligonucleotide
  Target: ATXN2; (-) strand; PAM type: YTN; PAM sequence: CTT
ggggaggctgaggcgggtgg

SEQ ID NO: 67680 - DNA, 20 bp, Artificial Sequence
  Description of Artificial Sequence: Synthetic oligonucleotide
  Target: ATXN2; (-) strand; PAM type: YTN; PAM sequence: CTG
taatcccagcacttggggag

SEQ ID NO: 67681 - DNA, 20 bp, Artificial Sequence
  Description of Artificial Sequence: Synthetic oligonucleotide
  Target: ATXN2; (-) strand; PAM type: YTN; PAM sequence: CTC
acggctgtaatcccagcact

SEQ ID NO: 67682 - DNA, 20 bp, Artificial Sequence
  Description of Artificial Sequence: Synthetic oligonucleotide
  Target: ATXN2; (-) strand; PAM type: YTN; PAM sequence: TTC
agccggtcaggcgcagtggc

SEQ ID NO: 67683 - DNA, 20 bp, Artificial Sequence
  Description of Artificial Sequence: Synthetic oligonucleotide
  Target: ATXN2; (-) strand; PAM type: YTN; PAM sequence: CTT
cagccggtcaggcgcagtgg

SEQ ID NO: 67684 - DNA, 20 bp, Artificial Sequence
  Description of Artificial Sequence: Synthetic oligonucleotide
  Target: ATXN2; (-) strand; PAM type: YTN; PAM sequence: TTC
ttcagccggtcaggcgcagt

SEQ ID NO: 67685 - DNA, 20 bp, Artificial Sequence
  Description of Artificial Sequence: Synthetic oligonucleotide
  Target: ATXN2; (-) strand; PAM type: YTN; PAM sequence: CTT
cttcagccggtcaggcgcag

SEQ ID NO: 67686 - DNA, 20 bp, Artificial Sequence
  Description of Artificial Sequence: Synthetic oligonucleotide
  Target: ATXN2; (-) strand; PAM type: YTN; PAM sequence: TTA
aaaatcttcttcagccggtc

SEQ ID NO: 67687 - DNA, 20 bp, Artificial Sequence
  Description of Artificial Sequence: Synthetic oligonucleotide
  Target: ATXN2; (-) strand; PAM type: YTN; PAM sequence: TTT
aaaaatcttcttcagccggt

SEQ ID NO: 67688 - DNA, 20 bp, Artificial Sequence
  Description of Artificial Sequence: Synthetic oligonucleotide
  Target: ATXN2; (-) strand; PAM type: YTN; PAM sequence: TTT
taaaaatcttcttcagccgg

SEQ ID NO: 67689 - DNA, 20 bp, Artificial Sequence
  Description of Artificial Sequence: Synthetic oligonucleotide
  Target: ATXN2; (-) strand; PAM type: YTN; PAM sequence: CTA
ccaagaaaacaaaaatttta

SEQ ID NO: 67690 - DNA, 20 bp, Artificial Sequence
  Description of Artificial Sequence: Synthetic oligonucleotide
  Target: ATXN2; (-) strand; PAM type: YTN; PAM sequence: TTA
agactaccaagaaaacaaaa

SEQ ID NO: 67691 - DNA, 20 bp, Artificial Sequence
  Description of Artificial Sequence: Synthetic oligonucleotide
  Target: ATXN2; (-) strand; PAM type: YTN; PAM sequence: CTT
aagactaccaagaaaacaaa

SEQ ID NO: 67692 - DNA, 20 bp, Artificial Sequence
  Description of Artificial Sequence: Synthetic oligonucleotide
  Target: ATXN2; (-) strand; PAM type: YTN; PAM sequence: TTA
tcttaagactaccaagaaaa

SEQ ID NO: 67693 - DNA, 20 bp, Artificial Sequence
  Description of Artificial Sequence: Synthetic oligonucleotide
  Target: ATXN2; (-) strand; PAM type: YTN; PAM sequence: TTC
aattatcttaagactaccaa

SEQ ID NO: 67694 - DNA, 20 bp, Artificial Sequence
  Description of Artificial Sequence: Synthetic oligonucleotide
  Target: ATXN2; (-) strand; PAM type: YTN; PAM sequence: CTT
caattatcttaagactacca

SEQ ID NO: 67695 - DNA, 20 bp, Artificial Sequence
  Description of Artificial Sequence: Synthetic oligonucleotide
  Target: ATXN2; (-) strand; PAM type: YTN; PAM sequence: TTG
gtcttcaattatcttaagac

SEQ ID NO: 67696 - DNA, 20 bp, Artificial Sequence
  Description of Artificial Sequence: Synthetic oligonucleotide
  Target: ATXN2; (-) strand; PAM type: YTN; PAM sequence: CTT
ggtcttcaattatcttaaga

SEQ ID NO: 67697 - DNA, 20 bp, Artificial Sequence
  Description of Artificial Sequence: Synthetic oligonucleotide
  Target: ATXN2; (-) strand; PAM type: YTN; PAM sequence: TTC
cttggtcttcaattatctta

SEQ ID NO: 67698 - DNA, 20 bp, Artificial Sequence
  Description of Artificial Sequence: Synthetic oligonucleotide
  Target: ATXN2; (-) strand; PAM type: YTN; PAM sequence: CTT
ccttggtcttcaattatctt

SEQ ID NO: 67699 - DNA, 20 bp, Artificial Sequence
  Description of Artificial Sequence: Synthetic oligonucleotide
  Target: ATXN2; (-) strand; PAM type: YTN; PAM sequence: TTC
ttccttggtcttcaattatc

SEQ ID NO: 67700 - DNA, 20 bp, Artificial Sequence
  Description of Artificial Sequence: Synthetic oligonucleotide
  Target: ATXN2; (-) strand; PAM type: YTN; PAM sequence: TTT
cttccttggtcttcaattat

SEQ ID NO: 67701 - DNA, 20 bp, Artificial Sequence
  Description of Artificial Sequence: Synthetic oligonucleotide
  Target: ATXN2; (-) strand; PAM type: YTN; PAM sequence: TTT
tcttccttggtcttcaatta

SEQ ID NO: 67702 - DNA, 20 bp, Artificial Sequence
  Description of Artificial Sequence: Synthetic oligonucleotide
  Target: ATXN2; (-) strand; PAM type: YTN; PAM sequence: TTA
ttttcttccttggtcttcaa

SEQ ID NO: 67703 - DNA, 20 bp, Artificial Sequence
  Description of Artificial Sequence: Synthetic oligonucleotide
  Target: ATXN2; (-) strand; PAM type: YTN; PAM sequence: TTT
attttcttccttggtcttca

SEQ ID NO: 67704 - DNA, 20 bp, Artificial Sequence
  Description of Artificial Sequence: Synthetic oligonucleotide
  Target: ATXN2; (-) strand; PAM type: YTN; PAM sequence: TTT
tattttcttccttggtcttc

SEQ ID NO: 67705 - DNA, 20 bp, Artificial Sequence
  Description of Artificial Sequence: Synthetic oligonucleotide
  Target: ATXN2; (-) strand; PAM type: YTN; PAM sequence: TTT
ttattttcttccttggtctt

SEQ ID NO: 67706 - DNA, 20 bp, Artificial Sequence
  Description of Artificial Sequence: Synthetic oligonucleotide
  Target: ATXN2; (-) strand; PAM type: YTN; PAM sequence: CTT
tttattttcttccttggtct

SEQ ID NO: 67707 - DNA, 20 bp, Artificial Sequence
  Description of Artificial Sequence: Synthetic oligonucleotide
  Target: ATXN2; (-) strand; PAM type: YTN; PAM sequence: TTG
tactttttattttcttcctt

SEQ ID NO: 67708 - DNA, 20 bp, Artificial Sequence
  Description of Artificial Sequence: Synthetic oligonucleotide
  Target: ATXN2; (-) strand; PAM type: YTN; PAM sequence: TTT
gtactttttattttcttcct

SEQ ID NO: 67709 - DNA, 20 bp, Artificial Sequence
  Description of Artificial Sequence: Synthetic oligonucleotide
  Target: ATXN2; (-) strand; PAM type: YTN; PAM sequence: CTT
tgtactttttattttcttcc

SEQ ID NO: 67710 - DNA, 20 bp, Artificial Sequence
  Description of Artificial Sequence: Synthetic oligonucleotide
  Target: ATXN2; (-) strand; PAM type: YTN; PAM sequence: TTC
ctttgtactttttattttct

SEQ ID NO: 67711 - DNA, 20 bp, Artificial Sequence
  Description of Artificial Sequence: Synthetic oligonucleotide
  Target: ATXN2; (-) strand; PAM type: YTN; PAM sequence: CTA
aattcctttgtactttttat

SEQ ID NO: 67712 - DNA, 20 bp, Artificial Sequence
  Description of Artificial Sequence: Synthetic oligonucleotide
  Target: ATXN2; (-) strand; PAM type: YTN; PAM sequence: TTG
tatcctaaattcctttgtac

SEQ ID NO: 67713 - DNA, 20 bp, Artificial Sequence
  Description of Artificial Sequence: Synthetic oligonucleotide
  Target: ATXN2; (-) strand; PAM type: YTN; PAM sequence: TTC
atgtaattgtatcctaaatt

SEQ ID NO: 67714 - DNA, 20 bp, Artificial Sequence
  Description of Artificial Sequence: Synthetic oligonucleotide
  Target: ATXN2; (-) strand; PAM type: YTN; PAM sequence: TTC
atgtgatgcacattcatgta

SEQ ID NO: 67715 - DNA, 20 bp, Artificial Sequence
  Description of Artificial Sequence: Synthetic oligonucleotide
  Target: ATXN2; (-) strand; PAM type: YTN; PAM sequence: CTT
catgtgatgcacattcatgt

SEQ ID NO: 67716 - DNA, 20 bp, Artificial Sequence
  Description of Artificial Sequence: Synthetic oligonucleotide
  Target: ATXN2; (-) strand; PAM type: YTN; PAM sequence: CTC
agcttcatgtgatgcacatt

SEQ ID NO: 67717 - DNA, 20 bp, Artificial Sequence
  Description of Artificial Sequence: Synthetic oligonucleotide
  Target: ATXN2; (-) strand; PAM type: YTN; PAM sequence: CTG
ctcagcttcatgtgatgcac

SEQ ID NO: 67718 - DNA, 20 bp, Artificial Sequence
  Description of Artificial Sequence: Synthetic oligonucleotide
  Target: ATXN2; (-) strand; PAM type: YTN; PAM sequence: TTC
tgctcagcttcatgtgatgc

SEQ ID NO: 67719 - DNA, 20 bp, Artificial Sequence
  Description of Artificial Sequence: Synthetic oligonucleotide
  Target: ATXN2; (-) strand; PAM type: YTN; PAM sequence: TTT
ctgctcagcttcatgtgatg

SEQ ID NO: 67720 - DNA, 20 bp, Artificial Sequence
  Description of Artificial Sequence: Synthetic oligonucleotide
  Target: ATXN2; (-) strand; PAM type: YTN; PAM sequence: CTA
tacatttctgctcagcttca

SEQ ID NO: 67721 - DNA, 20 bp, Artificial Sequence
  Description of Artificial Sequence: Synthetic oligonucleotide
  Target: ATXN2; (-) strand; PAM type: YTN; PAM sequence: TTG
ctatacatttctgctcagct

SEQ ID NO: 67722 - DNA, 20 bp, Artificial Sequence
  Description of Artificial Sequence: Synthetic oligonucleotide
  Target: ATXN2; (-) strand; PAM type: YTN; PAM sequence: TTA
gttgctatacatttctgctc

SEQ ID NO: 67723 - DNA, 20 bp, Artificial Sequence
  Description of Artificial Sequence: Synthetic oligonucleotide
  Target: ATXN2; (-) strand; PAM type: YTN; PAM sequence: TTT
agttgctatacatttctgct

SEQ ID NO: 67724 - DNA, 20 bp, Artificial Sequence
  Description of Artificial Sequence: Synthetic oligonucleotide
  Target: ATXN2; (-) strand; PAM type: YTN; PAM sequence: TTT
tagttgctatacatttctgc

SEQ ID NO: 67725 - DNA, 20 bp, Artificial Sequence
  Description of Artificial Sequence: Synthetic oligonucleotide
  Target: ATXN2; (-) strand; PAM type: YTN; PAM sequence: TTT
ttagttgctatacatttctg

SEQ ID NO: 67726 - DNA, 20 bp, Artificial Sequence
  Description of Artificial Sequence: Synthetic oligonucleotide
  Target: ATXN2; (-) strand; PAM type: YTN; PAM sequence: CTG
tttttagttgctatacattt

SEQ ID NO: 67727 - DNA, 20 bp, Artificial Sequence
  Description of Artificial Sequence: Synthetic oligonucleotide
  Target: ATXN2; (-) strand; PAM type: YTN; PAM sequence: TTA
aatctgtttttagttgctat

SEQ ID NO: 67728 - DNA, 20 bp, Artificial Sequence
  Description of Artificial Sequence: Synthetic oligonucleotide
  Target: ATXN2; (-) strand; PAM type: YTN; PAM sequence: CTG
tgttaaatctgtttttagtt

SEQ ID NO: 67729 - DNA, 20 bp, Artificial Sequence
  Description of Artificial Sequence: Synthetic oligonucleotide
  Target: ATXN2; (-) strand; PAM type: YTN; PAM sequence: CTC
agctgtgttaaatctgtttt

SEQ ID NO: 67730 - DNA, 20 bp, Artificial Sequence
  Description of Artificial Sequence: Synthetic oligonucleotide
  Target: ATXN2; (-) strand; PAM type: YTN; PAM sequence: TTA
aggaaacaaaaacaaaactc

SEQ ID NO: 67731 - DNA, 20 bp, Artificial Sequence
  Description of Artificial Sequence: Synthetic oligonucleotide
  Target: ATXN2; (-) strand; PAM type: YTN; PAM sequence: CTT
aaggaaacaaaaacaaaact

SEQ ID NO: 67732 - DNA, 20 bp, Artificial Sequence
  Description of Artificial Sequence: Synthetic oligonucleotide
  Target: ATXN2; (-) strand; PAM type: YTN; PAM sequence: TTC
aagcttaaggaaacaaaaac

SEQ ID NO: 67733 - DNA, 20 bp, Artificial Sequence
  Description of Artificial Sequence: Synthetic oligonucleotide
  Target: ATXN2; (-) strand; PAM type: YTN; PAM sequence: CTT
caagcttaaggaaacaaaaa

SEQ ID NO: 67734 - DNA, 20 bp, Artificial Sequence
  Description of Artificial Sequence: Synthetic oligonucleotide
  Target: ATXN2; (-) strand; PAM type: YTN; PAM sequence: CTC
aaaaaaaagaaaaaagaaac

SEQ ID NO: 67735 - DNA, 20 bp, Artificial Sequence
  Description of Artificial Sequence: Synthetic oligonucleotide
  Target: ATXN2; (-) strand; PAM type: YTN; PAM sequence: CTA
tctcaaaaaaaagaaaaaag

SEQ ID NO: 67736 - DNA, 20 bp, Artificial Sequence
  Description of Artificial Sequence: Synthetic oligonucleotide
  Target: ATXN2; (-) strand; PAM type: YTN; PAM sequence: CTC
tatctcaaaaaaaagaaaaa

SEQ ID NO: 67737 - DNA, 20 bp, Artificial Sequence
  Description of Artificial Sequence: Synthetic oligonucleotide
  Target: ATXN2; (-) strand; PAM type: YTN; PAM sequence: CTG
ggtgacaagagcgaaactct

SEQ ID NO: 67738 - DNA, 20 bp, Artificial Sequence
  Description of Artificial Sequence: Synthetic oligonucleotide
  Target: ATXN2; (-) strand; PAM type: YTN; PAM sequence: CTC
cagtctgggtgacaagagcg

SEQ ID NO: 67739 - DNA, 20 bp, Artificial Sequence
  Description of Artificial Sequence: Synthetic oligonucleotide
  Target: ATXN2; (-) strand; PAM type: YTN; PAM sequence: TTG
cactccagtctgggtgacaa

SEQ ID NO: 67740 - DNA, 20 bp, Artificial Sequence
  Description of Artificial Sequence: Synthetic oligonucleotide
  Target: ATXN2; (-) strand; PAM type: YTN; PAM sequence: TTG
cagtgagccaagatcacacc

SEQ ID NO: 67741 - DNA, 20 bp, Artificial Sequence
  Description of Artificial Sequence: Synthetic oligonucleotide
  Target: ATXN2; (-) strand; PAM type: YTN; PAM sequence: TTG
aacccaggaggtgaaggttg

SEQ ID NO: 67742 - DNA, 20 bp, Artificial Sequence
  Description of Artificial Sequence: Synthetic oligonucleotide
  Target: ATXN2; (-) strand; PAM type: YTN; PAM sequence: TTT
gaacccaggaggtgaaggtt

SEQ ID NO: 67743 - DNA, 20 bp, Artificial Sequence
  Description of Artificial Sequence: Synthetic oligonucleotide
  Target: ATXN2; (-) strand; PAM type: YTN; PAM sequence: CTG
aggcaggagaatcatttgaa

SEQ ID NO: 67744 - DNA, 20 bp, Artificial Sequence
  Description of Artificial Sequence: Synthetic oligonucleotide
  Target: ATXN2; (-) strand; PAM type: YTN; PAM sequence: TTG
agaggctgaggcaggagaat

SEQ ID NO: 67745 - DNA, 20 bp, Artificial Sequence
  Description of Artificial Sequence: Synthetic oligonucleotide
  Target: ATXN2; (-) strand; PAM type: YTN; PAM sequence: TTT
gagaggctgaggcaggagaa

SEQ ID NO: 67746 - DNA, 20 bp, Artificial Sequence
  Description of Artificial Sequence: Synthetic oligonucleotide
  Target: ATXN2; (-) strand; PAM type: YTN; PAM sequence: CTA
tttgagaggctgaggcagga

SEQ ID NO: 67747 - DNA, 20 bp, Artificial Sequence
  Description of Artificial Sequence: Synthetic oligonucleotide
  Target: ATXN2; (-) strand; PAM type: YTN; PAM sequence: CTG
agtgtggtggctatttgaga

SEQ ID NO: 67748 - DNA, 20 bp, Artificial Sequence
  Description of Artificial Sequence: Synthetic oligonucleotide
  Target: ATXN2; (-) strand; PAM type: YTN; PAM sequence: TTA
gctgagtgtggtggctattt

SEQ ID NO: 67749 - DNA, 20 bp, Artificial Sequence
  Description of Artificial Sequence: Synthetic oligonucleotide
  Target: ATXN2; (-) strand; PAM type: YTN; PAM sequence: CTA
aaaatacaaaattagctgag

SEQ ID NO: 67750 - DNA, 20 bp, Artificial Sequence
  Description of Artificial Sequence: Synthetic oligonucleotide
  Target: ATXN2; (-) strand; PAM type: YTN; PAM sequence: CTA
ctaaaaatacaaaattagct

SEQ ID NO: 67751 - DNA, 20 bp, Artificial Sequence
  Description of Artificial Sequence: Synthetic oligonucleotide
  Target: ATXN2; (-) strand; PAM type: YTN; PAM sequence: CTC
tactaaaaatacaaaattag

SEQ ID NO: 67752 - DNA, 20 bp, Artificial Sequence
  Description of Artificial Sequence: Synthetic oligonucleotide
  Target: ATXN2; (-) strand; PAM type: YTN; PAM sequence: CTG
accaacatgatgaaacccca

SEQ ID NO: 67753 - DNA, 20 bp, Artificial Sequence
  Description of Artificial Sequence: Synthetic oligonucleotide
  Target: ATXN2; (-) strand; PAM type: YTN; PAM sequence: CTG
gcctgaccaacatgatgaaa

SEQ ID NO: 67754 - DNA, 20 bp, Artificial Sequence
  Description of Artificial Sequence: Synthetic oligonucleotide
  Target: ATXN2; (-) strand; PAM type: YTN; PAM sequence: TTC
aagactggcctgaccaacat

SEQ ID NO: 67755 - DNA, 20 bp, Artificial Sequence
  Description of Artificial Sequence: Synthetic oligonucleotide
  Target: ATXN2; (-) strand; PAM type: YTN; PAM sequence: TTG
aggtcaggagttcaagactg

SEQ ID NO: 67756 - DNA, 20 bp, Artificial Sequence
  Description of Artificial Sequence: Synthetic oligonucleotide
  Target: ATXN2; (-) strand; PAM type: YTN; PAM sequence: CTT
gaggtcaggagttcaagact

SEQ ID NO: 67757 - DNA, 20 bp, Artificial Sequence
  Description of Artificial Sequence: Synthetic oligonucleotide
  Target: ATXN2; (-) strand; PAM type: YTN; PAM sequence: CTG
aggtgggtggatcacttgag

SEQ ID NO: 67758 - DNA, 20 bp, Artificial Sequence
  Description of Artificial Sequence: Synthetic oligonucleotide
  Target: ATXN2; (-) strand; PAM type: YTN; PAM sequence: TTG
ggaggctgaggtgggtggat

SEQ ID NO: 67759 - DNA, 20 bp, Artificial Sequence
  Description of Artificial Sequence: Synthetic oligonucleotide
  Target: ATXN2; (-) strand; PAM type: YTN; PAM sequence: TTT
gggaggctgaggtgggtgga

SEQ ID NO: 67760 - DNA, 20 bp, Artificial Sequence
  Description of Artificial Sequence: Synthetic oligonucleotide
  Target: ATXN2; (-) strand; PAM type: YTN; PAM sequence: CTT
tgggaggctgaggtgggtgg

SEQ ID NO: 67761 - DNA, 20 bp, Artificial Sequence
  Description of Artificial Sequence: Synthetic oligonucleotide
  Target: ATXN2; (-) strand; PAM type: YTN; PAM sequence: CTG
taatcccagcactttgggag

SEQ ID NO: 67762 - DNA, 20 bp, Artificial Sequence
  Description of Artificial Sequence: Synthetic oligonucleotide
  Target: ATXN2; (-) strand; PAM type: YTN; PAM sequence: CTC
atgcctgtaatcccagcact

SEQ ID NO: 67763 - DNA, 20 bp, Artificial Sequence
  Description of Artificial Sequence: Synthetic oligonucleotide
  Target: ATXN2; (-) strand; PAM type: YTN; PAM sequence: CTG
tggctcatgcctgtaatccc

SEQ ID NO: 67764 - DNA, 20 bp, Artificial Sequence
  Description of Artificial Sequence: Synthetic oligonucleotide
  Target: ATXN2; (-) strand; PAM type: YTN; PAM sequence: TTG
ctgtggctcatgcctgtaat

SEQ ID NO: 67765 - DNA, 20 bp, Artificial Sequence
  Description of Artificial Sequence: Synthetic oligonucleotide
  Target: ATXN2; (-) strand; PAM type: YTN; PAM sequence: TTA
aaagaaacaagatcggccag

SEQ ID NO: 67766 - DNA, 20 bp, Artificial Sequence
  Description of Artificial Sequence: Synthetic oligonucleotide
  Target: ATXN2; (-) strand; PAM type: YTN; PAM sequence: TTT
aaaagaaacaagatcggcca

SEQ ID NO: 67767 - DNA, 20 bp, Artificial Sequence
  Description of Artificial Sequence: Synthetic oligonucleotide
  Target: ATXN2; (-) strand; PAM type: YTN; PAM sequence: CTT
taaaagaaacaagatcggcc

SEQ ID NO: 67768 - DNA, 20 bp, Artificial Sequence
  Description of Artificial Sequence: Synthetic oligonucleotide
  Target: ATXN2; (-) strand; PAM type: YTN; PAM sequence: TTA
atcagtccagagaaccttta

SEQ ID NO: 67769 - DNA, 20 bp, Artificial Sequence
  Description of Artificial Sequence: Synthetic oligonucleotide
  Target: ATXN2; (-) strand; PAM type: YTN; PAM sequence: TTT
aatcagtccagagaaccttt

SEQ ID NO: 67770 - DNA, 20 bp, Artificial Sequence
  Description of Artificial Sequence: Synthetic oligonucleotide
  Target: ATXN2; (-) strand; PAM type: YTN; PAM sequence: TTT
taatcagtccagagaacctt

SEQ ID NO: 67771 - DNA, 20 bp, Artificial Sequence
  Description of Artificial Sequence: Synthetic oligonucleotide
  Target: ATXN2; (-) strand; PAM type: YTN; PAM sequence: CTT
ttaatcagtccagagaacct

SEQ ID NO: 67772 - DNA, 20 bp, Artificial Sequence
  Description of Artificial Sequence: Synthetic oligonucleotide
  Target: ATXN2; (-) strand; PAM type: YTN; PAM sequence: CTC
ttttaatcagtccagagaac

SEQ ID NO: 67773 - DNA, 20 bp, Artificial Sequence
  Description of Artificial Sequence: Synthetic oligonucleotide
  Target: ATXN2; (-) strand; PAM type: YTN; PAM sequence: TTC
tcttttaatcagtccagaga

SEQ ID NO: 67774 - DNA, 20 bp, Artificial Sequence
  Description of Artificial Sequence: Synthetic oligonucleotide
  Target: ATXN2; (-) strand; PAM type: YTN; PAM sequence: TTT
ctcttttaatcagtccagag

SEQ ID NO: 67775 - DNA, 20 bp, Artificial Sequence
  Description of Artificial Sequence: Synthetic oligonucleotide
  Target: ATXN2; (-) strand; PAM type: YTN; PAM sequence: TTT
tctcttttaatcagtccaga

SEQ ID NO: 67776 - DNA, 20 bp, Artificial Sequence
  Description of Artificial Sequence: Synthetic oligonucleotide
  Target: ATXN2; (-) strand; PAM type: YTN; PAM sequence: TTT
ttctcttttaatcagtccag

SEQ ID NO: 67777 - DNA, 20 bp, Artificial Sequence
  Description of Artificial Sequence: Synthetic oligonucleotide
  Target: ATXN2; (-) strand; PAM type: YTN; PAM sequence: CTT
tttctcttttaatcagtcca

SEQ ID NO: 67778 - DNA, 20 bp, Artificial Sequence
  Description of Artificial Sequence: Synthetic oligonucleotide
  Target: ATXN2; (-) strand; PAM type: YTN; PAM sequence: TTA
aaacaaacaaacaaacaaac

SEQ ID NO: 67779 - DNA, 20 bp, Artificial Sequence
  Description of Artificial Sequence: Synthetic oligonucleotide
  Target: ATXN2; (-) strand; PAM type: YTN; PAM sequence: CTT
aaaacaaacaaacaaacaaa

SEQ ID NO: 67780 - DNA, 20 bp, Artificial Sequence
  Description of Artificial Sequence: Synthetic oligonucleotide
  Target: ATXN2; (-) strand; PAM type: YTN; PAM sequence: TTA
caaagaatacttaaaacaaa

SEQ ID NO: 67781 - DNA, 20 bp, Artificial Sequence
  Description of Artificial Sequence: Synthetic oligonucleotide
  Target: ATXN2; (-) strand; PAM type: YTN; PAM sequence: CTT
acaaagaatacttaaaacaa

SEQ ID NO: 67782 - DNA, 20 bp, Artificial Sequence
  Description of Artificial Sequence: Synthetic oligonucleotide
  Target: ATXN2; (-) strand; PAM type: YTN; PAM sequence: CTG
tggtaagcaagagcttacaa

SEQ ID NO: 67783 - DNA, 20 bp, Artificial Sequence
  Description of Artificial Sequence: Synthetic oligonucleotide
  Target: ATXN2; (-) strand; PAM type: YTN; PAM sequence: TTC
ccataactgtggtaagcaag

SEQ ID NO: 67784 - DNA, 20 bp, Artificial Sequence
  Description of Artificial Sequence: Synthetic oligonucleotide
  Target: ATXN2; (-) strand; PAM type: YTN; PAM sequence: TTG
ttcccataactgtggtaagc

SEQ ID NO: 67785 - DNA, 20 bp, Artificial Sequence
  Description of Artificial Sequence: Synthetic oligonucleotide
  Target: ATXN2; (-) strand; PAM type: YTN; PAM sequence: TTT
gttcccataactgtggtaag

SEQ ID NO: 67786 - DNA, 20 bp, Artificial Sequence
  Description of Artificial Sequence: Synthetic oligonucleotide
  Target: ATXN2; (-) strand; PAM type: YTN; PAM sequence: CTT
tgttcccataactgtggtaa

SEQ ID NO: 67787 - DNA, 20 bp, Artificial Sequence
  Description of Artificial Sequence: Synthetic oligonucleotide
  Target: ATXN2; (-) strand; PAM type: YTN; PAM sequence: TTA
gtgctttgttcccataactg

SEQ ID NO: 67788 - DNA, 20 bp, Artificial Sequence
  Description of Artificial Sequence: Synthetic oligonucleotide
  Target: ATXN2; (-) strand; PAM type: YTN; PAM sequence: CTT
agtgctttgttcccataact

SEQ ID NO: 67789 - DNA, 20 bp, Artificial Sequence
  Description of Artificial Sequence: Synthetic oligonucleotide
  Target: ATXN2; (-) strand; PAM type: YTN; PAM sequence: TTG
ccaatcagtccttagtgctt

SEQ ID NO: 67790 - DNA, 20 bp, Artificial Sequence
  Description of Artificial Sequence: Synthetic oligonucleotide
  Target: ATXN2; (-) strand; PAM type: YTN; PAM sequence: TTT
gccaatcagtccttagtgct

SEQ ID NO: 67791 - DNA, 20 bp, Artificial Sequence
  Description of Artificial Sequence: Synthetic oligonucleotide
  Target: ATXN2; (-) strand; PAM type: YTN; PAM sequence: CTT
tgccaatcagtccttagtgc

SEQ ID NO: 67792 - DNA, 20 bp, Artificial Sequence
  Description of Artificial Sequence: Synthetic oligonucleotide
  Target: ATXN2; (-) strand; PAM type: YTN; PAM sequence: CTA
ctttgccaatcagtccttag

SEQ ID NO: 67793 - DNA, 20 bp, Artificial Sequence
  Description of Artificial Sequence: Synthetic oligonucleotide
  Target: ATXN2; (-) strand; PAM type: YTN; PAM sequence: TTG
ctactttgccaatcagtcct

SEQ ID NO: 67794 - DNA, 20 bp, Artificial Sequence
  Description of Artificial Sequence: Synthetic oligonucleotide
  Target: ATXN2; (-) strand; PAM type: YTN; PAM sequence: TTT
gctactttgccaatcagtcc

SEQ ID NO: 67795 - DNA, 20 bp, Artificial Sequence
  Description of Artificial Sequence: Synthetic oligonucleotide
  Target: ATXN2; (-) strand; PAM type: YTN; PAM sequence: TTT
tgctactttgccaatcagtc

SEQ ID NO: 67796 - DNA, 20 bp, Artificial Sequence
  Description of Artificial Sequence: Synthetic oligonucleotide
  Target: ATXN2; (-) strand; PAM type: YTN; PAM sequence: CTT
ttgctactttgccaatcagt

SEQ ID NO: 67797 - DNA, 20 bp, Artificial Sequence
  Description of Artificial Sequence: Synthetic oligonucleotide
  Target: ATXN2; (-) strand; PAM type: YTN; PAM sequence: CTG
cttttgctactttgccaatc

SEQ ID NO: 67798 - DNA, 20 bp, Artificial Sequence
  Description of Artificial Sequence: Synthetic oligonucleotide
  Target: ATXN2; (-) strand; PAM type: YTN; PAM sequence: CTG
actgcttttgctactttgcc

SEQ ID NO: 67799 - DNA, 20 bp, Artificial Sequence
  Description of Artificial Sequence: Synthetic oligonucleotide
  Target: ATXN2; (-) strand; PAM type: YTN; PAM sequence: TTA
caataaggctgactgctttt

SEQ ID NO: 67800 - DNA, 20 bp, Artificial Sequence
  Description of Artificial Sequence: Synthetic oligonucleotide
  Target: ATXN2; (-) strand; PAM type: YTN; PAM sequence: TTT
acaataaggctgactgcttt

SEQ ID NO: 67801 - DNA, 20 bp, Artificial Sequence
  Description of Artificial Sequence: Synthetic oligonucleotide
  Target: ATXN2; (-) strand; PAM type: YTN; PAM sequence: TTT
tacaataaggctgactgctt

SEQ ID NO: 67802 - DNA, 20 bp, Artificial Sequence
  Description of Artificial Sequence: Synthetic oligonucleotide
  Target: ATXN2; (-) strand; PAM type: YTN; PAM sequence: TTG
acatgattttacaataaggc

SEQ ID NO: 67803 - DNA, 20 bp, Artificial Sequence
  Description of Artificial Sequence: Synthetic oligonucleotide
  Target: ATXN2; (-) strand; PAM type: YTN; PAM sequence: CTA
gacgttgacatgattttaca

SEQ ID NO: 67804 - DNA, 20 bp, Artificial Sequence
  Description of Artificial Sequence: Synthetic oligonucleotide
  Target: ATXN2; (-) strand; PAM type: YTN; PAM sequence: TTA
aaaactagacgttgacatga

SEQ ID NO: 67805 - DNA, 20 bp, Artificial Sequence
  Description of Artificial Sequence: Synthetic oligonucleotide
  Target: ATXN2; (-) strand; PAM type: YTN; PAM sequence: TTT
aaaaactagacgttgacatg

SEQ ID NO: 67806 - DNA, 20 bp, Artificial Sequence
  Description of Artificial Sequence: Synthetic oligonucleotide
  Target: ATXN2; (-) strand; PAM type: YTN; PAM sequence: CTC
aaaaaaaaaaaaaaaaaaaa

SEQ ID NO: 67807 - DNA, 20 bp, Artificial Sequence
  Description of Artificial Sequence: Synthetic oligonucleotide
  Target: ATXN2; (-) strand; PAM type: YTN; PAM sequence: CTG
tctcaaaaaaaaaaaaaaaa

SEQ ID NO: 67808 - DNA, 20 bp, Artificial Sequence
  Description of Artificial Sequence: Synthetic oligonucleotide
  Target: ATXN2; (-) strand; PAM type: YTN; PAM sequence: CTC
tgtctcaaaaaaaaaaaaaa

SEQ ID NO: 67809 - DNA, 20 bp, Artificial Sequence
  Description of Artificial Sequence: Synthetic oligonucleotide
  Target: ATXN2; (-) strand; PAM type: YTN; PAM sequence: CTC
cagcatgggcaacagagcaa

SEQ ID NO: 67810 - DNA, 20 bp, Artificial Sequence
  Description of Artificial Sequence: Synthetic oligonucleotide
  Target: ATXN2; (-) strand; PAM type: YTN; PAM sequence: TTG
cactccagcatgggcaacag

SEQ ID NO: 67811 - DNA, 20 bp, Artificial Sequence
  Description of Artificial Sequence: Synthetic oligonucleotide
  Target: ATXN2; (-) strand; PAM type: YTN; PAM sequence: CTG
agatcacgccattgcactcc

SEQ ID NO: 67812 - DNA, 20 bp, Artificial Sequence
  Description of Artificial Sequence: Synthetic oligonucleotide
  Target: ATXN2; (-) strand; PAM type: YTN; PAM sequence: TTA
gctgagatcacgccattgca

SEQ ID NO: 67813 - DNA, 20 bp, Artificial Sequence
  Description of Artificial Sequence: Synthetic oligonucleotide
  Target: ATXN2; (-) strand; PAM type: YTN; PAM sequence: TTG
cagttagctgagatcacgcc

SEQ ID NO: 67814 - DNA, 20 bp, Artificial Sequence
  Description of Artificial Sequence: Synthetic oligonucleotide
  Target: ATXN2; (-) strand; PAM type: YTN; PAM sequence: CTT
gcagttagctgagatcacgc

SEQ ID NO: 67815 - DNA, 20 bp, Artificial Sequence
  Description of Artificial Sequence: Synthetic oligonucleotide
  Target: ATXN2; (-) strand; PAM type: YTN; PAM sequence: CTC
gggaagcggagcttgcagtt

SEQ ID NO: 67816 - DNA, 20 bp, Artificial Sequence
  Description of Artificial Sequence: Synthetic oligonucleotide
  Target: ATXN2; (-) strand; PAM type: YTN; PAM sequence: CTG
aggcaggagaatggcatgaa

SEQ ID NO: 67817 - DNA, 20 bp, Artificial Sequence
  Description of Artificial Sequence: Synthetic oligonucleotide
  Target: ATXN2; (-) strand; PAM type: YTN; PAM sequence: TTG
ggaggctgaggcaggagaat

SEQ ID NO: 67818 - DNA, 20 bp, Artificial Sequence
  Description of Artificial Sequence: Synthetic oligonucleotide
  Target: ATXN2; (-) strand; PAM type: YTN; PAM sequence: CTT
gggaggctgaggcaggagaa

SEQ ID NO: 67819 - DNA, 20 bp, Artificial Sequence
  Description of Artificial Sequence: Synthetic oligonucleotide
  Target: ATXN2; (-) strand; PAM type: YTN; PAM sequence: CTA
cttgggaggctgaggcagga

SEQ ID NO: 67820 - DNA, 20 bp, Artificial Sequence
  Description of Artificial Sequence: Synthetic oligonucleotide
  Target: ATXN2; (-) strand; PAM type: YTN; PAM sequence: CTG
tagtcccagctacttgggag

SEQ ID NO: 67821 - DNA, 20 bp, Artificial Sequence
  Description of Artificial Sequence: Synthetic oligonucleotide
  Target: ATXN2; (-) strand; PAM type: YTN; PAM sequence: TTA
gccgggcatggtggcgggtg

SEQ ID NO: 67822 - DNA, 20 bp, Artificial Sequence
  Description of Artificial Sequence: Synthetic oligonucleotide
  Target: ATXN2; (-) strand; PAM type: YTN; PAM sequence: CTA
aaagtacaaaaaaaattagc

SEQ ID NO: 67823 - DNA, 20 bp, Artificial Sequence
  Description of Artificial Sequence: Synthetic oligonucleotide
  Target: ATXN2; (-) strand; PAM type: YTN; PAM sequence: CTA
ctaaaagtacaaaaaaaatt

SEQ ID NO: 67824 - DNA, 20 bp, Artificial Sequence
  Description of Artificial Sequence: Synthetic oligonucleotide
  Target: ATXN2; (-) strand; PAM type: YTN; PAM sequence: CTA
acacggtgaaaccccgtccc

SEQ ID NO: 67825 - DNA, 20 bp, Artificial Sequence
  Description of Artificial Sequence: Synthetic oligonucleotide
  Target: ATXN2; (-) strand; PAM type: YTN; PAM sequence: CTG
gctaacacggtgaaaccccg

SEQ ID NO: 67826 - DNA, 20 bp, Artificial Sequence
  Description of Artificial Sequence: Synthetic oligonucleotide
  Target: ATXN2; (-) strand; PAM type: YTN; PAM sequence: CTG
aggtgggcggatcacaaggt

SEQ ID NO: 67827 - DNA, 20 bp, Artificial Sequence
  Description of Artificial Sequence: Synthetic oligonucleotide
  Target: ATXN2; (-) strand; PAM type: YTN; PAM sequence: TTG
ggaggctgaggtgggcggat

SEQ ID NO: 67828 - DNA, 20 bp, Artificial Sequence
  Description of Artificial Sequence: Synthetic oligonucleotide
  Target: ATXN2; (-) strand; PAM type: YTN; PAM sequence: TTT
gggaggctgaggtgggcgga

SEQ ID NO: 67829 - DNA, 20 bp, Artificial Sequence
  Description of Artificial Sequence: Synthetic oligonucleotide
  Target: ATXN2; (-) strand; PAM type: YTN; PAM sequence: CTT
tgggaggctgaggtgggcgg

SEQ ID NO: 67830 - DNA, 20 bp, Artificial Sequence
  Description of Artificial Sequence: Synthetic oligonucleotide
  Target: ATXN2; (-) strand; PAM type: YTN; PAM sequence: CTG
taatcccagcactttgggag

SEQ ID NO: 67831 - DNA, 20 bp, Artificial Sequence
  Description of Artificial Sequence: Synthetic oligonucleotide
  Target: ATXN2; (-) strand; PAM type: YTN; PAM sequence: CTC
acgcctgtaatcccagcact

SEQ ID NO: 67832 - DNA, 20 bp, Artificial Sequence
  Description of Artificial Sequence: Synthetic oligonucleotide
  Target: ATXN2; (-) strand; PAM type: YTN; PAM sequence: CTG
ggtgtggtggctcacgcctg

SEQ ID NO: 67833 - DNA, 20 bp, Artificial Sequence
  Description of Artificial Sequence: Synthetic oligonucleotide
  Target: ATXN2; (-) strand; PAM type: YTN; PAM sequence: TTA
ggctgggtgtggtggctcac

SEQ ID NO: 67834 - DNA, 20 bp, Artificial Sequence
  Description of Artificial Sequence: Synthetic oligonucleotide
  Target: ATXN2; (-) strand; PAM type: YTN; PAM sequence: CTA
taaaagtataaaaattaggc

SEQ ID NO: 67835 - DNA, 20 bp, Artificial Sequence
  Description of Artificial Sequence: Synthetic oligonucleotide
  Target: ATXN2; (-) strand; PAM type: YTN; PAM sequence: CTG
acagcagctataaaagtata

SEQ ID NO: 67836 - DNA, 20 bp, Artificial Sequence
  Description of Artificial Sequence: Synthetic oligonucleotide
  Target: ATXN2; (-) strand; PAM type: YTN; PAM sequence: TTA
gcataaggaatatgctgaca

SEQ ID NO: 67837 - DNA, 20 bp, Artificial Sequence
  Description of Artificial Sequence: Synthetic oligonucleotide
  Target: ATXN2; (-) strand; PAM type: YTN; PAM sequence: TTG
tgattagcataaggaatatg

SEQ ID NO: 67838 - DNA, 20 bp, Artificial Sequence
  Description of Artificial Sequence: Synthetic oligonucleotide
  Target: ATXN2; (-) strand; PAM type: YTN; PAM sequence: TTT
gtgattagcataaggaatat

SEQ ID NO: 67839 - DNA, 20 bp, Artificial Sequence
  Description of Artificial Sequence: Synthetic oligonucleotide
  Target: ATXN2; (-) strand; PAM type: YTN; PAM sequence: TTA
tttgtgattagcataaggaa

SEQ ID NO: 67840 - DNA, 20 bp, Artificial Sequence
  Description of Artificial Sequence: Synthetic oligonucleotide
  Target: ATXN2; (-) strand; PAM type: YTN; PAM sequence: TTT
atttgtgattagcataagga

SEQ ID NO: 67841 - DNA, 20 bp, Artificial Sequence
  Description of Artificial Sequence: Synthetic oligonucleotide
  Target: ATXN2; (-) strand; PAM type: YTN; PAM sequence: TTT
tatttgtgattagcataagg

SEQ ID NO: 67842 - DNA, 20 bp, Artificial Sequence
  Description of Artificial Sequence: Synthetic oligonucleotide
  Target: ATXN2; (-) strand; PAM type: YTN; PAM sequence: TTC
cataataaggaatatcaaat

SEQ ID NO: 67843 - DNA, 20 bp, Artificial Sequence
  Description of Artificial Sequence: Synthetic oligonucleotide
  Target: ATXN2; (-) strand; PAM type: YTN; PAM sequence: TTT
ccataataaggaatatcaaa

SEQ ID NO: 67844 - DNA, 20 bp, Artificial Sequence
  Description of Artificial Sequence: Synthetic oligonucleotide
  Target: ATXN2; (-) strand; PAM type: YTN; PAM sequence: CTA
tatttccataataaggaata

SEQ ID NO: 67845 - DNA, 20 bp, Artificial Sequence
  Description of Artificial Sequence: Synthetic oligonucleotide
  Target: ATXN2; (-) strand; PAM type: YTN; PAM sequence: TTC
ccaactatatttccataata

SEQ ID NO: 67846 - DNA, 20 bp, Artificial Sequence
  Description of Artificial Sequence: Synthetic oligonucleotide
  Target: ATXN2; (-) strand; PAM type: YTN; PAM sequence: CTA
attcccaactatatttccat

SEQ ID NO: 67847 - DNA, 20 bp, Artificial Sequence
  Description of Artificial Sequence: Synthetic oligonucleotide
  Target: ATXN2; (-) strand; PAM type: YTN; PAM sequence: CTG
tatatggcactaattcccaa

SEQ ID NO: 67848 - DNA, 20 bp, Artificial Sequence
  Description of Artificial Sequence: Synthetic oligonucleotide
  Target: ATXN2; (-) strand; PAM type: YTN; PAM sequence: CTA
tagcatctgtatatggcact

SEQ ID NO: 67849 - DNA, 20 bp, Artificial Sequence
  Description of Artificial Sequence: Synthetic oligonucleotide
  Target: ATXN2; (-) strand; PAM type: YTN; PAM sequence: TTC
tatagcatctgtatatggca

SEQ ID NO: 67850 - DNA, 20 bp, Artificial Sequence
  Description of Artificial Sequence: Synthetic oligonucleotide
  Target: ATXN2; (-) strand; PAM type: YTN; PAM sequence: TTT
ctatagcatctgtatatggc

SEQ ID NO: 67851 - DNA, 20 bp, Artificial Sequence
  Description of Artificial Sequence: Synthetic oligonucleotide
  Target: ATXN2; (-) strand; PAM type: YTN; PAM sequence: TTG
tagtgtgtttctatagcatc

SEQ ID NO: 67852 - DNA, 20 bp, Artificial Sequence
  Description of Artificial Sequence: Synthetic oligonucleotide
  Target: ATXN2; (-) strand; PAM type: YTN; PAM sequence: TTA
cattgtagtgtgtttctata

SEQ ID NO: 67853 - DNA, 20 bp, Artificial Sequence
  Description of Artificial Sequence: Synthetic oligonucleotide
  Target: ATXN2; (-) strand; PAM type: YTN; PAM sequence: CTT
acattgtagtgtgtttctat

SEQ ID NO: 67854 - DNA, 20 bp, Artificial Sequence
  Description of Artificial Sequence: Synthetic oligonucleotide
  Target: ATXN2; (-) strand; PAM type: YTN; PAM sequence: TTG
gcttacattgtagtgtgttt

SEQ ID NO: 67855 - DNA, 20 bp, Artificial Sequence
  Description of Artificial Sequence: Synthetic oligonucleotide
  Target: ATXN2; (-) strand; PAM type: YTN; PAM sequence: TTT
ggcttacattgtagtgtgtt

SEQ ID NO: 67856 - DNA, 20 bp, Artificial Sequence
  Description of Artificial Sequence: Synthetic oligonucleotide
  Target: ATXN2; (-) strand; PAM type: YTN; PAM sequence: TTT
tggcttacattgtagtgtgt

SEQ ID NO: 67857 - DNA, 20 bp, Artificial Sequence
  Description of Artificial Sequence: Synthetic oligonucleotide
  Target: ATXN2; (-) strand; PAM type: YTN; PAM sequence: TTT
ttggcttacattgtagtgtg

SEQ ID NO: 67858 - DNA, 20 bp, Artificial Sequence
  Description of Artificial Sequence: Synthetic oligonucleotide
  Target: ATXN2; (-) strand; PAM type: YTN; PAM sequence: TTA
tttttggcttacattgtagt

SEQ ID NO: 67859 - DNA, 20 bp, Artificial Sequence
  Description of Artificial Sequence: Synthetic oligonucleotide
  Target: ATXN2; (-) strand; PAM type: YTN; PAM sequence: TTT
atttttggcttacattgtag

SEQ ID NO: 67860 - DNA, 20 bp, Artificial Sequence
  Description of Artificial Sequence: Synthetic oligonucleotide
  Target: ATXN2; (-) strand; PAM type: YTN; PAM sequence: CTA
taaacatttatttttggctt

SEQ ID NO: 67861 - DNA, 20 bp, Artificial Sequence
  Description of Artificial Sequence: Synthetic oligonucleotide
  Target: ATXN2; (-) strand; PAM type: YTN; PAM sequence: TTC
tataaacatttatttttggc

SEQ ID NO: 67862 - DNA, 20 bp, Artificial Sequence
  Description of Artificial Sequence: Synthetic oligonucleotide
  Target: ATXN2; (-) strand; PAM type: YTN; PAM sequence: TTA
tcagtacattctataaacat

SEQ ID NO: 67863 - DNA, 20 bp, Artificial Sequence
  Description of Artificial Sequence: Synthetic oligonucleotide
  Target: ATXN2; (-) strand; PAM type: YTN; PAM sequence: TTT
atcagtacattctataaaca

SEQ ID NO: 67864 - DNA, 20 bp, Artificial Sequence
  Description of Artificial Sequence: Synthetic oligonucleotide
  Target: ATXN2; (-) strand; PAM type: YTN; PAM sequence: TTG
tttatcagtacattctataa

SEQ ID NO: 67865 - DNA, 20 bp, Artificial Sequence
  Description of Artificial Sequence: Synthetic oligonucleotide
  Target: ATXN2; (-) strand; PAM type: YTN; PAM sequence: TTT
gtttatcagtacattctata

SEQ ID NO: 67866 - DNA, 20 bp, Artificial Sequence
  Description of Artificial Sequence: Synthetic oligonucleotide
  Target: ATXN2; (-) strand; PAM type: YTN; PAM sequence: CTT
tgtttatcagtacattctat

SEQ ID NO: 67867 - DNA, 20 bp, Artificial Sequence
  Description of Artificial Sequence: Synthetic oligonucleotide
  Target: ATXN2; (-) strand; PAM type: YTN; PAM sequence: TTA
gcagctttgtttatcagtac

SEQ ID NO: 67868 - DNA, 20 bp, Artificial Sequence
  Description of Artificial Sequence: Synthetic oligonucleotide
  Target: ATXN2; (-) strand; PAM type: YTN; PAM sequence: TTT
agcagctttgtttatcagta

SEQ ID NO: 67869 - DNA, 20 bp, Artificial Sequence
  Description of Artificial Sequence: Synthetic oligonucleotide
  Target: ATXN2; (-) strand; PAM type: YTN; PAM sequence: TTT
tagcagctttgtttatcagt

SEQ ID NO: 67870 - DNA, 20 bp, Artificial Sequence
  Description of Artificial Sequence: Synthetic oligonucleotide
  Target: ATXN2; (-) strand; PAM type: YTN; PAM sequence: TTT
ttagcagctttgtttatcag

SEQ ID NO: 67871 - DNA, 20 bp, Artificial Sequence
  Description of Artificial Sequence: Synthetic oligonucleotide
  Target: ATXN2; (-) strand; PAM type: YTN; PAM sequence: CTT
tttagcagctttgtttatca

SEQ ID NO: 67872 - DNA, 20 bp, Artificial Sequence
  Description of Artificial Sequence: Synthetic oligonucleotide
  Target: ATXN2; (-) strand; PAM type: YTN; PAM sequence: TTA
tctttttagcagctttgttt

SEQ ID NO: 67873 - DNA, 20 bp, Artificial Sequence
  Description of Artificial Sequence: Synthetic oligonucleotide
  Target: ATXN2; (-) strand; PAM type: YTN; PAM sequence: CTT
atctttttagcagctttgtt

SEQ ID NO: 67874 - DNA, 20 bp, Artificial Sequence
  Description of Artificial Sequence: Synthetic oligonucleotide
  Target: ATXN2; (-) strand; PAM type: YTN; PAM sequence: TTC
cttatctttttagcagcttt

SEQ ID NO: 67875 - DNA, 20 bp, Artificial Sequence
  Description of Artificial Sequence: Synthetic oligonucleotide
  Target: ATXN2; (-) strand; PAM type: YTN; PAM sequence: TTT
ccttatctttttagcagctt

SEQ ID NO: 67876 - DNA, 20 bp, Artificial Sequence
  Description of Artificial Sequence: Synthetic oligonucleotide
  Target: ATXN2; (-) strand; PAM type: YTN; PAM sequence: TTG
gagggaccgtatttccttat

SEQ ID NO: 67877 - DNA, 20 bp, Artificial Sequence
  Description of Artificial Sequence: Synthetic oligonucleotide
  Target: ATXN2; (-) strand; PAM type: YTN; PAM sequence: TTT
ggagggaccgtatttcctta

SEQ ID NO: 67878 - DNA, 20 bp, Artificial Sequence
  Description of Artificial Sequence: Synthetic oligonucleotide
  Target: ATXN2; (-) strand; PAM type: YTN; PAM sequence: CTA
tttggagggaccgtatttcc

SEQ ID NO: 67879 - DNA, 20 bp, Artificial Sequence
  Description of Artificial Sequence: Synthetic oligonucleotide
  Target: ATXN2; (-) strand; PAM type: YTN; PAM sequence: CTA
atatgaggcaaacacagtat

SEQ ID NO: 67880 - DNA, 20 bp, Artificial Sequence
  Description of Artificial Sequence: Synthetic oligonucleotide
  Target: ATXN2; (-) strand; PAM type: YTN; PAM sequence: CTC
taatatgaggcaaacacagt

SEQ ID NO: 67881 - DNA, 20 bp, Artificial Sequence
  Description of Artificial Sequence: Synthetic oligonucleotide
  Target: ATXN2; (-) strand; PAM type: YTN; PAM sequence: CTC
tctaatatgaggcaaacaca

SEQ ID NO: 67882 - DNA, 20 bp, Artificial Sequence
  Description of Artificial Sequence: Synthetic oligonucleotide
  Target: ATXN2; (-) strand; PAM type: YTN; PAM sequence: TTG
taaagtacctctctaatatg

SEQ ID NO: 67883 - DNA, 20 bp, Artificial Sequence
  Description of Artificial Sequence: Synthetic oligonucleotide
  Target: ATXN2; (-) strand; PAM type: YTN; PAM sequence: TTT
gtaaagtacctctctaatat

SEQ ID NO: 67884 - DNA, 20 bp, Artificial Sequence
  Description of Artificial Sequence: Synthetic oligonucleotide
  Target: ATXN2; (-) strand; PAM type: YTN; PAM sequence: TTT
tgtaaagtacctctctaata

SEQ ID NO: 67885 - DNA, 20 bp, Artificial Sequence
  Description of Artificial Sequence: Synthetic oligonucleotide
  Target: ATXN2; (-) strand; PAM type: YTN; PAM sequence: CTA
taaagttttgtaaagtacct

SEQ ID NO: 67886 - DNA, 20 bp, Artificial Sequence
  Description of Artificial Sequence: Synthetic oligonucleotide
  Target: ATXN2; (-) strand; PAM type: YTN; PAM sequence: TTG
taaaactataaagttttgta

SEQ ID NO: 67887 - DNA, 20 bp, Artificial Sequence
  Description of Artificial Sequence: Synthetic oligonucleotide
  Target: ATXN2; (-) strand; PAM type: YTN; PAM sequence: TTC
ataaatacagatatattgta

SEQ ID NO: 67888 - DNA, 20 bp, Artificial Sequence
  Description of Artificial Sequence: Synthetic oligonucleotide
  Target: ATXN2; (-) strand; PAM type: YTN; PAM sequence: CTA
taaggttcataaatacagat

SEQ ID NO: 67889 - DNA, 20 bp, Artificial Sequence
  Description of Artificial Sequence: Synthetic oligonucleotide
  Target: ATXN2; (-) strand; PAM type: YTN; PAM sequence: TTC
ctataaggttcataaataca

SEQ ID NO: 67890 - DNA, 20 bp, Artificial Sequence
  Description of Artificial Sequence: Synthetic oligonucleotide
  Target: ATXN2; (-) strand; PAM type: YTN; PAM sequence: TTG
tgatgagattcctataaggt

SEQ ID NO: 67891 - DNA, 20 bp, Artificial Sequence
  Description of Artificial Sequence: Synthetic oligonucleotide
  Target: ATXN2; (-) strand; PAM type: YTN; PAM sequence: TTA
tgggattgtgatgagattcc

SEQ ID NO: 67892 - DNA, 20 bp, Artificial Sequence
  Description of Artificial Sequence: Synthetic oligonucleotide
  Target: ATXN2; (-) strand; PAM type: YTN; PAM sequence: CTA
cattatgggattgtgatgag

SEQ ID NO: 67893 - DNA, 20 bp, Artificial Sequence
  Description of Artificial Sequence: Synthetic oligonucleotide
  Target: ATXN2; (-) strand; PAM type: YTN; PAM sequence: CTA
gtctacattatgggattgtg

SEQ ID NO: 67894 - DNA, 20 bp, Artificial Sequence
  Description of Artificial Sequence: Synthetic oligonucleotide
  Target: ATXN2; (-) strand; PAM type: YTN; PAM sequence: TTG
cctagtctacattatgggat

SEQ ID NO: 67895 - DNA, 20 bp, Artificial Sequence
  Description of Artificial Sequence: Synthetic oligonucleotide
  Target: ATXN2; (-) strand; PAM type: YTN; PAM sequence: CTT
gcctagtctacattatggga

SEQ ID NO: 67896 - DNA, 20 bp, Artificial Sequence
  Description of Artificial Sequence: Synthetic oligonucleotide
  Target: ATXN2; (-) strand; PAM type: YTN; PAM sequence: TTC
ttgcctagtctacattatgg

SEQ ID NO: 67897 - DNA, 20 bp, Artificial Sequence
  Description of Artificial Sequence: Synthetic oligonucleotide
  Target: ATXN2; (-) strand; PAM type: YTN; PAM sequence: TTA
ataattcttgcctagtctac

SEQ ID NO: 67898 - DNA, 20 bp, Artificial Sequence
  Description of Artificial Sequence: Synthetic oligonucleotide
  Target: ATXN2; (-) strand; PAM type: YTN; PAM sequence: TTC
gcagtgagtaaagtgttaat

SEQ ID NO: 67899 - DNA, 20 bp, Artificial Sequence
  Description of Artificial Sequence: Synthetic oligonucleotide
  Target: ATXN2; (-) strand; PAM type: YTN; PAM sequence: TTT
cgcagtgagtaaagtgttaa

SEQ ID NO: 67900 - DNA, 20 bp, Artificial Sequence
  Description of Artificial Sequence: Synthetic oligonucleotide
  Target: ATXN2; (-) strand; PAM type: YTN; PAM sequence: TTG
agatttcgcagtgagtaaag

SEQ ID NO: 67901 - DNA, 20 bp, Artificial Sequence
  Description of Artificial Sequence: Synthetic oligonucleotide
  Target: ATXN2; (-) strand; PAM type: YTN; PAM sequence: CTG
aagttgagatttcgcagtga

SEQ ID NO: 67902 - DNA, 20 bp, Artificial Sequence
  Description of Artificial Sequence: Synthetic oligonucleotide
  Target: ATXN2; (-) strand; PAM type: YTN; PAM sequence: TTC
tgaagttgagatttcgcagt

SEQ ID NO: 67903 - DNA, 20 bp, Artificial Sequence
  Description of Artificial Sequence: Synthetic oligonucleotide
  Target: ATXN2; (-) strand; PAM type: YTN; PAM sequence: CTC
attctgaagttgagatttcg

SEQ ID NO: 67904 - DNA, 20 bp, Artificial Sequence
  Description of Artificial Sequence: Synthetic oligonucleotide
  Target: ATXN2; (-) strand; PAM type: YTN; PAM sequence: TTA
aagcaagtcagacactcatt

SEQ ID NO: 67905 - DNA, 20 bp, Artificial Sequence
  Description of Artificial Sequence: Synthetic oligonucleotide
  Target: ATXN2; (-) strand; PAM type: YTN; PAM sequence: TTC
atcatatattaaagcaagtc

SEQ ID NO: 67906 - DNA, 20 bp, Artificial Sequence
  Description of Artificial Sequence: Synthetic oligonucleotide
  Target: ATXN2; (-) strand; PAM type: YTN; PAM sequence: TTA
ttcatcatatattaaagcaa

SEQ ID NO: 67907 - DNA, 20 bp, Artificial Sequence
  Description of Artificial Sequence: Synthetic oligonucleotide
  Target: ATXN2; (-) strand; PAM type: YTN; PAM sequence: CTT
attcatcatatattaaagca

SEQ ID NO: 67908 - DNA, 20 bp, Artificial Sequence
  Description of Artificial Sequence: Synthetic oligonucleotide
  Target: ATXN2; (-) strand; PAM type: YTN; PAM sequence: CTA
ccacttattcatcatatatt

SEQ ID NO: 67909 - DNA, 20 bp, Artificial Sequence
  Description of Artificial Sequence: Synthetic oligonucleotide
  Target: ATXN2; (-) strand; PAM type: YTN; PAM sequence: CTC
taccacttattcatcatata

SEQ ID NO: 67910 - DNA, 20 bp, Artificial Sequence
  Description of Artificial Sequence: Synthetic oligonucleotide
  Target: ATXN2; (-) strand; PAM type: YTN; PAM sequence: CTG
ggctctaccacttattcatc

SEQ ID NO: 67911 - DNA, 20 bp, Artificial Sequence
  Description of Artificial Sequence: Synthetic oligonucleotide
  Target: ATXN2; (-) strand; PAM type: YTN; PAM sequence: TTC
tgggctctaccacttattca

SEQ ID NO: 67912 - DNA, 20 bp, Artificial Sequence
  Description of Artificial Sequence: Synthetic oligonucleotide
  Target: ATXN2; (-) strand; PAM type: YTN; PAM sequence: TTA
ttctgggctctaccacttat

SEQ ID NO: 67913 - DNA, 20 bp, Artificial Sequence
  Description of Artificial Sequence: Synthetic oligonucleotide
  Target: ATXN2; (-) strand; PAM type: YTN; PAM sequence: TTT
attctgggctctaccactta

SEQ ID NO: 67914 - DNA, 20 bp, Artificial Sequence
  Description of Artificial Sequence: Synthetic oligonucleotide
  Target: ATXN2; (-) strand; PAM type: YTN; PAM sequence: TTT
tattctgggctctaccactt

SEQ ID NO: 67915 - DNA, 20 bp, Artificial Sequence
  Description of Artificial Sequence: Synthetic oligonucleotide
  Target: ATXN2; (-) strand; PAM type: YTN; PAM sequence: TTT
ttattctgggctctaccact

SEQ ID NO: 67916 - DNA, 20 bp, Artificial Sequence
  Description of Artificial Sequence: Synthetic oligonucleotide
  Target: ATXN2; (-) strand; PAM type: YTN; PAM sequence: TTG
ggaaacccatatttttattc

SEQ ID NO: 67917 - DNA, 20 bp, Artificial Sequence
  Description of Artificial Sequence: Synthetic oligonucleotide
  Target: ATXN2; (-) strand; PAM type: YTN; PAM sequence: TTA
aaaatagtagaatcaccagg

SEQ ID NO: 67918 - DNA, 20 bp, Artificial Sequence
  Description of Artificial Sequence: Synthetic oligonucleotide
  Target: ATXN2; (-) strand; PAM type: YTN; PAM sequence: TTG
aggaagtgtaagtatgtata

SEQ ID NO: 67919 - DNA, 20 bp, Artificial Sequence
  Description of Artificial Sequence: Synthetic oligonucleotide
  Target: ATXN2; (-) strand; PAM type: YTN; PAM sequence: TTT
gaggaagtgtaagtatgtat

SEQ ID NO: 67920 - DNA, 20 bp, Artificial Sequence
  Description of Artificial Sequence: Synthetic oligonucleotide
  Target: ATXN2; (-) strand; PAM type: YTN; PAM sequence: CTG
tttgaggaagtgtaagtatg

SEQ ID NO: 67921 - DNA, 20 bp, Artificial Sequence
  Description of Artificial Sequence: Synthetic oligonucleotide
  Target: ATXN2; (-) strand; PAM type: YTN; PAM sequence: CTC
tgtttgaggaagtgtaagta

SEQ ID NO: 67922 - DNA, 20 bp, Artificial Sequence
  Description of Artificial Sequence: Synthetic oligonucleotide
  Target: ATXN2; (-) strand; PAM type: YTN; PAM sequence: CTA
caactctgtttgaggaagtg

SEQ ID NO: 67923 - DNA, 20 bp, Artificial Sequence
  Description of Artificial Sequence: Synthetic oligonucleotide
  Target: ATXN2; (-) strand; PAM type: YTN; PAM sequence: CTG
agctacaactctgtttgagg

SEQ ID NO: 67924 - DNA, 20 bp, Artificial Sequence
  Description of Artificial Sequence: Synthetic oligonucleotide
  Target: ATXN2; (-) strand; PAM type: YTN; PAM sequence: CTA
gatataaagagggctgagct

SEQ ID NO: 67925 - DNA, 20 bp, Artificial Sequence
  Description of Artificial Sequence: Synthetic oligonucleotide
  Target: ATXN2; (-) strand; PAM type: YTN; PAM sequence: TTA
cactagatataaagagggct

SEQ ID NO: 67926 - DNA, 20 bp, Artificial Sequence
  Description of Artificial Sequence: Synthetic oligonucleotide
  Target: ATXN2; (-) strand; PAM type: YTN; PAM sequence: TTG
tcattacactagatataaag

SEQ ID NO: 67927 - DNA, 20 bp, Artificial Sequence
  Description of Artificial Sequence: Synthetic oligonucleotide
  Target: ATXN2; (-) strand; PAM type: YTN; PAM sequence: TTT
gtcattacactagatataaa

SEQ ID NO: 67928 - DNA, 20 bp, Artificial Sequence
  Description of Artificial Sequence: Synthetic oligonucleotide
  Target: ATXN2; (-) strand; PAM type: YTN; PAM sequence: TTT
tgtcattacactagatataa

SEQ ID NO: 67929 - DNA, 20 bp, Artificial Sequence
  Description of Artificial Sequence: Synthetic oligonucleotide
  Target: ATXN2; (-) strand; PAM type: YTN; PAM sequence: CTC
attttgtcattacactagat

SEQ ID NO: 67930 - DNA, 20 bp, Artificial Sequence
  Description of Artificial Sequence: Synthetic oligonucleotide
  Target: ATXN2; (-) strand; PAM type: YTN; PAM sequence: TTG
ggcataatgatggtactcat

SEQ ID NO: 67931 - DNA, 20 bp, Artificial Sequence
  Description of Artificial Sequence: Synthetic oligonucleotide
  Target: ATXN2; (-) strand; PAM type: YTN; PAM sequence: CTT
gggcataatgatggtactca

SEQ ID NO: 67932 - DNA, 20 bp, Artificial Sequence
  Description of Artificial Sequence: Synthetic oligonucleotide
  Target: ATXN2; (-) strand; PAM type: YTN; PAM sequence: CTC
ggggggaacgtggtcatcag

SEQ ID NO: 67933 - DNA, 20 bp, Artificial Sequence
  Description of Artificial Sequence: Synthetic oligonucleotide
  Target: ATXN2; (-) strand; PAM type: YTN; PAM sequence: CTC
cagtagcaaggaccagtccc

SEQ ID NO: 67934 - DNA, 20 bp, Artificial Sequence
  Description of Artificial Sequence: Synthetic oligonucleotide
  Target: ATXN2; (-) strand; PAM type: YTN; PAM sequence: CTC
ctccagtagcaaggaccagt

SEQ ID NO: 67935 - DNA, 20 bp, Artificial Sequence
  Description of Artificial Sequence: Synthetic oligonucleotide
  Target: ATXN2; (-) strand; PAM type: YTN; PAM sequence: CTA
ctcctccagtagcaaggacc

SEQ ID NO: 67936 - DNA, 20 bp, Artificial Sequence
  Description of Artificial Sequence: Synthetic oligonucleotide
  Target: ATXN2; (-) strand; PAM type: YTN; PAM sequence: TTG
tatcccacaacccacccagt

SEQ ID NO: 67937 - DNA, 20 bp, Artificial Sequence
  Description of Artificial Sequence: Synthetic oligonucleotide
  Target: ATXN2; (-) strand; PAM type: YTN; PAM sequence: TTT
gtatcccacaacccacccag

SEQ ID NO: 67938 - DNA, 20 bp, Artificial Sequence
  Description of Artificial Sequence: Synthetic oligonucleotide
  Target: ATXN2; (-) strand; PAM type: YTN; PAM sequence: CTA
gaatttgtatcccacaaccc

SEQ ID NO: 67939 - DNA, 20 bp, Artificial Sequence
  Description of Artificial Sequence: Synthetic oligonucleotide
  Target: ATXN2; (-) strand; PAM type: YTN; PAM sequence: TTC
catatccagtggcctagaat

SEQ ID NO: 67940 - DNA, 20 bp, Artificial Sequence
  Description of Artificial Sequence: Synthetic oligonucleotide
  Target: ATXN2; (-) strand; PAM type: YTN; PAM sequence: CTG
ggaggggttccatatccagt

SEQ ID NO: 67941 - DNA, 20 bp, Artificial Sequence
  Description of Artificial Sequence: Synthetic oligonucleotide
  Target: ATXN2; (-) strand; PAM type: YTN; PAM sequence: CTG
ctgggaggggttccatatcc

SEQ ID NO: 67942 - DNA, 20 bp, Artificial Sequence
  Description of Artificial Sequence: Synthetic oligonucleotide
  Target: ATXN2; (-) strand; PAM type: YTN; PAM sequence: TTC
tgctgggaggggttccatat

SEQ ID NO: 67943 - DNA, 20 bp, Artificial Sequence
  Description of Artificial Sequence: Synthetic oligonucleotide
  Target: ATXN2; (-) strand; PAM type: YTN; PAM sequence: TTT
ctgctgggaggggttccata

SEQ ID NO: 67944 - DNA, 20 bp, Artificial Sequence
  Description of Artificial Sequence: Synthetic oligonucleotide
  Target: ATXN2; (-) strand; PAM type: YTN; PAM sequence: CTC
gaaatcacagagtttctgct

SEQ ID NO: 67945 - DNA, 20 bp, Artificial Sequence
  Description of Artificial Sequence: Synthetic oligonucleotide
  Target: ATXN2; (-) strand; PAM type: YTN; PAM sequence: CTC
caaggatgtccccaaaggcc

SEQ ID NO: 67946 - DNA, 20 bp, Artificial Sequence
  Description of Artificial Sequence: Synthetic oligonucleotide
  Target: ATXN2; (-) strand; PAM type: YTN; PAM sequence: TTA
gggcctccaaggatgtcccc

SEQ ID NO: 67947 - DNA, 20 bp, Artificial Sequence
  Description of Artificial Sequence: Synthetic oligonucleotide
  Target: ATXN2; (-) strand; PAM type: YTN; PAM sequence: CTT
agggcctccaaggatgtccc

SEQ ID NO: 67948 - DNA, 20 bp, Artificial Sequence
  Description of Artificial Sequence: Synthetic oligonucleotide
  Target: ATXN2; (-) strand; PAM type: YTN; PAM sequence: TTC
cttagggcctccaaggatgt

SEQ ID NO: 67949 - DNA, 20 bp, Artificial Sequence
  Description of Artificial Sequence: Synthetic oligonucleotide
  Target: ATXN2; (-) strand; PAM type: YTN; PAM sequence: CTT
ccttagggcctccaaggatg

SEQ ID NO: 67950 - DNA, 20 bp, Artificial Sequence
  Description of Artificial Sequence: Synthetic oligonucleotide
  Target: ATXN2; (-) strand; PAM type: YTN; PAM sequence: TTC
ttccttagggcctccaagga

SEQ ID NO: 67951 - DNA, 20 bp, Artificial Sequence
  Description of Artificial Sequence: Synthetic oligonucleotide
  Target: ATXN2; (-) strand; PAM type: YTN; PAM sequence: TTT
cttccttagggcctccaagg

SEQ ID NO: 67952 - DNA, 20 bp, Artificial Sequence
  Description of Artificial Sequence: Synthetic oligonucleotide
  Target: ATXN2; (-) strand; PAM type: YTN; PAM sequence: CTG
tttcttccttagggcctcca

SEQ ID NO: 67953 - DNA, 20 bp, Artificial Sequence
  Description of Artificial Sequence: Synthetic oligonucleotide
  Target: ATXN2; (-) strand; PAM type: YTN; PAM sequence: TTC
actgtttcttccttagggcc

SEQ ID NO: 67954 - DNA, 20 bp, Artificial Sequence
  Description of Artificial Sequence: Synthetic oligonucleotide
  Target: ATXN2; (-) strand; PAM type: YTN; PAM sequence: TTA
tgtgatgttcactgtttctt

SEQ ID NO: 67955 - DNA, 20 bp, Artificial Sequence
  Description of Artificial Sequence: Synthetic oligonucleotide
  Target: ATXN2; (-) strand; PAM type: YTN; PAM sequence: TTT
atgtgatgttcactgtttct

SEQ ID NO: 67956 - DNA, 20 bp, Artificial Sequence
  Description of Artificial Sequence: Synthetic oligonucleotide
  Target: ATXN2; (-) strand; PAM type: YTN; PAM sequence: CTG
atgaatatcatggaatttat

SEQ ID NO: 67957 - DNA, 20 bp, Artificial Sequence
  Description of Artificial Sequence: Synthetic oligonucleotide
  Target: ATXN2; (-) strand; PAM type: YTN; PAM sequence: TTA
gcagaaaagtagtactgatg

SEQ ID NO: 67958 - DNA, 20 bp, Artificial Sequence
  Description of Artificial Sequence: Synthetic oligonucleotide
  Target: ATXN2; (-) strand; PAM type: YTN; PAM sequence: TTT
agcagaaaagtagtactgat

SEQ ID NO: 67959 - DNA, 20 bp, Artificial Sequence
  Description of Artificial Sequence: Synthetic oligonucleotide
  Target: ATXN2; (-) strand; PAM type: YTN; PAM sequence: CTG
tagagtgagtgagtgtgtgt

SEQ ID NO: 67960 - DNA, 20 bp, Artificial Sequence
  Description of Artificial Sequence: Synthetic oligonucleotide
  Target: ATXN2; (-) strand; PAM type: YTN; PAM sequence: TTA
accaaggaaaaactgtagag

SEQ ID NO: 67961 - DNA, 20 bp, Artificial Sequence
  Description of Artificial Sequence: Synthetic oligonucleotide
  Target: ATXN2; (-) strand; PAM type: YTN; PAM sequence: TTT
aaccaaggaaaaactgtaga

SEQ ID NO: 67962 - DNA, 20 bp, Artificial Sequence
  Description of Artificial Sequence: Synthetic oligonucleotide
  Target: ATXN2; (-) strand; PAM type: YTN; PAM sequence: TTT
taaccaaggaaaaactgtag

SEQ ID NO: 67963 - DNA, 20 bp, Artificial Sequence
  Description of Artificial Sequence: Synthetic oligonucleotide
  Target: ATXN2; (-) strand; PAM type: YTN; PAM sequence: TTT
ttaaccaaggaaaaactgta

SEQ ID NO: 67964 - DNA, 20 bp, Artificial Sequence
  Description of Artificial Sequence: Synthetic oligonucleotide
  Target: ATXN2; (-) strand; PAM type: YTN; PAM sequence: CTA
tttttaaccaaggaaaaact

SEQ ID NO: 67965 - DNA, 20 bp, Artificial Sequence
  Description of Artificial Sequence: Synthetic oligonucleotide
  Target: ATXN2; (-) strand; PAM type: YTN; PAM sequence: TTC
tatttttaaccaaggaaaaa

SEQ ID NO: 67966 - DNA, 20 bp, Artificial Sequence
  Description of Artificial Sequence: Synthetic oligonucleotide
  Target: ATXN2; (-) strand; PAM type: YTN; PAM sequence: TTT
ctatttttaaccaaggaaaa

SEQ ID NO: 67967 - DNA, 20 bp, Artificial Sequence
  Description of Artificial Sequence: Synthetic oligonucleotide
  Target: ATXN2; (-) strand; PAM type: YTN; PAM sequence: TTT
tctatttttaaccaaggaaa

SEQ ID NO: 67968 - DNA, 20 bp, Artificial Sequence
  Description of Artificial Sequence: Synthetic oligonucleotide
  Target: ATXN2; (-) strand; PAM type: YTN; PAM sequence: TTT
ttctatttttaaccaaggaa

SEQ ID NO: 67969 - DNA, 20 bp, Artificial Sequence
  Description of Artificial Sequence: Synthetic oligonucleotide
  Target: ATXN2; (-) strand; PAM type: YTN; PAM sequence: TTT
tttctatttttaaccaagga

SEQ ID NO: 67970 - DNA, 20 bp, Artificial Sequence
  Description of Artificial Sequence: Synthetic oligonucleotide
  Target: ATXN2; (-) strand; PAM type: YTN; PAM sequence: TTT
ttttctatttttaaccaagg

SEQ ID NO: 67971 - DNA, 20 bp, Artificial Sequence
  Description of Artificial Sequence: Synthetic oligonucleotide
  Target: ATXN2; (-) strand; PAM type: YTN; PAM sequence: TTT
tttttctatttttaaccaag

SEQ ID NO: 67972 - DNA, 20 bp, Artificial Sequence
  Description of Artificial Sequence: Synthetic oligonucleotide
  Target: ATXN2; (-) strand; PAM type: YTN; PAM sequence: TTT
ttttttctatttttaaccaa

SEQ ID NO: 67973 - DNA, 20 bp, Artificial Sequence
  Description of Artificial Sequence: Synthetic oligonucleotide
  Target: ATXN2; (-) strand; PAM type: YTN; PAM sequence: TTT
tttttttctatttttaacca

SEQ ID NO: 67974 - DNA, 20 bp, Artificial Sequence
  Description of Artificial Sequence: Synthetic oligonucleotide
  Target: ATXN2; (-) strand; PAM type: YTN; PAM sequence: TTT
ttttttttctatttttaacc

SEQ ID NO: 67975 - DNA, 20 bp, Artificial Sequence
  Description of Artificial Sequence: Synthetic oligonucleotide
  Target: ATXN2; (-) strand; PAM type: YTN; PAM sequence: TTT
tttttttttctatttttaac

SEQ ID NO: 67976 - DNA, 20 bp, Artificial Sequence
  Description of Artificial Sequence: Synthetic oligonucleotide
  Target: ATXN2; (-) strand; PAM type: YTN; PAM sequence: TTA
gtatggccaaaaaaatatgt

SEQ ID NO: 67977 - DNA, 20 bp, Artificial Sequence
  Description of Artificial Sequence: Synthetic oligonucleotide
  Target: ATXN2; (-) strand; PAM type: YTN; PAM sequence: CTG
aaagaattagtatggccaaa

SEQ ID NO: 67978 - DNA, 20 bp, Artificial Sequence
  Description of Artificial Sequence: Synthetic oligonucleotide
  Target: ATXN2; (-) strand; PAM type: YTN; PAM sequence: TTC
tgaaagaattagtatggcca

SEQ ID NO: 67979 - DNA, 20 bp, Artificial Sequence
  Description of Artificial Sequence: Synthetic oligonucleotide
  Target: ATXN2; (-) strand; PAM type: YTN; PAM sequence: TTC
cacaaaataattctgaaaga

SEQ ID NO: 67980 - DNA, 20 bp, Artificial Sequence
  Description of Artificial Sequence: Synthetic oligonucleotide
  Target: ATXN2; (-) strand; PAM type: YTN; PAM sequence: TTG
tggcattccacaaaataatt

SEQ ID NO: 67981 - DNA, 20 bp, Artificial Sequence
  Description of Artificial Sequence: Synthetic oligonucleotide
  Target: ATXN2; (-) strand; PAM type: YTN; PAM sequence: TTT
gtggcattccacaaaataat

SEQ ID NO: 67982 - DNA, 20 bp, Artificial Sequence
  Description of Artificial Sequence: Synthetic oligonucleotide
  Target: ATXN2; (-) strand; PAM type: YTN; PAM sequence: CTT
tgtggcattccacaaaataa

SEQ ID NO: 67983 - DNA, 20 bp, Artificial Sequence
  Description of Artificial Sequence: Synthetic oligonucleotide
  Target: ATXN2; (-) strand; PAM type: YTN; PAM sequence: TTA
taaaactttgtggcattcca

SEQ ID NO: 67984 - DNA, 20 bp, Artificial Sequence
  Description of Artificial Sequence: Synthetic oligonucleotide
  Target: ATXN2; (-) strand; PAM type: YTN; PAM sequence: TTT
ataaaactttgtggcattcc

SEQ ID NO: 67985 - DNA, 20 bp, Artificial Sequence
  Description of Artificial Sequence: Synthetic oligonucleotide
  Target: ATXN2; (-) strand; PAM type: YTN; PAM sequence: TTA
tttataaaactttgtggcat

SEQ ID NO: 67986 - DNA, 20 bp, Artificial Sequence
  Description of Artificial Sequence: Synthetic oligonucleotide
  Target: ATXN2; (-) strand; PAM type: YTN; PAM sequence: TTT
atttataaaactttgtggca

SEQ ID NO: 67987 - DNA, 20 bp, Artificial Sequence
  Description of Artificial Sequence: Synthetic oligonucleotide
  Target: ATXN2; (-) strand; PAM type: YTN; PAM sequence: TTA
aaaataaagggaaataataa

SEQ ID NO: 67988 - DNA, 20 bp, Artificial Sequence
  Description of Artificial Sequence: Synthetic oligonucleotide
  Target: ATXN2; (-) strand; PAM type: YTN; PAM sequence: TTT
aaaaataaagggaaataata

SEQ ID NO: 67989 - DNA, 20 bp, Artificial Sequence
  Description of Artificial Sequence: Synthetic oligonucleotide
  Target: ATXN2; (-) strand; PAM type: YTN; PAM sequence: CTT
taaaaataaagggaaataat

SEQ ID NO: 67990 - DNA, 20 bp, Artificial Sequence
  Description of Artificial Sequence: Synthetic oligonucleotide
  Target: ATXN2; (-) strand; PAM type: YTN; PAM sequence: TTC
tttaaaaataaagggaaata

SEQ ID NO: 67991 - DNA, 20 bp, Artificial Sequence
  Description of Artificial Sequence: Synthetic oligonucleotide
  Target: ATXN2; (-) strand; PAM type: YTN; PAM sequence: TTT
ctttaaaaataaagggaaat

SEQ ID NO: 67992 - DNA, 20 bp, Artificial Sequence
  Description of Artificial Sequence: Synthetic oligonucleotide
  Target: ATXN2; (-) strand; PAM type: YTN; PAM sequence: CTT
tctttaaaaataaagggaaa

SEQ ID NO: 67993 - DNA, 20 bp, Artificial Sequence
  Description of Artificial Sequence: Synthetic oligonucleotide
  Target: ATXN2; (-) strand; PAM type: YTN; PAM sequence: CTC
cctttctttaaaaataaagg

SEQ ID NO: 67994 - DNA, 20 bp, Artificial Sequence
  Description of Artificial Sequence: Synthetic oligonucleotide
  Target: ATXN2; (-) strand; PAM type: YTN; PAM sequence: TTC
atccctccctttctttaaaa

SEQ ID NO: 67995 - DNA, 20 bp, Artificial Sequence
  Description of Artificial Sequence: Synthetic oligonucleotide
  Target: ATXN2; (-) strand; PAM type: YTN; PAM sequence: CTT
catccctccctttctttaaa

SEQ ID NO: 67996 - DNA, 20 bp, Artificial Sequence
  Description of Artificial Sequence: Synthetic oligonucleotide
  Target: ATXN2; (-) strand; PAM type: YTN; PAM sequence: TTA
ccaccaacttcatccctccc

SEQ ID NO: 67997 - DNA, 20 bp, Artificial Sequence
  Description of Artificial Sequence: Synthetic oligonucleotide
  Target: ATXN2; (-) strand; PAM type: YTN; PAM sequence: CTT
accaccaacttcatccctcc

SEQ ID NO: 67998 - DNA, 20 bp, Artificial Sequence
  Description of Artificial Sequence: Synthetic oligonucleotide
  Target: ATXN2; (-) strand; PAM type: YTN; PAM sequence: TTC
ttaccaccaacttcatccct

SEQ ID NO: 67999 - DNA, 20 bp, Artificial Sequence
  Description of Artificial Sequence: Synthetic oligonucleotide
  Target: ATXN2; (-) strand; PAM type: YTN; PAM sequence: TTT
cttaccaccaacttcatccc

SEQ ID NO: 68000 - DNA, 20 bp, Artificial Sequence
  Description of Artificial Sequence: Synthetic oligonucleotide
  Target: ATXN2; (-) strand; PAM type: YTN; PAM sequence: TTG
atttcttaccaccaacttca

SEQ ID NO: 68001 - DNA, 20 bp, Artificial Sequence
  Description of Artificial Sequence: Synthetic oligonucleotide
  Target: ATXN2; (-) strand; PAM type: YTN; PAM sequence: TTG
ttgatttcttaccaccaact

SEQ ID NO: 68002 - DNA, 20 bp, Artificial Sequence
  Description of Artificial Sequence: Synthetic oligonucleotide
  Target: ATXN2; (-) strand; PAM type: YTN; PAM sequence: TTA
ttgttgatttcttaccacca

SEQ ID NO: 68003 - DNA, 20 bp, Artificial Sequence
  Description of Artificial Sequence: Synthetic oligonucleotide
  Target: ATXN2; (-) strand; PAM type: YTN; PAM sequence: CTT
attgttgatttcttaccacc

SEQ ID NO: 68004 - DNA, 20 bp, Artificial Sequence
  Description of Artificial Sequence: Synthetic oligonucleotide
  Target: ATXN2; (-) strand; PAM type: YTN; PAM sequence: TTG
acatcttattgttgatttct

SEQ ID NO: 68005 - DNA, 20 bp, Artificial Sequence
  Description of Artificial Sequence: Synthetic oligonucleotide
  Target: ATXN2; (-) strand; PAM type: YTN; PAM sequence: TTA
agagttgacatcttattgtt

SEQ ID NO: 68006 - DNA, 20 bp, Artificial Sequence
  Description of Artificial Sequence: Synthetic oligonucleotide
  Target: ATXN2; (-) strand; PAM type: YTN; PAM sequence: TTT
aagagttgacatcttattgt

SEQ ID NO: 68007 - DNA, 20 bp, Artificial Sequence
  Description of Artificial Sequence: Synthetic oligonucleotide
  Target: ATXN2; (-) strand; PAM type: YTN; PAM sequence: TTT
taagagttgacatcttattg

SEQ ID NO: 68008 - DNA, 20 bp, Artificial Sequence
  Description of Artificial Sequence: Synthetic oligonucleotide
  Target: ATXN2; (-) strand; PAM type: YTN; PAM sequence: CTT
ttaagagttgacatcttatt

SEQ ID NO: 68009 - DNA, 20 bp, Artificial Sequence
  Description of Artificial Sequence: Synthetic oligonucleotide
  Target: ATXN2; (-) strand; PAM type: YTN; PAM sequence: TTC
ttttaagagttgacatctta

SEQ ID NO: 68010 - DNA, 20 bp, Artificial Sequence
  Description of Artificial Sequence: Synthetic oligonucleotide
  Target: ATXN2; (-) strand; PAM type: YTN; PAM sequence: CTA
cagttcttttaagagttgac

SEQ ID NO: 68011 - DNA, 20 bp, Artificial Sequence
  Description of Artificial Sequence: Synthetic oligonucleotide
  Target: ATXN2; (-) strand; PAM type: YTN; PAM sequence: TTG
ctacagttcttttaagagtt

SEQ ID NO: 68012 - DNA, 20 bp, Artificial Sequence
  Description of Artificial Sequence: Synthetic oligonucleotide
  Target: ATXN2; (-) strand; PAM type: YTN; PAM sequence: TTG
aaacagattgctacagttct

SEQ ID NO: 68013 - DNA, 20 bp, Artificial Sequence
  Description of Artificial Sequence: Synthetic oligonucleotide
  Target: ATXN2; (-) strand; PAM type: YTN; PAM sequence: TTA
caaataagacatagttgaaa

SEQ ID NO: 68014 - DNA, 20 bp, Artificial Sequence
  Description of Artificial Sequence: Synthetic oligonucleotide
  Target: ATXN2; (-) strand; PAM type: YTN; PAM sequence: TTT
acaaataagacatagttgaa

SEQ ID NO: 68015 - DNA, 20 bp, Artificial Sequence
  Description of Artificial Sequence: Synthetic oligonucleotide
  Target: ATXN2; (-) strand; PAM type: YTN; PAM sequence: CTT
tacaaataagacatagttga

SEQ ID NO: 68016 - DNA, 20 bp, Artificial Sequence
  Description of Artificial Sequence: Synthetic oligonucleotide
  Target: ATXN2; (-) strand; PAM type: YTN; PAM sequence: TTC
tttacaaataagacatagtt

SEQ ID NO: 68017 - DNA, 20 bp, Artificial Sequence
  Description of Artificial Sequence: Synthetic oligonucleotide
  Target: ATXN2; (-) strand; PAM type: YTN; PAM sequence: TTT
ctttacaaataagacatagt

SEQ ID NO: 68018 - DNA, 20 bp, Artificial Sequence
  Description of Artificial Sequence: Synthetic oligonucleotide
  Target: ATXN2; (-) strand; PAM type: YTN; PAM sequence: CTA
gtaacatatttctttacaaa

SEQ ID NO: 68019 - DNA, 20 bp, Artificial Sequence
  Description of Artificial Sequence: Synthetic oligonucleotide
  Target: ATXN2; (-) strand; PAM type: YTN; PAM sequence: TTC
tagtaacatatttctttaca

SEQ ID NO: 68020 - DNA, 20 bp, Artificial Sequence
  Description of Artificial Sequence: Synthetic oligonucleotide
  Target: ATXN2; (-) strand; PAM type: YTN; PAM sequence: TTT
ctagtaacatatttctttac

SEQ ID NO: 68021 - DNA, 20 bp, Artificial Sequence
  Description of Artificial Sequence: Synthetic oligonucleotide
  Target: ATXN2; (-) strand; PAM type: YTN; PAM sequence: TTA
tcatgtagtcataatttcta

SEQ ID NO: 68022 - DNA, 20 bp, Artificial Sequence
  Description of Artificial Sequence: Synthetic oligonucleotide
  Target: ATXN2; (-) strand; PAM type: YTN; PAM sequence: TTT
atcatgtagtcataatttct

SEQ ID NO: 68023 - DNA, 20 bp, Artificial Sequence
  Description of Artificial Sequence: Synthetic oligonucleotide
  Target: ATXN2; (-) strand; PAM type: YTN; PAM sequence: TTT
tatcatgtagtcataatttc

SEQ ID NO: 68024 - DNA, 20 bp, Artificial Sequence
  Description of Artificial Sequence: Synthetic oligonucleotide
  Target: ATXN2; (-) strand; PAM type: YTN; PAM sequence: TTA
aaaatattttatcatgtagt

SEQ ID NO: 68025 - DNA, 20 bp, Artificial Sequence
  Description of Artificial Sequence: Synthetic oligonucleotide
  Target: ATXN2; (-) strand; PAM type: YTN; PAM sequence: TTC
gggtcagggaaaggtaaaat

SEQ ID NO: 68026 - DNA, 20 bp, Artificial Sequence
  Description of Artificial Sequence: Synthetic oligonucleotide
  Target: ATXN2; (-) strand; PAM type: YTN; PAM sequence: TTA
gaagtaatgtagaaaattcg

SEQ ID NO: 68027 - DNA, 20 bp, Artificial Sequence
  Description of Artificial Sequence: Synthetic oligonucleotide
  Target: ATXN2; (-) strand; PAM type: YTN; PAM sequence: TTT
agaagtaatgtagaaaattc

SEQ ID NO: 68028 - DNA, 20 bp, Artificial Sequence
  Description of Artificial Sequence: Synthetic oligonucleotide
  Target: ATXN2; (-) strand; PAM type: YTN; PAM sequence: TTT
tagaagtaatgtagaaaatt

SEQ ID NO: 68029 - DNA, 20 bp, Artificial Sequence
  Description of Artificial Sequence: Synthetic oligonucleotide
  Target: ATXN2; (-) strand; PAM type: YTN; PAM sequence: CTA
attttagaagtaatgtagaa

SEQ ID NO: 68030 - DNA, 20 bp, Artificial Sequence
  Description of Artificial Sequence: Synthetic oligonucleotide
  Target: ATXN2; (-) strand; PAM type: YTN; PAM sequence: TTC
taattttagaagtaatgtag

SEQ ID NO: 68031 - DNA, 20 bp, Artificial Sequence
  Description of Artificial Sequence: Synthetic oligonucleotide
  Target: ATXN2; (-) strand; PAM type: YTN; PAM sequence: TTT
ctaattttagaagtaatgta

SEQ ID NO: 68032 - DNA, 20 bp, Artificial Sequence
  Description of Artificial Sequence: Synthetic oligonucleotide
  Target: ATXN2; (-) strand; PAM type: YTN; PAM sequence: TTT
tctaattttagaagtaatgt

SEQ ID NO: 68033 - DNA, 20 bp, Artificial Sequence
  Description of Artificial Sequence: Synthetic oligonucleotide
  Target: ATXN2; (-) strand; PAM type: YTN; PAM sequence: TTT
ttctaattttagaagtaatg

SEQ ID NO: 68034 - DNA, 20 bp, Artificial Sequence
  Description of Artificial Sequence: Synthetic oligonucleotide
  Target: ATXN2; (-) strand; PAM type: YTN; PAM sequence: TTT
tttctaattttagaagtaat

SEQ ID NO: 68035 - DNA, 20 bp, Artificial Sequence
  Description of Artificial Sequence: Synthetic oligonucleotide
  Target: ATXN2; (-) strand; PAM type: YTN; PAM sequence: TTT
ttttctaattttagaagtaa

SEQ ID NO: 68036 - DNA, 20 bp, Artificial Sequence
  Description of Artificial Sequence: Synthetic oligonucleotide
  Target: ATXN2; (-) strand; PAM type: YTN; PAM sequence: TTT
tttttctaattttagaagta

SEQ ID NO: 68037 - DNA, 20 bp, Artificial Sequence
  Description of Artificial Sequence: Synthetic oligonucleotide
  Target: ATXN2; (-) strand; PAM type: YTN; PAM sequence: TTT
ttttttctaattttagaagt

SEQ ID NO: 68038 - DNA, 20 bp, Artificial Sequence
  Description of Artificial Sequence: Synthetic oligonucleotide
  Target: ATXN2; (-) strand; PAM type: YTN; PAM sequence: TTT
tttttttctaattttagaag

SEQ ID NO: 68039 - DNA, 20 bp, Artificial Sequence
  Description of Artificial Sequence: Synthetic oligonucleotide
  Target: ATXN2; (-) strand; PAM type: YTN; PAM sequence: TTA
aattttttttttctaatttt

SEQ ID NO: 68040 - DNA, 20 bp, Artificial Sequence
  Description of Artificial Sequence: Synthetic oligonucleotide
  Target: ATXN2; (-) strand; PAM type: YTN; PAM sequence: TTT
aaattttttttttctaattt

SEQ ID NO: 68041 - DNA, 20 bp, Artificial Sequence
  Description of Artificial Sequence: Synthetic oligonucleotide
  Target: ATXN2; (-) strand; PAM type: YTN; PAM sequence: CTG
tttaaattttttttttctaa

SEQ ID NO: 68042 - DNA, 20 bp, Artificial Sequence
  Description of Artificial Sequence: Synthetic oligonucleotide
  Target: ATXN2; (-) strand; PAM type: YTN; PAM sequence: TTC
tgtttaaattttttttttct

SEQ ID NO: 68043 - DNA, 20 bp, Artificial Sequence
  Description of Artificial Sequence: Synthetic oligonucleotide
  Target: ATXN2; (-) strand; PAM type: YTN; PAM sequence: CTT
ctgtttaaattttttttttc

SEQ ID NO: 68044 - DNA, 20 bp, Artificial Sequence
  Description of Artificial Sequence: Synthetic oligonucleotide
  Target: ATXN2; (-) strand; PAM type: YTN; PAM sequence: TTA
atagtcttctgtttaaattt

SEQ ID NO: 68045 - DNA, 20 bp, Artificial Sequence
  Description of Artificial Sequence: Synthetic oligonucleotide
  Target: ATXN2; (-) strand; PAM type: YTN; PAM sequence: TTA
gtggtatcggggtgtatagg

SEQ ID NO: 68046 - DNA, 20 bp, Artificial Sequence
  Description of Artificial Sequence: Synthetic oligonucleotide
  Target: ATXN2; (-) strand; PAM type: YTN; PAM sequence: TTT
agtggtatcggggtgtatag

SEQ ID NO: 68047 - DNA, 20 bp, Artificial Sequence
  Description of Artificial Sequence: Synthetic oligonucleotide
  Target: ATXN2; (-) strand; PAM type: YTN; PAM sequence: TTT
tagtggtatcggggtgtata

SEQ ID NO: 68048 - DNA, 20 bp, Artificial Sequence
  Description of Artificial Sequence: Synthetic oligonucleotide
  Target: ATXN2; (-) strand; PAM type: YTN; PAM sequence: TTA
agaagggtatgtacatatgt

SEQ ID NO: 68049 - DNA, 20 bp, Artificial Sequence
  Description of Artificial Sequence: Synthetic oligonucleotide
  Target: ATXN2; (-) strand; PAM type: YTN; PAM sequence: TTT
aagaagggtatgtacatatg

SEQ ID NO: 68050 - DNA, 20 bp, Artificial Sequence
  Description of Artificial Sequence: Synthetic oligonucleotide
  Target: ATXN2; (-) strand; PAM type: YTN; PAM sequence: TTA
gagaaatttaagaagggtat

SEQ ID NO: 68051 - DNA, 20 bp, Artificial Sequence
  Description of Artificial Sequence: Synthetic oligonucleotide
  Target: ATXN2; (-) strand; PAM type: YTN; PAM sequence: TTT
agagaaatttaagaagggta

SEQ ID NO: 68052 - DNA, 20 bp, Artificial Sequence
  Description of Artificial Sequence: Synthetic oligonucleotide
  Target: ATXN2; (-) strand; PAM type: YTN; PAM sequence: TTT
tagagaaatttaagaagggt

SEQ ID NO: 68053 - DNA, 20 bp, Artificial Sequence
  Description of Artificial Sequence: Synthetic oligonucleotide
  Target: ATXN2; (-) strand; PAM type: YTN; PAM sequence: CTA
aaattttagagaaatttaag

SEQ ID NO: 68054 - DNA, 20 bp, Artificial Sequence
  Description of Artificial Sequence: Synthetic oligonucleotide
  Target: ATXN2; (-) strand; PAM type: YTN; PAM sequence: TTG
atgatcatgatagaagagat

SEQ ID NO: 68055 - DNA, 20 bp, Artificial Sequence
  Description of Artificial Sequence: Synthetic oligonucleotide
  Target: ATXN2; (-) strand; PAM type: YTN; PAM sequence: TTA
aaattgatgatcatgataga

SEQ ID NO: 68056 - DNA, 20 bp, Artificial Sequence
  Description of Artificial Sequence: Synthetic oligonucleotide
  Target: ATXN2; (-) strand; PAM type: YTN; PAM sequence: TTT
aaaattgatgatcatgatag

SEQ ID NO: 68057 - DNA, 20 bp, Artificial Sequence
  Description of Artificial Sequence: Synthetic oligonucleotide
  Target: ATXN2; (-) strand; PAM type: YTN; PAM sequence: TTT
taaaattgatgatcatgata

SEQ ID NO: 68058 - DNA, 20 bp, Artificial Sequence
  Description of Artificial Sequence: Synthetic oligonucleotide
  Target: ATXN2; (-) strand; PAM type: YTN; PAM sequence: TTA
agccgagttttaaaattgat

SEQ ID NO: 68059 - DNA, 20 bp, Artificial Sequence
  Description of Artificial Sequence: Synthetic oligonucleotide
  Target: ATXN2; (-) strand; PAM type: YTN; PAM sequence: TTT
aagccgagttttaaaattga

SEQ ID NO: 68060 - DNA, 20 bp, Artificial Sequence
  Description of Artificial Sequence: Synthetic oligonucleotide
  Target: ATXN2; (-) strand; PAM type: YTN; PAM sequence: TTT
taagccgagttttaaaattg

SEQ ID NO: 68061 - DNA, 20 bp, Artificial Sequence
  Description of Artificial Sequence: Synthetic oligonucleotide
  Target: ATXN2; (-) strand; PAM type: YTN; PAM sequence: CTG
ttttaagccgagttttaaaa

SEQ ID NO: 68062 - DNA, 20 bp, Artificial Sequence
  Description of Artificial Sequence: Synthetic oligonucleotide
  Target: ATXN2; (-) strand; PAM type: YTN; PAM sequence: TTA
ctgttttaagccgagtttta

SEQ ID NO: 68063 - DNA, 20 bp, Artificial Sequence
  Description of Artificial Sequence: Synthetic oligonucleotide
  Target: ATXN2; (-) strand; PAM type: YTN; PAM sequence: CTT
actgttttaagccgagtttt

SEQ ID NO: 68064 - DNA, 20 bp, Artificial Sequence
  Description of Artificial Sequence: Synthetic oligonucleotide
  Target: ATXN2; (-) strand; PAM type: YTN; PAM sequence: CTG
cttactgttttaagccgagt

SEQ ID NO: 68065 - DNA, 20 bp, Artificial Sequence
  Description of Artificial Sequence: Synthetic oligonucleotide
  Target: ATXN2; (-) strand; PAM type: YTN; PAM sequence: TTA
ctgcttactgttttaagccg

SEQ ID NO: 68066 - DNA, 20 bp, Artificial Sequence
  Description of Artificial Sequence: Synthetic oligonucleotide
  Target: ATXN2; (-) strand; PAM type: YTN; PAM sequence: TTA
caggttactgcttactgttt

SEQ ID NO: 68067 - DNA, 20 bp, Artificial Sequence
  Description of Artificial Sequence: Synthetic oligonucleotide
  Target: ATXN2; (-) strand; PAM type: YTN; PAM sequence: CTT
acaggttactgcttactgtt

SEQ ID NO: 68068 - DNA, 20 bp, Artificial Sequence
  Description of Artificial Sequence: Synthetic oligonucleotide
  Target: ATXN2; (-) strand; PAM type: YTN; PAM sequence: CTG
cttacaggttactgcttact

SEQ ID NO: 68069 - DNA, 20 bp, Artificial Sequence
  Description of Artificial Sequence: Synthetic oligonucleotide
  Target: ATXN2; (-) strand; PAM type: YTN; PAM sequence: CTA
agaaactgcttacaggttac

SEQ ID NO: 68070 - DNA, 20 bp, Artificial Sequence
  Description of Artificial Sequence: Synthetic oligonucleotide
  Target: ATXN2; (-) strand; PAM type: YTN; PAM sequence: CTA
agcctaagaaactgcttaca

SEQ ID NO: 68071 - DNA, 20 bp, Artificial Sequence
  Description of Artificial Sequence: Synthetic oligonucleotide
  Target: ATXN2; (-) strand; PAM type: YTN; PAM sequence: CTG
ctaagcctaagaaactgctt

SEQ ID NO: 68072 - DNA, 20 bp, Artificial Sequence
  Description of Artificial Sequence: Synthetic oligonucleotide
  Target: ATXN2; (-) strand; PAM type: YTN; PAM sequence: CTC
acagcctgctaagcctaaga

SEQ ID NO: 68073 - DNA, 20 bp, Artificial Sequence
  Description of Artificial Sequence: Synthetic oligonucleotide
  Target: ATXN2; (-) strand; PAM type: YTN; PAM sequence: TTC
agctcacagcctgctaagcc

SEQ ID NO: 68074 - DNA, 20 bp, Artificial Sequence
  Description of Artificial Sequence: Synthetic oligonucleotide
  Target: ATXN2; (-) strand; PAM type: YTN; PAM sequence: TTT
cagctcacagcctgctaagc

SEQ ID NO: 68075 - DNA, 20 bp, Artificial Sequence
  Description of Artificial Sequence: Synthetic oligonucleotide
  Target: ATXN2; (-) strand; PAM type: YTN; PAM sequence: TTT
tcagctcacagcctgctaag

SEQ ID NO: 68076 - DNA, 20 bp, Artificial Sequence
  Description of Artificial Sequence: Synthetic oligonucleotide
  Target: ATXN2; (-) strand; PAM type: YTN; PAM sequence: TTA
atagaattttcagctcacag

SEQ ID NO: 68077 - DNA, 20 bp, Artificial Sequence
  Description of Artificial Sequence: Synthetic oligonucleotide
  Target: ATXN2; (-) strand; PAM type: YTN; PAM sequence: TTT
aatagaattttcagctcaca

SEQ ID NO: 68078 - DNA, 20 bp, Artificial Sequence
  Description of Artificial Sequence: Synthetic oligonucleotide
  Target: ATXN2; (-) strand; PAM type: YTN; PAM sequence: CTT
taatagaattttcagctcac

SEQ ID NO: 68079 - DNA, 20 bp, Artificial Sequence
  Description of Artificial Sequence: Synthetic oligonucleotide
  Target: ATXN2; (-) strand; PAM type: YTN; PAM sequence: CTA
atacaagtcatccctttaat

SEQ ID NO: 68080 - DNA, 20 bp, Artificial Sequence
  Description of Artificial Sequence: Synthetic oligonucleotide
  Target: ATXN2; (-) strand; PAM type: YTN; PAM sequence: TTA
atagactaatacaagtcatc

SEQ ID NO: 68081 - DNA, 20 bp, Artificial Sequence
  Description of Artificial Sequence: Synthetic oligonucleotide
  Target: ATXN2; (-) strand; PAM type: YTN; PAM sequence: CTA
ttaatagactaatacaagtc

SEQ ID NO: 68082 - DNA, 20 bp, Artificial Sequence
  Description of Artificial Sequence: Synthetic oligonucleotide
  Target: ATXN2; (-) strand; PAM type: YTN; PAM sequence: TTG
gtcatctattaatagactaa

SEQ ID NO: 68083 - DNA, 20 bp, Artificial Sequence
  Description of Artificial Sequence: Synthetic oligonucleotide
  Target: ATXN2; (-) strand; PAM type: YTN; PAM sequence: TTT
ggtcatctattaatagacta

SEQ ID NO: 68084 - DNA, 20 bp, Artificial Sequence
  Description of Artificial Sequence: Synthetic oligonucleotide
  Target: ATXN2; (-) strand; PAM type: YTN; PAM sequence: TTT
tggtcatctattaatagact

SEQ ID NO: 68085 - DNA, 20 bp, Artificial Sequence
  Description of Artificial Sequence: Synthetic oligonucleotide
  Target: ATXN2; (-) strand; PAM type: YTN; PAM sequence: TTA
ttttggtcatctattaatag

SEQ ID NO: 68086 - DNA, 20 bp, Artificial Sequence
  Description of Artificial Sequence: Synthetic oligonucleotide
  Target: ATXN2; (-) strand; PAM type: YTN; PAM sequence: CTC
ccccaaatgtcagttatttt

SEQ ID NO: 68087 - DNA, 20 bp, Artificial Sequence
  Description of Artificial Sequence: Synthetic oligonucleotide
  Target: ATXN2; (-) strand; PAM type: YTN; PAM sequence: TTC
tcccccaaatgtcagttatt

SEQ ID NO: 68088 - DNA, 20 bp, Artificial Sequence
  Description of Artificial Sequence: Synthetic oligonucleotide
  Target: ATXN2; (-) strand; PAM type: YTN; PAM sequence: TTT
ctcccccaaatgtcagttat

SEQ ID NO: 68089 - DNA, 20 bp, Artificial Sequence
  Description of Artificial Sequence: Synthetic oligonucleotide
  Target: ATXN2; (-) strand; PAM type: YTN; PAM sequence: CTG
atttctcccccaaatgtcag

SEQ ID NO: 68090 - DNA, 20 bp, Artificial Sequence
  Description of Artificial Sequence: Synthetic oligonucleotide
  Target: ATXN2; (-) strand; PAM type: YTN; PAM sequence: TTC
atatagtgctgatttctccc

SEQ ID NO: 68091 - DNA, 20 bp, Artificial Sequence
  Description of Artificial Sequence: Synthetic oligonucleotide
  Target: ATXN2; (-) strand; PAM type: YTN; PAM sequence: TTG
acaattcatatagtgctgat

SEQ ID NO: 68092 - DNA, 20 bp, Artificial Sequence
  Description of Artificial Sequence: Synthetic oligonucleotide
  Target: ATXN2; (-) strand; PAM type: YTN; PAM sequence: TTT
gacaattcatatagtgctga

SEQ ID NO: 68093 - DNA, 20 bp, Artificial Sequence
  Description of Artificial Sequence: Synthetic oligonucleotide
  Target: ATXN2; (-) strand; PAM type: YTN; PAM sequence: TTT
tgacaattcatatagtgctg

SEQ ID NO: 68094 - DNA, 20 bp, Artificial Sequence
  Description of Artificial Sequence: Synthetic oligonucleotide
  Target: ATXN2; (-) strand; PAM type: YTN; PAM sequence: CTA
gtggcatggcagaatcaata

SEQ ID NO: 68095 - DNA, 20 bp, Artificial Sequence
  Description of Artificial Sequence: Synthetic oligonucleotide
  Target: ATXN2; (-) strand; PAM type: YTN; PAM sequence: TTA
gaaagagtagtcactagtgg

SEQ ID NO: 68096 - DNA, 20 bp, Artificial Sequence
  Description of Artificial Sequence: Synthetic oligonucleotide
  Target: ATXN2; (-) strand; PAM type: YTN; PAM sequence: TTT
agaaagagtagtcactagtg

SEQ ID NO: 68097 - DNA, 20 bp, Artificial Sequence
  Description of Artificial Sequence: Synthetic oligonucleotide
  Target: ATXN2; (-) strand; PAM type: YTN; PAM sequence: CTG
atttagaaagagtagtcact

SEQ ID NO: 68098 - DNA, 20 bp, Artificial Sequence
  Description of Artificial Sequence: Synthetic oligonucleotide
  Target: ATXN2; (-) strand; PAM type: YTN; PAM sequence: CTA
atgcacagtagactgattta

SEQ ID NO: 68099 - DNA, 20 bp, Artificial Sequence
  Description of Artificial Sequence: Synthetic oligonucleotide
  Target: ATXN2; (-) strand; PAM type: YTN; PAM sequence: TTG
gtctaatgcacagtagactg

SEQ ID NO: 68100 - DNA, 20 bp, Artificial Sequence
  Description of Artificial Sequence: Synthetic oligonucleotide
  Target: ATXN2; (-) strand; PAM type: YTN; PAM sequence: CTG
atagattggtctaatgcaca

SEQ ID NO: 68101 - DNA, 20 bp, Artificial Sequence
  Description of Artificial Sequence: Synthetic oligonucleotide
  Target: ATXN2; (-) strand; PAM type: YTN; PAM sequence: TTA
cctgatagattggtctaatg

SEQ ID NO: 68102 - DNA, 20 bp, Artificial Sequence
  Description of Artificial Sequence: Synthetic oligonucleotide
  Target: ATXN2; (-) strand; PAM type: YTN; PAM sequence: TTT
acctgatagattggtctaat

SEQ ID NO: 68103 - DNA, 20 bp, Artificial Sequence
  Description of Artificial Sequence: Synthetic oligonucleotide
  Target: ATXN2; (-) strand; PAM type: YTN; PAM sequence: TTT
tacctgatagattggtctaa

SEQ ID NO: 68104 - DNA, 20 bp, Artificial Sequence
  Description of Artificial Sequence: Synthetic oligonucleotide
  Target: ATXN2; (-) strand; PAM type: YTN; PAM sequence: CTT
ttacctgatagattggtcta

SEQ ID NO: 68105 - DNA, 20 bp, Artificial Sequence
  Description of Artificial Sequence: Synthetic oligonucleotide
  Target: ATXN2; (-) strand; PAM type: YTN; PAM sequence: CTC
ttttacctgatagattggtc

SEQ ID NO: 68106 - DNA, 20 bp, Artificial Sequence
  Description of Artificial Sequence: Synthetic oligonucleotide
  Target: ATXN2; (-) strand; PAM type: YTN; PAM sequence: CTG
tccactcttttacctgatag

SEQ ID NO: 68107 - DNA, 20 bp, Artificial Sequence
  Description of Artificial Sequence: Synthetic oligonucleotide
  Target: ATXN2; (-) strand; PAM type: YTN; PAM sequence: TTC
tgtccactcttttacctgat

SEQ ID NO: 68108 - DNA, 20 bp, Artificial Sequence
  Description of Artificial Sequence: Synthetic oligonucleotide
  Target: ATXN2; (-) strand; PAM type: YTN; PAM sequence: CTG
atgagggccattctgtccac

SEQ ID NO: 68109 - DNA, 20 bp, Artificial Sequence
  Description of Artificial Sequence: Synthetic oligonucleotide
  Target: ATXN2; (-) strand; PAM type: YTN; PAM sequence: CTC
tgatgagggccattctgtcc

SEQ ID NO: 68110 - DNA, 20 bp, Artificial Sequence
  Description of Artificial Sequence: Synthetic oligonucleotide
  Target: ATXN2; (-) strand; PAM type: YTN; PAM sequence: TTC
tctgatgagggccattctgt

SEQ ID NO: 68111 - DNA, 20 bp, Artificial Sequence
  Description of Artificial Sequence: Synthetic oligonucleotide
  Target: ATXN2; (-) strand; PAM type: YTN; PAM sequence: CTT
ctctgatgagggccattctg

SEQ ID NO: 68112 - DNA, 20 bp, Artificial Sequence
  Description of Artificial Sequence: Synthetic oligonucleotide
  Target: ATXN2; (-) strand; PAM type: YTN; PAM sequence: TTA
acaccagtaggcttctctga

SEQ ID NO: 68113 - DNA, 20 bp, Artificial Sequence
  Description of Artificial Sequence: Synthetic oligonucleotide
  Target: ATXN2; (-) strand; PAM type: YTN; PAM sequence: TTG
gtgttaacaccagtaggctt

SEQ ID NO: 68114 - DNA, 20 bp, Artificial Sequence
  Description of Artificial Sequence: Synthetic oligonucleotide
  Target: ATXN2; (-) strand; PAM type: YTN; PAM sequence: CTT
ggtgttaacaccagtaggct

SEQ ID NO: 68115 - DNA, 20 bp, Artificial Sequence
  Description of Artificial Sequence: Synthetic oligonucleotide
  Target: ATXN2; (-) strand; PAM type: YTN; PAM sequence: TTC
gcttggtgttaacaccagta

SEQ ID NO: 68116 - DNA, 20 bp, Artificial Sequence
  Description of Artificial Sequence: Synthetic oligonucleotide
  Target: ATXN2; (-) strand; PAM type: YTN; PAM sequence: TTT
cgcttggtgttaacaccagt

SEQ ID NO: 68117 - DNA, 20 bp, Artificial Sequence
  Description of Artificial Sequence: Synthetic oligonucleotide
  Target: ATXN2; (-) strand; PAM type: YTN; PAM sequence: TTT
tcgcttggtgttaacaccag

SEQ ID NO: 68118 - DNA, 20 bp, Artificial Sequence
  Description of Artificial Sequence: Synthetic oligonucleotide
  Target: ATXN2; (-) strand; PAM type: YTN; PAM sequence: TTA
gggaagttttcgcttggtgt

SEQ ID NO: 68119 - DNA, 20 bp, Artificial Sequence
  Description of Artificial Sequence: Synthetic oligonucleotide
  Target: ATXN2; (-) strand; PAM type: YTN; PAM sequence: TTG
acattagggaagttttcgct

SEQ ID NO: 68120 - DNA, 20 bp, Artificial Sequence
  Description of Artificial Sequence: Synthetic oligonucleotide
  Target: ATXN2; (-) strand; PAM type: YTN; PAM sequence: TTT
gacattagggaagttttcgc

SEQ ID NO: 68121 - DNA, 20 bp, Artificial Sequence
  Description of Artificial Sequence: Synthetic oligonucleotide
  Target: ATXN2; (-) strand; PAM type: YTN; PAM sequence: CTT
tgacattagggaagttttcg

SEQ ID NO: 68122 - DNA, 20 bp, Artificial Sequence
  Description of Artificial Sequence: Synthetic oligonucleotide
  Target: ATXN2; (-) strand; PAM type: YTN; PAM sequence: TTG
gctttgacattagggaagtt

SEQ ID NO: 68123 - DNA, 20 bp, Artificial Sequence
  Description of Artificial Sequence: Synthetic oligonucleotide
  Target: ATXN2; (-) strand; PAM type: YTN; PAM sequence: TTT
ggctttgacattagggaagt

SEQ ID NO: 68124 - DNA, 20 bp, Artificial Sequence
  Description of Artificial Sequence: Synthetic oligonucleotide
  Target: ATXN2; (-) strand; PAM type: YTN; PAM sequence: TTG
gcagccgggtgagagagtga

SEQ ID NO: 68125 - DNA, 20 bp, Artificial Sequence
  Description of Artificial Sequence: Synthetic oligonucleotide
  Target: ATXN2; (-) strand; PAM type: YTN; PAM sequence: TTT
ggcagccgggtgagagagtg

SEQ ID NO: 68126 - DNA, 20 bp, Artificial Sequence
  Description of Artificial Sequence: Synthetic oligonucleotide
  Target: ATXN2; (-) strand; PAM type: YTN; PAM sequence: CTA
aagagtttggcagccgggtg

SEQ ID NO: 68127 - DNA, 20 bp, Artificial Sequence
  Description of Artificial Sequence: Synthetic oligonucleotide
  Target: ATXN2; (-) strand; PAM type: YTN; PAM sequence: TTC
taaagagtttggcagccggg

SEQ ID NO: 68128 - DNA, 20 bp, Artificial Sequence
  Description of Artificial Sequence: Synthetic oligonucleotide
  Target: ATXN2; (-) strand; PAM type: YTN; PAM sequence: TTG
aagttctaaagagtttggca

SEQ ID NO: 68129 - DNA, 20 bp, Artificial Sequence
  Description of Artificial Sequence: Synthetic oligonucleotide
  Target: ATXN2; (-) strand; PAM type: YTN; PAM sequence: TTT
gaagttctaaagagtttggc

SEQ ID NO: 68130 - DNA, 20 bp, Artificial Sequence
  Description of Artificial Sequence: Synthetic oligonucleotide
  Target: ATXN2; (-) strand; PAM type: YTN; PAM sequence: TTA
atttgaagttctaaagagtt

SEQ ID NO: 68131 - DNA, 20 bp, Artificial Sequence
  Description of Artificial Sequence: Synthetic oligonucleotide
  Target: ATXN2; (-) strand; PAM type: YTN; PAM sequence: TTG
gcaacatatattaatttgaa

SEQ ID NO: 68132 - DNA, 20 bp, Artificial Sequence
  Description of Artificial Sequence: Synthetic oligonucleotide
  Target: ATXN2; (-) strand; PAM type: YTN; PAM sequence: CTA
ttggcaacatatattaattt

SEQ ID NO: 68133 - DNA, 20 bp, Artificial Sequence
  Description of Artificial Sequence: Synthetic oligonucleotide
  Target: ATXN2; (-) strand; PAM type: YTN; PAM sequence: TTC
tattggcaacatatattaat

SEQ ID NO: 68134 - DNA, 20 bp, Artificial Sequence
  Description of Artificial Sequence: Synthetic oligonucleotide
  Target: ATXN2; (-) strand; PAM type: YTN; PAM sequence: TTA
taaaaataaaaataaaataa

SEQ ID NO: 68135 - DNA, 20 bp, Artificial Sequence
  Description of Artificial Sequence: Synthetic oligonucleotide
  Target: ATXN2; (-) strand; PAM type: YTN; PAM sequence: CTT
ataaaaataaaaataaaata

SEQ ID NO: 68136 - DNA, 20 bp, Artificial Sequence
  Description of Artificial Sequence: Synthetic oligonucleotide
  Target: ATXN2; (-) strand; PAM type: YTN; PAM sequence: CTG
tcttataaaaataaaaataa

SEQ ID NO: 68137 - DNA, 20 bp, Artificial Sequence
  Description of Artificial Sequence: Synthetic oligonucleotide
  Target: ATXN2; (-) strand; PAM type: YTN; PAM sequence: CTC
tgtcttataaaaataaaaat

SEQ ID NO: 68138 - DNA, 20 bp, Artificial Sequence
  Description of Artificial Sequence: Synthetic oligonucleotide
  Target: ATXN2; (-) strand; PAM type: YTN; PAM sequence: CTG
ggcgacagagacagactctg

SEQ ID NO: 68139 - DNA, 20 bp, Artificial Sequence
  Description of Artificial Sequence: Synthetic oligonucleotide
  Target: ATXN2; (-) strand; PAM type: YTN; PAM sequence: CTC
cagcctgggcgacagagaca

SEQ ID NO: 68140 - DNA, 20 bp, Artificial Sequence
  Description of Artificial Sequence: Synthetic oligonucleotide
  Target: ATXN2; (-) strand; PAM type: YTN; PAM sequence: CTG
cactccagcctgggcgacag

SEQ ID NO: 68141 - DNA, 20 bp, Artificial Sequence
  Description of Artificial Sequence: Synthetic oligonucleotide
  Target: ATXN2; (-) strand; PAM type: YTN; PAM sequence: TTG
agatcgtaccactgcactcc

SEQ ID NO: 68142 - DNA, 20 bp, Artificial Sequence
  Description of Artificial Sequence: Synthetic oligonucleotide
  Target: ATXN2; (-) strand; PAM type: YTN; PAM sequence: TTG
cagtgagttgagatcgtacc

SEQ ID NO: 68143 - DNA, 20 bp, Artificial Sequence
  Description of Artificial Sequence: Synthetic oligonucleotide
  Target: ATXN2; (-) strand; PAM type: YTN; PAM sequence: CTG
ggaggcagaggttgcagtga

SEQ ID NO: 68144 - DNA, 20 bp, Artificial Sequence
  Description of Artificial Sequence: Synthetic oligonucleotide
  Target: ATXN2; (-) strand; PAM type: YTN; PAM sequence: TTG
aacctgggaggcagaggttg

SEQ ID NO: 68145 - DNA, 20 bp, Artificial Sequence
  Description of Artificial Sequence: Synthetic oligonucleotide
  Target: ATXN2; (-) strand; PAM type: YTN; PAM sequence: CTT
gaacctgggaggcagaggtt

SEQ ID NO: 68146 - DNA, 20 bp, Artificial Sequence
  Description of Artificial Sequence: Synthetic oligonucleotide
  Target: ATXN2; (-) strand; PAM type: YTN; PAM sequence: CTG
aggcaggagaatcacttgaa

SEQ ID NO: 68147 - DNA, 20 bp, Artificial Sequence
  Description of Artificial Sequence: Synthetic oligonucleotide
  Target: ATXN2; (-) strand; PAM type: YTN; PAM sequence: TTG
ggaggctgaggcaggagaat

SEQ ID NO: 68148 - DNA, 20 bp, Artificial Sequence
  Description of Artificial Sequence: Synthetic oligonucleotide
  Target: ATXN2; (-) strand; PAM type: YTN; PAM sequence: CTT
gggaggctgaggcaggagaa

SEQ ID NO: 68149 - DNA, 20 bp, Artificial Sequence
  Description of Artificial Sequence: Synthetic oligonucleotide
  Target: ATXN2; (-) strand; PAM type: YTN; PAM sequence: CTA
cttgggaggctgaggcagga

SEQ ID NO: 68150 - DNA, 20 bp, Artificial Sequence
  Description of Artificial Sequence: Synthetic oligonucleotide
  Target: ATXN2; (-) strand; PAM type: YTN; PAM sequence: CTA
aaaatacccagctacttggg

SEQ ID NO: 68151 - DNA, 20 bp, Artificial Sequence
  Description of Artificial Sequence: Synthetic oligonucleotide
  Target: ATXN2; (-) strand; PAM type: YTN; PAM sequence: CTA
ctaaaaatacccagctactt

SEQ ID NO: 68152 - DNA, 20 bp, Artificial Sequence
  Description of Artificial Sequence: Synthetic oligonucleotide
  Target: ATXN2; (-) strand; PAM type: YTN; PAM sequence: CTC
tactaaaaatacccagctac

SEQ ID NO: 68153 - DNA, 20 bp, Artificial Sequence
  Description of Artificial Sequence: Synthetic oligonucleotide
  Target: ATXN2; (-) strand; PAM type: YTN; PAM sequence: CTC
gtctctactaaaaataccca

SEQ ID NO: 68154 - DNA, 20 bp, Artificial Sequence
  Description of Artificial Sequence: Synthetic oligonucleotide
  Target: ATXN2; (-) strand; PAM type: YTN; PAM sequence: CTG
gccaacatggtgaaacctcg

SEQ ID NO: 68155 - DNA, 20 bp, Artificial Sequence
  Description of Artificial Sequence: Synthetic oligonucleotide
  Target: ATXN2; (-) strand; PAM type: YTN; PAM sequence: TTG
agaccagcctggccaacatg

SEQ ID NO: 68156 - DNA, 20 bp, Artificial Sequence
  Description of Artificial Sequence: Synthetic oligonucleotide
  Target: ATXN2; (-) strand; PAM type: YTN; PAM sequence: TTT
gagaccagcctggccaacat

SEQ ID NO: 68157 - DNA, 20 bp, Artificial Sequence
  Description of Artificial Sequence: Synthetic oligonucleotide
  Target: ATXN2; (-) strand; PAM type: YTN; PAM sequence: TTG
aggtcaggagtttgagacca

SEQ ID NO: 68158 - DNA, 20 bp, Artificial Sequence
  Description of Artificial Sequence: Synthetic oligonucleotide
  Target: ATXN2; (-) strand; PAM type: YTN; PAM sequence: CTT
gaggtcaggagtttgagacc

SEQ ID NO: 68159 - DNA, 20 bp, Artificial Sequence
  Description of Artificial Sequence: Synthetic oligonucleotide
  Target: ATXN2; (-) strand; PAM type: YTN; PAM sequence: CTG
aggcaggtggatcacttgag

SEQ ID NO: 68160 - DNA, 20 bp, Artificial Sequence
  Description of Artificial Sequence: Synthetic oligonucleotide
  Target: ATXN2; (-) strand; PAM type: YTN; PAM sequence: TTG
ggaggctgaggcaggtggat

SEQ ID NO: 68161 - DNA, 20 bp, Artificial Sequence
  Description of Artificial Sequence: Synthetic oligonucleotide
  Target: ATXN2; (-) strand; PAM type: YTN; PAM sequence: TTT
gggaggctgaggcaggtgga

SEQ ID NO: 68162 - DNA, 20 bp, Artificial Sequence
  Description of Artificial Sequence: Synthetic oligonucleotide
  Target: ATXN2; (-) strand; PAM type: YTN; PAM sequence: CTT
tgggaggctgaggcaggtgg

SEQ ID NO: 68163 - DNA, 20 bp, Artificial Sequence
  Description of Artificial Sequence: Synthetic oligonucleotide
  Target: ATXN2; (-) strand; PAM type: YTN; PAM sequence: CTC
agcactttgggaggctgagg

SEQ ID NO: 68164 - DNA, 20 bp, Artificial Sequence
  Description of Artificial Sequence: Synthetic oligonucleotide
  Target: ATXN2; (-) strand; PAM type: YTN; PAM sequence: CTG
taatctcagcactttgggag

SEQ ID NO: 68165 - DNA, 20 bp, Artificial Sequence
  Description of Artificial Sequence: Synthetic oligonucleotide
  Target: ATXN2; (-) strand; PAM type: YTN; PAM sequence: CTA
acgcctgtaatctcagcact

SEQ ID NO: 68166 - DNA, 20 bp, Artificial Sequence
  Description of Artificial Sequence: Synthetic oligonucleotide
  Target: ATXN2; (-) strand; PAM type: YTN; PAM sequence: TTG
gaagccaggcatggtggcta

SEQ ID NO: 68167 - DNA, 20 bp, Artificial Sequence
  Description of Artificial Sequence: Synthetic oligonucleotide
  Target: ATXN2; (-) strand; PAM type: YTN; PAM sequence: CTG
ttggaagccaggcatggtgg

SEQ ID NO: 68168 - DNA, 20 bp, Artificial Sequence
  Description of Artificial Sequence: Synthetic oligonucleotide
  Target: ATXN2; (-) strand; PAM type: YTN; PAM sequence: TTC
ctgttggaagccaggcatgg

SEQ ID NO: 68169 - DNA, 20 bp, Artificial Sequence
  Description of Artificial Sequence: Synthetic oligonucleotide
  Target: ATXN2; (-) strand; PAM type: YTN; PAM sequence: TTA
aattcctgttggaagccagg

SEQ ID NO: 68170 - DNA, 20 bp, Artificial Sequence
  Description of Artificial Sequence: Synthetic oligonucleotide
  Target: ATXN2; (-) strand; PAM type: YTN; PAM sequence: TTT
aaattcctgttggaagccag

SEQ ID NO: 68171 - DNA, 20 bp, Artificial Sequence
  Description of Artificial Sequence: Synthetic oligonucleotide
  Target: ATXN2; (-) strand; PAM type: YTN; PAM sequence: TTC
gtgtttaaattcctgttgga

SEQ ID NO: 68172 - DNA, 20 bp, Artificial Sequence
  Description of Artificial Sequence: Synthetic oligonucleotide
  Target: ATXN2; (-) strand; PAM type: YTN; PAM sequence: CTA
aagatcatgttcgtgtttaa

SEQ ID NO: 68173 - DNA, 20 bp, Artificial Sequence
  Description of Artificial Sequence: Synthetic oligonucleotide
  Target: ATXN2; (-) strand; PAM type: YTN; PAM sequence: TTC
taaagatcatgttcgtgttt

SEQ ID NO: 68174 - DNA, 20 bp, Artificial Sequence
  Description of Artificial Sequence: Synthetic oligonucleotide
  Target: ATXN2; (-) strand; PAM type: YTN; PAM sequence: CTT
ctaaagatcatgttcgtgtt

SEQ ID NO: 68175 - DNA, 20 bp, Artificial Sequence
  Description of Artificial Sequence: Synthetic oligonucleotide
  Target: ATXN2; (-) strand; PAM type: YTN; PAM sequence: TTC
ttctaaagatcatgttcgtg

SEQ ID NO: 68176 - DNA, 20 bp, Artificial Sequence
  Description of Artificial Sequence: Synthetic oligonucleotide
  Target: ATXN2; (-) strand; PAM type: YTN; PAM sequence: TTA
gcattcttctaaagatcatg

SEQ ID NO: 68177 - DNA, 20 bp, Artificial Sequence
  Description of Artificial Sequence: Synthetic oligonucleotide
  Target: ATXN2; (-) strand; PAM type: YTN; PAM sequence: TTA
tagtgtataacattagcatt

SEQ ID NO: 68178 - DNA, 20 bp, Artificial Sequence
  Description of Artificial Sequence: Synthetic oligonucleotide
  Target: ATXN2; (-) strand; PAM type: YTN; PAM sequence: TTG
aaaattatagtgtataacat

SEQ ID NO: 68179 - DNA, 20 bp, Artificial Sequence
  Description of Artificial Sequence: Synthetic oligonucleotide
  Target: ATXN2; (-) strand; PAM type: YTN; PAM sequence: TTT
gaaaattatagtgtataaca

SEQ ID NO: 68180 - DNA, 20 bp, Artificial Sequence
  Description of Artificial Sequence: Synthetic oligonucleotide
  Target: ATXN2; (-) strand; PAM type: YTN; PAM sequence: TTC
catttgaaaattatagtgta

SEQ ID NO: 68181 - DNA, 20 bp, Artificial Sequence
  Description of Artificial Sequence: Synthetic oligonucleotide
  Target: ATXN2; (-) strand; PAM type: YTN; PAM sequence: TTT
ccatttgaaaattatagtgt

SEQ ID NO: 68182 - DNA, 20 bp, Artificial Sequence
  Description of Artificial Sequence: Synthetic oligonucleotide
  Target: ATXN2; (-) strand; PAM type: YTN; PAM sequence: TTG
aatatttccatttgaaaatt

SEQ ID NO: 68183 - DNA, 20 bp, Artificial Sequence
  Description of Artificial Sequence: Synthetic oligonucleotide
  Target: ATXN2; (-) strand; PAM type: YTN; PAM sequence: TTC
agagatgttgaatatttcca

SEQ ID NO: 68184 - DNA, 20 bp, Artificial Sequence
  Description of Artificial Sequence: Synthetic oligonucleotide
  Target: ATXN2; (-) strand; PAM type: YTN; PAM sequence: CTG
tgtcattcagagatgttgaa

SEQ ID NO: 68185 - DNA, 20 bp, Artificial Sequence
  Description of Artificial Sequence: Synthetic oligonucleotide
  Target: ATXN2; (-) strand; PAM type: YTN; PAM sequence: TTC
tgtgtcattcagagatgttg

SEQ ID NO: 68186 - DNA, 20 bp, Artificial Sequence
  Description of Artificial Sequence: Synthetic oligonucleotide
  Target: ATXN2; (-) strand; PAM type: YTN; PAM sequence: TTT
ctgtgtcattcagagatgtt

SEQ ID NO: 68187 - DNA, 20 bp, Artificial Sequence
  Description of Artificial Sequence: Synthetic oligonucleotide
  Target: ATXN2; (-) strand; PAM type: YTN; PAM sequence: CTT
tctgtgtcattcagagatgt

SEQ ID NO: 68188 - DNA, 20 bp, Artificial Sequence
  Description of Artificial Sequence: Synthetic oligonucleotide
  Target: ATXN2; (-) strand; PAM type: YTN; PAM sequence: TTC
acacagaaatatactttctg

SEQ ID NO: 68189 - DNA, 20 bp, Artificial Sequence
  Description of Artificial Sequence: Synthetic oligonucleotide
  Target: ATXN2; (-) strand; PAM type: YTN; PAM sequence: CTT
cacacagaaatatactttct

SEQ ID NO: 68190 - DNA, 20 bp, Artificial Sequence
  Description of Artificial Sequence: Synthetic oligonucleotide
  Target: ATXN2; (-) strand; PAM type: YTN; PAM sequence: TTA
acttcacacagaaatatact

SEQ ID NO: 68191 - DNA, 20 bp, Artificial Sequence
  Description of Artificial Sequence: Synthetic oligonucleotide
  Target: ATXN2; (-) strand; PAM type: YTN; PAM sequence: CTC
atgtattaacttcacacaga

SEQ ID NO: 68192 - DNA, 20 bp, Artificial Sequence
  Description of Artificial Sequence: Synthetic oligonucleotide
  Target: ATXN2; (-) strand; PAM type: YTN; PAM sequence: CTG
ctcatgtattaacttcacac

SEQ ID NO: 68193 - DNA, 20 bp, Artificial Sequence
  Description of Artificial Sequence: Synthetic oligonucleotide
  Target: ATXN2; (-) strand; PAM type: YTN; PAM sequence: TTA
aggactgctcatgtattaac

SEQ ID NO: 68194 - DNA, 20 bp, Artificial Sequence
  Description of Artificial Sequence: Synthetic oligonucleotide
  Target: ATXN2; (-) strand; PAM type: YTN; PAM sequence: TTT
aaggactgctcatgtattaa

SEQ ID NO: 68195 - DNA, 20 bp, Artificial Sequence
  Description of Artificial Sequence: Synthetic oligonucleotide
  Target: ATXN2; (-) strand; PAM type: YTN; PAM sequence: TTA
agatttaaggactgctcatg

SEQ ID NO: 68196 - DNA, 20 bp, Artificial Sequence
  Description of Artificial Sequence: Synthetic oligonucleotide
  Target: ATXN2; (-) strand; PAM type: YTN; PAM sequence: TTA
cattaagatttaaggactgc

SEQ ID NO: 68197 - DNA, 20 bp, Artificial Sequence
  Description of Artificial Sequence: Synthetic oligonucleotide
  Target: ATXN2; (-) strand; PAM type: YTN; PAM sequence: TTA
ttacattaagatttaaggac

SEQ ID NO: 68198 - DNA, 20 bp, Artificial Sequence
  Description of Artificial Sequence: Synthetic oligonucleotide
  Target: ATXN2; (-) strand; PAM type: YTN; PAM sequence: TTT
attacattaagatttaagga

SEQ ID NO: 68199 - DNA, 20 bp, Artificial Sequence
  Description of Artificial Sequence: Synthetic oligonucleotide
  Target: ATXN2; (-) strand; PAM type: YTN; PAM sequence: CTT
tattacattaagatttaagg

SEQ ID NO: 68200 - DNA, 20 bp, Artificial Sequence
  Description of Artificial Sequence: Synthetic oligonucleotide
  Target: ATXN2; (-) strand; PAM type: YTN; PAM sequence: CTG
tgaacatctttattacatta

SEQ ID NO: 68201 - DNA, 20 bp, Artificial Sequence
  Description of Artificial Sequence: Synthetic oligonucleotide
  Target: ATXN2; (-) strand; PAM type: YTN; PAM sequence: TTA
atgactgtgaacatctttat

SEQ ID NO: 68202 - DNA, 20 bp, Artificial Sequence
  Description of Artificial Sequence: Synthetic oligonucleotide
  Target: ATXN2; (-) strand; PAM type: YTN; PAM sequence: TTA
aataaaacatgatcattaat

SEQ ID NO: 68203 - DNA, 20 bp, Artificial Sequence
  Description of Artificial Sequence: Synthetic oligonucleotide
  Target: ATXN2; (-) strand; PAM type: YTN; PAM sequence: TTA
atgagaatatattaaataaa

SEQ ID NO: 68204 - DNA, 20 bp, Artificial Sequence
  Description of Artificial Sequence: Synthetic oligonucleotide
  Target: ATXN2; (-) strand; PAM type: YTN; PAM sequence: TTT
aatgagaatatattaaataa

SEQ ID NO: 68205 - DNA, 20 bp, Artificial Sequence
  Description of Artificial Sequence: Synthetic oligonucleotide
  Target: ATXN2; (-) strand; PAM type: YTN; PAM sequence: TTA
tttaatgagaatatattaaa

SEQ ID NO: 68206 - DNA, 20 bp, Artificial Sequence
  Description of Artificial Sequence: Synthetic oligonucleotide
  Target: ATXN2; (-) strand; PAM type: YTN; PAM sequence: TTT
atttaatgagaatatattaa

SEQ ID NO: 68207 - DNA, 20 bp, Artificial Sequence
  Description of Artificial Sequence: Synthetic oligonucleotide
  Target: ATXN2; (-) strand; PAM type: YTN; PAM sequence: TTG
agtaagcgatgtttatttaa

SEQ ID NO: 68208 - DNA, 20 bp, Artificial Sequence
  Description of Artificial Sequence: Synthetic oligonucleotide
  Target: ATXN2; (-) strand; PAM type: YTN; PAM sequence: TTT
gagtaagcgatgtttattta

SEQ ID NO: 68209 - DNA, 20 bp, Artificial Sequence
  Description of Artificial Sequence: Synthetic oligonucleotide
  Target: ATXN2; (-) strand; PAM type: YTN; PAM sequence: TTG
tagtccatcatttgagtaag

SEQ ID NO: 68210 - DNA, 20 bp, Artificial Sequence
  Description of Artificial Sequence: Synthetic oligonucleotide
  Target: ATXN2; (-) strand; PAM type: YTN; PAM sequence: CTT
gtagtccatcatttgagtaa

SEQ ID NO: 68211 - DNA, 20 bp, Artificial Sequence
  Description of Artificial Sequence: Synthetic oligonucleotide
  Target: ATXN2; (-) strand; PAM type: YTN; PAM sequence: TTC
ttgtagtccatcatttgagt

SEQ ID NO: 68212 - DNA, 20 bp, Artificial Sequence
  Description of Artificial Sequence: Synthetic oligonucleotide
  Target: ATXN2; (-) strand; PAM type: YTN; PAM sequence: TTT
cttgtagtccatcatttgag

SEQ ID NO: 68213 - DNA, 20 bp, Artificial Sequence
  Description of Artificial Sequence: Synthetic oligonucleotide
  Target: ATXN2; (-) strand; PAM type: YTN; PAM sequence: TTT
tcttgtagtccatcatttga

SEQ ID NO: 68214 - DNA, 20 bp, Artificial Sequence
  Description of Artificial Sequence: Synthetic oligonucleotide
  Target: ATXN2; (-) strand; PAM type: YTN; PAM sequence: TTT
ttcttgtagtccatcatttg

SEQ ID NO: 68215 - DNA, 20 bp, Artificial Sequence
  Description of Artificial Sequence: Synthetic oligonucleotide
  Target: ATXN2; (-) strand; PAM type: YTN; PAM sequence: TTG
atatttttcttgtagtccat

SEQ ID NO: 68216 - DNA, 20 bp, Artificial Sequence
  Description of Artificial Sequence: Synthetic oligonucleotide
  Target: ATXN2; (-) strand; PAM type: YTN; PAM sequence: CTG
ttgatatttttcttgtagtc

SEQ ID NO: 68217 - DNA, 20 bp, Artificial Sequence
  Description of Artificial Sequence: Synthetic oligonucleotide
  Target: ATXN2; (-) strand; PAM type: YTN; PAM sequence: TTC
tgttgatatttttcttgtag

SEQ ID NO: 68218 - DNA, 20 bp, Artificial Sequence
  Description of Artificial Sequence: Synthetic oligonucleotide
  Target: ATXN2; (-) strand; PAM type: YTN; PAM sequence: CTA
aatgcaaaattctgttgata

SEQ ID NO: 68219 - DNA, 20 bp, Artificial Sequence
  Description of Artificial Sequence: Synthetic oligonucleotide
  Target: ATXN2; (-) strand; PAM type: YTN; PAM sequence: TTA
atagtggtcactaaatgcaa

SEQ ID NO: 68220 - DNA, 20 bp, Artificial Sequence
  Description of Artificial Sequence: Synthetic oligonucleotide
  Target: ATXN2; (-) strand; PAM type: YTN; PAM sequence: CTT
aatagtggtcactaaatgca

SEQ ID NO: 68221 - DNA, 20 bp, Artificial Sequence
  Description of Artificial Sequence: Synthetic oligonucleotide
  Target: ATXN2; (-) strand; PAM type: YTN; PAM sequence: CTC
aaaagggccttaatagtggt

SEQ ID NO: 68222 - DNA, 20 bp, Artificial Sequence
  Description of Artificial Sequence: Synthetic oligonucleotide
  Target: ATXN2; (-) strand; PAM type: YTN; PAM sequence: TTG
ctcaaaagggccttaatagt

SEQ ID NO: 68223 - DNA, 20 bp, Artificial Sequence
  Description of Artificial Sequence: Synthetic oligonucleotide
  Target: ATXN2; (-) strand; PAM type: YTN; PAM sequence: TTT
gctcaaaagggccttaatag

SEQ ID NO: 68224 - DNA, 20 bp, Artificial Sequence
  Description of Artificial Sequence: Synthetic oligonucleotide
  Target: ATXN2; (-) strand; PAM type: YTN; PAM sequence: CTT
tgctcaaaagggccttaata

SEQ ID NO: 68225 - DNA, 20 bp, Artificial Sequence
  Description of Artificial Sequence: Synthetic oligonucleotide
  Target: ATXN2; (-) strand; PAM type: YTN; PAM sequence: TTC
tttgctcaaaagggccttaa

SEQ ID NO: 68226 - DNA, 20 bp, Artificial Sequence
  Description of Artificial Sequence: Synthetic oligonucleotide
  Target: ATXN2; (-) strand; PAM type: YTN; PAM sequence: CTT
ctttgctcaaaagggcctta

SEQ ID NO: 68227 - DNA, 20 bp, Artificial Sequence
  Description of Artificial Sequence: Synthetic oligonucleotide
  Target: ATXN2; (-) strand; PAM type: YTN; PAM sequence: TTC
aaggtgacttctttgctcaa

SEQ ID NO: 68228 - DNA, 20 bp, Artificial Sequence
  Description of Artificial Sequence: Synthetic oligonucleotide
  Target: ATXN2; (-) strand; PAM type: YTN; PAM sequence: TTT
caaggtgacttctttgctca

SEQ ID NO: 68229 - DNA, 20 bp, Artificial Sequence
  Description of Artificial Sequence: Synthetic oligonucleotide
  Target: ATXN2; (-) strand; PAM type: YTN; PAM sequence: TTT
tcaaggtgacttctttgctc

SEQ ID NO: 68230 - DNA, 20 bp, Artificial Sequence
  Description of Artificial Sequence: Synthetic oligonucleotide
  Target: ATXN2; (-) strand; PAM type: YTN; PAM sequence: CTG
attttcaaggtgacttcttt

SEQ ID NO: 68231 - DNA, 20 bp, Artificial Sequence
  Description of Artificial Sequence: Synthetic oligonucleotide
  Target: ATXN2; (-) strand; PAM type: YTN; PAM sequence: TTC
cactgattttcaaggtgact

SEQ ID NO: 68232 - DNA, 20 bp, Artificial Sequence
  Description of Artificial Sequence: Synthetic oligonucleotide
  Target: ATXN2; (-) strand; PAM type: YTN; PAM sequence: TTG
aagagcaagttccactgatt

SEQ ID NO: 68233 - DNA, 20 bp, Artificial Sequence
  Description of Artificial Sequence: Synthetic oligonucleotide
  Target: ATXN2; (-) strand; PAM type: YTN; PAM sequence: CTT
gaagagcaagttccactgat

SEQ ID NO: 68234 - DNA, 20 bp, Artificial Sequence
  Description of Artificial Sequence: Synthetic oligonucleotide
  Target: ATXN2; (-) strand; PAM type: YTN; PAM sequence: CTA
accttgaagagcaagttcca

SEQ ID NO: 68235 - DNA, 20 bp, Artificial Sequence
  Description of Artificial Sequence: Synthetic oligonucleotide
  Target: ATXN2; (-) strand; PAM type: YTN; PAM sequence: CTG
aagcatctaaccttgaagag

SEQ ID NO: 68236 - DNA, 20 bp, Artificial Sequence
  Description of Artificial Sequence: Synthetic oligonucleotide
  Target: ATXN2; (-) strand; PAM type: YTN; PAM sequence: TTG
actgaagcatctaaccttga

SEQ ID NO: 68237 - DNA, 20 bp, Artificial Sequence
  Description of Artificial Sequence: Synthetic oligonucleotide
  Target: ATXN2; (-) strand; PAM type: YTN; PAM sequence: TTT
gactgaagcatctaaccttg

SEQ ID NO: 68238 - DNA, 20 bp, Artificial Sequence
  Description of Artificial Sequence: Synthetic oligonucleotide
  Target: ATXN2; (-) strand; PAM type: YTN; PAM sequence: CTT
tgactgaagcatctaacctt

SEQ ID NO: 68239 - DNA, 20 bp, Artificial Sequence
  Description of Artificial Sequence: Synthetic oligonucleotide
  Target: ATXN2; (-) strand; PAM type: YTN; PAM sequence: CTA
agcaggcaggtcatatgact

SEQ ID NO: 68240 - DNA, 20 bp, Artificial Sequence
  Description of Artificial Sequence: Synthetic oligonucleotide
  Target: ATXN2; (-) strand; PAM type: YTN; PAM sequence: TTA
ccatctaagcaggcaggtca

SEQ ID NO: 68241 - DNA, 20 bp, Artificial Sequence
  Description of Artificial Sequence: Synthetic oligonucleotide
  Target: ATXN2; (-) strand; PAM type: YTN; PAM sequence: TTG
ttaccatctaagcaggcagg

SEQ ID NO: 68242 - DNA, 20 bp, Artificial Sequence
  Description of Artificial Sequence: Synthetic oligonucleotide
  Target: ATXN2; (-) strand; PAM type: YTN; PAM sequence: TTA
aataaattgttaccatctaa

SEQ ID NO: 68243 - DNA, 20 bp, Artificial Sequence
  Description of Artificial Sequence: Synthetic oligonucleotide
  Target: ATXN2; (-) strand; PAM type: YTN; PAM sequence: TTT
aaataaattgttaccatcta

SEQ ID NO: 68244 - DNA, 20 bp, Artificial Sequence
  Description of Artificial Sequence: Synthetic oligonucleotide
  Target: ATXN2; (-) strand; PAM type: YTN; PAM sequence: TTT
taaataaattgttaccatct

SEQ ID NO: 68245 - DNA, 20 bp, Artificial Sequence
  Description of Artificial Sequence: Synthetic oligonucleotide
  Target: ATXN2; (-) strand; PAM type: YTN; PAM sequence: CTT
ttaaataaattgttaccatc

SEQ ID NO: 68246 - DNA, 20 bp, Artificial Sequence
  Description of Artificial Sequence: Synthetic oligonucleotide
  Target: ATXN2; (-) strand; PAM type: YTN; PAM sequence: CTA
cttttaaataaattgttacc

SEQ ID NO: 68247 - DNA, 20 bp, Artificial Sequence
  Description of Artificial Sequence: Synthetic oligonucleotide
  Target: ATXN2; (-) strand; PAM type: YTN; PAM sequence: TTG
gctacttttaaataaattgt

SEQ ID NO: 68248 - DNA, 20 bp, Artificial Sequence
  Description of Artificial Sequence: Synthetic oligonucleotide
  Target: ATXN2; (-) strand; PAM type: YTN; PAM sequence: CTG
tattggctacttttaaataa

SEQ ID NO: 68249 - DNA, 20 bp, Artificial Sequence
  Description of Artificial Sequence: Synthetic oligonucleotide
  Target: ATXN2; (-) strand; PAM type: YTN; PAM sequence: CTG
gagaaaactgtattggctac

SEQ ID NO: 68250 - DNA, 20 bp, Artificial Sequence
  Description of Artificial Sequence: Synthetic oligonucleotide
  Target: ATXN2; (-) strand; PAM type: YTN; PAM sequence: TTC
cctggagaaaactgtattgg

SEQ ID NO: 68251 - DNA, 20 bp, Artificial Sequence
  Description of Artificial Sequence: Synthetic oligonucleotide
  Target: ATXN2; (-) strand; PAM type: YTN; PAM sequence: CTT
ccctggagaaaactgtattg

SEQ ID NO: 68252 - DNA, 20 bp, Artificial Sequence
  Description of Artificial Sequence: Synthetic oligonucleotide
  Target: ATXN2; (-) strand; PAM type: YTN; PAM sequence: CTG
cttccctggagaaaactgta

SEQ ID NO: 68253 - DNA, 20 bp, Artificial Sequence
  Description of Artificial Sequence: Synthetic oligonucleotide
  Target: ATXN2; (-) strand; PAM type: YTN; PAM sequence: CTC
ctgcttccctggagaaaact

SEQ ID NO: 68254 - DNA, 20 bp, Artificial Sequence
  Description of Artificial Sequence: Synthetic oligonucleotide
  Target: ATXN2; (-) strand; PAM type: YTN; PAM sequence: TTC
tcctgcttccctggagaaaa

SEQ ID NO: 68255 - DNA, 20 bp, Artificial Sequence
  Description of Artificial Sequence: Synthetic oligonucleotide
  Target: ATXN2; (-) strand; PAM type: YTN; PAM sequence: TTT
ctcctgcttccctggagaaa

SEQ ID NO: 68256 - DNA, 20 bp, Artificial Sequence
  Description of Artificial Sequence: Synthetic oligonucleotide
  Target: ATXN2; (-) strand; PAM type: YTN; PAM sequence: TTC
cgcacaaaatgtgtttctcc

SEQ ID NO: 68257 - DNA, 20 bp, Artificial Sequence
  Description of Artificial Sequence: Synthetic oligonucleotide
  Target: ATXN2; (-) strand; PAM type: YTN; PAM sequence: TTT
ccgcacaaaatgtgtttctc

SEQ ID NO: 68258 - DNA, 20 bp, Artificial Sequence
  Description of Artificial Sequence: Synthetic oligonucleotide
  Target: ATXN2; (-) strand; PAM type: YTN; PAM sequence: TTT
tccgcacaaaatgtgtttct

SEQ ID NO: 68259 - DNA, 20 bp, Artificial Sequence
  Description of Artificial Sequence: Synthetic oligonucleotide
  Target: ATXN2; (-) strand; PAM type: YTN; PAM sequence: CTA
ataaagttttccgcacaaaa

SEQ ID NO: 68260 - DNA, 20 bp, Artificial Sequence
  Description of Artificial Sequence: Synthetic oligonucleotide
  Target: ATXN2; (-) strand; PAM type: YTN; PAM sequence: TTG
ggactaataaagttttccgc

SEQ ID NO: 68261 - DNA, 20 bp, Artificial Sequence
  Description of Artificial Sequence: Synthetic oligonucleotide
  Target: ATXN2; (-) strand; PAM type: YTN; PAM sequence: TTA
tgttgggactaataaagttt

SEQ ID NO: 68262 - DNA, 20 bp, Artificial Sequence
  Description of Artificial Sequence: Synthetic oligonucleotide
  Target: ATXN2; (-) strand; PAM type: YTN; PAM sequence: CTT
atgttgggactaataaagtt

SEQ ID NO: 68263 - DNA, 20 bp, Artificial Sequence
  Description of Artificial Sequence: Synthetic oligonucleotide
  Target: ATXN2; (-) strand; PAM type: YTN; PAM sequence: TTG
cttatgttgggactaataaa

SEQ ID NO: 68264 - DNA, 20 bp, Artificial Sequence
  Description of Artificial Sequence: Synthetic oligonucleotide
  Target: ATXN2; (-) strand; PAM type: YTN; PAM sequence: TTA
atattgcttatgttgggact

SEQ ID NO: 68265 - DNA, 20 bp, Artificial Sequence
  Description of Artificial Sequence: Synthetic oligonucleotide
  Target: ATXN2; (-) strand; PAM type: YTN; PAM sequence: TTA
gttaatattgcttatgttgg

SEQ ID NO: 68266 - DNA, 20 bp, Artificial Sequence
  Description of Artificial Sequence: Synthetic oligonucleotide
  Target: ATXN2; (-) strand; PAM type: YTN; PAM sequence: TTA
aaattagttaatattgctta

SEQ ID NO: 68267 - DNA, 20 bp, Artificial Sequence
  Description of Artificial Sequence: Synthetic oligonucleotide
  Target: ATXN2; (-) strand; PAM type: YTN; PAM sequence: TTC
attaaaattagttaatattg

SEQ ID NO: 68268 - DNA, 20 bp, Artificial Sequence
  Description of Artificial Sequence: Synthetic oligonucleotide
  Target: ATXN2; (-) strand; PAM type: YTN; PAM sequence: TTG
ttcattaaaattagttaata

SEQ ID NO: 68269 - DNA, 20 bp, Artificial Sequence
  Description of Artificial Sequence: Synthetic oligonucleotide
  Target: ATXN2; (-) strand; PAM type: YTN; PAM sequence: TTT
gttcattaaaattagttaat

SEQ ID NO: 68270 - DNA, 20 bp, Artificial Sequence
  Description of Artificial Sequence: Synthetic oligonucleotide
  Target: ATXN2; (-) strand; PAM type: YTN; PAM sequence: CTG
atttgttcattaaaattagt

SEQ ID NO: 68271 - DNA, 20 bp, Artificial Sequence
  Description of Artificial Sequence: Synthetic oligonucleotide
  Target: ATXN2; (-) strand; PAM type: YTN; PAM sequence: TTA
atctgatttgttcattaaaa

SEQ ID NO: 68272 - DNA, 20 bp, Artificial Sequence
  Description of Artificial Sequence: Synthetic oligonucleotide
  Target: ATXN2; (-) strand; PAM type: YTN; PAM sequence: TTT
aatctgatttgttcattaaa

SEQ ID NO: 68273 - DNA, 20 bp, Artificial Sequence
  Description of Artificial Sequence: Synthetic oligonucleotide
  Target: ATXN2; (-) strand; PAM type: YTN; PAM sequence: TTT
taatctgatttgttcattaa

SEQ ID NO: 68274 - DNA, 20 bp, Artificial Sequence
  Description of Artificial Sequence: Synthetic oligonucleotide
  Target: ATXN2; (-) strand; PAM type: YTN; PAM sequence: TTA
aaattttaatctgatttgtt

SEQ ID NO: 68275 - DNA, 20 bp, Artificial Sequence
  Description of Artificial Sequence: Synthetic oligonucleotide
  Target: ATXN2; (-) strand; PAM type: YTN; PAM sequence: TTG
tgttaaaattttaatctgat

SEQ ID NO: 68276 - DNA, 20 bp, Artificial Sequence
  Description of Artificial Sequence: Synthetic oligonucleotide
  Target: ATXN2; (-) strand; PAM type: YTN; PAM sequence: TTT
gtgttaaaattttaatctga

SEQ ID NO: 68277 - DNA, 20 bp, Artificial Sequence
  Description of Artificial Sequence: Synthetic oligonucleotide
  Target: ATXN2; (-) strand; PAM type: YTN; PAM sequence: CTG
aatatttgtgttaaaatttt

SEQ ID NO: 68278 - DNA, 20 bp, Artificial Sequence
  Description of Artificial Sequence: Synthetic oligonucleotide
  Target: ATXN2; (-) strand; PAM type: YTN; PAM sequence: TTC
tgaatatttgtgttaaaatt

SEQ ID NO: 68279 - DNA, 20 bp, Artificial Sequence
  Description of Artificial Sequence: Synthetic oligonucleotide
  Target: ATXN2; (-) strand; PAM type: YTN; PAM sequence: CTA
gttctgaatatttgtgttaa

SEQ ID NO: 68280 - DNA, 20 bp, Artificial Sequence
  Description of Artificial Sequence: Synthetic oligonucleotide
  Target: ATXN2; (-) strand; PAM type: YTN; PAM sequence: TTG
atactagttctgaatatttg

SEQ ID NO: 68281 - DNA, 20 bp, Artificial Sequence
  Description of Artificial Sequence: Synthetic oligonucleotide
  Target: ATXN2; (-) strand; PAM type: YTN; PAM sequence: TTT
gatactagttctgaatattt

SEQ ID NO: 68282 - DNA, 20 bp, Artificial Sequence
  Description of Artificial Sequence: Synthetic oligonucleotide
  Target: ATXN2; (-) strand; PAM type: YTN; PAM sequence: TTT
tgatactagttctgaatatt

SEQ ID NO: 68283 - DNA, 20 bp, Artificial Sequence
  Description of Artificial Sequence: Synthetic oligonucleotide
  Target: ATXN2; (-) strand; PAM type: YTN; PAM sequence: CTT
ttgatactagttctgaatat

SEQ ID NO: 68284 - DNA, 20 bp, Artificial Sequence
  Description of Artificial Sequence: Synthetic oligonucleotide
  Target: ATXN2; (-) strand; PAM type: YTN; PAM sequence: CTG
aatcataatgtccttttgat

SEQ ID NO: 68285 - DNA, 20 bp, Artificial Sequence
  Description of Artificial Sequence: Synthetic oligonucleotide
  Target: ATXN2; (-) strand; PAM type: YTN; PAM sequence: TTC
tgaatcataatgtccttttg

SEQ ID NO: 68286 - DNA, 20 bp, Artificial Sequence
  Description of Artificial Sequence: Synthetic oligonucleotide
  Target: ATXN2; (-) strand; PAM type: YTN; PAM sequence: TTT
ctgaatcataatgtcctttt

SEQ ID NO: 68287 - DNA, 20 bp, Artificial Sequence
  Description of Artificial Sequence: Synthetic oligonucleotide
  Target: ATXN2; (-) strand; PAM type: YTN; PAM sequence: TTT
tctgaatcataatgtccttt

SEQ ID NO: 68288 - DNA, 20 bp, Artificial Sequence
  Description of Artificial Sequence: Synthetic oligonucleotide
  Target: ATXN2; (-) strand; PAM type: YTN; PAM sequence: CTG
ttttctgaatcataatgtcc

SEQ ID NO: 68289 - DNA, 20 bp, Artificial Sequence
  Description of Artificial Sequence: Synthetic oligonucleotide
  Target: ATXN2; (-) strand; PAM type: YTN; PAM sequence: TTA
aaaacctgttttctgaatca

SEQ ID NO: 68290 - DNA, 20 bp, Artificial Sequence
  Description of Artificial Sequence: Synthetic oligonucleotide
  Target: ATXN2; (-) strand; PAM type: YTN; PAM sequence: TTA
aatgccacccatatattaaa

SEQ ID NO: 68291 - DNA, 20 bp, Artificial Sequence
  Description of Artificial Sequence: Synthetic oligonucleotide
  Target: ATXN2; (-) strand; PAM type: YTN; PAM sequence: TTT
aaatgccacccatatattaa

SEQ ID NO: 68292 - DNA, 20 bp, Artificial Sequence
  Description of Artificial Sequence: Synthetic oligonucleotide
  Target: ATXN2; (-) strand; PAM type: YTN; PAM sequence: CTA
atttaaatgccacccatata

SEQ ID NO: 68293 - DNA, 20 bp, Artificial Sequence
  Description of Artificial Sequence: Synthetic oligonucleotide
  Target: ATXN2; (-) strand; PAM type: YTN; PAM sequence: TTC
taatttaaatgccacccata

SEQ ID NO: 68294 - DNA, 20 bp, Artificial Sequence
  Description of Artificial Sequence: Synthetic oligonucleotide
  Target: ATXN2; (-) strand; PAM type: YTN; PAM sequence: TTG
tagaaaggtaacattctaat

SEQ ID NO: 68295 - DNA, 20 bp, Artificial Sequence
  Description of Artificial Sequence: Synthetic oligonucleotide
  Target: ATXN2; (-) strand; PAM type: YTN; PAM sequence: TTG
ccacatatcaaatacaggga

SEQ ID NO: 68296 - DNA, 20 bp, Artificial Sequence
  Description of Artificial Sequence: Synthetic oligonucleotide
  Target: ATXN2; (-) strand; PAM type: YTN; PAM sequence: CTA
aatccatcattgccacatat

SEQ ID NO: 68297 - DNA, 20 bp, Artificial Sequence
  Description of Artificial Sequence: Synthetic oligonucleotide
  Target: ATXN2; (-) strand; PAM type: YTN; PAM sequence: TTG
gcgctaaatccatcattgcc

SEQ ID NO: 68298 - DNA, 20 bp, Artificial Sequence
  Description of Artificial Sequence: Synthetic oligonucleotide
  Target: ATXN2; (-) strand; PAM type: YTN; PAM sequence: TTT
ggcgctaaatccatcattgc

SEQ ID NO: 68299 - DNA, 20 bp, Artificial Sequence
  Description of Artificial Sequence: Synthetic oligonucleotide
  Target: ATXN2; (-) strand; PAM type: YTN; PAM sequence: TTC
agtatttggcgctaaatcca

SEQ ID NO: 68300 - DNA, 20 bp, Artificial Sequence
  Description of Artificial Sequence: Synthetic oligonucleotide
  Target: ATXN2; (-) strand; PAM type: YTN; PAM sequence: TTA
ttcagtatttggcgctaaat

SEQ ID NO: 68301 - DNA, 20 bp, Artificial Sequence
  Description of Artificial Sequence: Synthetic oligonucleotide
  Target: ATXN2; (-) strand; PAM type: YTN; PAM sequence: CTT
attcagtatttggcgctaaa

SEQ ID NO: 68302 - DNA, 20 bp, Artificial Sequence
  Description of Artificial Sequence: Synthetic oligonucleotide
  Target: ATXN2; (-) strand; PAM type: YTN; PAM sequence: TTC
ttattcagtatttggcgcta

SEQ ID NO: 68303 - DNA, 20 bp, Artificial Sequence
  Description of Artificial Sequence: Synthetic oligonucleotide
  Target: ATXN2; (-) strand; PAM type: YTN; PAM sequence: TTG
taattcttattcagtatttg

SEQ ID NO: 68304 - DNA, 20 bp, Artificial Sequence
  Description of Artificial Sequence: Synthetic oligonucleotide
  Target: ATXN2; (-) strand; PAM type: YTN; PAM sequence: CTT
gtaattcttattcagtattt

SEQ ID NO: 68305 - DNA, 20 bp, Artificial Sequence
  Description of Artificial Sequence: Synthetic oligonucleotide
  Target: ATXN2; (-) strand; PAM type: YTN; PAM sequence: CTC
gtcaaaaataagaataaaat

SEQ ID NO: 68306 - DNA, 20 bp, Artificial Sequence
  Description of Artificial Sequence: Synthetic oligonucleotide
  Target: ATXN2; (-) strand; PAM type: YTN; PAM sequence: TTC
ctcgtcaaaaataagaataa

SEQ ID NO: 68307 - DNA, 20 bp, Artificial Sequence
  Description of Artificial Sequence: Synthetic oligonucleotide
  Target: ATXN2; (-) strand; PAM type: YTN; PAM sequence: TTT
cctcgtcaaaaataagaata

SEQ ID NO: 68308 - DNA, 20 bp, Artificial Sequence
  Description of Artificial Sequence: Synthetic oligonucleotide
  Target: ATXN2; (-) strand; PAM type: YTN; PAM sequence: CTT
tcctcgtcaaaaataagaat

SEQ ID NO: 68309 - DNA, 20 bp, Artificial Sequence
  Description of Artificial Sequence: Synthetic oligonucleotide
  Target: ATXN2; (-) strand; PAM type: YTN; PAM sequence: TTC
tttcctcgtcaaaaataaga

SEQ ID NO: 68310 - DNA, 20 bp, Artificial Sequence
  Description of Artificial Sequence: Synthetic oligonucleotide
  Target: ATXN2; (-) strand; PAM type: YTN; PAM sequence: TTT
ctttcctcgtcaaaaataag

SEQ ID NO: 68311 - DNA, 20 bp, Artificial Sequence
  Description of Artificial Sequence: Synthetic oligonucleotide
  Target: ATXN2; (-) strand; PAM type: YTN; PAM sequence: CTA
tttctttcctcgtcaaaaat

SEQ ID NO: 68312 - DNA, 20 bp, Artificial Sequence
  Description of Artificial Sequence: Synthetic oligonucleotide
  Target: ATXN2; (-) strand; PAM type: YTN; PAM sequence: TTA
gctatttctttcctcgtcaa

SEQ ID NO: 68313 - DNA, 20 bp, Artificial Sequence
  Description of Artificial Sequence: Synthetic oligonucleotide
  Target: ATXN2; (-) strand; PAM type: YTN; PAM sequence: TTT
agctatttctttcctcgtca

SEQ ID NO: 68314 - DNA, 20 bp, Artificial Sequence
  Description of Artificial Sequence: Synthetic oligonucleotide
  Target: ATXN2; (-) strand; PAM type: YTN; PAM sequence: TTG
aatatttagctatttctttc

SEQ ID NO: 68315 - DNA, 20 bp, Artificial Sequence
  Description of Artificial Sequence: Synthetic oligonucleotide
  Target: ATXN2; (-) strand; PAM type: YTN; PAM sequence: TTT
gaatatttagctatttcttt

SEQ ID NO: 68316 - DNA, 20 bp, Artificial Sequence
  Description of Artificial Sequence: Synthetic oligonucleotide
  Target: ATXN2; (-) strand; PAM type: YTN; PAM sequence: TTG
ataaaaacgacatatgaatt

SEQ ID NO: 68317 - DNA, 20 bp, Artificial Sequence
  Description of Artificial Sequence: Synthetic oligonucleotide
  Target: ATXN2; (-) strand; PAM type: YTN; PAM sequence: CTG
agataaaattgataaaaacg

SEQ ID NO: 68318 - DNA, 20 bp, Artificial Sequence
  Description of Artificial Sequence: Synthetic oligonucleotide
  Target: ATXN2; (-) strand; PAM type: YTN; PAM sequence: TTG
atctgagataaaattgataa

SEQ ID NO: 68319 - DNA, 20 bp, Artificial Sequence
  Description of Artificial Sequence: Synthetic oligonucleotide
  Target: ATXN2; (-) strand; PAM type: YTN; PAM sequence: CTT
gatctgagataaaattgata

SEQ ID NO: 68320 - DNA, 20 bp, Artificial Sequence
  Description of Artificial Sequence: Synthetic oligonucleotide
  Target: ATXN2; (-) strand; PAM type: YTN; PAM sequence: CTG
gaagaagtccttgatctgag

SEQ ID NO: 68321 - DNA, 20 bp, Artificial Sequence
  Description of Artificial Sequence: Synthetic oligonucleotide
  Target: ATXN2; (-) strand; PAM type: YTN; PAM sequence: TTA
atctggaagaagtccttgat

SEQ ID NO: 68322 - DNA, 20 bp, Artificial Sequence
  Description of Artificial Sequence: Synthetic oligonucleotide
  Target: ATXN2; (-) strand; PAM type: YTN; PAM sequence: TTT
aatctggaagaagtccttga

SEQ ID NO: 68323 - DNA, 20 bp, Artificial Sequence
  Description of Artificial Sequence: Synthetic oligonucleotide
  Target: ATXN2; (-) strand; PAM type: YTN; PAM sequence: CTT
taatctggaagaagtccttg

SEQ ID NO: 68324 - DNA, 20 bp, Artificial Sequence
  Description of Artificial Sequence: Synthetic oligonucleotide
  Target: ATXN2; (-) strand; PAM type: YTN; PAM sequence: CTG
ctttaatctggaagaagtcc

SEQ ID NO: 68325 - DNA, 20 bp, Artificial Sequence
  Description of Artificial Sequence: Synthetic oligonucleotide
  Target: ATXN2; (-) strand; PAM type: YTN; PAM sequence: TTA
catagtgaaaggctgcttta

SEQ ID NO: 68326 - DNA, 20 bp, Artificial Sequence
  Description of Artificial Sequence: Synthetic oligonucleotide
  Target: ATXN2; (-) strand; PAM type: YTN; PAM sequence: CTT
acatagtgaaaggctgcttt

SEQ ID NO: 68327 - DNA, 20 bp, Artificial Sequence
  Description of Artificial Sequence: Synthetic oligonucleotide
  Target: ATXN2; (-) strand; PAM type: YTN; PAM sequence: TTG
caatcttacatagtgaaagg

SEQ ID NO: 68328 - DNA, 20 bp, Artificial Sequence
  Description of Artificial Sequence: Synthetic oligonucleotide
  Target: ATXN2; (-) strand; PAM type: YTN; PAM sequence: TTT
gcaatcttacatagtgaaag

SEQ ID NO: 68329 - DNA, 20 bp, Artificial Sequence
  Description of Artificial Sequence: Synthetic oligonucleotide
  Target: ATXN2; (-) strand; PAM type: YTN; PAM sequence: CTT
tgcaatcttacatagtgaaa

SEQ ID NO: 68330 - DNA, 20 bp, Artificial Sequence
  Description of Artificial Sequence: Synthetic oligonucleotide
  Target: ATXN2; (-) strand; PAM type: YTN; PAM sequence: TTA
gctttgcaatcttacatagt

SEQ ID NO: 68331 - DNA, 20 bp, Artificial Sequence
  Description of Artificial Sequence: Synthetic oligonucleotide
  Target: ATXN2; (-) strand; PAM type: YTN; PAM sequence: TTA
aagttagctttgcaatctta

SEQ ID NO: 68332 - DNA, 20 bp, Artificial Sequence
  Description of Artificial Sequence: Synthetic oligonucleotide
  Target: ATXN2; (-) strand; PAM type: YTN; PAM sequence: TTT
aaagttagctttgcaatctt

SEQ ID NO: 68333 - DNA, 20 bp, Artificial Sequence
  Description of Artificial Sequence: Synthetic oligonucleotide
  Target: ATXN2; (-) strand; PAM type: YTN; PAM sequence: TTT
taaagttagctttgcaatct

SEQ ID NO: 68334 - DNA, 20 bp, Artificial Sequence
  Description of Artificial Sequence: Synthetic oligonucleotide
  Target: ATXN2; (-) strand; PAM type: YTN; PAM sequence: TTT
ttaaagttagctttgcaatc

SEQ ID NO: 68335 - DNA, 20 bp, Artificial Sequence
  Description of Artificial Sequence: Synthetic oligonucleotide
  Target: ATXN2; (-) strand; PAM type: YTN; PAM sequence: TTT
tttaaagttagctttgcaat

SEQ ID NO: 68336 - DNA, 20 bp, Artificial Sequence
  Description of Artificial Sequence: Synthetic oligonucleotide
  Target: ATXN2; (-) strand; PAM type: YTN; PAM sequence: TTT
ttttaaagttagctttgcaa

SEQ ID NO: 68337 - DNA, 20 bp, Artificial Sequence
  Description of Artificial Sequence: Synthetic oligonucleotide
  Target: ATXN2; (-) strand; PAM type: YTN; PAM sequence: CTG
agtaatttttttaaagttag

SEQ ID NO: 68338 - DNA, 20 bp, Artificial Sequence
  Description of Artificial Sequence: Synthetic oligonucleotide
  Target: ATXN2; (-) strand; PAM type: YTN; PAM sequence: TTA
actgagtaatttttttaaag

SEQ ID NO: 68339 - DNA, 20 bp, Artificial Sequence
  Description of Artificial Sequence: Synthetic oligonucleotide
  Target: ATXN2; (-) strand; PAM type: YTN; PAM sequence: TTT
aactgagtaatttttttaaa

SEQ ID NO: 68340 - DNA, 20 bp, Artificial Sequence
  Description of Artificial Sequence: Synthetic oligonucleotide
  Target: ATXN2; (-) strand; PAM type: YTN; PAM sequence: CTA
aatttaactgagtaattttt

SEQ ID NO: 68341 - DNA, 20 bp, Artificial Sequence
  Description of Artificial Sequence: Synthetic oligonucleotide
  Target: ATXN2; (-) strand; PAM type: YTN; PAM sequence: TTC
taaatttaactgagtaattt

SEQ ID NO: 68342 - DNA, 20 bp, Artificial Sequence
  Description of Artificial Sequence: Synthetic oligonucleotide
  Target: ATXN2; (-) strand; PAM type: YTN; PAM sequence: TTA
gaatgccagaagaattctaa

SEQ ID NO: 68343 - DNA, 20 bp, Artificial Sequence
  Description of Artificial Sequence: Synthetic oligonucleotide
  Target: ATXN2; (-) strand; PAM type: YTN; PAM sequence: TTT
agaatgccagaagaattcta

SEQ ID NO: 68344 - DNA, 20 bp, Artificial Sequence
  Description of Artificial Sequence: Synthetic oligonucleotide
  Target: ATXN2; (-) strand; PAM type: YTN; PAM sequence: TTT
tagaatgccagaagaattct

SEQ ID NO: 68345 - DNA, 20 bp, Artificial Sequence
  Description of Artificial Sequence: Synthetic oligonucleotide
  Target: ATXN2; (-) strand; PAM type: YTN; PAM sequence: TTT
ttagaatgccagaagaattc

SEQ ID NO: 68346 - DNA, 20 bp, Artificial Sequence
  Description of Artificial Sequence: Synthetic oligonucleotide
  Target: ATXN2; (-) strand; PAM type: YTN; PAM sequence: TTG
atttttagaatgccagaaga

SEQ ID NO: 68347 - DNA, 20 bp, Artificial Sequence
  Description of Artificial Sequence: Synthetic oligonucleotide
  Target: ATXN2; (-) strand; PAM type: YTN; PAM sequence: TTA
aagtagttgatttttagaat

SEQ ID NO: 68348 - DNA, 20 bp, Artificial Sequence
  Description of Artificial Sequence: Synthetic oligonucleotide
  Target: ATXN2; (-) strand; PAM type: YTN; PAM sequence: TTA
gattaaagtagttgattttt

SEQ ID NO: 68349 - DNA, 20 bp, Artificial Sequence
  Description of Artificial Sequence: Synthetic oligonucleotide
  Target: ATXN2; (-) strand; PAM type: YTN; PAM sequence: CTT
agattaaagtagttgatttt

SEQ ID NO: 68350 - DNA, 20 bp, Artificial Sequence
  Description of Artificial Sequence: Synthetic oligonucleotide
  Target: ATXN2; (-) strand; PAM type: YTN; PAM sequence: CTG
cccttagattaaagtagttg

SEQ ID NO: 68351 - DNA, 20 bp, Artificial Sequence
  Description of Artificial Sequence: Synthetic oligonucleotide
  Target: ATXN2; (-) strand; PAM type: YTN; PAM sequence: TTG
cgtgtctgcccttagattaa

SEQ ID NO: 68352 - DNA, 20 bp, Artificial Sequence
  Description of Artificial Sequence: Synthetic oligonucleotide
  Target: ATXN2; (-) strand; PAM type: YTN; PAM sequence: TTT
gcgtgtctgcccttagatta

SEQ ID NO: 68353 - DNA, 20 bp, Artificial Sequence
  Description of Artificial Sequence: Synthetic oligonucleotide
  Target: ATXN2; (-) strand; PAM type: YTN; PAM sequence: CTT
tgcgtgtctgcccttagatt

SEQ ID NO: 68354 - DNA, 20 bp, Artificial Sequence
  Description of Artificial Sequence: Synthetic oligonucleotide
  Target: ATXN2; (-) strand; PAM type: YTN; PAM sequence: CTG
actttgcgtgtctgccctta

SEQ ID NO: 68355 - DNA, 20 bp, Artificial Sequence
  Description of Artificial Sequence: Synthetic oligonucleotide
  Target: ATXN2; (-) strand; PAM type: YTN; PAM sequence: TTG
agagcgacagcccatgtagc

SEQ ID NO: 68356 - DNA, 20 bp, Artificial Sequence
  Description of Artificial Sequence: Synthetic oligonucleotide
  Target: ATXN2; (-) strand; PAM type: YTN; PAM sequence: TTT
gagagcgacagcccatgtag

SEQ ID NO: 68357 - DNA, 20 bp, Artificial Sequence
  Description of Artificial Sequence: Synthetic oligonucleotide
  Target: ATXN2; (-) strand; PAM type: YTN; PAM sequence: TTT
tgagagcgacagcccatgta

SEQ ID NO: 68358 - DNA, 20 bp, Artificial Sequence
  Description of Artificial Sequence: Synthetic oligonucleotide
  Target: ATXN2; (-) strand; PAM type: YTN; PAM sequence: TTT
ttgagagcgacagcccatgt

SEQ ID NO: 68359 - DNA, 20 bp, Artificial Sequence
  Description of Artificial Sequence: Synthetic oligonucleotide
  Target: ATXN2; (-) strand; PAM type: YTN; PAM sequence: TTT
tttgagagcgacagcccatg

SEQ ID NO: 68360 - DNA, 20 bp, Artificial Sequence
  Description of Artificial Sequence: Synthetic oligonucleotide
  Target: ATXN2; (-) strand; PAM type: YTN; PAM sequence: CTT
ttttgagagcgacagcccat

SEQ ID NO: 68361 - DNA, 20 bp, Artificial Sequence
  Description of Artificial Sequence: Synthetic oligonucleotide
  Target: ATXN2; (-) strand; PAM type: YTN; PAM sequence: CTG
ggtcttttttgagagcgaca

SEQ ID NO: 68362 - DNA, 20 bp, Artificial Sequence
  Description of Artificial Sequence: Synthetic oligonucleotide
  Target: ATXN2; (-) strand; PAM type: YTN; PAM sequence: TTC
tgggtcttttttgagagcga

SEQ ID NO: 68363 - DNA, 20 bp, Artificial Sequence
  Description of Artificial Sequence: Synthetic oligonucleotide
  Target: ATXN2; (-) strand; PAM type: YTN; PAM sequence: TTT
ctgggtcttttttgagagcg

SEQ ID NO: 68364 - DNA, 20 bp, Artificial Sequence
  Description of Artificial Sequence: Synthetic oligonucleotide
  Target: ATXN2; (-) strand; PAM type: YTN; PAM sequence: TTT
tctgggtcttttttgagagc

SEQ ID NO: 68365 - DNA, 20 bp, Artificial Sequence
  Description of Artificial Sequence: Synthetic oligonucleotide
  Target: ATXN2; (-) strand; PAM type: YTN; PAM sequence: TTG
gccataagcagggatggtgt

SEQ ID NO: 68366 - DNA, 20 bp, Artificial Sequence
  Description of Artificial Sequence: Synthetic oligonucleotide
  Target: ATXN2; (-) strand; PAM type: YTN; PAM sequence: CTA
ttggccataagcagggatgg

SEQ ID NO: 68367 - DNA, 20 bp, Artificial Sequence
  Description of Artificial Sequence: Synthetic oligonucleotide
  Target: ATXN2; (-) strand; PAM type: YTN; PAM sequence: TTC
ctattggccataagcaggga

SEQ ID NO: 68368 - DNA, 20 bp, Artificial Sequence
  Description of Artificial Sequence: Synthetic oligonucleotide
  Target: ATXN2; (-) strand; PAM type: YTN; PAM sequence: CTT
cctattggccataagcaggg

SEQ ID NO: 68369 - DNA, 20 bp, Artificial Sequence
  Description of Artificial Sequence: Synthetic oligonucleotide
  Target: ATXN2; (-) strand; PAM type: YTN; PAM sequence: CTA
gtgaaccttcctattggcca

SEQ ID NO: 68370 - DNA, 20 bp, Artificial Sequence
  Description of Artificial Sequence: Synthetic oligonucleotide
  Target: ATXN2; (-) strand; PAM type: YTN; PAM sequence: TTG
gccaaggtcctagtgaacct

SEQ ID NO: 68371 - DNA, 20 bp, Artificial Sequence
  Description of Artificial Sequence: Synthetic oligonucleotide
  Target: ATXN2; (-) strand; PAM type: YTN; PAM sequence: TTT
ggccaaggtcctagtgaacc

SEQ ID NO: 68372 - DNA, 20 bp, Artificial Sequence
  Description of Artificial Sequence: Synthetic oligonucleotide
  Target: ATXN2; (-) strand; PAM type: YTN; PAM sequence: CTT
tggccaaggtcctagtgaac

SEQ ID NO: 68373 - DNA, 20 bp, Artificial Sequence
  Description of Artificial Sequence: Synthetic oligonucleotide
  Target: ATXN2; (-) strand; PAM type: YTN; PAM sequence: CTC
tttggccaaggtcctagtga

SEQ ID NO: 68374 - DNA, 20 bp, Artificial Sequence
  Description of Artificial Sequence: Synthetic oligonucleotide
  Target: ATXN2; (-) strand; PAM type: YTN; PAM sequence: TTA
cagctctttggccaaggtcc

SEQ ID NO: 68375 - DNA, 20 bp, Artificial Sequence
  Description of Artificial Sequence: Synthetic oligonucleotide
  Target: ATXN2; (-) strand; PAM type: YTN; PAM sequence: TTT
acagctctttggccaaggtc

SEQ ID NO: 68376 - DNA, 20 bp, Artificial Sequence
  Description of Artificial Sequence: Synthetic oligonucleotide
  Target: ATXN2; (-) strand; PAM type: YTN; PAM sequence: TTT
tacagctctttggccaaggt

SEQ ID NO: 68377 - DNA, 20 bp, Artificial Sequence
  Description of Artificial Sequence: Synthetic oligonucleotide
  Target: ATXN2; (-) strand; PAM type: YTN; PAM sequence: TTC
attttacagctctttggcca

SEQ ID NO: 68378 - DNA, 20 bp, Artificial Sequence
  Description of Artificial Sequence: Synthetic oligonucleotide
  Target: ATXN2; (-) strand; PAM type: YTN; PAM sequence: TTA
ggttcattttacagctcttt

SEQ ID NO: 68379 - DNA, 20 bp, Artificial Sequence
  Description of Artificial Sequence: Synthetic oligonucleotide
  Target: ATXN2; (-) strand; PAM type: YTN; PAM sequence: CTT
aggttcattttacagctctt

SEQ ID NO: 68380 - DNA, 20 bp, Artificial Sequence
  Description of Artificial Sequence: Synthetic oligonucleotide
  Target: ATXN2; (-) strand; PAM type: YTN; PAM sequence: TTG
aacttaggttcattttacag

SEQ ID NO: 68381 - DNA, 20 bp, Artificial Sequence
  Description of Artificial Sequence: Synthetic oligonucleotide
  Target: ATXN2; (-) strand; PAM type: YTN; PAM sequence: CTT
gaacttaggttcattttaca

SEQ ID NO: 68382 - DNA, 20 bp, Artificial Sequence
  Description of Artificial Sequence: Synthetic oligonucleotide
  Target: ATXN2; (-) strand; PAM type: YTN; PAM sequence: TTC
agccagtcttgaacttaggt

SEQ ID NO: 68383 - DNA, 20 bp, Artificial Sequence
  Description of Artificial Sequence: Synthetic oligonucleotide
  Target: ATXN2; (-) strand; PAM type: YTN; PAM sequence: CTT
cagccagtcttgaacttagg

SEQ ID NO: 68384 - DNA, 20 bp, Artificial Sequence
  Description of Artificial Sequence: Synthetic oligonucleotide
  Target: ATXN2; (-) strand; PAM type: YTN; PAM sequence: TTC
ttcagccagtcttgaactta

SEQ ID NO: 68385 - DNA, 20 bp, Artificial Sequence
  Description of Artificial Sequence: Synthetic oligonucleotide
  Target: ATXN2; (-) strand; PAM type: YTN; PAM sequence: TTT
cttcagccagtcttgaactt

SEQ ID NO: 68386 - DNA, 20 bp, Artificial Sequence
  Description of Artificial Sequence: Synthetic oligonucleotide
  Target: ATXN2; (-) strand; PAM type: YTN; PAM sequence: CTT
tcttcagccagtcttgaact

SEQ ID NO: 68387 - DNA, 20 bp, Artificial Sequence
  Description of Artificial Sequence: Synthetic oligonucleotide
  Target: ATXN2; (-) strand; PAM type: YTN; PAM sequence: TTA
aacaaatgaactttcttcag

SEQ ID NO: 68388 - DNA, 20 bp, Artificial Sequence
  Description of Artificial Sequence: Synthetic oligonucleotide
  Target: ATXN2; (-) strand; PAM type: YTN; PAM sequence: CTG
tatacagtagttaaacaaat

SEQ ID NO: 68389 - DNA, 20 bp, Artificial Sequence
  Description of Artificial Sequence: Synthetic oligonucleotide
  Target: ATXN2; (-) strand; PAM type: YTN; PAM sequence: TTG
cactgtatacagtagttaaa

SEQ ID NO: 68390 - DNA, 20 bp, Artificial Sequence
  Description of Artificial Sequence: Synthetic oligonucleotide
  Target: ATXN2; (-) strand; PAM type: YTN; PAM sequence: TTT
gcactgtatacagtagttaa

SEQ ID NO: 68391 - DNA, 20 bp, Artificial Sequence
  Description of Artificial Sequence: Synthetic oligonucleotide
  Target: ATXN2; (-) strand; PAM type: YTN; PAM sequence: TTA
tttgcactgtatacagtagt

SEQ ID NO: 68392 - DNA, 20 bp, Artificial Sequence
  Description of Artificial Sequence: Synthetic oligonucleotide
  Target: ATXN2; (-) strand; PAM type: YTN; PAM sequence: CTT
atttgcactgtatacagtag

SEQ ID NO: 68393 - DNA, 20 bp, Artificial Sequence
  Description of Artificial Sequence: Synthetic oligonucleotide
  Target: ATXN2; (-) strand; PAM type: YTN; PAM sequence: CTC
cttatttgcactgtatacag

SEQ ID NO: 68394 - DNA, 20 bp, Artificial Sequence
  Description of Artificial Sequence: Synthetic oligonucleotide
  Target: ATXN2; (-) strand; PAM type: YTN; PAM sequence: TTC
cccctccttatttgcactgt

SEQ ID NO: 68395 - DNA, 20 bp, Artificial Sequence
  Description of Artificial Sequence: Synthetic oligonucleotide
  Target: ATXN2; (-) strand; PAM type: YTN; PAM sequence: CTT
ccccctccttatttgcactg

SEQ ID NO: 68396 - DNA, 20 bp, Artificial Sequence
  Description of Artificial Sequence: Synthetic oligonucleotide
  Target: ATXN2; (-) strand; PAM type: YTN; PAM sequence: CTG
ccccacagccttccccctcc

SEQ ID NO: 68397 - DNA, 20 bp, Artificial Sequence
  Description of Artificial Sequence: Synthetic oligonucleotide
  Target: ATXN2; (-) strand; PAM type: YTN; PAM sequence: TTA
cagccccagaagggtctgcc

SEQ ID NO: 68398 - DNA, 20 bp, Artificial Sequence
  Description of Artificial Sequence: Synthetic oligonucleotide
  Target: ATXN2; (-) strand; PAM type: YTN; PAM sequence: TTT
acagccccagaagggtctgc

SEQ ID NO: 68399 - DNA, 20 bp, Artificial Sequence
  Description of Artificial Sequence: Synthetic oligonucleotide
  Target: ATXN2; (-) strand; PAM type: YTN; PAM sequence: CTT
tacagccccagaagggtctg

SEQ ID NO: 68400 - DNA, 20 bp, Artificial Sequence
  Description of Artificial Sequence: Synthetic oligonucleotide
  Target: ATXN2; (-) strand; PAM type: YTN; PAM sequence: TTC
tttacagccccagaagggtc

SEQ ID NO: 68401 - DNA, 20 bp, Artificial Sequence
  Description of Artificial Sequence: Synthetic oligonucleotide
  Target: ATXN2; (-) strand; PAM type: YTN; PAM sequence: CTT
ctttacagccccagaagggt

SEQ ID NO: 68402 - DNA, 20 bp, Artificial Sequence
  Description of Artificial Sequence: Synthetic oligonucleotide
  Target: ATXN2; (-) strand; PAM type: YTN; PAM sequence: TTA
tgcttctttacagccccaga

SEQ ID NO: 68403 - DNA, 20 bp, Artificial Sequence
  Description of Artificial Sequence: Synthetic oligonucleotide
  Target: ATXN2; (-) strand; PAM type: YTN; PAM sequence: CTG
ataattatgcttctttacag

SEQ ID NO: 68404 - DNA, 20 bp, Artificial Sequence
  Description of Artificial Sequence: Synthetic oligonucleotide
  Target: ATXN2; (-) strand; PAM type: YTN; PAM sequence: CTG
cctgataattatgcttcttt

SEQ ID NO: 68405 - DNA, 20 bp, Artificial Sequence
  Description of Artificial Sequence: Synthetic oligonucleotide
  Target: ATXN2; (-) strand; PAM type: YTN; PAM sequence: CTC
tgcctgataattatgcttct

SEQ ID NO: 68406 - DNA, 20 bp, Artificial Sequence
  Description of Artificial Sequence: Synthetic oligonucleotide
  Target: ATXN2; (-) strand; PAM type: YTN; PAM sequence: TTA
tctctgcctgataattatgc

SEQ ID NO: 68407 - DNA, 20 bp, Artificial Sequence
  Description of Artificial Sequence: Synthetic oligonucleotide
  Target: ATXN2; (-) strand; PAM type: YTN; PAM sequence: TTT
atctctgcctgataattatg

SEQ ID NO: 68408 - DNA, 20 bp, Artificial Sequence
  Description of Artificial Sequence: Synthetic oligonucleotide
  Target: ATXN2; (-) strand; PAM type: YTN; PAM sequence: TTA
aaaagggggtttatctctgc

SEQ ID NO: 68409 - DNA, 20 bp, Artificial Sequence
  Description of Artificial Sequence: Synthetic oligonucleotide
  Target: ATXN2; (-) strand; PAM type: YTN; PAM sequence: TTG
ttaaaaagggggtttatctc

SEQ ID NO: 68410 - DNA, 20 bp, Artificial Sequence
  Description of Artificial Sequence: Synthetic oligonucleotide
  Target: ATXN2; (-) strand; PAM type: YTN; PAM sequence: TTG
ttgttaaaaagggggtttat

SEQ ID NO: 68411 - DNA, 20 bp, Artificial Sequence
  Description of Artificial Sequence: Synthetic oligonucleotide
  Target: ATXN2; (-) strand; PAM type: YTN; PAM sequence: TTG
aattgttgttaaaaaggggg

SEQ ID NO: 68412 - DNA, 20 bp, Artificial Sequence
  Description of Artificial Sequence: Synthetic oligonucleotide
  Target: ATXN2; (-) strand; PAM type: YTN; PAM sequence: CTT
gaattgttgttaaaaagggg

SEQ ID NO: 68413 - DNA, 20 bp, Artificial Sequence
  Description of Artificial Sequence: Synthetic oligonucleotide
  Target: ATXN2; (-) strand; PAM type: YTN; PAM sequence: CTC
ttgaattgttgttaaaaagg

SEQ ID NO: 68414 - DNA, 20 bp, Artificial Sequence
  Description of Artificial Sequence: Synthetic oligonucleotide
  Target: ATXN2; (-) strand; PAM type: YTN; PAM sequence: CTC
tcttgaattgttgttaaaaa

SEQ ID NO: 68415 - DNA, 20 bp, Artificial Sequence
  Description of Artificial Sequence: Synthetic oligonucleotide
  Target: ATXN2; (-) strand; PAM type: YTN; PAM sequence: CTA
taaactctcttgaattgttg

SEQ ID NO: 68416 - DNA, 20 bp, Artificial Sequence
  Description of Artificial Sequence: Synthetic oligonucleotide
  Target: ATXN2; (-) strand; PAM type: YTN; PAM sequence: TTG
ataaatgtgtgaagctataa

SEQ ID NO: 68417 - DNA, 20 bp, Artificial Sequence
  Description of Artificial Sequence: Synthetic oligonucleotide
  Target: ATXN2; (-) strand; PAM type: YTN; PAM sequence: TTT
gataaatgtgtgaagctata

SEQ ID NO: 68418 - DNA, 20 bp, Artificial Sequence
  Description of Artificial Sequence: Synthetic oligonucleotide
  Target: ATXN2; (-) strand; PAM type: YTN; PAM sequence: TTA
gagagaaatttgataaatgt

SEQ ID NO: 68419 - DNA, 20 bp, Artificial Sequence
  Description of Artificial Sequence: Synthetic oligonucleotide
  Target: ATXN2; (-) strand; PAM type: YTN; PAM sequence: TTC
attagagagaaatttgataa

SEQ ID NO: 68420 - DNA, 20 bp, Artificial Sequence
  Description of Artificial Sequence: Synthetic oligonucleotide
  Target: ATXN2; (-) strand; PAM type: YTN; PAM sequence: TTG
ttcattagagagaaatttga

SEQ ID NO: 68421 - DNA, 20 bp, Artificial Sequence
  Description of Artificial Sequence: Synthetic oligonucleotide
  Target: ATXN2; (-) strand; PAM type: YTN; PAM sequence: TTT
gttcattagagagaaatttg

SEQ ID NO: 68422 - DNA, 20 bp, Artificial Sequence
  Description of Artificial Sequence: Synthetic oligonucleotide
  Target: ATXN2; (-) strand; PAM type: YTN; PAM sequence: TTT
tgttcattagagagaaattt

SEQ ID NO: 68423 - DNA, 20 bp, Artificial Sequence
  Description of Artificial Sequence: Synthetic oligonucleotide
  Target: ATXN2; (-) strand; PAM type: YTN; PAM sequence: CTT
ttgttcattagagagaaatt

SEQ ID NO: 68424 - DNA, 20 bp, Artificial Sequence
  Description of Artificial Sequence: Synthetic oligonucleotide
  Target: ATXN2; (-) strand; PAM type: YTN; PAM sequence: TTA
accttttgttcattagagag

SEQ ID NO: 68425 - DNA, 20 bp, Artificial Sequence
  Description of Artificial Sequence: Synthetic oligonucleotide
  Target: ATXN2; (-) strand; PAM type: YTN; PAM sequence: CTA
ttaaccttttgttcattaga

SEQ ID NO: 68426 - DNA, 20 bp, Artificial Sequence
  Description of Artificial Sequence: Synthetic oligonucleotide
  Target: ATXN2; (-) strand; PAM type: YTN; PAM sequence: TTC
tattaaccttttgttcatta

SEQ ID NO: 68427 - DNA, 20 bp, Artificial Sequence
  Description of Artificial Sequence: Synthetic oligonucleotide
  Target: ATXN2; (-) strand; PAM type: YTN; PAM sequence: TTT
ctattaaccttttgttcatt

SEQ ID NO: 68428 - DNA, 20 bp, Artificial Sequence
  Description of Artificial Sequence: Synthetic oligonucleotide
  Target: ATXN2; (-) strand; PAM type: YTN; PAM sequence: CTA
tttctattaaccttttgttc

SEQ ID NO: 68429 - DNA, 20 bp, Artificial Sequence
  Description of Artificial Sequence: Synthetic oligonucleotide
  Target: ATXN2; (-) strand; PAM type: YTN; PAM sequence: TTA
aaactatttctattaacctt

SEQ ID NO: 68430 - DNA, 20 bp, Artificial Sequence
  Description of Artificial Sequence: Synthetic oligonucleotide
  Target: ATXN2; (-) strand; PAM type: YTN; PAM sequence: TTA
ttaaaactatttctattaac

SEQ ID NO: 68431 - DNA, 20 bp, Artificial Sequence
  Description of Artificial Sequence: Synthetic oligonucleotide
  Target: ATXN2; (-) strand; PAM type: YTN; PAM sequence: TTT
attaaaactatttctattaa

SEQ ID NO: 68432 - DNA, 20 bp, Artificial Sequence
  Description of Artificial Sequence: Synthetic oligonucleotide
  Target: ATXN2; (-) strand; PAM type: YTN; PAM sequence: TTA
gtttattaaaactatttcta

SEQ ID NO: 68433 - DNA, 20 bp, Artificial Sequence
  Description of Artificial Sequence: Synthetic oligonucleotide
  Target: ATXN2; (-) strand; PAM type: YTN; PAM sequence: TTT
agtttattaaaactatttct

SEQ ID NO: 68434 - DNA, 20 bp, Artificial Sequence
  Description of Artificial Sequence: Synthetic oligonucleotide
  Target: ATXN2; (-) strand; PAM type: YTN; PAM sequence: CTT
tagtttattaaaactatttc

SEQ ID NO: 68435 - DNA, 20 bp, Artificial Sequence
  Description of Artificial Sequence: Synthetic oligonucleotide
  Target: ATXN2; (-) strand; PAM type: YTN; PAM sequence: TTA
actttagtttattaaaacta

SEQ ID NO: 68436 - DNA, 20 bp, Artificial Sequence
  Description of Artificial Sequence: Synthetic oligonucleotide
  Target: ATXN2; (-) strand; PAM type: YTN; PAM sequence: TTT
aactttagtttattaaaact

SEQ ID NO: 68437 - DNA, 20 bp, Artificial Sequence
  Description of Artificial Sequence: Synthetic oligonucleotide
  Target: ATXN2; (-) strand; PAM type: YTN; PAM sequence: TTT
taactttagtttattaaaac

SEQ ID NO: 68438 - DNA, 20 bp, Artificial Sequence
  Description of Artificial Sequence: Synthetic oligonucleotide
  Target: ATXN2; (-) strand; PAM type: YTN; PAM sequence: CTG
tgttttaactttagtttatt

SEQ ID NO: 68439 - DNA, 20 bp, Artificial Sequence
  Description of Artificial Sequence: Synthetic oligonucleotide
  Target: ATXN2; (-) strand; PAM type: YTN; PAM sequence: TTC
tgtgttttaactttagttta

SEQ ID NO: 68440 - DNA, 20 bp, Artificial Sequence
  Description of Artificial Sequence: Synthetic oligonucleotide
  Target: ATXN2; (-) strand; PAM type: YTN; PAM sequence: TTT
ctgtgttttaactttagttt

SEQ ID NO: 68441 - DNA, 20 bp, Artificial Sequence
  Description of Artificial Sequence: Synthetic oligonucleotide
  Target: ATXN2; (-) strand; PAM type: YTN; PAM sequence: CTA
taatttctgtgttttaactt

SEQ ID NO: 68442 - DNA, 20 bp, Artificial Sequence
  Description of Artificial Sequence: Synthetic oligonucleotide
  Target: ATXN2; (-) strand; PAM type: YTN; PAM sequence: TTA
ataacctataatttctgtgt

SEQ ID NO: 68443 - DNA, 20 bp, Artificial Sequence
  Description of Artificial Sequence: Synthetic oligonucleotide
  Target: ATXN2; (-) strand; PAM type: YTN; PAM sequence: TTT
aataacctataatttctgtg

SEQ ID NO: 68444 - DNA, 20 bp, Artificial Sequence
  Description of Artificial Sequence: Synthetic oligonucleotide
  Target: ATXN2; (-) strand; PAM type: YTN; PAM sequence: TTA
tttaataacctataatttct

SEQ ID NO: 68445 - DNA, 20 bp, Artificial Sequence
  Description of Artificial Sequence: Synthetic oligonucleotide
  Target: ATXN2; (-) strand; PAM type: YTN; PAM sequence: TTC
attatttaataacctataat

SEQ ID NO: 68446 - DNA, 20 bp, Artificial Sequence
  Description of Artificial Sequence: Synthetic oligonucleotide
  Target: ATXN2; (-) strand; PAM type: YTN; PAM sequence: CTT
cattatttaataacctataa

SEQ ID NO: 68447 - DNA, 20 bp, Artificial Sequence
  Description of Artificial Sequence: Synthetic oligonucleotide
  Target: ATXN2; (-) strand; PAM type: YTN; PAM sequence: CTC
ttcattatttaataacctat

SEQ ID NO: 68448 - DNA, 20 bp, Artificial Sequence
  Description of Artificial Sequence: Synthetic oligonucleotide
  Target: ATXN2; (-) strand; PAM type: YTN; PAM sequence: TTC
ctcttcattatttaataacc

SEQ ID NO: 68449 - DNA, 20 bp, Artificial Sequence
  Description of Artificial Sequence: Synthetic oligonucleotide
  Target: ATXN2; (-) strand; PAM type: YTN; PAM sequence: TTT
cctcttcattatttaataac

SEQ ID NO: 68450 - DNA, 20 bp, Artificial Sequence
  Description of Artificial Sequence: Synthetic oligonucleotide
  Target: ATXN2; (-) strand; PAM type: YTN; PAM sequence: TTA
caaaatagtttcctcttcat

SEQ ID NO: 68451 - DNA, 20 bp, Artificial Sequence
  Description of Artificial Sequence: Synthetic oligonucleotide
  Target: ATXN2; (-) strand; PAM type: YTN; PAM sequence: TTA
taattacaaaatagtttcct

SEQ ID NO: 68452 - DNA, 20 bp, Artificial Sequence
  Description of Artificial Sequence: Synthetic oligonucleotide
  Target: ATXN2; (-) strand; PAM type: YTN; PAM sequence: TTT
ataattacaaaatagtttcc

SEQ ID NO: 68453 - DNA, 20 bp, Artificial Sequence
  Description of Artificial Sequence: Synthetic oligonucleotide
  Target: ATXN2; (-) strand; PAM type: YTN; PAM sequence: CTA
tgtgagtttataattacaaa

SEQ ID NO: 68454 - DNA, 20 bp, Artificial Sequence
  Description of Artificial Sequence: Synthetic oligonucleotide
  Target: ATXN2; (-) strand; PAM type: YTN; PAM sequence: CTC
ctatgtgagtttataattac

SEQ ID NO: 68455 - DNA, 20 bp, Artificial Sequence
  Description of Artificial Sequence: Synthetic oligonucleotide
  Target: ATXN2; (-) strand; PAM type: YTN; PAM sequence: TTA
actcctatgtgagtttataa

SEQ ID NO: 68456 - DNA, 20 bp, Artificial Sequence
  Description of Artificial Sequence: Synthetic oligonucleotide
  Target: ATXN2; (-) strand; PAM type: YTN; PAM sequence: TTT
aactcctatgtgagtttata

SEQ ID NO: 68457 - DNA, 20 bp, Artificial Sequence
  Description of Artificial Sequence: Synthetic oligonucleotide
  Target: ATXN2; (-) strand; PAM type: YTN; PAM sequence: TTG
tttaactcctatgtgagttt

SEQ ID NO: 68458 - DNA, 20 bp, Artificial Sequence
  Description of Artificial Sequence: Synthetic oligonucleotide
  Target: ATXN2; (-) strand; PAM type: YTN; PAM sequence: TTT
gtttaactcctatgtgagtt

SEQ ID NO: 68459 - DNA, 20 bp, Artificial Sequence
  Description of Artificial Sequence: Synthetic oligonucleotide
  Target: ATXN2; (-) strand; PAM type: YTN; PAM sequence: CTT
tgtttaactcctatgtgagt

SEQ ID NO: 68460 - DNA, 20 bp, Artificial Sequence
  Description of Artificial Sequence: Synthetic oligonucleotide
  Target: ATXN2; (-) strand; PAM type: YTN; PAM sequence: TTG
tctttgtttaactcctatgt

SEQ ID NO: 68461 - DNA, 20 bp, Artificial Sequence
  Description of Artificial Sequence: Synthetic oligonucleotide
  Target: ATXN2; (-) strand; PAM type: YTN; PAM sequence: TTT
gtctttgtttaactcctatg

SEQ ID NO: 68462 - DNA, 20 bp, Artificial Sequence
  Description of Artificial Sequence: Synthetic oligonucleotide
  Target: ATXN2; (-) strand; PAM type: YTN; PAM sequence: TTG
tttgtctttgtttaactcct

SEQ ID NO: 68463 - DNA, 20 bp, Artificial Sequence
  Description of Artificial Sequence: Synthetic oligonucleotide
  Target: ATXN2; (-) strand; PAM type: YTN; PAM sequence: TTT
gtttgtctttgtttaactcc

SEQ ID NO: 68464 - DNA, 20 bp, Artificial Sequence
  Description of Artificial Sequence: Synthetic oligonucleotide
  Target: ATXN2; (-) strand; PAM type: YTN; PAM sequence: TTT
tgtttgtctttgtttaactc

SEQ ID NO: 68465 - DNA, 20 bp, Artificial Sequence
  Description of Artificial Sequence: Synthetic oligonucleotide
  Target: ATXN2; (-) strand; PAM type: YTN; PAM sequence: TTT
ttgtttgtctttgtttaact

SEQ ID NO: 68466 - DNA, 20 bp, Artificial Sequence
  Description of Artificial Sequence: Synthetic oligonucleotide
  Target: ATXN2; (-) strand; PAM type: YTN; PAM sequence: TTC
atgtttttgtttgtctttgt

SEQ ID NO: 68467 - DNA, 20 bp, Artificial Sequence
  Description of Artificial Sequence: Synthetic oligonucleotide
  Target: ATXN2; (-) strand; PAM type: YTN; PAM sequence: TTG
ttcatgtttttgtttgtctt

SEQ ID NO: 68468 - DNA, 20 bp, Artificial Sequence
  Description of Artificial Sequence: Synthetic oligonucleotide
  Target: ATXN2; (-) strand; PAM type: YTN; PAM sequence: TTT
gttcatgtttttgtttgtct

SEQ ID NO: 68469 - DNA, 20 bp, Artificial Sequence
  Description of Artificial Sequence: Synthetic oligonucleotide
  Target: ATXN2; (-) strand; PAM type: YTN; PAM sequence: TTC
agaaggtacaataccacaat

SEQ ID NO: 68470 - DNA, 20 bp, Artificial Sequence
  Description of Artificial Sequence: Synthetic oligonucleotide
  Target: ATXN2; (-) strand; PAM type: YTN; PAM sequence: CTT
cagaaggtacaataccacaa

SEQ ID NO: 68471 - DNA, 20 bp, Artificial Sequence
  Description of Artificial Sequence: Synthetic oligonucleotide
  Target: ATXN2; (-) strand; PAM type: YTN; PAM sequence: CTA
aacgcatgtcttcagaaggt

SEQ ID NO: 68472 - DNA, 20 bp, Artificial Sequence
  Description of Artificial Sequence: Synthetic oligonucleotide
  Target: ATXN2; (-) strand; PAM type: YTN; PAM sequence: CTA
tgcctaaacgcatgtcttca

SEQ ID NO: 68473 - DNA, 20 bp, Artificial Sequence
  Description of Artificial Sequence: Synthetic oligonucleotide
  Target: ATXN2; (-) strand; PAM type: YTN; PAM sequence: CTA
ctatgcctaaacgcatgtct

SEQ ID NO: 68474 - DNA, 20 bp, Artificial Sequence
  Description of Artificial Sequence: Synthetic oligonucleotide
  Target: ATXN2; (-) strand; PAM type: YTN; PAM sequence: CTC
tactatgcctaaacgcatgt

SEQ ID NO: 68475 - DNA, 20 bp, Artificial Sequence
  Description of Artificial Sequence: Synthetic oligonucleotide
  Target: ATXN2; (-) strand; PAM type: YTN; PAM sequence: CTG
tctctactatgcctaaacgc

SEQ ID NO: 68476 - DNA, 20 bp, Artificial Sequence
  Description of Artificial Sequence: Synthetic oligonucleotide
  Target: ATXN2; (-) strand; PAM type: YTN; PAM sequence: CTC
ctgtctctactatgcctaaa

SEQ ID NO: 68477 - DNA, 20 bp, Artificial Sequence
  Description of Artificial Sequence: Synthetic oligonucleotide
  Target: ATXN2; (-) strand; PAM type: YTN; PAM sequence: CTC
cagctcctgtctctactatg

SEQ ID NO: 68478 - DNA, 20 bp, Artificial Sequence
  Description of Artificial Sequence: Synthetic oligonucleotide
  Target: ATXN2; (-) strand; PAM type: YTN; PAM sequence: TTC
tccagctcctgtctctacta

SEQ ID NO: 68479 - DNA, 20 bp, Artificial Sequence
  Description of Artificial Sequence: Synthetic oligonucleotide
  Target: ATXN2; (-) strand; PAM type: YTN; PAM sequence: CTC
atggttctccagctcctgtc

SEQ ID NO: 68480 - DNA, 20 bp, Artificial Sequence
  Description of Artificial Sequence: Synthetic oligonucleotide
  Target: ATXN2; (-) strand; PAM type: YTN; PAM sequence: CTG
ctcatggttctccagctcct

SEQ ID NO: 68481 - DNA, 20 bp, Artificial Sequence
  Description of Artificial Sequence: Synthetic oligonucleotide
  Target: ATXN2; (-) strand; PAM type: YTN; PAM sequence: CTC
tgctcatggttctccagctc

SEQ ID NO: 68482 - DNA, 20 bp, Artificial Sequence
  Description of Artificial Sequence: Synthetic oligonucleotide
  Target: ATXN2; (-) strand; PAM type: YTN; PAM sequence: CTC
acccctctgctcatggttct

SEQ ID NO: 68483 - DNA, 20 bp, Artificial Sequence
  Description of Artificial Sequence: Synthetic oligonucleotide
  Target: ATXN2; (-) strand; PAM type: YTN; PAM sequence: CTC
gcggccatccagacccccgt

SEQ ID NO: 68484 - DNA, 20 bp, Artificial Sequence
  Description of Artificial Sequence: Synthetic oligonucleotide
  Target: ATXN2; (-) strand; PAM type: YTN; PAM sequence: CTC
caggcccccctcgcggccat

SEQ ID NO: 68485 - DNA, 20 bp, Artificial Sequence
  Description of Artificial Sequence: Synthetic oligonucleotide
  Target: ATXN2; (-) strand; PAM type: YTN; PAM sequence: CTA
cacggccgccctccaggccc

SEQ ID NO: 68486 - DNA, 20 bp, Artificial Sequence
  Description of Artificial Sequence: Synthetic oligonucleotide
  Target: ATXN2; (-) strand; PAM type: YTN; PAM sequence: CTC
gggcagccacccctacacgg

SEQ ID NO: 68487 - DNA, 20 bp, Artificial Sequence
  Description of Artificial Sequence: Synthetic oligonucleotide
  Target: ATXN2; (-) strand; PAM type: YTN; PAM sequence: TTC
cacctcgggcagccacccct

SEQ ID NO: 68488 - DNA, 20 bp, Artificial Sequence
  Description of Artificial Sequence: Synthetic oligonucleotide
  Target: ATXN2; (-) strand; PAM type: YTN; PAM sequence: CTT
ccacctcgggcagccacccc

SEQ ID NO: 68489 - DNA, 20 bp, Artificial Sequence
  Description of Artificial Sequence: Synthetic oligonucleotide
  Target: ATXN2; (-) strand; PAM type: YTN; PAM sequence: CTC
ttccacctcgggcagccacc

SEQ ID NO: 68490 - DNA, 20 bp, Artificial Sequence
  Description of Artificial Sequence: Synthetic oligonucleotide
  Target: ATXN2; (-) strand; PAM type: YTN; PAM sequence: CTC
tcttccacctcgggcagcca

SEQ ID NO: 68491 - DNA, 20 bp, Artificial Sequence
  Description of Artificial Sequence: Synthetic oligonucleotide
  Target: ATXN2; (-) strand; PAM type: YTN; PAM sequence: CTA
ccagtcaggtcccaactctc

SEQ ID NO: 68492 - DNA, 20 bp, Artificial Sequence
  Description of Artificial Sequence: Synthetic oligonucleotide
  Target: ATXN2; (-) strand; PAM type: YTN; PAM sequence: CTC
gctaccagtcaggtcccaac

SEQ ID NO: 68493 - DNA, 20 bp, Artificial Sequence
  Description of Artificial Sequence: Synthetic oligonucleotide
  Target: ATXN2; (-) strand; PAM type: YTN; PAM sequence: TTC
tcgctaccagtcaggtccca

SEQ ID NO: 68494 - DNA, 20 bp, Artificial Sequence
  Description of Artificial Sequence: Synthetic oligonucleotide
  Target: ATXN2; (-) strand; PAM type: YTN; PAM sequence: CTT
ctcgctaccagtcaggtccc

SEQ ID NO: 68495 - DNA, 20 bp, Artificial Sequence
  Description of Artificial Sequence: Synthetic oligonucleotide
  Target: ATXN2; (-) strand; PAM type: YTN; PAM sequence: CTC
gcccaccttctcgctaccag

SEQ ID NO: 68496 - DNA, 20 bp, Artificial Sequence
  Description of Artificial Sequence: Synthetic oligonucleotide
  Target: ATXN2; (-) strand; PAM type: YTN; PAM sequence: CTC
tcgcccaccttctcgctacc

SEQ ID NO: 68497 - DNA, 20 bp, Artificial Sequence
  Description of Artificial Sequence: Synthetic oligonucleotide
  Target: ATXN2; (-) strand; PAM type: YTN; PAM sequence: TTC
ctctcgcccaccttctcgct

SEQ ID NO: 68498 - DNA, 20 bp, Artificial Sequence
  Description of Artificial Sequence: Synthetic oligonucleotide
  Target: ATXN2; (-) strand; PAM type: YTN; PAM sequence: CTT
cctctcgcccaccttctcgc

SEQ ID NO: 68499 - DNA, 20 bp, Artificial Sequence
  Description of Artificial Sequence: Synthetic oligonucleotide
  Target: ATXN2; (-) strand; PAM type: YTN; PAM sequence: CTC
cttcctctcgcccaccttct

SEQ ID NO: 68500 - DNA, 20 bp, Artificial Sequence
  Description of Artificial Sequence: Synthetic oligonucleotide
  Target: ATXN2; (-) strand; PAM type: YTN; PAM sequence: TTG
cccatctccttcctctcgcc

SEQ ID NO: 68501 - DNA, 20 bp, Artificial Sequence
  Description of Artificial Sequence: Synthetic oligonucleotide
  Target: ATXN2; (-) strand; PAM type: YTN; PAM sequence: CTT
gcccatctccttcctctcgc

SEQ ID NO: 68502 - DNA, 20 bp, Artificial Sequence
  Description of Artificial Sequence: Synthetic oligonucleotide
  Target: ATXN2; (-) strand; PAM type: YTN; PAM sequence: CTG
gccatcgccttgcccatctc

SEQ ID NO: 68503 - DNA, 20 bp, Artificial Sequence
  Description of Artificial Sequence: Synthetic oligonucleotide
  Target: ATXN2; (-) strand; PAM type: YTN; PAM sequence: TTC
cctggccatcgccttgccca

SEQ ID NO: 68504 - DNA, 20 bp, Artificial Sequence
  Description of Artificial Sequence: Synthetic oligonucleotide
  Target: ATXN2; (-) strand; PAM type: YTN; PAM sequence: CTG
tcaggtgttccctggccatc

SEQ ID NO: 68505 - DNA, 20 bp, Artificial Sequence
  Description of Artificial Sequence: Synthetic oligonucleotide
  Target: ATXN2; (-) strand; PAM type: YTN; PAM sequence: TTC
tgtcaggtgttccctggcca

SEQ ID NO: 68506 - DNA, 20 bp, Artificial Sequence
  Description of Artificial Sequence: Synthetic oligonucleotide
  Target: ATXN2; (-) strand; PAM type: YTN; PAM sequence: TTG
ttctgtcaggtgttccctgg

SEQ ID NO: 68507 - DNA, 20 bp, Artificial Sequence
  Description of Artificial Sequence: Synthetic oligonucleotide
  Target: ATXN2; (-) strand; PAM type: YTN; PAM sequence: TTT
gttctgtcaggtgttccctg

SEQ ID NO: 68508 - DNA, 20 bp, Artificial Sequence
  Description of Artificial Sequence: Synthetic oligonucleotide
  Target: ATXN2; (-) strand; PAM type: YTN; PAM sequence: TTC
atatcatttgttctgtcagg

SEQ ID NO: 68509 - DNA, 20 bp, Artificial Sequence
  Description of Artificial Sequence: Synthetic oligonucleotide
  Target: ATXN2; (-) strand; PAM type: YTN; PAM sequence: CTT
catatcatttgttctgtcag

SEQ ID NO: 68510 - DNA, 20 bp, Artificial Sequence
  Description of Artificial Sequence: Synthetic oligonucleotide
  Target: ATXN2; (-) strand; PAM type: YTN; PAM sequence: TTC
cttcatatcatttgttctgt

SEQ ID NO: 68511 - DNA, 20 bp, Artificial Sequence
  Description of Artificial Sequence: Synthetic oligonucleotide
  Target: ATXN2; (-) strand; PAM type: YTN; PAM sequence: TTT
ccttcatatcatttgttctg

SEQ ID NO: 68512 - DNA, 20 bp, Artificial Sequence
  Description of Artificial Sequence: Synthetic oligonucleotide
  Target: ATXN2; (-) strand; PAM type: YTN; PAM sequence: CTT
tccttcatatcatttgttct

SEQ ID NO: 68513 - DNA, 20 bp, Artificial Sequence
  Description of Artificial Sequence: Synthetic oligonucleotide
  Target: ATXN2; (-) strand; PAM type: YTN; PAM sequence: TTA
tactttccttcatatcattt

SEQ ID NO: 68514 - DNA, 20 bp, Artificial Sequence
  Description of Artificial Sequence: Synthetic oligonucleotide
  Target: ATXN2; (-) strand; PAM type: YTN; PAM sequence: TTT
atactttccttcatatcatt

SEQ ID NO: 68515 - DNA, 20 bp, Artificial Sequence
  Description of Artificial Sequence: Synthetic oligonucleotide
  Target: ATXN2; (-) strand; PAM type: YTN; PAM sequence: TTT
tatactttccttcatatcat

SEQ ID NO: 68516 - DNA, 20 bp, Artificial Sequence
  Description of Artificial Sequence: Synthetic oligonucleotide
  Target: ATXN2; (-) strand; PAM type: YTN; PAM sequence: TTT
ttatactttccttcatatca

SEQ ID NO: 68517 - DNA, 20 bp, Artificial Sequence
  Description of Artificial Sequence: Synthetic oligonucleotide
  Target: ATXN2; (-) strand; PAM type: YTN; PAM sequence: TTA
gtttttatactttccttcat

SEQ ID NO: 68518 - DNA, 20 bp, Artificial Sequence
  Description of Artificial Sequence: Synthetic oligonucleotide
  Target: ATXN2; (-) strand; PAM type: YTN; PAM sequence: TTT
agtttttatactttccttca

SEQ ID NO: 68519 - DNA, 20 bp, Artificial Sequence
  Description of Artificial Sequence: Synthetic oligonucleotide
  Target: ATXN2; (-) strand; PAM type: YTN; PAM sequence: CTT
tagtttttatactttccttc

SEQ ID NO: 68520 - DNA, 20 bp, Artificial Sequence
  Description of Artificial Sequence: Synthetic oligonucleotide
  Target: ATXN2; (-) strand; PAM type: YTN; PAM sequence: TTC
tttagtttttatactttcct

SEQ ID NO: 68521 - DNA, 20 bp, Artificial Sequence
  Description of Artificial Sequence: Synthetic oligonucleotide
  Target: ATXN2; (-) strand; PAM type: YTN; PAM sequence: TTT
ctttagtttttatactttcc

SEQ ID NO: 68522 - DNA, 20 bp, Artificial Sequence
  Description of Artificial Sequence: Synthetic oligonucleotide
  Target: ATXN2; (-) strand; PAM type: YTN; PAM sequence: TTT
tctttagtttttatactttc

SEQ ID NO: 68523 - DNA, 20 bp, Artificial Sequence
  Description of Artificial Sequence: Synthetic oligonucleotide
  Target: ATXN2; (-) strand; PAM type: YTN; PAM sequence: TTT
ttctttagtttttatacttt

SEQ ID NO: 68524 - DNA, 20 bp, Artificial Sequence
  Description of Artificial Sequence: Synthetic oligonucleotide
  Target: ATXN2; (-) strand; PAM type: YTN; PAM sequence: TTT
tttctttagtttttatactt

SEQ ID NO: 68525 - DNA, 20 bp, Artificial Sequence
  Description of Artificial Sequence: Synthetic oligonucleotide
  Target: ATXN2; (-) strand; PAM type: YTN; PAM sequence: TTT
ttttctttagtttttatact

SEQ ID NO: 68526 - DNA, 20 bp, Artificial Sequence
  Description of Artificial Sequence: Synthetic oligonucleotide
  Target: ATXN2; (-) strand; PAM type: YTN; PAM sequence: CTC
atttttttctttagttttta

SEQ ID NO: 68527 - DNA, 20 bp, Artificial Sequence
  Description of Artificial Sequence: Synthetic oligonucleotide
  Target: ATXN2; (-) strand; PAM type: YTN; PAM sequence: TTC
cctcatttttttctttagtt

SEQ ID NO: 68528 - DNA, 20 bp, Artificial Sequence
  Description of Artificial Sequence: Synthetic oligonucleotide
  Target: ATXN2; (-) strand; PAM type: YTN; PAM sequence: TTT
ccctcatttttttctttagt

SEQ ID NO: 68529 - DNA, 20 bp, Artificial Sequence
  Description of Artificial Sequence: Synthetic oligonucleotide
  Target: ATXN2; (-) strand; PAM type: YTN; PAM sequence: TTT
tccctcatttttttctttag

SEQ ID NO: 68530 - DNA, 20 bp, Artificial Sequence
  Description of Artificial Sequence: Synthetic oligonucleotide
  Target: ATXN2; (-) strand; PAM type: YTN; PAM sequence: TTT
ttccctcatttttttcttta

SEQ ID NO: 68531 - DNA, 20 bp, Artificial Sequence
  Description of Artificial Sequence: Synthetic oligonucleotide
  Target: ATXN2; (-) strand; PAM type: YTN; PAM sequence: TTT
tttccctcatttttttcttt

SEQ ID NO: 68532 - DNA, 20 bp, Artificial Sequence
  Description of Artificial Sequence: Synthetic oligonucleotide
  Target: ATXN2; (-) strand; PAM type: YTN; PAM sequence: CTT
ttttccctcatttttttctt

SEQ ID NO: 68533 - DNA, 20 bp, Artificial Sequence
  Description of Artificial Sequence: Synthetic oligonucleotide
  Target: ATXN2; (-) strand; PAM type: YTN; PAM sequence: TTA
cttttttccctcattttttt

SEQ ID NO: 68534 - DNA, 20 bp, Artificial Sequence
  Description of Artificial Sequence: Synthetic oligonucleotide
  Target: ATXN2; (-) strand; PAM type: YTN; PAM sequence: TTT
acttttttccctcatttttt

SEQ ID NO: 68535 - DNA, 20 bp, Artificial Sequence
  Description of Artificial Sequence: Synthetic oligonucleotide
  Target: ATXN2; (-) strand; PAM type: YTN; PAM sequence: CTG
tttacttttttccctcattt

SEQ ID NO: 68536 - DNA, 20 bp, Artificial Sequence
  Description of Artificial Sequence: Synthetic oligonucleotide
  Target: ATXN2; (-) strand; PAM type: YTN; PAM sequence: TTC
tgtttacttttttccctcat

SEQ ID NO: 68537 - DNA, 20 bp, Artificial Sequence
  Description of Artificial Sequence: Synthetic oligonucleotide
  Target: ATXN2; (-) strand; PAM type: YTN; PAM sequence: TTT
ctgtttacttttttccctca

SEQ ID NO: 68538 - DNA, 20 bp, Artificial Sequence
  Description of Artificial Sequence: Synthetic oligonucleotide
  Target: ATXN2; (-) strand; PAM type: YTN; PAM sequence: TTT
tctgtttacttttttccctc

SEQ ID NO: 68539 - DNA, 20 bp, Artificial Sequence
  Description of Artificial Sequence: Synthetic oligonucleotide
  Target: ATXN2; (-) strand; PAM type: YTN; PAM sequence: TTT
ttctgtttacttttttccct

SEQ ID NO: 68540 - DNA, 20 bp, Artificial Sequence
  Description of Artificial Sequence: Synthetic oligonucleotide
  Target: ATXN2; (-) strand; PAM type: YTN; PAM sequence: TTT
tttctgtttacttttttccc

SEQ ID NO: 68541 - DNA, 20 bp, Artificial Sequence
  Description of Artificial Sequence: Synthetic oligonucleotide
  Target: ATXN2; (-) strand; PAM type: YTN; PAM sequence: TTT
ttttctgtttacttttttcc

SEQ ID NO: 68542 - DNA, 20 bp, Artificial Sequence
  Description of Artificial Sequence: Synthetic oligonucleotide
  Target: ATXN2; (-) strand; PAM type: YTN; PAM sequence: CTT
tttttctgtttacttttttc

SEQ ID NO: 68543 - DNA, 20 bp, Artificial Sequence
  Description of Artificial Sequence: Synthetic oligonucleotide
  Target: ATXN2; (-) strand; PAM type: YTN; PAM sequence: TTA
ctttttttctgtttactttt

SEQ ID NO: 68544 - DNA, 20 bp, Artificial Sequence
  Description of Artificial Sequence: Synthetic oligonucleotide
  Target: ATXN2; (-) strand; PAM type: YTN; PAM sequence: TTT
actttttttctgtttacttt

SEQ ID NO: 68545 - DNA, 20 bp, Artificial Sequence
  Description of Artificial Sequence: Synthetic oligonucleotide
  Target: ATXN2; (-) strand; PAM type: YTN; PAM sequence: TTT
tactttttttctgtttactt

SEQ ID NO: 68546 - DNA, 20 bp, Artificial Sequence
  Description of Artificial Sequence: Synthetic oligonucleotide
  Target: ATXN2; (-) strand; PAM type: YTN; PAM sequence: TTG
tcattttactttttttctgt

SEQ ID NO: 68547 - DNA, 20 bp, Artificial Sequence
  Description of Artificial Sequence: Synthetic oligonucleotide
  Target: ATXN2; (-) strand; PAM type: YTN; PAM sequence: TTT
gtcattttactttttttctg

SEQ ID NO: 68548 - DNA, 20 bp, Artificial Sequence
  Description of Artificial Sequence: Synthetic oligonucleotide
  Target: ATXN2; (-) strand; PAM type: YTN; PAM sequence: TTT
tgtcattttactttttttct

SEQ ID NO: 68549 - DNA, 20 bp, Artificial Sequence
  Description of Artificial Sequence: Synthetic oligonucleotide
  Target: ATXN2; (-) strand; PAM type: YTN; PAM sequence: TTT
ttgtcattttactttttttc

SEQ ID NO: 68550 - DNA, 20 bp, Artificial Sequence
  Description of Artificial Sequence: Synthetic oligonucleotide
  Target: ATXN2; (-) strand; PAM type: YTN; PAM sequence: TTA
aaatgtacaagaaatcattt

SEQ ID NO: 68551 - DNA, 20 bp, Artificial Sequence
  Description of Artificial Sequence: Synthetic oligonucleotide
  Target: ATXN2; (-) strand; PAM type: YTN; PAM sequence: CTC
aaagggttaaaatgtacaag

SEQ ID NO: 68552 - DNA, 20 bp, Artificial Sequence
  Description of Artificial Sequence: Synthetic oligonucleotide
  Target: ATXN2; (-) strand; PAM type: YTN; PAM sequence: CTG
tcctcaaagggttaaaatgt

SEQ ID NO: 68553 - DNA, 20 bp, Artificial Sequence
  Description of Artificial Sequence: Synthetic oligonucleotide
  Target: ATXN2; (-) strand; PAM type: YTN; PAM sequence: TTA
tcacaaatcaaatgactgtc

SEQ ID NO: 68554 - DNA, 20 bp, Artificial Sequence
  Description of Artificial Sequence: Synthetic oligonucleotide
  Target: ATXN2; (-) strand; PAM type: YTN; PAM sequence: CTT
atcacaaatcaaatgactgt

SEQ ID NO: 68555 - DNA, 20 bp, Artificial Sequence
  Description of Artificial Sequence: Synthetic oligonucleotide
  Target: ATXN2; (-) strand; PAM type: YTN; PAM sequence: CTA
aaacttatcacaaatcaaat

SEQ ID NO: 68556 - DNA, 20 bp, Artificial Sequence
  Description of Artificial Sequence: Synthetic oligonucleotide
  Target: ATXN2; (-) strand; PAM type: YTN; PAM sequence: TTA
tgctaaaacttatcacaaat

SEQ ID NO: 68557 - DNA, 20 bp, Artificial Sequence
  Description of Artificial Sequence: Synthetic oligonucleotide
  Target: ATXN2; (-) strand; PAM type: YTN; PAM sequence: TTA
agttatgctaaaacttatca

SEQ ID NO: 68558 - DNA, 20 bp, Artificial Sequence
  Description of Artificial Sequence: Synthetic oligonucleotide
  Target: ATXN2; (-) strand; PAM type: YTN; PAM sequence: TTA
tgtcagttaagttatgctaa

SEQ ID NO: 68559 - DNA, 20 bp, Artificial Sequence
  Description of Artificial Sequence: Synthetic oligonucleotide
  Target: ATXN2; (-) strand; PAM type: YTN; PAM sequence: TTT
atgtcagttaagttatgcta

SEQ ID NO: 68560 - DNA, 20 bp, Artificial Sequence
  Description of Artificial Sequence: Synthetic oligonucleotide
  Target: ATXN2; (-) strand; PAM type: YTN; PAM sequence: TTA
aagtaaaatgtgaatttatg

SEQ ID NO: 68561 - DNA, 20 bp, Artificial Sequence
  Description of Artificial Sequence: Synthetic oligonucleotide
  Target: ATXN2; (-) strand; PAM type: YTN; PAM sequence: TTA
aggaggttaaagtaaaatgt

SEQ ID NO: 68562 - DNA, 20 bp, Artificial Sequence
  Description of Artificial Sequence: Synthetic oligonucleotide
  Target: ATXN2; (-) strand; PAM type: YTN; PAM sequence: CTT
aaggaggttaaagtaaaatg

SEQ ID NO: 68563 - DNA, 20 bp, Artificial Sequence
  Description of Artificial Sequence: Synthetic oligonucleotide
  Target: ATXN2; (-) strand; PAM type: YTN; PAM sequence: TTA
atcttaaggaggttaaagta

SEQ ID NO: 68564 - DNA, 20 bp, Artificial Sequence
  Description of Artificial Sequence: Synthetic oligonucleotide
  Target: ATXN2; (-) strand; PAM type: YTN; PAM sequence: CTT
aatcttaaggaggttaaagt

SEQ ID NO: 68565 - DNA, 20 bp, Artificial Sequence
  Description of Artificial Sequence: Synthetic oligonucleotide
  Target: ATXN2; (-) strand; PAM type: YTN; PAM sequence: TTA
aacagacttaatcttaagga

SEQ ID NO: 68566 - DNA, 20 bp, Artificial Sequence
  Description of Artificial Sequence: Synthetic oligonucleotide
  Target: ATXN2; (-) strand; PAM type: YTN; PAM sequence: TTT
aaacagacttaatcttaagg

SEQ ID NO: 68567 - DNA, 20 bp, Artificial Sequence
  Description of Artificial Sequence: Synthetic oligonucleotide
  Target: ATXN2; (-) strand; PAM type: YTN; PAM sequence: TTC
atttaaacagacttaatctt

SEQ ID NO: 68568 - DNA, 20 bp, Artificial Sequence
  Description of Artificial Sequence: Synthetic oligonucleotide
  Target: ATXN2; (-) strand; PAM type: YTN; PAM sequence: TTG
ggaacgtgtattcatttaaa

SEQ ID NO: 68569 - DNA, 20 bp, Artificial Sequence
  Description of Artificial Sequence: Synthetic oligonucleotide
  Target: ATXN2; (-) strand; PAM type: YTN; PAM sequence: TTT
gggaacgtgtattcatttaa

SEQ ID NO: 68570 - DNA, 20 bp, Artificial Sequence
  Description of Artificial Sequence: Synthetic oligonucleotide
  Target: ATXN2; (-) strand; PAM type: YTN; PAM sequence: CTT
tgggaacgtgtattcattta

SEQ ID NO: 68571 - DNA, 20 bp, Artificial Sequence
  Description of Artificial Sequence: Synthetic oligonucleotide
  Target: ATXN2; (-) strand; PAM type: YTN; PAM sequence: TTA
accctttgggaacgtgtatt

SEQ ID NO: 68572 - DNA, 20 bp, Artificial Sequence
  Description of Artificial Sequence: Synthetic oligonucleotide
  Target: ATXN2; (-) strand; PAM type: YTN; PAM sequence: CTA
attaaccctttgggaacgtg

SEQ ID NO: 68573 - DNA, 20 bp, Artificial Sequence
  Description of Artificial Sequence: Synthetic oligonucleotide
  Target: ATXN2; (-) strand; PAM type: YTN; PAM sequence: TTC
aatagtgtgtatagatccta

SEQ ID NO: 68574 - DNA, 20 bp, Artificial Sequence
  Description of Artificial Sequence: Synthetic oligonucleotide
  Target: ATXN2; (-) strand; PAM type: YTN; PAM sequence: CTT
caatagtgtgtatagatcct

SEQ ID NO: 68575 - DNA, 20 bp, Artificial Sequence
  Description of Artificial Sequence: Synthetic oligonucleotide
  Target: ATXN2; (-) strand; PAM type: YTN; PAM sequence: TTC
ttcaatagtgtgtatagatc

SEQ ID NO: 68576 - DNA, 20 bp, Artificial Sequence
  Description of Artificial Sequence: Synthetic oligonucleotide
  Target: ATXN2; (-) strand; PAM type: YTN; PAM sequence: CTT
cttcaatagtgtgtatagat

SEQ ID NO: 68577 - DNA, 20 bp, Artificial Sequence
  Description of Artificial Sequence: Synthetic oligonucleotide
  Target: ATXN2; (-) strand; PAM type: YTN; PAM sequence: CTG
tcttcttcaatagtgtgtat

SEQ ID NO: 68578 - DNA, 20 bp, Artificial Sequence
  Description of Artificial Sequence: Synthetic oligonucleotide
  Target: ATXN2; (-) strand; PAM type: YTN; PAM sequence: TTA
actgtcttcttcaatagtgt

SEQ ID NO: 68579 - DNA, 20 bp, Artificial Sequence
  Description of Artificial Sequence: Synthetic oligonucleotide
  Target: ATXN2; (-) strand; PAM type: YTN; PAM sequence: CTT
aactgtcttcttcaatagtg

SEQ ID NO: 68580 - DNA, 20 bp, Artificial Sequence
  Description of Artificial Sequence: Synthetic oligonucleotide
  Target: ATXN2; (-) strand; PAM type: YTN; PAM sequence: TTA
ataggcaaagtcttaactgt

SEQ ID NO: 68581 - DNA, 20 bp, Artificial Sequence
  Description of Artificial Sequence: Synthetic oligonucleotide
  Target: ATXN2; (-) strand; PAM type: YTN; PAM sequence: TTA
tagaagcaggattaataggc

SEQ ID NO: 68582 - DNA, 20 bp, Artificial Sequence
  Description of Artificial Sequence: Synthetic oligonucleotide
  Target: ATXN2; (-) strand; PAM type: YTN; PAM sequence: CTG
agaaacagttatagaagcag

SEQ ID NO: 68583 - DNA, 20 bp, Artificial Sequence
  Description of Artificial Sequence: Synthetic oligonucleotide
  Target: ATXN2; (-) strand; PAM type: YTN; PAM sequence: TTA
ctgagaaacagttatagaag

SEQ ID NO: 68584 - DNA, 20 bp, Artificial Sequence
  Description of Artificial Sequence: Synthetic oligonucleotide
  Target: ATXN2; (-) strand; PAM type: YTN; PAM sequence: TTA
aacaaccagttactgagaaa

SEQ ID NO: 68585 - DNA, 20 bp, Artificial Sequence
  Description of Artificial Sequence: Synthetic oligonucleotide
  Target: ATXN2; (-) strand; PAM type: YTN; PAM sequence: TTT
aaacaaccagttactgagaa

SEQ ID NO: 68586 - DNA, 20 bp, Artificial Sequence
  Description of Artificial Sequence: Synthetic oligonucleotide
  Target: ATXN2; (-) strand; PAM type: YTN; PAM sequence: CTT
taaacaaccagttactgaga

SEQ ID NO: 68587 - DNA, 20 bp, Artificial Sequence
  Description of Artificial Sequence: Synthetic oligonucleotide
  Target: ATXN2; (-) strand; PAM type: YTN; PAM sequence: TTC
ctttaaacaaccagttactg

SEQ ID NO: 68588 - DNA, 20 bp, Artificial Sequence
  Description of Artificial Sequence: Synthetic oligonucleotide
  Target: ATXN2; (-) strand; PAM type: YTN; PAM sequence: TTA
tattcctttaaacaaccagt

SEQ ID NO: 68589 - DNA, 20 bp, Artificial Sequence
  Description of Artificial Sequence: Synthetic oligonucleotide
  Target: ATXN2; (-) strand; PAM type: YTN; PAM sequence: CTA
gtgtatgttatattccttta

SEQ ID NO: 68590 - DNA, 20 bp, Artificial Sequence
  Description of Artificial Sequence: Synthetic oligonucleotide
  Target: ATXN2; (-) strand; PAM type: YTN; PAM sequence: TTA
tctagtgtatgttatattcc

SEQ ID NO: 68591 - DNA, 20 bp, Artificial Sequence
  Description of Artificial Sequence: Synthetic oligonucleotide
  Target: ATXN2; (-) strand; PAM type: YTN; PAM sequence: TTA
tgtgaaattatctagtgtat

SEQ ID NO: 68592 - DNA, 20 bp, Artificial Sequence
  Description of Artificial Sequence: Synthetic oligonucleotide
  Target: ATXN2; (-) strand; PAM type: YTN; PAM sequence: TTA
ttatgtgaaattatctagtg

SEQ ID NO: 68593 - DNA, 20 bp, Artificial Sequence
  Description of Artificial Sequence: Synthetic oligonucleotide
  Target: ATXN2; (-) strand; PAM type: YTN; PAM sequence: TTT
attatgtgaaattatctagt

SEQ ID NO: 68594 - DNA, 20 bp, Artificial Sequence
  Description of Artificial Sequence: Synthetic oligonucleotide
  Target: ATXN2; (-) strand; PAM type: YTN; PAM sequence: TTG
tgatttattatgtgaaatta

SEQ ID NO: 68595 - DNA, 20 bp, Artificial Sequence
  Description of Artificial Sequence: Synthetic oligonucleotide
  Target: ATXN2; (-) strand; PAM type: YTN; PAM sequence: TTA
ttgtgatttattatgtgaaa

SEQ ID NO: 68596 - DNA, 20 bp, Artificial Sequence
  Description of Artificial Sequence: Synthetic oligonucleotide
  Target: ATXN2; (-) strand; PAM type: YTN; PAM sequence: CTG
agtaggaattattgtgattt

SEQ ID NO: 68597 - DNA, 20 bp, Artificial Sequence
  Description of Artificial Sequence: Synthetic oligonucleotide
  Target: ATXN2; (-) strand; PAM type: YTN; PAM sequence: CTC
ctgagtaggaattattgtga

SEQ ID NO: 68598 - DNA, 20 bp, Artificial Sequence
  Description of Artificial Sequence: Synthetic oligonucleotide
  Target: ATXN2; (-) strand; PAM type: YTN; PAM sequence: TTA
ctcctgagtaggaattattg

SEQ ID NO: 68599 - DNA, 20 bp, Artificial Sequence
  Description of Artificial Sequence: Synthetic oligonucleotide
  Target: ATXN2; (-) strand; PAM type: YTN; PAM sequence: CTT
actcctgagtaggaattatt

SEQ ID NO: 68600 - DNA, 20 bp, Artificial Sequence
  Description of Artificial Sequence: Synthetic oligonucleotide
  Target: ATXN2; (-) strand; PAM type: YTN; PAM sequence: CTA
atacagtaaataatcttact

SEQ ID NO: 68601 - DNA, 20 bp, Artificial Sequence
  Description of Artificial Sequence: Synthetic oligonucleotide
  Target: ATXN2; (-) strand; PAM type: YTN; PAM sequence: TTA
aaactaatacagtaaataat

SEQ ID NO: 68602 - DNA, 20 bp, Artificial Sequence
  Description of Artificial Sequence: Synthetic oligonucleotide
  Target: ATXN2; (-) strand; PAM type: YTN; PAM sequence: CTC
agagttaaaactaatacagt

SEQ ID NO: 68603 - DNA, 20 bp, Artificial Sequence
  Description of Artificial Sequence: Synthetic oligonucleotide
  Target: ATXN2; (-) strand; PAM type: YTN; PAM sequence: TTA
tgcctcagagttaaaactaa

SEQ ID NO: 68604 - DNA, 20 bp, Artificial Sequence
  Description of Artificial Sequence: Synthetic oligonucleotide
  Target: ATXN2; (-) strand; PAM type: YTN; PAM sequence: TTC
gttatgcctcagagttaaaa

SEQ ID NO: 68605 - DNA, 20 bp, Artificial Sequence
  Description of Artificial Sequence: Synthetic oligonucleotide
  Target: ATXN2; (-) strand; PAM type: YTN; PAM sequence: TTT
cgttatgcctcagagttaaa

SEQ ID NO: 68606 - DNA, 20 bp, Artificial Sequence
  Description of Artificial Sequence: Synthetic oligonucleotide
  Target: ATXN2; (-) strand; PAM type: YTN; PAM sequence: TTT
tcgttatgcctcagagttaa

SEQ ID NO: 68607 - DNA, 20 bp, Artificial Sequence
  Description of Artificial Sequence: Synthetic oligonucleotide
  Target: ATXN2; (-) strand; PAM type: YTN; PAM sequence: TTA
ttttcgttatgcctcagagt

SEQ ID NO: 68608 - DNA, 20 bp, Artificial Sequence
  Description of Artificial Sequence: Synthetic oligonucleotide
  Target: ATXN2; (-) strand; PAM type: YTN; PAM sequence: CTT
attttcgttatgcctcagag

SEQ ID NO: 68609 - DNA, 20 bp, Artificial Sequence
  Description of Artificial Sequence: Synthetic oligonucleotide
  Target: ATXN2; (-) strand; PAM type: YTN; PAM sequence: CTG
cttattttcgttatgcctca

SEQ ID NO: 68610 - DNA, 20 bp, Artificial Sequence
  Description of Artificial Sequence: Synthetic oligonucleotide
  Target: ATXN2; (-) strand; PAM type: YTN; PAM sequence: CTA
ctgcttattttcgttatgcc

SEQ ID NO: 68611 - DNA, 20 bp, Artificial Sequence
  Description of Artificial Sequence: Synthetic oligonucleotide
  Target: ATXN2; (-) strand; PAM type: YTN; PAM sequence: TTG
gatataatagctactgctta

SEQ ID NO: 68612 - DNA, 20 bp, Artificial Sequence
  Description of Artificial Sequence: Synthetic oligonucleotide
  Target: ATXN2; (-) strand; PAM type: YTN; PAM sequence: CTA
attggatataatagctactg

SEQ ID NO: 68613 - DNA, 20 bp, Artificial Sequence
  Description of Artificial Sequence: Synthetic oligonucleotide
  Target: ATXN2; (-) strand; PAM type: YTN; PAM sequence: TTC
taattggatataatagctac

SEQ ID NO: 68614 - DNA, 20 bp, Artificial Sequence
  Description of Artificial Sequence: Synthetic oligonucleotide
  Target: ATXN2; (-) strand; PAM type: YTN; PAM sequence: TTT
ctaattggatataatagcta

SEQ ID NO: 68615 - DNA, 20 bp, Artificial Sequence
  Description of Artificial Sequence: Synthetic oligonucleotide
  Target: ATXN2; (-) strand; PAM type: YTN; PAM sequence: TTG
taaggaaccagcatttctaa

SEQ ID NO: 68616 - DNA, 20 bp, Artificial Sequence
  Description of Artificial Sequence: Synthetic oligonucleotide
  Target: ATXN2; (-) strand; PAM type: YTN; PAM sequence: CTG
atgaaaatcatagataattg

SEQ ID NO: 68617 - DNA, 20 bp, Artificial Sequence
  Description of Artificial Sequence: Synthetic oligonucleotide
  Target: ATXN2; (-) strand; PAM type: YTN; PAM sequence: TTC
aagtgtaaacctgatgaaaa

SEQ ID NO: 68618 - DNA, 20 bp, Artificial Sequence
  Description of Artificial Sequence: Synthetic oligonucleotide
  Target: ATXN2; (-) strand; PAM type: YTN; PAM sequence: CTG
ggttcaagtgtaaacctgat

SEQ ID NO: 68619 - DNA, 20 bp, Artificial Sequence
  Description of Artificial Sequence: Synthetic oligonucleotide
  Target: ATXN2; (-) strand; PAM type: YTN; PAM sequence: TTC
tgggttcaagtgtaaacctg

SEQ ID NO: 68620 - DNA, 20 bp, Artificial Sequence
  Description of Artificial Sequence: Synthetic oligonucleotide
  Target: ATXN2; (-) strand; PAM type: YTN; PAM sequence: CTG
agttctgggttcaagtgtaa

SEQ ID NO: 68621 - DNA, 20 bp, Artificial Sequence
  Description of Artificial Sequence: Synthetic oligonucleotide
  Target: ATXN2; (-) strand; PAM type: YTN; PAM sequence: TTC
caaactgagttctgggttca

SEQ ID NO: 68622 - DNA, 20 bp, Artificial Sequence
  Description of Artificial Sequence: Synthetic oligonucleotide
  Target: ATXN2; (-) strand; PAM type: YTN; PAM sequence: TTA
ataagattccaaactgagtt

SEQ ID NO: 68623 - DNA, 20 bp, Artificial Sequence
  Description of Artificial Sequence: Synthetic oligonucleotide
  Target: ATXN2; (-) strand; PAM type: YTN; PAM sequence: CTT
aataagattccaaactgagt

SEQ ID NO: 68624 - DNA, 20 bp, Artificial Sequence
  Description of Artificial Sequence: Synthetic oligonucleotide
  Target: ATXN2; (-) strand; PAM type: YTN; PAM sequence: TTG
cttaataagattccaaactg

SEQ ID NO: 68625 - DNA, 20 bp, Artificial Sequence
  Description of Artificial Sequence: Synthetic oligonucleotide
  Target: ATXN2; (-) strand; PAM type: YTN; PAM sequence: CTT
gcttaataagattccaaact

SEQ ID NO: 68626 - DNA, 20 bp, Artificial Sequence
  Description of Artificial Sequence: Synthetic oligonucleotide
  Target: ATXN2; (-) strand; PAM type: YTN; PAM sequence: TTA
aatgggacttgcttaataag

SEQ ID NO: 68627 - DNA, 20 bp, Artificial Sequence
  Description of Artificial Sequence: Synthetic oligonucleotide
  Target: ATXN2; (-) strand; PAM type: YTN; PAM sequence: CTT
aaatgggacttgcttaataa

SEQ ID NO: 68628 - DNA, 20 bp, Artificial Sequence
  Description of Artificial Sequence: Synthetic oligonucleotide
  Target: ATXN2; (-) strand; PAM type: YTN; PAM sequence: CTA
cttaaatgggacttgcttaa

SEQ ID NO: 68629 - DNA, 20 bp, Artificial Sequence
  Description of Artificial Sequence: Synthetic oligonucleotide
  Target: ATXN2; (-) strand; PAM type: YTN; PAM sequence: TTC
tacttaaatgggacttgctt

SEQ ID NO: 68630 - DNA, 20 bp, Artificial Sequence
  Description of Artificial Sequence: Synthetic oligonucleotide
  Target: ATXN2; (-) strand; PAM type: YTN; PAM sequence: TTT
ctacttaaatgggacttgct

SEQ ID NO: 68631 - DNA, 20 bp, Artificial Sequence
  Description of Artificial Sequence: Synthetic oligonucleotide
  Target: ATXN2; (-) strand; PAM type: YTN; PAM sequence: TTA
tttctacttaaatgggactt

SEQ ID NO: 68632 - DNA, 20 bp, Artificial Sequence
  Description of Artificial Sequence: Synthetic oligonucleotide
  Target: ATXN2; (-) strand; PAM type: YTN; PAM sequence: TTT
atttctacttaaatgggact

SEQ ID NO: 68633 - DNA, 20 bp, Artificial Sequence
  Description of Artificial Sequence: Synthetic oligonucleotide
  Target: ATXN2; (-) strand; PAM type: YTN; PAM sequence: TTT
tatttctacttaaatgggac

SEQ ID NO: 68634 - DNA, 20 bp, Artificial Sequence
  Description of Artificial Sequence: Synthetic oligonucleotide
  Target: ATXN2; (-) strand; PAM type: YTN; PAM sequence: CTA
gaagagtaatgttttatttc

SEQ ID NO: 68635 - DNA, 20 bp, Artificial Sequence
  Description of Artificial Sequence: Synthetic oligonucleotide
  Target: ATXN2; (-) strand; PAM type: YTN; PAM sequence: CTC
tagaagagtaatgttttatt

SEQ ID NO: 68636 - DNA, 20 bp, Artificial Sequence
  Description of Artificial Sequence: Synthetic oligonucleotide
  Target: ATXN2; (-) strand; PAM type: YTN; PAM sequence: CTC
acaggagtcacaaactctag

SEQ ID NO: 68637 - DNA, 20 bp, Artificial Sequence
  Description of Artificial Sequence: Synthetic oligonucleotide
  Target: ATXN2; (-) strand; PAM type: YTN; PAM sequence: TTG
atactcacaggagtcacaaa

SEQ ID NO: 68638 - DNA, 20 bp, Artificial Sequence
  Description of Artificial Sequence: Synthetic oligonucleotide
  Target: ATXN2; (-) strand; PAM type: YTN; PAM sequence: TTT
gatactcacaggagtcacaa

SEQ ID NO: 68639 - DNA, 20 bp, Artificial Sequence
  Description of Artificial Sequence: Synthetic oligonucleotide
  Target: ATXN2; (-) strand; PAM type: YTN; PAM sequence: TTA
tcatttgatactcacaggag

SEQ ID NO: 68640 - DNA, 20 bp, Artificial Sequence
  Description of Artificial Sequence: Synthetic oligonucleotide
  Target: ATXN2; (-) strand; PAM type: YTN; PAM sequence: TTG
aaatagcaatgaatattatc

SEQ ID NO: 68641 - DNA, 20 bp, Artificial Sequence
  Description of Artificial Sequence: Synthetic oligonucleotide
  Target: ATXN2; (-) strand; PAM type: YTN; PAM sequence: TTT
gaaatagcaatgaatattat

SEQ ID NO: 68642 - DNA, 20 bp, Artificial Sequence
  Description of Artificial Sequence: Synthetic oligonucleotide
  Target: ATXN2; (-) strand; PAM type: YTN; PAM sequence: TTT
tgaaatagcaatgaatatta

SEQ ID NO: 68643 - DNA, 20 bp, Artificial Sequence
  Description of Artificial Sequence: Synthetic oligonucleotide
  Target: ATXN2; (-) strand; PAM type: YTN; PAM sequence: TTT
ttgaaatagcaatgaatatt

SEQ ID NO: 68644 - DNA, 20 bp, Artificial Sequence
  Description of Artificial Sequence: Synthetic oligonucleotide
  Target: ATXN2; (-) strand; PAM type: YTN; PAM sequence: TTT
tttgaaatagcaatgaatat

SEQ ID NO: 68645 - DNA, 20 bp, Artificial Sequence
  Description of Artificial Sequence: Synthetic oligonucleotide
  Target: ATXN2; (-) strand; PAM type: YTN; PAM sequence: TTT
ttttgaaatagcaatgaata

SEQ ID NO: 68646 - DNA, 20 bp, Artificial Sequence
  Description of Artificial Sequence: Synthetic oligonucleotide
  Target: ATXN2; (-) strand; PAM type: YTN; PAM sequence: TTT
tttttgaaatagcaatgaat

SEQ ID NO: 68647 - DNA, 20 bp, Artificial Sequence
  Description of Artificial Sequence: Synthetic oligonucleotide
  Target: ATXN2; (-) strand; PAM type: YTN; PAM sequence: TTT
ttttttgaaatagcaatgaa

SEQ ID NO: 68648 - DNA, 20 bp, Artificial Sequence
  Description of Artificial Sequence: Synthetic oligonucleotide
  Target: ATXN2; (-) strand; PAM type: YTN; PAM sequence: CTT
tttttttgaaatagcaatga

SEQ ID NO: 68649 - DNA, 20 bp, Artificial Sequence
  Description of Artificial Sequence: Synthetic oligonucleotide
  Target: ATXN2; (-) strand; PAM type: YTN; PAM sequence: TTA
atgaggtcaagacttttttt

SEQ ID NO: 68650 - DNA, 20 bp, Artificial Sequence
  Description of Artificial Sequence: Synthetic oligonucleotide
  Target: ATXN2; (-) strand; PAM type: YTN; PAM sequence: TTT
aatgaggtcaagactttttt

SEQ ID NO: 68651 - DNA, 20 bp, Artificial Sequence
  Description of Artificial Sequence: Synthetic oligonucleotide
  Target: ATXN2; (-) strand; PAM type: YTN; PAM sequence: CTA
gtttaatgaggtcaagactt

SEQ ID NO: 68652 - DNA, 20 bp, Artificial Sequence
  Description of Artificial Sequence: Synthetic oligonucleotide
  Target: ATXN2; (-) strand; PAM type: YTN; PAM sequence: TTC
tagtttaatgaggtcaagac

SEQ ID NO: 68653 - DNA, 20 bp, Artificial Sequence
  Description of Artificial Sequence: Synthetic oligonucleotide
  Target: ATXN2; (-) strand; PAM type: YTN; PAM sequence: TTT
ctagtttaatgaggtcaaga

SEQ ID NO: 68654 - DNA, 20 bp, Artificial Sequence
  Description of Artificial Sequence: Synthetic oligonucleotide
  Target: ATXN2; (-) strand; PAM type: YTN; PAM sequence: TTT
tctagtttaatgaggtcaag

SEQ ID NO: 68655 - DNA, 20 bp, Artificial Sequence
  Description of Artificial Sequence: Synthetic oligonucleotide
  Target: ATXN2; (-) strand; PAM type: YTN; PAM sequence: TTT
ttctagtttaatgaggtcaa

SEQ ID NO: 68656 - DNA, 20 bp, Artificial Sequence
  Description of Artificial Sequence: Synthetic oligonucleotide
  Target: ATXN2; (-) strand; PAM type: YTN; PAM sequence: CTT
tttctagtttaatgaggtca

SEQ ID NO: 68657 - DNA, 20 bp, Artificial Sequence
  Description of Artificial Sequence: Synthetic oligonucleotide
  Target: ATXN2; (-) strand; PAM type: YTN; PAM sequence: CTC
cctttttctagtttaatgag

SEQ ID NO: 68658 - DNA, 20 bp, Artificial Sequence
  Description of Artificial Sequence: Synthetic oligonucleotide
  Target: ATXN2; (-) strand; PAM type: YTN; PAM sequence: TTA
gaaggtctccctttttctag

SEQ ID NO: 68659 - DNA, 20 bp, Artificial Sequence
  Description of Artificial Sequence: Synthetic oligonucleotide
  Target: ATXN2; (-) strand; PAM type: YTN; PAM sequence: TTT
agaaggtctccctttttcta

SEQ ID NO: 68660 - DNA, 20 bp, Artificial Sequence
  Description of Artificial Sequence: Synthetic oligonucleotide
  Target: ATXN2; (-) strand; PAM type: YTN; PAM sequence: TTA
tttagaaggtctcccttttt

SEQ ID NO: 68661 - DNA, 20 bp, Artificial Sequence
  Description of Artificial Sequence: Synthetic oligonucleotide
  Target: ATXN2; (-) strand; PAM type: YTN; PAM sequence: CTG
tataaattatttagaaggtc

SEQ ID NO: 68662 - DNA, 20 bp, Artificial Sequence
  Description of Artificial Sequence: Synthetic oligonucleotide
  Target: ATXN2; (-) strand; PAM type: YTN; PAM sequence: TTA
actgtataaattatttagaa

SEQ ID NO: 68663 - DNA, 20 bp, Artificial Sequence
  Description of Artificial Sequence: Synthetic oligonucleotide
  Target: ATXN2; (-) strand; PAM type: YTN; PAM sequence: TTT
aactgtataaattatttaga

SEQ ID NO: 68664 - DNA, 20 bp, Artificial Sequence
  Description of Artificial Sequence: Synthetic oligonucleotide
  Target: ATXN2; (-) strand; PAM type: YTN; PAM sequence: TTA
gataagtgtttaactgtata

SEQ ID NO: 68665 - DNA, 20 bp, Artificial Sequence
  Description of Artificial Sequence: Synthetic oligonucleotide
  Target: ATXN2; (-) strand; PAM type: YTN; PAM sequence: CTT
agataagtgtttaactgtat

SEQ ID NO: 68666 - DNA, 20 bp, Artificial Sequence
  Description of Artificial Sequence: Synthetic oligonucleotide
  Target: ATXN2; (-) strand; PAM type: YTN; PAM sequence: TTA
agcagtcgcttagataagtg

SEQ ID NO: 68667 - DNA, 20 bp, Artificial Sequence
  Description of Artificial Sequence: Synthetic oligonucleotide
  Target: ATXN2; (-) strand; PAM type: YTN; PAM sequence: TTA
ttaagcagtcgcttagataa

SEQ ID NO: 68668 - DNA, 20 bp, Artificial Sequence
  Description of Artificial Sequence: Synthetic oligonucleotide
  Target: ATXN2; (-) strand; PAM type: YTN; PAM sequence: TTT
attaagcagtcgcttagata

SEQ ID NO: 68669 - DNA, 20 bp, Artificial Sequence
  Description of Artificial Sequence: Synthetic oligonucleotide
  Target: ATXN2; (-) strand; PAM type: YTN; PAM sequence: TTG
cagtatttattaagcagtcg

SEQ ID NO: 68670 - DNA, 20 bp, Artificial Sequence
  Description of Artificial Sequence: Synthetic oligonucleotide
  Target: ATXN2; (-) strand; PAM type: YTN; PAM sequence: TTG
tagttgcagtatttattaag

SEQ ID NO: 68671 - DNA, 20 bp, Artificial Sequence
  Description of Artificial Sequence: Synthetic oligonucleotide
  Target: ATXN2; (-) strand; PAM type: YTN; PAM sequence: TTT
gtagttgcagtatttattaa

SEQ ID NO: 68672 - DNA, 20 bp, Artificial Sequence
  Description of Artificial Sequence: Synthetic oligonucleotide
  Target: ATXN2; (-) strand; PAM type: YTN; PAM sequence: CTT
tgtagttgcagtatttatta

SEQ ID NO: 68673 - DNA, 20 bp, Artificial Sequence
  Description of Artificial Sequence: Synthetic oligonucleotide
  Target: ATXN2; (-) strand; PAM type: YTN; PAM sequence: CTG
ctttgtagttgcagtattta

SEQ ID NO: 68674 - DNA, 20 bp, Artificial Sequence
  Description of Artificial Sequence: Synthetic oligonucleotide
  Target: ATXN2; (-) strand; PAM type: YTN; PAM sequence: TTG
gtgatgactgctttgtagtt

SEQ ID NO: 68675 - DNA, 20 bp, Artificial Sequence
  Description of Artificial Sequence: Synthetic oligonucleotide
  Target: ATXN2; (-) strand; PAM type: YTN; PAM sequence: TTT
ggtgatgactgctttgtagt

SEQ ID NO: 68676 - DNA, 20 bp, Artificial Sequence
  Description of Artificial Sequence: Synthetic oligonucleotide
  Target: ATXN2; (-) strand; PAM type: YTN; PAM sequence: TTA
tttggtgatgactgctttgt

SEQ ID NO: 68677 - DNA, 20 bp, Artificial Sequence
  Description of Artificial Sequence: Synthetic oligonucleotide
  Target: ATXN2; (-) strand; PAM type: YTN; PAM sequence: TTT
atttggtgatgactgctttg

SEQ ID NO: 68678 - DNA, 20 bp, Artificial Sequence
  Description of Artificial Sequence: Synthetic oligonucleotide
  Target: ATXN2; (-) strand; PAM type: YTN; PAM sequence: CTA
ggcatatccatcagtataaa

SEQ ID NO: 68679 - DNA, 20 bp, Artificial Sequence
  Description of Artificial Sequence: Synthetic oligonucleotide
  Target: ATXN2; (-) strand; PAM type: YTN; PAM sequence: TTA
cctaggcatatccatcagta

SEQ ID NO: 68680 - DNA, 20 bp, Artificial Sequence
  Description of Artificial Sequence: Synthetic oligonucleotide
  Target: ATXN2; (-) strand; PAM type: YTN; PAM sequence: TTT
acctaggcatatccatcagt

SEQ ID NO: 68681 - DNA, 20 bp, Artificial Sequence
  Description of Artificial Sequence: Synthetic oligonucleotide
  Target: ATXN2; (-) strand; PAM type: YTN; PAM sequence: CTT
tacctaggcatatccatcag

SEQ ID NO: 68682 - DNA, 20 bp, Artificial Sequence
  Description of Artificial Sequence: Synthetic oligonucleotide
  Target: ATXN2; (-) strand; PAM type: YTN; PAM sequence: CTG
tatctttacctaggcatatc

SEQ ID NO: 68683 - DNA, 20 bp, Artificial Sequence
  Description of Artificial Sequence: Synthetic oligonucleotide
  Target: ATXN2; (-) strand; PAM type: YTN; PAM sequence: CTA
gctgtatctttacctaggca

SEQ ID NO: 68684 - DNA, 20 bp, Artificial Sequence
  Description of Artificial Sequence: Synthetic oligonucleotide
  Target: ATXN2; (-) strand; PAM type: YTN; PAM sequence: TTA
aatactagctgtatctttac

SEQ ID NO: 68685 - DNA, 20 bp, Artificial Sequence
  Description of Artificial Sequence: Synthetic oligonucleotide
  Target: ATXN2; (-) strand; PAM type: YTN; PAM sequence: TTA
aggtaagtgatatgtaatgt

SEQ ID NO: 68686 - DNA, 20 bp, Artificial Sequence
  Description of Artificial Sequence: Synthetic oligonucleotide
  Target: ATXN2; (-) strand; PAM type: YTN; PAM sequence: TTG
ataagattaaggtaagtgat

SEQ ID NO: 68687 - DNA, 20 bp, Artificial Sequence
  Description of Artificial Sequence: Synthetic oligonucleotide
  Target: ATXN2; (-) strand; PAM type: YTN; PAM sequence: TTT
gataagattaaggtaagtga

SEQ ID NO: 68688 - DNA, 20 bp, Artificial Sequence
  Description of Artificial Sequence: Synthetic oligonucleotide
  Target: ATXN2; (-) strand; PAM type: YTN; PAM sequence: CTG
tttgataagattaaggtaag

SEQ ID NO: 68689 - DNA, 20 bp, Artificial Sequence
  Description of Artificial Sequence: Synthetic oligonucleotide
  Target: ATXN2; (-) strand; PAM type: YTN; PAM sequence: CTG
gactgtttgataagattaag

SEQ ID NO: 68690 - DNA, 20 bp, Artificial Sequence
  Description of Artificial Sequence: Synthetic oligonucleotide
  Target: ATXN2; (-) strand; PAM type: YTN; PAM sequence: CTA
tggagaggagacctggactg

SEQ ID NO: 68691 - DNA, 20 bp, Artificial Sequence
  Description of Artificial Sequence: Synthetic oligonucleotide
  Target: ATXN2; (-) strand; PAM type: YTN; PAM sequence: TTA
agtgtgtggaaccctatgga

SEQ ID NO: 68692 - DNA, 20 bp, Artificial Sequence
  Description of Artificial Sequence: Synthetic oligonucleotide
  Target: ATXN2; (-) strand; PAM type: YTN; PAM sequence: CTT
aagtgtgtggaaccctatgg

SEQ ID NO: 68693 - DNA, 20 bp, Artificial Sequence
  Description of Artificial Sequence: Synthetic oligonucleotide
  Target: ATXN2; (-) strand; PAM type: YTN; PAM sequence: CTG
agaaatatatgatacttaag

SEQ ID NO: 68694 - DNA, 20 bp, Artificial Sequence
  Description of Artificial Sequence: Synthetic oligonucleotide
  Target: ATXN2; (-) strand; PAM type: YTN; PAM sequence: CTG
aagggggctgagaaatatat

SEQ ID NO: 68695 - DNA, 20 bp, Artificial Sequence
  Description of Artificial Sequence: Synthetic oligonucleotide
  Target: ATXN2; (-) strand; PAM type: YTN; PAM sequence: TTA
aaaaacctgaagggggctga

SEQ ID NO: 68696 - DNA, 20 bp, Artificial Sequence
  Description of Artificial Sequence: Synthetic oligonucleotide
  Target: ATXN2; (-) strand; PAM type: YTN; PAM sequence: TTA
aagttaaaaaacctgaaggg

SEQ ID NO: 68697 - DNA, 20 bp, Artificial Sequence
  Description of Artificial Sequence: Synthetic oligonucleotide
  Target: ATXN2; (-) strand; PAM type: YTN; PAM sequence: TTT
aaagttaaaaaacctgaagg

SEQ ID NO: 68698 - DNA, 20 bp, Artificial Sequence
  Description of Artificial Sequence: Synthetic oligonucleotide
  Target: ATXN2; (-) strand; PAM type: YTN; PAM sequence: TTT
taaagttaaaaaacctgaag

SEQ ID NO: 68699 - DNA, 20 bp, Artificial Sequence
  Description of Artificial Sequence: Synthetic oligonucleotide
  Target: ATXN2; (-) strand; PAM type: YTN; PAM sequence: TTA
taaacagaattttaaagtta

SEQ ID NO: 68700 - DNA, 20 bp, Artificial Sequence
  Description of Artificial Sequence: Synthetic oligonucleotide
  Target: ATXN2; (-) strand; PAM type: YTN; PAM sequence: TTT
ataaacagaattttaaagtt

SEQ ID NO: 68701 - DNA, 20 bp, Artificial Sequence
  Description of Artificial Sequence: Synthetic oligonucleotide
  Target: ATXN2; (-) strand; PAM type: YTN; PAM sequence: TTG
tttataaacagaattttaaa

SEQ ID NO: 68702 - DNA, 20 bp, Artificial Sequence
  Description of Artificial Sequence: Synthetic oligonucleotide
  Target: ATXN2; (-) strand; PAM type: YTN; PAM sequence: TTA
gttgtttataaacagaattt

SEQ ID NO: 68703 - DNA, 20 bp, Artificial Sequence
  Description of Artificial Sequence: Synthetic oligonucleotide
  Target: ATXN2; (-) strand; PAM type: YTN; PAM sequence: TTT
agttgtttataaacagaatt

SEQ ID NO: 68704 - DNA, 20 bp, Artificial Sequence
  Description of Artificial Sequence: Synthetic oligonucleotide
  Target: ATXN2; (-) strand; PAM type: YTN; PAM sequence: TTT
tagttgtttataaacagaat

SEQ ID NO: 68705 - DNA, 20 bp, Artificial Sequence
  Description of Artificial Sequence: Synthetic oligonucleotide
  Target: ATXN2; (-) strand; PAM type: YTN; PAM sequence: CTG
aggaaagattttagttgttt

SEQ ID NO: 68706 - DNA, 20 bp, Artificial Sequence
  Description of Artificial Sequence: Synthetic oligonucleotide
  Target: ATXN2; (-) strand; PAM type: YTN; PAM sequence: CTC
actgaggaaagattttagtt

SEQ ID NO: 68707 - DNA, 20 bp, Artificial Sequence
  Description of Artificial Sequence: Synthetic oligonucleotide
  Target: ATXN2; (-) strand; PAM type: YTN; PAM sequence: TTG
ctcactgaggaaagatttta

SEQ ID NO: 68708 - DNA, 20 bp, Artificial Sequence
  Description of Artificial Sequence: Synthetic oligonucleotide
  Target: ATXN2; (-) strand; PAM type: YTN; PAM sequence: TTT
gctcactgaggaaagatttt

SEQ ID NO: 68709 - DNA, 20 bp, Artificial Sequence
  Description of Artificial Sequence: Synthetic oligonucleotide
  Target: ATXN2; (-) strand; PAM type: YTN; PAM sequence: CTT
tgctcactgaggaaagattt

SEQ ID NO: 68710 - DNA, 20 bp, Artificial Sequence
  Description of Artificial Sequence: Synthetic oligonucleotide
  Target: ATXN2; (-) strand; PAM type: YTN; PAM sequence: TTC
tttgctcactgaggaaagat

SEQ ID NO: 68711 - DNA, 20 bp, Artificial Sequence
  Description of Artificial Sequence: Synthetic oligonucleotide
  Target: ATXN2; (-) strand; PAM type: YTN; PAM sequence: TTT
ctttgctcactgaggaaaga

SEQ ID NO: 68712 - DNA, 20 bp, Artificial Sequence
  Description of Artificial Sequence: Synthetic oligonucleotide
  Target: ATXN2; (-) strand; PAM type: YTN; PAM sequence: TTG
ggggtgaaatttctttgctc

SEQ ID NO: 68713 - DNA, 20 bp, Artificial Sequence
  Description of Artificial Sequence: Synthetic oligonucleotide
  Target: ATXN2; (-) strand; PAM type: YTN; PAM sequence: TTA
atattgggggtgaaatttct

SEQ ID NO: 68714 - DNA, 20 bp, Artificial Sequence
  Description of Artificial Sequence: Synthetic oligonucleotide
  Target: ATXN2; (-) strand; PAM type: YTN; PAM sequence: CTT
aatattgggggtgaaatttc

SEQ ID NO: 68715 - DNA, 20 bp, Artificial Sequence
  Description of Artificial Sequence: Synthetic oligonucleotide
  Target: ATXN2; (-) strand; PAM type: YTN; PAM sequence: TTC
agtacttaatattgggggtg

SEQ ID NO: 68716 - DNA, 20 bp, Artificial Sequence
  Description of Artificial Sequence: Synthetic oligonucleotide
  Target: ATXN2; (-) strand; PAM type: YTN; PAM sequence: TTT
cagtacttaatattgggggt

SEQ ID NO: 68717 - DNA, 20 bp, Artificial Sequence
  Description of Artificial Sequence: Synthetic oligonucleotide
  Target: ATXN2; (-) strand; PAM type: YTN; PAM sequence: TTT
tcagtacttaatattggggg

SEQ ID NO: 68718 - DNA, 20 bp, Artificial Sequence
  Description of Artificial Sequence: Synthetic oligonucleotide
  Target: ATXN2; (-) strand; PAM type: YTN; PAM sequence: TTG
agtattttcagtacttaata

SEQ ID NO: 68719 - DNA, 20 bp, Artificial Sequence
  Description of Artificial Sequence: Synthetic oligonucleotide
  Target: ATXN2; (-) strand; PAM type: YTN; PAM sequence: CTT
gagtattttcagtacttaat

SEQ ID NO: 68720 - DNA, 20 bp, Artificial Sequence
  Description of Artificial Sequence: Synthetic oligonucleotide
  Target: ATXN2; (-) strand; PAM type: YTN; PAM sequence: CTC
ttgagtattttcagtactta

SEQ ID NO: 68721 - DNA, 20 bp, Artificial Sequence
  Description of Artificial Sequence: Synthetic oligonucleotide
  Target: ATXN2; (-) strand; PAM type: YTN; PAM sequence: CTC
caaatggacactcttgagta

SEQ ID NO: 68722 - DNA, 20 bp, Artificial Sequence
  Description of Artificial Sequence: Synthetic oligonucleotide
  Target: ATXN2; (-) strand; PAM type: YTN; PAM sequence: CTC
tccaaatggacactcttgag

SEQ ID NO: 68723 - DNA, 20 bp, Artificial Sequence
  Description of Artificial Sequence: Synthetic oligonucleotide
  Target: ATXN2; (-) strand; PAM type: YTN; PAM sequence: TTC
ctctccaaatggacactctt

SEQ ID NO: 68724 - DNA, 20 bp, Artificial Sequence
  Description of Artificial Sequence: Synthetic oligonucleotide
  Target: ATXN2; (-) strand; PAM type: YTN; PAM sequence: CTC
cagaattcctctccaaatgg

SEQ ID NO: 68725 - DNA, 20 bp, Artificial Sequence
  Description of Artificial Sequence: Synthetic oligonucleotide
  Target: ATXN2; (-) strand; PAM type: YTN; PAM sequence: TTC
tccagaattcctctccaaat

SEQ ID NO: 68726 - DNA, 20 bp, Artificial Sequence
  Description of Artificial Sequence: Synthetic oligonucleotide
  Target: ATXN2; (-) strand; PAM type: YTN; PAM sequence: TTT
ctccagaattcctctccaaa

SEQ ID NO: 68727 - DNA, 20 bp, Artificial Sequence
  Description of Artificial Sequence: Synthetic oligonucleotide
  Target: ATXN2; (-) strand; PAM type: YTN; PAM sequence: TTT
tctccagaattcctctccaa

SEQ ID NO: 68728 - DNA, 20 bp, Artificial Sequence
  Description of Artificial Sequence: Synthetic oligonucleotide
  Target: ATXN2; (-) strand; PAM type: YTN; PAM sequence: CTT
ttctccagaattcctctcca

SEQ ID NO: 68729 - DNA, 20 bp, Artificial Sequence
  Description of Artificial Sequence: Synthetic oligonucleotide
  Target: ATXN2; (-) strand; PAM type: YTN; PAM sequence: TTG
agtcttttctccagaattcc

SEQ ID NO: 68730 - DNA, 20 bp, Artificial Sequence
  Description of Artificial Sequence: Synthetic oligonucleotide
  Target: ATXN2; (-) strand; PAM type: YTN; PAM sequence: TTC
attgagtcttttctccagaa

SEQ ID NO: 68731 - DNA, 20 bp, Artificial Sequence
  Description of Artificial Sequence: Synthetic oligonucleotide
  Target: ATXN2; (-) strand; PAM type: YTN; PAM sequence: TTT
cattgagtcttttctccaga

SEQ ID NO: 68732 - DNA, 20 bp, Artificial Sequence
  Description of Artificial Sequence: Synthetic oligonucleotide
  Target: ATXN2; (-) strand; PAM type: YTN; PAM sequence: TTT
tcattgagtcttttctccag

SEQ ID NO: 68733 - DNA, 20 bp, Artificial Sequence
  Description of Artificial Sequence: Synthetic oligonucleotide
  Target: ATXN2; (-) strand; PAM type: YTN; PAM sequence: TTG
ttttcattgagtcttttctc

SEQ ID NO: 68734 - DNA, 20 bp, Artificial Sequence
  Description of Artificial Sequence: Synthetic oligonucleotide
  Target: ATXN2; (-) strand; PAM type: YTN; PAM sequence: TTT
gttttcattgagtcttttct

SEQ ID NO: 68735 - DNA, 20 bp, Artificial Sequence
  Description of Artificial Sequence: Synthetic oligonucleotide
  Target: ATXN2; (-) strand; PAM type: YTN; PAM sequence: TTC
atttgttttcattgagtctt

SEQ ID NO: 68736 - DNA, 20 bp, Artificial Sequence
  Description of Artificial Sequence: Synthetic oligonucleotide
  Target: ATXN2; (-) strand; PAM type: YTN; PAM sequence: TTT
catttgttttcattgagtct

SEQ ID NO: 68737 - DNA, 20 bp, Artificial Sequence
  Description of Artificial Sequence: Synthetic oligonucleotide
  Target: ATXN2; (-) strand; PAM type: YTN; PAM sequence: TTC
caatttcatttgttttcatt

SEQ ID NO: 68738 - DNA, 20 bp, Artificial Sequence
  Description of Artificial Sequence: Synthetic oligonucleotide
  Target: ATXN2; (-) strand; PAM type: YTN; PAM sequence: TTT
ccaatttcatttgttttcat

SEQ ID NO: 68739 - DNA, 20 bp, Artificial Sequence
  Description of Artificial Sequence: Synthetic oligonucleotide
  Target: ATXN2; (-) strand; PAM type: YTN; PAM sequence: CTA
agtttccaatttcatttgtt

SEQ ID NO: 68740 - DNA, 20 bp, Artificial Sequence
  Description of Artificial Sequence: Synthetic oligonucleotide
  Target: ATXN2; (-) strand; PAM type: YTN; PAM sequence: TTA
gatgaaaatagagaacacta

SEQ ID NO: 68741 - DNA, 20 bp, Artificial Sequence
  Description of Artificial Sequence: Synthetic oligonucleotide
  Target: ATXN2; (-) strand; PAM type: YTN; PAM sequence: TTG
gaaagttagatgaaaataga

SEQ ID NO: 68742 - DNA, 20 bp, Artificial Sequence
  Description of Artificial Sequence: Synthetic oligonucleotide
  Target: ATXN2; (-) strand; PAM type: YTN; PAM sequence: TTT
ggaaagttagatgaaaatag

SEQ ID NO: 68743 - DNA, 20 bp, Artificial Sequence
  Description of Artificial Sequence: Synthetic oligonucleotide
  Target: ATXN2; (-) strand; PAM type: YTN; PAM sequence: TTA
aatttggaaagttagatgaa

SEQ ID NO: 68744 - DNA, 20 bp, Artificial Sequence
  Description of Artificial Sequence: Synthetic oligonucleotide
  Target: ATXN2; (-) strand; PAM type: YTN; PAM sequence: TTT
aaatttggaaagttagatga

SEQ ID NO: 68745 - DNA, 20 bp, Artificial Sequence
  Description of Artificial Sequence: Synthetic oligonucleotide
  Target: ATXN2; (-) strand; PAM type: YTN; PAM sequence: CTA
tttaaatttggaaagttaga

SEQ ID NO: 68746 - DNA, 20 bp, Artificial Sequence
  Description of Artificial Sequence: Synthetic oligonucleotide
  Target: ATXN2; (-) strand; PAM type: YTN; PAM sequence: TTA
gctatttaaatttggaaagt

SEQ ID NO: 68747 - DNA, 20 bp, Artificial Sequence
  Description of Artificial Sequence: Synthetic oligonucleotide
  Target: ATXN2; (-) strand; PAM type: YTN; PAM sequence: TTT
agctatttaaatttggaaag

SEQ ID NO: 68748 - DNA, 20 bp, Artificial Sequence
  Description of Artificial Sequence: Synthetic oligonucleotide
  Target: ATXN2; (-) strand; PAM type: YTN; PAM sequence: TTT
tagctatttaaatttggaaa

SEQ ID NO: 68749 - DNA, 20 bp, Artificial Sequence
  Description of Artificial Sequence: Synthetic oligonucleotide
  Target: ATXN2; (-) strand; PAM type: YTN; PAM sequence: TTC
aattttagctatttaaattt

SEQ ID NO: 68750 - DNA, 20 bp, Artificial Sequence
  Description of Artificial Sequence: Synthetic oligonucleotide
  Target: ATXN2; (-) strand; PAM type: YTN; PAM sequence: TTG
tgggaaaagagtggacattc

SEQ ID NO: 68751 - DNA, 20 bp, Artificial Sequence
  Description of Artificial Sequence: Synthetic oligonucleotide
  Target: ATXN2; (-) strand; PAM type: YTN; PAM sequence: TTT
gtgggaaaagagtggacatt

SEQ ID NO: 68752 - DNA, 20 bp, Artificial Sequence
  Description of Artificial Sequence: Synthetic oligonucleotide
  Target: ATXN2; (-) strand; PAM type: YTN; PAM sequence: CTT
tgtgggaaaagagtggacat

SEQ ID NO: 68753 - DNA, 20 bp, Artificial Sequence
  Description of Artificial Sequence: Synthetic oligonucleotide
  Target: ATXN2; (-) strand; PAM type: YTN; PAM sequence: CTA
actttgtgggaaaagagtgg

SEQ ID NO: 68754 - DNA, 20 bp, Artificial Sequence
  Description of Artificial Sequence: Synthetic oligonucleotide
  Target: ATXN2; (-) strand; PAM type: YTN; PAM sequence: TTA
ctaactttgtgggaaaagag

SEQ ID NO: 68755 - DNA, 20 bp, Artificial Sequence
  Description of Artificial Sequence: Synthetic oligonucleotide
  Target: ATXN2; (-) strand; PAM type: YTN; PAM sequence: CTA
tggatggtatggaaatagta

SEQ ID NO: 68756 - DNA, 20 bp, Artificial Sequence
  Description of Artificial Sequence: Synthetic oligonucleotide
  Target: ATXN2; (-) strand; PAM type: YTN; PAM sequence: TTC
tatggatggtatggaaatag

SEQ ID NO: 68757 - DNA, 20 bp, Artificial Sequence
  Description of Artificial Sequence: Synthetic oligonucleotide
  Target: ATXN2; (-) strand; PAM type: YTN; PAM sequence: CTG
aacaacagttctatggatgg

SEQ ID NO: 68758 - DNA, 20 bp, Artificial Sequence
  Description of Artificial Sequence: Synthetic oligonucleotide
  Target: ATXN2; (-) strand; PAM type: YTN; PAM sequence: TTC
cataaatcagggatactgaa

SEQ ID NO: 68759 - DNA, 20 bp, Artificial Sequence
  Description of Artificial Sequence: Synthetic oligonucleotide
  Target: ATXN2; (-) strand; PAM type: YTN; PAM sequence: TTT
ccataaatcagggatactga

SEQ ID NO: 68760 - DNA, 20 bp, Artificial Sequence
  Description of Artificial Sequence: Synthetic oligonucleotide
  Target: ATXN2; (-) strand; PAM type: YTN; PAM sequence: TTT
tccataaatcagggatactg

SEQ ID NO: 68761 - DNA, 20 bp, Artificial Sequence
  Description of Artificial Sequence: Synthetic oligonucleotide
  Target: ATXN2; (-) strand; PAM type: YTN; PAM sequence: CTT
ttccataaatcagggatact

SEQ ID NO: 68762 - DNA, 20 bp, Artificial Sequence
  Description of Artificial Sequence: Synthetic oligonucleotide
  Target: ATXN2; (-) strand; PAM type: YTN; PAM sequence: TTG
tggatcttttccataaatca

SEQ ID NO: 68763 - DNA, 20 bp, Artificial Sequence
  Description of Artificial Sequence: Synthetic oligonucleotide
  Target: ATXN2; (-) strand; PAM type: YTN; PAM sequence: TTG
taggttgtggatcttttcca

SEQ ID NO: 68764 - DNA, 20 bp, Artificial Sequence
  Description of Artificial Sequence: Synthetic oligonucleotide
  Target: ATXN2; (-) strand; PAM type: YTN; PAM sequence: CTT
gtaggttgtggatcttttcc

SEQ ID NO: 68765 - DNA, 20 bp, Artificial Sequence
  Description of Artificial Sequence: Synthetic oligonucleotide
  Target: ATXN2; (-) strand; PAM type: YTN; PAM sequence: TTG
aatatatcttgtaggttgtg

SEQ ID NO: 68766 - DNA, 20 bp, Artificial Sequence
  Description of Artificial Sequence: Synthetic oligonucleotide
  Target: ATXN2; (-) strand; PAM type: YTN; PAM sequence: CTA
ggttgaatatatcttgtagg

SEQ ID NO: 68767 - DNA, 20 bp, Artificial Sequence
  Description of Artificial Sequence: Synthetic oligonucleotide
  Target: ATXN2; (-) strand; PAM type: YTN; PAM sequence: CTA
aatctaggttgaatatatct

SEQ ID NO: 68768 - DNA, 20 bp, Artificial Sequence
  Description of Artificial Sequence: Synthetic oligonucleotide
  Target: ATXN2; (-) strand; PAM type: YTN; PAM sequence: CTC
taaatctaggttgaatatat

SEQ ID NO: 68769 - DNA, 20 bp, Artificial Sequence
  Description of Artificial Sequence: Synthetic oligonucleotide
  Target: ATXN2; (-) strand; PAM type: YTN; PAM sequence: CTA
cctctaaatctaggttgaat

SEQ ID NO: 68770 - DNA, 20 bp, Artificial Sequence
  Description of Artificial Sequence: Synthetic oligonucleotide
  Target: ATXN2; (-) strand; PAM type: YTN; PAM sequence: CTC
tacctctaaatctaggttga

SEQ ID NO: 68771 - DNA, 20 bp, Artificial Sequence
  Description of Artificial Sequence: Synthetic oligonucleotide
  Target: ATXN2; (-) strand; PAM type: YTN; PAM sequence: TTA
ctctacctctaaatctaggt

SEQ ID NO: 68772 - DNA, 20 bp, Artificial Sequence
  Description of Artificial Sequence: Synthetic oligonucleotide
  Target: ATXN2; (-) strand; PAM type: YTN; PAM sequence: TTT
actctacctctaaatctagg

SEQ ID NO: 68773 - DNA, 20 bp, Artificial Sequence
  Description of Artificial Sequence: Synthetic oligonucleotide
  Target: ATXN2; (-) strand; PAM type: YTN; PAM sequence: TTT
tactctacctctaaatctag

SEQ ID NO: 68774 - DNA, 20 bp, Artificial Sequence
  Description of Artificial Sequence: Synthetic oligonucleotide
  Target: ATXN2; (-) strand; PAM type: YTN; PAM sequence: TTT
ttactctacctctaaatcta

SEQ ID NO: 68775 - DNA, 20 bp, Artificial Sequence
  Description of Artificial Sequence: Synthetic oligonucleotide
  Target: ATXN2; (-) strand; PAM type: YTN; PAM sequence: TTT
tttactctacctctaaatct

SEQ ID NO: 68776 - DNA, 20 bp, Artificial Sequence
  Description of Artificial Sequence: Synthetic oligonucleotide
  Target: ATXN2; (-) strand; PAM type: YTN; PAM sequence: TTA
gtaggaagacattttttact

SEQ ID NO: 68777 - DNA, 20 bp, Artificial Sequence
  Description of Artificial Sequence: Synthetic oligonucleotide
  Target: ATXN2; (-) strand; PAM type: YTN; PAM sequence: TTT
agtaggaagacattttttac

SEQ ID NO: 68778 - DNA, 20 bp, Artificial Sequence
  Description of Artificial Sequence: Synthetic oligonucleotide
  Target: ATXN2; (-) strand; PAM type: YTN; PAM sequence: CTT
tagtaggaagacatttttta

SEQ ID NO: 68779 - DNA, 20 bp, Artificial Sequence
  Description of Artificial Sequence: Synthetic oligonucleotide
  Target: ATXN2; (-) strand; PAM type: YTN; PAM sequence: CTG
aatctttagtaggaagacat

SEQ ID NO: 68780 - DNA, 20 bp, Artificial Sequence
  Description of Artificial Sequence: Synthetic oligonucleotide
  Target: ATXN2; (-) strand; PAM type: YTN; PAM sequence: TTA
agtaaaagaaacctgaatct

SEQ ID NO: 68781 - DNA, 20 bp, Artificial Sequence
  Description of Artificial Sequence: Synthetic oligonucleotide
  Target: ATXN2; (-) strand; PAM type: YTN; PAM sequence: CTT
aagtaaaagaaacctgaatc

SEQ ID NO: 68782 - DNA, 20 bp, Artificial Sequence
  Description of Artificial Sequence: Synthetic oligonucleotide
  Target: ATXN2; (-) strand; PAM type: YTN; PAM sequence: TTA
gcaacttaagtaaaagaaac

SEQ ID NO: 68783 - DNA, 20 bp, Artificial Sequence
  Description of Artificial Sequence: Synthetic oligonucleotide
  Target: ATXN2; (-) strand; PAM type: YTN; PAM sequence: TTT
agcaacttaagtaaaagaaa

SEQ ID NO: 68784 - DNA, 20 bp, Artificial Sequence
  Description of Artificial Sequence: Synthetic oligonucleotide
  Target: ATXN2; (-) strand; PAM type: YTN; PAM sequence: TTA
cagtttagcaacttaagtaa

SEQ ID NO: 68785 - DNA, 20 bp, Artificial Sequence
  Description of Artificial Sequence: Synthetic oligonucleotide
  Target: ATXN2; (-) strand; PAM type: YTN; PAM sequence: CTA
agggtggatgttacagttta

SEQ ID NO: 68786 - DNA, 20 bp, Artificial Sequence
  Description of Artificial Sequence: Synthetic oligonucleotide
  Target: ATXN2; (-) strand; PAM type: YTN; PAM sequence: TTA
gtctaagggtggatgttaca

SEQ ID NO: 68787 - DNA, 20 bp, Artificial Sequence
  Description of Artificial Sequence: Synthetic oligonucleotide
  Target: ATXN2; (-) strand; PAM type: YTN; PAM sequence: CTT
agtctaagggtggatgttac

SEQ ID NO: 68788 - DNA, 20 bp, Artificial Sequence
  Description of Artificial Sequence: Synthetic oligonucleotide
  Target: ATXN2; (-) strand; PAM type: YTN; PAM sequence: TTA
aaaaacaacaaaaacaaccc

SEQ ID NO: 68789 - DNA, 20 bp, Artificial Sequence
  Description of Artificial Sequence: Synthetic oligonucleotide
  Target: ATXN2; (-) strand; PAM type: YTN; PAM sequence: CTT
aaaaaacaacaaaaacaacc

SEQ ID NO: 68790 - DNA, 20 bp, Artificial Sequence
  Description of Artificial Sequence: Synthetic oligonucleotide
  Target: ATXN2; (-) strand; PAM type: YTN; PAM sequence: TTG
cttaaaaaacaacaaaaaca

SEQ ID NO: 68791 - DNA, 20 bp, Artificial Sequence
  Description of Artificial Sequence: Synthetic oligonucleotide
  Target: ATXN2; (-) strand; PAM type: YTN; PAM sequence: TTT
gcttaaaaaacaacaaaaac

SEQ ID NO: 68792 - DNA, 20 bp, Artificial Sequence
  Description of Artificial Sequence: Synthetic oligonucleotide
  Target: ATXN2; (-) strand; PAM type: YTN; PAM sequence: CTA
gagaaatttgcttaaaaaac

SEQ ID NO: 68793 - DNA, 20 bp, Artificial Sequence
  Description of Artificial Sequence: Synthetic oligonucleotide
  Target: ATXN2; (-) strand; PAM type: YTN; PAM sequence: TTA
taatacaagacatgatcaag

SEQ ID NO: 68794 - DNA, 20 bp, Artificial Sequence
  Description of Artificial Sequence: Synthetic oligonucleotide
  Target: ATXN2; (-) strand; PAM type: YTN; PAM sequence: CTT
ataatacaagacatgatcaa

SEQ ID NO: 68795 - DNA, 20 bp, Artificial Sequence
  Description of Artificial Sequence: Synthetic oligonucleotide
  Target: ATXN2; (-) strand; PAM type: YTN; PAM sequence: CTG
aggtaacttataatacaaga

SEQ ID NO: 68796 - DNA, 20 bp, Artificial Sequence
  Description of Artificial Sequence: Synthetic oligonucleotide
  Target: ATXN2; (-) strand; PAM type: YTN; PAM sequence: TTC
aagaaaggatctgaggtaac

SEQ ID NO: 68797 - DNA, 20 bp, Artificial Sequence
  Description of Artificial Sequence: Synthetic oligonucleotide
  Target: ATXN2; (-) strand; PAM type: YTN; PAM sequence: CTT
caagaaaggatctgaggtaa

SEQ ID NO: 68798 - DNA, 20 bp, Artificial Sequence
  Description of Artificial Sequence: Synthetic oligonucleotide
  Target: ATXN2; (-) strand; PAM type: YTN; PAM sequence: TTA
cttcaagaaaggatctgagg

SEQ ID NO: 68799 - DNA, 20 bp, Artificial Sequence
  Description of Artificial Sequence: Synthetic oligonucleotide
  Target: ATXN2; (-) strand; PAM type: YTN; PAM sequence: CTT
acttcaagaaaggatctgag

SEQ ID NO: 68800 - DNA, 20 bp, Artificial Sequence
  Description of Artificial Sequence: Synthetic oligonucleotide
  Target: ATXN2; (-) strand; PAM type: YTN; PAM sequence: TTA
tgcttacttcaagaaaggat

SEQ ID NO: 68801 - DNA, 20 bp, Artificial Sequence
  Description of Artificial Sequence: Synthetic oligonucleotide
  Target: ATXN2; (-) strand; PAM type: YTN; PAM sequence: CTA
tattatgcttacttcaagaa

SEQ ID NO: 68802 - DNA, 20 bp, Artificial Sequence
  Description of Artificial Sequence: Synthetic oligonucleotide
  Target: ATXN2; (-) strand; PAM type: YTN; PAM sequence: TTC
tatattatgcttacttcaag

SEQ ID NO: 68803 - DNA, 20 bp, Artificial Sequence
  Description of Artificial Sequence: Synthetic oligonucleotide
  Target: ATXN2; (-) strand; PAM type: YTN; PAM sequence: TTT
ctatattatgcttacttcaa

SEQ ID NO: 68804 - DNA, 20 bp, Artificial Sequence
  Description of Artificial Sequence: Synthetic oligonucleotide
  Target: ATXN2; (-) strand; PAM type: YTN; PAM sequence: TTG
tttctatattatgcttactt

SEQ ID NO: 68805 - DNA, 20 bp, Artificial Sequence
  Description of Artificial Sequence: Synthetic oligonucleotide
  Target: ATXN2; (-) strand; PAM type: YTN; PAM sequence: TTT
gtttctatattatgcttact

SEQ ID NO: 68806 - DNA, 20 bp, Artificial Sequence
  Description of Artificial Sequence: Synthetic oligonucleotide
  Target: ATXN2; (-) strand; PAM type: YTN; PAM sequence: TTA
tttgtttctatattatgctt

SEQ ID NO: 68807 - DNA, 20 bp, Artificial Sequence
  Description of Artificial Sequence: Synthetic oligonucleotide
  Target: ATXN2; (-) strand; PAM type: YTN; PAM sequence: TTC
attatttgtttctatattat

SEQ ID NO: 68808 - DNA, 20 bp, Artificial Sequence
  Description of Artificial Sequence: Synthetic oligonucleotide
  Target: ATXN2; (-) strand; PAM type: YTN; PAM sequence: TTT
cattatttgtttctatatta

SEQ ID NO: 68809 - DNA, 20 bp, Artificial Sequence
  Description of Artificial Sequence: Synthetic oligonucleotide
  Target: ATXN2; (-) strand; PAM type: YTN; PAM sequence: TTT
tcattatttgtttctatatt

SEQ ID NO: 68810 - DNA, 20 bp, Artificial Sequence
  Description of Artificial Sequence: Synthetic oligonucleotide
  Target: ATXN2; (-) strand; PAM type: YTN; PAM sequence: TTA
atatagatcaattttcatta

SEQ ID NO: 68811 - DNA, 20 bp, Artificial Sequence
  Description of Artificial Sequence: Synthetic oligonucleotide
  Target: ATXN2; (-) strand; PAM type: YTN; PAM sequence: CTG
tggttaatatagatcaattt

SEQ ID NO: 68812 - DNA, 20 bp, Artificial Sequence
  Description of Artificial Sequence: Synthetic oligonucleotide
  Target: ATXN2; (-) strand; PAM type: YTN; PAM sequence: CTA
tgtgcaacactgtggttaat

SEQ ID NO: 68813 - DNA, 20 bp, Artificial Sequence
  Description of Artificial Sequence: Synthetic oligonucleotide
  Target: ATXN2; (-) strand; PAM type: YTN; PAM sequence: CTA
acctatgtgcaacactgtgg

SEQ ID NO: 68814 - DNA, 20 bp, Artificial Sequence
  Description of Artificial Sequence: Synthetic oligonucleotide
  Target: ATXN2; (-) strand; PAM type: YTN; PAM sequence: TTC
taacctatgtgcaacactgt

SEQ ID NO: 68815 - DNA, 20 bp, Artificial Sequence
  Description of Artificial Sequence: Synthetic oligonucleotide
  Target: ATXN2; (-) strand; PAM type: YTN; PAM sequence: TTA
tatggaaaattctaacctat

SEQ ID NO: 68816 - DNA, 20 bp, Artificial Sequence
  Description of Artificial Sequence: Synthetic oligonucleotide
  Target: ATXN2; (-) strand; PAM type: YTN; PAM sequence: TTT
atatggaaaattctaaccta

SEQ ID NO: 68817 - DNA, 20 bp, Artificial Sequence
  Description of Artificial Sequence: Synthetic oligonucleotide
  Target: ATXN2; (-) strand; PAM type: YTN; PAM sequence: TTA
gacataatttatatggaaaa

SEQ ID NO: 68818 - DNA, 20 bp, Artificial Sequence
  Description of Artificial Sequence: Synthetic oligonucleotide
  Target: ATXN2; (-) strand; PAM type: YTN; PAM sequence: TTT
agacataatttatatggaaa

SEQ ID NO: 68819 - DNA, 20 bp, Artificial Sequence
  Description of Artificial Sequence: Synthetic oligonucleotide
  Target: ATXN2; (-) strand; PAM type: YTN; PAM sequence: TTT
tagacataatttatatggaa

SEQ ID NO: 68820 - DNA, 20 bp, Artificial Sequence
  Description of Artificial Sequence: Synthetic oligonucleotide
  Target: ATXN2; (-) strand; PAM type: YTN; PAM sequence: TTT
ttagacataatttatatgga

SEQ ID NO: 68821 - DNA, 20 bp, Artificial Sequence
  Description of Artificial Sequence: Synthetic oligonucleotide
  Target: ATXN2; (-) strand; PAM type: YTN; PAM sequence: TTT
tttagacataatttatatgg

SEQ ID NO: 68822 - DNA, 20 bp, Artificial Sequence
  Description of Artificial Sequence: Synthetic oligonucleotide
  Target: ATXN2; (-) strand; PAM type: YTN; PAM sequence: CTG
gataataaaattttttagac

SEQ ID NO: 68823 - DNA, 20 bp, Artificial Sequence
  Description of Artificial Sequence: Synthetic oligonucleotide
  Target: ATXN2; (-) strand; PAM type: YTN; PAM sequence: TTA
aaaacactggataataaaat

SEQ ID NO: 68824 - DNA, 20 bp, Artificial Sequence
  Description of Artificial Sequence: Synthetic oligonucleotide
  Target: ATXN2; (-) strand; PAM type: YTN; PAM sequence: TTT
aaaaacactggataataaaa

SEQ ID NO: 68825 - DNA, 20 bp, Artificial Sequence
  Description of Artificial Sequence: Synthetic oligonucleotide
  Target: ATXN2; (-) strand; PAM type: YTN; PAM sequence: TTT
taaaaacactggataataaa

SEQ ID NO: 68826 - DNA, 20 bp, Artificial Sequence
  Description of Artificial Sequence: Synthetic oligonucleotide
  Target: ATXN2; (-) strand; PAM type: YTN; PAM sequence: CTC
aattttaaaaacactggata

SEQ ID NO: 68827 - DNA, 20 bp, Artificial Sequence
  Description of Artificial Sequence: Synthetic oligonucleotide
  Target: ATXN2; (-) strand; PAM type: YTN; PAM sequence: TTC
tcaattttaaaaacactgga

SEQ ID NO: 68828 - DNA, 20 bp, Artificial Sequence
  Description of Artificial Sequence: Synthetic oligonucleotide
  Target: ATXN2; (-) strand; PAM type: YTN; PAM sequence: TTG
ggtaggttctcaattttaaa

SEQ ID NO: 68829 - DNA, 20 bp, Artificial Sequence
  Description of Artificial Sequence: Synthetic oligonucleotide
  Target: ATXN2; (-) strand; PAM type: YTN; PAM sequence: TTT
gggtaggttctcaattttaa

SEQ ID NO: 68830 - DNA, 20 bp, Artificial Sequence
  Description of Artificial Sequence: Synthetic oligonucleotide
  Target: ATXN2; (-) strand; PAM type: YTN; PAM sequence: CTT
tgggtaggttctcaatttta

SEQ ID NO: 68831 - DNA, 20 bp, Artificial Sequence
  Description of Artificial Sequence: Synthetic oligonucleotide
  Target: ATXN2; (-) strand; PAM type: YTN; PAM sequence: TTG
gaaactttgggtaggttctc

SEQ ID NO: 68832 - DNA, 20 bp, Artificial Sequence
  Description of Artificial Sequence: Synthetic oligonucleotide
  Target: ATXN2; (-) strand; PAM type: YTN; PAM sequence: TTC
acatataaagaaattggaaa

SEQ ID NO: 68833 - DNA, 20 bp, Artificial Sequence
  Description of Artificial Sequence: Synthetic oligonucleotide
  Target: ATXN2; (-) strand; PAM type: YTN; PAM sequence: CTT
cacatataaagaaattggaa

SEQ ID NO: 68834 - DNA, 20 bp, Artificial Sequence
  Description of Artificial Sequence: Synthetic oligonucleotide
  Target: ATXN2; (-) strand; PAM type: YTN; PAM sequence: TTG
gccaaaaacacttcacatat

SEQ ID NO: 68835 - DNA, 20 bp, Artificial Sequence
  Description of Artificial Sequence: Synthetic oligonucleotide
  Target: ATXN2; (-) strand; PAM type: YTN; PAM sequence: CTT
ggccaaaaacacttcacata

SEQ ID NO: 68836 - DNA, 20 bp, Artificial Sequence
  Description of Artificial Sequence: Synthetic oligonucleotide
  Target: ATXN2; (-) strand; PAM type: YTN; PAM sequence: TTA
acccaagacaatcacttggc

SEQ ID NO: 68837 - DNA, 20 bp, Artificial Sequence
  Description of Artificial Sequence: Synthetic oligonucleotide
  Target: ATXN2; (-) strand; PAM type: YTN; PAM sequence: TTT
aacccaagacaatcacttgg

SEQ ID NO: 68838 - DNA, 20 bp, Artificial Sequence
  Description of Artificial Sequence: Synthetic oligonucleotide
  Target: ATXN2; (-) strand; PAM type: YTN; PAM sequence: CTA
catttaacccaagacaatca

SEQ ID NO: 68839 - DNA, 20 bp, Artificial Sequence
  Description of Artificial Sequence: Synthetic oligonucleotide
  Target: ATXN2; (-) strand; PAM type: YTN; PAM sequence: CTA
agataaagtgctacatttaa

SEQ ID NO: 68840 - DNA, 20 bp, Artificial Sequence
  Description of Artificial Sequence: Synthetic oligonucleotide
  Target: ATXN2; (-) strand; PAM type: YTN; PAM sequence: TTC
atgatgtactaagataaagt

SEQ ID NO: 68841 - DNA, 20 bp, Artificial Sequence
  Description of Artificial Sequence: Synthetic oligonucleotide
  Target: ATXN2; (-) strand; PAM type: YTN; PAM sequence: TTA
gcatgatgaaatattcatga

SEQ ID NO: 68842 - DNA, 20 bp, Artificial Sequence
  Description of Artificial Sequence: Synthetic oligonucleotide
  Target: ATXN2; (-) strand; PAM type: YTN; PAM sequence: TTT
agcatgatgaaatattcatg

SEQ ID NO: 68843 - DNA, 20 bp, Artificial Sequence
  Description of Artificial Sequence: Synthetic oligonucleotide
  Target: ATXN2; (-) strand; PAM type: YTN; PAM sequence: TTA
tttagcatgatgaaatattc

SEQ ID NO: 68844 - DNA, 20 bp, Artificial Sequence
  Description of Artificial Sequence: Synthetic oligonucleotide
  Target: ATXN2; (-) strand; PAM type: YTN; PAM sequence: TTG
acatatatattatttagcat

SEQ ID NO: 68845 - DNA, 20 bp, Artificial Sequence
  Description of Artificial Sequence: Synthetic oligonucleotide
  Target: ATXN2; (-) strand; PAM type: YTN; PAM sequence: TTG
tatatgtcattgacatatat

SEQ ID NO: 68846 - DNA, 20 bp, Artificial Sequence
  Description of Artificial Sequence: Synthetic oligonucleotide
  Target: ATXN2; (-) strand; PAM type: YTN; PAM sequence: TTA
gtaaaacattgtatatgtca

SEQ ID NO: 68847 - DNA, 20 bp, Artificial Sequence
  Description of Artificial Sequence: Synthetic oligonucleotide
  Target: ATXN2; (-) strand; PAM type: YTN; PAM sequence: TTA
aattagtaaaacattgtata

SEQ ID NO: 68848 - DNA, 20 bp, Artificial Sequence
  Description of Artificial Sequence: Synthetic oligonucleotide
  Target: ATXN2; (-) strand; PAM type: YTN; PAM sequence: TTG
tggatattaaattagtaaaa

SEQ ID NO: 68849 - DNA, 20 bp, Artificial Sequence
  Description of Artificial Sequence: Synthetic oligonucleotide
  Target: ATXN2; (-) strand; PAM type: YTN; PAM sequence: TTT
gtggatattaaattagtaaa

SEQ ID NO: 68850 - DNA, 20 bp, Artificial Sequence
  Description of Artificial Sequence: Synthetic oligonucleotide
  Target: ATXN2; (-) strand; PAM type: YTN; PAM sequence: TTT
tgtggatattaaattagtaa

SEQ ID NO: 68851 - DNA, 20 bp, Artificial Sequence
  Description of Artificial Sequence: Synthetic oligonucleotide
  Target: ATXN2; (-) strand; PAM type: YTN; PAM sequence: CTT
ttgtggatattaaattagta

SEQ ID NO: 68852 - DNA, 20 bp, Artificial Sequence
  Description of Artificial Sequence: Synthetic oligonucleotide
  Target: ATXN2; (-) strand; PAM type: YTN; PAM sequence: TTG
gcttttgtggatattaaatt

SEQ ID NO: 68853 - DNA, 20 bp, Artificial Sequence
  Description of Artificial Sequence: Synthetic oligonucleotide
  Target: ATXN2; (-) strand; PAM type: YTN; PAM sequence: TTA
aaattggcttttgtggatat

SEQ ID NO: 68854 - DNA, 20 bp, Artificial Sequence
  Description of Artificial Sequence: Synthetic oligonucleotide
  Target: ATXN2; (-) strand; PAM type: YTN; PAM sequence: CTT
aaaattggcttttgtggata

SEQ ID NO: 68855 - DNA, 20 bp, Artificial Sequence
  Description of Artificial Sequence: Synthetic oligonucleotide
  Target: ATXN2; (-) strand; PAM type: YTN; PAM sequence: TTA
cttaaaattggcttttgtgg

SEQ ID NO: 68856 - DNA, 20 bp, Artificial Sequence
  Description of Artificial Sequence: Synthetic oligonucleotide
  Target: ATXN2; (-) strand; PAM type: YTN; PAM sequence: TTC
agcattacttaaaattggct

SEQ ID NO: 68857 - DNA, 20 bp, Artificial Sequence
  Description of Artificial Sequence: Synthetic oligonucleotide
  Target: ATXN2; (-) strand; PAM type: YTN; PAM sequence: CTT
cagcattacttaaaattggc

SEQ ID NO: 68858 - DNA, 20 bp, Artificial Sequence
  Description of Artificial Sequence: Synthetic oligonucleotide
  Target: ATXN2; (-) strand; PAM type: YTN; PAM sequence: TTC
acttcagcattacttaaaat

SEQ ID NO: 68859 - DNA, 20 bp, Artificial Sequence
  Description of Artificial Sequence: Synthetic oligonucleotide
  Target: ATXN2; (-) strand; PAM type: YTN; PAM sequence: TTT
cacttcagcattacttaaaa

SEQ ID NO: 68860 - DNA, 20 bp, Artificial Sequence
  Description of Artificial Sequence: Synthetic oligonucleotide
  Target: ATXN2; (-) strand; PAM type: YTN; PAM sequence: CTT
tcacttcagcattacttaaa

SEQ ID NO: 68861 - DNA, 20 bp, Artificial Sequence
  Description of Artificial Sequence: Synthetic oligonucleotide
  Target: ATXN2; (-) strand; PAM type: YTN; PAM sequence: TTG
gtgagtagctttcacttcag

SEQ ID NO: 68862 - DNA, 20 bp, Artificial Sequence
  Description of Artificial Sequence: Synthetic oligonucleotide
  Target: ATXN2; (-) strand; PAM type: YTN; PAM sequence: TTT
ggtgagtagctttcacttca

SEQ ID NO: 68863 - DNA, 20 bp, Artificial Sequence
  Description of Artificial Sequence: Synthetic oligonucleotide
  Target: ATXN2; (-) strand; PAM type: YTN; PAM sequence: TTA
atgatttggtgagtagcttt

SEQ ID NO: 68864 - DNA, 20 bp, Artificial Sequence
  Description of Artificial Sequence: Synthetic oligonucleotide
  Target: ATXN2; (-) strand; PAM type: YTN; PAM sequence: TTT
aatgatttggtgagtagctt

SEQ ID NO: 68865 - DNA, 20 bp, Artificial Sequence
  Description of Artificial Sequence: Synthetic oligonucleotide
  Target: ATXN2; (-) strand; PAM type: YTN; PAM sequence: CTT
taatgatttggtgagtagct

SEQ ID NO: 68866 - DNA, 20 bp, Artificial Sequence
  Description of Artificial Sequence: Synthetic oligonucleotide
  Target: ATXN2; (-) strand; PAM type: YTN; PAM sequence: CTG
atatgaatgtgcactttaat

SEQ ID NO: 68867 - DNA, 20 bp, Artificial Sequence
  Description of Artificial Sequence: Synthetic oligonucleotide
  Target: ATXN2; (-) strand; PAM type: YTN; PAM sequence: TTA
cataactgatatgaatgtgc

SEQ ID NO: 68868 - DNA, 20 bp, Artificial Sequence
  Description of Artificial Sequence: Synthetic oligonucleotide
  Target: ATXN2; (-) strand; PAM type: YTN; PAM sequence: TTT
acataactgatatgaatgtg

SEQ ID NO: 68869 - DNA, 20 bp, Artificial Sequence
  Description of Artificial Sequence: Synthetic oligonucleotide
  Target: ATXN2; (-) strand; PAM type: YTN; PAM sequence: TTA
aaatagtttacataactgat

SEQ ID NO: 68870 - DNA, 20 bp, Artificial Sequence
  Description of Artificial Sequence: Synthetic oligonucleotide
  Target: ATXN2; (-) strand; PAM type: YTN; PAM sequence: CTT
aaaatagtttacataactga

SEQ ID NO: 68871 - DNA, 20 bp, Artificial Sequence
  Description of Artificial Sequence: Synthetic oligonucleotide
  Target: ATXN2; (-) strand; PAM type: YTN; PAM sequence: TTA
aaatacttaaaatagtttac

SEQ ID NO: 68872 - DNA, 20 bp, Artificial Sequence
  Description of Artificial Sequence: Synthetic oligonucleotide
  Target: ATXN2; (-) strand; PAM type: YTN; PAM sequence: CTT
aaaatacttaaaatagttta

SEQ ID NO: 68873 - DNA, 20 bp, Artificial Sequence
  Description of Artificial Sequence: Synthetic oligonucleotide
  Target: ATXN2; (-) strand; PAM type: YTN; PAM sequence: CTA
aatacttaaaatacttaaaa

SEQ ID NO: 68874 - DNA, 20 bp, Artificial Sequence
  Description of Artificial Sequence: Synthetic oligonucleotide
  Target: ATXN2; (-) strand; PAM type: YTN; PAM sequence: TTC
taaatacttaaaatacttaa

SEQ ID NO: 68875 - DNA, 20 bp, Artificial Sequence
  Description of Artificial Sequence: Synthetic oligonucleotide
  Target: ATXN2; (-) strand; PAM type: YTN; PAM sequence: TTT
ctaaatacttaaaatactta

SEQ ID NO: 68876 - DNA, 20 bp, Artificial Sequence
  Description of Artificial Sequence: Synthetic oligonucleotide
  Target: ATXN2; (-) strand; PAM type: YTN; PAM sequence: TTT
tctaaatacttaaaatactt

SEQ ID NO: 68877 - DNA, 20 bp, Artificial Sequence
  Description of Artificial Sequence: Synthetic oligonucleotide
  Target: ATXN2; (-) strand; PAM type: YTN; PAM sequence: TTG
ataaaatagttttctaaata

SEQ ID NO: 68878 - DNA, 20 bp, Artificial Sequence
  Description of Artificial Sequence: Synthetic oligonucleotide
  Target: ATXN2; (-) strand; PAM type: YTN; PAM sequence: TTG
tcaatatcattgataaaata

SEQ ID NO: 68879 - DNA, 20 bp, Artificial Sequence
  Description of Artificial Sequence: Synthetic oligonucleotide
  Target: ATXN2; (-) strand; PAM type: YTN; PAM sequence: CTT
gtcaatatcattgataaaat

SEQ ID NO: 68880 - DNA, 20 bp, Artificial Sequence
  Description of Artificial Sequence: Synthetic oligonucleotide
  Target: ATXN2; (-) strand; PAM type: YTN; PAM sequence: TTG
accagacttgtcaatatcat

SEQ ID NO: 68881 - DNA, 20 bp, Artificial Sequence
  Description of Artificial Sequence: Synthetic oligonucleotide
  Target: ATXN2; (-) strand; PAM type: YTN; PAM sequence: TTT
gaccagacttgtcaatatca

SEQ ID NO: 68882 - DNA, 20 bp, Artificial Sequence
  Description of Artificial Sequence: Synthetic oligonucleotide
  Target: ATXN2; (-) strand; PAM type: YTN; PAM sequence: TTT
tgaccagacttgtcaatatc

SEQ ID NO: 68883 - DNA, 20 bp, Artificial Sequence
  Description of Artificial Sequence: Synthetic oligonucleotide
  Target: ATXN2; (-) strand; PAM type: YTN; PAM sequence: TTA
atggaggcaagtattttgac

SEQ ID NO: 68884 - DNA, 20 bp, Artificial Sequence
  Description of Artificial Sequence: Synthetic oligonucleotide
  Target: ATXN2; (-) strand; PAM type: YTN; PAM sequence: TTC
agaccaaagagtagttaatg

SEQ ID NO: 68885 - DNA, 20 bp, Artificial Sequence
  Description of Artificial Sequence: Synthetic oligonucleotide
  Target: ATXN2; (-) strand; PAM type: YTN; PAM sequence: CTG
gttcagaccaaagagtagtt

SEQ ID NO: 68886 - DNA, 20 bp, Artificial Sequence
  Description of Artificial Sequence: Synthetic oligonucleotide
  Target: ATXN2; (-) strand; PAM type: YTN; PAM sequence: TTC
tggttcagaccaaagagtag

SEQ ID NO: 68887 - DNA, 20 bp, Artificial Sequence
  Description of Artificial Sequence: Synthetic oligonucleotide
  Target: ATXN2; (-) strand; PAM type: YTN; PAM sequence: TTC
aacccgaattctggttcaga

SEQ ID NO: 68888 - DNA, 20 bp, Artificial Sequence
  Description of Artificial Sequence: Synthetic oligonucleotide
  Target: ATXN2; (-) strand; PAM type: YTN; PAM sequence: TTT
caacccgaattctggttcag

SEQ ID NO: 68889 - DNA, 20 bp, Artificial Sequence
  Description of Artificial Sequence: Synthetic oligonucleotide
  Target: ATXN2; (-) strand; PAM type: YTN; PAM sequence: TTC
agatttcaacccgaattctg

SEQ ID NO: 68890 - DNA, 20 bp, Artificial Sequence
  Description of Artificial Sequence: Synthetic oligonucleotide
  Target: ATXN2; (-) strand; PAM type: YTN; PAM sequence: CTT
cagatttcaacccgaattct

SEQ ID NO: 68891 - DNA, 20 bp, Artificial Sequence
  Description of Artificial Sequence: Synthetic oligonucleotide
  Target: ATXN2; (-) strand; PAM type: YTN; PAM sequence: CTC
acacttcagatttcaacccg

SEQ ID NO: 68892 - DNA, 20 bp, Artificial Sequence
  Description of Artificial Sequence: Synthetic oligonucleotide
  Target: ATXN2; (-) strand; PAM type: YTN; PAM sequence: TTC
tcacacttcagatttcaacc

SEQ ID NO: 68893 - DNA, 20 bp, Artificial Sequence
  Description of Artificial Sequence: Synthetic oligonucleotide
  Target: ATXN2; (-) strand; PAM type: YTN; PAM sequence: CTT
ctcacacttcagatttcaac

SEQ ID NO: 68894 - DNA, 20 bp, Artificial Sequence
  Description of Artificial Sequence: Synthetic oligonucleotide
  Target: ATXN2; (-) strand; PAM type: YTN; PAM sequence: CTC
catgccatcaagatccactt

SEQ ID NO: 68895 - DNA, 20 bp, Artificial Sequence
  Description of Artificial Sequence: Synthetic oligonucleotide
  Target: ATXN2; (-) strand; PAM type: YTN; PAM sequence: CTG
gatcgggctccatgccatca

SEQ ID NO: 68896 - DNA, 20 bp, Artificial Sequence
  Description of Artificial Sequence: Synthetic oligonucleotide
  Target: ATXN2; (-) strand; PAM type: YTN; PAM sequence: TTC
accgcgtatgggccagcctg

SEQ ID NO: 68897 - DNA, 20 bp, Artificial Sequence
  Description of Artificial Sequence: Synthetic oligonucleotide
  Target: ATXN2; (-) strand; PAM type: YTN; PAM sequence: CTG
gggaagtgggagacagaatt

SEQ ID NO: 68898 - DNA, 20 bp, Artificial Sequence
  Description of Artificial Sequence: Synthetic oligonucleotide
  Target: ATXN2; (-) strand; PAM type: YTN; PAM sequence: CTG
gacaaagaaatagagaagtc

SEQ ID NO: 68899 - DNA, 20 bp, Artificial Sequence
  Description of Artificial Sequence: Synthetic oligonucleotide
  Target: ATXN2; (-) strand; PAM type: YTN; PAM sequence: CTC
ctggacaaagaaatagagaa

SEQ ID NO: 68900 - DNA, 20 bp, Artificial Sequence
  Description of Artificial Sequence: Synthetic oligonucleotide
  Target: ATXN2; (-) strand; PAM type: YTN; PAM sequence: TTC
ctcctggacaaagaaataga

SEQ ID NO: 68901 - DNA, 20 bp, Artificial Sequence
  Description of Artificial Sequence: Synthetic oligonucleotide
  Target: ATXN2; (-) strand; PAM type: YTN; PAM sequence: TTC
agggaaaataaatatattcc

SEQ ID NO: 68902 - DNA, 20 bp, Artificial Sequence
  Description of Artificial Sequence: Synthetic oligonucleotide
  Target: ATXN2; (-) strand; PAM type: YTN; PAM sequence: TTT
cagggaaaataaatatattc

SEQ ID NO: 68903 - DNA, 20 bp, Artificial Sequence
  Description of Artificial Sequence: Synthetic oligonucleotide
  Target: ATXN2; (-) strand; PAM type: YTN; PAM sequence: TTT
tcagggaaaataaatatatt

SEQ ID NO: 68904 - DNA, 20 bp, Artificial Sequence
  Description of Artificial Sequence: Synthetic oligonucleotide
  Target: ATXN2; (-) strand; PAM type: YTN; PAM sequence: CTC
attttcagggaaaataaata

SEQ ID NO: 68905 - DNA, 20 bp, Artificial Sequence
  Description of Artificial Sequence: Synthetic oligonucleotide
  Target: ATXN2; (-) strand; PAM type: YTN; PAM sequence: CTC
tcattttcagggaaaataaa

SEQ ID NO: 68906 - DNA, 20 bp, Artificial Sequence
  Description of Artificial Sequence: Synthetic oligonucleotide
  Target: ATXN2; (-) strand; PAM type: YTN; PAM sequence: TTA
gaggatctctcattttcagg

SEQ ID NO: 68907 - DNA, 20 bp, Artificial Sequence
  Description of Artificial Sequence: Synthetic oligonucleotide
  Target: ATXN2; (-) strand; PAM type: YTN; PAM sequence: TTT
agaggatctctcattttcag

SEQ ID NO: 68908 - DNA, 20 bp, Artificial Sequence
  Description of Artificial Sequence: Synthetic oligonucleotide
  Target: ATXN2; (-) strand; PAM type: YTN; PAM sequence: TTA
gaataaaatgatttagagga

SEQ ID NO: 68909 - DNA, 20 bp, Artificial Sequence
  Description of Artificial Sequence: Synthetic oligonucleotide
  Target: ATXN2; (-) strand; PAM type: YTN; PAM sequence: TTT
agaataaaatgatttagagg

SEQ ID NO: 68910 - DNA, 20 bp, Artificial Sequence
  Description of Artificial Sequence: Synthetic oligonucleotide
  Target: ATXN2; (-) strand; PAM type: YTN; PAM sequence: TTT
tagaataaaatgatttagag

SEQ ID NO: 68911 - DNA, 20 bp, Artificial Sequence
  Description of Artificial Sequence: Synthetic oligonucleotide
  Target: ATXN2; (-) strand; PAM type: YTN; PAM sequence: CTT
ttagaataaaatgatttaga

SEQ ID NO: 68912 - DNA, 20 bp, Artificial Sequence
  Description of Artificial Sequence: Synthetic oligonucleotide
  Target: ATXN2; (-) strand; PAM type: YTN; PAM sequence: TTG
gtaccttttagaataaaatg

SEQ ID NO: 68913 - DNA, 20 bp, Artificial Sequence
  Description of Artificial Sequence: Synthetic oligonucleotide
  Target: ATXN2; (-) strand; PAM type: YTN; PAM sequence: CTT
ggtaccttttagaataaaat

SEQ ID NO: 68914 - DNA, 20 bp, Artificial Sequence
  Description of Artificial Sequence: Synthetic oligonucleotide
  Target: ATXN2; (-) strand; PAM type: YTN; PAM sequence: TTG
gcttggtaccttttagaata

SEQ ID NO: 68915 - DNA, 20 bp, Artificial Sequence
  Description of Artificial Sequence: Synthetic oligonucleotide
  Target: ATXN2; (-) strand; PAM type: YTN; PAM sequence: TTC
attggcttggtaccttttag

SEQ ID NO: 68916 - DNA, 20 bp, Artificial Sequence
  Description of Artificial Sequence: Synthetic oligonucleotide
  Target: ATXN2; (-) strand; PAM type: YTN; PAM sequence: TTT
cattggcttggtacctttta

SEQ ID NO: 68917 - DNA, 20 bp, Artificial Sequence
  Description of Artificial Sequence: Synthetic oligonucleotide
  Target: ATXN2; (-) strand; PAM type: YTN; PAM sequence: TTA
gatatgtttcattggcttgg

SEQ ID NO: 68918 - DNA, 20 bp, Artificial Sequence
  Description of Artificial Sequence: Synthetic oligonucleotide
  Target: ATXN2; (-) strand; PAM type: YTN; PAM sequence: TTT
agatatgtttcattggcttg

SEQ ID NO: 68919 - DNA, 20 bp, Artificial Sequence
  Description of Artificial Sequence: Synthetic oligonucleotide
  Target: ATXN2; (-) strand; PAM type: YTN; PAM sequence: TTT
tagatatgtttcattggctt

SEQ ID NO: 68920 - DNA, 20 bp, Artificial Sequence
  Description of Artificial Sequence: Synthetic oligonucleotide
  Target: ATXN2; (-) strand; PAM type: YTN; PAM sequence: CTT
ttagatatgtttcattggct

SEQ ID NO: 68921 - DNA, 20 bp, Artificial Sequence
  Description of Artificial Sequence: Synthetic oligonucleotide
  Target: ATXN2; (-) strand; PAM type: YTN; PAM sequence: CTA
gatgacttttagatatgttt

SEQ ID NO: 68922 - DNA, 20 bp, Artificial Sequence
  Description of Artificial Sequence: Synthetic oligonucleotide
  Target: ATXN2; (-) strand; PAM type: YTN; PAM sequence: CTG
tctagatgacttttagatat

SEQ ID NO: 68923 - DNA, 20 bp, Artificial Sequence
  Description of Artificial Sequence: Synthetic oligonucleotide
  Target: ATXN2; (-) strand; PAM type: YTN; PAM sequence: TTC
tgtctagatgacttttagat

SEQ ID NO: 68924 - DNA, 20 bp, Artificial Sequence
  Description of Artificial Sequence: Synthetic oligonucleotide
  Target: ATXN2; (-) strand; PAM type: YTN; PAM sequence: CTT
ctgtctagatgacttttaga

SEQ ID NO: 68925 - DNA, 20 bp, Artificial Sequence
  Description of Artificial Sequence: Synthetic oligonucleotide
  Target: ATXN2; (-) strand; PAM type: YTN; PAM sequence: TTC
ccttctgtctagatgacttt

SEQ ID NO: 68926 - DNA, 20 bp, Artificial Sequence
  Description of Artificial Sequence: Synthetic oligonucleotide
  Target: ATXN2; (-) strand; PAM type: YTN; PAM sequence: TTG
taacaagcattcccttctgt

SEQ ID NO: 68927 - DNA, 20 bp, Artificial Sequence
  Description of Artificial Sequence: Synthetic oligonucleotide
  Target: ATXN2; (-) strand; PAM type: YTN; PAM sequence: TTT
gtaacaagcattcccttctg

SEQ ID NO: 68928 - DNA, 20 bp, Artificial Sequence
  Description of Artificial Sequence: Synthetic oligonucleotide
  Target: ATXN2; (-) strand; PAM type: YTN; PAM sequence: TTT
tgtaacaagcattcccttct

SEQ ID NO: 68929 - DNA, 20 bp, Artificial Sequence
  Description of Artificial Sequence: Synthetic oligonucleotide
  Target: ATXN2; (-) strand; PAM type: YTN; PAM sequence: TTT
ttgtaacaagcattcccttc

SEQ ID NO: 68930 - DNA, 20 bp, Artificial Sequence
  Description of Artificial Sequence: Synthetic oligonucleotide
  Target: ATXN2; (-) strand; PAM type: YTN; PAM sequence: CTT
tttgtaacaagcattccctt

SEQ ID NO: 68931 - DNA, 20 bp, Artificial Sequence
  Description of Artificial Sequence: Synthetic oligonucleotide
  Target: ATXN2; (-) strand; PAM type: YTN; PAM sequence: TTA
gtgtagaacctttttgtaac

SEQ ID NO: 68932 - DNA, 20 bp, Artificial Sequence
  Description of Artificial Sequence: Synthetic oligonucleotide
  Target: ATXN2; (-) strand; PAM type: YTN; PAM sequence: TTT
agtgtagaacctttttgtaa

SEQ ID NO: 68933 - DNA, 20 bp, Artificial Sequence
  Description of Artificial Sequence: Synthetic oligonucleotide
  Target: ATXN2; (-) strand; PAM type: YTN; PAM sequence: TTG
gtttagtgtagaaccttttt

SEQ ID NO: 68934 - DNA, 20 bp, Artificial Sequence
  Description of Artificial Sequence: Synthetic oligonucleotide
  Target: ATXN2; (-) strand; PAM type: YTN; PAM sequence: TTT
ggtttagtgtagaacctttt

SEQ ID NO: 68935 - DNA, 20 bp, Artificial Sequence
  Description of Artificial Sequence: Synthetic oligonucleotide
  Target: ATXN2; (-) strand; PAM type: YTN; PAM sequence: CTG
ggagtgaggcagtttggttt

SEQ ID NO: 68936 - DNA, 20 bp, Artificial Sequence
  Description of Artificial Sequence: Synthetic oligonucleotide
  Target: ATXN2; (-) strand; PAM type: YTN; PAM sequence: CTC
agggtaagatggaagaacag

SEQ ID NO: 68937 - DNA, 20 bp, Artificial Sequence
  Description of Artificial Sequence: Synthetic oligonucleotide
  Target: ATXN2; (-) strand; PAM type: YTN; PAM sequence: TTA
gaactcagggtaagatggaa

SEQ ID NO: 68938 - DNA, 20 bp, Artificial Sequence
  Description of Artificial Sequence: Synthetic oligonucleotide
  Target: ATXN2; (-) strand; PAM type: YTN; PAM sequence: CTA
agggaagggacagtccagag

SEQ ID NO: 68939 - DNA, 20 bp, Artificial Sequence
  Description of Artificial Sequence: Synthetic oligonucleotide
  Target: ATXN2; (-) strand; PAM type: YTN; PAM sequence: TTA
ggagcagaatctaagggaag

SEQ ID NO: 68940 - DNA, 20 bp, Artificial Sequence
  Description of Artificial Sequence: Synthetic oligonucleotide
  Target: ATXN2; (-) strand; PAM type: YTN; PAM sequence: CTT
aggagcagaatctaagggaa

SEQ ID NO: 68941 - DNA, 20 bp, Artificial Sequence
  Description of Artificial Sequence: Synthetic oligonucleotide
  Target: ATXN2; (-) strand; PAM type: YTN; PAM sequence: TTG
tgcttaggagcagaatctaa

SEQ ID NO: 68942 - DNA, 20 bp, Artificial Sequence
  Description of Artificial Sequence: Synthetic oligonucleotide
  Target: ATXN2; (-) strand; PAM type: YTN; PAM sequence: TTT
gtgcttaggagcagaatcta

SEQ ID NO: 68943 - DNA, 20 bp, Artificial Sequence
  Description of Artificial Sequence: Synthetic oligonucleotide
  Target: ATXN2; (-) strand; PAM type: YTN; PAM sequence: CTT
tgtgcttaggagcagaatct

SEQ ID NO: 68944 - DNA, 20 bp, Artificial Sequence
  Description of Artificial Sequence: Synthetic oligonucleotide
  Target: ATXN2; (-) strand; PAM type: YTN; PAM sequence: TTA
aactttgtgcttaggagcag

SEQ ID NO: 68945 - DNA, 20 bp, Artificial Sequence
  Description of Artificial Sequence: Synthetic oligonucleotide
  Target: ATXN2; (-) strand; PAM type: YTN; PAM sequence: CTG
ttaaactttgtgcttaggag

SEQ ID NO: 68946 - DNA, 20 bp, Artificial Sequence
  Description of Artificial Sequence: Synthetic oligonucleotide
  Target: ATXN2; (-) strand; PAM type: YTN; PAM sequence: TTG
atggaatcagccatagagag

SEQ ID NO: 68947 - DNA, 20 bp, Artificial Sequence
  Description of Artificial Sequence: Synthetic oligonucleotide
  Target: ATXN2; (-) strand; PAM type: YTN; PAM sequence: TTG
tgaagatagaccaagattga

SEQ ID NO: 68948 - DNA, 20 bp, Artificial Sequence
  Description of Artificial Sequence: Synthetic oligonucleotide
  Target: ATXN2; (-) strand; PAM type: YTN; PAM sequence: TTG
agaaagtgaaggacaaaaaa

SEQ ID NO: 68949 - DNA, 20 bp, Artificial Sequence
  Description of Artificial Sequence: Synthetic oligonucleotide
  Target: ATXN2; (-) strand; PAM type: YTN; PAM sequence: CTC
agagaaaataaaattgagaa

SEQ ID NO: 68950 - DNA, 20 bp, Artificial Sequence
  Description of Artificial Sequence: Synthetic oligonucleotide
  Target: ATXN2; (-) strand; PAM type: YTN; PAM sequence: TTG
gagccatgaaaaaccaaaga

SEQ ID NO: 68951 - DNA, 20 bp, Artificial Sequence
  Description of Artificial Sequence: Synthetic oligonucleotide
  Target: ATXN2; (-) strand; PAM type: YTN; PAM sequence: TTG
ccgatattggagccatgaaa

SEQ ID NO: 68952 - DNA, 20 bp, Artificial Sequence
  Description of Artificial Sequence: Synthetic oligonucleotide
  Target: ATXN2; (-) strand; PAM type: YTN; PAM sequence: TTC
atcagcattgccgatattgg

SEQ ID NO: 68953 - DNA, 20 bp, Artificial Sequence
  Description of Artificial Sequence: Synthetic oligonucleotide
  Target: ATXN2; (-) strand; PAM type: YTN; PAM sequence: TTT
catcagcattgccgatattg

SEQ ID NO: 68954 - DNA, 20 bp, Artificial Sequence
  Description of Artificial Sequence: Synthetic oligonucleotide
  Target: ATXN2; (-) strand; PAM type: YTN; PAM sequence: TTG
aggtttcatcagcattgccg

SEQ ID NO: 68955 - DNA, 20 bp, Artificial Sequence
  Description of Artificial Sequence: Synthetic oligonucleotide
  Target: ATXN2; (-) strand; PAM type: YTN; PAM sequence: TTT
gaggtttcatcagcattgcc

SEQ ID NO: 68956 - DNA, 20 bp, Artificial Sequence
  Description of Artificial Sequence: Synthetic oligonucleotide
  Target: ATXN2; (-) strand; PAM type: YTN; PAM sequence: TTC
agtttgaggtttcatcagca

SEQ ID NO: 68957 - DNA, 20 bp, Artificial Sequence
  Description of Artificial Sequence: Synthetic oligonucleotide
  Target: ATXN2; (-) strand; PAM type: YTN; PAM sequence: CTG
gcggttcagtttgaggtttc

SEQ ID NO: 68958 - DNA, 20 bp, Artificial Sequence
  Description of Artificial Sequence: Synthetic oligonucleotide
  Target: ATXN2; (-) strand; PAM type: YTN; PAM sequence: CTG
tgagactggcggttcagttt

SEQ ID NO: 68959 - DNA, 20 bp, Artificial Sequence
  Description of Artificial Sequence: Synthetic oligonucleotide
  Target: ATXN2; (-) strand; PAM type: YTN; PAM sequence: TTG
acactgtgagactggcggtt

SEQ ID NO: 68960 - DNA, 20 bp, Artificial Sequence
  Description of Artificial Sequence: Synthetic oligonucleotide
  Target: ATXN2; (-) strand; PAM type: YTN; PAM sequence: CTG
atagatgttgacactgtgag

SEQ ID NO: 68961 - DNA, 20 bp, Artificial Sequence
  Description of Artificial Sequence: Synthetic oligonucleotide
  Target: ATXN2; (-) strand; PAM type: YTN; PAM sequence: TTG
acatgtccactgatagatgt

SEQ ID NO: 68962 - DNA, 20 bp, Artificial Sequence
  Description of Artificial Sequence: Synthetic oligonucleotide
  Target: ATXN2; (-) strand; PAM type: YTN; PAM sequence: TTG
aattgacatgtccactgata

SEQ ID NO: 68963 - DNA, 20 bp, Artificial Sequence
  Description of Artificial Sequence: Synthetic oligonucleotide
  Target: ATXN2; (-) strand; PAM type: YTN; PAM sequence: TTT
gaattgacatgtccactgat

SEQ ID NO: 68964 - DNA, 20 bp, Artificial Sequence
  Description of Artificial Sequence: Synthetic oligonucleotide
  Target: ATXN2; (-) strand; PAM type: YTN; PAM sequence: CTG
gtgatttgaattgacatgtc

SEQ ID NO: 68965 - DNA, 20 bp, Artificial Sequence
  Description of Artificial Sequence: Synthetic oligonucleotide
  Target: ATXN2; (-) strand; PAM type: YTN; PAM sequence: TTA
gagtctggtgatttgaattg

SEQ ID NO: 68966 - DNA, 20 bp, Artificial Sequence
  Description of Artificial Sequence: Synthetic oligonucleotide
  Target: ATXN2; (-) strand; PAM type: YTN; PAM sequence: CTT
agagtctggtgatttgaatt

SEQ ID NO: 68967 - DNA, 20 bp, Artificial Sequence
  Description of Artificial Sequence: Synthetic oligonucleotide
  Target: ATXN2; (-) strand; PAM type: YTN; PAM sequence: TTA
aaggcagtcagcttagagtc

SEQ ID NO: 68968 - DNA, 20 bp, Artificial Sequence
  Description of Artificial Sequence: Synthetic oligonucleotide
  Target: ATXN2; (-) strand; PAM type: YTN; PAM sequence: CTT
aaaggcagtcagcttagagt

SEQ ID NO: 68969 - DNA, 20 bp, Artificial Sequence
  Description of Artificial Sequence: Synthetic oligonucleotide
  Target: ATXN2; (-) strand; PAM type: YTN; PAM sequence: CTC
ttaaaggcagtcagcttaga

SEQ ID NO: 68970 - DNA, 20 bp, Artificial Sequence
  Description of Artificial Sequence: Synthetic oligonucleotide
  Target: ATXN2; (-) strand; PAM type: YTN; PAM sequence: CTC
tcttaaaggcagtcagctta

SEQ ID NO: 68971 - DNA, 20 bp, Artificial Sequence
  Description of Artificial Sequence: Synthetic oligonucleotide
  Target: ATXN2; (-) strand; PAM type: YTN; PAM sequence: CTA
gtaaagtaagagatgcatcc

SEQ ID NO: 68972 - DNA, 20 bp, Artificial Sequence
  Description of Artificial Sequence: Synthetic oligonucleotide
  Target: ATXN2; (-) strand; PAM type: YTN; PAM sequence: CTA
tctagtaaagtaagagatgc

SEQ ID NO: 68973 - DNA, 20 bp, Artificial Sequence
  Description of Artificial Sequence: Synthetic oligonucleotide
  Target: ATXN2; (-) strand; PAM type: YTN; PAM sequence: CTA
cctatctagtaaagtaagag

SEQ ID NO: 68974 - DNA, 20 bp, Artificial Sequence
  Description of Artificial Sequence: Synthetic oligonucleotide
  Target: ATXN2; (-) strand; PAM type: YTN; PAM sequence: CTG
ctacctatctagtaaagtaa

SEQ ID NO: 68975 - DNA, 20 bp, Artificial Sequence
  Description of Artificial Sequence: Synthetic oligonucleotide
  Target: ATXN2; (-) strand; PAM type: YTN; PAM sequence: TTG
agaaatacctgctacctatc

SEQ ID NO: 68976 - DNA, 20 bp, Artificial Sequence
  Description of Artificial Sequence: Synthetic oligonucleotide
  Target: ATXN2; (-) strand; PAM type: YTN; PAM sequence: TTC
ataaacgtgttgagaaatac

SEQ ID NO: 68977 - DNA, 20 bp, Artificial Sequence
  Description of Artificial Sequence: Synthetic oligonucleotide
  Target: ATXN2; (-) strand; PAM type: YTN; PAM sequence: TTA
ttcataaacgtgttgagaaa

SEQ ID NO: 68978 - DNA, 20 bp, Artificial Sequence
  Description of Artificial Sequence: Synthetic oligonucleotide
  Target: ATXN2; (-) strand; PAM type: YTN; PAM sequence: TTT
attcataaacgtgttgagaa

SEQ ID NO: 68979 - DNA, 20 bp, Artificial Sequence
  Description of Artificial Sequence: Synthetic oligonucleotide
  Target: ATXN2; (-) strand; PAM type: YTN; PAM sequence: TTC
atttattcataaacgtgttg

SEQ ID NO: 68980 - DNA, 20 bp, Artificial Sequence
  Description of Artificial Sequence: Synthetic oligonucleotide
  Target: ATXN2; (-) strand; PAM type: YTN; PAM sequence: TTT
catttattcataaacgtgtt

SEQ ID NO: 68981 - DNA, 20 bp, Artificial Sequence
  Description of Artificial Sequence: Synthetic oligonucleotide
  Target: ATXN2; (-) strand; PAM type: YTN; PAM sequence: CTT
tcatttattcataaacgtgt

SEQ ID NO: 68982 - DNA, 20 bp, Artificial Sequence
  Description of Artificial Sequence: Synthetic oligonucleotide
  Target: ATXN2; (-) strand; PAM type: YTN; PAM sequence: TTG
tgggtctttcatttattcat

SEQ ID NO: 68983 - DNA, 20 bp, Artificial Sequence
  Description of Artificial Sequence: Synthetic oligonucleotide
  Target: ATXN2; (-) strand; PAM type: YTN; PAM sequence: CTT
gtgggtctttcatttattca

SEQ ID NO: 68984 - DNA, 20 bp, Artificial Sequence
  Description of Artificial Sequence: Synthetic oligonucleotide
  Target: ATXN2; (-) strand; PAM type: YTN; PAM sequence: TTG
catatgtgggcttgtgggtc

SEQ ID NO: 68985 - DNA, 20 bp, Artificial Sequence
  Description of Artificial Sequence: Synthetic oligonucleotide
  Target: ATXN2; (-) strand; PAM type: YTN; PAM sequence: CTA
attgcatatgtgggcttgtg

SEQ ID NO: 68986 - DNA, 20 bp, Artificial Sequence
  Description of Artificial Sequence: Synthetic oligonucleotide
  Target: ATXN2; (-) strand; PAM type: YTN; PAM sequence: TTG
tgcagctaattgcatatgtg

SEQ ID NO: 68987 - DNA, 20 bp, Artificial Sequence
  Description of Artificial Sequence: Synthetic oligonucleotide
  Target: ATXN2; (-) strand; PAM type: YTN; PAM sequence: TTT
gtgcagctaattgcatatgt

SEQ ID NO: 68988 - DNA, 20 bp, Artificial Sequence
  Description of Artificial Sequence: Synthetic oligonucleotide
  Target: ATXN2; (-) strand; PAM type: YTN; PAM sequence: CTC
cgtttgtgcagctaattgca

SEQ ID NO: 68989 - DNA, 20 bp, Artificial Sequence
  Description of Artificial Sequence: Synthetic oligonucleotide
  Target: ATXN2; (-) strand; PAM type: YTN; PAM sequence: TTG
aggggaaaaacagtgactcc

SEQ ID NO: 68990 - DNA, 20 bp, Artificial Sequence
  Description of Artificial Sequence: Synthetic oligonucleotide
  Target: ATXN2; (-) strand; PAM type: YTN; PAM sequence: TTT
gaggggaaaaacagtgactc

SEQ ID NO: 68991 - DNA, 20 bp, Artificial Sequence
  Description of Artificial Sequence: Synthetic oligonucleotide
  Target: ATXN2; (-) strand; PAM type: YTN; PAM sequence: CTG
gtaagagagagaggaaacat

SEQ ID NO: 68992 - DNA, 20 bp, Artificial Sequence
  Description of Artificial Sequence: Synthetic oligonucleotide
  Target: ATXN2; (-) strand; PAM type: YTN; PAM sequence: TTA
atggatgtactggtaagaga

SEQ ID NO: 68993 - DNA, 20 bp, Artificial Sequence
  Description of Artificial Sequence: Synthetic oligonucleotide
  Target: ATXN2; (-) strand; PAM type: YTN; PAM sequence: CTT
aatggatgtactggtaagag

SEQ ID NO: 68994 - DNA, 20 bp, Artificial Sequence
  Description of Artificial Sequence: Synthetic oligonucleotide
  Target: ATXN2; (-) strand; PAM type: YTN; PAM sequence: CTA
agtgacttaatggatgtact

SEQ ID NO: 68995 - DNA, 20 bp, Artificial Sequence
  Description of Artificial Sequence: Synthetic oligonucleotide
  Target: ATXN2; (-) strand; PAM type: YTN; PAM sequence: TTG
ataactaagtgacttaatgg

SEQ ID NO: 68996 - DNA, 20 bp, Artificial Sequence
  Description of Artificial Sequence: Synthetic oligonucleotide
  Target: ATXN2; (-) strand; PAM type: YTN; PAM sequence: TTT
gataactaagtgacttaatg

SEQ ID NO: 68997 - DNA, 20 bp, Artificial Sequence
  Description of Artificial Sequence: Synthetic oligonucleotide
  Target: ATXN2; (-) strand; PAM type: YTN; PAM sequence: TTA
tttgataactaagtgactta

SEQ ID NO: 68998 - DNA, 20 bp, Artificial Sequence
  Description of Artificial Sequence: Synthetic oligonucleotide
  Target: ATXN2; (-) strand; PAM type: YTN; PAM sequence: TTT
atttgataactaagtgactt

SEQ ID NO: 68999 - DNA, 20 bp, Artificial Sequence
  Description of Artificial Sequence: Synthetic oligonucleotide
  Target: ATXN2; (-) strand; PAM type: YTN; PAM sequence: CTG
aggtttatttgataactaag

SEQ ID NO: 69000 - DNA, 20 bp, Artificial Sequence
  Description of Artificial Sequence: Synthetic oligonucleotide
  Target: ATXN2; (-) strand; PAM type: YTN; PAM sequence: TTA
agggatgagcctgaggttta

SEQ ID NO: 69001 - DNA, 20 bp, Artificial Sequence
  Description of Artificial Sequence: Synthetic oligonucleotide
  Target: ATXN2; (-) strand; PAM type: YTN; PAM sequence: CTA
gttaagggatgagcctgagg

SEQ ID NO: 69002 - DNA, 20 bp, Artificial Sequence
  Description of Artificial Sequence: Synthetic oligonucleotide
  Target: ATXN2; (-) strand; PAM type: YTN; PAM sequence: TTG
gtaaccacctagttaaggga

SEQ ID NO: 69003 - DNA, 20 bp, Artificial Sequence
  Description of Artificial Sequence: Synthetic oligonucleotide
  Target: ATXN2; (-) strand; PAM type: YTN; PAM sequence: TTT
ggtaaccacctagttaaggg

SEQ ID NO: 69004 - DNA, 20 bp, Artificial Sequence
  Description of Artificial Sequence: Synthetic oligonucleotide
  Target: ATXN2; (-) strand; PAM type: YTN; PAM sequence: CTG
tgagaatttggtaaccacct

SEQ ID NO: 69005 - DNA, 20 bp, Artificial Sequence
  Description of Artificial Sequence: Synthetic oligonucleotide
  Target: ATXN2; (-) strand; PAM type: YTN; PAM sequence: TTC
aactgtgagaatttggtaac

SEQ ID NO: 69006 - DNA, 20 bp, Artificial Sequence
  Description of Artificial Sequence: Synthetic oligonucleotide
  Target: ATXN2; (-) strand; PAM type: YTN; PAM sequence: CTG
aaatagttcaactgtgagaa

SEQ ID NO: 69007 - DNA, 20 bp, Artificial Sequence
  Description of Artificial Sequence: Synthetic oligonucleotide
  Target: ATXN2; (-) strand; PAM type: YTN; PAM sequence: TTA
gtgcactgaaatagttcaac

SEQ ID NO: 69008 - DNA, 20 bp, Artificial Sequence
  Description of Artificial Sequence: Synthetic oligonucleotide
  Target: ATXN2; (-) strand; PAM type: YTN; PAM sequence: CTG
agacacagagaacagttagt

SEQ ID NO: 69009 - DNA, 20 bp, Artificial Sequence
  Description of Artificial Sequence: Synthetic oligonucleotide
  Target: ATXN2; (-) strand; PAM type: YTN; PAM sequence: CTG
gctgagacacagagaacagt

SEQ ID NO: 69010 - DNA, 20 bp, Artificial Sequence
  Description of Artificial Sequence: Synthetic oligonucleotide
  Target: ATXN2; (-) strand; PAM type: YTN; PAM sequence: TTG
aggactggctgagacacaga

SEQ ID NO: 69011 - DNA, 20 bp, Artificial Sequence
  Description of Artificial Sequence: Synthetic oligonucleotide
  Target: ATXN2; (-) strand; PAM type: YTN; PAM sequence: CTG
gggcattgaggactggctga

SEQ ID NO: 69012 - DNA, 20 bp, Artificial Sequence
  Description of Artificial Sequence: Synthetic oligonucleotide
  Target: ATXN2; (-) strand; PAM type: YTN; PAM sequence: TTG
gaaggagatggggtgaataa

SEQ ID NO: 69013 - DNA, 20 bp, Artificial Sequence
  Description of Artificial Sequence: Synthetic oligonucleotide
  Target: ATXN2; (-) strand; PAM type: YTN; PAM sequence: CTG
ttggaaggagatggggtgaa

SEQ ID NO: 69014 - DNA, 20 bp, Artificial Sequence
  Description of Artificial Sequence: Synthetic oligonucleotide
  Target: ATXN2; (-) strand; PAM type: YTN; PAM sequence: CTA
aagagcaccctgttggaagg

SEQ ID NO: 69015 - DNA, 20 bp, Artificial Sequence
  Description of Artificial Sequence: Synthetic oligonucleotide
  Target: ATXN2; (-) strand; PAM type: YTN; PAM sequence: TTG
gcatgtcatgctaaagagca

SEQ ID NO: 69016 - DNA, 20 bp, Artificial Sequence
  Description of Artificial Sequence: Synthetic oligonucleotide
  Target: ATXN2; (-) strand; PAM type: YTN; PAM sequence: CTT
ggcatgtcatgctaaagagc

SEQ ID NO: 69017 - DNA, 20 bp, Artificial Sequence
  Description of Artificial Sequence: Synthetic oligonucleotide
  Target: ATXN2; (-) strand; PAM type: YTN; PAM sequence: TTA
aaggacttggcatgtcatgc

SEQ ID NO: 69018 - DNA, 20 bp, Artificial Sequence
  Description of Artificial Sequence: Synthetic oligonucleotide
  Target: ATXN2; (-) strand; PAM type: YTN; PAM sequence: CTG
aggtcattaaaggacttggc

SEQ ID NO: 69019 - DNA, 20 bp, Artificial Sequence
  Description of Artificial Sequence: Synthetic oligonucleotide
  Target: ATXN2; (-) strand; PAM type: YTN; PAM sequence: TTG
atagtaggaactgaggtcat

SEQ ID NO: 69020 - DNA, 20 bp, Artificial Sequence
  Description of Artificial Sequence: Synthetic oligonucleotide
  Target: ATXN2; (-) strand; PAM type: YTN; PAM sequence: CTG
tgtcaggtgcagcagtggca

SEQ ID NO: 69021 - DNA, 20 bp, Artificial Sequence
  Description of Artificial Sequence: Synthetic oligonucleotide
  Target: ATXN2; (-) strand; PAM type: YTN; PAM sequence: CTG
gaacacaggatctgtgtcag

SEQ ID NO: 69022 - DNA, 20 bp, Artificial Sequence
  Description of Artificial Sequence: Synthetic oligonucleotide
  Target: ATXN2; (-) strand; PAM type: YTN; PAM sequence: TTG
catgtgtctggaacacagga

SEQ ID NO: 69023 - DNA, 20 bp, Artificial Sequence
  Description of Artificial Sequence: Synthetic oligonucleotide
  Target: ATXN2; (-) strand; PAM type: YTN; PAM sequence: TTG
ttgcatgtgtctggaacaca

SEQ ID NO: 69024 - DNA, 20 bp, Artificial Sequence
  Description of Artificial Sequence: Synthetic oligonucleotide
  Target: ATXN2; (-) strand; PAM type: YTN; PAM sequence: CTG
gttgttgcatgtgtctggaa

SEQ ID NO: 69025 - DNA, 20 bp, Artificial Sequence
  Description of Artificial Sequence: Synthetic oligonucleotide
  Target: ATXN2; (-) strand; PAM type: YTN; PAM sequence: CTC
aggagagggctggttgttgc

SEQ ID NO: 69026 - DNA, 20 bp, Artificial Sequence
  Description of Artificial Sequence: Synthetic oligonucleotide
  Target: ATXN2; (-) strand; PAM type: YTN; PAM sequence: TTG
gccagctcaggagagggctg

SEQ ID NO: 69027 - DNA, 20 bp, Artificial Sequence
  Description of Artificial Sequence: Synthetic oligonucleotide
  Target: ATXN2; (-) strand; PAM type: YTN; PAM sequence: TTT
ggccagctcaggagagggct

SEQ ID NO: 69028 - DNA, 20 bp, Artificial Sequence
  Description of Artificial Sequence: Synthetic oligonucleotide
  Target: ATXN2; (-) strand; PAM type: YTN; PAM sequence: CTA
tgagaaaatttggccagctc

SEQ ID NO: 69029 - DNA, 20 bp, Artificial Sequence
  Description of Artificial Sequence: Synthetic oligonucleotide
  Target: ATXN2; (-) strand; PAM type: YTN; PAM sequence: CTG
atgaaaagccatgtacaagc

SEQ ID NO: 69030 - DNA, 20 bp, Artificial Sequence
  Description of Artificial Sequence: Synthetic oligonucleotide
  Target: ATXN2; (-) strand; PAM type: YTN; PAM sequence: TTA
tcacctgatgaaaagccatg

SEQ ID NO: 69031 - DNA, 20 bp, Artificial Sequence
  Description of Artificial Sequence: Synthetic oligonucleotide
  Target: ATXN2; (-) strand; PAM type: YTN; PAM sequence: TTT
atcacctgatgaaaagccat

SEQ ID NO: 69032 - DNA, 20 bp, Artificial Sequence
  Description of Artificial Sequence: Synthetic oligonucleotide
  Target: ATXN2; (-) strand; PAM type: YTN; PAM sequence: TTG
ggagaagagtttatcacctg

SEQ ID NO: 69033 - DNA, 20 bp, Artificial Sequence
  Description of Artificial Sequence: Synthetic oligonucleotide
  Target: ATXN2; (-) strand; PAM type: YTN; PAM sequence: TTA
gagaagagttgggagaagag

SEQ ID NO: 69034 - DNA, 20 bp, Artificial Sequence
  Description of Artificial Sequence: Synthetic oligonucleotide
  Target: ATXN2; (-) strand; PAM type: YTN; PAM sequence: CTT
agagaagagttgggagaaga

SEQ ID NO: 69035 - DNA, 20 bp, Artificial Sequence
  Description of Artificial Sequence: Synthetic oligonucleotide
  Target: ATXN2; (-) strand; PAM type: YTN; PAM sequence: TTG
acacttagagaagagttggg

SEQ ID NO: 69036 - DNA, 20 bp, Artificial Sequence
  Description of Artificial Sequence: Synthetic oligonucleotide
  Target: ATXN2; (-) strand; PAM type: YTN; PAM sequence: TTT
gacacttagagaagagttgg

SEQ ID NO: 69037 - DNA, 20 bp, Artificial Sequence
  Description of Artificial Sequence: Synthetic oligonucleotide
  Target: ATXN2; (-) strand; PAM type: YTN; PAM sequence: CTT
tgacacttagagaagagttg

SEQ ID NO: 69038 - DNA, 20 bp, Artificial Sequence
  Description of Artificial Sequence: Synthetic oligonucleotide
  Target: ATXN2; (-) strand; PAM type: YTN; PAM sequence: TTG
tgataagataatagggtctt

SEQ ID NO: 69039 - DNA, 20 bp, Artificial Sequence
  Description of Artificial Sequence: Synthetic oligonucleotide
  Target: ATXN2; (-) strand; PAM type: YTN; PAM sequence: TTT
gtgataagataatagggtct

SEQ ID NO: 69040 - DNA, 20 bp, Artificial Sequence
  Description of Artificial Sequence: Synthetic oligonucleotide
  Target: ATXN2; (-) strand; PAM type: YTN; PAM sequence: TTT
tgtgataagataatagggtc

SEQ ID NO: 69041 - DNA, 20 bp, Artificial Sequence
  Description of Artificial Sequence: Synthetic oligonucleotide
  Target: ATXN2; (-) strand; PAM type: YTN; PAM sequence: TTG
aggaggtgacattttgtgat

SEQ ID NO: 69042 - DNA, 20 bp, Artificial Sequence
  Description of Artificial Sequence: Synthetic oligonucleotide
  Target: ATXN2; (-) strand; PAM type: YTN; PAM sequence: CTC
attgaggaggtgacattttg

SEQ ID NO: 69043 - DNA, 20 bp, Artificial Sequence
  Description of Artificial Sequence: Synthetic oligonucleotide
  Target: ATXN2; (-) strand; PAM type: YTN; PAM sequence: CTG
tagagtcagagaaaacctca

SEQ ID NO: 69044 - DNA, 20 bp, Artificial Sequence
  Description of Artificial Sequence: Synthetic oligonucleotide
  Target: ATXN2; (-) strand; PAM type: YTN; PAM sequence: CTA
gcataacctgtagagtcaga

SEQ ID NO: 69045 - DNA, 20 bp, Artificial Sequence
  Description of Artificial Sequence: Synthetic oligonucleotide
  Target: ATXN2; (-) strand; PAM type: YTN; PAM sequence: CTA
ggaacatacagaatgaggag

SEQ ID NO: 69046 - DNA, 20 bp, Artificial Sequence
  Description of Artificial Sequence: Synthetic oligonucleotide
  Target: ATXN2; (-) strand; PAM type: YTN; PAM sequence: TTC
aaagtactaggaacatacag

SEQ ID NO: 69047 - DNA, 20 bp, Artificial Sequence
  Description of Artificial Sequence: Synthetic oligonucleotide
  Target: ATXN2; (-) strand; PAM type: YTN; PAM sequence: TTA
aaggcatgttcaaagtacta

SEQ ID NO: 69048 - DNA, 20 bp, Artificial Sequence
  Description of Artificial Sequence: Synthetic oligonucleotide
  Target: ATXN2; (-) strand; PAM type: YTN; PAM sequence: TTG
gttaaaggcatgttcaaagt

SEQ ID NO: 69049 - DNA, 20 bp, Artificial Sequence
  Description of Artificial Sequence: Synthetic oligonucleotide
  Target: ATXN2; (-) strand; PAM type: YTN; PAM sequence: CTT
ggttaaaggcatgttcaaag

SEQ ID NO: 69050 - DNA, 20 bp, Artificial Sequence
  Description of Artificial Sequence: Synthetic oligonucleotide
  Target: ATXN2; (-) strand; PAM type: YTN; PAM sequence: TTG
cttggttaaaggcatgttca

SEQ ID NO: 69051 - DNA, 20 bp, Artificial Sequence
  Description of Artificial Sequence: Synthetic oligonucleotide
  Target: ATXN2; (-) strand; PAM type: YTN; PAM sequence: TTT
gcttggttaaaggcatgttc

SEQ ID NO: 69052 - DNA, 20 bp, Artificial Sequence
  Description of Artificial Sequence: Synthetic oligonucleotide
  Target: ATXN2; (-) strand; PAM type: YTN; PAM sequence: CTG
gtgggggacacgtgtaacaa

SEQ ID NO: 69053 - DNA, 20 bp, Artificial Sequence
  Description of Artificial Sequence: Synthetic oligonucleotide
  Target: ATXN2; (-) strand; PAM type: YTN; PAM sequence: TTA
tctggtgggggacacgtgta

SEQ ID NO: 69054 - DNA, 20 bp, Artificial Sequence
  Description of Artificial Sequence: Synthetic oligonucleotide
  Target: ATXN2; (-) strand; PAM type: YTN; PAM sequence: TTA
aaatagttatctggtggggg

SEQ ID NO: 69055 - DNA, 20 bp, Artificial Sequence
  Description of Artificial Sequence: Synthetic oligonucleotide
  Target: ATXN2; (-) strand; PAM type: YTN; PAM sequence: TTG
ttaaaatagttatctggtgg

SEQ ID NO: 69056 - DNA, 20 bp, Artificial Sequence
  Description of Artificial Sequence: Synthetic oligonucleotide
  Target: ATXN2; (-) strand; PAM type: YTN; PAM sequence: CTT
gttaaaatagttatctggtg

SEQ ID NO: 69057 - DNA, 20 bp, Artificial Sequence
  Description of Artificial Sequence: Synthetic oligonucleotide
  Target: ATXN2; (-) strand; PAM type: YTN; PAM sequence: TTG
aagagcttgttaaaatagtt

SEQ ID NO: 69058 - DNA, 20 bp, Artificial Sequence
  Description of Artificial Sequence: Synthetic oligonucleotide
  Target: ATXN2; (-) strand; PAM type: YTN; PAM sequence: CTT
gaagagcttgttaaaatagt

SEQ ID NO: 69059 - DNA, 20 bp, Artificial Sequence
  Description of Artificial Sequence: Synthetic oligonucleotide
  Target: ATXN2; (-) strand; PAM type: YTN; PAM sequence: TTG
gtatatcacggtgagcaatc

SEQ ID NO: 69060 - DNA, 20 bp, Artificial Sequence
  Description of Artificial Sequence: Synthetic oligonucleotide
  Target: ATXN2; (-) strand; PAM type: YTN; PAM sequence: CTG
tggagccaagtgttggtata

SEQ ID NO: 69061 - DNA, 20 bp, Artificial Sequence
  Description of Artificial Sequence: Synthetic oligonucleotide
  Target: ATXN2; (-) strand; PAM type: YTN; PAM sequence: CTC
tgtggagccaagtgttggta

SEQ ID NO: 69062 - DNA, 20 bp, Artificial Sequence
  Description of Artificial Sequence: Synthetic oligonucleotide
  Target: ATXN2; (-) strand; PAM type: YTN; PAM sequence: TTG
agagtaagctctgtggagcc

SEQ ID NO: 69063 - DNA, 20 bp, Artificial Sequence
  Description of Artificial Sequence: Synthetic oligonucleotide
  Target: ATXN2; (-) strand; PAM type: YTN; PAM sequence: TTT
gagagtaagctctgtggagc

SEQ ID NO: 69064 - DNA, 20 bp, Artificial Sequence
  Description of Artificial Sequence: Synthetic oligonucleotide
  Target: ATXN2; (-) strand; PAM type: YTN; PAM sequence: TTT
tgagagtaagctctgtggag

SEQ ID NO: 69065 - DNA, 20 bp, Artificial Sequence
  Description of Artificial Sequence: Synthetic oligonucleotide
  Target: ATXN2; (-) strand; PAM type: YTN; PAM sequence: CTT
ttgagagtaagctctgtgga

SEQ ID NO: 69066 - DNA, 20 bp, Artificial Sequence
  Description of Artificial Sequence: Synthetic oligonucleotide
  Target: ATXN2; (-) strand; PAM type: YTN; PAM sequence: TTG
gaaaatatgcttttgagagt

SEQ ID NO: 69067 - DNA, 20 bp, Artificial Sequence
  Description of Artificial Sequence: Synthetic oligonucleotide
  Target: ATXN2; (-) strand; PAM type: YTN; PAM sequence: CTT
ggaaaatatgcttttgagag

SEQ ID NO: 69068 - DNA, 20 bp, Artificial Sequence
  Description of Artificial Sequence: Synthetic oligonucleotide
  Target: ATXN2; (-) strand; PAM type: YTN; PAM sequence: TTA
tggtgatcttggaaaatatg

SEQ ID NO: 69069 - DNA, 20 bp, Artificial Sequence
  Description of Artificial Sequence: Synthetic oligonucleotide
  Target: ATXN2; (-) strand; PAM type: YTN; PAM sequence: TTA
gagaaaaggttatggtgatc

SEQ ID NO: 69070 - DNA, 20 bp, Artificial Sequence
  Description of Artificial Sequence: Synthetic oligonucleotide
  Target: ATXN2; (-) strand; PAM type: YTN; PAM sequence: CTG
ttagagaaaaggttatggtg

SEQ ID NO: 69071 - DNA, 20 bp, Artificial Sequence
  Description of Artificial Sequence: Synthetic oligonucleotide
  Target: ATXN2; (-) strand; PAM type: YTN; PAM sequence: TTA
agatctgttagagaaaaggt

SEQ ID NO: 69072 - DNA, 20 bp, Artificial Sequence
  Description of Artificial Sequence: Synthetic oligonucleotide
  Target: ATXN2; (-) strand; PAM type: YTN; PAM sequence: TTT
aagatctgttagagaaaagg

SEQ ID NO: 69073 - DNA, 20 bp, Artificial Sequence
  Description of Artificial Sequence: Synthetic oligonucleotide
  Target: ATXN2; (-) strand; PAM type: YTN; PAM sequence: TTG
gtttaagatctgttagagaa

SEQ ID NO: 69074 - DNA, 20 bp, Artificial Sequence
  Description of Artificial Sequence: Synthetic oligonucleotide
  Target: ATXN2; (-) strand; PAM type: YTN; PAM sequence: TTA
ggtagagaatgcaagtagaa

SEQ ID NO: 69075 - DNA, 20 bp, Artificial Sequence
  Description of Artificial Sequence: Synthetic oligonucleotide
  Target: ATXN2; (-) strand; PAM type: YTN; PAM sequence: CTT
aggtagagaatgcaagtaga

SEQ ID NO: 69076 - DNA, 20 bp, Artificial Sequence
  Description of Artificial Sequence: Synthetic oligonucleotide
  Target: ATXN2; (-) strand; PAM type: YTN; PAM sequence: TTA
atatagcttaggtagagaat

SEQ ID NO: 69077 - DNA, 20 bp, Artificial Sequence
  Description of Artificial Sequence: Synthetic oligonucleotide
  Target: ATXN2; (-) strand; PAM type: YTN; PAM sequence: TTT
aatatagcttaggtagagaa

SEQ ID NO: 69078 - DNA, 20 bp, Artificial Sequence
  Description of Artificial Sequence: Synthetic oligonucleotide
  Target: ATXN2; (-) strand; PAM type: YTN; PAM sequence: CTT
taatatagcttaggtagaga

SEQ ID NO: 69079 - DNA, 20 bp, Artificial Sequence
  Description of Artificial Sequence: Synthetic oligonucleotide
  Target: ATXN2; (-) strand; PAM type: YTN; PAM sequence: TTC
ctttaatatagcttaggtag

SEQ ID NO: 69080 - DNA, 20 bp, Artificial Sequence
  Description of Artificial Sequence: Synthetic oligonucleotide
  Target: ATXN2; (-) strand; PAM type: YTN; PAM sequence: CTT
cctttaatatagcttaggta

SEQ ID NO: 69081 - DNA, 20 bp, Artificial Sequence
  Description of Artificial Sequence: Synthetic oligonucleotide
  Target: ATXN2; (-) strand; PAM type: YTN; PAM sequence: CTC
ttcctttaatatagcttagg

SEQ ID NO: 69082 - DNA, 20 bp, Artificial Sequence
  Description of Artificial Sequence: Synthetic oligonucleotide
  Target: ATXN2; (-) strand; PAM type: YTN; PAM sequence: TTC
ctcttcctttaatatagctt

SEQ ID NO: 69083 - DNA, 20 bp, Artificial Sequence
  Description of Artificial Sequence: Synthetic oligonucleotide
  Target: ATXN2; (-) strand; PAM type: YTN; PAM sequence: TTT
cctcttcctttaatatagct

SEQ ID NO: 69084 - DNA, 20 bp, Artificial Sequence
  Description of Artificial Sequence: Synthetic oligonucleotide
  Target: ATXN2; (-) strand; PAM type: YTN; PAM sequence: TTA
tatttcctcttcctttaata

SEQ ID NO: 69085 - DNA, 20 bp, Artificial Sequence
  Description of Artificial Sequence: Synthetic oligonucleotide
  Target: ATXN2; (-) strand; PAM type: YTN; PAM sequence: TTA
ttatatttcctcttccttta

SEQ ID NO: 69086 - DNA, 20 bp, Artificial Sequence
  Description of Artificial Sequence: Synthetic oligonucleotide
  Target: ATXN2; (-) strand; PAM type: YTN; PAM sequence: TTG
ttattatatttcctcttcct

SEQ ID NO: 69087 - DNA, 20 bp, Artificial Sequence
  Description of Artificial Sequence: Synthetic oligonucleotide
  Target: ATXN2; (-) strand; PAM type: YTN; PAM sequence: CTG
tgtgagacggtgtattgtta

SEQ ID NO: 69088 - DNA, 20 bp, Artificial Sequence
  Description of Artificial Sequence: Synthetic oligonucleotide
  Target: ATXN2; (-) strand; PAM type: YTN; PAM sequence: CTC
aaggtctgtgtgagacggtg

SEQ ID NO: 69089 - DNA, 20 bp, Artificial Sequence
  Description of Artificial Sequence: Synthetic oligonucleotide
  Target: ATXN2; (-) strand; PAM type: YTN; PAM sequence: TTG
gatacacaactcaaggtctg

SEQ ID NO: 69090 - DNA, 20 bp, Artificial Sequence
  Description of Artificial Sequence: Synthetic oligonucleotide
  Target: ATXN2; (-) strand; PAM type: YTN; PAM sequence: TTT
ggatacacaactcaaggtct

SEQ ID NO: 69091 - DNA, 20 bp, Artificial Sequence
  Description of Artificial Sequence: Synthetic oligonucleotide
  Target: ATXN2; (-) strand; PAM type: YTN; PAM sequence: TTT
tggatacacaactcaaggtc

SEQ ID NO: 69092 - DNA, 20 bp, Artificial Sequence
  Description of Artificial Sequence: Synthetic oligonucleotide
  Target: ATXN2; (-) strand; PAM type: YTN; PAM sequence: TTA
aaggaaatcatgatgcagta

SEQ ID NO: 69093 - DNA, 20 bp, Artificial Sequence
  Description of Artificial Sequence: Synthetic oligonucleotide
  Target: ATXN2; (-) strand; PAM type: YTN; PAM sequence: TTT
aaaggaaatcatgatgcagt

SEQ ID NO: 69094 - DNA, 20 bp, Artificial Sequence
  Description of Artificial Sequence: Synthetic oligonucleotide
  Target: ATXN2; (-) strand; PAM type: YTN; PAM sequence: CTA
ggtatttaaaggaaatcatg

SEQ ID NO: 69095 - DNA, 20 bp, Artificial Sequence
  Description of Artificial Sequence: Synthetic oligonucleotide
  Target: ATXN2; (-) strand; PAM type: YTN; PAM sequence: TTC
cagtgaacgtgaggggcaca

SEQ ID NO: 69096 - DNA, 20 bp, Artificial Sequence
  Description of Artificial Sequence: Synthetic oligonucleotide
  Target: ATXN2; (-) strand; PAM type: YTN; PAM sequence: TTC
agagaaattccagtgaacgt

SEQ ID NO: 69097 - DNA, 20 bp, Artificial Sequence
  Description of Artificial Sequence: Synthetic oligonucleotide
  Target: ATXN2; (-) strand; PAM type: YTN; PAM sequence: CTG
gaaaatgatgataggagtga

SEQ ID NO: 69098 - DNA, 20 bp, Artificial Sequence
  Description of Artificial Sequence: Synthetic oligonucleotide
  Target: ATXN2; (-) strand; PAM type: YTN; PAM sequence: CTC
gagtggccctggaaaatgat

SEQ ID NO: 69099 - DNA, 20 bp, Artificial Sequence
  Description of Artificial Sequence: Synthetic oligonucleotide
  Target: ATXN2; (-) strand; PAM type: YTN; PAM sequence: TTG
agtcaagtgcccagtacaaa

SEQ ID NO: 69100 - DNA, 20 bp, Artificial Sequence
  Description of Artificial Sequence: Synthetic oligonucleotide
  Target: ATXN2; (-) strand; PAM type: YTN; PAM sequence: TTA
gcagaagaaattgagtcaag

SEQ ID NO: 69101 - DNA, 20 bp, Artificial Sequence
  Description of Artificial Sequence: Synthetic oligonucleotide
  Target: ATXN2; (-) strand; PAM type: YTN; PAM sequence: TTA
aaacgggaagcaagggcaaa

SEQ ID NO: 69102 - DNA, 20 bp, Artificial Sequence
  Description of Artificial Sequence: Synthetic oligonucleotide
  Target: ATXN2; (-) strand; PAM type: YTN; PAM sequence: TTT
aaaacgggaagcaagggcaa

SEQ ID NO: 69103 - DNA, 20 bp, Artificial Sequence
  Description of Artificial Sequence: Synthetic oligonucleotide
  Target: ATXN2; (-) strand; PAM type: YTN; PAM sequence: TTT
taaaacgggaagcaagggca

SEQ ID NO: 69104 - DNA, 20 bp, Artificial Sequence
  Description of Artificial Sequence: Synthetic oligonucleotide
  Target: ATXN2; (-) strand; PAM type: YTN; PAM sequence: TTT
ttaaaacgggaagcaagggc

SEQ ID NO: 69105 - DNA, 20 bp, Artificial Sequence
  Description of Artificial Sequence: Synthetic oligonucleotide
  Target: ATXN2; (-) strand; PAM type: YTN; PAM sequence: CTC
agaagaatttttaaaacggg

SEQ ID NO: 69106 - DNA, 20 bp, Artificial Sequence
  Description of Artificial Sequence: Synthetic oligonucleotide
  Target: ATXN2; (-) strand; PAM type: YTN; PAM sequence: TTA
gaaagagataactcagaaga

SEQ ID NO: 69107 - DNA, 20 bp, Artificial Sequence
  Description of Artificial Sequence: Synthetic oligonucleotide
  Target: ATXN2; (-) strand; PAM type: YTN; PAM sequence: CTT
agaaagagataactcagaag

SEQ ID NO: 69108 - DNA, 20 bp, Artificial Sequence
  Description of Artificial Sequence: Synthetic oligonucleotide
  Target: ATXN2; (-) strand; PAM type: YTN; PAM sequence: TTC
agagtgcccttagaaagaga

SEQ ID NO: 69109 - DNA, 20 bp, Artificial Sequence
  Description of Artificial Sequence: Synthetic oligonucleotide
  Target: ATXN2; (-) strand; PAM type: YTN; PAM sequence: TTT
cagagtgcccttagaaagag

SEQ ID NO: 69110 - DNA, 20 bp, Artificial Sequence
  Description of Artificial Sequence: Synthetic oligonucleotide
  Target: ATXN2; (-) strand; PAM type: YTN; PAM sequence: CTC
atgtttcagagtgcccttag

SEQ ID NO: 69111 - DNA, 20 bp, Artificial Sequence
  Description of Artificial Sequence: Synthetic oligonucleotide
  Target: ATXN2; (-) strand; PAM type: YTN; PAM sequence: TTC
ctcatgtttcagagtgccct

SEQ ID NO: 69112 - DNA, 20 bp, Artificial Sequence
  Description of Artificial Sequence: Synthetic oligonucleotide
  Target: ATXN2; (-) strand; PAM type: YTN; PAM sequence: TTT
cctcatgtttcagagtgccc

SEQ ID NO: 69113 - DNA, 20 bp, Artificial Sequence
  Description of Artificial Sequence: Synthetic oligonucleotide
  Target: ATXN2; (-) strand; PAM type: YTN; PAM sequence: TTT
tcctcatgtttcagagtgcc

SEQ ID NO: 69114 - DNA, 20 bp, Artificial Sequence
  Description of Artificial Sequence: Synthetic oligonucleotide
  Target: ATXN2; (-) strand; PAM type: YTN; PAM sequence: CTT
ttcctcatgtttcagagtgc

SEQ ID NO: 69115 - DNA, 20 bp, Artificial Sequence
  Description of Artificial Sequence: Synthetic oligonucleotide
  Target: ATXN2; (-) strand; PAM type: YTN; PAM sequence: TTC
ttttcctcatgtttcagagt

SEQ ID NO: 69116 - DNA, 20 bp, Artificial Sequence
  Description of Artificial Sequence: Synthetic oligonucleotide
  Target: ATXN2; (-) strand; PAM type: YTN; PAM sequence: TTT
cttttcctcatgtttcagag

SEQ ID NO: 69117 - DNA, 20 bp, Artificial Sequence
  Description of Artificial Sequence: Synthetic oligonucleotide
  Target: ATXN2; (-) strand; PAM type: YTN; PAM sequence: TTT
tcttttcctcatgtttcaga

SEQ ID NO: 69118 - DNA, 20 bp, Artificial Sequence
  Description of Artificial Sequence: Synthetic oligonucleotide
  Target: ATXN2; (-) strand; PAM type: YTN; PAM sequence: CTT
ttcttttcctcatgtttcag

SEQ ID NO: 69119 - DNA, 20 bp, Artificial Sequence
  Description of Artificial Sequence: Synthetic oligonucleotide
  Target: ATXN2; (-) strand; PAM type: YTN; PAM sequence: TTG
cttttcttttcctcatgttt

SEQ ID NO: 69120 - DNA, 20 bp, Artificial Sequence
  Description of Artificial Sequence: Synthetic oligonucleotide
  Target: ATXN2; (-) strand; PAM type: YTN; PAM sequence: TTT
gcttttcttttcctcatgtt

SEQ ID NO: 69121 - DNA, 20 bp, Artificial Sequence
  Description of Artificial Sequence: Synthetic oligonucleotide
  Target: ATXN2; (-) strand; PAM type: YTN; PAM sequence: TTT
tgcttttcttttcctcatgt

SEQ ID NO: 69122 - DNA, 20 bp, Artificial Sequence
  Description of Artificial Sequence: Synthetic oligonucleotide
  Target: ATXN2; (-) strand; PAM type: YTN; PAM sequence: CTC
attttgcttttcttttcctc

SEQ ID NO: 69123 - DNA, 20 bp, Artificial Sequence
  Description of Artificial Sequence: Synthetic oligonucleotide
  Target: ATXN2; (-) strand; PAM type: YTN; PAM sequence: TTA
aaggactcattttgcttttc

SEQ ID NO: 69124 - DNA, 20 bp, Artificial Sequence
  Description of Artificial Sequence: Synthetic oligonucleotide
  Target: ATXN2; (-) strand; PAM type: YTN; PAM sequence: TTT
aaaggactcattttgctttt

SEQ ID NO: 69125 - DNA, 20 bp, Artificial Sequence
  Description of Artificial Sequence: Synthetic oligonucleotide
  Target: ATXN2; (-) strand; PAM type: YTN; PAM sequence: CTT
taaaggactcattttgcttt

SEQ ID NO: 69126 - DNA, 20 bp, Artificial Sequence
  Description of Artificial Sequence: Synthetic oligonucleotide
  Target: ATXN2; (-) strand; PAM type: YTN; PAM sequence: CTG
tggctttaaaggactcattt

SEQ ID NO: 69127 - DNA, 20 bp, Artificial Sequence
  Description of Artificial Sequence: Synthetic oligonucleotide
  Target: ATXN2; (-) strand; PAM type: YTN; PAM sequence: TTA
tgacagatacataaactgtg

SEQ ID NO: 69128 - DNA, 20 bp, Artificial Sequence
  Description of Artificial Sequence: Synthetic oligonucleotide
  Target: ATXN2; (-) strand; PAM type: YTN; PAM sequence: TTG
attatgacagatacataaac

SEQ ID NO: 69129 - DNA, 20 bp, Artificial Sequence
  Description of Artificial Sequence: Synthetic oligonucleotide
  Target: ATXN2; (-) strand; PAM type: YTN; PAM sequence: TTA
gtagttgattatgacagata

SEQ ID NO: 69130 - DNA, 20 bp, Artificial Sequence
  Description of Artificial Sequence: Synthetic oligonucleotide
  Target: ATXN2; (-) strand; PAM type: YTN; PAM sequence: CTT
agtagttgattatgacagat

SEQ ID NO: 69131 - DNA, 20 bp, Artificial Sequence
  Description of Artificial Sequence: Synthetic oligonucleotide
  Target: ATXN2; (-) strand; PAM type: YTN; PAM sequence: TTC
ttagtagttgattatgacag

SEQ ID NO: 69132 - DNA, 20 bp, Artificial Sequence
  Description of Artificial Sequence: Synthetic oligonucleotide
  Target: ATXN2; (-) strand; PAM type: YTN; PAM sequence: TTT
cttagtagttgattatgaca

SEQ ID NO: 69133 - DNA, 20 bp, Artificial Sequence
  Description of Artificial Sequence: Synthetic oligonucleotide
  Target: ATXN2; (-) strand; PAM type: YTN; PAM sequence: CTT
tcttagtagttgattatgac

SEQ ID NO: 69134 - DNA, 20 bp, Artificial Sequence
  Description of Artificial Sequence: Synthetic oligonucleotide
  Target: ATXN2; (-) strand; PAM type: YTN; PAM sequence: CTA
aactttcttagtagttgatt

SEQ ID NO: 69135 - DNA, 20 bp, Artificial Sequence
  Description of Artificial Sequence: Synthetic oligonucleotide
  Target: ATXN2; (-) strand; PAM type: YTN; PAM sequence: CTC
taaactttcttagtagttga

SEQ ID NO: 69136 - DNA, 20 bp, Artificial Sequence
  Description of Artificial Sequence: Synthetic oligonucleotide
  Target: ATXN2; (-) strand; PAM type: YTN; PAM sequence: CTA
aactctaaactttcttagta

SEQ ID NO: 69137 - DNA, 20 bp, Artificial Sequence
  Description of Artificial Sequence: Synthetic oligonucleotide
  Target: ATXN2; (-) strand; PAM type: YTN; PAM sequence: TTC
taaactctaaactttcttag

SEQ ID NO: 69138 - DNA, 20 bp, Artificial Sequence
  Description of Artificial Sequence: Synthetic oligonucleotide
  Target: ATXN2; (-) strand; PAM type: YTN; PAM sequence: TTA
ccagtattctaaactctaaa

SEQ ID NO: 69139 - DNA, 20 bp, Artificial Sequence
  Description of Artificial Sequence: Synthetic oligonucleotide
  Target: ATXN2; (-) strand; PAM type: YTN; PAM sequence: TTT
accagtattctaaactctaa

SEQ ID NO: 69140 - DNA, 20 bp, Artificial Sequence
  Description of Artificial Sequence: Synthetic oligonucleotide
  Target: ATXN2; (-) strand; PAM type: YTN; PAM sequence: TTT
taccagtattctaaactcta

SEQ ID NO: 69141 - DNA, 20 bp, Artificial Sequence
  Description of Artificial Sequence: Synthetic oligonucleotide
  Target: ATXN2; (-) strand; PAM type: YTN; PAM sequence: TTT
ttaccagtattctaaactct

SEQ ID NO: 69142 - DNA, 20 bp, Artificial Sequence
  Description of Artificial Sequence: Synthetic oligonucleotide
  Target: ATXN2; (-) strand; PAM type: YTN; PAM sequence: CTG
tttttaccagtattctaaac

SEQ ID NO: 69143 - DNA, 20 bp, Artificial Sequence
  Description of Artificial Sequence: Synthetic oligonucleotide
  Target: ATXN2; (-) strand; PAM type: YTN; PAM sequence: TTC
tgtttttaccagtattctaa

SEQ ID NO: 69144 - DNA, 20 bp, Artificial Sequence
  Description of Artificial Sequence: Synthetic oligonucleotide
  Target: ATXN2; (-) strand; PAM type: YTN; PAM sequence: TTT
ctgtttttaccagtattcta

SEQ ID NO: 69145 - DNA, 20 bp, Artificial Sequence
  Description of Artificial Sequence: Synthetic oligonucleotide
  Target: ATXN2; (-) strand; PAM type: YTN; PAM sequence: TTA
gtttctgtttttaccagtat

SEQ ID NO: 69146 - DNA, 20 bp, Artificial Sequence
  Description of Artificial Sequence: Synthetic oligonucleotide
  Target: ATXN2; (-) strand; PAM type: YTN; PAM sequence: TTT
agtttctgtttttaccagta

SEQ ID NO: 69147 - DNA, 20 bp, Artificial Sequence
  Description of Artificial Sequence: Synthetic oligonucleotide
  Target: ATXN2; (-) strand; PAM type: YTN; PAM sequence: TTT
tagtttctgtttttaccagt

SEQ ID NO: 69148 - DNA, 20 bp, Artificial Sequence
  Description of Artificial Sequence: Synthetic oligonucleotide
  Target: ATXN2; (-) strand; PAM type: YTN; PAM sequence: TTA
gttttagtttctgtttttac

SEQ ID NO: 69149 - DNA, 20 bp, Artificial Sequence
  Description of Artificial Sequence: Synthetic oligonucleotide
  Target: ATXN2; (-) strand; PAM type: YTN; PAM sequence: TTT
agttttagtttctgttttta

SEQ ID NO: 69150 - DNA, 20 bp, Artificial Sequence
  Description of Artificial Sequence: Synthetic oligonucleotide
  Target: ATXN2; (-) strand; PAM type: YTN; PAM sequence: TTT
tagttttagtttctgttttt

SEQ ID NO: 69151 - DNA, 20 bp, Artificial Sequence
  Description of Artificial Sequence: Synthetic oligonucleotide
  Target: ATXN2; (-) strand; PAM type: YTN; PAM sequence: TTA
gttttagttttagtttctgt

SEQ ID NO: 69152 - DNA, 20 bp, Artificial Sequence
  Description of Artificial Sequence: Synthetic oligonucleotide
  Target: ATXN2; (-) strand; PAM type: YTN; PAM sequence: TTT
agttttagttttagtttctg

SEQ ID NO: 69153 - DNA, 20 bp, Artificial Sequence
  Description of Artificial Sequence: Synthetic oligonucleotide
  Target: ATXN2; (-) strand; PAM type: YTN; PAM sequence: TTT
tagttttagttttagtttct

SEQ ID NO: 69154 - DNA, 20 bp, Artificial Sequence
  Description of Artificial Sequence: Synthetic oligonucleotide
  Target: ATXN2; (-) strand; PAM type: YTN; PAM sequence: TTA
gttttagttttagttttagt

SEQ ID NO: 69155 - DNA, 20 bp, Artificial Sequence
  Description of Artificial Sequence: Synthetic oligonucleotide
  Target: ATXN2; (-) strand; PAM type: YTN; PAM sequence: TTT
agttttagttttagttttag

SEQ ID NO: 69156 - DNA, 20 bp, Artificial Sequence
  Description of Artificial Sequence: Synthetic oligonucleotide
  Target: ATXN2; (-) strand; PAM type: YTN; PAM sequence: TTT
tagttttagttttagtttta

SEQ ID NO: 69157 - DNA, 20 bp, Artificial Sequence
  Description of Artificial Sequence: Synthetic oligonucleotide
  Target: ATXN2; (-) strand; PAM type: YTN; PAM sequence: CTT
ttagttttagttttagtttt

SEQ ID NO: 69158 - DNA, 20 bp, Artificial Sequence
  Description of Artificial Sequence: Synthetic oligonucleotide
  Target: ATXN2; (-) strand; PAM type: YTN; PAM sequence: CTA
taacttttagttttagtttt

SEQ ID NO: 69159 - DNA, 20 bp, Artificial Sequence
  Description of Artificial Sequence: Synthetic oligonucleotide
  Target: ATXN2; (-) strand; PAM type: YTN; PAM sequence: TTA
taaatacacagatcactata

SEQ ID NO: 69160 - DNA, 20 bp, Artificial Sequence
  Description of Artificial Sequence: Synthetic oligonucleotide
  Target: ATXN2; (-) strand; PAM type: YTN; PAM sequence: TTT
ataaatacacagatcactat

SEQ ID NO: 69161 - DNA, 20 bp, Artificial Sequence
  Description of Artificial Sequence: Synthetic oligonucleotide
  Target: ATXN2; (-) strand; PAM type: YTN; PAM sequence: TTG
atttataaatacacagatca

SEQ ID NO: 69162 - DNA, 20 bp, Artificial Sequence
  Description of Artificial Sequence: Synthetic oligonucleotide
  Target: ATXN2; (-) strand; PAM type: YTN; PAM sequence: TTT
gatttataaatacacagatc

SEQ ID NO: 69163 - DNA, 20 bp, Artificial Sequence
  Description of Artificial Sequence: Synthetic oligonucleotide
  Target: ATXN2; (-) strand; PAM type: YTN; PAM sequence: TTT
tgatttataaatacacagat

SEQ ID NO: 69164 - DNA, 20 bp, Artificial Sequence
  Description of Artificial Sequence: Synthetic oligonucleotide
  Target: ATXN2; (-) strand; PAM type: YTN; PAM sequence: TTA
gaattttgatttataaatac

SEQ ID NO: 69165 - DNA, 20 bp, Artificial Sequence
  Description of Artificial Sequence: Synthetic oligonucleotide
  Target: ATXN2; (-) strand; PAM type: YTN; PAM sequence: CTG
gagaaaaggtaacagaaaaa

SEQ ID NO: 69166 - DNA, 20 bp, Artificial Sequence
  Description of Artificial Sequence: Synthetic oligonucleotide
  Target: ATXN2; (-) strand; PAM type: YTN; PAM sequence: CTC
tggagaaaaggtaacagaaa

SEQ ID NO: 69167 - DNA, 20 bp, Artificial Sequence
  Description of Artificial Sequence: Synthetic oligonucleotide
  Target: ATXN2; (-) strand; PAM type: YTN; PAM sequence: TTC
ctctggagaaaaggtaacag

SEQ ID NO: 69168 - DNA, 20 bp, Artificial Sequence
  Description of Artificial Sequence: Synthetic oligonucleotide
  Target: ATXN2; (-) strand; PAM type: YTN; PAM sequence: TTG
aaatatgttcctctggagaa

SEQ ID NO: 69169 - DNA, 20 bp, Artificial Sequence
  Description of Artificial Sequence: Synthetic oligonucleotide
  Target: ATXN2; (-) strand; PAM type: YTN; PAM sequence: TTT
gaaatatgttcctctggaga

SEQ ID NO: 69170 - DNA, 20 bp, Artificial Sequence
  Description of Artificial Sequence: Synthetic oligonucleotide
  Target: ATXN2; (-) strand; PAM type: YTN; PAM sequence: TTT
tgaaatatgttcctctggag

SEQ ID NO: 69171 - DNA, 20 bp, Artificial Sequence
  Description of Artificial Sequence: Synthetic oligonucleotide
  Target: ATXN2; (-) strand; PAM type: YTN; PAM sequence: TTT
ttgaaatatgttcctctgga

SEQ ID NO: 69172 - DNA, 20 bp, Artificial Sequence
  Description of Artificial Sequence: Synthetic oligonucleotide
  Target: ATXN2; (-) strand; PAM type: YTN; PAM sequence: TTA
accagtttttgaaatatgtt

SEQ ID NO: 69173 - DNA, 20 bp, Artificial Sequence
  Description of Artificial Sequence: Synthetic oligonucleotide
  Target: ATXN2; (-) strand; PAM type: YTN; PAM sequence: TTT
aaccagtttttgaaatatgt

SEQ ID NO: 69174 - DNA, 20 bp, Artificial Sequence
  Description of Artificial Sequence: Synthetic oligonucleotide
  Target: ATXN2; (-) strand; PAM type: YTN; PAM sequence: TTA
tggtgaacagtttaaccagt

SEQ ID NO: 69175 - DNA, 20 bp, Artificial Sequence
  Description of Artificial Sequence: Synthetic oligonucleotide
  Target: ATXN2; (-) strand; PAM type: YTN; PAM sequence: TTG
caagggcagagattatggtg

SEQ ID NO: 69176 - DNA, 20 bp, Artificial Sequence
  Description of Artificial Sequence: Synthetic oligonucleotide
  Target: ATXN2; (-) strand; PAM type: YTN; PAM sequence: TTT
gcaagggcagagattatggt

SEQ ID NO: 69177 - DNA, 20 bp, Artificial Sequence
  Description of Artificial Sequence: Synthetic oligonucleotide
  Target: ATXN2; (-) strand; PAM type: YTN; PAM sequence: CTA
aatttgcaagggcagagatt

SEQ ID NO: 69178 - DNA, 20 bp, Artificial Sequence
  Description of Artificial Sequence: Synthetic oligonucleotide
  Target: ATXN2; (-) strand; PAM type: YTN; PAM sequence: TTA
aaaaatatctaaatttgcaa

SEQ ID NO: 69179 - DNA, 20 bp, Artificial Sequence
  Description of Artificial Sequence: Synthetic oligonucleotide
  Target: ATXN2; (-) strand; PAM type: YTN; PAM sequence: TTG
ttaaaaaatatctaaatttg

SEQ ID NO: 69180 - DNA, 20 bp, Artificial Sequence
  Description of Artificial Sequence: Synthetic oligonucleotide
  Target: ATXN2; (-) strand; PAM type: YTN; PAM sequence: CTA
agttgttaaaaaatatctaa

SEQ ID NO: 69181 - DNA, 20 bp, Artificial Sequence
  Description of Artificial Sequence: Synthetic oligonucleotide
  Target: ATXN2; (-) strand; PAM type: YTN; PAM sequence: TTC
taagttgttaaaaaatatct

SEQ ID NO: 69182 - DNA, 20 bp, Artificial Sequence
  Description of Artificial Sequence: Synthetic oligonucleotide
  Target: ATXN2; (-) strand; PAM type: YTN; PAM sequence: CTT
ctaagttgttaaaaaatatc

SEQ ID NO: 69183 - DNA, 20 bp, Artificial Sequence
  Description of Artificial Sequence: Synthetic oligonucleotide
  Target: ATXN2; (-) strand; PAM type: YTN; PAM sequence: TTG
tcttctaagttgttaaaaaa

SEQ ID NO: 69184 - DNA, 20 bp, Artificial Sequence
  Description of Artificial Sequence: Synthetic oligonucleotide
  Target: ATXN2; (-) strand; PAM type: YTN; PAM sequence: TTT
gtcttctaagttgttaaaaa

SEQ ID NO: 69185 - DNA, 20 bp, Artificial Sequence
  Description of Artificial Sequence: Synthetic oligonucleotide
  Target: ATXN2; (-) strand; PAM type: YTN; PAM sequence: TTT
tgtcttctaagttgttaaaa

SEQ ID NO: 69186 - DNA, 20 bp, Artificial Sequence
  Description of Artificial Sequence: Synthetic oligonucleotide
  Target: ATXN2; (-) strand; PAM type: YTN; PAM sequence: CTG
gccggttttgtcttctaagt

SEQ ID NO: 69187 - DNA, 20 bp, Artificial Sequence
  Description of Artificial Sequence: Synthetic oligonucleotide
  Target: ATXN2; (-) strand; PAM type: YTN; PAM sequence: CTG
tgcctggccggttttgtctt

SEQ ID NO: 69188 - DNA, 20 bp, Artificial Sequence
  Description of Artificial Sequence: Synthetic oligonucleotide
  Target: ATXN2; (-) strand; PAM type: YTN; PAM sequence: TTA
caggtgtgagccactgtgcc

SEQ ID NO: 69189 - DNA, 20 bp, Artificial Sequence
  Description of Artificial Sequence: Synthetic oligonucleotide
  Target: ATXN2; (-) strand; PAM type: YTN; PAM sequence: CTG
ggattacaggtgtgagccac

SEQ ID NO: 69190 - DNA, 20 bp, Artificial Sequence
  Description of Artificial Sequence: Synthetic oligonucleotide
  Target: ATXN2; (-) strand; PAM type: YTN; PAM sequence: CTC
ccaaagtgctgggattacag

SEQ ID NO: 69191 - DNA, 20 bp, Artificial Sequence
  Description of Artificial Sequence: Synthetic oligonucleotide
  Target: ATXN2; (-) strand; PAM type: YTN; PAM sequence: CTC
ggcctcccaaagtgctggga

SEQ ID NO: 69192 - DNA, 20 bp, Artificial Sequence
  Description of Artificial Sequence: Synthetic oligonucleotide
  Target: ATXN2; (-) strand; PAM type: YTN; PAM sequence: CTG
cctcggcctcccaaagtgct

SEQ ID NO: 69193 - DNA, 20 bp, Artificial Sequence
  Description of Artificial Sequence: Synthetic oligonucleotide
  Target: ATXN2; (-) strand; PAM type: YTN; PAM sequence: CTC
gtgatccacctgcctcggcc

SEQ ID NO: 69194 - DNA, 20 bp, Artificial Sequence
  Description of Artificial Sequence: Synthetic oligonucleotide
  Target: ATXN2; (-) strand; PAM type: YTN; PAM sequence: TTC
acctcgtgatccacctgcct

SEQ ID NO: 69195 - DNA, 20 bp, Artificial Sequence
  Description of Artificial Sequence: Synthetic oligonucleotide
  Target: ATXN2; (-) strand; PAM type: YTN; PAM sequence: CTT
cacctcgtgatccacctgcc

SEQ ID NO: 69196 - DNA, 20 bp, Artificial Sequence
  Description of Artificial Sequence: Synthetic oligonucleotide
  Target: ATXN2; (-) strand; PAM type: YTN; PAM sequence: CTC
ttcacctcgtgatccacctg

SEQ ID NO: 69197 - DNA, 20 bp, Artificial Sequence
  Description of Artificial Sequence: Synthetic oligonucleotide
  Target: ATXN2; (-) strand; PAM type: YTN; PAM sequence: CTC
gatctcttcacctcgtgatc

SEQ ID NO: 69198 - DNA, 20 bp, Artificial Sequence
  Description of Artificial Sequence: Synthetic oligonucleotide
  Target: ATXN2; (-) strand; PAM type: YTN; PAM sequence: TTG
gccaggatagtctcgatctc

SEQ ID NO: 69199 - DNA, 20 bp, Artificial Sequence
  Description of Artificial Sequence: Synthetic oligonucleotide
  Target: ATXN2; (-) strand; PAM type: YTN; PAM sequence: TTC
accatgttggccaggatagt

SEQ ID NO: 69200 - DNA, 20 bp, Artificial Sequence
  Description of Artificial Sequence: Synthetic oligonucleotide
  Target: ATXN2; (-) strand; PAM type: YTN; PAM sequence: TTT
caccatgttggccaggatag

SEQ ID NO: 69201 - DNA, 20 bp, Artificial Sequence
  Description of Artificial Sequence: Synthetic oligonucleotide
  Target: ATXN2; (-) strand; PAM type: YTN; PAM sequence: TTA
gtagagacggggtttcacca

SEQ ID NO: 69202 - DNA, 20 bp, Artificial Sequence
  Description of Artificial Sequence: Synthetic oligonucleotide
  Target: ATXN2; (-) strand; PAM type: YTN; PAM sequence: TTT
agtagagacggggtttcacc

SEQ ID NO: 69203 - DNA, 20 bp, Artificial Sequence
  Description of Artificial Sequence: Synthetic oligonucleotide
  Target: ATXN2; (-) strand; PAM type: YTN; PAM sequence: TTT
tagtagagacggggtttcac

SEQ ID NO: 69204 - DNA, 20 bp, Artificial Sequence
  Description of Artificial Sequence: Synthetic oligonucleotide
  Target: ATXN2; (-) strand; PAM type: YTN; PAM sequence: TTT
ttagtagagacggggtttca

SEQ ID NO: 69205 - DNA, 20 bp, Artificial Sequence
  Description of Artificial Sequence: Synthetic oligonucleotide
  Target: ATXN2; (-) strand; PAM type: YTN; PAM sequence: CTG
tatttttagtagagacgggg

SEQ ID NO: 69206 - DNA, 20 bp, Artificial Sequence
  Description of Artificial Sequence: Synthetic oligonucleotide
  Target: ATXN2; (-) strand; PAM type: YTN; PAM sequence: TTC
tgtatttttagtagagacgg

SEQ ID NO: 69207 - DNA, 20 bp, Artificial Sequence
  Description of Artificial Sequence: Synthetic oligonucleotide
  Target: ATXN2; (-) strand; PAM type: YTN; PAM sequence: TTT
ctgtatttttagtagagacg

SEQ ID NO: 69208 - DNA, 20 bp, Artificial Sequence
  Description of Artificial Sequence: Synthetic oligonucleotide
  Target: ATXN2; (-) strand; PAM type: YTN; PAM sequence: CTA
atttctgtatttttagtaga

SEQ ID NO: 69209 - DNA, 20 bp, Artificial Sequence
  Description of Artificial Sequence: Synthetic oligonucleotide
  Target: ATXN2; (-) strand; PAM type: YTN; PAM sequence: CTA
ccatgcccatctaatttctg

SEQ ID NO: 69210 - DNA, 20 bp, Artificial Sequence
  Description of Artificial Sequence: Synthetic oligonucleotide
  Target: ATXN2; (-) strand; PAM type: YTN; PAM sequence: CTA
taggcgcgtgctaccatgcc

SEQ ID NO: 69211 - DNA, 20 bp, Artificial Sequence
  Description of Artificial Sequence: Synthetic oligonucleotide
  Target: ATXN2; (-) strand; PAM type: YTN; PAM sequence: CTG
ggactataggcgcgtgctac

SEQ ID NO: 69212 - DNA, 20 bp, Artificial Sequence
  Description of Artificial Sequence: Synthetic oligonucleotide
  Target: ATXN2; (-) strand; PAM type: YTN; PAM sequence: CTC
ccgagtagctgggactatag

SEQ ID NO: 69213 - DNA, 20 bp, Artificial Sequence
  Description of Artificial Sequence: Synthetic oligonucleotide
  Target: ATXN2; (-) strand; PAM type: YTN; PAM sequence: CTC
agcctcccgagtagctggga

SEQ ID NO: 69214 - DNA, 20 bp, Artificial Sequence
  Description of Artificial Sequence: Synthetic oligonucleotide
  Target: ATXN2; (-) strand; PAM type: YTN; PAM sequence: CTG
cctcagcctcccgagtagct

SEQ ID NO: 69215 - DNA, 20 bp, Artificial Sequence
  Description of Artificial Sequence: Synthetic oligonucleotide
  Target: ATXN2; (-) strand; PAM type: YTN; PAM sequence: CTC
ctgcctcagcctcccgagta

SEQ ID NO: 69216 - DNA, 20 bp, Artificial Sequence
  Description of Artificial Sequence: Synthetic oligonucleotide
  Target: ATXN2; (-) strand; PAM type: YTN; PAM sequence: TTC
tcctgcctcagcctcccgag

SEQ ID NO: 69217 - DNA, 20 bp, Artificial Sequence
  Description of Artificial Sequence: Synthetic oligonucleotide
  Target: ATXN2; (-) strand; PAM type: YTN; PAM sequence: TTC
aagcgattctcctgcctcag

SEQ ID NO: 69218 - DNA, 20 bp, Artificial Sequence
  Description of Artificial Sequence: Synthetic oligonucleotide
  Target: ATXN2; (-) strand; PAM type: YTN; PAM sequence: CTG
catcccgggttcaagcgatt

SEQ ID NO: 69219 - DNA, 20 bp, Artificial Sequence
  Description of Artificial Sequence: Synthetic oligonucleotide
  Target: ATXN2; (-) strand; PAM type: YTN; PAM sequence: CTC
tgcatcccgggttcaagcga

SEQ ID NO: 69220 - DNA, 20 bp, Artificial Sequence
  Description of Artificial Sequence: Synthetic oligonucleotide
  Target: ATXN2; (-) strand; PAM type: YTN; PAM sequence: CTG
caacctctgcatcccgggtt

SEQ ID NO: 69221 - DNA, 20 bp, Artificial Sequence
  Description of Artificial Sequence: Synthetic oligonucleotide
  Target: ATXN2; (-) strand; PAM type: YTN; PAM sequence: CTC
actgcaacctctgcatcccg

SEQ ID NO: 69222 - DNA, 20 bp, Artificial Sequence
  Description of Artificial Sequence: Synthetic oligonucleotide
  Target: ATXN2; (-) strand; PAM type: YTN; PAM sequence: CTC
ggctcactgcaacctctgca

SEQ ID NO: 69223 - DNA, 20 bp, Artificial Sequence
  Description of Artificial Sequence: Synthetic oligonucleotide
  Target: ATXN2; (-) strand; PAM type: YTN; PAM sequence: CTG
gagtgcagtggtgcaatctc

SEQ ID NO: 69224 - DNA, 20 bp, Artificial Sequence
  Description of Artificial Sequence: Synthetic oligonucleotide
  Target: ATXN2; (-) strand; PAM type: YTN; PAM sequence: CTC
caggctggagtgcagtggtg

SEQ ID NO: 69225 - DNA, 20 bp, Artificial Sequence
  Description of Artificial Sequence: Synthetic oligonucleotide
  Target: ATXN2; (-) strand; PAM type: YTN; PAM sequence: CTG
tgtctccaggctggagtgca

SEQ ID NO: 69226 - DNA, 20 bp, Artificial Sequence
  Description of Artificial Sequence: Synthetic oligonucleotide
  Target: ATXN2; (-) strand; PAM type: YTN; PAM sequence: CTC
gctgtgtctccaggctggag

SEQ ID NO: 69227 - DNA, 20 bp, Artificial Sequence
  Description of Artificial Sequence: Synthetic oligonucleotide
  Target: ATXN2; (-) strand; PAM type: YTN; PAM sequence: TTG
agagggaatctcgctgtgtc

SEQ ID NO: 69228 - DNA, 20 bp, Artificial Sequence
  Description of Artificial Sequence: Synthetic oligonucleotide
  Target: ATXN2; (-) strand; PAM type: YTN; PAM sequence: TTT
gagagggaatctcgctgtgt

SEQ ID NO: 69229 - DNA, 20 bp, Artificial Sequence
  Description of Artificial Sequence: Synthetic oligonucleotide
  Target: ATXN2; (-) strand; PAM type: YTN; PAM sequence: TTT
tgagagggaatctcgctgtg

SEQ ID NO: 69230 - DNA, 20 bp, Artificial Sequence
  Description of Artificial Sequence: Synthetic oligonucleotide
  Target: ATXN2; (-) strand; PAM type: YTN; PAM sequence: CTT
ttgagagggaatctcgctgt

SEQ ID NO: 69231 - DNA, 20 bp, Artificial Sequence
  Description of Artificial Sequence: Synthetic oligonucleotide
  Target: ATXN2; (-) strand; PAM type: YTN; PAM sequence: TTC
ttttgagagggaatctcgct

SEQ ID NO: 69232 - DNA, 20 bp, Artificial Sequence
  Description of Artificial Sequence: Synthetic oligonucleotide
  Target: ATXN2; (-) strand; PAM type: YTN; PAM sequence: TTT
cttttgagagggaatctcgc

SEQ ID NO: 69233 - DNA, 20 bp, Artificial Sequence
  Description of Artificial Sequence: Synthetic oligonucleotide
  Target: ATXN2; (-) strand; PAM type: YTN; PAM sequence: TTT
tcttttgagagggaatctcg

SEQ ID NO: 69234 - DNA, 20 bp, Artificial Sequence
  Description of Artificial Sequence: Synthetic oligonucleotide
  Target: ATXN2; (-) strand; PAM type: YTN; PAM sequence: TTT
ttcttttgagagggaatctc

SEQ ID NO: 69235 - DNA, 20 bp, Artificial Sequence
  Description of Artificial Sequence: Synthetic oligonucleotide
  Target: ATXN2; (-) strand; PAM type: YTN; PAM sequence: TTT
tttcttttgagagggaatct

SEQ ID NO: 69236 - DNA, 20 bp, Artificial Sequence
  Description of Artificial Sequence: Synthetic oligonucleotide
  Target: ATXN2; (-) strand; PAM type: YTN; PAM sequence: TTT
ttttcttttgagagggaatc

SEQ ID NO: 69237 - DNA, 20 bp, Artificial Sequence
  Description of Artificial Sequence: Synthetic oligonucleotide
  Target: ATXN2; (-) strand; PAM type: YTN; PAM sequence: TTT
tttttcttttgagagggaat

SEQ ID NO: 69238 - DNA, 20 bp, Artificial Sequence
  Description of Artificial Sequence: Synthetic oligonucleotide
  Target: ATXN2; (-) strand; PAM type: YTN; PAM sequence: TTT
ttttttcttttgagagggaa

SEQ ID NO: 69239 - DNA, 20 bp, Artificial Sequence
  Description of Artificial Sequence: Synthetic oligonucleotide
  Target: ATXN2; (-) strand; PAM type: YTN; PAM sequence: CTT
tttttttcttttgagaggga

SEQ ID NO: 69240 - DNA, 20 bp, Artificial Sequence
  Description of Artificial Sequence: Synthetic oligonucleotide
  Target: ATXN2; (-) strand; PAM type: YTN; PAM sequence: TTG
tctttttttttcttttgaga

SEQ ID NO: 69241 - DNA, 20 bp, Artificial Sequence
  Description of Artificial Sequence: Synthetic oligonucleotide
  Target: ATXN2; (-) strand; PAM type: YTN; PAM sequence: TTT
gtctttttttttcttttgag

SEQ ID NO: 69242 - DNA, 20 bp, Artificial Sequence
  Description of Artificial Sequence: Synthetic oligonucleotide
  Target: ATXN2; (-) strand; PAM type: YTN; PAM sequence: TTT
tgtctttttttttcttttga

SEQ ID NO: 69243 - DNA, 20 bp, Artificial Sequence
  Description of Artificial Sequence: Synthetic oligonucleotide
  Target: ATXN2; (-) strand; PAM type: YTN; PAM sequence: TTG
gttttgtctttttttttctt

SEQ ID NO: 69244 - DNA, 20 bp, Artificial Sequence
  Description of Artificial Sequence: Synthetic oligonucleotide
  Target: ATXN2; (-) strand; PAM type: YTN; PAM sequence: TTT
ggttttgtctttttttttct

SEQ ID NO: 69245 - DNA, 20 bp, Artificial Sequence
  Description of Artificial Sequence: Synthetic oligonucleotide
  Target: ATXN2; (-) strand; PAM type: YTN; PAM sequence: TTT
tggttttgtctttttttttc

SEQ ID NO: 69246 - DNA, 20 bp, Artificial Sequence
  Description of Artificial Sequence: Synthetic oligonucleotide
  Target: ATXN2; (-) strand; PAM type: YTN; PAM sequence: CTA
aacaaattttggttttgtct

SEQ ID NO: 69247 - DNA, 20 bp, Artificial Sequence
  Description of Artificial Sequence: Synthetic oligonucleotide
  Target: ATXN2; (-) strand; PAM type: YTN; PAM sequence: CTC
taaacaaattttggttttgt

SEQ ID NO: 69248 - DNA, 20 bp, Artificial Sequence
  Description of Artificial Sequence: Synthetic oligonucleotide
  Target: ATXN2; (-) strand; PAM type: YTN; PAM sequence: TTA
tgctctaaacaaattttggt

SEQ ID NO: 69249 - DNA, 20 bp, Artificial Sequence
  Description of Artificial Sequence: Synthetic oligonucleotide
  Target: ATXN2; (-) strand; PAM type: YTN; PAM sequence: TTT
atgctctaaacaaattttgg

SEQ ID NO: 69250 - DNA, 20 bp, Artificial Sequence
  Description of Artificial Sequence: Synthetic oligonucleotide
  Target: ATXN2; (-) strand; PAM type: YTN; PAM sequence: TTT
tatgctctaaacaaattttg

SEQ ID NO: 69251 - DNA, 20 bp, Artificial Sequence
  Description of Artificial Sequence: Synthetic oligonucleotide
  Target: ATXN2; (-) strand; PAM type: YTN; PAM sequence: TTT
ttatgctctaaacaaatttt

SEQ ID NO: 69252 - DNA, 20 bp, Artificial Sequence
  Description of Artificial Sequence: Synthetic oligonucleotide
  Target: ATXN2; (-) strand; PAM type: YTN; PAM sequence: CTG
tttttatgctctaaacaaat

SEQ ID NO: 69253 - DNA, 20 bp, Artificial Sequence
  Description of Artificial Sequence: Synthetic oligonucleotide
  Target: ATXN2; (-) strand; PAM type: YTN; PAM sequence: CTA
taccctgtttttatgctcta

SEQ ID NO: 69254 - DNA, 20 bp, Artificial Sequence
  Description of Artificial Sequence: Synthetic oligonucleotide
  Target: ATXN2; (-) strand; PAM type: YTN; PAM sequence: TTG
cctataccctgtttttatgc

SEQ ID NO: 69255 - DNA, 20 bp, Artificial Sequence
  Description of Artificial Sequence: Synthetic oligonucleotide
  Target: ATXN2; (-) strand; PAM type: YTN; PAM sequence: TTT
gcctataccctgtttttatg

SEQ ID NO: 69256 - DNA, 20 bp, Artificial Sequence
  Description of Artificial Sequence: Synthetic oligonucleotide
  Target: ATXN2; (-) strand; PAM type: YTN; PAM sequence: TTA
aaaaaagggaataaatgtag

SEQ ID NO: 69257 - DNA, 20 bp, Artificial Sequence
  Description of Artificial Sequence: Synthetic oligonucleotide
  Target: ATXN2; (-) strand; PAM type: YTN; PAM sequence: TTC
cattaaaaaaagggaataaa

SEQ ID NO: 69258 - DNA, 20 bp, Artificial Sequence
  Description of Artificial Sequence: Synthetic oligonucleotide
  Target: ATXN2; (-) strand; PAM type: YTN; PAM sequence: TTT
ccattaaaaaaagggaataa

SEQ ID NO: 69259 - DNA, 20 bp, Artificial Sequence
  Description of Artificial Sequence: Synthetic oligonucleotide
  Target: ATXN2; (-) strand; PAM type: YTN; PAM sequence: CTG
tgataaatttccattaaaaa

SEQ ID NO: 69260 - DNA, 20 bp, Artificial Sequence
  Description of Artificial Sequence: Synthetic oligonucleotide
  Target: ATXN2; (-) strand; PAM type: YTN; PAM sequence: TTA
ccaactgtgataaatttcca

SEQ ID NO: 69261 - DNA, 20 bp, Artificial Sequence
  Description of Artificial Sequence: Synthetic oligonucleotide
  Target: ATXN2; (-) strand; PAM type: YTN; PAM sequence: TTA
ttaccaactgtgataaattt

SEQ ID NO: 69262 - DNA, 20 bp, Artificial Sequence
  Description of Artificial Sequence: Synthetic oligonucleotide
  Target: ATXN2; (-) strand; PAM type: YTN; PAM sequence: CTT
attaccaactgtgataaatt

SEQ ID NO: 69263 - DNA, 20 bp, Artificial Sequence
  Description of Artificial Sequence: Synthetic oligonucleotide
  Target: ATXN2; (-) strand; PAM type: YTN; PAM sequence: CTC
ttattaccaactgtgataaa

SEQ ID NO: 69264 - DNA, 20 bp, Artificial Sequence
  Description of Artificial Sequence: Synthetic oligonucleotide
  Target: ATXN2; (-) strand; PAM type: YTN; PAM sequence: TTC
tcttattaccaactgtgata

SEQ ID NO: 69265 - DNA, 20 bp, Artificial Sequence
  Description of Artificial Sequence: Synthetic oligonucleotide
  Target: ATXN2; (-) strand; PAM type: YTN; PAM sequence: TTT
ctcttattaccaactgtgat

SEQ ID NO: 69266 - DNA, 20 bp, Artificial Sequence
  Description of Artificial Sequence: Synthetic oligonucleotide
  Target: ATXN2; (-) strand; PAM type: YTN; PAM sequence: TTT
tctcttattaccaactgtga

SEQ ID NO: 69267 - DNA, 20 bp, Artificial Sequence
  Description of Artificial Sequence: Synthetic oligonucleotide
  Target: ATXN2; (-) strand; PAM type: YTN; PAM sequence: TTT
ttctcttattaccaactgtg

SEQ ID NO: 69268 - DNA, 20 bp, Artificial Sequence
  Description of Artificial Sequence: Synthetic oligonucleotide
  Target: ATXN2; (-) strand; PAM type: YTN; PAM sequence: TTA
catgaaataatttttctctt

SEQ ID NO: 69269 - DNA, 20 bp, Artificial Sequence
  Description of Artificial Sequence: Synthetic oligonucleotide
  Target: ATXN2; (-) strand; PAM type: YTN; PAM sequence: TTA
aacaattacatgaaataatt

SEQ ID NO: 69270 - DNA, 20 bp, Artificial Sequence
  Description of Artificial Sequence: Synthetic oligonucleotide
  Target: ATXN2; (-) strand; PAM type: YTN; PAM sequence: TTA
agttaaacaattacatgaaa

SEQ ID NO: 69271 - DNA, 20 bp, Artificial Sequence
  Description of Artificial Sequence: Synthetic oligonucleotide
  Target: ATXN2; (-) strand; PAM type: YTN; PAM sequence: TTT
aagttaaacaattacatgaa

SEQ ID NO: 69272 - DNA, 20 bp, Artificial Sequence
  Description of Artificial Sequence: Synthetic oligonucleotide
  Target: ATXN2; (-) strand; PAM type: YTN; PAM sequence: TTT
taagttaaacaattacatga

SEQ ID NO: 69273 - DNA, 20 bp, Artificial Sequence
  Description of Artificial Sequence: Synthetic oligonucleotide
  Target: ATXN2; (-) strand; PAM type: YTN; PAM sequence: TTT
ttaagttaaacaattacatg

SEQ ID NO: 69274 - DNA, 20 bp, Artificial Sequence
  Description of Artificial Sequence: Synthetic oligonucleotide
  Target: ATXN2; (-) strand; PAM type: YTN; PAM sequence: TTA
gtttttaagttaaacaatta

SEQ ID NO: 69275 - DNA, 20 bp, Artificial Sequence
  Description of Artificial Sequence: Synthetic oligonucleotide
  Target: ATXN2; (-) strand; PAM type: YTN; PAM sequence: TTG
ttagtttttaagttaaacaa

SEQ ID NO: 69276 - DNA, 20 bp, Artificial Sequence
  Description of Artificial Sequence: Synthetic oligonucleotide
  Target: ATXN2; (-) strand; PAM type: YTN; PAM sequence: TTT
gttagtttttaagttaaaca

SEQ ID NO: 69277 - DNA, 20 bp, Artificial Sequence
  Description of Artificial Sequence: Synthetic oligonucleotide
  Target: ATXN2; (-) strand; PAM type: YTN; PAM sequence: TTA
tgatgaataaatgtttgtta

SEQ ID NO: 69278 - DNA, 20 bp, Artificial Sequence
  Description of Artificial Sequence: Synthetic oligonucleotide
  Target: ATXN2; (-) strand; PAM type: YTN; PAM sequence: TTT
atgatgaataaatgtttgtt

SEQ ID NO: 69279 - DNA, 20 bp, Artificial Sequence
  Description of Artificial Sequence: Synthetic oligonucleotide
  Target: ATXN2; (-) strand; PAM type: YTN; PAM sequence: TTA
atttatgatgaataaatgtt

SEQ ID NO: 69280 - DNA, 20 bp, Artificial Sequence
  Description of Artificial Sequence: Synthetic oligonucleotide
  Target: ATXN2; (-) strand; PAM type: YTN; PAM sequence: CTT
aatttatgatgaataaatgt

SEQ ID NO: 69281 - DNA, 20 bp, Artificial Sequence
  Description of Artificial Sequence: Synthetic oligonucleotide
  Target: ATXN2; (-) strand; PAM type: YTN; PAM sequence: TTC
atcagcttaatttatgatga

SEQ ID NO: 69282 - DNA, 20 bp, Artificial Sequence
  Description of Artificial Sequence: Synthetic oligonucleotide
  Target: ATXN2; (-) strand; PAM type: YTN; PAM sequence: TTT
catcagcttaatttatgatg

SEQ ID NO: 69283 - DNA, 20 bp, Artificial Sequence
  Description of Artificial Sequence: Synthetic oligonucleotide
  Target: ATXN2; (-) strand; PAM type: YTN; PAM sequence: TTT
tcatcagcttaatttatgat

SEQ ID NO: 69284 - DNA, 20 bp, Artificial Sequence
  Description of Artificial Sequence: Synthetic oligonucleotide
  Target: ATXN2; (-) strand; PAM type: YTN; PAM sequence: TTG
attttcatcagcttaattta

SEQ ID NO: 69285 - DNA, 20 bp, Artificial Sequence
  Description of Artificial Sequence: Synthetic oligonucleotide
  Target: ATXN2; (-) strand; PAM type: YTN; PAM sequence: TTT
gattttcatcagcttaattt

SEQ ID NO: 69286 - DNA, 20 bp, Artificial Sequence
  Description of Artificial Sequence: Synthetic oligonucleotide
  Target: ATXN2; (-) strand; PAM type: YTN; PAM sequence: CTT
tgattttcatcagcttaatt

SEQ ID NO: 69287 - DNA, 20 bp, Artificial Sequence
  Description of Artificial Sequence: Synthetic oligonucleotide
  Target: ATXN2; (-) strand; PAM type: YTN; PAM sequence: TTG
tctttgattttcatcagctt

SEQ ID NO: 69288 - DNA, 20 bp, Artificial Sequence
  Description of Artificial Sequence: Synthetic oligonucleotide
  Target: ATXN2; (-) strand; PAM type: YTN; PAM sequence: TTT
gtctttgattttcatcagct

SEQ ID NO: 69289 - DNA, 20 bp, Artificial Sequence
  Description of Artificial Sequence: Synthetic oligonucleotide
  Target: ATXN2; (-) strand; PAM type: YTN; PAM sequence: TTA
gtgcatttgtctttgatttt

SEQ ID NO: 69290 - DNA, 20 bp, Artificial Sequence
  Description of Artificial Sequence: Synthetic oligonucleotide
  Target: ATXN2; (-) strand; PAM type: YTN; PAM sequence: TTT
agtgcatttgtctttgattt

SEQ ID NO: 69291 - DNA, 20 bp, Artificial Sequence
  Description of Artificial Sequence: Synthetic oligonucleotide
  Target: ATXN2; (-) strand; PAM type: YTN; PAM sequence: TTT
tagtgcatttgtctttgatt

SEQ ID NO: 69292 - DNA, 20 bp, Artificial Sequence
  Description of Artificial Sequence: Synthetic oligonucleotide
  Target: ATXN2; (-) strand; PAM type: YTN; PAM sequence: TTA
ttttagtgcatttgtctttg

SEQ ID NO: 69293 - DNA, 20 bp, Artificial Sequence
  Description of Artificial Sequence: Synthetic oligonucleotide
  Target: ATXN2; (-) strand; PAM type: YTN; PAM sequence: TTT
attttagtgcatttgtcttt

SEQ ID NO: 69294 - DNA, 20 bp, Artificial Sequence
  Description of Artificial Sequence: Synthetic oligonucleotide
  Target: ATXN2; (-) strand; PAM type: YTN; PAM sequence: TTT
tattttagtgcatttgtctt

SEQ ID NO: 69295 - DNA, 20 bp, Artificial Sequence
  Description of Artificial Sequence: Synthetic oligonucleotide
  Target: ATXN2; (-) strand; PAM type: YTN; PAM sequence: TTT
ttattttagtgcatttgtct

SEQ ID NO: 69296 - DNA, 20 bp, Artificial Sequence
  Description of Artificial Sequence: Synthetic oligonucleotide
  Target: ATXN2; (-) strand; PAM type: YTN; PAM sequence: TTG
tttttattttagtgcatttg

SEQ ID NO: 69297 - DNA, 20 bp, Artificial Sequence
  Description of Artificial Sequence: Synthetic oligonucleotide
  Target: ATXN2; (-) strand; PAM type: YTN; PAM sequence: TTT
gtttttattttagtgcattt

SEQ ID NO: 69298 - DNA, 20 bp, Artificial Sequence
  Description of Artificial Sequence: Synthetic oligonucleotide
  Target: ATXN2; (-) strand; PAM type: YTN; PAM sequence: TTG
aaaagtttgtttttatttta

SEQ ID NO: 69299 - DNA, 20 bp, Artificial Sequence
  Description of Artificial Sequence: Synthetic oligonucleotide
  Target: ATXN2; (-) strand; PAM type: YTN; PAM sequence: TTT
gaaaagtttgtttttatttt

SEQ ID NO: 69300 - DNA, 20 bp, Artificial Sequence
  Description of Artificial Sequence: Synthetic oligonucleotide
  Target: ATXN2; (-) strand; PAM type: YTN; PAM sequence: TTC
gtatacgtaagtttgaaaag

SEQ ID NO: 69301 - DNA, 20 bp, Artificial Sequence
  Description of Artificial Sequence: Synthetic oligonucleotide
  Target: ATXN2; (-) strand; PAM type: YTN; PAM sequence: CTT
cgtatacgtaagtttgaaaa

SEQ ID NO: 69302 - DNA, 20 bp, Artificial Sequence
  Description of Artificial Sequence: Synthetic oligonucleotide
  Target: ATXN2; (-) strand; PAM type: YTN; PAM sequence: TTA
tcttcgtatacgtaagtttg

SEQ ID NO: 69303 - DNA, 20 bp, Artificial Sequence
  Description of Artificial Sequence: Synthetic oligonucleotide
  Target: ATXN2; (-) strand; PAM type: YTN; PAM sequence: TTT
atcttcgtatacgtaagttt

SEQ ID NO: 69304 - DNA, 20 bp, Artificial Sequence
  Description of Artificial Sequence: Synthetic oligonucleotide
  Target: ATXN2; (-) strand; PAM type: YTN; PAM sequence: CTA
cgtatgatagcagtttatct

SEQ ID NO: 69305 - DNA, 20 bp, Artificial Sequence
  Description of Artificial Sequence: Synthetic oligonucleotide
  Target: ATXN2; (-) strand; PAM type: YTN; PAM sequence: TTA
tggtgtagtgtctacgtatg

SEQ ID NO: 69306 - DNA, 20 bp, Artificial Sequence
  Description of Artificial Sequence: Synthetic oligonucleotide
  Target: ATXN2; (-) strand; PAM type: YTN; PAM sequence: TTC
gatataatgaagaaaattat

SEQ ID NO: 69307 - DNA, 20 bp, Artificial Sequence
  Description of Artificial Sequence: Synthetic oligonucleotide
  Target: ATXN2; (-) strand; PAM type: YTN; PAM sequence: TTT
cgatataatgaagaaaatta

SEQ ID NO: 69308 - DNA, 20 bp, Artificial Sequence
  Description of Artificial Sequence: Synthetic oligonucleotide
  Target: ATXN2; (-) strand; PAM type: YTN; PAM sequence: CTA
atggatgggatcccaatgat

SEQ ID NO: 69309 - DNA, 20 bp, Artificial Sequence
  Description of Artificial Sequence: Synthetic oligonucleotide
  Target: ATXN2; (-) strand; PAM type: YTN; PAM sequence: CTA
gtctaatggatgggatccca

SEQ ID NO: 69310 - DNA, 20 bp, Artificial Sequence
  Description of Artificial Sequence: Synthetic oligonucleotide
  Target: ATXN2; (-) strand; PAM type: YTN; PAM sequence: TTC
tagtctaatggatgggatcc

SEQ ID NO: 69311 - DNA, 20 bp, Artificial Sequence
  Description of Artificial Sequence: Synthetic oligonucleotide
  Target: ATXN2; (-) strand; PAM type: YTN; PAM sequence: CTT
ctagtctaatggatgggatc

SEQ ID NO: 69312 - DNA, 20 bp, Artificial Sequence
  Description of Artificial Sequence: Synthetic oligonucleotide
  Target: ATXN2; (-) strand; PAM type: YTN; PAM sequence: TTC
ttctagtctaatggatggga

SEQ ID NO: 69313 - DNA, 20 bp, Artificial Sequence
  Description of Artificial Sequence: Synthetic oligonucleotide
  Target: ATXN2; (-) strand; PAM type: YTN; PAM sequence: TTT
cttctagtctaatggatggg

SEQ ID NO: 69314 - DNA, 20 bp, Artificial Sequence
  Description of Artificial Sequence: Synthetic oligonucleotide
  Target: ATXN2; (-) strand; PAM type: YTN; PAM sequence: TTT
tcttctagtctaatggatgg

SEQ ID NO: 69315 - DNA, 20 bp, Artificial Sequence
  Description of Artificial Sequence: Synthetic oligonucleotide
  Target: ATXN2; (-) strand; PAM type: YTN; PAM sequence: TTC
attttcttctagtctaatgg

SEQ ID NO: 69316 - DNA, 20 bp, Artificial Sequence
  Description of Artificial Sequence: Synthetic oligonucleotide
  Target: ATXN2; (-) strand; PAM type: YTN; PAM sequence: CTT
cattttcttctagtctaatg

SEQ ID NO: 69317 - DNA, 20 bp, Artificial Sequence
  Description of Artificial Sequence: Synthetic oligonucleotide
  Target: ATXN2; (-) strand; PAM type: YTN; PAM sequence: TTG
aaaaacaagcttcattttct

SEQ ID NO: 69318 - DNA, 20 bp, Artificial Sequence
  Description of Artificial Sequence: Synthetic oligonucleotide
  Target: ATXN2; (-) strand; PAM type: YTN; PAM sequence: TTT
gaaaaacaagcttcattttc

SEQ ID NO: 69319 - DNA, 20 bp, Artificial Sequence
  Description of Artificial Sequence: Synthetic oligonucleotide
  Target: ATXN2; (-) strand; PAM type: YTN; PAM sequence: TTT
tgaaaaacaagcttcatttt

SEQ ID NO: 69320 - DNA, 20 bp, Artificial Sequence
  Description of Artificial Sequence: Synthetic oligonucleotide
  Target: ATXN2; (-) strand; PAM type: YTN; PAM sequence: TTG
acattttgaaaaacaagctt

SEQ ID NO: 69321 - DNA, 20 bp, Artificial Sequence
  Description of Artificial Sequence: Synthetic oligonucleotide
  Target: ATXN2; (-) strand; PAM type: YTN; PAM sequence: TTT
gacattttgaaaaacaagct

SEQ ID NO: 69322 - DNA, 20 bp, Artificial Sequence
  Description of Artificial Sequence: Synthetic oligonucleotide
  Target: ATXN2; (-) strand; PAM type: YTN; PAM sequence: CTT
tgacattttgaaaaacaagc

SEQ ID NO: 69323 - DNA, 20 bp, Artificial Sequence
  Description of Artificial Sequence: Synthetic oligonucleotide
  Target: ATXN2; (-) strand; PAM type: YTN; PAM sequence: CTA
ctttgacattttgaaaaaca

SEQ ID NO: 69324 - DNA, 20 bp, Artificial Sequence
  Description of Artificial Sequence: Synthetic oligonucleotide
  Target: ATXN2; (-) strand; PAM type: YTN; PAM sequence: CTG
aatgaaagggaacaactact

SEQ ID NO: 69325 - DNA, 20 bp, Artificial Sequence
  Description of Artificial Sequence: Synthetic oligonucleotide
  Target: ATXN2; (-) strand; PAM type: YTN; PAM sequence: TTA
taactgaatgaaagggaaca

SEQ ID NO: 69326 - DNA, 20 bp, Artificial Sequence
  Description of Artificial Sequence: Synthetic oligonucleotide
  Target: ATXN2; (-) strand; PAM type: YTN; PAM sequence: TTG
gttataactgaatgaaaggg

SEQ ID NO: 69327 - DNA, 20 bp, Artificial Sequence
  Description of Artificial Sequence: Synthetic oligonucleotide
  Target: ATXN2; (-) strand; PAM type: YTN; PAM sequence: TTA
atatagatgttggttataac

SEQ ID NO: 69328 - DNA, 20 bp, Artificial Sequence
  Description of Artificial Sequence: Synthetic oligonucleotide
  Target: ATXN2; (-) strand; PAM type: YTN; PAM sequence: TTG
ttaatatagatgttggttat

SEQ ID NO: 69329 - DNA, 20 bp, Artificial Sequence
  Description of Artificial Sequence: Synthetic oligonucleotide
  Target: ATXN2; (-) strand; PAM type: YTN; PAM sequence: TTA
gatattgttaatatagatgt

SEQ ID NO: 69330 - DNA, 20 bp, Artificial Sequence
  Description of Artificial Sequence: Synthetic oligonucleotide
  Target: ATXN2; (-) strand; PAM type: YTN; PAM sequence: TTG
ttagatattgttaatataga

SEQ ID NO: 69331 - DNA, 20 bp, Artificial Sequence
  Description of Artificial Sequence: Synthetic oligonucleotide
  Target: ATXN2; (-) strand; PAM type: YTN; PAM sequence: TTT
gttagatattgttaatatag

SEQ ID NO: 69332 - DNA, 20 bp, Artificial Sequence
  Description of Artificial Sequence: Synthetic oligonucleotide
  Target: ATXN2; (-) strand; PAM type: YTN; PAM sequence: CTC
aagtagtttgttagatattg

SEQ ID NO: 69333 - DNA, 20 bp, Artificial Sequence
  Description of Artificial Sequence: Synthetic oligonucleotide
  Target: ATXN2; (-) strand; PAM type: YTN; PAM sequence: TTG
ctcaagtagtttgttagata

SEQ ID NO: 69334 - DNA, 20 bp, Artificial Sequence
  Description of Artificial Sequence: Synthetic oligonucleotide
  Target: ATXN2; (-) strand; PAM type: YTN; PAM sequence: TTT
gctcaagtagtttgttagat

SEQ ID NO: 69335 - DNA, 20 bp, Artificial Sequence
  Description of Artificial Sequence: Synthetic oligonucleotide
  Target: ATXN2; (-) strand; PAM type: YTN; PAM sequence: TTT
tgctcaagtagtttgttaga

SEQ ID NO: 69336 - DNA, 20 bp, Artificial Sequence
  Description of Artificial Sequence: Synthetic oligonucleotide
  Target: ATXN2; (-) strand; PAM type: YTN; PAM sequence: CTA
attttgctcaagtagtttgt

SEQ ID NO: 69337 - DNA, 20 bp, Artificial Sequence
  Description of Artificial Sequence: Synthetic oligonucleotide
  Target: ATXN2; (-) strand; PAM type: YTN; PAM sequence: TTG
ctaattttgctcaagtagtt

SEQ ID NO: 69338 - DNA, 20 bp, Artificial Sequence
  Description of Artificial Sequence: Synthetic oligonucleotide
  Target: ATXN2; (-) strand; PAM type: YTN; PAM sequence: TTT
gctaattttgctcaagtagt

SEQ ID NO: 69339 - DNA, 20 bp, Artificial Sequence
  Description of Artificial Sequence: Synthetic oligonucleotide
  Target: ATXN2; (-) strand; PAM type: YTN; PAM sequence: CTA
atttgctaattttgctcaag

SEQ ID NO: 69340 - DNA, 20 bp, Artificial Sequence
  Description of Artificial Sequence: Synthetic oligonucleotide
  Target: ATXN2; (-) strand; PAM type: YTN; PAM sequence: TTC
taatttgctaattttgctca

SEQ ID NO: 69341 - DNA, 20 bp, Artificial Sequence
  Description of Artificial Sequence: Synthetic oligonucleotide
  Target: ATXN2; (-) strand; PAM type: YTN; PAM sequence: TTT
ctaatttgctaattttgctc

SEQ ID NO: 69342 - DNA, 20 bp, Artificial Sequence
  Description of Artificial Sequence: Synthetic oligonucleotide
  Target: ATXN2; (-) strand; PAM type: YTN; PAM sequence: TTT
tctaatttgctaattttgct

SEQ ID NO: 69343 - DNA, 20 bp, Artificial Sequence
  Description of Artificial Sequence: Synthetic oligonucleotide
  Target: ATXN2; (-) strand; PAM type: YTN; PAM sequence: CTA
ttttctaatttgctaatttt

SEQ ID NO: 69344 - DNA, 20 bp, Artificial Sequence
  Description of Artificial Sequence: Synthetic oligonucleotide
  Target: ATXN2; (-) strand; PAM type: YTN; PAM sequence: TTC
ctattttctaatttgctaat

SEQ ID NO: 69345 - DNA, 20 bp, Artificial Sequence
  Description of Artificial Sequence: Synthetic oligonucleotide
  Target: ATXN2; (-) strand; PAM type: YTN; PAM sequence: TTT
cctattttctaatttgctaa

SEQ ID NO: 69346 - DNA, 20 bp, Artificial Sequence
  Description of Artificial Sequence: Synthetic oligonucleotide
  Target: ATXN2; (-) strand; PAM type: YTN; PAM sequence: TTT
tcctattttctaatttgcta

SEQ ID NO: 69347 - DNA, 20 bp, Artificial Sequence
  Description of Artificial Sequence: Synthetic oligonucleotide
  Target: ATXN2; (-) strand; PAM type: YTN; PAM sequence: TTT
ttcctattttctaatttgct

SEQ ID NO: 69348 - DNA, 20 bp, Artificial Sequence
  Description of Artificial Sequence: Synthetic oligonucleotide
  Target: ATXN2; (-) strand; PAM type: YTN; PAM sequence: TTT
tttcctattttctaatttgc

SEQ ID NO: 69349 - DNA, 20 bp, Artificial Sequence
  Description of Artificial Sequence: Synthetic oligonucleotide
  Target: ATXN2; (-) strand; PAM type: YTN; PAM sequence: TTA
aggaaattttttcctatttt

SEQ ID NO: 69350 - DNA, 20 bp, Artificial Sequence
  Description of Artificial Sequence: Synthetic oligonucleotide
  Target: ATXN2; (-) strand; PAM type: YTN; PAM sequence: TTT
aaggaaattttttcctattt

SEQ ID NO: 69351 - DNA, 20 bp, Artificial Sequence
  Description of Artificial Sequence: Synthetic oligonucleotide
  Target: ATXN2; (-) strand; PAM type: YTN; PAM sequence: TTT
taaggaaattttttcctatt

SEQ ID NO: 69352 - DNA, 20 bp, Artificial Sequence
  Description of Artificial Sequence: Synthetic oligonucleotide
  Target: ATXN2; (-) strand; PAM type: YTN; PAM sequence: TTT
ttaaggaaattttttcctat

SEQ ID NO: 69353 - DNA, 20 bp, Artificial Sequence
  Description of Artificial Sequence: Synthetic oligonucleotide
  Target: ATXN2; (-) strand; PAM type: YTN; PAM sequence: CTA
aaacatttttaaggaaattt

SEQ ID NO: 69354 - DNA, 20 bp, Artificial Sequence
  Description of Artificial Sequence: Synthetic oligonucleotide
  Target: ATXN2; (-) strand; PAM type: YTN; PAM sequence: TTC
taaaacatttttaaggaaat

SEQ ID NO: 69355 - DNA, 20 bp, Artificial Sequence
  Description of Artificial Sequence: Synthetic oligonucleotide
  Target: ATXN2; (-) strand; PAM type: YTN; PAM sequence: TTT
ctaaaacatttttaaggaaa

SEQ ID NO: 69356 - DNA, 20 bp, Artificial Sequence
  Description of Artificial Sequence: Synthetic oligonucleotide
  Target: ATXN2; (-) strand; PAM type: YTN; PAM sequence: TTT
tctaaaacatttttaaggaa

SEQ ID NO: 69357 - DNA, 20 bp, Artificial Sequence
  Description of Artificial Sequence: Synthetic oligonucleotide
  Target: ATXN2; (-) strand; PAM type: YTN; PAM sequence: TTT
ttctaaaacatttttaagga

SEQ ID NO: 69358 - DNA, 20 bp, Artificial Sequence
  Description of Artificial Sequence: Synthetic oligonucleotide
  Target: ATXN2; (-) strand; PAM type: YTN; PAM sequence: CTG
ataagtatttttctaaaaca

SEQ ID NO: 69359 - DNA, 20 bp, Artificial Sequence
  Description of Artificial Sequence: Synthetic oligonucleotide
  Target: ATXN2; (-) strand; PAM type: YTN; PAM sequence: CTG
gaggggctgataagtatttt

SEQ ID NO: 69360 - DNA, 20 bp, Artificial Sequence
  Description of Artificial Sequence: Synthetic oligonucleotide
  Target: ATXN2; (-) strand; PAM type: YTN; PAM sequence: TTA
tcaactggaggggctgataa

SEQ ID NO: 69361 - DNA, 20 bp, Artificial Sequence
  Description of Artificial Sequence: Synthetic oligonucleotide
  Target: ATXN2; (-) strand; PAM type: YTN; PAM sequence: CTT
atcaactggaggggctgata

SEQ ID NO: 69362 - DNA, 20 bp, Artificial Sequence
  Description of Artificial Sequence: Synthetic oligonucleotide
  Target: ATXN2; (-) strand; PAM type: YTN; PAM sequence: TTA
cttatcaactggaggggctg

SEQ ID NO: 69363 - DNA, 20 bp, Artificial Sequence
  Description of Artificial Sequence: Synthetic oligonucleotide
  Target: ATXN2; (-) strand; PAM type: YTN; PAM sequence: TTG
tatagttacttatcaactgg

SEQ ID NO: 69364 - DNA, 20 bp, Artificial Sequence
  Description of Artificial Sequence: Synthetic oligonucleotide
  Target: ATXN2; (-) strand; PAM type: YTN; PAM sequence: TTG
tgttgtatagttacttatca

SEQ ID NO: 69365 - DNA, 20 bp, Artificial Sequence
  Description of Artificial Sequence: Synthetic oligonucleotide
  Target: ATXN2; (-) strand; PAM type: YTN; PAM sequence: CTC
aaataattgtgttgtatagt

SEQ ID NO: 69366 - DNA, 20 bp, Artificial Sequence
  Description of Artificial Sequence: Synthetic oligonucleotide
  Target: ATXN2; (-) strand; PAM type: YTN; PAM sequence: CTG
ctcaaataattgtgttgtat

SEQ ID NO: 69367 - DNA, 20 bp, Artificial Sequence
  Description of Artificial Sequence: Synthetic oligonucleotide
  Target: ATXN2; (-) strand; PAM type: YTN; PAM sequence: TTA
aaaataactgctcaaataat

SEQ ID NO: 69368 - DNA, 20 bp, Artificial Sequence
  Description of Artificial Sequence: Synthetic oligonucleotide
  Target: ATXN2; (-) strand; PAM type: YTN; PAM sequence: TTT
aaaaataactgctcaaataa

SEQ ID NO: 69369 - DNA, 20 bp, Artificial Sequence
  Description of Artificial Sequence: Synthetic oligonucleotide
  Target: ATXN2; (-) strand; PAM type: YTN; PAM sequence: CTT
taaaaataactgctcaaata

SEQ ID NO: 69370 - DNA, 20 bp, Artificial Sequence
  Description of Artificial Sequence: Synthetic oligonucleotide
  Target: ATXN2; (-) strand; PAM type: YTN; PAM sequence: CTA
aactttaaaaataactgctc

SEQ ID NO: 69371 - DNA, 20 bp, Artificial Sequence
  Description of Artificial Sequence: Synthetic oligonucleotide
  Target: ATXN2; (-) strand; PAM type: YTN; PAM sequence: TTC
taaactttaaaaataactgc

SEQ ID NO: 69372 - DNA, 20 bp, Artificial Sequence
  Description of Artificial Sequence: Synthetic oligonucleotide
  Target: ATXN2; (-) strand; PAM type: YTN; PAM sequence: TTA
aaatgttctaaactttaaaa

SEQ ID NO: 69373 - DNA, 20 bp, Artificial Sequence
  Description of Artificial Sequence: Synthetic oligonucleotide
  Target: ATXN2; (-) strand; PAM type: YTN; PAM sequence: TTA
tgaagtaattaaaatgttct

SEQ ID NO: 69374 - DNA, 20 bp, Artificial Sequence
  Description of Artificial Sequence: Synthetic oligonucleotide
  Target: ATXN2; (-) strand; PAM type: YTN; PAM sequence: TTT
atgaagtaattaaaatgttc

SEQ ID NO: 69375 - DNA, 20 bp, Artificial Sequence
  Description of Artificial Sequence: Synthetic oligonucleotide
  Target: ATXN2; (-) strand; PAM type: YTN; PAM sequence: TTT
tatgaagtaattaaaatgtt

SEQ ID NO: 69376 - DNA, 20 bp, Artificial Sequence
  Description of Artificial Sequence: Synthetic oligonucleotide
  Target: ATXN2; (-) strand; PAM type: YTN; PAM sequence: CTA
ttttatgaagtaattaaaat

SEQ ID NO: 69377 - DNA, 20 bp, Artificial Sequence
  Description of Artificial Sequence: Synthetic oligonucleotide
  Target: ATXN2; (-) strand; PAM type: YTN; PAM sequence: CTG
aaggctattttatgaagtaa

SEQ ID NO: 69378 - DNA, 20 bp, Artificial Sequence
  Description of Artificial Sequence: Synthetic oligonucleotide
  Target: ATXN2; (-) strand; PAM type: YTN; PAM sequence: CTG
atctgaaggctattttatga

SEQ ID NO: 69379 - DNA, 20 bp, Artificial Sequence
  Description of Artificial Sequence: Synthetic oligonucleotide
  Target: ATXN2; (-) strand; PAM type: YTN; PAM sequence: TTA
gagaaaagagagaaccctga

SEQ ID NO: 69380 - DNA, 20 bp, Artificial Sequence
  Description of Artificial Sequence: Synthetic oligonucleotide
  Target: ATXN2; (-) strand; PAM type: YTN; PAM sequence: TTA
caggttagagaaaagagaga

SEQ ID NO: 69381 - DNA, 20 bp, Artificial Sequence
  Description of Artificial Sequence: Synthetic oligonucleotide
  Target: ATXN2; (-) strand; PAM type: YTN; PAM sequence: TTT
acaggttagagaaaagagag

SEQ ID NO: 69382 - DNA, 20 bp, Artificial Sequence
  Description of Artificial Sequence: Synthetic oligonucleotide
  Target: ATXN2; (-) strand; PAM type: YTN; PAM sequence: TTT
tacaggttagagaaaagaga

SEQ ID NO: 69383 - DNA, 20 bp, Artificial Sequence
  Description of Artificial Sequence: Synthetic oligonucleotide
  Target: ATXN2; (-) strand; PAM type: YTN; PAM sequence: CTT
ttacaggttagagaaaagag

SEQ ID NO: 69384 - DNA, 20 bp, Artificial Sequence
  Description of Artificial Sequence: Synthetic oligonucleotide
  Target: ATXN2; (-) strand; PAM type: YTN; PAM sequence: CTG
aaaggtggcttttacaggtt

SEQ ID NO: 69385 - DNA, 20 bp, Artificial Sequence
  Description of Artificial Sequence: Synthetic oligonucleotide
  Target: ATXN2; (-) strand; PAM type: YTN; PAM sequence: CTA
actgaaaggtggcttttaca

SEQ ID NO: 69386 - DNA, 20 bp, Artificial Sequence
  Description of Artificial Sequence: Synthetic oligonucleotide
  Target: ATXN2; (-) strand; PAM type: YTN; PAM sequence: CTC
taactgaaaggtggctttta

SEQ ID NO: 69387 - DNA, 20 bp, Artificial Sequence
  Description of Artificial Sequence: Synthetic oligonucleotide
  Target: ATXN2; (-) strand; PAM type: YTN; PAM sequence: TTA
caggtaaatgtagatgtctc

SEQ ID NO: 69388 - DNA, 20 bp, Artificial Sequence
  Description of Artificial Sequence: Synthetic oligonucleotide
  Target: ATXN2; (-) strand; PAM type: YTN; PAM sequence: CTC
aagaaggttacaggtaaatg

SEQ ID NO: 69389 - DNA, 20 bp, Artificial Sequence
  Description of Artificial Sequence: Synthetic oligonucleotide
  Target: ATXN2; (-) strand; PAM type: YTN; PAM sequence: CTG
aggaccagtgtgatctcaag

SEQ ID NO: 69390 - DNA, 20 bp, Artificial Sequence
  Description of Artificial Sequence: Synthetic oligonucleotide
  Target: ATXN2; (-) strand; PAM type: YTN; PAM sequence: CTC
cacagacctgaggaccagtg

SEQ ID NO: 69391 - DNA, 20 bp, Artificial Sequence
  Description of Artificial Sequence: Synthetic oligonucleotide
  Target: ATXN2; (-) strand; PAM type: YTN; PAM sequence: CTG
tcctccacagacctgaggac

SEQ ID NO: 69392 - DNA, 20 bp, Artificial Sequence
  Description of Artificial Sequence: Synthetic oligonucleotide
  Target: ATXN2; (-) strand; PAM type: YTN; PAM sequence: CTC
ctgtcctccacagacctgag

SEQ ID NO: 69393 - DNA, 20 bp, Artificial Sequence
  Description of Artificial Sequence: Synthetic oligonucleotide
  Target: ATXN2; (-) strand; PAM type: YTN; PAM sequence: TTA
aaagaagtaaaatatgtacc

SEQ ID NO: 69394 - DNA, 20 bp, Artificial Sequence
  Description of Artificial Sequence: Synthetic oligonucleotide
  Target: ATXN2; (-) strand; PAM type: YTN; PAM sequence: TTT
aaaagaagtaaaatatgtac

SEQ ID NO: 69395 - DNA, 20 bp, Artificial Sequence
  Description of Artificial Sequence: Synthetic oligonucleotide
  Target: ATXN2; (-) strand; PAM type: YTN; PAM sequence: TTG
tttaaaagaagtaaaatatg

SEQ ID NO: 69396 - DNA, 20 bp, Artificial Sequence
  Description of Artificial Sequence: Synthetic oligonucleotide
  Target: ATXN2; (-) strand; PAM type: YTN; PAM sequence: CTT
gtttaaaagaagtaaaatat

SEQ ID NO: 69397 - DNA, 20 bp, Artificial Sequence
  Description of Artificial Sequence: Synthetic oligonucleotide
  Target: ATXN2; (-) strand; PAM type: YTN; PAM sequence: TTC
catgtggaatcccttgttta

SEQ ID NO: 69398 - DNA, 20 bp, Artificial Sequence
  Description of Artificial Sequence: Synthetic oligonucleotide
  Target: ATXN2; (-) strand; PAM type: YTN; PAM sequence: TTG
ttccatgtggaatcccttgt

SEQ ID NO: 69399 - DNA, 20 bp, Artificial Sequence
  Description of Artificial Sequence: Synthetic oligonucleotide
  Target: ATXN2; (-) strand; PAM type: YTN; PAM sequence: CTT
gttccatgtggaatcccttg

SEQ ID NO: 69400 - DNA, 20 bp, Artificial Sequence
  Description of Artificial Sequence: Synthetic oligonucleotide
  Target: ATXN2; (-) strand; PAM type: YTN; PAM sequence: TTA
aaaagcaccccttgttccat

SEQ ID NO: 69401 - DNA, 20 bp, Artificial Sequence
  Description of Artificial Sequence: Synthetic oligonucleotide
  Target: ATXN2; (-) strand; PAM type: YTN; PAM sequence: CTG
ttaaaaagcaccccttgttc

SEQ ID NO: 69402 - DNA, 20 bp, Artificial Sequence
  Description of Artificial Sequence: Synthetic oligonucleotide
  Target: ATXN2; (-) strand; PAM type: YTN; PAM sequence: TTG
gctgttaaaaagcacccctt

SEQ ID NO: 69403 - DNA, 20 bp, Artificial Sequence
  Description of Artificial Sequence: Synthetic oligonucleotide
  Target: ATXN2; (-) strand; PAM type: YTN; PAM sequence: TTT
ggctgttaaaaagcacccct

SEQ ID NO: 69404 - DNA, 20 bp, Artificial Sequence
  Description of Artificial Sequence: Synthetic oligonucleotide
  Target: ATXN2; (-) strand; PAM type: YTN; PAM sequence: TTT
tggctgttaaaaagcacccc

SEQ ID NO: 69405 - DNA, 20 bp, Artificial Sequence
  Description of Artificial Sequence: Synthetic oligonucleotide
  Target: ATXN2; (-) strand; PAM type: YTN; PAM sequence: TTT
ttggctgttaaaaagcaccc

SEQ ID NO: 69406 - DNA, 20 bp, Artificial Sequence
  Description of Artificial Sequence: Synthetic oligonucleotide
  Target: ATXN2; (-) strand; PAM type: YTN; PAM sequence: TTG
gaagtatttttggctgttaa

SEQ ID NO: 69407 - DNA, 20 bp, Artificial Sequence
  Description of Artificial Sequence: Synthetic oligonucleotide
  Target: ATXN2; (-) strand; PAM type: YTN; PAM sequence: CTC
ccaaacattggaagtatttt

SEQ ID NO: 69408 - DNA, 20 bp, Artificial Sequence
  Description of Artificial Sequence: Synthetic oligonucleotide
  Target: ATXN2; (-) strand; PAM type: YTN; PAM sequence: TTC
tcccaaacattggaagtatt

SEQ ID NO: 69409 - DNA, 20 bp, Artificial Sequence
  Description of Artificial Sequence: Synthetic oligonucleotide
  Target: ATXN2; (-) strand; PAM type: YTN; PAM sequence: TTT
ctcccaaacattggaagtat

SEQ ID NO: 69410 - DNA, 20 bp, Artificial Sequence
  Description of Artificial Sequence: Synthetic oligonucleotide
  Target: ATXN2; (-) strand; PAM type: YTN; PAM sequence: CTT
tctcccaaacattggaagta

SEQ ID NO: 69411 - DNA, 20 bp, Artificial Sequence
  Description of Artificial Sequence: Synthetic oligonucleotide
  Target: ATXN2; (-) strand; PAM type: YTN; PAM sequence: TTC
tttctcccaaacattggaag

SEQ ID NO: 69412 - DNA, 20 bp, Artificial Sequence
  Description of Artificial Sequence: Synthetic oligonucleotide
  Target: ATXN2; (-) strand; PAM type: YTN; PAM sequence: CTT
ctttctcccaaacattggaa

SEQ ID NO: 69413 - DNA, 20 bp, Artificial Sequence
  Description of Artificial Sequence: Synthetic oligonucleotide
  Target: ATXN2; (-) strand; PAM type: YTN; PAM sequence: CTC
ccttctttctcccaaacatt

SEQ ID NO: 69414 - DNA, 20 bp, Artificial Sequence
  Description of Artificial Sequence: Synthetic oligonucleotide
  Target: ATXN2; (-) strand; PAM type: YTN; PAM sequence: TTC
tcccttctttctcccaaaca

SEQ ID NO: 69415 - DNA, 20 bp, Artificial Sequence
  Description of Artificial Sequence: Synthetic oligonucleotide
  Target: ATXN2; (-) strand; PAM type: YTN; PAM sequence: CTT
ctcccttctttctcccaaac

SEQ ID NO: 69416 - DNA, 20 bp, Artificial Sequence
  Description of Artificial Sequence: Synthetic oligonucleotide
  Target: ATXN2; (-) strand; PAM type: YTN; PAM sequence: TTG
gcttctcccttctttctccc

SEQ ID NO: 69417 - DNA, 20 bp, Artificial Sequence
  Description of Artificial Sequence: Synthetic oligonucleotide
  Target: ATXN2; (-) strand; PAM type: YTN; PAM sequence: TTG
aatatgagggaaagcgttgg

SEQ ID NO: 69418 - DNA, 20 bp, Artificial Sequence
  Description of Artificial Sequence: Synthetic oligonucleotide
  Target: ATXN2; (-) strand; PAM type: YTN; PAM sequence: TTG
gaatcgttgaatatgaggga

SEQ ID NO: 69419 - DNA, 20 bp, Artificial Sequence
  Description of Artificial Sequence: Synthetic oligonucleotide
  Target: ATXN2; (-) strand; PAM type: YTN; PAM sequence: CTT
ggaatcgttgaatatgaggg

SEQ ID NO: 69420 - DNA, 20 bp, Artificial Sequence
  Description of Artificial Sequence: Synthetic oligonucleotide
  Target: ATXN2; (-) strand; PAM type: YTN; PAM sequence: CTA
gtaccatagtccgaccttgg

SEQ ID NO: 69421 - DNA, 20 bp, Artificial Sequence
  Description of Artificial Sequence: Synthetic oligonucleotide
  Target: ATXN2; (-) strand; PAM type: YTN; PAM sequence: TTG
ccagggacctagtaccatag

SEQ ID NO: 69422 - DNA, 20 bp, Artificial Sequence
  Description of Artificial Sequence: Synthetic oligonucleotide
  Target: ATXN2; (-) strand; PAM type: YTN; PAM sequence: TTC
ccaggaggaaggggaggttg

SEQ ID NO: 69423 - DNA, 20 bp, Artificial Sequence
  Description of Artificial Sequence: Synthetic oligonucleotide
  Target: ATXN2; (-) strand; PAM type: YTN; PAM sequence: TTG
agcattcccaggaggaaggg

SEQ ID NO: 69424 - DNA, 20 bp, Artificial Sequence
  Description of Artificial Sequence: Synthetic oligonucleotide
  Target: ATXN2; (-) strand; PAM type: YTN; PAM sequence: TTT
gagcattcccaggaggaagg

SEQ ID NO: 69425 - DNA, 20 bp, Artificial Sequence
  Description of Artificial Sequence: Synthetic oligonucleotide
  Target: ATXN2; (-) strand; PAM type: YTN; PAM sequence: TTC
ccatttgagcattcccagga

SEQ ID NO: 69426 - DNA, 20 bp, Artificial Sequence
  Description of Artificial Sequence: Synthetic oligonucleotide
  Target: ATXN2; (-) strand; PAM type: YTN; PAM sequence: CTT
cccatttgagcattcccagg

SEQ ID NO: 69427 - DNA, 20 bp, Artificial Sequence
  Description of Artificial Sequence: Synthetic oligonucleotide
  Target: ATXN2; (-) strand; PAM type: YTN; PAM sequence: CTG
ccttcccatttgagcattcc

SEQ ID NO: 69428 - DNA, 20 bp, Artificial Sequence
  Description of Artificial Sequence: Synthetic oligonucleotide
  Target: ATXN2; (-) strand; PAM type: YTN; PAM sequence: TTC
atgctgccttcccatttgag

SEQ ID NO: 69429 - DNA, 20 bp, Artificial Sequence
  Description of Artificial Sequence: Synthetic oligonucleotide
  Target: ATXN2; (-) strand; PAM type: YTN; PAM sequence: TTT
catgctgccttcccatttga

SEQ ID NO: 69430 - DNA, 20 bp, Artificial Sequence
  Description of Artificial Sequence: Synthetic oligonucleotide
  Target: ATXN2; (-) strand; PAM type: YTN; PAM sequence: TTC
accgtttcatgctgccttcc

SEQ ID NO: 69431 - DNA, 20 bp, Artificial Sequence
  Description of Artificial Sequence: Synthetic oligonucleotide
  Target: ATXN2; (-) strand; PAM type: YTN; PAM sequence: CTG
ttcaccgtttcatgctgcct

SEQ ID NO: 69432 - DNA, 20 bp, Artificial Sequence
  Description of Artificial Sequence: Synthetic oligonucleotide
  Target: ATXN2; (-) strand; PAM type: YTN; PAM sequence: TTG
cctgttcaccgtttcatgct

SEQ ID NO: 69433 - DNA, 20 bp, Artificial Sequence
  Description of Artificial Sequence: Synthetic oligonucleotide
  Target: ATXN2; (-) strand; PAM type: YTN; PAM sequence: TTG
tccagtgattgcctgttcac

SEQ ID NO: 69434 - DNA, 20 bp, Artificial Sequence
  Description of Artificial Sequence: Synthetic oligonucleotide
  Target: ATXN2; (-) strand; PAM type: YTN; PAM sequence: TTT
gtccagtgattgcctgttca

SEQ ID NO: 69435 - DNA, 20 bp, Artificial Sequence
  Description of Artificial Sequence: Synthetic oligonucleotide
  Target: ATXN2; (-) strand; PAM type: YTN; PAM sequence: CTT
tgtccagtgattgcctgttc

SEQ ID NO: 69436 - DNA, 20 bp, Artificial Sequence
  Description of Artificial Sequence: Synthetic oligonucleotide
  Target: ATXN2; (-) strand; PAM type: YTN; PAM sequence: TTG
tgactttgtccagtgattgc

SEQ ID NO: 69437 - DNA, 20 bp, Artificial Sequence
  Description of Artificial Sequence: Synthetic oligonucleotide
  Target: ATXN2; (-) strand; PAM type: YTN; PAM sequence: CTT
gtgactttgtccagtgattg

SEQ ID NO: 69438 - DNA, 20 bp, Artificial Sequence
  Description of Artificial Sequence: Synthetic oligonucleotide
  Target: ATXN2; (-) strand; PAM type: YTN; PAM sequence: TTC
ttgtgactttgtccagtgat

SEQ ID NO: 69439 - DNA, 20 bp, Artificial Sequence
  Description of Artificial Sequence: Synthetic oligonucleotide
  Target: ATXN2; (-) strand; PAM type: YTN; PAM sequence: CTA
aagcccagttcttgtgactt

SEQ ID NO: 69440 - DNA, 20 bp, Artificial Sequence
  Description of Artificial Sequence: Synthetic oligonucleotide
  Target: ATXN2; (-) strand; PAM type: YTN; PAM sequence: TTC
taaagcccagttcttgtgac

SEQ ID NO: 69441 - DNA, 20 bp, Artificial Sequence
  Description of Artificial Sequence: Synthetic oligonucleotide
  Target: ATXN2; (-) strand; PAM type: YTN; PAM sequence: TTT
ctaaagcccagttcttgtga

SEQ ID NO: 69442 - DNA, 20 bp, Artificial Sequence
  Description of Artificial Sequence: Synthetic oligonucleotide
  Target: ATXN2; (-) strand; PAM type: YTN; PAM sequence: CTA
atggtaaaaccatttctaaa

SEQ ID NO: 69443 - DNA, 20 bp, Artificial Sequence
  Description of Artificial Sequence: Synthetic oligonucleotide
  Target: ATXN2; (-) strand; PAM type: YTN; PAM sequence: CTG
ctaatggtaaaaccatttct

SEQ ID NO: 69444 - DNA, 20 bp, Artificial Sequence
  Description of Artificial Sequence: Synthetic oligonucleotide
  Target: ATXN2; (-) strand; PAM type: YTN; PAM sequence: CTG
aggtgtcacaactgctaatg

SEQ ID NO: 69445 - DNA, 20 bp, Artificial Sequence
  Description of Artificial Sequence: Synthetic oligonucleotide
  Target: ATXN2; (-) strand; PAM type: YTN; PAM sequence: TTC
tgaggtgtcacaactgctaa

SEQ ID NO: 69446 - DNA, 20 bp, Artificial Sequence
  Description of Artificial Sequence: Synthetic oligonucleotide
  Target: ATXN2; (-) strand; PAM type: YTN; PAM sequence: CTT
ctgaggtgtcacaactgcta

SEQ ID NO: 69447 - DNA, 20 bp, Artificial Sequence
  Description of Artificial Sequence: Synthetic oligonucleotide
  Target: ATXN2; (-) strand; PAM type: YTN; PAM sequence: TTG
ccacttctgaggtgtcacaa

SEQ ID NO: 69448 - DNA, 20 bp, Artificial Sequence
  Description of Artificial Sequence: Synthetic oligonucleotide
  Target: ATXN2; (-) strand; PAM type: YTN; PAM sequence: TTG
agatccagagttgccacttc

SEQ ID NO: 69449 - DNA, 20 bp, Artificial Sequence
  Description of Artificial Sequence: Synthetic oligonucleotide
  Target: ATXN2; (-) strand; PAM type: YTN; PAM sequence: TTA
gggtattgagatccagagtt

SEQ ID NO: 69450 - DNA, 20 bp, Artificial Sequence
  Description of Artificial Sequence: Synthetic oligonucleotide
  Target: ATXN2; (-) strand; PAM type: YTN; PAM sequence: TTA
taggttagggtattgagatc

SEQ ID NO: 69451 - DNA, 20 bp, Artificial Sequence
  Description of Artificial Sequence: Synthetic oligonucleotide
  Target: ATXN2; (-) strand; PAM type: YTN; PAM sequence: CTG
aggttataggttagggtatt

SEQ ID NO: 69452 - DNA, 20 bp, Artificial Sequence
  Description of Artificial Sequence: Synthetic oligonucleotide
  Target: ATXN2; (-) strand; PAM type: YTN; PAM sequence: CTA
tgctgaggttataggttagg

SEQ ID NO: 69453 - DNA, 20 bp, Artificial Sequence
  Description of Artificial Sequence: Synthetic oligonucleotide
  Target: ATXN2; (-) strand; PAM type: YTN; PAM sequence: TTA
cctatgctgaggttataggt

SEQ ID NO: 69454 - DNA, 20 bp, Artificial Sequence
  Description of Artificial Sequence: Synthetic oligonucleotide
  Target: ATXN2; (-) strand; PAM type: YTN; PAM sequence: TTG
tggagttacctatgctgagg

SEQ ID NO: 69455 - DNA, 20 bp, Artificial Sequence
  Description of Artificial Sequence: Synthetic oligonucleotide
  Target: ATXN2; (-) strand; PAM type: YTN; PAM sequence: CTC
gtagaattgtggagttacct

SEQ ID NO: 69456 - DNA, 20 bp, Artificial Sequence
  Description of Artificial Sequence: Synthetic oligonucleotide
  Target: ATXN2; (-) strand; PAM type: YTN; PAM sequence: TTC
ctcgtagaattgtggagtta

SEQ ID NO: 69457 - DNA, 20 bp, Artificial Sequence
  Description of Artificial Sequence: Synthetic oligonucleotide
  Target: ATXN2; (-) strand; PAM type: YTN; PAM sequence: TTT
cctcgtagaattgtggagtt

SEQ ID NO: 69458 - DNA, 20 bp, Artificial Sequence
  Description of Artificial Sequence: Synthetic oligonucleotide
  Target: ATXN2; (-) strand; PAM type: YTN; PAM sequence: CTA
tagtttcctcgtagaattgt

SEQ ID NO: 69459 - DNA, 20 bp, Artificial Sequence
  Description of Artificial Sequence: Synthetic oligonucleotide
  Target: ATXN2; (-) strand; PAM type: YTN; PAM sequence: TTC
ctatagtttcctcgtagaat

SEQ ID NO: 69460 - DNA, 20 bp, Artificial Sequence
  Description of Artificial Sequence: Synthetic oligonucleotide
  Target: ATXN2; (-) strand; PAM type: YTN; PAM sequence: TTT
cctatagtttcctcgtagaa

SEQ ID NO: 69461 - DNA, 20 bp, Artificial Sequence
  Description of Artificial Sequence: Synthetic oligonucleotide
  Target: ATXN2; (-) strand; PAM type: YTN; PAM sequence: TTG
cgaatggtaatttcctatag

SEQ ID NO: 69462 - DNA, 20 bp, Artificial Sequence
  Description of Artificial Sequence: Synthetic oligonucleotide
  Target: ATXN2; (-) strand; PAM type: YTN; PAM sequence: TTT
gcgaatggtaatttcctata

SEQ ID NO: 69463 - DNA, 20 bp, Artificial Sequence
  Description of Artificial Sequence: Synthetic oligonucleotide
  Target: ATXN2; (-) strand; PAM type: YTN; PAM sequence: TTT
tgcgaatggtaatttcctat

SEQ ID NO: 69464 - DNA, 20 bp, Artificial Sequence
  Description of Artificial Sequence: Synthetic oligonucleotide
  Target: ATXN2; (-) strand; PAM type: YTN; PAM sequence: CTT
ttgcgaatggtaatttccta

SEQ ID NO: 69465 - DNA, 20 bp, Artificial Sequence
  Description of Artificial Sequence: Synthetic oligonucleotide
  Target: ATXN2; (-) strand; PAM type: YTN; PAM sequence: CTC
ccttttgcgaatggtaattt

SEQ ID NO: 69466 - DNA, 20 bp, Artificial Sequence
  Description of Artificial Sequence: Synthetic oligonucleotide
  Target: ATXN2; (-) strand; PAM type: YTN; PAM sequence: CTC
ccccccaccaaaaaaagaag

SEQ ID NO: 69467 - DNA, 20 bp, Artificial Sequence
  Description of Artificial Sequence: Synthetic oligonucleotide
  Target: ATXN2; (-) strand; PAM type: YTN; PAM sequence: CTG
gctcccccccaccaaaaaaa

SEQ ID NO: 69468 - DNA, 20 bp, Artificial Sequence
  Description of Artificial Sequence: Synthetic oligonucleotide
  Target: ATXN2; (-) strand; PAM type: YTN; PAM sequence: TTG
cccctggctcccccccacca

SEQ ID NO: 69469 - DNA, 20 bp, Artificial Sequence
  Description of Artificial Sequence: Synthetic oligonucleotide
  Target: ATXN2; (-) strand; PAM type: YTN; PAM sequence: CTT
gcccctggctcccccccacc

SEQ ID NO: 69470 - DNA, 20 bp, Artificial Sequence
  Description of Artificial Sequence: Synthetic oligonucleotide
  Target: ATXN2; (-) strand; PAM type: YTN; PAM sequence: TTG
cttgcccctggctccccccc

SEQ ID NO: 69471 - DNA, 20 bp, Artificial Sequence
  Description of Artificial Sequence: Synthetic oligonucleotide
  Target: ATXN2; (-) strand; PAM type: YTN; PAM sequence: CTT
gcttgcccctggctcccccc

SEQ ID NO: 69472 - DNA, 20 bp, Artificial Sequence
  Description of Artificial Sequence: Synthetic oligonucleotide
  Target: ATXN2; (-) strand; PAM type: YTN; PAM sequence: TTA
ataaacttgcttgcccctgg

SEQ ID NO: 69473 - DNA, 20 bp, Artificial Sequence
  Description of Artificial Sequence: Synthetic oligonucleotide
  Target: ATXN2; (-) strand; PAM type: YTN; PAM sequence: CTT
aataaacttgcttgcccctg

SEQ ID NO: 69474 - DNA, 20 bp, Artificial Sequence
  Description of Artificial Sequence: Synthetic oligonucleotide
  Target: ATXN2; (-) strand; PAM type: YTN; PAM sequence: TTC
ttaataaacttgcttgcccc

SEQ ID NO: 69475 - DNA, 20 bp, Artificial Sequence
  Description of Artificial Sequence: Synthetic oligonucleotide
  Target: ATXN2; (-) strand; PAM type: YTN; PAM sequence: TTT
cttaataaacttgcttgccc

SEQ ID NO: 69476 - DNA, 20 bp, Artificial Sequence
  Description of Artificial Sequence: Synthetic oligonucleotide
  Target: ATXN2; (-) strand; PAM type: YTN; PAM sequence: CTT
tcttaataaacttgcttgcc

SEQ ID NO: 69477 - DNA, 20 bp, Artificial Sequence
  Description of Artificial Sequence: Synthetic oligonucleotide
  Target: ATXN2; (-) strand; PAM type: YTN; PAM sequence: TTA
ctttcttaataaacttgctt

SEQ ID NO: 69478 - DNA, 20 bp, Artificial Sequence
  Description of Artificial Sequence: Synthetic oligonucleotide
  Target: ATXN2; (-) strand; PAM type: YTN; PAM sequence: TTT
actttcttaataaacttgct

SEQ ID NO: 69479 - DNA, 20 bp, Artificial Sequence
  Description of Artificial Sequence: Synthetic oligonucleotide
  Target: ATXN2; (-) strand; PAM type: YTN; PAM sequence: TTA
tttactttcttaataaactt

SEQ ID NO: 69480 - DNA, 20 bp, Artificial Sequence
  Description of Artificial Sequence: Synthetic oligonucleotide
  Target: ATXN2; (-) strand; PAM type: YTN; PAM sequence: TTT
atttactttcttaataaact

SEQ ID NO: 69481 - DNA, 20 bp, Artificial Sequence
  Description of Artificial Sequence: Synthetic oligonucleotide
  Target: ATXN2; (-) strand; PAM type: YTN; PAM sequence: TTT
tatttactttcttaataaac

SEQ ID NO: 69482 - DNA, 20 bp, Artificial Sequence
  Description of Artificial Sequence: Synthetic oligonucleotide
  Target: ATXN2; (-) strand; PAM type: YTN; PAM sequence: CTT
ttatttactttcttaataaa

SEQ ID NO: 69483 - DNA, 20 bp, Artificial Sequence
  Description of Artificial Sequence: Synthetic oligonucleotide
  Target: ATXN2; (-) strand; PAM type: YTN; PAM sequence: TTC
ttttatttactttcttaata

SEQ ID NO: 69484 - DNA, 20 bp, Artificial Sequence
  Description of Artificial Sequence: Synthetic oligonucleotide
  Target: ATXN2; (-) strand; PAM type: YTN; PAM sequence: CTA
tggagtaggattcttttatt

SEQ ID NO: 69485 - DNA, 20 bp, Artificial Sequence
  Description of Artificial Sequence: Synthetic oligonucleotide
  Target: ATXN2; (-) strand; PAM type: YTN; PAM sequence: CTG
cctatggagtaggattcttt

SEQ ID NO: 69486 - DNA, 20 bp, Artificial Sequence
  Description of Artificial Sequence: Synthetic oligonucleotide
  Target: ATXN2; (-) strand; PAM type: YTN; PAM sequence: CTC
tgcctatggagtaggattct

SEQ ID NO: 69487 - DNA, 20 bp, Artificial Sequence
  Description of Artificial Sequence: Synthetic oligonucleotide
  Target: ATXN2; (-) strand; PAM type: YTN; PAM sequence: CTG
ctctgcctatggagtaggat

SEQ ID NO: 69488 - DNA, 20 bp, Artificial Sequence
  Description of Artificial Sequence: Synthetic oligonucleotide
  Target: ATXN2; (-) strand; PAM type: YTN; PAM sequence: CTC
agctgctctgcctatggagt

SEQ ID NO: 69489 - DNA, 20 bp, Artificial Sequence
  Description of Artificial Sequence: Synthetic oligonucleotide
  Target: ATXN2; (-) strand; PAM type: YTN; PAM sequence: TTA
aagaatgcagcctcagctgc

SEQ ID NO: 69490 - DNA, 20 bp, Artificial Sequence
  Description of Artificial Sequence: Synthetic oligonucleotide
  Target: ATXN2; (-) strand; PAM type: YTN; PAM sequence: TTA
cgttaaagaatgcagcctca

SEQ ID NO: 69491 - DNA, 20 bp, Artificial Sequence
  Description of Artificial Sequence: Synthetic oligonucleotide
  Target: ATXN2; (-) strand; PAM type: YTN; PAM sequence: TTT
acgttaaagaatgcagcctc

SEQ ID NO: 69492 - DNA, 20 bp, Artificial Sequence
  Description of Artificial Sequence: Synthetic oligonucleotide
  Target: ATXN2; (-) strand; PAM type: YTN; PAM sequence: TTT
tacgttaaagaatgcagcct

SEQ ID NO: 69493 - DNA, 20 bp, Artificial Sequence
  Description of Artificial Sequence: Synthetic oligonucleotide
  Target: ATXN2; (-) strand; PAM type: YTN; PAM sequence: CTT
ttacgttaaagaatgcagcc

SEQ ID NO: 69494 - DNA, 20 bp, Artificial Sequence
  Description of Artificial Sequence: Synthetic oligonucleotide
  Target: ATXN2; (-) strand; PAM type: YTN; PAM sequence: TTC
ttttacgttaaagaatgcag

SEQ ID NO: 69495 - DNA, 20 bp, Artificial Sequence
  Description of Artificial Sequence: Synthetic oligonucleotide
  Target: ATXN2; (-) strand; PAM type: YTN; PAM sequence: TTG
attcttttacgttaaagaat

SEQ ID NO: 69496 - DNA, 20 bp, Artificial Sequence
  Description of Artificial Sequence: Synthetic oligonucleotide
  Target: ATXN2; (-) strand; PAM type: YTN; PAM sequence: TTG
gttgattcttttacgttaaa

SEQ ID NO: 69497 - DNA, 20 bp, Artificial Sequence
  Description of Artificial Sequence: Synthetic oligonucleotide
  Target: ATXN2; (-) strand; PAM type: YTN; PAM sequence: CTG
tggcccaattggttgattct

SEQ ID NO: 69498 - DNA, 20 bp, Artificial Sequence
  Description of Artificial Sequence: Synthetic oligonucleotide
  Target: ATXN2; (-) strand; PAM type: YTN; PAM sequence: TTC
cagcctgtggcccaattggt

SEQ ID NO: 69499 - DNA, 20 bp, Artificial Sequence
  Description of Artificial Sequence: Synthetic oligonucleotide
  Target: ATXN2; (-) strand; PAM type: YTN; PAM sequence: CTT
ccagcctgtggcccaattgg

SEQ ID NO: 69500 - DNA, 20 bp, Artificial Sequence
  Description of Artificial Sequence: Synthetic oligonucleotide
  Target: ATXN2; (-) strand; PAM type: YTN; PAM sequence: CTG
gtaaatagtcttccagcctg

SEQ ID NO: 69501 - DNA, 20 bp, Artificial Sequence
  Description of Artificial Sequence: Synthetic oligonucleotide
  Target: ATXN2; (-) strand; PAM type: YTN; PAM sequence: TTC
actggtaaatagtcttccag

SEQ ID NO: 69502 - DNA, 20 bp, Artificial Sequence
  Description of Artificial Sequence: Synthetic oligonucleotide
  Target: ATXN2; (-) strand; PAM type: YTN; PAM sequence: TTA
tccaggcagtaatattcact

SEQ ID NO: 69503 - DNA, 20 bp, Artificial Sequence
  Description of Artificial Sequence: Synthetic oligonucleotide
  Target: ATXN2; (-) strand; PAM type: YTN; PAM sequence: TTA
gagaataattatccaggcag

SEQ ID NO: 69504 - DNA, 20 bp, Artificial Sequence
  Description of Artificial Sequence: Synthetic oligonucleotide
  Target: ATXN2; (-) strand; PAM type: YTN; PAM sequence: TTG
aaacattagagaataattat

SEQ ID NO: 69505 - DNA, 20 bp, Artificial Sequence
  Description of Artificial Sequence: Synthetic oligonucleotide
  Target: ATXN2; (-) strand; PAM type: YTN; PAM sequence: TTA
aaaaaggagttgaaacatta

SEQ ID NO: 69506 - DNA, 20 bp, Artificial Sequence
  Description of Artificial Sequence: Synthetic oligonucleotide
  Target: ATXN2; (-) strand; PAM type: YTN; PAM sequence: TTT
aaaaaaggagttgaaacatt

SEQ ID NO: 69507 - DNA, 20 bp, Artificial Sequence
  Description of Artificial Sequence: Synthetic oligonucleotide
  Target: ATXN2; (-) strand; PAM type: YTN; PAM sequence: CTT
taaaaaaggagttgaaacat

SEQ ID NO: 69508 - DNA, 20 bp, Artificial Sequence
  Description of Artificial Sequence: Synthetic oligonucleotide
  Target: ATXN2; (-) strand; PAM type: YTN; PAM sequence: TTC
accagtaaggctttaaaaaa

SEQ ID NO: 69509 - DNA, 20 bp, Artificial Sequence
  Description of Artificial Sequence: Synthetic oligonucleotide
  Target: ATXN2; (-) strand; PAM type: YTN; PAM sequence: TTT
caccagtaaggctttaaaaa

SEQ ID NO: 69510 - DNA, 20 bp, Artificial Sequence
  Description of Artificial Sequence: Synthetic oligonucleotide
  Target: ATXN2; (-) strand; PAM type: YTN; PAM sequence: TTT
tcaccagtaaggctttaaaa

SEQ ID NO: 69511 - DNA, 20 bp, Artificial Sequence
  Description of Artificial Sequence: Synthetic oligonucleotide
  Target: ATXN2; (-) strand; PAM type: YTN; PAM sequence: CTT
ttcaccagtaaggctttaaa

SEQ ID NO: 69512 - DNA, 20 bp, Artificial Sequence
  Description of Artificial Sequence: Synthetic oligonucleotide
  Target: ATXN2; (-) strand; PAM type: YTN; PAM sequence: TTA
tacttttcaccagtaaggct

SEQ ID NO: 69513 - DNA, 20 bp, Artificial Sequence
  Description of Artificial Sequence: Synthetic oligonucleotide
  Target: ATXN2; (-) strand; PAM type: YTN; PAM sequence: TTT
atacttttcaccagtaaggc

SEQ ID NO: 69514 - DNA, 20 bp, Artificial Sequence
  Description of Artificial Sequence: Synthetic oligonucleotide
  Target: ATXN2; (-) strand; PAM type: YTN; PAM sequence: CTT
tatacttttcaccagtaagg

SEQ ID NO: 69515 - DNA, 20 bp, Artificial Sequence
  Description of Artificial Sequence: Synthetic oligonucleotide
  Target: ATXN2; (-) strand; PAM type: YTN; PAM sequence: CTG
gactttatacttttcaccag

SEQ ID NO: 69516 - DNA, 20 bp, Artificial Sequence
  Description of Artificial Sequence: Synthetic oligonucleotide
  Target: ATXN2; (-) strand; PAM type: YTN; PAM sequence: TTA
ctggactttatacttttcac

SEQ ID NO: 69517 - DNA, 20 bp, Artificial Sequence
  Description of Artificial Sequence: Synthetic oligonucleotide
  Target: ATXN2; (-) strand; PAM type: YTN; PAM sequence: TTT
actggactttatacttttca

SEQ ID NO: 69518 - DNA, 20 bp, Artificial Sequence
  Description of Artificial Sequence: Synthetic oligonucleotide
  Target: ATXN2; (-) strand; PAM type: YTN; PAM sequence: CTT
tactggactttatacttttc

SEQ ID NO: 69519 - DNA, 20 bp, Artificial Sequence
  Description of Artificial Sequence: Synthetic oligonucleotide
  Target: ATXN2; (-) strand; PAM type: YTN; PAM sequence: TTA
caacctttactggactttat

SEQ ID NO: 69520 - DNA, 20 bp, Artificial Sequence
  Description of Artificial Sequence: Synthetic oligonucleotide
  Target: ATXN2; (-) strand; PAM type: YTN; PAM sequence: CTG
ggatggattacaacctttac

SEQ ID NO: 69521 - DNA, 20 bp, Artificial Sequence
  Description of Artificial Sequence: Synthetic oligonucleotide
  Target: ATXN2; (-) strand; PAM type: YTN; PAM sequence: TTC
tgggatggattacaaccttt

SEQ ID NO: 69522 - DNA, 20 bp, Artificial Sequence
  Description of Artificial Sequence: Synthetic oligonucleotide
  Target: ATXN2; (-) strand; PAM type: YTN; PAM sequence: CTT
ctgggatggattacaacctt

SEQ ID NO: 69523 - DNA, 20 bp, Artificial Sequence
  Description of Artificial Sequence: Synthetic oligonucleotide
  Target: ATXN2; (-) strand; PAM type: YTN; PAM sequence: TTC
ttctgggatggattacaacc

SEQ ID NO: 69524 - DNA, 20 bp, Artificial Sequence
  Description of Artificial Sequence: Synthetic oligonucleotide
  Target: ATXN2; (-) strand; PAM type: YTN; PAM sequence: TTC
attcttctgggatggattac

SEQ ID NO: 69525 - DNA, 20 bp, Artificial Sequence
  Description of Artificial Sequence: Synthetic oligonucleotide
  Target: ATXN2; (-) strand; PAM type: YTN; PAM sequence: TTG
atgtgttcattcttctggga

SEQ ID NO: 69526 - DNA, 20 bp, Artificial Sequence
  Description of Artificial Sequence: Synthetic oligonucleotide
  Target: ATXN2; (-) strand; PAM type: YTN; PAM sequence: TTG
gttgatgtgttcattcttct

SEQ ID NO: 69527 - DNA, 20 bp, Artificial Sequence
  Description of Artificial Sequence: Synthetic oligonucleotide
  Target: ATXN2; (-) strand; PAM type: YTN; PAM sequence: CTT
ggttgatgtgttcattcttc

SEQ ID NO: 69528 - DNA, 20 bp, Artificial Sequence
  Description of Artificial Sequence: Synthetic oligonucleotide
  Target: ATXN2; (-) strand; PAM type: YTN; PAM sequence: TTG
cttggttgatgtgttcattc

SEQ ID NO: 69529 - DNA, 20 bp, Artificial Sequence
  Description of Artificial Sequence: Synthetic oligonucleotide
  Target: ATXN2; (-) strand; PAM type: YTN; PAM sequence: TTG
ccatcagcattgcttggttg

SEQ ID NO: 69530 - DNA, 20 bp, Artificial Sequence
  Description of Artificial Sequence: Synthetic oligonucleotide
  Target: ATXN2; (-) strand; PAM type: YTN; PAM sequence: TTG
aggttgccatcagcattgct

SEQ ID NO: 69531 - DNA, 20 bp, Artificial Sequence
  Description of Artificial Sequence: Synthetic oligonucleotide
  Target: ATXN2; (-) strand; PAM type: YTN; PAM sequence: TTA
gcattgaggttgccatcagc

SEQ ID NO: 69532 - DNA, 20 bp, Artificial Sequence
  Description of Artificial Sequence: Synthetic oligonucleotide
  Target: ATXN2; (-) strand; PAM type: YTN; PAM sequence: CTT
agcattgaggttgccatcag

SEQ ID NO: 69533 - DNA, 20 bp, Artificial Sequence
  Description of Artificial Sequence: Synthetic oligonucleotide
  Target: ATXN2; (-) strand; PAM type: YTN; PAM sequence: TTC
gaggcaagccttagcattga

SEQ ID NO: 69534 - DNA, 20 bp, Artificial Sequence
  Description of Artificial Sequence: Synthetic oligonucleotide
  Target: ATXN2; (-) strand; PAM type: YTN; PAM sequence: CTT
cgaggcaagccttagcattg

SEQ ID NO: 69535 - DNA, 20 bp, Artificial Sequence
  Description of Artificial Sequence: Synthetic oligonucleotide
  Target: ATXN2; (-) strand; PAM type: YTN; PAM sequence: TTA
ataggtgaacttcgaggcaa

SEQ ID NO: 69536 - DNA, 20 bp, Artificial Sequence
  Description of Artificial Sequence: Synthetic oligonucleotide
  Target: ATXN2; (-) strand; PAM type: YTN; PAM sequence: CTG
gagtagcacaggaggaccca

SEQ ID NO: 69537 - DNA, 20 bp, Artificial Sequence
  Description of Artificial Sequence: Synthetic oligonucleotide
  Target: ATXN2; (-) strand; PAM type: YTN; PAM sequence: TTA
cctggagtagcacaggagga

SEQ ID NO: 69538 - DNA, 20 bp, Artificial Sequence
  Description of Artificial Sequence: Synthetic oligonucleotide
  Target: ATXN2; (-) strand; PAM type: YTN; PAM sequence: CTT
acctggagtagcacaggagg

SEQ ID NO: 69539 - DNA, 20 bp, Artificial Sequence
  Description of Artificial Sequence: Synthetic oligonucleotide
  Target: ATXN2; (-) strand; PAM type: YTN; PAM sequence: TTA
tagtcttacctggagtagca

SEQ ID NO: 69540 - DNA, 20 bp, Artificial Sequence
  Description of Artificial Sequence: Synthetic oligonucleotide
  Target: ATXN2; (-) strand; PAM type: YTN; PAM sequence: TTA
cattatagtcttacctggag

SEQ ID NO: 69541 - DNA, 20 bp, Artificial Sequence
  Description of Artificial Sequence: Synthetic oligonucleotide
  Target: ATXN2; (-) strand; PAM type: YTN; PAM sequence: CTT
acattatagtcttacctgga

SEQ ID NO: 69542 - DNA, 20 bp, Artificial Sequence
  Description of Artificial Sequence: Synthetic oligonucleotide
  Target: ATXN2; (-) strand; PAM type: YTN; PAM sequence: TTG
gtggtagacttacattatag

SEQ ID NO: 69543 - DNA, 20 bp, Artificial Sequence
  Description of Artificial Sequence: Synthetic oligonucleotide
  Target: ATXN2; (-) strand; PAM type: YTN; PAM sequence: TTG
cattggtggtagacttacat

SEQ ID NO: 69544 - DNA, 20 bp, Artificial Sequence
  Description of Artificial Sequence: Synthetic oligonucleotide
  Target: ATXN2; (-) strand; PAM type: YTN; PAM sequence: TTG
gcaaaaggaattgcattggt

SEQ ID NO: 69545 - DNA, 20 bp, Artificial Sequence
  Description of Artificial Sequence: Synthetic oligonucleotide
  Target: ATXN2; (-) strand; PAM type: YTN; PAM sequence: TTT
ggcaaaaggaattgcattgg

SEQ ID NO: 69546 - DNA, 20 bp, Artificial Sequence
  Description of Artificial Sequence: Synthetic oligonucleotide
  Target: ATXN2; (-) strand; PAM type: YTN; PAM sequence: CTG
cccatgtgtttggcaaaagg

SEQ ID NO: 69547 - DNA, 20 bp, Artificial Sequence
  Description of Artificial Sequence: Synthetic oligonucleotide
  Target: ATXN2; (-) strand; PAM type: YTN; PAM sequence: TTC
ctgcccatgtgtttggcaaa

SEQ ID NO: 69548 - DNA, 20 bp, Artificial Sequence
  Description of Artificial Sequence: Synthetic oligonucleotide
  Target: ATXN2; (-) strand; PAM type: YTN; PAM sequence: TTT
cctgcccatgtgtttggcaa

SEQ ID NO: 69549 - DNA, 20 bp, Artificial Sequence
  Description of Artificial Sequence: Synthetic oligonucleotide
  Target: ATXN2; (-) strand; PAM type: YTN; PAM sequence: CTC
cataagtaagtgtgatttcc

SEQ ID NO: 69550 - DNA, 20 bp, Artificial Sequence
  Description of Artificial Sequence: Synthetic oligonucleotide
  Target: ATXN2; (-) strand; PAM type: YTN; PAM sequence: TTA
aagcctccataagtaagtgt

SEQ ID NO: 69551 - DNA, 20 bp, Artificial Sequence
  Description of Artificial Sequence: Synthetic oligonucleotide
  Target: ATXN2; (-) strand; PAM type: YTN; PAM sequence: TTT
aaagcctccataagtaagtg

SEQ ID NO: 69552 - DNA, 20 bp, Artificial Sequence
  Description of Artificial Sequence: Synthetic oligonucleotide
  Target: ATXN2; (-) strand; PAM type: YTN; PAM sequence: TTT
taaagcctccataagtaagt

SEQ ID NO: 69553 - DNA, 20 bp, Artificial Sequence
  Description of Artificial Sequence: Synthetic oligonucleotide
  Target: ATXN2; (-) strand; PAM type: YTN; PAM sequence: TTA
agtaattttaaagcctccat

SEQ ID NO: 69554 - DNA, 20 bp, Artificial Sequence
  Description of Artificial Sequence: Synthetic oligonucleotide
  Target: ATXN2; (-) strand; PAM type: YTN; PAM sequence: CTT
aagtaattttaaagcctcca

SEQ ID NO: 69555 - DNA, 20 bp, Artificial Sequence
  Description of Artificial Sequence: Synthetic oligonucleotide
  Target: ATXN2; (-) strand; PAM type: YTN; PAM sequence: TTA
cttaagtaattttaaagcct

SEQ ID NO: 69556 - DNA, 20 bp, Artificial Sequence
  Description of Artificial Sequence: Synthetic oligonucleotide
  Target: ATXN2; (-) strand; PAM type: YTN; PAM sequence: TTA
tgtagggcatacattactta

SEQ ID NO: 69557 - DNA, 20 bp, Artificial Sequence
  Description of Artificial Sequence: Synthetic oligonucleotide
  Target: ATXN2; (-) strand; PAM type: YTN; PAM sequence: TTT
atgtagggcatacattactt

SEQ ID NO: 69558 - DNA, 20 bp, Artificial Sequence
  Description of Artificial Sequence: Synthetic oligonucleotide
  Target: ATXN2; (-) strand; PAM type: YTN; PAM sequence: TTT
tatgtagggcatacattact

SEQ ID NO: 69559 - DNA, 20 bp, Artificial Sequence
  Description of Artificial Sequence: Synthetic oligonucleotide
  Target: ATXN2; (-) strand; PAM type: YTN; PAM sequence: TTT
ttatgtagggcatacattac

SEQ ID NO: 69560 - DNA, 20 bp, Artificial Sequence
  Description of Artificial Sequence: Synthetic oligonucleotide
  Target: ATXN2; (-) strand; PAM type: YTN; PAM sequence: TTT
tttatgtagggcatacatta

SEQ ID NO: 69561 - DNA, 20 bp, Artificial Sequence
  Description of Artificial Sequence: Synthetic oligonucleotide
  Target: ATXN2; (-) strand; PAM type: YTN; PAM sequence: TTT
ttttatgtagggcatacatt

SEQ ID NO: 69562 - DNA, 20 bp, Artificial Sequence
  Description of Artificial Sequence: Synthetic oligonucleotide
  Target: ATXN2; (-) strand; PAM type: YTN; PAM sequence: TTT
tttttatgtagggcatacat

SEQ ID NO: 69563 - DNA, 20 bp, Artificial Sequence
  Description of Artificial Sequence: Synthetic oligonucleotide
  Target: ATXN2; (-) strand; PAM type: YTN; PAM sequence: TTT
ttttttatgtagggcataca

SEQ ID NO: 69564 - DNA, 20 bp, Artificial Sequence
  Description of Artificial Sequence: Synthetic oligonucleotide
  Target: ATXN2; (-) strand; PAM type: YTN; PAM sequence: TTT
tttttttatgtagggcatac

SEQ ID NO: 69565 - DNA, 20 bp, Artificial Sequence
  Description of Artificial Sequence: Synthetic oligonucleotide
  Target: ATXN2; (-) strand; PAM type: YTN; PAM sequence: TTT
ttttttttatgtagggcata

SEQ ID NO: 69566 - DNA, 20 bp, Artificial Sequence
  Description of Artificial Sequence: Synthetic oligonucleotide
  Target: ATXN2; (-) strand; PAM type: YTN; PAM sequence: TTT
tttttttttatgtagggcat

SEQ ID NO: 69567 - DNA, 20 bp, Artificial Sequence
  Description of Artificial Sequence: Synthetic oligonucleotide
  Target: ATXN2; (-) strand; PAM type: YTN; PAM sequence: TTT
ttttttttttatgtagggca

SEQ ID NO: 69568 - DNA, 20 bp, Artificial Sequence
  Description of Artificial Sequence: Synthetic oligonucleotide
  Target: ATXN2; (-) strand; PAM type: YTN; PAM sequence: TTT
tttttttttttatgtagggc

SEQ ID NO: 69569 - DNA, 20 bp, Artificial Sequence
  Description of Artificial Sequence: Synthetic oligonucleotide
  Target: ATXN2; (-) strand; PAM type: YTN; PAM sequence: TTT
ttttttttttttatgtaggg

SEQ ID NO: 69570 - DNA, 20 bp, Artificial Sequence
  Description of Artificial Sequence: Synthetic oligonucleotide
  Target: ATXN2; (-) strand; PAM type: YTN; PAM sequence: TTT
tttttttttttttatgtagg

SEQ ID NO: 69571 - DNA, 20 bp, Artificial Sequence
  Description of Artificial Sequence: Synthetic oligonucleotide
  Target: ATXN2; (-) strand; PAM type: YTN; PAM sequence: TTT
ttttttttttttttatgtag

SEQ ID NO: 69572 - DNA, 20 bp, Artificial Sequence
  Description of Artificial Sequence: Synthetic oligonucleotide
  Target: ATXN2; (-) strand; PAM type: YTN; PAM sequence: TTT
tttttttttttttttatgta

SEQ ID NO: 69573 - DNA, 20 bp, Artificial Sequence
  Description of Artificial Sequence: Synthetic oligonucleotide
  Target: ATXN2; (-) strand; PAM type: YTN; PAM sequence: CTT
ttttttttttttttttatgt

SEQ ID NO: 69574 - DNA, 20 bp, Artificial Sequence
  Description of Artificial Sequence: Synthetic oligonucleotide
  Target: ATXN2; (-) strand; PAM type: YTN; PAM sequence: TTG
tgtgcttttttttttttttt

SEQ ID NO: 69575 - DNA, 20 bp, Artificial Sequence
  Description of Artificial Sequence: Synthetic oligonucleotide
  Target: ATXN2; (-) strand; PAM type: YTN; PAM sequence: TTC
cgtattgtgtgctttttttt

SEQ ID NO: 69576 - DNA, 20 bp, Artificial Sequence
  Description of Artificial Sequence: Synthetic oligonucleotide
  Target: ATXN2; (-) strand; PAM type: YTN; PAM sequence: TTT
ccgtattgtgtgcttttttt

SEQ ID NO: 69577 - DNA, 20 bp, Artificial Sequence
  Description of Artificial Sequence: Synthetic oligonucleotide
  Target: ATXN2; (-) strand; PAM type: YTN; PAM sequence: CTT
tccgtattgtgtgctttttt

SEQ ID NO: 69578 - DNA, 20 bp, Artificial Sequence
  Description of Artificial Sequence: Synthetic oligonucleotide
  Target: ATXN2; (-) strand; PAM type: YTN; PAM sequence: CTG
gatgtctttccgtattgtgt

SEQ ID NO: 69579 - DNA, 20 bp, Artificial Sequence
  Description of Artificial Sequence: Synthetic oligonucleotide
  Target: ATXN2; (-) strand; PAM type: YTN; PAM sequence: TTA
ctggatgtctttccgtattg

SEQ ID NO: 69580 - DNA, 20 bp, Artificial Sequence
  Description of Artificial Sequence: Synthetic oligonucleotide
  Target: ATXN2; (-) strand; PAM type: YTN; PAM sequence: TTT
actggatgtctttccgtatt

SEQ ID NO: 69581 - DNA, 20 bp, Artificial Sequence
  Description of Artificial Sequence: Synthetic oligonucleotide
  Target: ATXN2; (-) strand; PAM type: YTN; PAM sequence: TTT
tactggatgtctttccgtat

SEQ ID NO: 69582 - DNA, 20 bp, Artificial Sequence
  Description of Artificial Sequence: Synthetic oligonucleotide
  Target: ATXN2; (-) strand; PAM type: YTN; PAM sequence: TTT
ttactggatgtctttccgta

SEQ ID NO: 69583 - DNA, 20 bp, Artificial Sequence
  Description of Artificial Sequence: Synthetic oligonucleotide
  Target: ATXN2; (-) strand; PAM type: YTN; PAM sequence: CTT
tttactggatgtctttccgt

SEQ ID NO: 69584 - DNA, 20 bp, Artificial Sequence
  Description of Artificial Sequence: Synthetic oligonucleotide
  Target: ATXN2; (-) strand; PAM type: YTN; PAM sequence: TTA
ctttttactggatgtctttc

SEQ ID NO: 69585 - DNA, 20 bp, Artificial Sequence
  Description of Artificial Sequence: Synthetic oligonucleotide
  Target: ATXN2; (-) strand; PAM type: YTN; PAM sequence: TTT
actttttactggatgtcttt

SEQ ID NO: 69586 - DNA, 20 bp, Artificial Sequence
  Description of Artificial Sequence: Synthetic oligonucleotide
  Target: ATXN2; (-) strand; PAM type: YTN; PAM sequence: TTG
gaagacatttactttttact

SEQ ID NO: 69587 - DNA, 20 bp, Artificial Sequence
  Description of Artificial Sequence: Synthetic oligonucleotide
  Target: ATXN2; (-) strand; PAM type: YTN; PAM sequence: CTG
ggattggaagacatttactt

SEQ ID NO: 69588 - DNA, 20 bp, Artificial Sequence
  Description of Artificial Sequence: Synthetic oligonucleotide
  Target: ATXN2; (-) strand; PAM type: YTN; PAM sequence: TTA
tgcacgctgggattggaaga

SEQ ID NO: 69589 - DNA, 20 bp, Artificial Sequence
  Description of Artificial Sequence: Synthetic oligonucleotide
  Target: ATXN2; (-) strand; PAM type: YTN; PAM sequence: TTT
atgcacgctgggattggaag

SEQ ID NO: 69590 - DNA, 20 bp, Artificial Sequence
  Description of Artificial Sequence: Synthetic oligonucleotide
  Target: ATXN2; (-) strand; PAM type: YTN; PAM sequence: TTA
tttatgcacgctgggattgg

SEQ ID NO: 69591 - DNA, 20 bp, Artificial Sequence
  Description of Artificial Sequence: Synthetic oligonucleotide
  Target: ATXN2; (-) strand; PAM type: YTN; PAM sequence: TTA
atagtagttatttatgcacg

SEQ ID NO: 69592 - DNA, 20 bp, Artificial Sequence
  Description of Artificial Sequence: Synthetic oligonucleotide
  Target: ATXN2; (-) strand; PAM type: YTN; PAM sequence: CTT
aatagtagttatttatgcac

SEQ ID NO: 69593 - DNA, 20 bp, Artificial Sequence
  Description of Artificial Sequence: Synthetic oligonucleotide
  Target: ATXN2; (-) strand; PAM type: YTN; PAM sequence: CTC
ttaatagtagttatttatgc

SEQ ID NO: 69594 - DNA, 20 bp, Artificial Sequence
  Description of Artificial Sequence: Synthetic oligonucleotide
  Target: ATXN2; (-) strand; PAM type: YTN; PAM sequence: CTG
ggataccaggcatgagccac

SEQ ID NO: 69595 - DNA, 20 bp, Artificial Sequence
  Description of Artificial Sequence: Synthetic oligonucleotide
  Target: ATXN2; (-) strand; PAM type: YTN; PAM sequence: CTC
ccaaagtgctgggataccag

SEQ ID NO: 69596 - DNA, 20 bp, Artificial Sequence
  Description of Artificial Sequence: Synthetic oligonucleotide
  Target: ATXN2; (-) strand; PAM type: YTN; PAM sequence: CTC
ggcctcccaaagtgctggga

SEQ ID NO: 69597 - DNA, 20 bp, Artificial Sequence
  Description of Artificial Sequence: Synthetic oligonucleotide
  Target: ATXN2; (-) strand; PAM type: YTN; PAM sequence: CTG
cctcggcctcccaaagtgct

SEQ ID NO: 69598 - DNA, 20 bp, Artificial Sequence
  Description of Artificial Sequence: Synthetic oligonucleotide
  Target: ATXN2; (-) strand; PAM type: YTN; PAM sequence: CTC
ctgcctcggcctcccaaagt

SEQ ID NO: 69599 - DNA, 20 bp, Artificial Sequence
  Description of Artificial Sequence: Synthetic oligonucleotide
  Target: ATXN2; (-) strand; PAM type: YTN; PAM sequence: TTC
gtgatcctcctgcctcggcc

SEQ ID NO: 69600 - DNA, 20 bp, Artificial Sequence
  Description of Artificial Sequence: Synthetic oligonucleotide
  Target: ATXN2; (-) strand; PAM type: YTN; PAM sequence: CTT
cgtgatcctcctgcctcggc

SEQ ID NO: 69601 - DNA, 20 bp, Artificial Sequence
  Description of Artificial Sequence: Synthetic oligonucleotide
  Target: ATXN2; (-) strand; PAM type: YTN; PAM sequence: CTG
acttcgtgatcctcctgcct

SEQ ID NO: 69602 - DNA, 20 bp, Artificial Sequence
  Description of Artificial Sequence: Synthetic oligonucleotide
  Target: ATXN2; (-) strand; PAM type: YTN; PAM sequence: CTC
ctgacttcgtgatcctcctg

SEQ ID NO: 69603 - DNA, 20 bp, Artificial Sequence
  Description of Artificial Sequence: Synthetic oligonucleotide
  Target: ATXN2; (-) strand; PAM type: YTN; PAM sequence: CTC
aatctcctgacttcgtgatc

SEQ ID NO: 69604 - DNA, 20 bp, Artificial Sequence
  Description of Artificial Sequence: Synthetic oligonucleotide
  Target: ATXN2; (-) strand; PAM type: YTN; PAM sequence: TTA
gccagcatggtctcaatctc

SEQ ID NO: 69605 - DNA, 20 bp, Artificial Sequence
  Description of Artificial Sequence: Synthetic oligonucleotide
  Target: ATXN2; (-) strand; PAM type: YTN; PAM sequence: TTC
accatgttagccagcatggt

SEQ ID NO: 69606 - DNA, 20 bp, Artificial Sequence
  Description of Artificial Sequence: Synthetic oligonucleotide
  Target: ATXN2; (-) strand; PAM type: YTN; PAM sequence: TTT
caccatgttagccagcatgg

SEQ ID NO: 69607 - DNA, 20 bp, Artificial Sequence
  Description of Artificial Sequence: Synthetic oligonucleotide
  Target: ATXN2; (-) strand; PAM type: YTN; PAM sequence: TTA
gtagagacagggtttcacca

SEQ ID NO: 69608 - DNA, 20 bp, Artificial Sequence
  Description of Artificial Sequence: Synthetic oligonucleotide
  Target: ATXN2; (-) strand; PAM type: YTN; PAM sequence: TTT
agtagagacagggtttcacc

SEQ ID NO: 69609 - DNA, 20 bp, Artificial Sequence
  Description of Artificial Sequence: Synthetic oligonucleotide
  Target: ATXN2; (-) strand; PAM type: YTN; PAM sequence: TTT
tagtagagacagggtttcac

SEQ ID NO: 69610 - DNA, 20 bp, Artificial Sequence
  Description of Artificial Sequence: Synthetic oligonucleotide
  Target: ATXN2; (-) strand; PAM type: YTN; PAM sequence: TTT
ttagtagagacagggtttca

SEQ ID NO: 69611 - DNA, 20 bp, Artificial Sequence
  Description of Artificial Sequence: Synthetic oligonucleotide
  Target: ATXN2; (-) strand; PAM type: YTN; PAM sequence: TTG
tatttttagtagagacaggg

SEQ ID NO: 69612 - DNA, 20 bp, Artificial Sequence
  Description of Artificial Sequence: Synthetic oligonucleotide
  Target: ATXN2; (-) strand; PAM type: YTN; PAM sequence: TTT
gtatttttagtagagacagg

SEQ ID NO: 69613 - DNA, 20 bp, Artificial Sequence
  Description of Artificial Sequence: Synthetic oligonucleotide
  Target: ATXN2; (-) strand; PAM type: YTN; PAM sequence: TTT
tgtatttttagtagagacag

SEQ ID NO: 69614 - DNA, 20 bp, Artificial Sequence
  Description of Artificial Sequence: Synthetic oligonucleotide
  Target: ATXN2; (-) strand; PAM type: YTN; PAM sequence: TTT
ttgtatttttagtagagaca

SEQ ID NO: 69615 - DNA, 20 bp, Artificial Sequence
  Description of Artificial Sequence: Synthetic oligonucleotide
  Target: ATXN2; (-) strand; PAM type: YTN; PAM sequence: TTT
tttgtatttttagtagagac

SEQ ID NO: 69616 - DNA, 20 bp, Artificial Sequence
  Description of Artificial Sequence: Synthetic oligonucleotide
  Target: ATXN2; (-) strand; PAM type: YTN; PAM sequence: CTA
attttttgtatttttagtag

SEQ ID NO: 69617 - DNA, 20 bp, Artificial Sequence
  Description of Artificial Sequence: Synthetic oligonucleotide
  Target: ATXN2; (-) strand; PAM type: YTN; PAM sequence: CTG
gctaattttttgtattttta

SEQ ID NO: 69618 - DNA, 20 bp, Artificial Sequence
  Description of Artificial Sequence: Synthetic oligonucleotide
  Target: ATXN2; (-) strand; PAM type: YTN; PAM sequence: CTC
ccgccaccacacctggctaa

SEQ ID NO: 69619 - DNA, 20 bp, Artificial Sequence
  Description of Artificial Sequence: Synthetic oligonucleotide
  Target: ATXN2; (-) strand; PAM type: YTN; PAM sequence: CTA
caggctcccgccaccacacc

SEQ ID NO: 69620 - DNA, 20 bp, Artificial Sequence
  Description of Artificial Sequence: Synthetic oligonucleotide
  Target: ATXN2; (-) strand; PAM type: YTN; PAM sequence: CTG
ggactacaggctcccgccac

SEQ ID NO: 69621 - DNA, 20 bp, Artificial Sequence
  Description of Artificial Sequence: Synthetic oligonucleotide
  Target: ATXN2; (-) strand; PAM type: YTN; PAM sequence: CTC
ccaagtagctgggactacag

SEQ ID NO: 69622 - DNA, 20 bp, Artificial Sequence
  Description of Artificial Sequence: Synthetic oligonucleotide
  Target: ATXN2; (-) strand; PAM type: YTN; PAM sequence: CTA
gcctcccaagtagctgggac

SEQ ID NO: 69623 - DNA, 20 bp, Artificial Sequence
  Description of Artificial Sequence: Synthetic oligonucleotide
  Target: ATXN2; (-) strand; PAM type: YTN; PAM sequence: CTG
ccctagcctcccaagtagct

SEQ ID NO: 69624 - DNA, 20 bp, Artificial Sequence
  Description of Artificial Sequence: Synthetic oligonucleotide
  Target: ATXN2; (-) strand; PAM type: YTN; PAM sequence: CTC
ctgccctagcctcccaagta

SEQ ID NO: 69625 - DNA, 20 bp, Artificial Sequence
  Description of Artificial Sequence: Synthetic oligonucleotide
  Target: ATXN2; (-) strand; PAM type: YTN; PAM sequence: TTC
tcctgccctagcctcccaag

SEQ ID NO: 69626 - DNA, 20 bp, Artificial Sequence
  Description of Artificial Sequence: Synthetic oligonucleotide
  Target: ATXN2; (-) strand; PAM type: YTN; PAM sequence: TTC
acaccattctcctgccctag

SEQ ID NO: 69627 - DNA, 20 bp, Artificial Sequence
  Description of Artificial Sequence: Synthetic oligonucleotide
  Target: ATXN2; (-) strand; PAM type: YTN; PAM sequence: CTC
ccgggttcacaccattctcc

SEQ ID NO: 69628 - DNA, 20 bp, Artificial Sequence
  Description of Artificial Sequence: Synthetic oligonucleotide
  Target: ATXN2; (-) strand; PAM type: YTN; PAM sequence: CTG
cctcccgggttcacaccatt

SEQ ID NO: 69629 - DNA, 20 bp, Artificial Sequence
  Description of Artificial Sequence: Synthetic oligonucleotide
  Target: ATXN2; (-) strand; PAM type: YTN; PAM sequence: CTC
tgcctcccgggttcacacca

SEQ ID NO: 69630 - DNA, 20 bp, Artificial Sequence
  Description of Artificial Sequence: Synthetic oligonucleotide
  Target: ATXN2; (-) strand; PAM type: YTN; PAM sequence: CTG
caagctctgcctcccgggtt

SEQ ID NO: 69631 - DNA, 20 bp, Artificial Sequence
  Description of Artificial Sequence: Synthetic oligonucleotide
  Target: ATXN2; (-) strand; PAM type: YTN; PAM sequence: CTC
actgcaagctctgcctcccg

SEQ ID NO: 69632 - DNA, 20 bp, Artificial Sequence
  Description of Artificial Sequence: Synthetic oligonucleotide
  Target: ATXN2; (-) strand; PAM type: YTN; PAM sequence: CTC
agctcactgcaagctctgcc

SEQ ID NO: 69633 - DNA, 20 bp, Artificial Sequence
  Description of Artificial Sequence: Synthetic oligonucleotide
  Target: ATXN2; (-) strand; PAM type: YTN; PAM sequence: TTG
agtgcagtggtgtgatctca

SEQ ID NO: 69634 - DNA, 20 bp, Artificial Sequence
  Description of Artificial Sequence: Synthetic oligonucleotide
  Target: ATXN2; (-) strand; PAM type: YTN; PAM sequence: CTT
gagtgcagtggtgtgatctc

SEQ ID NO: 69635 - DNA, 20 bp, Artificial Sequence
  Description of Artificial Sequence: Synthetic oligonucleotide
  Target: ATXN2; (-) strand; PAM type: YTN; PAM sequence: CTG
tcgcccagacttgagtgcag

SEQ ID NO: 69636 - DNA, 20 bp, Artificial Sequence
  Description of Artificial Sequence: Synthetic oligonucleotide
  Target: ATXN2; (-) strand; PAM type: YTN; PAM sequence: CTC
tgtcgcccagacttgagtgc

SEQ ID NO: 69637 - DNA, 20 bp, Artificial Sequence
  Description of Artificial Sequence: Synthetic oligonucleotide
  Target: ATXN2; (-) strand; PAM type: YTN; PAM sequence: CTC
gctctgtcgcccagacttga

SEQ ID NO: 69638 - DNA, 20 bp, Artificial Sequence
  Description of Artificial Sequence: Synthetic oligonucleotide
  Target: ATXN2; (-) strand; PAM type: YTN; PAM sequence: TTA
agatggagtctcgctctgtc

SEQ ID NO: 69639 - DNA, 20 bp, Artificial Sequence
  Description of Artificial Sequence: Synthetic oligonucleotide
  Target: ATXN2; (-) strand; PAM type: YTN; PAM sequence: TTT
aagatggagtctcgctctgt

SEQ ID NO: 69640 - DNA, 20 bp, Artificial Sequence
  Description of Artificial Sequence: Synthetic oligonucleotide
  Target: ATXN2; (-) strand; PAM type: YTN; PAM sequence: TTT
taagatggagtctcgctctg

SEQ ID NO: 69641 - DNA, 20 bp, Artificial Sequence
  Description of Artificial Sequence: Synthetic oligonucleotide
  Target: ATXN2; (-) strand; PAM type: YTN; PAM sequence: CTT
ttaagatggagtctcgctct

SEQ ID NO: 69642 - DNA, 20 bp, Artificial Sequence
  Description of Artificial Sequence: Synthetic oligonucleotide
  Target: ATXN2; (-) strand; PAM type: YTN; PAM sequence: TTC
ttttaagatggagtctcgct

SEQ ID NO: 69643 - DNA, 20 bp, Artificial Sequence
  Description of Artificial Sequence: Synthetic oligonucleotide
  Target: ATXN2; (-) strand; PAM type: YTN; PAM sequence: TTT
cttttaagatggagtctcgc

SEQ ID NO: 69644 - DNA, 20 bp, Artificial Sequence
  Description of Artificial Sequence: Synthetic oligonucleotide
  Target: ATXN2; (-) strand; PAM type: YTN; PAM sequence: TTT
tcttttaagatggagtctcg

SEQ ID NO: 69645 - DNA, 20 bp, Artificial Sequence
  Description of Artificial Sequence: Synthetic oligonucleotide
  Target: ATXN2; (-) strand; PAM type: YTN; PAM sequence: TTT
ttcttttaagatggagtctc

SEQ ID NO: 69646 - DNA, 20 bp, Artificial Sequence
  Description of Artificial Sequence: Synthetic oligonucleotide
  Target: ATXN2; (-) strand; PAM type: YTN; PAM sequence: TTT
tttcttttaagatggagtct

SEQ ID NO: 69647 - DNA, 20 bp, Artificial Sequence
  Description of Artificial Sequence: Synthetic oligonucleotide
  Target: ATXN2; (-) strand; PAM type: YTN; PAM sequence: TTT
ttttcttttaagatggagtc

SEQ ID NO: 69648 - DNA, 20 bp, Artificial Sequence
  Description of Artificial Sequence: Synthetic oligonucleotide
  Target: ATXN2; (-) strand; PAM type: YTN; PAM sequence: TTT
tttttcttttaagatggagt

SEQ ID NO: 69649 - DNA, 20 bp, Artificial Sequence
  Description of Artificial Sequence: Synthetic oligonucleotide
  Target: ATXN2; (-) strand; PAM type: YTN; PAM sequence: TTT
ttttttcttttaagatggag

SEQ ID NO: 69650 - DNA, 20 bp, Artificial Sequence
  Description of Artificial Sequence: Synthetic oligonucleotide
  Target: ATXN2; (-) strand; PAM type: YTN; PAM sequence: CTT
tttttttcttttaagatgga

SEQ ID NO: 69651 - DNA, 20 bp, Artificial Sequence
  Description of Artificial Sequence: Synthetic oligonucleotide
  Target: ATXN2; (-) strand; PAM type: YTN; PAM sequence: CTC
tttttttttcttttaagatg

SEQ ID NO: 69652 - DNA, 20 bp, Artificial Sequence
  Description of Artificial Sequence: Synthetic oligonucleotide
  Target: ATXN2; (-) strand; PAM type: YTN; PAM sequence: CTG
aaactctttttttttctttt

SEQ ID NO: 69653 - DNA, 20 bp, Artificial Sequence
  Description of Artificial Sequence: Synthetic oligonucleotide
  Target: ATXN2; (-) strand; PAM type: YTN; PAM sequence: CTG
cgcccggctgaaactctttt

SEQ ID NO: 69654 - DNA, 20 bp, Artificial Sequence
  Description of Artificial Sequence: Synthetic oligonucleotide
  Target: ATXN2; (-) strand; PAM type: YTN; PAM sequence: TTA
caggcatgagccactgcgcc

SEQ ID NO: 69655 - DNA, 20 bp, Artificial Sequence
  Description of Artificial Sequence: Synthetic oligonucleotide
  Target: ATXN2; (-) strand; PAM type: YTN; PAM sequence: CTG
ggattacaggcatgagccac

SEQ ID NO: 69656 - DNA, 20 bp, Artificial Sequence
  Description of Artificial Sequence: Synthetic oligonucleotide
  Target: ATXN2; (-) strand; PAM type: YTN; PAM sequence: CTC
aaagtgctgggattacaggc

SEQ ID NO: 69657 - DNA, 20 bp, Artificial Sequence
  Description of Artificial Sequence: Synthetic oligonucleotide
  Target: ATXN2; (-) strand; PAM type: YTN; PAM sequence: CTC
tcaaagtgctgggattacag

SEQ ID NO: 69658 - DNA, 20 bp, Artificial Sequence
  Description of Artificial Sequence: Synthetic oligonucleotide
  Target: ATXN2; (-) strand; PAM type: YTN; PAM sequence: TTG
gcctctcaaagtgctgggat

SEQ ID NO: 69659 - DNA, 20 bp, Artificial Sequence
  Description of Artificial Sequence: Synthetic oligonucleotide
  Target: ATXN2; (-) strand; PAM type: YTN; PAM sequence: CTT
ggcctctcaaagtgctggga

SEQ ID NO: 69660 - DNA, 20 bp, Artificial Sequence
  Description of Artificial Sequence: Synthetic oligonucleotide
  Target: ATXN2; (-) strand; PAM type: YTN; PAM sequence: CTC
aggtgatccacccaccttgg

SEQ ID NO: 69661 - DNA, 20 bp, Artificial Sequence
  Description of Artificial Sequence: Synthetic oligonucleotide
  Target: ATXN2; (-) strand; PAM type: YTN; PAM sequence: CTA
atctcaggtgatccacccac

SEQ ID NO: 69662 - DNA, 20 bp, Artificial Sequence
  Description of Artificial Sequence: Synthetic oligonucleotide
  Target: ATXN2; (-) strand; PAM type: YTN; PAM sequence: CTC
ctaatctcaggtgatccacc

SEQ ID NO: 69663 - DNA, 20 bp, Artificial Sequence
  Description of Artificial Sequence: Synthetic oligonucleotide
  Target: ATXN2; (-) strand; PAM type: YTN; PAM sequence: CTG
gtcccgaactcctaatctca

SEQ ID NO: 69664 - DNA, 20 bp, Artificial Sequence
  Description of Artificial Sequence: Synthetic oligonucleotide
  Target: ATXN2; (-) strand; PAM type: YTN; PAM sequence: TTG
gccaggctggtcccgaactc

SEQ ID NO: 69665 - DNA, 20 bp, Artificial Sequence
  Description of Artificial Sequence: Synthetic oligonucleotide
  Target: ATXN2; (-) strand; PAM type: YTN; PAM sequence: TTC
aacatgttggccaggctggt

SEQ ID NO: 69666 - DNA, 20 bp, Artificial Sequence
  Description of Artificial Sequence: Synthetic oligonucleotide
  Target: ATXN2; (-) strand; PAM type: YTN; PAM sequence: TTT
caacatgttggccaggctgg

SEQ ID NO: 69667 - DNA, 20 bp, Artificial Sequence
  Description of Artificial Sequence: Synthetic oligonucleotide
  Target: ATXN2; (-) strand; PAM type: YTN; PAM sequence: TTA
gtagagacagggtttcaaca

SEQ ID NO: 69668 - DNA, 20 bp, Artificial Sequence
  Description of Artificial Sequence: Synthetic oligonucleotide
  Target: ATXN2; (-) strand; PAM type: YTN; PAM sequence: TTT
agtagagacagggtttcaac

SEQ ID NO: 69669 - DNA, 20 bp, Artificial Sequence
  Description of Artificial Sequence: Synthetic oligonucleotide
  Target: ATXN2; (-) strand; PAM type: YTN; PAM sequence: TTT
tagtagagacagggtttcaa

SEQ ID NO: 69670 - DNA, 20 bp, Artificial Sequence
  Description of Artificial Sequence: Synthetic oligonucleotide
  Target: ATXN2; (-) strand; PAM type: YTN; PAM sequence: TTT
ttagtagagacagggtttca

SEQ ID NO: 69671 - DNA, 20 bp, Artificial Sequence
  Description of Artificial Sequence: Synthetic oligonucleotide
  Target: ATXN2; (-) strand; PAM type: YTN; PAM sequence: TTG
tatttttagtagagacaggg

SEQ ID NO: 69672 - DNA, 20 bp, Artificial Sequence
  Description of Artificial Sequence: Synthetic oligonucleotide
  Target: ATXN2; (-) strand; PAM type: YTN; PAM sequence: TTT
gtatttttagtagagacagg

SEQ ID NO: 69673 - DNA, 20 bp, Artificial Sequence
  Description of Artificial Sequence: Synthetic oligonucleotide
  Target: ATXN2; (-) strand; PAM type: YTN; PAM sequence: TTT
tgtatttttagtagagacag

SEQ ID NO: 69674 - DNA, 20 bp, Artificial Sequence
  Description of Artificial Sequence: Synthetic oligonucleotide
  Target: ATXN2; (-) strand; PAM type: YTN; PAM sequence: TTT
ttgtatttttagtagagaca

SEQ ID NO: 69675 - DNA, 20 bp, Artificial Sequence
  Description of Artificial Sequence: Synthetic oligonucleotide
  Target: ATXN2; (-) strand; PAM type: YTN; PAM sequence: TTT
tttgtatttttagtagagac

SEQ ID NO: 69676 - DNA, 20 bp, Artificial Sequence
  Description of Artificial Sequence: Synthetic oligonucleotide
  Target: ATXN2; (-) strand; PAM type: YTN; PAM sequence: CTA
attttttgtatttttagtag

SEQ ID NO: 69677 - DNA, 20 bp, Artificial Sequence
  Description of Artificial Sequence: Synthetic oligonucleotide
  Target: ATXN2; (-) strand; PAM type: YTN; PAM sequence: CTG
gctaattttttgtattttta

SEQ ID NO: 69678 - DNA, 20 bp, Artificial Sequence
  Description of Artificial Sequence: Synthetic oligonucleotide
  Target: ATXN2; (-) strand; PAM type: YTN; PAM sequence: CTA
caagcgcccgccaccacatc

SEQ ID NO: 69679 - DNA, 20 bp, Artificial Sequence
  Description of Artificial Sequence: Synthetic oligonucleotide
  Target: ATXN2; (-) strand; PAM type: YTN; PAM sequence: CTG
ggactacaagcgcccgccac

SEQ ID NO: 69680 - DNA, 20 bp, Artificial Sequence
  Description of Artificial Sequence: Synthetic oligonucleotide
  Target: ATXN2; (-) strand; PAM type: YTN; PAM sequence: CTG
agtagctgggactacaagcg

SEQ ID NO: 69681 - DNA, 20 bp, Artificial Sequence
  Description of Artificial Sequence: Synthetic oligonucleotide
  Target: ATXN2; (-) strand; PAM type: YTN; PAM sequence: TTC
tgagtagctgggactacaag

SEQ ID NO: 69682 - DNA, 20 bp, Artificial Sequence
  Description of Artificial Sequence: Synthetic oligonucleotide
  Target: ATXN2; (-) strand; PAM type: YTN; PAM sequence: CTT
ctgagtagctgggactacaa

SEQ ID NO: 69683 - DNA, 20 bp, Artificial Sequence
  Description of Artificial Sequence: Synthetic oligonucleotide
  Target: ATXN2; (-) strand; PAM type: YTN; PAM sequence: TTC
agccttctgagtagctggga

SEQ ID NO: 69684 - DNA, 20 bp, Artificial Sequence
  Description of Artificial Sequence: Synthetic oligonucleotide
  Target: ATXN2; (-) strand; PAM type: YTN; PAM sequence: CTT
cagccttctgagtagctggg

SEQ ID NO: 69685 - DNA, 20 bp, Artificial Sequence
  Description of Artificial Sequence: Synthetic oligonucleotide
  Target: ATXN2; (-) strand; PAM type: YTN; PAM sequence: CTG
cttcagccttctgagtagct

SEQ ID NO: 69686 - DNA, 20 bp, Artificial Sequence
  Description of Artificial Sequence: Synthetic oligonucleotide
  Target: ATXN2; (-) strand; PAM type: YTN; PAM sequence: CTC
ctgcttcagccttctgagta

SEQ ID NO: 69687 - DNA, 20 bp, Artificial Sequence
  Description of Artificial Sequence: Synthetic oligonucleotide
  Target: ATXN2; (-) strand; PAM type: YTN; PAM sequence: TTC
tcctgcttcagccttctgag

SEQ ID NO: 69688 - DNA, 20 bp, Artificial Sequence
  Description of Artificial Sequence: Synthetic oligonucleotide
  Target: ATXN2; (-) strand; PAM type: YTN; PAM sequence: TTC
aagcgattctcctgcttcag

SEQ ID NO: 69689 - DNA, 20 bp, Artificial Sequence
  Description of Artificial Sequence: Synthetic oligonucleotide
  Target: ATXN2; (-) strand; PAM type: YTN; PAM sequence: TTC
caggttcaagcgattctcct

SEQ ID NO: 69690 - DNA, 20 bp, Artificial Sequence
  Description of Artificial Sequence: Synthetic oligonucleotide
  Target: ATXN2; (-) strand; PAM type: YTN; PAM sequence: CTT
ccaggttcaagcgattctcc

SEQ ID NO: 69691 - DNA, 20 bp, Artificial Sequence
  Description of Artificial Sequence: Synthetic oligonucleotide
  Target: ATXN2; (-) strand; PAM type: YTN; PAM sequence: CTG
ccttccaggttcaagcgatt

SEQ ID NO: 69692 - DNA, 20 bp, Artificial Sequence
  Description of Artificial Sequence: Synthetic oligonucleotide
  Target: ATXN2; (-) strand; PAM type: YTN; PAM sequence: CTC
tgccttccaggttcaagcga

SEQ ID NO: 69693 - DNA, 20 bp, Artificial Sequence
  Description of Artificial Sequence: Synthetic oligonucleotide
  Target: ATXN2; (-) strand; PAM type: YTN; PAM sequence: CTG
aaacctctgccttccaggtt

SEQ ID NO: 69694 - DNA, 20 bp, Artificial Sequence
  Description of Artificial Sequence: Synthetic oligonucleotide
  Target: ATXN2; (-) strand; PAM type: YTN; PAM sequence: CTC
actgaaacctctgccttcca

SEQ ID NO: 69695 - DNA, 20 bp, Artificial Sequence
  Description of Artificial Sequence: Synthetic oligonucleotide
  Target: ATXN2; (-) strand; PAM type: YTN; PAM sequence: TTG
gctcactgaaacctctgcct

SEQ ID NO: 69696 - DNA, 20 bp, Artificial Sequence
  Description of Artificial Sequence: Synthetic oligonucleotide
  Target: ATXN2; (-) strand; PAM type: YTN; PAM sequence: CTT
ggctcactgaaacctctgcc

SEQ ID NO: 69697 - DNA, 20 bp, Artificial Sequence
  Description of Artificial Sequence: Synthetic oligonucleotide
  Target: ATXN2; (-) strand; PAM type: YTN; PAM sequence: CTG
gagtgcaatggcgtgatctt

SEQ ID NO: 69698 - DNA, 20 bp, Artificial Sequence
  Description of Artificial Sequence: Synthetic oligonucleotide
  Target: ATXN2; (-) strand; PAM type: YTN; PAM sequence: TTG
tccaggctggagtgcaatgg

SEQ ID NO: 69699 - DNA, 20 bp, Artificial Sequence
  Description of Artificial Sequence: Synthetic oligonucleotide
  Target: ATXN2; (-) strand; PAM type: YTN; PAM sequence: CTG
ttgtccaggctggagtgcaa

SEQ ID NO: 69700 - DNA, 20 bp, Artificial Sequence
  Description of Artificial Sequence: Synthetic oligonucleotide
  Target: ATXN2; (-) strand; PAM type: YTN; PAM sequence: CTC
tgttgtccaggctggagtgc

SEQ ID NO: 69701 - DNA, 20 bp, Artificial Sequence
  Description of Artificial Sequence: Synthetic oligonucleotide
  Target: ATXN2; (-) strand; PAM type: YTN; PAM sequence: TTG
ctctgttgtccaggctggag

SEQ ID NO: 69702 - DNA, 20 bp, Artificial Sequence
  Description of Artificial Sequence: Synthetic oligonucleotide
  Target: ATXN2; (-) strand; PAM type: YTN; PAM sequence: CTT
gctctgttgtccaggctgga

SEQ ID NO: 69703 - DNA, 20 bp, Artificial Sequence
  Description of Artificial Sequence: Synthetic oligonucleotide
  Target: ATXN2; (-) strand; PAM type: YTN; PAM sequence: TTG
agacggagtcttgctctgtt

SEQ ID NO: 69704 - DNA, 20 bp, Artificial Sequence
  Description of Artificial Sequence: Synthetic oligonucleotide
  Target: ATXN2; (-) strand; PAM type: YTN; PAM sequence: TTT
gagacggagtcttgctctgt

SEQ ID NO: 69705 - DNA, 20 bp, Artificial Sequence
  Description of Artificial Sequence: Synthetic oligonucleotide
  Target: ATXN2; (-) strand; PAM type: YTN; PAM sequence: TTT
tgagacggagtcttgctctg

SEQ ID NO: 69706 - DNA, 20 bp, Artificial Sequence
  Description of Artificial Sequence: Synthetic oligonucleotide
  Target: ATXN2; (-) strand; PAM type: YTN; PAM sequence: TTT
ttgagacggagtcttgctct

SEQ ID NO: 69707 - DNA, 20 bp, Artificial Sequence
  Description of Artificial Sequence: Synthetic oligonucleotide
  Target: ATXN2; (-) strand; PAM type: YTN; PAM sequence: CTT
tttgagacggagtcttgctc

SEQ ID NO: 69708 - DNA, 20 bp, Artificial Sequence
  Description of Artificial Sequence: Synthetic oligonucleotide
  Target: ATXN2; (-) strand; PAM type: YTN; PAM sequence: CTC
tttttgagacggagtcttgc

SEQ ID NO: 69709 - DNA, 20 bp, Artificial Sequence
  Description of Artificial Sequence: Synthetic oligonucleotide
  Target: ATXN2; (-) strand; PAM type: YTN; PAM sequence: TTA
cacccaagaaactctttttg

SEQ ID NO: 69710 - DNA, 20 bp, Artificial Sequence
  Description of Artificial Sequence: Synthetic oligonucleotide
  Target: ATXN2; (-) strand; PAM type: YTN; PAM sequence: CTG
aaattacacccaagaaactc

SEQ ID NO: 69711 - DNA, 20 bp, Artificial Sequence
  Description of Artificial Sequence: Synthetic oligonucleotide
  Target: ATXN2; (-) strand; PAM type: YTN; PAM sequence: CTA
gaagatgtctgaaattacac

SEQ ID NO: 69712 - DNA, 20 bp, Artificial Sequence
  Description of Artificial Sequence: Synthetic oligonucleotide
  Target: ATXN2; (-) strand; PAM type: YTN; PAM sequence: TTG
cctagaagatgtctgaaatt

SEQ ID NO: 69713 - DNA, 20 bp, Artificial Sequence
  Description of Artificial Sequence: Synthetic oligonucleotide
  Target: ATXN2; (-) strand; PAM type: YTN; PAM sequence: TTA
ttgcctagaagatgtctgaa

SEQ ID NO: 69714 - DNA, 20 bp, Artificial Sequence
  Description of Artificial Sequence: Synthetic oligonucleotide
  Target: ATXN2; (-) strand; PAM type: YTN; PAM sequence: CTT
attgcctagaagatgtctga

SEQ ID NO: 69715 - DNA, 20 bp, Artificial Sequence
  Description of Artificial Sequence: Synthetic oligonucleotide
  Target: ATXN2; (-) strand; PAM type: YTN; PAM sequence: TTC
ttattgcctagaagatgtct

SEQ ID NO: 69716 - DNA, 20 bp, Artificial Sequence
  Description of Artificial Sequence: Synthetic oligonucleotide
  Target: ATXN2; (-) strand; PAM type: YTN; PAM sequence: TTC
atattcttattgcctagaag

SEQ ID NO: 69717 - DNA, 20 bp, Artificial Sequence
  Description of Artificial Sequence: Synthetic oligonucleotide
  Target: ATXN2; (-) strand; PAM type: YTN; PAM sequence: CTG
ttcatattcttattgcctag

SEQ ID NO: 69718 - DNA, 20 bp, Artificial Sequence
  Description of Artificial Sequence: Synthetic oligonucleotide
  Target: ATXN2; (-) strand; PAM type: YTN; PAM sequence: TTA
aagagctgttcatattctta

SEQ ID NO: 69719 - DNA, 20 bp, Artificial Sequence
  Description of Artificial Sequence: Synthetic oligonucleotide
  Target: ATXN2; (-) strand; PAM type: YTN; PAM sequence: TTT
aaagagctgttcatattctt

SEQ ID NO: 69720 - DNA, 20 bp, Artificial Sequence
  Description of Artificial Sequence: Synthetic oligonucleotide
  Target: ATXN2; (-) strand; PAM type: YTN; PAM sequence: TTT
taaagagctgttcatattct

SEQ ID NO: 69721 - DNA, 20 bp, Artificial Sequence
  Description of Artificial Sequence: Synthetic oligonucleotide
  Target: ATXN2; (-) strand; PAM type: YTN; PAM sequence: TTT
ttaaagagctgttcatattc

SEQ ID NO: 69722 - DNA, 20 bp, Artificial Sequence
  Description of Artificial Sequence: Synthetic oligonucleotide
  Target: ATXN2; (-) strand; PAM type: YTN; PAM sequence: TTT
tttaaagagctgttcatatt

SEQ ID NO: 69723 - DNA, 20 bp, Artificial Sequence
  Description of Artificial Sequence: Synthetic oligonucleotide
  Target: ATXN2; (-) strand; PAM type: YTN; PAM sequence: TTT
ttttaaagagctgttcatat

SEQ ID NO: 69724 - DNA, 20 bp, Artificial Sequence
  Description of Artificial Sequence: Synthetic oligonucleotide
  Target: ATXN2; (-) strand; PAM type: YTN; PAM sequence: TTT
tttttaaagagctgttcata

SEQ ID NO: 69725 - DNA, 20 bp, Artificial Sequence
  Description of Artificial Sequence: Synthetic oligonucleotide
  Target: ATXN2; (-) strand; PAM type: YTN; PAM sequence: TTT
ttttttaaagagctgttcat

SEQ ID NO: 69726 - DNA, 20 bp, Artificial Sequence
  Description of Artificial Sequence: Synthetic oligonucleotide
  Target: ATXN2; (-) strand; PAM type: YTN; PAM sequence: TTT
tttttttaaagagctgttca

SEQ ID NO: 69727 - DNA, 20 bp, Artificial Sequence
  Description of Artificial Sequence: Synthetic oligonucleotide
  Target: ATXN2; (-) strand; PAM type: YTN; PAM sequence: TTT
ttttttttaaagagctgttc

SEQ ID NO: 69728 - DNA, 20 bp, Artificial Sequence
  Description of Artificial Sequence: Synthetic oligonucleotide
  Target: ATXN2; (-) strand; PAM type: YTN; PAM sequence: TTT
tttttttttaaagagctgtt

SEQ ID NO: 69729 - DNA, 20 bp, Artificial Sequence
  Description of Artificial Sequence: Synthetic oligonucleotide
  Target: ATXN2; (-) strand; PAM type: YTN; PAM sequence: TTT
ttttttttttaaagagctgt

SEQ ID NO: 69730 - DNA, 20 bp, Artificial Sequence
  Description of Artificial Sequence: Synthetic oligonucleotide
  Target: ATXN2; (-) strand; PAM type: YTN; PAM sequence: TTT
tttttttttttaaagagctg

SEQ ID NO: 69731 - DNA, 20 bp, Artificial Sequence
  Description of Artificial Sequence: Synthetic oligonucleotide
  Target: ATXN2; (-) strand; PAM type: YTN; PAM sequence: TTT
ttttttttttttaaagagct

SEQ ID NO: 69732 - DNA, 20 bp, Artificial Sequence
  Description of Artificial Sequence: Synthetic oligonucleotide
  Target: ATXN2; (-) strand; PAM type: YTN; PAM sequence: CTG
gccatgaaattttttttttt

SEQ ID NO: 69733 - DNA, 20 bp, Artificial Sequence
  Description of Artificial Sequence: Synthetic oligonucleotide
  Target: ATXN2; (-) strand; PAM type: YTN; PAM sequence: CTG
gcatgagccaccgcacctgg

SEQ ID NO: 69734 - DNA, 20 bp, Artificial Sequence
  Description of Artificial Sequence: Synthetic oligonucleotide
  Target: ATXN2; (-) strand; PAM type: YTN; PAM sequence: TTA
ctggcatgagccaccgcacc

SEQ ID NO: 69735 - DNA, 20 bp, Artificial Sequence
  Description of Artificial Sequence: Synthetic oligonucleotide
  Target: ATXN2; (-) strand; PAM type: YTN; PAM sequence: CTG
cgattactggcatgagccac

SEQ ID NO: 69736 - DNA, 20 bp, Artificial Sequence
  Description of Artificial Sequence: Synthetic oligonucleotide
  Target: ATXN2; (-) strand; PAM type: YTN; PAM sequence: CTC
ccaaagtgctgcgattactg

SEQ ID NO: 69737 - DNA, 20 bp, Artificial Sequence
  Description of Artificial Sequence: Synthetic oligonucleotide
  Target: ATXN2; (-) strand; PAM type: YTN; PAM sequence: CTC
agcctcccaaagtgctgcga

SEQ ID NO: 69738 - DNA, 20 bp, Artificial Sequence
  Description of Artificial Sequence: Synthetic oligonucleotide
  Target: ATXN2; (-) strand; PAM type: YTN; PAM sequence: CTG
cctcagcctcccaaagtgct

SEQ ID NO: 69739 - DNA, 20 bp, Artificial Sequence
  Description of Artificial Sequence: Synthetic oligonucleotide
  Target: ATXN2; (-) strand; PAM type: YTN; PAM sequence: CTC
gtgatccacctgcctcagcc

SEQ ID NO: 69740 - DNA, 20 bp, Artificial Sequence
  Description of Artificial Sequence: Synthetic oligonucleotide
  Target: ATXN2; (-) strand; PAM type: YTN; PAM sequence: CTG
aactcgtgatccacctgcct

SEQ ID NO: 69741 - DNA, 20 bp, Artificial Sequence
  Description of Artificial Sequence: Synthetic oligonucleotide
  Target: ATXN2; (-) strand; PAM type: YTN; PAM sequence: CTC
ctgaactcgtgatccacctg

SEQ ID NO: 69742 - DNA, 20 bp, Artificial Sequence
  Description of Artificial Sequence: Synthetic oligonucleotide
  Target: ATXN2; (-) strand; PAM type: YTN; PAM sequence: TTG
aactcctgaactcgtgatcc

SEQ ID NO: 69743 - DNA, 20 bp, Artificial Sequence
  Description of Artificial Sequence: Synthetic oligonucleotide
  Target: ATXN2; (-) strand; PAM type: YTN; PAM sequence: CTT
gaactcctgaactcgtgatc

SEQ ID NO: 69744 - DNA, 20 bp, Artificial Sequence
  Description of Artificial Sequence: Synthetic oligonucleotide
  Target: ATXN2; (-) strand; PAM type: YTN; PAM sequence: CTG
gtcttgaactcctgaactcg

SEQ ID NO: 69745 - DNA, 20 bp, Artificial Sequence
  Description of Artificial Sequence: Synthetic oligonucleotide
  Target: ATXN2; (-) strand; PAM type: YTN; PAM sequence: TTG
tcaggctggtcttgaactcc

SEQ ID NO: 69746 - DNA, 20 bp, Artificial Sequence
  Description of Artificial Sequence: Synthetic oligonucleotide
  Target: ATXN2; (-) strand; PAM type: YTN; PAM sequence: TTT
gtcaggctggtcttgaactc

SEQ ID NO: 69747 - DNA, 20 bp, Artificial Sequence
  Description of Artificial Sequence: Synthetic oligonucleotide
  Target: ATXN2; (-) strand; PAM type: YTN; PAM sequence: TTC
accatgtttgtcaggctggt

SEQ ID NO: 69748 - DNA, 20 bp, Artificial Sequence
  Description of Artificial Sequence: Synthetic oligonucleotide
  Target: ATXN2; (-) strand; PAM type: YTN; PAM sequence: TTT
caccatgtttgtcaggctgg

SEQ ID NO: 69749 - DNA, 20 bp, Artificial Sequence
  Description of Artificial Sequence: Synthetic oligonucleotide
  Target: ATXN2; (-) strand; PAM type: YTN; PAM sequence: TTA
gtagagaaggggtttcacca

SEQ ID NO: 69750 - DNA, 20 bp, Artificial Sequence
  Description of Artificial Sequence: Synthetic oligonucleotide
  Target: ATXN2; (-) strand; PAM type: YTN; PAM sequence: TTT
agtagagaaggggtttcacc

SEQ ID NO: 69751 - DNA, 20 bp, Artificial Sequence
  Description of Artificial Sequence: Synthetic oligonucleotide
  Target: ATXN2; (-) strand; PAM type: YTN; PAM sequence: TTT
tagtagagaaggggtttcac

SEQ ID NO: 69752 - DNA, 20 bp, Artificial Sequence
  Description of Artificial Sequence: Synthetic oligonucleotide
  Target: ATXN2; (-) strand; PAM type: YTN; PAM sequence: TTT
ttagtagagaaggggtttca

SEQ ID NO: 69753 - DNA, 20 bp, Artificial Sequence
  Description of Artificial Sequence: Synthetic oligonucleotide
  Target: ATXN2; (-) strand; PAM type: YTN; PAM sequence: TTG
tgtttttagtagagaagggg

SEQ ID NO: 69754 - DNA, 20 bp, Artificial Sequence
  Description of Artificial Sequence: Synthetic oligonucleotide
  Target: ATXN2; (-) strand; PAM type: YTN; PAM sequence: TTT
gtgtttttagtagagaaggg

SEQ ID NO: 69755 - DNA, 20 bp, Artificial Sequence
  Description of Artificial Sequence: Synthetic oligonucleotide
  Target: ATXN2; (-) strand; PAM type: YTN; PAM sequence: TTT
tgtgtttttagtagagaagg

SEQ ID NO: 69756 - DNA, 20 bp, Artificial Sequence
  Description of Artificial Sequence: Synthetic oligonucleotide
  Target: ATXN2; (-) strand; PAM type: YTN; PAM sequence: TTT
ttgtgtttttagtagagaag

SEQ ID NO: 69757 - DNA, 20 bp, Artificial Sequence
  Description of Artificial Sequence: Synthetic oligonucleotide
  Target: ATXN2; (-) strand; PAM type: YTN; PAM sequence: CTA
atttttgtgtttttagtaga

SEQ ID NO: 69758 - DNA, 20 bp, Artificial Sequence
  Description of Artificial Sequence: Synthetic oligonucleotide
  Target: ATXN2; (-) strand; PAM type: YTN; PAM sequence: CTG
ccaccatgcccagctaattt

SEQ ID NO: 69759 - DNA, 20 bp, Artificial Sequence
  Description of Artificial Sequence: Synthetic oligonucleotide
  Target: ATXN2; (-) strand; PAM type: YTN; PAM sequence: CTG
agtagctgccaccatgccca

SEQ ID NO: 69760 - DNA, 20 bp, Artificial Sequence
  Description of Artificial Sequence: Synthetic oligonucleotide
  Target: ATXN2; (-) strand; PAM type: YTN; PAM sequence: CTC
ctgagtagctgccaccatgc

SEQ ID NO: 69761 - DNA, 20 bp, Artificial Sequence
  Description of Artificial Sequence: Synthetic oligonucleotide
  Target: ATXN2; (-) strand; PAM type: YTN; PAM sequence: CTC
agcctcctgagtagctgcca

SEQ ID NO: 69762 - DNA, 20 bp, Artificial Sequence
  Description of Artificial Sequence: Synthetic oligonucleotide
  Target: ATXN2; (-) strand; PAM type: YTN; PAM sequence: CTG
cctcagcctcctgagtagct

SEQ ID NO: 69763 - DNA, 20 bp, Artificial Sequence
  Description of Artificial Sequence: Synthetic oligonucleotide
  Target: ATXN2; (-) strand; PAM type: YTN; PAM sequence: CTC
ctgcctcagcctcctgagta

SEQ ID NO: 69764 - DNA, 20 bp, Artificial Sequence
  Description of Artificial Sequence: Synthetic oligonucleotide
  Target: ATXN2; (-) strand; PAM type: YTN; PAM sequence: TTC
tcctgcctcagcctcctgag

SEQ ID NO: 69765 - DNA, 20 bp, Artificial Sequence
  Description of Artificial Sequence: Synthetic oligonucleotide
  Target: ATXN2; (-) strand; PAM type: YTN; PAM sequence: TTC
aagcgattctcctgcctcag

SEQ ID NO: 69766 - DNA, 20 bp, Artificial Sequence
  Description of Artificial Sequence: Synthetic oligonucleotide
  Target: ATXN2; (-) strand; PAM type: YTN; PAM sequence: CTC
ccgggttcaagcgattctcc

SEQ ID NO: 69767 - DNA, 20 bp, Artificial Sequence
  Description of Artificial Sequence: Synthetic oligonucleotide
  Target: ATXN2; (-) strand; PAM type: YTN; PAM sequence: CTC
cgcctcccgggttcaagcga

SEQ ID NO: 69768 - DNA, 20 bp, Artificial Sequence
  Description of Artificial Sequence: Synthetic oligonucleotide
  Target: ATXN2; (-) strand; PAM type: YTN; PAM sequence: CTG
caacctccgcctcccgggtt

SEQ ID NO: 69769 - DNA, 20 bp, Artificial Sequence
  Description of Artificial Sequence: Synthetic oligonucleotide
  Target: ATXN2; (-) strand; PAM type: YTN; PAM sequence: CTG
tcacactgcaacctccgcct

SEQ ID NO: 69770 - DNA, 20 bp, Artificial Sequence
  Description of Artificial Sequence: Synthetic oligonucleotide
  Target: ATXN2; (-) strand; PAM type: YTN; PAM sequence: CTC
tgtcacactgcaacctccgc

SEQ ID NO: 69771 - DNA, 20 bp, Artificial Sequence
  Description of Artificial Sequence: Synthetic oligonucleotide
  Target: ATXN2; (-) strand; PAM type: YTN; PAM sequence: TTG
ctctgtcacactgcaacctc

SEQ ID NO: 69772 - DNA, 20 bp, Artificial Sequence
  Description of Artificial Sequence: Synthetic oligonucleotide
  Target: ATXN2; (-) strand; PAM type: YTN; PAM sequence: CTT
gctctgtcacactgcaacct

SEQ ID NO: 69773 - DNA, 20 bp, Artificial Sequence
  Description of Artificial Sequence: Synthetic oligonucleotide
  Target: ATXN2; (-) strand; PAM type: YTN; PAM sequence: TTG
agacagagtcttgctctgtc

SEQ ID NO: 69774 - DNA, 20 bp, Artificial Sequence
  Description of Artificial Sequence: Synthetic oligonucleotide
  Target: ATXN2; (-) strand; PAM type: YTN; PAM sequence: TTT
gagacagagtcttgctctgt

SEQ ID NO: 69775 - DNA, 20 bp, Artificial Sequence
  Description of Artificial Sequence: Synthetic oligonucleotide
  Target: ATXN2; (-) strand; PAM type: YTN; PAM sequence: TTT
tgagacagagtcttgctctg

SEQ ID NO: 69776 - DNA, 20 bp, Artificial Sequence
  Description of Artificial Sequence: Synthetic oligonucleotide
  Target: ATXN2; (-) strand; PAM type: YTN; PAM sequence: TTT
ttgagacagagtcttgctct

SEQ ID NO: 69777 - DNA, 20 bp, Artificial Sequence
  Description of Artificial Sequence: Synthetic oligonucleotide
  Target: ATXN2; (-) strand; PAM type: YTN; PAM sequence: TTT
tttgagacagagtcttgctc

SEQ ID NO: 69778 - DNA, 20 bp, Artificial Sequence
  Description of Artificial Sequence: Synthetic oligonucleotide
  Target: ATXN2; (-) strand; PAM type: YTN; PAM sequence: TTT
ttttgagacagagtcttgct

SEQ ID NO: 69779 - DNA, 20 bp, Artificial Sequence
  Description of Artificial Sequence: Synthetic oligonucleotide
  Target: ATXN2; (-) strand; PAM type: YTN; PAM sequence: CTT
tttttgagacagagtcttgc

SEQ ID NO: 69780 - DNA, 20 bp, Artificial Sequence
  Description of Artificial Sequence: Synthetic oligonucleotide
  Target: ATXN2; (-) strand; PAM type: YTN; PAM sequence: TTC
tttttttgagacagagtctt

SEQ ID NO: 69781 - DNA, 20 bp, Artificial Sequence
  Description of Artificial Sequence: Synthetic oligonucleotide
  Target: ATXN2; (-) strand; PAM type: YTN; PAM sequence: TTT
ctttttttgagacagagtct

SEQ ID NO: 69782 - DNA, 20 bp, Artificial Sequence
  Description of Artificial Sequence: Synthetic oligonucleotide
  Target: ATXN2; (-) strand; PAM type: YTN; PAM sequence: TTT
tctttttttgagacagagtc

SEQ ID NO: 69783 - DNA, 20 bp, Artificial Sequence
  Description of Artificial Sequence: Synthetic oligonucleotide
  Target: ATXN2; (-) strand; PAM type: YTN; PAM sequence: TTT
ttctttttttgagacagagt

SEQ ID NO: 69784 - DNA, 20 bp, Artificial Sequence
  Description of Artificial Sequence: Synthetic oligonucleotide
  Target: ATXN2; (-) strand; PAM type: YTN; PAM sequence: TTT
tttctttttttgagacagag

SEQ ID NO: 69785 - DNA, 20 bp, Artificial Sequence
  Description of Artificial Sequence: Synthetic oligonucleotide
  Target: ATXN2; (-) strand; PAM type: YTN; PAM sequence: TTT
ttttctttttttgagacaga

SEQ ID NO: 69786 - DNA, 20 bp, Artificial Sequence
  Description of Artificial Sequence: Synthetic oligonucleotide
  Target: ATXN2; (-) strand; PAM type: YTN; PAM sequence: TTT
tttttctttttttgagacag

SEQ ID NO: 69787 - DNA, 20 bp, Artificial Sequence
  Description of Artificial Sequence: Synthetic oligonucleotide
  Target: ATXN2; (-) strand; PAM type: YTN; PAM sequence: TTT
ttttttctttttttgagaca

SEQ ID NO: 69788 - DNA, 20 bp, Artificial Sequence
  Description of Artificial Sequence: Synthetic oligonucleotide
  Target: ATXN2; (-) strand; PAM type: YTN; PAM sequence: TTT
tttttttctttttttgagac

SEQ ID NO: 69789 - DNA, 20 bp, Artificial Sequence
  Description of Artificial Sequence: Synthetic oligonucleotide
  Target: ATXN2; (-) strand; PAM type: YTN; PAM sequence: CTT
ttttttttctttttttgaga

SEQ ID NO: 69790 - DNA, 20 bp, Artificial Sequence
  Description of Artificial Sequence: Synthetic oligonucleotide
  Target: ATXN2; (-) strand; PAM type: YTN; PAM sequence: TTG
cttttttttttctttttttg

SEQ ID NO: 69791 - DNA, 20 bp, Artificial Sequence
  Description of Artificial Sequence: Synthetic oligonucleotide
  Target: ATXN2; (-) strand; PAM type: YTN; PAM sequence: TTT
gcttttttttttcttttttt

SEQ ID NO: 69792 - DNA, 20 bp, Artificial Sequence
  Description of Artificial Sequence: Synthetic oligonucleotide
  Target: ATXN2; (-) strand; PAM type: YTN; PAM sequence: CTA
tttgcttttttttttctttt

SEQ ID NO: 69793 - DNA, 20 bp, Artificial Sequence
  Description of Artificial Sequence: Synthetic oligonucleotide
  Target: ATXN2; (-) strand; PAM type: YTN; PAM sequence: CTG
ggatcctatttgcttttttt

SEQ ID NO: 69794 - DNA, 20 bp, Artificial Sequence
  Description of Artificial Sequence: Synthetic oligonucleotide
  Target: ATXN2; (-) strand; PAM type: YTN; PAM sequence: TTG
cagaacactgggatcctatt

SEQ ID NO: 69795 - DNA, 20 bp, Artificial Sequence
  Description of Artificial Sequence: Synthetic oligonucleotide
  Target: ATXN2; (-) strand; PAM type: YTN; PAM sequence: TTA
agagaaaaagcacattgcag

SEQ ID NO: 69796 - DNA, 20 bp, Artificial Sequence
  Description of Artificial Sequence: Synthetic oligonucleotide
  Target: ATXN2; (-) strand; PAM type: YTN; PAM sequence: TTA
ttaagagaaaaagcacattg

SEQ ID NO: 69797 - DNA, 20 bp, Artificial Sequence
  Description of Artificial Sequence: Synthetic oligonucleotide
  Target: ATXN2; (-) strand; PAM type: YTN; PAM sequence: TTT
attaagagaaaaagcacatt

SEQ ID NO: 69798 - DNA, 20 bp, Artificial Sequence
  Description of Artificial Sequence: Synthetic oligonucleotide
  Target: ATXN2; (-) strand; PAM type: YTN; PAM sequence: CTA
agatttattaagagaaaaag

SEQ ID NO: 69799 - DNA, 20 bp, Artificial Sequence
  Description of Artificial Sequence: Synthetic oligonucleotide
  Target: ATXN2; (-) strand; PAM type: YTN; PAM sequence: TTC
caatatggaaagatatctaa

SEQ ID NO: 69800 - DNA, 20 bp, Artificial Sequence
  Description of Artificial Sequence: Synthetic oligonucleotide
  Target: ATXN2; (-) strand; PAM type: YTN; PAM sequence: CTC
ccaaaaagaatggtgttcca

SEQ ID NO: 69801 - DNA, 20 bp, Artificial Sequence
  Description of Artificial Sequence: Synthetic oligonucleotide
  Target: ATXN2; (-) strand; PAM type: YTN; PAM sequence: CTA
catatctcccaaaaagaatg

SEQ ID NO: 69802 - DNA, 20 bp, Artificial Sequence
  Description of Artificial Sequence: Synthetic oligonucleotide
  Target: ATXN2; (-) strand; PAM type: YTN; PAM sequence: TTG
aaacactacatatctcccaa

SEQ ID NO: 69803 - DNA, 20 bp, Artificial Sequence
  Description of Artificial Sequence: Synthetic oligonucleotide
  Target: ATXN2; (-) strand; PAM type: YTN; PAM sequence: TTC
aattgaaacactacatatct

SEQ ID NO: 69804 - DNA, 20 bp, Artificial Sequence
  Description of Artificial Sequence: Synthetic oligonucleotide
  Target: ATXN2; (-) strand; PAM type: YTN; PAM sequence: TTA
tgatgtcaccattcaattga

SEQ ID NO: 69805 - DNA, 20 bp, Artificial Sequence
  Description of Artificial Sequence: Synthetic oligonucleotide
  Target: ATXN2; (-) strand; PAM type: YTN; PAM sequence: TTT
atgatgtcaccattcaattg

SEQ ID NO: 69806 - DNA, 20 bp, Artificial Sequence
  Description of Artificial Sequence: Synthetic oligonucleotide
  Target: ATXN2; (-) strand; PAM type: YTN; PAM sequence: TTA
gatttatgatgtcaccattc

SEQ ID NO: 69807 - DNA, 20 bp, Artificial Sequence
  Description of Artificial Sequence: Synthetic oligonucleotide
  Target: ATXN2; (-) strand; PAM type: YTN; PAM sequence: CTA
tcaatatagcatgagttaga

SEQ ID NO: 69808 - DNA, 20 bp, Artificial Sequence
  Description of Artificial Sequence: Synthetic oligonucleotide
  Target: ATXN2; (-) strand; PAM type: YTN; PAM sequence: CTA
agtgtctatcaatatagcat

SEQ ID NO: 69809 - DNA, 20 bp, Artificial Sequence
  Description of Artificial Sequence: Synthetic oligonucleotide
  Target: ATXN2; (-) strand; PAM type: YTN; PAM sequence: TTG
gaaacatgctaagtgtctat

SEQ ID NO: 69810 - DNA, 20 bp, Artificial Sequence
  Description of Artificial Sequence: Synthetic oligonucleotide
  Target: ATXN2; (-) strand; PAM type: YTN; PAM sequence: CTA
atagtgaaaaattggaaaca

SEQ ID NO: 69811 - DNA, 20 bp, Artificial Sequence
  Description of Artificial Sequence: Synthetic oligonucleotide
  Target: ATXN2; (-) strand; PAM type: YTN; PAM sequence: TTC
taatagtgaaaaattggaaa

SEQ ID NO: 69812 - DNA, 20 bp, Artificial Sequence
  Description of Artificial Sequence: Synthetic oligonucleotide
  Target: ATXN2; (-) strand; PAM type: YTN; PAM sequence: TTT
ctaatagtgaaaaattggaa

SEQ ID NO: 69813 - DNA, 20 bp, Artificial Sequence
  Description of Artificial Sequence: Synthetic oligonucleotide
  Target: ATXN2; (-) strand; PAM type: YTN; PAM sequence: TTA
tttctaatagtgaaaaattg

SEQ ID NO: 69814 - DNA, 20 bp, Artificial Sequence
  Description of Artificial Sequence: Synthetic oligonucleotide
  Target: ATXN2; (-) strand; PAM type: YTN; PAM sequence: CTG
gccatagcattatttctaat

SEQ ID NO: 69815 - DNA, 20 bp, Artificial Sequence
  Description of Artificial Sequence: Synthetic oligonucleotide
  Target: ATXN2; (-) strand; PAM type: YTN; PAM sequence: TTA
taggcgtgaaccaccatgcc

SEQ ID NO: 69816 - DNA, 20 bp, Artificial Sequence
  Description of Artificial Sequence: Synthetic oligonucleotide
  Target: ATXN2; (-) strand; PAM type: YTN; PAM sequence: CTG
agattataggcgtgaaccac

SEQ ID NO: 69817 - DNA, 20 bp, Artificial Sequence
  Description of Artificial Sequence: Synthetic oligonucleotide
  Target: ATXN2; (-) strand; PAM type: YTN; PAM sequence: CTC
ccaaagtgctgagattatag

SEQ ID NO: 69818 - DNA, 20 bp, Artificial Sequence
  Description of Artificial Sequence: Synthetic oligonucleotide
  Target: ATXN2; (-) strand; PAM type: YTN; PAM sequence: CTC
ggcctcccaaagtgctgaga

SEQ ID NO: 69819 - DNA, 20 bp, Artificial Sequence
  Description of Artificial Sequence: Synthetic oligonucleotide
  Target: ATXN2; (-) strand; PAM type: YTN; PAM sequence: CTG
cccacctcggcctcccaaag

SEQ ID NO: 69820 - DNA, 20 bp, Artificial Sequence
  Description of Artificial Sequence: Synthetic oligonucleotide
  Target: ATXN2; (-) strand; PAM type: YTN; PAM sequence: CTC
aggtgatctgcccacctcgg

SEQ ID NO: 69821 - DNA, 20 bp, Artificial Sequence
  Description of Artificial Sequence: Synthetic oligonucleotide
  Target: ATXN2; (-) strand; PAM type: YTN; PAM sequence: CTG
acctcaggtgatctgcccac

SEQ ID NO: 69822 - DNA, 20 bp, Artificial Sequence
  Description of Artificial Sequence: Synthetic oligonucleotide
  Target: ATXN2; (-) strand; PAM type: YTN; PAM sequence: CTC
ctgacctcaggtgatctgcc

SEQ ID NO: 69823 - DNA, 20 bp, Artificial Sequence
  Description of Artificial Sequence: Synthetic oligonucleotide
  Target: ATXN2; (-) strand; PAM type: YTN; PAM sequence: TTG
aactcctgacctcaggtgat

SEQ ID NO: 69824 - DNA, 20 bp, Artificial Sequence
  Description of Artificial Sequence: Synthetic oligonucleotide
  Target: ATXN2; (-) strand; PAM type: YTN; PAM sequence: CTT
gaactcctgacctcaggtga

SEQ ID NO: 69825 - DNA, 20 bp, Artificial Sequence
  Description of Artificial Sequence: Synthetic oligonucleotide
  Target: ATXN2; (-) strand; PAM type: YTN; PAM sequence: CTG
gtcttgaactcctgacctca

SEQ ID NO: 69826 - DNA, 20 bp, Artificial Sequence
  Description of Artificial Sequence: Synthetic oligonucleotide
  Target: ATXN2; (-) strand; PAM type: YTN; PAM sequence: TTG
gccaggctggtcttgaactc

SEQ ID NO: 69827 - DNA, 20 bp, Artificial Sequence
  Description of Artificial Sequence: Synthetic oligonucleotide
  Target: ATXN2; (-) strand; PAM type: YTN; PAM sequence: TTC
accatatgttggccaggctg

SEQ ID NO: 69828 - DNA, 20 bp, Artificial Sequence
  Description of Artificial Sequence: Synthetic oligonucleotide
  Target: ATXN2; (-) strand; PAM type: YTN; PAM sequence: TTT
caccatatgttggccaggct

SEQ ID NO: 69829 - DNA, 20 bp, Artificial Sequence
  Description of Artificial Sequence: Synthetic oligonucleotide
  Target: ATXN2; (-) strand; PAM type: YTN; PAM sequence: TTA
gtagagacggggtttcacca

SEQ ID NO: 69830 - DNA, 20 bp, Artificial Sequence
  Description of Artificial Sequence: Synthetic oligonucleotide
  Target: ATXN2; (-) strand; PAM type: YTN; PAM sequence: TTT
agtagagacggggtttcacc

SEQ ID NO: 69831 - DNA, 20 bp, Artificial Sequence
  Description of Artificial Sequence: Synthetic oligonucleotide
  Target: ATXN2; (-) strand; PAM type: YTN; PAM sequence: TTT
tagtagagacggggtttcac

SEQ ID NO: 69832 - DNA, 20 bp, Artificial Sequence
  Description of Artificial Sequence: Synthetic oligonucleotide
  Target: ATXN2; (-) strand; PAM type: YTN; PAM sequence: TTT
ttagtagagacggggtttca

SEQ ID NO: 69833 - DNA, 20 bp, Artificial Sequence
  Description of Artificial Sequence: Synthetic oligonucleotide
  Target: ATXN2; (-) strand; PAM type: YTN; PAM sequence: TTG
tatttttagtagagacgggg

SEQ ID NO: 69834 - DNA, 20 bp, Artificial Sequence
  Description of Artificial Sequence: Synthetic oligonucleotide
  Target: ATXN2; (-) strand; PAM type: YTN; PAM sequence: TTT
gtatttttagtagagacggg

SEQ ID NO: 69835 - DNA, 20 bp, Artificial Sequence
  Description of Artificial Sequence: Synthetic oligonucleotide
  Target: ATXN2; (-) strand; PAM type: YTN; PAM sequence: TTT
tgtatttttagtagagacgg

SEQ ID NO: 69836 - DNA, 20 bp, Artificial Sequence
  Description of Artificial Sequence: Synthetic oligonucleotide
  Target: ATXN2; (-) strand; PAM type: YTN; PAM sequence: TTT
ttgtatttttagtagagacg

SEQ ID NO: 69837 - DNA, 20 bp, Artificial Sequence
  Description of Artificial Sequence: Synthetic oligonucleotide
  Target: ATXN2; (-) strand; PAM type: YTN; PAM sequence: CTA
atttttgtatttttagtaga

SEQ ID NO: 69838 - DNA, 20 bp, Artificial Sequence
  Description of Artificial Sequence: Synthetic oligonucleotide
  Target: ATXN2; (-) strand; PAM type: YTN; PAM sequence: CTA
taggcgtgcgccaccacacc

SEQ ID NO: 69839 - DNA, 20 bp, Artificial Sequence
  Description of Artificial Sequence: Synthetic oligonucleotide
  Target: ATXN2; (-) strand; PAM type: YTN; PAM sequence: CTG
ggactataggcgtgcgccac

SEQ ID NO: 69840 - DNA, 20 bp, Artificial Sequence
  Description of Artificial Sequence: Synthetic oligonucleotide
  Target: ATXN2; (-) strand; PAM type: YTN; PAM sequence: TTC
caagcagctgggactatagg

SEQ ID NO: 69841 - DNA, 20 bp, Artificial Sequence
  Description of Artificial Sequence: Synthetic oligonucleotide
  Target: ATXN2; (-) strand; PAM type: YTN; PAM sequence: TTT
ccaagcagctgggactatag

SEQ ID NO: 69842 - DNA, 20 bp, Artificial Sequence
  Description of Artificial Sequence: Synthetic oligonucleotide
  Target: ATXN2; (-) strand; PAM type: YTN; PAM sequence: CTT
tccaagcagctgggactata

SEQ ID NO: 69843 - DNA, 20 bp, Artificial Sequence
  Description of Artificial Sequence: Synthetic oligonucleotide
  Target: ATXN2; (-) strand; PAM type: YTN; PAM sequence: CTC
agctttccaagcagctggga

SEQ ID NO: 69844 - DNA, 20 bp, Artificial Sequence
  Description of Artificial Sequence: Synthetic oligonucleotide
  Target: ATXN2; (-) strand; PAM type: YTN; PAM sequence: CTG
cctcagctttccaagcagct

SEQ ID NO: 69845 - DNA, 20 bp, Artificial Sequence
  Description of Artificial Sequence: Synthetic oligonucleotide
  Target: ATXN2; (-) strand; PAM type: YTN; PAM sequence: CTA
ctgcctcagctttccaagca

SEQ ID NO: 69846 - DNA, 20 bp, Artificial Sequence
  Description of Artificial Sequence: Synthetic oligonucleotide
  Target: ATXN2; (-) strand; PAM type: YTN; PAM sequence: TTC
tactgcctcagctttccaag

SEQ ID NO: 69847 - DNA, 20 bp, Artificial Sequence
  Description of Artificial Sequence: Synthetic oligonucleotide
  Target: ATXN2; (-) strand; PAM type: YTN; PAM sequence: TTC
aagtgattctactgcctcag

SEQ ID NO: 69848 - DNA, 20 bp, Artificial Sequence
  Description of Artificial Sequence: Synthetic oligonucleotide
  Target: ATXN2; (-) strand; PAM type: YTN; PAM sequence: CTG
ggttcaagtgattctactgc

SEQ ID NO: 69849 - DNA, 20 bp, Artificial Sequence
  Description of Artificial Sequence: Synthetic oligonucleotide
  Target: ATXN2; (-) strand; PAM type: YTN; PAM sequence: CTC
ctgggttcaagtgattctac

SEQ ID NO: 69850 - DNA, 20 bp, Artificial Sequence
  Description of Artificial Sequence: Synthetic oligonucleotide
  Target: ATXN2; (-) strand; PAM type: YTN; PAM sequence: CTC
cacctcctgggttcaagtga

SEQ ID NO: 69851 - DNA, 20 bp, Artificial Sequence
  Description of Artificial Sequence: Synthetic oligonucleotide
  Target: ATXN2; (-) strand; PAM type: YTN; PAM sequence: CTG
taacctccacctcctgggtt

SEQ ID NO: 69852 - DNA, 20 bp, Artificial Sequence
  Description of Artificial Sequence: Synthetic oligonucleotide
  Target: ATXN2; (-) strand; PAM type: YTN; PAM sequence: CTC
cctgtaacctccacctcctg

SEQ ID NO: 69853 - DNA, 20 bp, Artificial Sequence
  Description of Artificial Sequence: Synthetic oligonucleotide
  Target: ATXN2; (-) strand; PAM type: YTN; PAM sequence: CTC
ggctccctgtaacctccacc

SEQ ID NO: 69854 - DNA, 20 bp, Artificial Sequence
  Description of Artificial Sequence: Synthetic oligonucleotide
  Target: ATXN2; (-) strand; PAM type: YTN; PAM sequence: CTG
gagtgcagtggtgcgatctc

SEQ ID NO: 69855 - DNA, 20 bp, Artificial Sequence
  Description of Artificial Sequence: Synthetic oligonucleotide
  Target: ATXN2; (-) strand; PAM type: YTN; PAM sequence: CTG
tcacccagactggagtgcag

SEQ ID NO: 69856 - DNA, 20 bp, Artificial Sequence
  Description of Artificial Sequence: Synthetic oligonucleotide
  Target: ATXN2; (-) strand; PAM type: YTN; PAM sequence: CTC
tgtcacccagactggagtgc

SEQ ID NO: 69857 - DNA, 20 bp, Artificial Sequence
  Description of Artificial Sequence: Synthetic oligonucleotide
  Target: ATXN2; (-) strand; PAM type: YTN; PAM sequence: CTC
actctgtcacccagactgga

SEQ ID NO: 69858 - DNA, 20 bp, Artificial Sequence
  Description of Artificial Sequence: Synthetic oligonucleotide
  Target: ATXN2; (-) strand; PAM type: YTN; PAM sequence: TTG
agagatggagtctcactctg

SEQ ID NO: 69859 - DNA, 20 bp, Artificial Sequence
  Description of Artificial Sequence: Synthetic oligonucleotide
  Target: ATXN2; (-) strand; PAM type: YTN; PAM sequence: TTT
gagagatggagtctcactct

SEQ ID NO: 69860 - DNA, 20 bp, Artificial Sequence
  Description of Artificial Sequence: Synthetic oligonucleotide
  Target: ATXN2; (-) strand; PAM type: YTN; PAM sequence: TTT
tgagagatggagtctcactc

SEQ ID NO: 69861 - DNA, 20 bp, Artificial Sequence
  Description of Artificial Sequence: Synthetic oligonucleotide
  Target: ATXN2; (-) strand; PAM type: YTN; PAM sequence: TTG
ttttgagagatggagtctca

SEQ ID NO: 69862 - DNA, 20 bp, Artificial Sequence
  Description of Artificial Sequence: Synthetic oligonucleotide
  Target: ATXN2; (-) strand; PAM type: YTN; PAM sequence: CTG
ttgttttgagagatggagtc

SEQ ID NO: 69863 - DNA, 20 bp, Artificial Sequence
  Description of Artificial Sequence: Synthetic oligonucleotide
  Target: ATXN2; (-) strand; PAM type: YTN; PAM sequence: TTG
ctgttgttttgagagatgga

SEQ ID NO: 69864 - DNA, 20 bp, Artificial Sequence
  Description of Artificial Sequence: Synthetic oligonucleotide
  Target: ATXN2; (-) strand; PAM type: YTN; PAM sequence: TTG
ttgctgttgttttgagagat

SEQ ID NO: 69865 - DNA, 20 bp, Artificial Sequence
  Description of Artificial Sequence: Synthetic oligonucleotide
  Target: ATXN2; (-) strand; PAM type: YTN; PAM sequence: TTG
ttgttgctgttgttttgaga

SEQ ID NO: 69866 - DNA, 20 bp, Artificial Sequence
  Description of Artificial Sequence: Synthetic oligonucleotide
  Target: ATXN2; (-) strand; PAM type: YTN; PAM sequence: TTG
ttgttgttgctgttgttttg

SEQ ID NO: 69867 - DNA, 20 bp, Artificial Sequence
  Description of Artificial Sequence: Synthetic oligonucleotide
  Target: ATXN2; (-) strand; PAM type: YTN; PAM sequence: TTT
gttgttgttgctgttgtttt

SEQ ID NO: 69868 - DNA, 20 bp, Artificial Sequence
  Description of Artificial Sequence: Synthetic oligonucleotide
  Target: ATXN2; (-) strand; PAM type: YTN; PAM sequence: TTT
tgttgttgttgctgttgttt

SEQ ID NO: 69869 - DNA, 20 bp, Artificial Sequence
  Description of Artificial Sequence: Synthetic oligonucleotide
  Target: ATXN2; (-) strand; PAM type: YTN; PAM sequence: CTT
ttgttgttgttgctgttgtt

SEQ ID NO: 69870 - DNA, 20 bp, Artificial Sequence
  Description of Artificial Sequence: Synthetic oligonucleotide
  Target: ATXN2; (-) strand; PAM type: YTN; PAM sequence: TTC
ttttgttgttgttgctgttg

SEQ ID NO: 69871 - DNA, 20 bp, Artificial Sequence
  Description of Artificial Sequence: Synthetic oligonucleotide
  Target: ATXN2; (-) strand; PAM type: YTN; PAM sequence: TTT
cttttgttgttgttgctgtt

SEQ ID NO: 69872 - DNA, 20 bp, Artificial Sequence
  Description of Artificial Sequence: Synthetic oligonucleotide
  Target: ATXN2; (-) strand; PAM type: YTN; PAM sequence: TTA
tttcttttgttgttgttgct

SEQ ID NO: 69873 - DNA, 20 bp, Artificial Sequence
  Description of Artificial Sequence: Synthetic oligonucleotide
  Target: ATXN2; (-) strand; PAM type: YTN; PAM sequence: TTC
agcattatttcttttgttgt

SEQ ID NO: 69874 - DNA, 20 bp, Artificial Sequence
  Description of Artificial Sequence: Synthetic oligonucleotide
  Target: ATXN2; (-) strand; PAM type: YTN; PAM sequence: TTT
cagcattatttcttttgttg

SEQ ID NO: 69875 - DNA, 20 bp, Artificial Sequence
  Description of Artificial Sequence: Synthetic oligonucleotide
  Target: ATXN2; (-) strand; PAM type: YTN; PAM sequence: TTT
tcagcattatttcttttgtt

SEQ ID NO: 69876 - DNA, 20 bp, Artificial Sequence
  Description of Artificial Sequence: Synthetic oligonucleotide
  Target: ATXN2; (-) strand; PAM type: YTN; PAM sequence: TTT
ttcagcattatttcttttgt

SEQ ID NO: 69877 - DNA, 20 bp, Artificial Sequence
  Description of Artificial Sequence: Synthetic oligonucleotide
  Target: ATXN2; (-) strand; PAM type: YTN; PAM sequence: TTT
tttcagcattatttcttttg

SEQ ID NO: 69878 - DNA, 20 bp, Artificial Sequence
  Description of Artificial Sequence: Synthetic oligonucleotide
  Target: ATXN2; (-) strand; PAM type: YTN; PAM sequence: TTT
ttttcagcattatttctttt

SEQ ID NO: 69879 - DNA, 20 bp, Artificial Sequence
  Description of Artificial Sequence: Synthetic oligonucleotide
  Target: ATXN2; (-) strand; PAM type: YTN; PAM sequence: TTT
tttttcagcattatttcttt

SEQ ID NO: 69880 - DNA, 20 bp, Artificial Sequence
  Description of Artificial Sequence: Synthetic oligonucleotide
  Target: ATXN2; (-) strand; PAM type: YTN; PAM sequence: TTT
ttttttcagcattatttctt

SEQ ID NO: 69881 - DNA, 20 bp, Artificial Sequence
  Description of Artificial Sequence: Synthetic oligonucleotide
  Target: ATXN2; (-) strand; PAM type: YTN; PAM sequence: TTT
tttttttcagcattatttct

SEQ ID NO: 69882 - DNA, 20 bp, Artificial Sequence
  Description of Artificial Sequence: Synthetic oligonucleotide
  Target: ATXN2; (-) strand; PAM type: YTN; PAM sequence: TTT
ttttttttcagcattatttc

SEQ ID NO: 69883 - DNA, 20 bp, Artificial Sequence
  Description of Artificial Sequence: Synthetic oligonucleotide
  Target: ATXN2; (-) strand; PAM type: YTN; PAM sequence: TTT
tttttttttcagcattattt

SEQ ID NO: 69884 - DNA, 20 bp, Artificial Sequence
  Description of Artificial Sequence: Synthetic oligonucleotide
  Target: ATXN2; (-) strand; PAM type: YTN; PAM sequence: TTT
ttttttttttcagcattatt

SEQ ID NO: 69885 - DNA, 20 bp, Artificial Sequence
  Description of Artificial Sequence: Synthetic oligonucleotide
  Target: ATXN2; (-) strand; PAM type: YTN; PAM sequence: CTG
accaggattttttttttttt

SEQ ID NO: 69886 - DNA, 20 bp, Artificial Sequence
  Description of Artificial Sequence: Synthetic oligonucleotide
  Target: ATXN2; (-) strand; PAM type: YTN; PAM sequence: TTA
caggtgtgagccatcatgcc

SEQ ID NO: 69887 - DNA, 20 bp, Artificial Sequence
  Description of Artificial Sequence: Synthetic oligonucleotide
  Target: ATXN2; (-) strand; PAM type: YTN; PAM sequence: CTG
ggattacaggtgtgagccat

SEQ ID NO: 69888 - DNA, 20 bp, Artificial Sequence
  Description of Artificial Sequence: Synthetic oligonucleotide
  Target: ATXN2; (-) strand; PAM type: YTN; PAM sequence: CTC
ccaaagtgctgggattacag

SEQ ID NO: 69889 - DNA, 20 bp, Artificial Sequence
  Description of Artificial Sequence: Synthetic oligonucleotide
  Target: ATXN2; (-) strand; PAM type: YTN; PAM sequence: CTC
agcctcccaaagtgctggga

SEQ ID NO: 69890 - DNA, 20 bp, Artificial Sequence
  Description of Artificial Sequence: Synthetic oligonucleotide
  Target: ATXN2; (-) strand; PAM type: YTN; PAM sequence: CTC
aggtaatccacccacctcag

SEQ ID NO: 69891 - DNA, 20 bp, Artificial Sequence
  Description of Artificial Sequence: Synthetic oligonucleotide
  Target: ATXN2; (-) strand; PAM type: YTN; PAM sequence: CTG
agctcaggtaatccacccac

SEQ ID NO: 69892 - DNA, 20 bp, Artificial Sequence
  Description of Artificial Sequence: Synthetic oligonucleotide
  Target: ATXN2; (-) strand; PAM type: YTN; PAM sequence: CTC
ctgagctcaggtaatccacc

SEQ ID NO: 69893 - DNA, 20 bp, Artificial Sequence
  Description of Artificial Sequence: Synthetic oligonucleotide
  Target: ATXN2; (-) strand; PAM type: YTN; PAM sequence: CTG
gaactcctgagctcaggtaa

SEQ ID NO: 69894 - DNA, 20 bp, Artificial Sequence
  Description of Artificial Sequence: Synthetic oligonucleotide
  Target: ATXN2; (-) strand; PAM type: YTN; PAM sequence: TTG
cccagggtgatctggaactc

SEQ ID NO: 69895 - DNA, 20 bp, Artificial Sequence
  Description of Artificial Sequence: Synthetic oligonucleotide
  Target: ATXN2; (-) strand; PAM type: YTN; PAM sequence: TTA
ccatgttgcccagggtgatc

SEQ ID NO: 69896 - DNA, 20 bp, Artificial Sequence
  Description of Artificial Sequence: Synthetic oligonucleotide
  Target: ATXN2; (-) strand; PAM type: YTN; PAM sequence: TTT
accatgttgcccagggtgat

SEQ ID NO: 69897 - DNA, 20 bp, Artificial Sequence
  Description of Artificial Sequence: Synthetic oligonucleotide
  Target: ATXN2; (-) strand; PAM type: YTN; PAM sequence: TTT
taccatgttgcccagggtga

SEQ ID NO: 69898 - DNA, 20 bp, Artificial Sequence
  Description of Artificial Sequence: Synthetic oligonucleotide
  Target: ATXN2; (-) strand; PAM type: YTN; PAM sequence: CTG
cagagacagggttttaccat

SEQ ID NO: 69899 - DNA, 20 bp, Artificial Sequence
  Description of Artificial Sequence: Synthetic oligonucleotide
  Target: ATXN2; (-) strand; PAM type: YTN; PAM sequence: TTC
tgcagagacagggttttacc

SEQ ID NO: 69900 - DNA, 20 bp, Artificial Sequence
  Description of Artificial Sequence: Synthetic oligonucleotide
  Target: ATXN2; (-) strand; PAM type: YTN; PAM sequence: TTT
ctgcagagacagggttttac

SEQ ID NO: 69901 - DNA, 20 bp, Artificial Sequence
  Description of Artificial Sequence: Synthetic oligonucleotide
  Target: ATXN2; (-) strand; PAM type: YTN; PAM sequence: TTT
tctgcagagacagggtttta

SEQ ID NO: 69902 - DNA, 20 bp, Artificial Sequence
  Description of Artificial Sequence: Synthetic oligonucleotide
  Target: ATXN2; (-) strand; PAM type: YTN; PAM sequence: TTT
ttctgcagagacagggtttt

SEQ ID NO: 69903 - DNA, 20 bp, Artificial Sequence
  Description of Artificial Sequence: Synthetic oligonucleotide
  Target: ATXN2; (-) strand; PAM type: YTN; PAM sequence: CTT
tttctgcagagacagggttt

SEQ ID NO: 69904 - DNA, 20 bp, Artificial Sequence
  Description of Artificial Sequence: Synthetic oligonucleotide
  Target: ATXN2; (-) strand; PAM type: YTN; PAM sequence: TTC
tttttctgcagagacagggt

SEQ ID NO: 69905 - DNA, 20 bp, Artificial Sequence
  Description of Artificial Sequence: Synthetic oligonucleotide
  Target: ATXN2; (-) strand; PAM type: YTN; PAM sequence: TTT
ctttttctgcagagacaggg

SEQ ID NO: 69906 - DNA, 20 bp, Artificial Sequence
  Description of Artificial Sequence: Synthetic oligonucleotide
  Target: ATXN2; (-) strand; PAM type: YTN; PAM sequence: TTT
tctttttctgcagagacagg

SEQ ID NO: 69907 - DNA, 20 bp, Artificial Sequence
  Description of Artificial Sequence: Synthetic oligonucleotide
  Target: ATXN2; (-) strand; PAM type: YTN; PAM sequence: TTT
ttctttttctgcagagacag

SEQ ID NO: 69908 - DNA, 20 bp, Artificial Sequence
  Description of Artificial Sequence: Synthetic oligonucleotide
  Target: ATXN2; (-) strand; PAM type: YTN; PAM sequence: TTT
tttctttttctgcagagaca

SEQ ID NO: 69909 - DNA, 20 bp, Artificial Sequence
  Description of Artificial Sequence: Synthetic oligonucleotide
  Target: ATXN2; (-) strand; PAM type: YTN; PAM sequence: TTT
ttttctttttctgcagagac

SEQ ID NO: 69910 - DNA, 20 bp, Artificial Sequence
  Description of Artificial Sequence: Synthetic oligonucleotide
  Target: ATXN2; (-) strand; PAM type: YTN; PAM sequence: TTT
tttttctttttctgcagaga

SEQ ID NO: 69911 - DNA, 20 bp, Artificial Sequence
  Description of Artificial Sequence: Synthetic oligonucleotide
  Target: ATXN2; (-) strand; PAM type: YTN; PAM sequence: TTT
ttttttctttttctgcagag

SEQ ID NO: 69912 - DNA, 20 bp, Artificial Sequence
  Description of Artificial Sequence: Synthetic oligonucleotide
  Target: ATXN2; (-) strand; PAM type: YTN; PAM sequence: TTT
tttttttctttttctgcaga

SEQ ID NO: 69913 - DNA, 20 bp, Artificial Sequence
  Description of Artificial Sequence: Synthetic oligonucleotide
  Target: ATXN2; (-) strand; PAM type: YTN; PAM sequence: TTT
ttttttttctttttctgcag

SEQ ID NO: 69914 - DNA, 20 bp, Artificial Sequence
  Description of Artificial Sequence: Synthetic oligonucleotide
  Target: ATXN2; (-) strand; PAM type: YTN; PAM sequence: TTT
tttttttttctttttctgca

SEQ ID NO: 69915 - DNA, 20 bp, Artificial Sequence
  Description of Artificial Sequence: Synthetic oligonucleotide
  Target: ATXN2; (-) strand; PAM type: YTN; PAM sequence: TTA
tatgtgaagatttttttttt

SEQ ID NO: 69916 - DNA, 20 bp, Artificial Sequence
  Description of Artificial Sequence: Synthetic oligonucleotide
  Target: ATXN2; (-) strand; PAM type: YTN; PAM sequence: CTC
atatatccataagacatgca

SEQ ID NO: 69917 - DNA, 20 bp, Artificial Sequence
  Description of Artificial Sequence: Synthetic oligonucleotide
  Target: ATXN2; (-) strand; PAM type: YTN; PAM sequence: TTG
ccctcatatatccataagac

SEQ ID NO: 69918 - DNA, 20 bp, Artificial Sequence
  Description of Artificial Sequence: Synthetic oligonucleotide
  Target: ATXN2; (-) strand; PAM type: YTN; PAM sequence: TTT
gccctcatatatccataaga

SEQ ID NO: 69919 - DNA, 20 bp, Artificial Sequence
  Description of Artificial Sequence: Synthetic oligonucleotide
  Target: ATXN2; (-) strand; PAM type: YTN; PAM sequence: TTT
tgccctcatatatccataag

SEQ ID NO: 69920 - DNA, 20 bp, Artificial Sequence
  Description of Artificial Sequence: Synthetic oligonucleotide
  Target: ATXN2; (-) strand; PAM type: YTN; PAM sequence: TTT
ttgccctcatatatccataa

SEQ ID NO: 69921 - DNA, 20 bp, Artificial Sequence
  Description of Artificial Sequence: Synthetic oligonucleotide
  Target: ATXN2; (-) strand; PAM type: YTN; PAM sequence: TTA
tttttgccctcatatatcca

SEQ ID NO: 69922 - DNA, 20 bp, Artificial Sequence
  Description of Artificial Sequence: Synthetic oligonucleotide
  Target: ATXN2; (-) strand; PAM type: YTN; PAM sequence: TTT
atttttgccctcatatatcc

SEQ ID NO: 69923 - DNA, 20 bp, Artificial Sequence
  Description of Artificial Sequence: Synthetic oligonucleotide
  Target: ATXN2; (-) strand; PAM type: YTN; PAM sequence: CTA
gtaatttatttttgccctca

SEQ ID NO: 69924 - DNA, 20 bp, Artificial Sequence
  Description of Artificial Sequence: Synthetic oligonucleotide
  Target: ATXN2; (-) strand; PAM type: YTN; PAM sequence: CTC
tagtaatttatttttgccct

SEQ ID NO: 69925 - DNA, 20 bp, Artificial Sequence
  Description of Artificial Sequence: Synthetic oligonucleotide
  Target: ATXN2; (-) strand; PAM type: YTN; PAM sequence: CTA
tctctagtaatttatttttg

SEQ ID NO: 69926 - DNA, 20 bp, Artificial Sequence
  Description of Artificial Sequence: Synthetic oligonucleotide
  Target: ATXN2; (-) strand; PAM type: YTN; PAM sequence: TTC
tatctctagtaatttatttt

SEQ ID NO: 69927 - DNA, 20 bp, Artificial Sequence
  Description of Artificial Sequence: Synthetic oligonucleotide
  Target: ATXN2; (-) strand; PAM type: YTN; PAM sequence: TTC
cagcagttctatctctagta

SEQ ID NO: 69928 - DNA, 20 bp, Artificial Sequence
  Description of Artificial Sequence: Synthetic oligonucleotide
  Target: ATXN2; (-) strand; PAM type: YTN; PAM sequence: TTG
ttccagcagttctatctcta

SEQ ID NO: 69929 - DNA, 20 bp, Artificial Sequence
  Description of Artificial Sequence: Synthetic oligonucleotide
  Target: ATXN2; (-) strand; PAM type: YTN; PAM sequence: TTT
gttccagcagttctatctct

SEQ ID NO: 69930 - DNA, 20 bp, Artificial Sequence
  Description of Artificial Sequence: Synthetic oligonucleotide
  Target: ATXN2; (-) strand; PAM type: YTN; PAM sequence: CTT
tgttccagcagttctatctc

SEQ ID NO: 69931 - DNA, 20 bp, Artificial Sequence
  Description of Artificial Sequence: Synthetic oligonucleotide
  Target: ATXN2; (-) strand; PAM type: YTN; PAM sequence: TTA
aaatgcacatacactttgtt

SEQ ID NO: 69932 - DNA, 20 bp, Artificial Sequence
  Description of Artificial Sequence: Synthetic oligonucleotide
  Target: ATXN2; (-) strand; PAM type: YTN; PAM sequence: TTT
aaaatgcacatacactttgt

SEQ ID NO: 69933 - DNA, 20 bp, Artificial Sequence
  Description of Artificial Sequence: Synthetic oligonucleotide
  Target: ATXN2; (-) strand; PAM type: YTN; PAM sequence: CTA
atcaaaatttaaaatgcaca

SEQ ID NO: 69934 - DNA, 20 bp, Artificial Sequence
  Description of Artificial Sequence: Synthetic oligonucleotide
  Target: ATXN2; (-) strand; PAM type: YTN; PAM sequence: CTG
gcaatgctaatcaaaattta

SEQ ID NO: 69935 - DNA, 20 bp, Artificial Sequence
  Description of Artificial Sequence: Synthetic oligonucleotide
  Target: ATXN2; (-) strand; PAM type: YTN; PAM sequence: CTG
gagagaatctggcaatgcta

SEQ ID NO: 69936 - DNA, 20 bp, Artificial Sequence
  Description of Artificial Sequence: Synthetic oligonucleotide
  Target: ATXN2; (-) strand; PAM type: YTN; PAM sequence: TTC
tggagagaatctggcaatgc

SEQ ID NO: 69937 - DNA, 20 bp, Artificial Sequence
  Description of Artificial Sequence: Synthetic oligonucleotide
  Target: ATXN2; (-) strand; PAM type: YTN; PAM sequence: TTT
ctggagagaatctggcaatg

SEQ ID NO: 69938 - DNA, 20 bp, Artificial Sequence
  Description of Artificial Sequence: Synthetic oligonucleotide
  Target: ATXN2; (-) strand; PAM type: YTN; PAM sequence: CTT
tctggagagaatctggcaat

SEQ ID NO: 69939 - DNA, 20 bp, Artificial Sequence
  Description of Artificial Sequence: Synthetic oligonucleotide
  Target: ATXN2; (-) strand; PAM type: YTN; PAM sequence: TTG
atagagtctttctggagaga

SEQ ID NO: 69940 - DNA, 20 bp, Artificial Sequence
  Description of Artificial Sequence: Synthetic oligonucleotide
  Target: ATXN2; (-) strand; PAM type: YTN; PAM sequence: TTG
gtgaggtggataaattgata

SEQ ID NO: 69941 - DNA, 20 bp, Artificial Sequence
  Description of Artificial Sequence: Synthetic oligonucleotide
  Target: ATXN2; (-) strand; PAM type: YTN; PAM sequence: CTA
ttggtgaggtggataaattg

SEQ ID NO: 69942 - DNA, 20 bp, Artificial Sequence
  Description of Artificial Sequence: Synthetic oligonucleotide
  Target: ATXN2; (-) strand; PAM type: YTN; PAM sequence: TTA
cactattggtgaggtggata

SEQ ID NO: 69943 - DNA, 20 bp, Artificial Sequence
  Description of Artificial Sequence: Synthetic oligonucleotide
  Target: ATXN2; (-) strand; PAM type: YTN; PAM sequence: TTT
acactattggtgaggtggat

SEQ ID NO: 69944 - DNA, 20 bp, Artificial Sequence
  Description of Artificial Sequence: Synthetic oligonucleotide
  Target: ATXN2; (-) strand; PAM type: YTN; PAM sequence: TTT
tacactattggtgaggtgga

SEQ ID NO: 69945 - DNA, 20 bp, Artificial Sequence
  Description of Artificial Sequence: Synthetic oligonucleotide
  Target: ATXN2; (-) strand; PAM type: YTN; PAM sequence: CTT
ttacactattggtgaggtgg

SEQ ID NO: 69946 - DNA, 20 bp, Artificial Sequence
  Description of Artificial Sequence: Synthetic oligonucleotide
  Target: ATXN2; (-) strand; PAM type: YTN; PAM sequence: TTC
ttttacactattggtgaggt

SEQ ID NO: 69947 - DNA, 20 bp, Artificial Sequence
  Description of Artificial Sequence: Synthetic oligonucleotide
  Target: ATXN2; (-) strand; PAM type: YTN; PAM sequence: CTT
cttttacactattggtgagg

SEQ ID NO: 69948 - DNA, 20 bp, Artificial Sequence
  Description of Artificial Sequence: Synthetic oligonucleotide
  Target: ATXN2; (-) strand; PAM type: YTN; PAM sequence: CTG
tatgaaaaatatgaggaaac

SEQ ID NO: 69949 - DNA, 20 bp, Artificial Sequence
  Description of Artificial Sequence: Synthetic oligonucleotide
  Target: ATXN2; (-) strand; PAM type: YTN; PAM sequence: CTG
tacatcacgtcacctgtatg

SEQ ID NO: 69950 - DNA, 20 bp, Artificial Sequence
  Description of Artificial Sequence: Synthetic oligonucleotide
  Target: ATXN2; (-) strand; PAM type: YTN; PAM sequence: CTC
aagtctgtacatcacgtcac

SEQ ID NO: 69951 - DNA, 20 bp, Artificial Sequence
  Description of Artificial Sequence: Synthetic oligonucleotide
  Target: ATXN2; (-) strand; PAM type: YTN; PAM sequence: TTC
tcaagtctgtacatcacgtc

SEQ ID NO: 69952 - DNA, 20 bp, Artificial Sequence
  Description of Artificial Sequence: Synthetic oligonucleotide
  Target: ATXN2; (-) strand; PAM type: YTN; PAM sequence: CTA
atataatggttctcaagtct

SEQ ID NO: 69953 - DNA, 20 bp, Artificial Sequence
  Description of Artificial Sequence: Synthetic oligonucleotide
  Target: ATXN2; (-) strand; PAM type: YTN; PAM sequence: TTA
acaaatcatatataacctaa

SEQ ID NO: 69954 - DNA, 20 bp, Artificial Sequence
  Description of Artificial Sequence: Synthetic oligonucleotide
  Target: ATXN2; (-) strand; PAM type: YTN; PAM sequence: TTT
aacaaatcatatataaccta

SEQ ID NO: 69955 - DNA, 20 bp, Artificial Sequence
  Description of Artificial Sequence: Synthetic oligonucleotide
  Target: ATXN2; (-) strand; PAM type: YTN; PAM sequence: CTT
taacaaatcatatataacct

SEQ ID NO: 69956 - DNA, 20 bp, Artificial Sequence
  Description of Artificial Sequence: Synthetic oligonucleotide
  Target: ATXN2; (-) strand; PAM type: YTN; PAM sequence: CTC
aaactttaacaaatcatata

SEQ ID NO: 69957 - DNA, 20 bp, Artificial Sequence
  Description of Artificial Sequence: Synthetic oligonucleotide
  Target: ATXN2; (-) strand; PAM type: YTN; PAM sequence: TTC
tcaaactttaacaaatcata

SEQ ID NO: 69958 - DNA, 20 bp, Artificial Sequence
  Description of Artificial Sequence: Synthetic oligonucleotide
  Target: ATXN2; (-) strand; PAM type: YTN; PAM sequence: TTA
attctcaaactttaacaaat

SEQ ID NO: 69959 - DNA, 20 bp, Artificial Sequence
  Description of Artificial Sequence: Synthetic oligonucleotide
  Target: ATXN2; (-) strand; PAM type: YTN; PAM sequence: CTG
gacatacacaggcaacatgt

SEQ ID NO: 69960 - DNA, 20 bp, Artificial Sequence
  Description of Artificial Sequence: Synthetic oligonucleotide
  Target: ATXN2; (-) strand; PAM type: YTN; PAM sequence: CTA
gtaataaaactggacataca

SEQ ID NO: 69961 - DNA, 20 bp, Artificial Sequence
  Description of Artificial Sequence: Synthetic oligonucleotide
  Target: ATXN2; (-) strand; PAM type: YTN; PAM sequence: CTA
aagtctagtaataaaactgg

SEQ ID NO: 69962 - DNA, 20 bp, Artificial Sequence
  Description of Artificial Sequence: Synthetic oligonucleotide
  Target: ATXN2; (-) strand; PAM type: YTN; PAM sequence: TTG
acctaaagtctagtaataaa

SEQ ID NO: 69963 - DNA, 20 bp, Artificial Sequence
  Description of Artificial Sequence: Synthetic oligonucleotide
  Target: ATXN2; (-) strand; PAM type: YTN; PAM sequence: TTT
gacctaaagtctagtaataa

SEQ ID NO: 69964 - DNA, 20 bp, Artificial Sequence
  Description of Artificial Sequence: Synthetic oligonucleotide
  Target: ATXN2; (-) strand; PAM type: YTN; PAM sequence: CTT
tgacctaaagtctagtaata

SEQ ID NO: 69965 - DNA, 20 bp, Artificial Sequence
  Description of Artificial Sequence: Synthetic oligonucleotide
  Target: ATXN2; (-) strand; PAM type: YTN; PAM sequence: CTA
ctttgacctaaagtctagta

SEQ ID NO: 69966 - DNA, 20 bp, Artificial Sequence
  Description of Artificial Sequence: Synthetic oligonucleotide
  Target: ATXN2; (-) strand; PAM type: YTN; PAM sequence: CTG
aaatgtcctactttgaccta

SEQ ID NO: 69967 - DNA, 20 bp, Artificial Sequence
  Description of Artificial Sequence: Synthetic oligonucleotide
  Target: ATXN2; (-) strand; PAM type: YTN; PAM sequence: CTC
agacaggaagcctgaaatgt

SEQ ID NO: 69968 - DNA, 20 bp, Artificial Sequence
  Description of Artificial Sequence: Synthetic oligonucleotide
  Target: ATXN2; (-) strand; PAM type: YTN; PAM sequence: TTC
ctcagacaggaagcctgaaa

SEQ ID NO: 69969 - DNA, 20 bp, Artificial Sequence
  Description of Artificial Sequence: Synthetic oligonucleotide
  Target: ATXN2; (-) strand; PAM type: YTN; PAM sequence: CTT
cctcagacaggaagcctgaa

SEQ ID NO: 69970 - DNA, 20 bp, Artificial Sequence
  Description of Artificial Sequence: Synthetic oligonucleotide
  Target: ATXN2; (-) strand; PAM type: YTN; PAM sequence: CTC
ttcctcagacaggaagcctg

SEQ ID NO: 69971 - DNA, 20 bp, Artificial Sequence
  Description of Artificial Sequence: Synthetic oligonucleotide
  Target: ATXN2; (-) strand; PAM type: YTN; PAM sequence: TTA
ataatgacactcttcctcag

SEQ ID NO: 69972 - DNA, 20 bp, Artificial Sequence
  Description of Artificial Sequence: Synthetic oligonucleotide
  Target: ATXN2; (-) strand; PAM type: YTN; PAM sequence: CTT
aataatgacactcttcctca

SEQ ID NO: 69973 - DNA, 20 bp, Artificial Sequence
  Description of Artificial Sequence: Synthetic oligonucleotide
  Target: ATXN2; (-) strand; PAM type: YTN; PAM sequence: TTA
aggcataacagcttaataat

SEQ ID NO: 69974 - DNA, 20 bp, Artificial Sequence
  Description of Artificial Sequence: Synthetic oligonucleotide
  Target: ATXN2; (-) strand; PAM type: YTN; PAM sequence: TTT
aaggcataacagcttaataa

SEQ ID NO: 69975 - DNA, 20 bp, Artificial Sequence
  Description of Artificial Sequence: Synthetic oligonucleotide
  Target: ATXN2; (-) strand; PAM type: YTN; PAM sequence: TTG
atgtttaaggcataacagct

SEQ ID NO: 69976 - DNA, 20 bp, Artificial Sequence
  Description of Artificial Sequence: Synthetic oligonucleotide
  Target: ATXN2; (-) strand; PAM type: YTN; PAM sequence: TTT
gatgtttaaggcataacagc

SEQ ID NO: 69977 - DNA, 20 bp, Artificial Sequence
  Description of Artificial Sequence: Synthetic oligonucleotide
  Target: ATXN2; (-) strand; PAM type: YTN; PAM sequence: CTG
tgtttgatgtttaaggcata

SEQ ID NO: 69978 - DNA, 20 bp, Artificial Sequence
  Description of Artificial Sequence: Synthetic oligonucleotide
  Target: ATXN2; (-) strand; PAM type: YTN; PAM sequence: TTG
taacatatctgtgtttgatg

SEQ ID NO: 69979 - DNA, 20 bp, Artificial Sequence
  Description of Artificial Sequence: Synthetic oligonucleotide
  Target: ATXN2; (-) strand; PAM type: YTN; PAM sequence: TTT
gtaacatatctgtgtttgat

SEQ ID NO: 69980 - DNA, 20 bp, Artificial Sequence
  Description of Artificial Sequence: Synthetic oligonucleotide
  Target: ATXN2; (-) strand; PAM type: YTN; PAM sequence: TTG
agtagaaagagaatttgtaa

SEQ ID NO: 69981 - DNA, 20 bp, Artificial Sequence
  Description of Artificial Sequence: Synthetic oligonucleotide
  Target: ATXN2; (-) strand; PAM type: YTN; PAM sequence: TTC
cattgagtagaaagagaatt

SEQ ID NO: 69982 - DNA, 20 bp, Artificial Sequence
  Description of Artificial Sequence: Synthetic oligonucleotide
  Target: ATXN2; (-) strand; PAM type: YTN; PAM sequence: CTT
ccattgagtagaaagagaat

SEQ ID NO: 69983 - DNA, 20 bp, Artificial Sequence
  Description of Artificial Sequence: Synthetic oligonucleotide
  Target: ATXN2; (-) strand; PAM type: YTN; PAM sequence: TTG
agtagaatgaagaatcttcc

SEQ ID NO: 69984 - DNA, 20 bp, Artificial Sequence
  Description of Artificial Sequence: Synthetic oligonucleotide
  Target: ATXN2; (-) strand; PAM type: YTN; PAM sequence: TTT
gagtagaatgaagaatcttc

SEQ ID NO: 69985 - DNA, 20 bp, Artificial Sequence
  Description of Artificial Sequence: Synthetic oligonucleotide
  Target: ATXN2; (-) strand; PAM type: YTN; PAM sequence: TTA
tggtaccaatatttgagtag

SEQ ID NO: 69986 - DNA, 20 bp, Artificial Sequence
  Description of Artificial Sequence: Synthetic oligonucleotide
  Target: ATXN2; (-) strand; PAM type: YTN; PAM sequence: TTG
ccaaaaatgagtgttatggt

SEQ ID NO: 69987 - DNA, 20 bp, Artificial Sequence
  Description of Artificial Sequence: Synthetic oligonucleotide
  Target: ATXN2; (-) strand; PAM type: YTN; PAM sequence: CTT
gccaaaaatgagtgttatgg

SEQ ID NO: 69988 - DNA, 20 bp, Artificial Sequence
  Description of Artificial Sequence: Synthetic oligonucleotide
  Target: ATXN2; (-) strand; PAM type: YTN; PAM sequence: TTA
ggatagagagcatagagata

SEQ ID NO: 69989 - DNA, 20 bp, Artificial Sequence
  Description of Artificial Sequence: Synthetic oligonucleotide
  Target: ATXN2; (-) strand; PAM type: YTN; PAM sequence: TTT
aggatagagagcatagagat

SEQ ID NO: 69990 - DNA, 20 bp, Artificial Sequence
  Description of Artificial Sequence: Synthetic oligonucleotide
  Target: ATXN2; (-) strand; PAM type: YTN; PAM sequence: CTT
taggatagagagcatagaga

SEQ ID NO: 69991 - DNA, 20 bp, Artificial Sequence
  Description of Artificial Sequence: Synthetic oligonucleotide
  Target: ATXN2; (-) strand; PAM type: YTN; PAM sequence: CTG
tctttaggatagagagcata

SEQ ID NO: 69992 - DNA, 20 bp, Artificial Sequence
  Description of Artificial Sequence: Synthetic oligonucleotide
  Target: ATXN2; (-) strand; PAM type: YTN; PAM sequence: CTC
tgtctttaggatagagagca

SEQ ID NO: 69993 - DNA, 20 bp, Artificial Sequence
  Description of Artificial Sequence: Synthetic oligonucleotide
  Target: ATXN2; (-) strand; PAM type: YTN; PAM sequence: TTA
ataaagactctgtctttagg

SEQ ID NO: 69994 - DNA, 20 bp, Artificial Sequence
  Description of Artificial Sequence: Synthetic oligonucleotide
  Target: ATXN2; (-) strand; PAM type: YTN; PAM sequence: CTT
aataaagactctgtctttag

SEQ ID NO: 69995 - DNA, 20 bp, Artificial Sequence
  Description of Artificial Sequence: Synthetic oligonucleotide
  Target: ATXN2; (-) strand; PAM type: YTN; PAM sequence: CTA
agaaataaaaataaaaacaa

SEQ ID NO: 69996 - DNA, 20 bp, Artificial Sequence
  Description of Artificial Sequence: Synthetic oligonucleotide
  Target: ATXN2; (-) strand; PAM type: YTN; PAM sequence: CTC
taagaaataaaaataaaaac

SEQ ID NO: 69997 - DNA, 20 bp, Artificial Sequence
  Description of Artificial Sequence: Synthetic oligonucleotide
  Target: ATXN2; (-) strand; PAM type: YTN; PAM sequence: TTC
tctaagaaataaaaataaaa

SEQ ID NO: 69998 - DNA, 20 bp, Artificial Sequence
  Description of Artificial Sequence: Synthetic oligonucleotide
  Target: ATXN2; (-) strand; PAM type: YTN; PAM sequence: CTT
ctctaagaaataaaaataaa

SEQ ID NO: 69999 - DNA, 20 bp, Artificial Sequence
  Description of Artificial Sequence: Synthetic oligonucleotide
  Target: ATXN2; (-) strand; PAM type: YTN; PAM sequence: CTG
aatgacataaggagacccct

SEQ ID NO: 70000 - DNA, 20 bp, Artificial Sequence
  Description of Artificial Sequence: Synthetic oligonucleotide
  Target: ATXN2; (-) strand; PAM type: YTN; PAM sequence: TTG
gagtccagcctgaatgacat

SEQ ID NO: 70001 - DNA, 20 bp, Artificial Sequence
  Description of Artificial Sequence: Synthetic oligonucleotide
  Target: ATXN2; (-) strand; PAM type: YTN; PAM sequence: TTG
agcccaggagttggagtcca

SEQ ID NO: 70002 - DNA, 20 bp, Artificial Sequence
  Description of Artificial Sequence: Synthetic oligonucleotide
  Target: ATXN2; (-) strand; PAM type: YTN; PAM sequence: CTT
gagcccaggagttggagtcc

SEQ ID NO: 70003 - DNA, 20 bp, Artificial Sequence
  Description of Artificial Sequence: Synthetic oligonucleotide
  Target: ATXN2; (-) strand; PAM type: YTN; PAM sequence: CTG
aagcaggaggatcacttgag

SEQ ID NO: 70004 - DNA, 20 bp, Artificial Sequence
  Description of Artificial Sequence: Synthetic oligonucleotide
  Target: ATXN2; (-) strand; PAM type: YTN; PAM sequence: TTG
ggaggctgaagcaggaggat

SEQ ID NO: 70005 - DNA, 20 bp, Artificial Sequence
  Description of Artificial Sequence: Synthetic oligonucleotide
  Target: ATXN2; (-) strand; PAM type: YTN; PAM sequence: CTT
gggaggctgaagcaggagga

SEQ ID NO: 70006 - DNA, 20 bp, Artificial Sequence
  Description of Artificial Sequence: Synthetic oligonucleotide
  Target: ATXN2; (-) strand; PAM type: YTN; PAM sequence: CTA
cttgggaggctgaagcagga

SEQ ID NO: 70007 - DNA, 20 bp, Artificial Sequence
  Description of Artificial Sequence: Synthetic oligonucleotide
  Target: ATXN2; (-) strand; PAM type: YTN; PAM sequence: CTG
cagtcccagctacttgggag

SEQ ID NO: 70008 - DNA, 20 bp, Artificial Sequence
  Description of Artificial Sequence: Synthetic oligonucleotide
  Target: ATXN2; (-) strand; PAM type: YTN; PAM sequence: CTG
gcacatgcctgcagtcccag

SEQ ID NO: 70009 - DNA, 20 bp, Artificial Sequence
  Description of Artificial Sequence: Synthetic oligonucleotide
  Target: ATXN2; (-) strand; PAM type: YTN; PAM sequence: CTG
ggtatgctggcacatgcctg

SEQ ID NO: 70010 - DNA, 20 bp, Artificial Sequence
  Description of Artificial Sequence: Synthetic oligonucleotide
  Target: ATXN2; (-) strand; PAM type: YTN; PAM sequence: TTA
gctgggtatgctggcacatg

SEQ ID NO: 70011 - DNA, 20 bp, Artificial Sequence
  Description of Artificial Sequence: Synthetic oligonucleotide
  Target: ATXN2; (-) strand; PAM type: YTN; PAM sequence: CTT
agctgggtatgctggcacat

SEQ ID NO: 70012 - DNA, 20 bp, Artificial Sequence
  Description of Artificial Sequence: Synthetic oligonucleotide
  Target: ATXN2; (-) strand; PAM type: YTN; PAM sequence: TTG
aagtgcttagctgggtatgc

SEQ ID NO: 70013 - DNA, 20 bp, Artificial Sequence
  Description of Artificial Sequence: Synthetic oligonucleotide
  Target: ATXN2; (-) strand; PAM type: YTN; PAM sequence: CTT
gaagtgcttagctgggtatg

SEQ ID NO: 70014 - DNA, 20 bp, Artificial Sequence
  Description of Artificial Sequence: Synthetic oligonucleotide
  Target: ATXN2; (-) strand; PAM type: YTN; PAM sequence: CTG
tacttgaagtgcttagctgg

SEQ ID NO: 70015 - DNA, 20 bp, Artificial Sequence
  Description of Artificial Sequence: Synthetic oligonucleotide
  Target: ATXN2; (-) strand; PAM type: YTN; PAM sequence: TTA
tctgtacttgaagtgcttag

SEQ ID NO: 70016 - DNA, 20 bp, Artificial Sequence
  Description of Artificial Sequence: Synthetic oligonucleotide
  Target: ATXN2; (-) strand; PAM type: YTN; PAM sequence: TTA
atgcattatctgtacttgaa

SEQ ID NO: 70017 - DNA, 20 bp, Artificial Sequence
  Description of Artificial Sequence: Synthetic oligonucleotide
  Target: ATXN2; (-) strand; PAM type: YTN; PAM sequence: TTT
aatgcattatctgtacttga

SEQ ID NO: 70018 - DNA, 20 bp, Artificial Sequence
  Description of Artificial Sequence: Synthetic oligonucleotide
  Target: ATXN2; (-) strand; PAM type: YTN; PAM sequence: CTT
taatgcattatctgtacttg

SEQ ID NO: 70019 - DNA, 20 bp, Artificial Sequence
  Description of Artificial Sequence: Synthetic oligonucleotide
  Target: ATXN2; (-) strand; PAM type: YTN; PAM sequence: CTC
tttaatgcattatctgtact

SEQ ID NO: 70020 - DNA, 20 bp, Artificial Sequence
  Description of Artificial Sequence: Synthetic oligonucleotide
  Target: ATXN2; (-) strand; PAM type: YTN; PAM sequence: CTC
tctttaatgcattatctgta

SEQ ID NO: 70021 - DNA, 20 bp, Artificial Sequence
  Description of Artificial Sequence: Synthetic oligonucleotide
  Target: ATXN2; (-) strand; PAM type: YTN; PAM sequence: TTC
tctctttaatgcattatctg

SEQ ID NO: 70022 - DNA, 20 bp, Artificial Sequence
  Description of Artificial Sequence: Synthetic oligonucleotide
  Target: ATXN2; (-) strand; PAM type: YTN; PAM sequence: TTT
ctctctttaatgcattatct

SEQ ID NO: 70023 - DNA, 20 bp, Artificial Sequence
  Description of Artificial Sequence: Synthetic oligonucleotide
  Target: ATXN2; (-) strand; PAM type: YTN; PAM sequence: TTG
tttctctctttaatgcatta

SEQ ID NO: 70024 - DNA, 20 bp, Artificial Sequence
  Description of Artificial Sequence: Synthetic oligonucleotide
  Target: ATXN2; (-) strand; PAM type: YTN; PAM sequence: TTT
gtttctctctttaatgcatt

SEQ ID NO: 70025 - DNA, 20 bp, Artificial Sequence
  Description of Artificial Sequence: Synthetic oligonucleotide
  Target: ATXN2; (-) strand; PAM type: YTN; PAM sequence: TTT
tgtttctctctttaatgcat

SEQ ID NO: 70026 - DNA, 20 bp, Artificial Sequence
  Description of Artificial Sequence: Synthetic oligonucleotide
  Target: ATXN2; (-) strand; PAM type: YTN; PAM sequence: CTA
gttttgtttctctctttaat

SEQ ID NO: 70027 - DNA, 20 bp, Artificial Sequence
  Description of Artificial Sequence: Synthetic oligonucleotide
  Target: ATXN2; (-) strand; PAM type: YTN; PAM sequence: TTG
tcacatactagttttgtttc

SEQ ID NO: 70028 - DNA, 20 bp, Artificial Sequence
  Description of Artificial Sequence: Synthetic oligonucleotide
  Target: ATXN2; (-) strand; PAM type: YTN; PAM sequence: CTT
gtcacatactagttttgttt

SEQ ID NO: 70029 - DNA, 20 bp, Artificial Sequence
  Description of Artificial Sequence: Synthetic oligonucleotide
  Target: ATXN2; (-) strand; PAM type: YTN; PAM sequence: CTC
ttgtcacatactagttttgt

SEQ ID NO: 70030 - DNA, 20 bp, Artificial Sequence
  Description of Artificial Sequence: Synthetic oligonucleotide
  Target: ATXN2; (-) strand; PAM type: YTN; PAM sequence: CTA
aaacgcctcttgtcacatac

SEQ ID NO: 70031 - DNA, 20 bp, Artificial Sequence
  Description of Artificial Sequence: Synthetic oligonucleotide
  Target: ATXN2; (-) strand; PAM type: YTN; PAM sequence: TTC
taaaacgcctcttgtcacat

SEQ ID NO: 70032 - DNA, 20 bp, Artificial Sequence
  Description of Artificial Sequence: Synthetic oligonucleotide
  Target: ATXN2; (-) strand; PAM type: YTN; PAM sequence: TTT
ctaaaacgcctcttgtcaca

SEQ ID NO: 70033 - DNA, 20 bp, Artificial Sequence
  Description of Artificial Sequence: Synthetic oligonucleotide
  Target: ATXN2; (-) strand; PAM type: YTN; PAM sequence: TTA
tttctaaaacgcctcttgtc

SEQ ID NO: 70034 - DNA, 20 bp, Artificial Sequence
  Description of Artificial Sequence: Synthetic oligonucleotide
  Target: ATXN2; (-) strand; PAM type: YTN; PAM sequence: TTT
atttctaaaacgcctcttgt

SEQ ID NO: 70035 - DNA, 20 bp, Artificial Sequence
  Description of Artificial Sequence: Synthetic oligonucleotide
  Target: ATXN2; (-) strand; PAM type: YTN; PAM sequence: TTT
tatttctaaaacgcctcttg

SEQ ID NO: 70036 - DNA, 20 bp, Artificial Sequence
  Description of Artificial Sequence: Synthetic oligonucleotide
  Target: ATXN2; (-) strand; PAM type: YTN; PAM sequence: CTT
ttatttctaaaacgcctctt

SEQ ID NO: 70037 - DNA, 20 bp, Artificial Sequence
  Description of Artificial Sequence: Synthetic oligonucleotide
  Target: ATXN2; (-) strand; PAM type: YTN; PAM sequence: TTC
ttttatttctaaaacgcctc

SEQ ID NO: 70038 - DNA, 20 bp, Artificial Sequence
  Description of Artificial Sequence: Synthetic oligonucleotide
  Target: ATXN2; (-) strand; PAM type: YTN; PAM sequence: CTC
cacaaaattcttttatttct

SEQ ID NO: 70039 - DNA, 20 bp, Artificial Sequence
  Description of Artificial Sequence: Synthetic oligonucleotide
  Target: ATXN2; (-) strand; PAM type: YTN; PAM sequence: TTC
tccacaaaattcttttattt

SEQ ID NO: 70040 - DNA, 20 bp, Artificial Sequence
  Description of Artificial Sequence: Synthetic oligonucleotide
  Target: ATXN2; (-) strand; PAM type: YTN; PAM sequence: TTA
ttctccacaaaattctttta

SEQ ID NO: 70041 - DNA, 20 bp, Artificial Sequence
  Description of Artificial Sequence: Synthetic oligonucleotide
  Target: ATXN2; (-) strand; PAM type: YTN; PAM sequence: TTG
gattattctccacaaaattc

SEQ ID NO: 70042 - DNA, 20 bp, Artificial Sequence
  Description of Artificial Sequence: Synthetic oligonucleotide
  Target: ATXN2; (-) strand; PAM type: YTN; PAM sequence: TTT
ggattattctccacaaaatt

SEQ ID NO: 70043 - DNA, 20 bp, Artificial Sequence
  Description of Artificial Sequence: Synthetic oligonucleotide
  Target: ATXN2; (-) strand; PAM type: YTN; PAM sequence: TTA
aatttggattattctccaca

SEQ ID NO: 70044 - DNA, 20 bp, Artificial Sequence
  Description of Artificial Sequence: Synthetic oligonucleotide
  Target: ATXN2; (-) strand; PAM type: YTN; PAM sequence: CTT
aaatttggattattctccac

SEQ ID NO: 70045 - DNA, 20 bp, Artificial Sequence
  Description of Artificial Sequence: Synthetic oligonucleotide
  Target: ATXN2; (-) strand; PAM type: YTN; PAM sequence: TTG
gtcttaaatttggattattc

SEQ ID NO: 70046 - DNA, 20 bp, Artificial Sequence
  Description of Artificial Sequence: Synthetic oligonucleotide
  Target: ATXN2; (-) strand; PAM type: YTN; PAM sequence: CTT
ggtcttaaatttggattatt

SEQ ID NO: 70047 - DNA, 20 bp, Artificial Sequence
  Description of Artificial Sequence: Synthetic oligonucleotide
  Target: ATXN2; (-) strand; PAM type: YTN; PAM sequence: TTC
ttggtcttaaatttggatta

SEQ ID NO: 70048 - DNA, 20 bp, Artificial Sequence
  Description of Artificial Sequence: Synthetic oligonucleotide
  Target: ATXN2; (-) strand; PAM type: YTN; PAM sequence: TTT
cttggtcttaaatttggatt

SEQ ID NO: 70049 - DNA, 20 bp, Artificial Sequence
  Description of Artificial Sequence: Synthetic oligonucleotide
  Target: ATXN2; (-) strand; PAM type: YTN; PAM sequence: TTA
cataaatttcttggtcttaa

SEQ ID NO: 70050 - DNA, 20 bp, Artificial Sequence
  Description of Artificial Sequence: Synthetic oligonucleotide
  Target: ATXN2; (-) strand; PAM type: YTN; PAM sequence: TTA
aagcattacataaatttctt

SEQ ID NO: 70051 - DNA, 20 bp, Artificial Sequence
  Description of Artificial Sequence: Synthetic oligonucleotide
  Target: ATXN2; (-) strand; PAM type: YTN; PAM sequence: TTG
gaattaaagcattacataaa

SEQ ID NO: 70052 - DNA, 20 bp, Artificial Sequence
  Description of Artificial Sequence: Synthetic oligonucleotide
  Target: ATXN2; (-) strand; PAM type: YTN; PAM sequence: TTA
cattggaattaaagcattac

SEQ ID NO: 70053 - DNA, 20 bp, Artificial Sequence
  Description of Artificial Sequence: Synthetic oligonucleotide
  Target: ATXN2; (-) strand; PAM type: YTN; PAM sequence: TTA
ggttacattggaattaaagc

SEQ ID NO: 70054 - DNA, 20 bp, Artificial Sequence
  Description of Artificial Sequence: Synthetic oligonucleotide
  Target: ATXN2; (-) strand; PAM type: YTN; PAM sequence: TTA
agataaataattaggttaca

SEQ ID NO: 70055 - DNA, 20 bp, Artificial Sequence
  Description of Artificial Sequence: Synthetic oligonucleotide
  Target: ATXN2; (-) strand; PAM type: YTN; PAM sequence: TTG
tcattaagataaataattag

SEQ ID NO: 70056 - DNA, 20 bp, Artificial Sequence
  Description of Artificial Sequence: Synthetic oligonucleotide
  Target: ATXN2; (-) strand; PAM type: YTN; PAM sequence: CTG
aagaaaaggttgtcattaag

SEQ ID NO: 70057 - DNA, 20 bp, Artificial Sequence
  Description of Artificial Sequence: Synthetic oligonucleotide
  Target: ATXN2; (-) strand; PAM type: YTN; PAM sequence: TTG
tctgaagaaaaggttgtcat

SEQ ID NO: 70058 - DNA, 20 bp, Artificial Sequence
  Description of Artificial Sequence: Synthetic oligonucleotide
  Target: ATXN2; (-) strand; PAM type: YTN; PAM sequence: CTT
gtctgaagaaaaggttgtca

SEQ ID NO: 70059 - DNA, 20 bp, Artificial Sequence
  Description of Artificial Sequence: Synthetic oligonucleotide
  Target: ATXN2; (-) strand; PAM type: YTN; PAM sequence: CTC
ttgtctgaagaaaaggttgt

SEQ ID NO: 70060 - DNA, 20 bp, Artificial Sequence
  Description of Artificial Sequence: Synthetic oligonucleotide
  Target: ATXN2; (-) strand; PAM type: YTN; PAM sequence: TTA
agcctcttgtctgaagaaaa

SEQ ID NO: 70061 - DNA, 20 bp, Artificial Sequence
  Description of Artificial Sequence: Synthetic oligonucleotide
  Target: ATXN2; (-) strand; PAM type: YTN; PAM sequence: TTT
aagcctcttgtctgaagaaa

SEQ ID NO: 70062 - DNA, 20 bp, Artificial Sequence
  Description of Artificial Sequence: Synthetic oligonucleotide
  Target: ATXN2; (-) strand; PAM type: YTN; PAM sequence: TTT
taagcctcttgtctgaagaa

SEQ ID NO: 70063 - DNA, 20 bp, Artificial Sequence
  Description of Artificial Sequence: Synthetic oligonucleotide
  Target: ATXN2; (-) strand; PAM type: YTN; PAM sequence: TTG
aagtaggacattttaagcct

SEQ ID NO: 70064 - DNA, 20 bp, Artificial Sequence
  Description of Artificial Sequence: Synthetic oligonucleotide
  Target: ATXN2; (-) strand; PAM type: YTN; PAM sequence: CTA
gagaagaggttgaagtagga

SEQ ID NO: 70065 - DNA, 20 bp, Artificial Sequence
  Description of Artificial Sequence: Synthetic oligonucleotide
  Target: ATXN2; (-) strand; PAM type: YTN; PAM sequence: TTC
acctagagaagaggttgaag

SEQ ID NO: 70066 - DNA, 20 bp, Artificial Sequence
  Description of Artificial Sequence: Synthetic oligonucleotide
  Target: ATXN2; (-) strand; PAM type: YTN; PAM sequence: CTT
cacctagagaagaggttgaa

SEQ ID NO: 70067 - DNA, 20 bp, Artificial Sequence
  Description of Artificial Sequence: Synthetic oligonucleotide
  Target: ATXN2; (-) strand; PAM type: YTN; PAM sequence: TTG
acttcacctagagaagaggt

SEQ ID NO: 70068 - DNA, 20 bp, Artificial Sequence
  Description of Artificial Sequence: Synthetic oligonucleotide
  Target: ATXN2; (-) strand; PAM type: YTN; PAM sequence: TTG
ttgacttcacctagagaaga

SEQ ID NO: 70069 - DNA, 20 bp, Artificial Sequence
  Description of Artificial Sequence: Synthetic oligonucleotide
  Target: ATXN2; (-) strand; PAM type: YTN; PAM sequence: TTA
attgttgacttcacctagag

SEQ ID NO: 70070 - DNA, 20 bp, Artificial Sequence
  Description of Artificial Sequence: Synthetic oligonucleotide
  Target: ATXN2; (-) strand; PAM type: YTN; PAM sequence: CTT
aattgttgacttcacctaga

SEQ ID NO: 70071 - DNA, 20 bp, Artificial Sequence
  Description of Artificial Sequence: Synthetic oligonucleotide
  Target: ATXN2; (-) strand; PAM type: YTN; PAM sequence: CTA
aggaaagtggtgtcttaatt

SEQ ID NO: 70072 - DNA, 20 bp, Artificial Sequence
  Description of Artificial Sequence: Synthetic oligonucleotide
  Target: ATXN2; (-) strand; PAM type: YTN; PAM sequence: TTA
acacccagccaaataaggta

SEQ ID NO: 70073 - DNA, 20 bp, Artificial Sequence
  Description of Artificial Sequence: Synthetic oligonucleotide
  Target: ATXN2; (-) strand; PAM type: YTN; PAM sequence: TTT
aacacccagccaaataaggt

SEQ ID NO: 70074 - DNA, 20 bp, Artificial Sequence
  Description of Artificial Sequence: Synthetic oligonucleotide
  Target: ATXN2; (-) strand; PAM type: YTN; PAM sequence: CTT
taacacccagccaaataagg

SEQ ID NO: 70075 - DNA, 20 bp, Artificial Sequence
  Description of Artificial Sequence: Synthetic oligonucleotide
  Target: ATXN2; (-) strand; PAM type: YTN; PAM sequence: TTG
ctttaacacccagccaaata

SEQ ID NO: 70076 - DNA, 20 bp, Artificial Sequence
  Description of Artificial Sequence: Synthetic oligonucleotide
  Target: ATXN2; (-) strand; PAM type: YTN; PAM sequence: TTT
gctttaacacccagccaaat

SEQ ID NO: 70077 - DNA, 20 bp, Artificial Sequence
  Description of Artificial Sequence: Synthetic oligonucleotide
  Target: ATXN2; (-) strand; PAM type: YTN; PAM sequence: TTT
tgctttaacacccagccaaa

SEQ ID NO: 70078 - DNA, 20 bp, Artificial Sequence
  Description of Artificial Sequence: Synthetic oligonucleotide
  Target: ATXN2; (-) strand; PAM type: YTN; PAM sequence: TTA
gaaaccatgggaaatgccgg

SEQ ID NO: 70079 - DNA, 20 bp, Artificial Sequence
  Description of Artificial Sequence: Synthetic oligonucleotide
  Target: ATXN2; (-) strand; PAM type: YTN; PAM sequence: TTA
aaattagaaaccatgggaaa

SEQ ID NO: 70080 - DNA, 20 bp, Artificial Sequence
  Description of Artificial Sequence: Synthetic oligonucleotide
  Target: ATXN2; (-) strand; PAM type: YTN; PAM sequence: TTA
aattaaaattagaaaccatg

SEQ ID NO: 70081 - DNA, 20 bp, Artificial Sequence
  Description of Artificial Sequence: Synthetic oligonucleotide
  Target: ATXN2; (-) strand; PAM type: YTN; PAM sequence: CTT
aaattaaaattagaaaccat

SEQ ID NO: 70082 - DNA, 20 bp, Artificial Sequence
  Description of Artificial Sequence: Synthetic oligonucleotide
  Target: ATXN2; (-) strand; PAM type: YTN; PAM sequence: TTA
aaataaataataagaagtag

SEQ ID NO: 70083 - DNA, 20 bp, Artificial Sequence
  Description of Artificial Sequence: Synthetic oligonucleotide
  Target: ATXN2; (-) strand; PAM type: YTN; PAM sequence: TTG
tgattaaaataaataataag

SEQ ID NO: 70084 - DNA, 20 bp, Artificial Sequence
  Description of Artificial Sequence: Synthetic oligonucleotide
  Target: ATXN2; (-) strand; PAM type: YTN; PAM sequence: TTT
gtgattaaaataaataataa

SEQ ID NO: 70085 - DNA, 20 bp, Artificial Sequence
  Description of Artificial Sequence: Synthetic oligonucleotide
  Target: ATXN2; (-) strand; PAM type: YTN; PAM sequence: CTT
tgtgattaaaataaataata

SEQ ID NO: 70086 - DNA, 20 bp, Artificial Sequence
  Description of Artificial Sequence: Synthetic oligonucleotide
  Target: ATXN2; (-) strand; PAM type: YTN; PAM sequence: TTC
tttgtgattaaaataaataa

SEQ ID NO: 70087 - DNA, 20 bp, Artificial Sequence
  Description of Artificial Sequence: Synthetic oligonucleotide
  Target: ATXN2; (-) strand; PAM type: YTN; PAM sequence: CTT
ctttgtgattaaaataaata

SEQ ID NO: 70088 - DNA, 20 bp, Artificial Sequence
  Description of Artificial Sequence: Synthetic oligonucleotide
  Target: ATXN2; (-) strand; PAM type: YTN; PAM sequence: TTA
cttctttgtgattaaaataa

SEQ ID NO: 70089 - DNA, 20 bp, Artificial Sequence
  Description of Artificial Sequence: Synthetic oligonucleotide
  Target: ATXN2; (-) strand; PAM type: YTN; PAM sequence: CTC
atgaattacttctttgtgat

SEQ ID NO: 70090 - DNA, 20 bp, Artificial Sequence
  Description of Artificial Sequence: Synthetic oligonucleotide
  Target: ATXN2; (-) strand; PAM type: YTN; PAM sequence: TTG
tggatgctcatgaattactt

SEQ ID NO: 70091 - DNA, 20 bp, Artificial Sequence
  Description of Artificial Sequence: Synthetic oligonucleotide
  Target: ATXN2; (-) strand; PAM type: YTN; PAM sequence: CTT
gtggatgctcatgaattact

SEQ ID NO: 70092 - DNA, 20 bp, Artificial Sequence
  Description of Artificial Sequence: Synthetic oligonucleotide
  Target: ATXN2; (-) strand; PAM type: YTN; PAM sequence: TTC
ttgtggatgctcatgaatta

SEQ ID NO: 70093 - DNA, 20 bp, Artificial Sequence
  Description of Artificial Sequence: Synthetic oligonucleotide
  Target: ATXN2; (-) strand; PAM type: YTN; PAM sequence: CTG
ttcttgtggatgctcatgaa

SEQ ID NO: 70094 - DNA, 20 bp, Artificial Sequence
  Description of Artificial Sequence: Synthetic oligonucleotide
  Target: ATXN2; (-) strand; PAM type: YTN; PAM sequence: CTG
tctgttcttgtggatgctca

SEQ ID NO: 70095 - DNA, 20 bp, Artificial Sequence
  Description of Artificial Sequence: Synthetic oligonucleotide
  Target: ATXN2; (-) strand; PAM type: YTN; PAM sequence: TTA
agcaggagtactgtctgttc

SEQ ID NO: 70096 - DNA, 20 bp, Artificial Sequence
  Description of Artificial Sequence: Synthetic oligonucleotide
  Target: ATXN2; (-) strand; PAM type: YTN; PAM sequence: TTG
taggggttaagcaggagtac

SEQ ID NO: 70097 - DNA, 20 bp, Artificial Sequence
  Description of Artificial Sequence: Synthetic oligonucleotide
  Target: ATXN2; (-) strand; PAM type: YTN; PAM sequence: CTT
gtaggggttaagcaggagta

SEQ ID NO: 70098 - DNA, 20 bp, Artificial Sequence
  Description of Artificial Sequence: Synthetic oligonucleotide
  Target: ATXN2; (-) strand; PAM type: YTN; PAM sequence: TTA
cttgtaggggttaagcagga

SEQ ID NO: 70099 - DNA, 20 bp, Artificial Sequence
  Description of Artificial Sequence: Synthetic oligonucleotide
  Target: ATXN2; (-) strand; PAM type: YTN; PAM sequence: TTT
acttgtaggggttaagcagg

SEQ ID NO: 70100 - DNA, 20 bp, Artificial Sequence
  Description of Artificial Sequence: Synthetic oligonucleotide
  Target: ATXN2; (-) strand; PAM type: YTN; PAM sequence: TTT
tacttgtaggggttaagcag

SEQ ID NO: 70101 - DNA, 20 bp, Artificial Sequence
  Description of Artificial Sequence: Synthetic oligonucleotide
  Target: ATXN2; (-) strand; PAM type: YTN; PAM sequence: TTG
tcattttacttgtaggggtt

SEQ ID NO: 70102 - DNA, 20 bp, Artificial Sequence
  Description of Artificial Sequence: Synthetic oligonucleotide
  Target: ATXN2; (-) strand; PAM type: YTN; PAM sequence: TTT
gtcattttacttgtaggggt

SEQ ID NO: 70103 - DNA, 20 bp, Artificial Sequence
  Description of Artificial Sequence: Synthetic oligonucleotide
  Target: ATXN2; (-) strand; PAM type: YTN; PAM sequence: CTC
ccaagcaatatataaagaaa

SEQ ID NO: 70104 - DNA, 20 bp, Artificial Sequence
  Description of Artificial Sequence: Synthetic oligonucleotide
  Target: ATXN2; (-) strand; PAM type: YTN; PAM sequence: TTC
tcccaagcaatatataaaga

SEQ ID NO: 70105 - DNA, 20 bp, Artificial Sequence
  Description of Artificial Sequence: Synthetic oligonucleotide
  Target: ATXN2; (-) strand; PAM type: YTN; PAM sequence: TTT
ctcccaagcaatatataaag

SEQ ID NO: 70106 - DNA, 20 bp, Artificial Sequence
  Description of Artificial Sequence: Synthetic oligonucleotide
  Target: ATXN2; (-) strand; PAM type: YTN; PAM sequence: CTT
tctcccaagcaatatataaa

SEQ ID NO: 70107 - DNA, 20 bp, Artificial Sequence
  Description of Artificial Sequence: Synthetic oligonucleotide
  Target: ATXN2; (-) strand; PAM type: YTN; PAM sequence: CTA
gagactttctcccaagcaat

SEQ ID NO: 70108 - DNA, 20 bp, Artificial Sequence
  Description of Artificial Sequence: Synthetic oligonucleotide
  Target: ATXN2; (-) strand; PAM type: YTN; PAM sequence: TTG
tataactagagactttctcc

SEQ ID NO: 70109 - DNA, 20 bp, Artificial Sequence
  Description of Artificial Sequence: Synthetic oligonucleotide
  Target: ATXN2; (-) strand; PAM type: YTN; PAM sequence: TTG
ttgtataactagagactttc

SEQ ID NO: 70110 - DNA, 20 bp, Artificial Sequence
  Description of Artificial Sequence: Synthetic oligonucleotide
  Target: ATXN2; (-) strand; PAM type: YTN; PAM sequence: TTT
gttgtataactagagacttt

SEQ ID NO: 70111 - DNA, 20 bp, Artificial Sequence
  Description of Artificial Sequence: Synthetic oligonucleotide
  Target: ATXN2; (-) strand; PAM type: YTN; PAM sequence: TTA
gagcagcaggtttgttgtat

SEQ ID NO: 70112 - DNA, 20 bp, Artificial Sequence
  Description of Artificial Sequence: Synthetic oligonucleotide
  Target: ATXN2; (-) strand; PAM type: YTN; PAM sequence: TTT
agagcagcaggtttgttgta

SEQ ID NO: 70113 - DNA, 20 bp, Artificial Sequence
  Description of Artificial Sequence: Synthetic oligonucleotide
  Target: ATXN2; (-) strand; PAM type: YTN; PAM sequence: TTG
tagtgagtgtatttagagca

SEQ ID NO: 70114 - DNA, 20 bp, Artificial Sequence
  Description of Artificial Sequence: Synthetic oligonucleotide
  Target: ATXN2; (-) strand; PAM type: YTN; PAM sequence: TTA
ttgtagtgagtgtatttaga

SEQ ID NO: 70115 - DNA, 20 bp, Artificial Sequence
  Description of Artificial Sequence: Synthetic oligonucleotide
  Target: ATXN2; (-) strand; PAM type: YTN; PAM sequence: TTG
ttattgtagtgagtgtattt

SEQ ID NO: 70116 - DNA, 20 bp, Artificial Sequence
  Description of Artificial Sequence: Synthetic oligonucleotide
  Target: ATXN2; (-) strand; PAM type: YTN; PAM sequence: TTG
ttgttattgtagtgagtgta

SEQ ID NO: 70117 - DNA, 20 bp, Artificial Sequence
  Description of Artificial Sequence: Synthetic oligonucleotide
  Target: ATXN2; (-) strand; PAM type: YTN; PAM sequence: TTG
ttgttgttattgtagtgagt

SEQ ID NO: 70118 - DNA, 20 bp, Artificial Sequence
  Description of Artificial Sequence: Synthetic oligonucleotide
  Target: ATXN2; (-) strand; PAM type: YTN; PAM sequence: TTG
ttgttgttgttattgtagtg

SEQ ID NO: 70119 - DNA, 20 bp, Artificial Sequence
  Description of Artificial Sequence: Synthetic oligonucleotide
  Target: ATXN2; (-) strand; PAM type: YTN; PAM sequence: TTT
gttgttgttgttattgtagt

SEQ ID NO: 70120 - DNA, 20 bp, Artificial Sequence
  Description of Artificial Sequence: Synthetic oligonucleotide
  Target: ATXN2; (-) strand; PAM type: YTN; PAM sequence: TTT
tgttgttgttgttattgtag

SEQ ID NO: 70121 - DNA, 20 bp, Artificial Sequence
  Description of Artificial Sequence: Synthetic oligonucleotide
  Target: ATXN2; (-) strand; PAM type: YTN; PAM sequence: CTT
ttgttgttgttgttattgta

SEQ ID NO: 70122 - DNA, 20 bp, Artificial Sequence
  Description of Artificial Sequence: Synthetic oligonucleotide
  Target: ATXN2; (-) strand; PAM type: YTN; PAM sequence: TTA
aatgtgcttttgttgttgtt

SEQ ID NO: 70123 - DNA, 20 bp, Artificial Sequence
  Description of Artificial Sequence: Synthetic oligonucleotide
  Target: ATXN2; (-) strand; PAM type: YTN; PAM sequence: TTT
aaatgtgcttttgttgttgt

SEQ ID NO: 70124 - DNA, 20 bp, Artificial Sequence
  Description of Artificial Sequence: Synthetic oligonucleotide
  Target: ATXN2; (-) strand; PAM type: YTN; PAM sequence: TTG
taatttaaatgtgcttttgt

SEQ ID NO: 70125 - DNA, 20 bp, Artificial Sequence
  Description of Artificial Sequence: Synthetic oligonucleotide
  Target: ATXN2; (-) strand; PAM type: YTN; PAM sequence: TTG
gttgtaatttaaatgtgctt

SEQ ID NO: 70126 - DNA, 20 bp, Artificial Sequence
  Description of Artificial Sequence: Synthetic oligonucleotide
  Target: ATXN2; (-) strand; PAM type: YTN; PAM sequence: CTT
ggttgtaatttaaatgtgct

SEQ ID NO: 70127 - DNA, 20 bp, Artificial Sequence
  Description of Artificial Sequence: Synthetic oligonucleotide
  Target: ATXN2; (-) strand; PAM type: YTN; PAM sequence: CTG
tcacttggttgtaatttaaa

SEQ ID NO: 70128 - DNA, 20 bp, Artificial Sequence
  Description of Artificial Sequence: Synthetic oligonucleotide
  Target: ATXN2; (-) strand; PAM type: YTN; PAM sequence: CTG
gtcagtatgacatcctgtca

SEQ ID NO: 70129 - DNA, 20 bp, Artificial Sequence
  Description of Artificial Sequence: Synthetic oligonucleotide
  Target: ATXN2; (-) strand; PAM type: YTN; PAM sequence: CTC
tggtcagtatgacatcctgt

SEQ ID NO: 70130 - DNA, 20 bp, Artificial Sequence
  Description of Artificial Sequence: Synthetic oligonucleotide
  Target: ATXN2; (-) strand; PAM type: YTN; PAM sequence: CTA
gactctggtcagtatgacat

SEQ ID NO: 70131 - DNA, 20 bp, Artificial Sequence
  Description of Artificial Sequence: Synthetic oligonucleotide
  Target: ATXN2; (-) strand; PAM type: YTN; PAM sequence: TTG
ctagactctggtcagtatga

SEQ ID NO: 70132 - DNA, 20 bp, Artificial Sequence
  Description of Artificial Sequence: Synthetic oligonucleotide
  Target: ATXN2; (-) strand; PAM type: YTN; PAM sequence: TTA
ttgctagactctggtcagta

SEQ ID NO: 70133 - DNA, 20 bp, Artificial Sequence
  Description of Artificial Sequence: Synthetic oligonucleotide
  Target: ATXN2; (-) strand; PAM type: YTN; PAM sequence: TTG
taattattgctagactctgg

SEQ ID NO: 70134 - DNA, 20 bp, Artificial Sequence
  Description of Artificial Sequence: Synthetic oligonucleotide
  Target: ATXN2; (-) strand; PAM type: YTN; PAM sequence: TTT
gtaattattgctagactctg

SEQ ID NO: 70135 - DNA, 20 bp, Artificial Sequence
  Description of Artificial Sequence: Synthetic oligonucleotide
  Target: ATXN2; (-) strand; PAM type: YTN; PAM sequence: CTT
tgtaattattgctagactct

SEQ ID NO: 70136 - DNA, 20 bp, Artificial Sequence
  Description of Artificial Sequence: Synthetic oligonucleotide
  Target: ATXN2; (-) strand; PAM type: YTN; PAM sequence: TTG
gaaaatgacgtagtaagtaa

SEQ ID NO: 70137 - DNA, 20 bp, Artificial Sequence
  Description of Artificial Sequence: Synthetic oligonucleotide
  Target: ATXN2; (-) strand; PAM type: YTN; PAM sequence: TTT
ggaaaatgacgtagtaagta

SEQ ID NO: 70138 - DNA, 20 bp, Artificial Sequence
  Description of Artificial Sequence: Synthetic oligonucleotide
  Target: ATXN2; (-) strand; PAM type: YTN; PAM sequence: CTT
tggaaaatgacgtagtaagt

SEQ ID NO: 70139 - DNA, 20 bp, Artificial Sequence
  Description of Artificial Sequence: Synthetic oligonucleotide
  Target: ATXN2; (-) strand; PAM type: YTN; PAM sequence: TTG
aggctttggaaaatgacgta

SEQ ID NO: 70140 - DNA, 20 bp, Artificial Sequence
  Description of Artificial Sequence: Synthetic oligonucleotide
  Target: ATXN2; (-) strand; PAM type: YTN; PAM sequence: CTT
gaggctttggaaaatgacgt

SEQ ID NO: 70141 - DNA, 20 bp, Artificial Sequence
  Description of Artificial Sequence: Synthetic oligonucleotide
  Target: ATXN2; (-) strand; PAM type: YTN; PAM sequence: CTC
acagccaatgaggaacttga

SEQ ID NO: 70142 - DNA, 20 bp, Artificial Sequence
  Description of Artificial Sequence: Synthetic oligonucleotide
  Target: ATXN2; (-) strand; PAM type: YTN; PAM sequence: CTG
ggatgcaggtgaactcacag

SEQ ID NO: 70143 - DNA, 20 bp, Artificial Sequence
  Description of Artificial Sequence: Synthetic oligonucleotide
  Target: ATXN2; (-) strand; PAM type: YTN; PAM sequence: CTG
gagccctgggatgcaggtga

SEQ ID NO: 70144 - DNA, 20 bp, Artificial Sequence
  Description of Artificial Sequence: Synthetic oligonucleotide
  Target: ATXN2; (-) strand; PAM type: YTN; PAM sequence: CTA
aagtgaatggcgaacacaaa

SEQ ID NO: 70145 - DNA, 20 bp, Artificial Sequence
  Description of Artificial Sequence: Synthetic oligonucleotide
  Target: ATXN2; (-) strand; PAM type: YTN; PAM sequence: CTA
tcagtgctaaagtgaatggc

SEQ ID NO: 70146 - DNA, 20 bp, Artificial Sequence
  Description of Artificial Sequence: Synthetic oligonucleotide
  Target: ATXN2; (-) strand; PAM type: YTN; PAM sequence: CTG
ctatcagtgctaaagtgaat

SEQ ID NO: 70147 - DNA, 20 bp, Artificial Sequence
  Description of Artificial Sequence: Synthetic oligonucleotide
  Target: ATXN2; (-) strand; PAM type: YTN; PAM sequence: CTC
tgctatcagtgctaaagtga

SEQ ID NO: 70148 - DNA, 20 bp, Artificial Sequence
  Description of Artificial Sequence: Synthetic oligonucleotide
  Target: ATXN2; (-) strand; PAM type: YTN; PAM sequence: CTG
actctgctatcagtgctaaa

SEQ ID NO: 70149 - DNA, 20 bp, Artificial Sequence
  Description of Artificial Sequence: Synthetic oligonucleotide
  Target: ATXN2; (-) strand; PAM type: YTN; PAM sequence: TTA
ctgactctgctatcagtgct

SEQ ID NO: 70150 - DNA, 20 bp, Artificial Sequence
  Description of Artificial Sequence: Synthetic oligonucleotide
  Target: ATXN2; (-) strand; PAM type: YTN; PAM sequence: TTT
actgactctgctatcagtgc

SEQ ID NO: 70151 - DNA, 20 bp, Artificial Sequence
  Description of Artificial Sequence: Synthetic oligonucleotide
  Target: ATXN2; (-) strand; PAM type: YTN; PAM sequence: TTT
tactgactctgctatcagtg

SEQ ID NO: 70152 - DNA, 20 bp, Artificial Sequence
  Description of Artificial Sequence: Synthetic oligonucleotide
  Target: ATXN2; (-) strand; PAM type: YTN; PAM sequence: CTT
ttactgactctgctatcagt

SEQ ID NO: 70153 - DNA, 20 bp, Artificial Sequence
  Description of Artificial Sequence: Synthetic oligonucleotide
  Target: ATXN2; (-) strand; PAM type: YTN; PAM sequence: TTG
cagatgcttttactgactct

SEQ ID NO: 70154 - DNA, 20 bp, Artificial Sequence
  Description of Artificial Sequence: Synthetic oligonucleotide
  Target: ATXN2; (-) strand; PAM type: YTN; PAM sequence: TTT
gcagatgcttttactgactc

SEQ ID NO: 70155 - DNA, 20 bp, Artificial Sequence
  Description of Artificial Sequence: Synthetic oligonucleotide
  Target: ATXN2; (-) strand; PAM type: YTN; PAM sequence: CTT
tgcagatgcttttactgact

SEQ ID NO: 70156 - DNA, 20 bp, Artificial Sequence
  Description of Artificial Sequence: Synthetic oligonucleotide
  Target: ATXN2; (-) strand; PAM type: YTN; PAM sequence: TTC
tttgcagatgcttttactga

SEQ ID NO: 70157 - DNA, 20 bp, Artificial Sequence
  Description of Artificial Sequence: Synthetic oligonucleotide
  Target: ATXN2; (-) strand; PAM type: YTN; PAM sequence: TTC
aaccaaaaccattctttgca

SEQ ID NO: 70158 - DNA, 20 bp, Artificial Sequence
  Description of Artificial Sequence: Synthetic oligonucleotide
  Target: ATXN2; (-) strand; PAM type: YTN; PAM sequence: TTT
caaccaaaaccattctttgc

SEQ ID NO: 70159 - DNA, 20 bp, Artificial Sequence
  Description of Artificial Sequence: Synthetic oligonucleotide
  Target: ATXN2; (-) strand; PAM type: YTN; PAM sequence: CTT
tcaaccaaaaccattctttg

SEQ ID NO: 70160 - DNA, 20 bp, Artificial Sequence
  Description of Artificial Sequence: Synthetic oligonucleotide
  Target: ATXN2; (-) strand; PAM type: YTN; PAM sequence: TTA
tataaactttcaaccaaaac

SEQ ID NO: 70161 - DNA, 20 bp, Artificial Sequence
  Description of Artificial Sequence: Synthetic oligonucleotide
  Target: ATXN2; (-) strand; PAM type: YTN; PAM sequence: TTG
ccagattatataaactttca

SEQ ID NO: 70162 - DNA, 20 bp, Artificial Sequence
  Description of Artificial Sequence: Synthetic oligonucleotide
  Target: ATXN2; (-) strand; PAM type: YTN; PAM sequence: CTG
attgccagattatataaact

SEQ ID NO: 70163 - DNA, 20 bp, Artificial Sequence
  Description of Artificial Sequence: Synthetic oligonucleotide
  Target: ATXN2; (-) strand; PAM type: YTN; PAM sequence: TTC
acgtgtgtgagtgtaactga

SEQ ID NO: 70164 - DNA, 20 bp, Artificial Sequence
  Description of Artificial Sequence: Synthetic oligonucleotide
  Target: ATXN2; (-) strand; PAM type: YTN; PAM sequence: TTG
gtaattcacgtgtgtgagtg

SEQ ID NO: 70165 - DNA, 20 bp, Artificial Sequence
  Description of Artificial Sequence: Synthetic oligonucleotide
  Target: ATXN2; (-) strand; PAM type: YTN; PAM sequence: TTG
ttggtaattcacgtgtgtga

SEQ ID NO: 70166 - DNA, 20 bp, Artificial Sequence
  Description of Artificial Sequence: Synthetic oligonucleotide
  Target: ATXN2; (-) strand; PAM type: YTN; PAM sequence: TTT
gttggtaattcacgtgtgtg

SEQ ID NO: 70167 - DNA, 20 bp, Artificial Sequence
  Description of Artificial Sequence: Synthetic oligonucleotide
  Target: ATXN2; (-) strand; PAM type: YTN; PAM sequence: CTT
tgttggtaattcacgtgtgt

SEQ ID NO: 70168 - DNA, 20 bp, Artificial Sequence
  Description of Artificial Sequence: Synthetic oligonucleotide
  Target: ATXN2; (-) strand; PAM type: YTN; PAM sequence: TTA
acatatgtctttgttggtaa

SEQ ID NO: 70169 - DNA, 20 bp, Artificial Sequence
  Description of Artificial Sequence: Synthetic oligonucleotide
  Target: ATXN2; (-) strand; PAM type: YTN; PAM sequence: TTT
aacatatgtctttgttggta

SEQ ID NO: 70170 - DNA, 20 bp, Artificial Sequence
  Description of Artificial Sequence: Synthetic oligonucleotide
  Target: ATXN2; (-) strand; PAM type: YTN; PAM sequence: TTT
taacatatgtctttgttggt

SEQ ID NO: 70171 - DNA, 20 bp, Artificial Sequence
  Description of Artificial Sequence: Synthetic oligonucleotide
  Target: ATXN2; (-) strand; PAM type: YTN; PAM sequence: TTT
ttaacatatgtctttgttgg

SEQ ID NO: 70172 - DNA, 20 bp, Artificial Sequence
  Description of Artificial Sequence: Synthetic oligonucleotide
  Target: ATXN2; (-) strand; PAM type: YTN; PAM sequence: TTT
tttaacatatgtctttgttg

SEQ ID NO: 70173 - DNA, 20 bp, Artificial Sequence
  Description of Artificial Sequence: Synthetic oligonucleotide
  Target: ATXN2; (-) strand; PAM type: YTN; PAM sequence: TTG
ttttttaacatatgtctttg

SEQ ID NO: 70174 - DNA, 20 bp, Artificial Sequence
  Description of Artificial Sequence: Synthetic oligonucleotide
  Target: ATXN2; (-) strand; PAM type: YTN; PAM sequence: TTC
gtaattgttttttaacatat

SEQ ID NO: 70175 - DNA, 20 bp, Artificial Sequence
  Description of Artificial Sequence: Synthetic oligonucleotide
  Target: ATXN2; (-) strand; PAM type: YTN; PAM sequence: TTT
cgtaattgttttttaacata

SEQ ID NO: 70176 - DNA, 20 bp, Artificial Sequence
  Description of Artificial Sequence: Synthetic oligonucleotide
  Target: ATXN2; (-) strand; PAM type: YTN; PAM sequence: TTT
tcgtaattgttttttaacat

SEQ ID NO: 70177 - DNA, 20 bp, Artificial Sequence
  Description of Artificial Sequence: Synthetic oligonucleotide
  Target: ATXN2; (-) strand; PAM type: YTN; PAM sequence: TTT
ttcgtaattgttttttaaca

SEQ ID NO: 70178 - DNA, 20 bp, Artificial Sequence
  Description of Artificial Sequence: Synthetic oligonucleotide
  Target: ATXN2; (-) strand; PAM type: YTN; PAM sequence: TTC
atttttcgtaattgtttttt

SEQ ID NO: 70179 - DNA, 20 bp, Artificial Sequence
  Description of Artificial Sequence: Synthetic oligonucleotide
  Target: ATXN2; (-) strand; PAM type: YTN; PAM sequence: TTA
tgtgaaattcatttttcgta

SEQ ID NO: 70180 - DNA, 20 bp, Artificial Sequence
  Description of Artificial Sequence: Synthetic oligonucleotide
  Target: ATXN2; (-) strand; PAM type: YTN; PAM sequence: TTA
aacaattatgtgaaattcat

SEQ ID NO: 70181 - DNA, 20 bp, Artificial Sequence
  Description of Artificial Sequence: Synthetic oligonucleotide
  Target: ATXN2; (-) strand; PAM type: YTN; PAM sequence: TTA
agttaaacaattatgtgaaa

SEQ ID NO: 70182 - DNA, 20 bp, Artificial Sequence
  Description of Artificial Sequence: Synthetic oligonucleotide
  Target: ATXN2; (-) strand; PAM type: YTN; PAM sequence: TTT
aagttaaacaattatgtgaa

SEQ ID NO: 70183 - DNA, 20 bp, Artificial Sequence
  Description of Artificial Sequence: Synthetic oligonucleotide
  Target: ATXN2; (-) strand; PAM type: YTN; PAM sequence: TTT
taagttaaacaattatgtga

SEQ ID NO: 70184 - DNA, 20 bp, Artificial Sequence
  Description of Artificial Sequence: Synthetic oligonucleotide
  Target: ATXN2; (-) strand; PAM type: YTN; PAM sequence: TTA
gattttaagttaaacaatta

SEQ ID NO: 70185 - DNA, 20 bp, Artificial Sequence
  Description of Artificial Sequence: Synthetic oligonucleotide
  Target: ATXN2; (-) strand; PAM type: YTN; PAM sequence: CTG
ttagattttaagttaaacaa

SEQ ID NO: 70186 - DNA, 20 bp, Artificial Sequence
  Description of Artificial Sequence: Synthetic oligonucleotide
  Target: ATXN2; (-) strand; PAM type: YTN; PAM sequence: TTC
tgttagattttaagttaaac

SEQ ID NO: 70187 - DNA, 20 bp, Artificial Sequence
  Description of Artificial Sequence: Synthetic oligonucleotide
  Target: ATXN2; (-) strand; PAM type: YTN; PAM sequence: TTT
ctgttagattttaagttaaa

SEQ ID NO: 70188 - DNA, 20 bp, Artificial Sequence
  Description of Artificial Sequence: Synthetic oligonucleotide
  Target: ATXN2; (-) strand; PAM type: YTN; PAM sequence: TTC
aataaatgtttctgttagat

SEQ ID NO: 70189 - DNA, 20 bp, Artificial Sequence
  Description of Artificial Sequence: Synthetic oligonucleotide
  Target: ATXN2; (-) strand; PAM type: YTN; PAM sequence: TTA
tgttcaataaatgtttctgt

SEQ ID NO: 70190 - DNA, 20 bp, Artificial Sequence
  Description of Artificial Sequence: Synthetic oligonucleotide
  Target: ATXN2; (-) strand; PAM type: YTN; PAM sequence: CTA
aattatgttcaataaatgtt

SEQ ID NO: 70191 - DNA, 20 bp, Artificial Sequence
  Description of Artificial Sequence: Synthetic oligonucleotide
  Target: ATXN2; (-) strand; PAM type: YTN; PAM sequence: TTC
atcaacctaaattatgttca

SEQ ID NO: 70192 - DNA, 20 bp, Artificial Sequence
  Description of Artificial Sequence: Synthetic oligonucleotide
  Target: ATXN2; (-) strand; PAM type: YTN; PAM sequence: TTT
catcaacctaaattatgttc

SEQ ID NO: 70193 - DNA, 20 bp, Artificial Sequence
  Description of Artificial Sequence: Synthetic oligonucleotide
  Target: ATXN2; (-) strand; PAM type: YTN; PAM sequence: TTT
tcatcaacctaaattatgtt

SEQ ID NO: 70194 - DNA, 20 bp, Artificial Sequence
  Description of Artificial Sequence: Synthetic oligonucleotide
  Target: ATXN2; (-) strand; PAM type: YTN; PAM sequence: TTG
ttttcatcaacctaaattat

SEQ ID NO: 70195 - DNA, 20 bp, Artificial Sequence
  Description of Artificial Sequence: Synthetic oligonucleotide
  Target: ATXN2; (-) strand; PAM type: YTN; PAM sequence: TTT
gttttcatcaacctaaatta

SEQ ID NO: 70196 - DNA, 20 bp, Artificial Sequence
  Description of Artificial Sequence: Synthetic oligonucleotide
  Target: ATXN2; (-) strand; PAM type: YTN; PAM sequence: TTT
tgttttcatcaacctaaatt

SEQ ID NO: 70197 - DNA, 20 bp, Artificial Sequence
  Description of Artificial Sequence: Synthetic oligonucleotide
  Target: ATXN2; (-) strand; PAM type: YTN; PAM sequence: CTT
ttgttttcatcaacctaaat

SEQ ID NO: 70198 - DNA, 20 bp, Artificial Sequence
  Description of Artificial Sequence: Synthetic oligonucleotide
  Target: ATXN2; (-) strand; PAM type: YTN; PAM sequence: TTG
gtcttttgttttcatcaacc

SEQ ID NO: 70199 - DNA, 20 bp, Artificial Sequence
  Description of Artificial Sequence: Synthetic oligonucleotide
  Target: ATXN2; (-) strand; PAM type: YTN; PAM sequence: TTA
tagtgcattggtcttttgtt

SEQ ID NO: 70200 - DNA, 20 bp, Artificial Sequence
  Description of Artificial Sequence: Synthetic oligonucleotide
  Target: ATXN2; (-) strand; PAM type: YTN; PAM sequence: TTA
ttatagtgcattggtctttt

SEQ ID NO: 70201 - DNA, 20 bp, Artificial Sequence
  Description of Artificial Sequence: Synthetic oligonucleotide
  Target: ATXN2; (-) strand; PAM type: YTN; PAM sequence: TTT
attatagtgcattggtcttt

SEQ ID NO: 70202 - DNA, 20 bp, Artificial Sequence
  Description of Artificial Sequence: Synthetic oligonucleotide
  Target: ATXN2; (-) strand; PAM type: YTN; PAM sequence: CTT
tattatagtgcattggtctt

SEQ ID NO: 70203 - DNA, 20 bp, Artificial Sequence
  Description of Artificial Sequence: Synthetic oligonucleotide
  Target: ATXN2; (-) strand; PAM type: YTN; PAM sequence: TTA
cctttattatagtgcattgg

SEQ ID NO: 70204 - DNA, 20 bp, Artificial Sequence
  Description of Artificial Sequence: Synthetic oligonucleotide
  Target: ATXN2; (-) strand; PAM type: YTN; PAM sequence: TTT
acctttattatagtgcattg

SEQ ID NO: 70205 - DNA, 20 bp, Artificial Sequence
  Description of Artificial Sequence: Synthetic oligonucleotide
  Target: ATXN2; (-) strand; PAM type: YTN; PAM sequence: TTA
agtttacctttattatagtg

SEQ ID NO: 70206 - DNA, 20 bp, Artificial Sequence
  Description of Artificial Sequence: Synthetic oligonucleotide
  Target: ATXN2; (-) strand; PAM type: YTN; PAM sequence: TTT
aagtttacctttattatagt

SEQ ID NO: 70207 - DNA, 20 bp, Artificial Sequence
  Description of Artificial Sequence: Synthetic oligonucleotide
  Target: ATXN2; (-) strand; PAM type: YTN; PAM sequence: TTT
taagtttacctttattatag

SEQ ID NO: 70208 - DNA, 20 bp, Artificial Sequence
  Description of Artificial Sequence: Synthetic oligonucleotide
  Target: ATXN2; (-) strand; PAM type: YTN; PAM sequence: TTC
acatacataagttttaagtt

SEQ ID NO: 70209 - DNA, 20 bp, Artificial Sequence
  Description of Artificial Sequence: Synthetic oligonucleotide
  Target: ATXN2; (-) strand; PAM type: YTN; PAM sequence: CTT
cacatacataagttttaagt

SEQ ID NO: 70210 - DNA, 20 bp, Artificial Sequence
  Description of Artificial Sequence: Synthetic oligonucleotide
  Target: ATXN2; (-) strand; PAM type: YTN; PAM sequence: TTA
tcttcacatacataagtttt

SEQ ID NO: 70211 - DNA, 20 bp, Artificial Sequence
  Description of Artificial Sequence: Synthetic oligonucleotide
  Target: ATXN2; (-) strand; PAM type: YTN; PAM sequence: TTT
atcttcacatacataagttt

SEQ ID NO: 70212 - DNA, 20 bp, Artificial Sequence
  Description of Artificial Sequence: Synthetic oligonucleotide
  Target: ATXN2; (-) strand; PAM type: YTN; PAM sequence: TTA
gatagcagtttatcttcaca

SEQ ID NO: 70213 - DNA, 20 bp, Artificial Sequence
  Description of Artificial Sequence: Synthetic oligonucleotide
  Target: ATXN2; (-) strand; PAM type: YTN; PAM sequence: TTT
agatagcagtttatcttcac

SEQ ID NO: 70214 - DNA, 20 bp, Artificial Sequence
  Description of Artificial Sequence: Synthetic oligonucleotide
  Target: ATXN2; (-) strand; PAM type: YTN; PAM sequence: TTC
cgtatcagtttagatagcag

SEQ ID NO: 70215 - DNA, 20 bp, Artificial Sequence
  Description of Artificial Sequence: Synthetic oligonucleotide
  Target: ATXN2; (-) strand; PAM type: YTN; PAM sequence: CTA
tatattccgtatcagtttag

SEQ ID NO: 70216 - DNA, 20 bp, Artificial Sequence
  Description of Artificial Sequence: Synthetic oligonucleotide
  Target: ATXN2; (-) strand; PAM type: YTN; PAM sequence: CTG
aatactatatattccgtatc

SEQ ID NO: 70217 - DNA, 20 bp, Artificial Sequence
  Description of Artificial Sequence: Synthetic oligonucleotide
  Target: ATXN2; (-) strand; PAM type: YTN; PAM sequence: TTA
ctgaatactatatattccgt

SEQ ID NO: 70218 - DNA, 20 bp, Artificial Sequence
  Description of Artificial Sequence: Synthetic oligonucleotide
  Target: ATXN2; (-) strand; PAM type: YTN; PAM sequence: TTT
actgaatactatatattccg

SEQ ID NO: 70219 - DNA, 20 bp, Artificial Sequence
  Description of Artificial Sequence: Synthetic oligonucleotide
  Target: ATXN2; (-) strand; PAM type: YTN; PAM sequence: TTT
tactgaatactatatattcc

SEQ ID NO: 70220 - DNA, 20 bp, Artificial Sequence
  Description of Artificial Sequence: Synthetic oligonucleotide
  Target: ATXN2; (-) strand; PAM type: YTN; PAM sequence: CTT
ttactgaatactatatattc

SEQ ID NO: 70221 - DNA, 20 bp, Artificial Sequence
  Description of Artificial Sequence: Synthetic oligonucleotide
  Target: ATXN2; (-) strand; PAM type: YTN; PAM sequence: TTA
aacgtgaaagcatactttta

SEQ ID NO: 70222 - DNA, 20 bp, Artificial Sequence
  Description of Artificial Sequence: Synthetic oligonucleotide
  Target: ATXN2; (-) strand; PAM type: YTN; PAM sequence: CTA
aattaaacgtgaaagcatac

SEQ ID NO: 70223 - DNA, 20 bp, Artificial Sequence
  Description of Artificial Sequence: Synthetic oligonucleotide
  Target: ATXN2; (-) strand; PAM type: YTN; PAM sequence: TTG
ctaaattaaacgtgaaagca

SEQ ID NO: 70224 - DNA, 20 bp, Artificial Sequence
  Description of Artificial Sequence: Synthetic oligonucleotide
  Target: ATXN2; (-) strand; PAM type: YTN; PAM sequence: TTT
gctaaattaaacgtgaaagc

SEQ ID NO: 70225 - DNA, 20 bp, Artificial Sequence
  Description of Artificial Sequence: Synthetic oligonucleotide
  Target: ATXN2; (-) strand; PAM type: YTN; PAM sequence: TTC
catttgctaaattaaacgtg

SEQ ID NO: 70226 - DNA, 20 bp, Artificial Sequence
  Description of Artificial Sequence: Synthetic oligonucleotide
  Target: ATXN2; (-) strand; PAM type: YTN; PAM sequence: CTG
tgattccatttgctaaatta

SEQ ID NO: 70227 - DNA, 20 bp, Artificial Sequence
  Description of Artificial Sequence: Synthetic oligonucleotide
  Target: ATXN2; (-) strand; PAM type: YTN; PAM sequence: CTG
atagtcatctgtgattccat

SEQ ID NO: 70228 - DNA, 20 bp, Artificial Sequence
  Description of Artificial Sequence: Synthetic oligonucleotide
  Target: ATXN2; (-) strand; PAM type: YTN; PAM sequence: TTA
ctgatagtcatctgtgattc

SEQ ID NO: 70229 - DNA, 20 bp, Artificial Sequence
  Description of Artificial Sequence: Synthetic oligonucleotide
  Target: ATXN2; (-) strand; PAM type: YTN; PAM sequence: TTT
actgatagtcatctgtgatt

SEQ ID NO: 70230 - DNA, 20 bp, Artificial Sequence
  Description of Artificial Sequence: Synthetic oligonucleotide
  Target: ATXN2; (-) strand; PAM type: YTN; PAM sequence: CTT
tactgatagtcatctgtgat

SEQ ID NO: 70231 - DNA, 20 bp, Artificial Sequence
  Description of Artificial Sequence: Synthetic oligonucleotide
  Target: ATXN2; (-) strand; PAM type: YTN; PAM sequence: TTA
tatgaaaagaaaataccttt

SEQ ID NO: 70232 - DNA, 20 bp, Artificial Sequence
  Description of Artificial Sequence: Synthetic oligonucleotide
  Target: ATXN2; (-) strand; PAM type: YTN; PAM sequence: TTA
aaattatatgaaaagaaaat

SEQ ID NO: 70233 - DNA, 20 bp, Artificial Sequence
  Description of Artificial Sequence: Synthetic oligonucleotide
  Target: ATXN2; (-) strand; PAM type: YTN; PAM sequence: CTT
aaaattatatgaaaagaaaa

SEQ ID NO: 70234 - DNA, 20 bp, Artificial Sequence
  Description of Artificial Sequence: Synthetic oligonucleotide
  Target: ATXN2; (-) strand; PAM type: YTN; PAM sequence: TTC
gtgtggcttaaaattatatg

SEQ ID NO: 70235 - DNA, 20 bp, Artificial Sequence
  Description of Artificial Sequence: Synthetic oligonucleotide
  Target: ATXN2; (-) strand; PAM type: YTN; PAM sequence: CTT
cgtgtggcttaaaattatat

SEQ ID NO: 70236 - DNA, 20 bp, Artificial Sequence
  Description of Artificial Sequence: Synthetic oligonucleotide
  Target: ATXN2; (-) strand; PAM type: YTN; PAM sequence: CTC
aaaaaaaaaaaaaaaatgct

SEQ ID NO: 70237 - DNA, 20 bp, Artificial Sequence
  Description of Artificial Sequence: Synthetic oligonucleotide
  Target: ATXN2; (-) strand; PAM type: YTN; PAM sequence: CTA
tctcaaaaaaaaaaaaaaaa

SEQ ID NO: 70238 - DNA, 20 bp, Artificial Sequence
  Description of Artificial Sequence: Synthetic oligonucleotide
  Target: ATXN2; (-) strand; PAM type: YTN; PAM sequence: CTC
tatctcaaaaaaaaaaaaaa

SEQ ID NO: 70239 - DNA, 20 bp, Artificial Sequence
  Description of Artificial Sequence: Synthetic oligonucleotide
  Target: ATXN2; (-) strand; PAM type: YTN; PAM sequence: CTG
ggcaacagaacgagactcta

SEQ ID NO: 70240 - DNA, 20 bp, Artificial Sequence
  Description of Artificial Sequence: Synthetic oligonucleotide
  Target: ATXN2; (-) strand; PAM type: YTN; PAM sequence: TTC
cagcctgggcaacagaacga

SEQ ID NO: 70241 - DNA, 20 bp, Artificial Sequence
  Description of Artificial Sequence: Synthetic oligonucleotide
  Target: ATXN2; (-) strand; PAM type: YTN; PAM sequence: CTG
cattccagcctgggcaacag

SEQ ID NO: 70242 - DNA, 20 bp, Artificial Sequence
  Description of Artificial Sequence: Synthetic oligonucleotide
  Target: ATXN2; (-) strand; PAM type: YTN; PAM sequence: TTG
cagtgagccgagatcacgcc

SEQ ID NO: 70243 - DNA, 20 bp, Artificial Sequence
  Description of Artificial Sequence: Synthetic oligonucleotide
  Target: ATXN2; (-) strand; PAM type: YTN; PAM sequence: TTG
aacccgggaggcagaggttg

SEQ ID NO: 70244 - DNA, 20 bp, Artificial Sequence
  Description of Artificial Sequence: Synthetic oligonucleotide
  Target: ATXN2; (-) strand; PAM type: YTN; PAM sequence: CTT
gaacccgggaggcagaggtt

SEQ ID NO: 70245 - DNA, 20 bp, Artificial Sequence
  Description of Artificial Sequence: Synthetic oligonucleotide
  Target: ATXN2; (-) strand; PAM type: YTN; PAM sequence: CTG
aggcaggagaatcgcttgaa

SEQ ID NO: 70246 - DNA, 20 bp, Artificial Sequence
  Description of Artificial Sequence: Synthetic oligonucleotide
  Target: ATXN2; (-) strand; PAM type: YTN; PAM sequence: CTC
gggagactgaggcaggagaa

SEQ ID NO: 70247 - DNA, 20 bp, Artificial Sequence
  Description of Artificial Sequence: Synthetic oligonucleotide
  Target: ATXN2; (-) strand; PAM type: YTN; PAM sequence: CTA
ctcgggagactgaggcagga

SEQ ID NO: 70248 - DNA, 20 bp, Artificial Sequence
  Description of Artificial Sequence: Synthetic oligonucleotide
  Target: ATXN2; (-) strand; PAM type: YTN; PAM sequence: CTG
tagtcccagctactcgggag

SEQ ID NO: 70249 - DNA, 20 bp, Artificial Sequence
  Description of Artificial Sequence: Synthetic oligonucleotide
  Target: ATXN2; (-) strand; PAM type: YTN; PAM sequence: TTA
tccgggcgtggtggtacaca

SEQ ID NO: 70250 - DNA, 20 bp, Artificial Sequence
  Description of Artificial Sequence: Synthetic oligonucleotide
  Target: ATXN2; (-) strand; PAM type: YTN; PAM sequence: CTA
aaaatacaaaaaattatccg

SEQ ID NO: 70251 - DNA, 20 bp, Artificial Sequence
  Description of Artificial Sequence: Synthetic oligonucleotide
  Target: ATXN2; (-) strand; PAM type: YTN; PAM sequence: CTA
ctaaaaatacaaaaaattat

SEQ ID NO: 70252 - DNA, 20 bp, Artificial Sequence
  Description of Artificial Sequence: Synthetic oligonucleotide
  Target: ATXN2; (-) strand; PAM type: YTN; PAM sequence: CTA
acacggtgaaaccccgtcta

SEQ ID NO: 70253 - DNA, 20 bp, Artificial Sequence
  Description of Artificial Sequence: Synthetic oligonucleotide
  Target: ATXN2; (-) strand; PAM type: YTN; PAM sequence: CTG
gctaacacggtgaaaccccg

SEQ ID NO: 70254 - DNA, 20 bp, Artificial Sequence
  Description of Artificial Sequence: Synthetic oligonucleotide
  Target: ATXN2; (-) strand; PAM type: YTN; PAM sequence: CTA
ggtcaggagatcaagaccag

SEQ ID NO: 70255 - DNA, 20 bp, Artificial Sequence
  Description of Artificial Sequence: Synthetic oligonucleotide
  Target: ATXN2; (-) strand; PAM type: YTN; PAM sequence: TTG
ggaggccaaggtgggggtat

SEQ ID NO: 70256 - DNA, 20 bp, Artificial Sequence
  Description of Artificial Sequence: Synthetic oligonucleotide
  Target: ATXN2; (-) strand; PAM type: YTN; PAM sequence: TTT
gggaggccaaggtgggggta

SEQ ID NO: 70257 - DNA, 20 bp, Artificial Sequence
  Description of Artificial Sequence: Synthetic oligonucleotide
  Target: ATXN2; (-) strand; PAM type: YTN; PAM sequence: CTT
tgggaggccaaggtgggggt

SEQ ID NO: 70258 - DNA, 20 bp, Artificial Sequence
  Description of Artificial Sequence: Synthetic oligonucleotide
  Target: ATXN2; (-) strand; PAM type: YTN; PAM sequence: CTG
taatcccagcactttgggag

SEQ ID NO: 70259 - DNA, 20 bp, Artificial Sequence
  Description of Artificial Sequence: Synthetic oligonucleotide
  Target: ATXN2; (-) strand; PAM type: YTN; PAM sequence: CTC
atgcctgtaatcccagcact

SEQ ID NO: 70260 - DNA, 20 bp, Artificial Sequence
  Description of Artificial Sequence: Synthetic oligonucleotide
  Target: ATXN2; (-) strand; PAM type: YTN; PAM sequence: CTG
ggcatggtggctcatgcctg

SEQ ID NO: 70261 - DNA, 20 bp, Artificial Sequence
  Description of Artificial Sequence: Synthetic oligonucleotide
  Target: ATXN2; (-) strand; PAM type: YTN; PAM sequence: TTC
atgtgggctgggcatggtgg

SEQ ID NO: 70262 - DNA, 20 bp, Artificial Sequence
  Description of Artificial Sequence: Synthetic oligonucleotide
  Target: ATXN2; (-) strand; PAM type: YTN; PAM sequence: CTT
catgtgggctgggcatggtg

SEQ ID NO: 70263 - DNA, 20 bp, Artificial Sequence
  Description of Artificial Sequence: Synthetic oligonucleotide
  Target: ATXN2; (-) strand; PAM type: YTN; PAM sequence: TTA
aaatatgcttcatgtgggct

SEQ ID NO: 70264 - DNA, 20 bp, Artificial Sequence
  Description of Artificial Sequence: Synthetic oligonucleotide
  Target: ATXN2; (-) strand; PAM type: YTN; PAM sequence: TTA
tgtcaatatattaaaatatg

SEQ ID NO: 70265 - DNA, 20 bp, Artificial Sequence
  Description of Artificial Sequence: Synthetic oligonucleotide
  Target: ATXN2; (-) strand; PAM type: YTN; PAM sequence: TTA
atgaattatgtcaatatatt

SEQ ID NO: 70266 - DNA, 20 bp, Artificial Sequence
  Description of Artificial Sequence: Synthetic oligonucleotide
  Target: ATXN2; (-) strand; PAM type: YTN; PAM sequence: TTT
aatgaattatgtcaatatat

SEQ ID NO: 70267 - DNA, 20 bp, Artificial Sequence
  Description of Artificial Sequence: Synthetic oligonucleotide
  Target: ATXN2; (-) strand; PAM type: YTN; PAM sequence: CTG
taatataatttaatgaatta

SEQ ID NO: 70268 - DNA, 20 bp, Artificial Sequence
  Description of Artificial Sequence: Synthetic oligonucleotide
  Target: ATXN2; (-) strand; PAM type: YTN; PAM sequence: TTA
cctgtaatataatttaatga

SEQ ID NO: 70269 - DNA, 20 bp, Artificial Sequence
  Description of Artificial Sequence: Synthetic oligonucleotide
  Target: ATXN2; (-) strand; PAM type: YTN; PAM sequence: CTG
agacatgcagagtaattacc

SEQ ID NO: 70270 - DNA, 20 bp, Artificial Sequence
  Description of Artificial Sequence: Synthetic oligonucleotide
  Target: ATXN2; (-) strand; PAM type: YTN; PAM sequence: TTC
tgagacatgcagagtaatta

SEQ ID NO: 70271 - DNA, 20 bp, Artificial Sequence
  Description of Artificial Sequence: Synthetic oligonucleotide
  Target: ATXN2; (-) strand; PAM type: YTN; PAM sequence: CTT
ctgagacatgcagagtaatt

SEQ ID NO: 70272 - DNA, 20 bp, Artificial Sequence
  Description of Artificial Sequence: Synthetic oligonucleotide
  Target: ATXN2; (-) strand; PAM type: YTN; PAM sequence: TTG
gtcacttctgagacatgcag

SEQ ID NO: 70273 - DNA, 20 bp, Artificial Sequence
  Description of Artificial Sequence: Synthetic oligonucleotide
  Target: ATXN2; (-) strand; PAM type: YTN; PAM sequence: CTT
ggtcacttctgagacatgca

SEQ ID NO: 70274 - DNA, 20 bp, Artificial Sequence
  Description of Artificial Sequence: Synthetic oligonucleotide
  Target: ATXN2; (-) strand; PAM type: YTN; PAM sequence: TTC
ttggtcacttctgagacatg

SEQ ID NO: 70275 - DNA, 20 bp, Artificial Sequence
  Description of Artificial Sequence: Synthetic oligonucleotide
  Target: ATXN2; (-) strand; PAM type: YTN; PAM sequence: TTT
cttggtcacttctgagacat

SEQ ID NO: 70276 - DNA, 20 bp, Artificial Sequence
  Description of Artificial Sequence: Synthetic oligonucleotide
  Target: ATXN2; (-) strand; PAM type: YTN; PAM sequence: TTT
tcttggtcacttctgagaca

SEQ ID NO: 70277 - DNA, 20 bp, Artificial Sequence
  Description of Artificial Sequence: Synthetic oligonucleotide
  Target: ATXN2; (-) strand; PAM type: YTN; PAM sequence: CTG
gccagaaattttcttggtca

SEQ ID NO: 70278 - DNA, 20 bp, Artificial Sequence
  Description of Artificial Sequence: Synthetic oligonucleotide
  Target: ATXN2; (-) strand; PAM type: YTN; PAM sequence: TTA
caggcatgagccaccacatc

SEQ ID NO: 70279 - DNA, 20 bp, Artificial Sequence
  Description of Artificial Sequence: Synthetic oligonucleotide
  Target: ATXN2; (-) strand; PAM type: YTN; PAM sequence: CTG
gtattacaggcatgagccac

SEQ ID NO: 70280 - DNA, 20 bp, Artificial Sequence
  Description of Artificial Sequence: Synthetic oligonucleotide
  Target: ATXN2; (-) strand; PAM type: YTN; PAM sequence: CTC
ccaaagtgctggtattacag

SEQ ID NO: 70281 - DNA, 20 bp, Artificial Sequence
  Description of Artificial Sequence: Synthetic oligonucleotide
  Target: ATXN2; (-) strand; PAM type: YTN; PAM sequence: CTG
ggcctcccaaagtgctggta

SEQ ID NO: 70282 - DNA, 20 bp, Artificial Sequence
  Description of Artificial Sequence: Synthetic oligonucleotide
  Target: ATXN2; (-) strand; PAM type: YTN; PAM sequence: CTG
cctgggcctcccaaagtgct

SEQ ID NO: 70283 - DNA, 20 bp, Artificial Sequence
  Description of Artificial Sequence: Synthetic oligonucleotide
  Target: ATXN2; (-) strand; PAM type: YTN; PAM sequence: CTC
atgatccacctgcctgggcc

SEQ ID NO: 70284 - DNA, 20 bp, Artificial Sequence
  Description of Artificial Sequence: Synthetic oligonucleotide
  Target: ATXN2; (-) strand; PAM type: YTN; PAM sequence: TTA
acctcatgatccacctgcct

SEQ ID NO: 70285 - DNA, 20 bp, Artificial Sequence
  Description of Artificial Sequence: Synthetic oligonucleotide
  Target: ATXN2; (-) strand; PAM type: YTN; PAM sequence: CTT
aacctcatgatccacctgcc

SEQ ID NO: 70286 - DNA, 20 bp, Artificial Sequence
  Description of Artificial Sequence: Synthetic oligonucleotide
  Target: ATXN2; (-) strand; PAM type: YTN; PAM sequence: CTC
ttaacctcatgatccacctg

SEQ ID NO: 70287 - DNA, 20 bp, Artificial Sequence
  Description of Artificial Sequence: Synthetic oligonucleotide
  Target: ATXN2; (-) strand; PAM type: YTN; PAM sequence: CTC
gatctcttaacctcatgatc

SEQ ID NO: 70288 - DNA, 20 bp, Artificial Sequence
  Description of Artificial Sequence: Synthetic oligonucleotide
  Target: ATXN2; (-) strand; PAM type: YTN; PAM sequence: TTG
gccaggatggtctcgatctc

SEQ ID NO: 70289 - DNA, 20 bp, Artificial Sequence
  Description of Artificial Sequence: Synthetic oligonucleotide
  Target: ATXN2; (-) strand; PAM type: YTN; PAM sequence: TTC
accatgttggccaggatggt

SEQ ID NO: 70290 - DNA, 20 bp, Artificial Sequence
  Description of Artificial Sequence: Synthetic oligonucleotide
  Target: ATXN2; (-) strand; PAM type: YTN; PAM sequence: TTT
caccatgttggccaggatgg

SEQ ID NO: 70291 - DNA, 20 bp, Artificial Sequence
  Description of Artificial Sequence: Synthetic oligonucleotide
  Target: ATXN2; (-) strand; PAM type: YTN; PAM sequence: TTA
gtagagagagggtttcacca

SEQ ID NO: 70292 - DNA, 20 bp, Artificial Sequence
  Description of Artificial Sequence: Synthetic oligonucleotide
  Target: ATXN2; (-) strand; PAM type: YTN; PAM sequence: TTT
agtagagagagggtttcacc

SEQ ID NO: 70293 - DNA, 20 bp, Artificial Sequence
  Description of Artificial Sequence: Synthetic oligonucleotide
  Target: ATXN2; (-) strand; PAM type: YTN; PAM sequence: TTT
tagtagagagagggtttcac

SEQ ID NO: 70294 - DNA, 20 bp, Artificial Sequence
  Description of Artificial Sequence: Synthetic oligonucleotide
  Target: ATXN2; (-) strand; PAM type: YTN; PAM sequence: TTT
ttagtagagagagggtttca

SEQ ID NO: 70295 - DNA, 20 bp, Artificial Sequence
  Description of Artificial Sequence: Synthetic oligonucleotide
  Target: ATXN2; (-) strand; PAM type: YTN; PAM sequence: TTG
tatttttagtagagagaggg

SEQ ID NO: 70296 - DNA, 20 bp, Artificial Sequence
  Description of Artificial Sequence: Synthetic oligonucleotide
  Target: ATXN2; (-) strand; PAM type: YTN; PAM sequence: TTT
gtatttttagtagagagagg

SEQ ID NO: 70297 - DNA, 20 bp, Artificial Sequence
  Description of Artificial Sequence: Synthetic oligonucleotide
  Target: ATXN2; (-) strand; PAM type: YTN; PAM sequence: TTT
tgtatttttagtagagagag

SEQ ID NO: 70298 - DNA, 20 bp, Artificial Sequence
  Description of Artificial Sequence: Synthetic oligonucleotide
  Target: ATXN2; (-) strand; PAM type: YTN; PAM sequence: TTT
ttgtatttttagtagagaga

SEQ ID NO: 70299 - DNA, 20 bp, Artificial Sequence
  Description of Artificial Sequence: Synthetic oligonucleotide
  Target: ATXN2; (-) strand; PAM type: YTN; PAM sequence: CTA
atttttgtatttttagtaga

SEQ ID NO: 70300 - DNA, 20 bp, Artificial Sequence
  Description of Artificial Sequence: Synthetic oligonucleotide
  Target: ATXN2; (-) strand; PAM type: YTN; PAM sequence: CTA
caggcatgtgccaccatgcc

SEQ ID NO: 70301 - DNA, 20 bp, Artificial Sequence
  Description of Artificial Sequence: Synthetic oligonucleotide
  Target: ATXN2; (-) strand; PAM type: YTN; PAM sequence: CTG
ggactacaggcatgtgccac

SEQ ID NO: 70302 - DNA, 20 bp, Artificial Sequence
  Description of Artificial Sequence: Synthetic oligonucleotide
  Target: ATXN2; (-) strand; PAM type: YTN; PAM sequence: CTC
ccgagtagctgggactacag

SEQ ID NO: 70303 - DNA, 20 bp, Artificial Sequence
  Description of Artificial Sequence: Synthetic oligonucleotide
  Target: ATXN2; (-) strand; PAM type: YTN; PAM sequence: CTC
agcctcccgagtagctggga

SEQ ID NO: 70304 - DNA, 20 bp, Artificial Sequence
  Description of Artificial Sequence: Synthetic oligonucleotide
  Target: ATXN2; (-) strand; PAM type: YTN; PAM sequence: TTC
ctcagcctcccgagtagctg

SEQ ID NO: 70305 - DNA, 20 bp, Artificial Sequence
  Description of Artificial Sequence: Synthetic oligonucleotide
  Target: ATXN2; (-) strand; PAM type: YTN; PAM sequence: CTT
cctcagcctcccgagtagct

SEQ ID NO: 70306 - DNA, 20 bp, Artificial Sequence
  Description of Artificial Sequence: Synthetic oligonucleotide
  Target: ATXN2; (-) strand; PAM type: YTN; PAM sequence: CTC
cttcctcagcctcccgagta

SEQ ID NO: 70307 - DNA, 20 bp, Artificial Sequence
  Description of Artificial Sequence: Synthetic oligonucleotide
  Target: ATXN2; (-) strand; PAM type: YTN; PAM sequence: TTC
tccttcctcagcctcccgag

SEQ ID NO: 70308 - DNA, 20 bp, Artificial Sequence
  Description of Artificial Sequence: Synthetic oligonucleotide
  Target: ATXN2; (-) strand; PAM type: YTN; PAM sequence: TTC
aaacgattctccttcctcag

SEQ ID NO: 70309 - DNA, 20 bp, Artificial Sequence
  Description of Artificial Sequence: Synthetic oligonucleotide
  Target: ATXN2; (-) strand; PAM type: YTN; PAM sequence: CTC
ccgggttcaaacgattctcc

SEQ ID NO: 70310 - DNA, 20 bp, Artificial Sequence
  Description of Artificial Sequence: Synthetic oligonucleotide
  Target: ATXN2; (-) strand; PAM type: YTN; PAM sequence: CTC
cacctcccgggttcaaacga

SEQ ID NO: 70311 - DNA, 20 bp, Artificial Sequence
  Description of Artificial Sequence: Synthetic oligonucleotide
  Target: ATXN2; (-) strand; PAM type: YTN; PAM sequence: TTG
caacctccacctcccgggtt

SEQ ID NO: 70312 - DNA, 20 bp, Artificial Sequence
  Description of Artificial Sequence: Synthetic oligonucleotide
  Target: ATXN2; (-) strand; PAM type: YTN; PAM sequence: TTC
attgcaacctccacctcccg

SEQ ID NO: 70313 - DNA, 20 bp, Artificial Sequence
  Description of Artificial Sequence: Synthetic oligonucleotide
  Target: ATXN2; (-) strand; PAM type: YTN; PAM sequence: CTC
cattcattgcaacctccacc

SEQ ID NO: 70314 - DNA, 20 bp, Artificial Sequence
  Description of Artificial Sequence: Synthetic oligonucleotide
  Target: ATXN2; (-) strand; PAM type: YTN; PAM sequence: CTG
gagcacagtggcgtgatctc

SEQ ID NO: 70315 - DNA, 20 bp, Artificial Sequence
  Description of Artificial Sequence: Synthetic oligonucleotide
  Target: ATXN2; (-) strand; PAM type: YTN; PAM sequence: CTG
tcgccaggctggagcacagt

SEQ ID NO: 70316 - DNA, 20 bp, Artificial Sequence
  Description of Artificial Sequence: Synthetic oligonucleotide
  Target: ATXN2; (-) strand; PAM type: YTN; PAM sequence: CTC
tgtcgccaggctggagcaca

SEQ ID NO: 70317 - DNA, 20 bp, Artificial Sequence
  Description of Artificial Sequence: Synthetic oligonucleotide
  Target: ATXN2; (-) strand; PAM type: YTN; PAM sequence: CTC
actctgtcgccaggctggag

SEQ ID NO: 70318 - DNA, 20 bp, Artificial Sequence
  Description of Artificial Sequence: Synthetic oligonucleotide
  Target: ATXN2; (-) strand; PAM type: YTN; PAM sequence: TTG
agacagggtctcactctgtc

SEQ ID NO: 70319 - DNA, 20 bp, Artificial Sequence
  Description of Artificial Sequence: Synthetic oligonucleotide
  Target: ATXN2; (-) strand; PAM type: YTN; PAM sequence: TTT
gagacagggtctcactctgt

SEQ ID NO: 70320 - DNA, 20 bp, Artificial Sequence
  Description of Artificial Sequence: Synthetic oligonucleotide
  Target: ATXN2; (-) strand; PAM type: YTN; PAM sequence: TTT
tgagacagggtctcactctg

SEQ ID NO: 70321 - DNA, 20 bp, Artificial Sequence
  Description of Artificial Sequence: Synthetic oligonucleotide
  Target: ATXN2; (-) strand; PAM type: YTN; PAM sequence: TTT
ttgagacagggtctcactct

SEQ ID NO: 70322 - DNA, 20 bp, Artificial Sequence
  Description of Artificial Sequence: Synthetic oligonucleotide
  Target: ATXN2; (-) strand; PAM type: YTN; PAM sequence: TTT
tttgagacagggtctcactc

SEQ ID NO: 70323 - DNA, 20 bp, Artificial Sequence
  Description of Artificial Sequence: Synthetic oligonucleotide
  Target: ATXN2; (-) strand; PAM type: YTN; PAM sequence: TTT
ttttgagacagggtctcact

SEQ ID NO: 70324 - DNA, 20 bp, Artificial Sequence
  Description of Artificial Sequence: Synthetic oligonucleotide
  Target: ATXN2; (-) strand; PAM type: YTN; PAM sequence: TTT
tttttgagacagggtctcac

SEQ ID NO: 70325 - DNA, 20 bp, Artificial Sequence
  Description of Artificial Sequence: Synthetic oligonucleotide
  Target: ATXN2; (-) strand; PAM type: YTN; PAM sequence: TTT
ttttttgagacagggtctca

SEQ ID NO: 70326 - DNA, 20 bp, Artificial Sequence
  Description of Artificial Sequence: Synthetic oligonucleotide
  Target: ATXN2; (-) strand; PAM type: YTN; PAM sequence: TTT
tttttttgagacagggtctc

SEQ ID NO: 70327 - DNA, 20 bp, Artificial Sequence
  Description of Artificial Sequence: Synthetic oligonucleotide
  Target: ATXN2; (-) strand; PAM type: YTN; PAM sequence: TTT
ttttttttgagacagggtct

SEQ ID NO: 70328 - DNA, 20 bp, Artificial Sequence
  Description of Artificial Sequence: Synthetic oligonucleotide
  Target: ATXN2; (-) strand; PAM type: YTN; PAM sequence: CTT
tttttttttgagacagggtc

SEQ ID NO: 70329 - DNA, 20 bp, Artificial Sequence
  Description of Artificial Sequence: Synthetic oligonucleotide
  Target: ATXN2; (-) strand; PAM type: YTN; PAM sequence: TTC
tttttttttttgagacaggg

SEQ ID NO: 70330 - DNA, 20 bp, Artificial Sequence
  Description of Artificial Sequence: Synthetic oligonucleotide
  Target: ATXN2; (-) strand; PAM type: YTN; PAM sequence: TTT
ctttttttttttgagacagg

SEQ ID NO: 70331 - DNA, 20 bp, Artificial Sequence
  Description of Artificial Sequence: Synthetic oligonucleotide
  Target: ATXN2; (-) strand; PAM type: YTN; PAM sequence: TTT
tctttttttttttgagacag

SEQ ID NO: 70332 - DNA, 20 bp, Artificial Sequence
  Description of Artificial Sequence: Synthetic oligonucleotide
  Target: ATXN2; (-) strand; PAM type: YTN; PAM sequence: TTT
ttctttttttttttgagaca

SEQ ID NO: 70333 - DNA, 20 bp, Artificial Sequence
  Description of Artificial Sequence: Synthetic oligonucleotide
  Target: ATXN2; (-) strand; PAM type: YTN; PAM sequence: CTT
tttctttttttttttgagac

SEQ ID NO: 70334 - DNA, 20 bp, Artificial Sequence
  Description of Artificial Sequence: Synthetic oligonucleotide
  Target: ATXN2; (-) strand; PAM type: YTN; PAM sequence: TTC
tttttctttttttttttgag

SEQ ID NO: 70335 - DNA, 20 bp, Artificial Sequence
  Description of Artificial Sequence: Synthetic oligonucleotide
  Target: ATXN2; (-) strand; PAM type: YTN; PAM sequence: TTT
ctttttctttttttttttga

SEQ ID NO: 70336 - DNA, 20 bp, Artificial Sequence
  Description of Artificial Sequence: Synthetic oligonucleotide
  Target: ATXN2; (-) strand; PAM type: YTN; PAM sequence: TTT
tctttttctttttttttttg

SEQ ID NO: 70337 - DNA, 20 bp, Artificial Sequence
  Description of Artificial Sequence: Synthetic oligonucleotide
  Target: ATXN2; (-) strand; PAM type: YTN; PAM sequence: TTG
atagaaattttctttttctt

SEQ ID NO: 70338 - DNA, 20 bp, Artificial Sequence
  Description of Artificial Sequence: Synthetic oligonucleotide
  Target: ATXN2; (-) strand; PAM type: YTN; PAM sequence: TTG
atggattgatagaaattttc

SEQ ID NO: 70339 - DNA, 20 bp, Artificial Sequence
  Description of Artificial Sequence: Synthetic oligonucleotide
  Target: ATXN2; (-) strand; PAM type: YTN; PAM sequence: TTT
gatggattgatagaaatttt

SEQ ID NO: 70340 - DNA, 20 bp, Artificial Sequence
  Description of Artificial Sequence: Synthetic oligonucleotide
  Target: ATXN2; (-) strand; PAM type: YTN; PAM sequence: TTT
tgatggattgatagaaattt

SEQ ID NO: 70341 - DNA, 20 bp, Artificial Sequence
  Description of Artificial Sequence: Synthetic oligonucleotide
  Target: ATXN2; (-) strand; PAM type: YTN; PAM sequence: TTT
ttgatggattgatagaaatt

SEQ ID NO: 70342 - DNA, 20 bp, Artificial Sequence
  Description of Artificial Sequence: Synthetic oligonucleotide
  Target: ATXN2; (-) strand; PAM type: YTN; PAM sequence: CTC
aaaaaagaaaaaaaaaaaaa

SEQ ID NO: 70343 - DNA, 20 bp, Artificial Sequence
  Description of Artificial Sequence: Synthetic oligonucleotide
  Target: ATXN2; (-) strand; PAM type: YTN; PAM sequence: CTC
catctcaaaaaagaaaaaaa

SEQ ID NO: 70344 - DNA, 20 bp, Artificial Sequence
  Description of Artificial Sequence: Synthetic oligonucleotide
  Target: ATXN2; (-) strand; PAM type: YTN; PAM sequence: CTG
ggtgaaagagcaagctccat

SEQ ID NO: 70345 - DNA, 20 bp, Artificial Sequence
  Description of Artificial Sequence: Synthetic oligonucleotide
  Target: ATXN2; (-) strand; PAM type: YTN; PAM sequence: CTC
cggtctgggtgaaagagcaa

SEQ ID NO: 70346 - DNA, 20 bp, Artificial Sequence
  Description of Artificial Sequence: Synthetic oligonucleotide
  Target: ATXN2; (-) strand; PAM type: YTN; PAM sequence: CTG
cactccggtctgggtgaaag

SEQ ID NO: 70347 - DNA, 20 bp, Artificial Sequence
  Description of Artificial Sequence: Synthetic oligonucleotide
  Target: ATXN2; (-) strand; PAM type: YTN; PAM sequence: TTG
cagggagccgagatggtgtc

SEQ ID NO: 70348 - DNA, 20 bp, Artificial Sequence
  Description of Artificial Sequence: Synthetic oligonucleotide
  Target: ATXN2; (-) strand; PAM type: YTN; PAM sequence: CTG
gaaggtggatgttgcaggga

SEQ ID NO: 70349 - DNA, 20 bp, Artificial Sequence
  Description of Artificial Sequence: Synthetic oligonucleotide
  Target: ATXN2; (-) strand; PAM type: YTN; PAM sequence: TTG
aacctggaaggtggatgttg

SEQ ID NO: 70350 - DNA, 20 bp, Artificial Sequence
  Description of Artificial Sequence: Synthetic oligonucleotide
  Target: ATXN2; (-) strand; PAM type: YTN; PAM sequence: CTT
gaacctggaaggtggatgtt

SEQ ID NO: 70351 - DNA, 20 bp, Artificial Sequence
  Description of Artificial Sequence: Synthetic oligonucleotide
  Target: ATXN2; (-) strand; PAM type: YTN; PAM sequence: TTC
ccttgaacctggaaggtgga

SEQ ID NO: 70352 - DNA, 20 bp, Artificial Sequence
  Description of Artificial Sequence: Synthetic oligonucleotide
  Target: ATXN2; (-) strand; PAM type: YTN; PAM sequence: CTG
aggcaggagattcccttgaa

SEQ ID NO: 70353 - DNA, 20 bp, Artificial Sequence
  Description of Artificial Sequence: Synthetic oligonucleotide
  Target: ATXN2; (-) strand; PAM type: YTN; PAM sequence: TTG
ggaggctgaggcaggagatt

SEQ ID NO: 70354 - DNA, 20 bp, Artificial Sequence
  Description of Artificial Sequence: Synthetic oligonucleotide
  Target: ATXN2; (-) strand; PAM type: YTN; PAM sequence: CTT
gggaggctgaggcaggagat

SEQ ID NO: 70355 - DNA, 20 bp, Artificial Sequence
  Description of Artificial Sequence: Synthetic oligonucleotide
  Target: ATXN2; (-) strand; PAM type: YTN; PAM sequence: CTA
cttgggaggctgaggcagga

SEQ ID NO: 70356 - DNA, 20 bp, Artificial Sequence
  Description of Artificial Sequence: Synthetic oligonucleotide
  Target: ATXN2; (-) strand; PAM type: YTN; PAM sequence: TTA
gctacttgggaggctgaggc

SEQ ID NO: 70357 - DNA, 20 bp, Artificial Sequence
  Description of Artificial Sequence: Synthetic oligonucleotide
  Target: ATXN2; (-) strand; PAM type: YTN; PAM sequence: CTT
agctacttgggaggctgagg

SEQ ID NO: 70358 - DNA, 20 bp, Artificial Sequence
  Description of Artificial Sequence: Synthetic oligonucleotide
  Target: ATXN2; (-) strand; PAM type: YTN; PAM sequence: CTG
taatcttagctacttgggag

SEQ ID NO: 70359 - DNA, 20 bp, Artificial Sequence
  Description of Artificial Sequence: Synthetic oligonucleotide
  Target: ATXN2; (-) strand; PAM type: YTN; PAM sequence: TTG
gtgggcgcctgtaatcttag

SEQ ID NO: 70360 - DNA, 20 bp, Artificial Sequence
  Description of Artificial Sequence: Synthetic oligonucleotide
  Target: ATXN2; (-) strand; PAM type: YTN; PAM sequence: CTG
ggcgtgttggtgggcgcctg

SEQ ID NO: 70361 - DNA, 20 bp, Artificial Sequence
  Description of Artificial Sequence: Synthetic oligonucleotide
  Target: ATXN2; (-) strand; PAM type: YTN; PAM sequence: TTA
gctgggcgtgttggtgggcg

SEQ ID NO: 70362 - DNA, 20 bp, Artificial Sequence
  Description of Artificial Sequence: Synthetic oligonucleotide
  Target: ATXN2; (-) strand; PAM type: YTN; PAM sequence: CTA
aaaatacaaacattagctgg

SEQ ID NO: 70363 - DNA, 20 bp, Artificial Sequence
  Description of Artificial Sequence: Synthetic oligonucleotide
  Target: ATXN2; (-) strand; PAM type: YTN; PAM sequence: CTG
ctaaaaatacaaacattagc

SEQ ID NO: 70364 - DNA, 20 bp, Artificial Sequence
  Description of Artificial Sequence: Synthetic oligonucleotide
  Target: ATXN2; (-) strand; PAM type: YTN; PAM sequence: CTC
tgctaaaaatacaaacatta

SEQ ID NO: 70365 - DNA, 20 bp, Artificial Sequence
  Description of Artificial Sequence: Synthetic oligonucleotide
  Target: ATXN2; (-) strand; PAM type: YTN; PAM sequence: CTG
tctctgctaaaaatacaaac

SEQ ID NO: 70366 - DNA, 20 bp, Artificial Sequence
  Description of Artificial Sequence: Synthetic oligonucleotide
  Target: ATXN2; (-) strand; PAM type: YTN; PAM sequence: CTG
gccaacatggtgaaaccctg

SEQ ID NO: 70367 - DNA, 20 bp, Artificial Sequence
  Description of Artificial Sequence: Synthetic oligonucleotide
  Target: ATXN2; (-) strand; PAM type: YTN; PAM sequence: TTC
gagaccagcctggccaacat

SEQ ID NO: 70368 - DNA, 20 bp, Artificial Sequence
  Description of Artificial Sequence: Synthetic oligonucleotide
  Target: ATXN2; (-) strand; PAM type: YTN; PAM sequence: CTG
aggtcaggagttcgagacca

SEQ ID NO: 70369 - DNA, 20 bp, Artificial Sequence
  Description of Artificial Sequence: Synthetic oligonucleotide
  Target: ATXN2; (-) strand; PAM type: YTN; PAM sequence: TTG
ggaggccaaggtgggtggat

SEQ ID NO: 70370 - DNA, 20 bp, Artificial Sequence
  Description of Artificial Sequence: Synthetic oligonucleotide
  Target: ATXN2; (-) strand; PAM type: YTN; PAM sequence: TTT
gggaggccaaggtgggtgga

SEQ ID NO: 70371 - DNA, 20 bp, Artificial Sequence
  Description of Artificial Sequence: Synthetic oligonucleotide
  Target: ATXN2; (-) strand; PAM type: YTN; PAM sequence: CTT
tgggaggccaaggtgggtgg

SEQ ID NO: 70372 - DNA, 20 bp, Artificial Sequence
  Description of Artificial Sequence: Synthetic oligonucleotide
  Target: ATXN2; (-) strand; PAM type: YTN; PAM sequence: CTG
taatcccagcactttgggag

SEQ ID NO: 70373 - DNA, 20 bp, Artificial Sequence
  Description of Artificial Sequence: Synthetic oligonucleotide
  Target: ATXN2; (-) strand; PAM type: YTN; PAM sequence: CTC
acacctgtaatcccagcact

SEQ ID NO: 70374 - DNA, 20 bp, Artificial Sequence
  Description of Artificial Sequence: Synthetic oligonucleotide
  Target: ATXN2; (-) strand; PAM type: YTN; PAM sequence: TTG
ctcacacctgtaatcccagc

SEQ ID NO: 70375 - DNA, 20 bp, Artificial Sequence
  Description of Artificial Sequence: Synthetic oligonucleotide
  Target: ATXN2; (-) strand; PAM type: YTN; PAM sequence: TTA
ggccgggcatggttgctcac

SEQ ID NO: 70376 - DNA, 20 bp, Artificial Sequence
  Description of Artificial Sequence: Synthetic oligonucleotide
  Target: ATXN2; (-) strand; PAM type: YTN; PAM sequence: TTT
aggccgggcatggttgctca

SEQ ID NO: 70377 - DNA, 20 bp, Artificial Sequence
  Description of Artificial Sequence: Synthetic oligonucleotide
  Target: ATXN2; (-) strand; PAM type: YTN; PAM sequence: TTT
taggccgggcatggttgctc

SEQ ID NO: 70378 - DNA, 20 bp, Artificial Sequence
  Description of Artificial Sequence: Synthetic oligonucleotide
  Target: ATXN2; (-) strand; PAM type: YTN; PAM sequence: TTA
aacaaaagagatattttagg

SEQ ID NO: 70379 - DNA, 20 bp, Artificial Sequence
  Description of Artificial Sequence: Synthetic oligonucleotide
  Target: ATXN2; (-) strand; PAM type: YTN; PAM sequence: TTA
gtgcatccattaaacaaaag

SEQ ID NO: 70380 - DNA, 20 bp, Artificial Sequence
  Description of Artificial Sequence: Synthetic oligonucleotide
  Target: ATXN2; (-) strand; PAM type: YTN; PAM sequence: CTA
attagtgcatccattaaaca

SEQ ID NO: 70381 - DNA, 20 bp, Artificial Sequence
  Description of Artificial Sequence: Synthetic oligonucleotide
  Target: ATXN2; (-) strand; PAM type: YTN; PAM sequence: CTC
cgaaggtatatctaattagt

SEQ ID NO: 70382 - DNA, 20 bp, Artificial Sequence
  Description of Artificial Sequence: Synthetic oligonucleotide
  Target: ATXN2; (-) strand; PAM type: YTN; PAM sequence: CTG
caagtactccgaaggtatat

SEQ ID NO: 70383 - DNA, 20 bp, Artificial Sequence
  Description of Artificial Sequence: Synthetic oligonucleotide
  Target: ATXN2; (-) strand; PAM type: YTN; PAM sequence: TTG
gctgcaagtactccgaaggt

SEQ ID NO: 70384 - DNA, 20 bp, Artificial Sequence
  Description of Artificial Sequence: Synthetic oligonucleotide
  Target: ATXN2; (-) strand; PAM type: YTN; PAM sequence: TTT
ggctgcaagtactccgaagg

SEQ ID NO: 70385 - DNA, 20 bp, Artificial Sequence
  Description of Artificial Sequence: Synthetic oligonucleotide
  Target: ATXN2; (-) strand; PAM type: YTN; PAM sequence: TTA
aaaacaaaatccacatatat

SEQ ID NO: 70386 - DNA, 20 bp, Artificial Sequence
  Description of Artificial Sequence: Synthetic oligonucleotide
  Target: ATXN2; (-) strand; PAM type: YTN; PAM sequence: CTG
tacatagacatgaatatgga

SEQ ID NO: 70387 - DNA, 20 bp, Artificial Sequence
  Description of Artificial Sequence: Synthetic oligonucleotide
  Target: ATXN2; (-) strand; PAM type: YTN; PAM sequence: TTG
accactgtacatagacatga

SEQ ID NO: 70388 - DNA, 20 bp, Artificial Sequence
  Description of Artificial Sequence: Synthetic oligonucleotide
  Target: ATXN2; (-) strand; PAM type: YTN; PAM sequence: CTG
ggatattgaccactgtacat

SEQ ID NO: 70389 - DNA, 20 bp, Artificial Sequence
  Description of Artificial Sequence: Synthetic oligonucleotide
  Target: ATXN2; (-) strand; PAM type: YTN; PAM sequence: TTG
ctgggatattgaccactgta

SEQ ID NO: 70390 - DNA, 20 bp, Artificial Sequence
  Description of Artificial Sequence: Synthetic oligonucleotide
  Target: ATXN2; (-) strand; PAM type: YTN; PAM sequence: TTT
gctgggatattgaccactgt

SEQ ID NO: 70391 - DNA, 20 bp, Artificial Sequence
  Description of Artificial Sequence: Synthetic oligonucleotide
  Target: ATXN2; (-) strand; PAM type: YTN; PAM sequence: CTA
atggcaagagtttgctggga

SEQ ID NO: 70392 - DNA, 20 bp, Artificial Sequence
  Description of Artificial Sequence: Synthetic oligonucleotide
  Target: ATXN2; (-) strand; PAM type: YTN; PAM sequence: TTA
ctaatggcaagagtttgctg

SEQ ID NO: 70393 - DNA, 20 bp, Artificial Sequence
  Description of Artificial Sequence: Synthetic oligonucleotide
  Target: ATXN2; (-) strand; PAM type: YTN; PAM sequence: TTT
actaatggcaagagtttgct

SEQ ID NO: 70394 - DNA, 20 bp, Artificial Sequence
  Description of Artificial Sequence: Synthetic oligonucleotide
  Target: ATXN2; (-) strand; PAM type: YTN; PAM sequence: TTC
atttactaatggcaagagtt

SEQ ID NO: 70395 - DNA, 20 bp, Artificial Sequence
  Description of Artificial Sequence: Synthetic oligonucleotide
  Target: ATXN2; (-) strand; PAM type: YTN; PAM sequence: CTT
catttactaatggcaagagt

SEQ ID NO: 70396 - DNA, 20 bp, Artificial Sequence
  Description of Artificial Sequence: Synthetic oligonucleotide
  Target: ATXN2; (-) strand; PAM type: YTN; PAM sequence: TTA
gaatggcttcatttactaat

SEQ ID NO: 70397 - DNA, 20 bp, Artificial Sequence
  Description of Artificial Sequence: Synthetic oligonucleotide
  Target: ATXN2; (-) strand; PAM type: YTN; PAM sequence: CTT
agaatggcttcatttactaa

SEQ ID NO: 70398 - DNA, 20 bp, Artificial Sequence
  Description of Artificial Sequence: Synthetic oligonucleotide
  Target: ATXN2; (-) strand; PAM type: YTN; PAM sequence: TTA
aaccacttagaatggcttca

SEQ ID NO: 70399 - DNA, 20 bp, Artificial Sequence
  Description of Artificial Sequence: Synthetic oligonucleotide
  Target: ATXN2; (-) strand; PAM type: YTN; PAM sequence: CTG
ggaggggttaaaccacttag

SEQ ID NO: 70400 - DNA, 20 bp, Artificial Sequence
  Description of Artificial Sequence: Synthetic oligonucleotide
  Target: ATXN2; (-) strand; PAM type: YTN; PAM sequence: TTC
tgggaggggttaaaccactt

SEQ ID NO: 70401 - DNA, 20 bp, Artificial Sequence
  Description of Artificial Sequence: Synthetic oligonucleotide
  Target: ATXN2; (-) strand; PAM type: YTN; PAM sequence: TTA
tatatgaagaagtgggttct

SEQ ID NO: 70402 - DNA, 20 bp, Artificial Sequence
  Description of Artificial Sequence: Synthetic oligonucleotide
  Target: ATXN2; (-) strand; PAM type: YTN; PAM sequence: TTG
tagcagagtggttatatatg

SEQ ID NO: 70403 - DNA, 20 bp, Artificial Sequence
  Description of Artificial Sequence: Synthetic oligonucleotide
  Target: ATXN2; (-) strand; PAM type: YTN; PAM sequence: TTT
gtagcagagtggttatatat

SEQ ID NO: 70404 - DNA, 20 bp, Artificial Sequence
  Description of Artificial Sequence: Synthetic oligonucleotide
  Target: ATXN2; (-) strand; PAM type: YTN; PAM sequence: CTT
tgtagcagagtggttatata

SEQ ID NO: 70405 - DNA, 20 bp, Artificial Sequence
  Description of Artificial Sequence: Synthetic oligonucleotide
  Target: ATXN2; (-) strand; PAM type: YTN; PAM sequence: CTG
aactttgtagcagagtggtt

SEQ ID NO: 70406 - DNA, 20 bp, Artificial Sequence
  Description of Artificial Sequence: Synthetic oligonucleotide
  Target: ATXN2; (-) strand; PAM type: YTN; PAM sequence: CTG
tagggcctgaactttgtagc

SEQ ID NO: 70407 - DNA, 20 bp, Artificial Sequence
  Description of Artificial Sequence: Synthetic oligonucleotide
  Target: ATXN2; (-) strand; PAM type: YTN; PAM sequence: CTG
agacaggtaatactgtaggg

SEQ ID NO: 70408 - DNA, 20 bp, Artificial Sequence
  Description of Artificial Sequence: Synthetic oligonucleotide
  Target: ATXN2; (-) strand; PAM type: YTN; PAM sequence: TTC
tgagacaggtaatactgtag

SEQ ID NO: 70409 - DNA, 20 bp, Artificial Sequence
  Description of Artificial Sequence: Synthetic oligonucleotide
  Target: ATXN2; (-) strand; PAM type: YTN; PAM sequence: TTT
ctgagacaggtaatactgta

SEQ ID NO: 70410 - DNA, 20 bp, Artificial Sequence
  Description of Artificial Sequence: Synthetic oligonucleotide
  Target: ATXN2; (-) strand; PAM type: YTN; PAM sequence: CTT
tctgagacaggtaatactgt

SEQ ID NO: 70411 - DNA, 20 bp, Artificial Sequence
  Description of Artificial Sequence: Synthetic oligonucleotide
  Target: ATXN2; (-) strand; PAM type: YTN; PAM sequence: CTG
aactttctgagacaggtaat

SEQ ID NO: 70412 - DNA, 20 bp, Artificial Sequence
  Description of Artificial Sequence: Synthetic oligonucleotide
  Target: ATXN2; (-) strand; PAM type: YTN; PAM sequence: CTA
cctgaactttctgagacagg

SEQ ID NO: 70413 - DNA, 20 bp, Artificial Sequence
  Description of Artificial Sequence: Synthetic oligonucleotide
  Target: ATXN2; (-) strand; PAM type: YTN; PAM sequence: CTG
ctacctgaactttctgagac

SEQ ID NO: 70414 - DNA, 20 bp, Artificial Sequence
  Description of Artificial Sequence: Synthetic oligonucleotide
  Target: ATXN2; (-) strand; PAM type: YTN; PAM sequence: TTA
ataggaagtccaggtatgcc

SEQ ID NO: 70415 - DNA, 20 bp, Artificial Sequence
  Description of Artificial Sequence: Synthetic oligonucleotide
  Target: ATXN2; (-) strand; PAM type: YTN; PAM sequence: TTA
gtagaagagaagaggacaca

SEQ ID NO: 70416 - DNA, 20 bp, Artificial Sequence
  Description of Artificial Sequence: Synthetic oligonucleotide
  Target: ATXN2; (-) strand; PAM type: YTN; PAM sequence: TTC
aataacattagtagaagaga

SEQ ID NO: 70417 - DNA, 20 bp, Artificial Sequence
  Description of Artificial Sequence: Synthetic oligonucleotide
  Target: ATXN2; (-) strand; PAM type: YTN; PAM sequence: CTT
caataacattagtagaagag

SEQ ID NO: 70418 - DNA, 20 bp, Artificial Sequence
  Description of Artificial Sequence: Synthetic oligonucleotide
  Target: ATXN2; (-) strand; PAM type: YTN; PAM sequence: CTC
ttcaataacattagtagaag

SEQ ID NO: 70419 - DNA, 20 bp, Artificial Sequence
  Description of Artificial Sequence: Synthetic oligonucleotide
  Target: ATXN2; (-) strand; PAM type: YTN; PAM sequence: TTC
ataagtcagtactcttcaat

SEQ ID NO: 70420 - DNA, 20 bp, Artificial Sequence
  Description of Artificial Sequence: Synthetic oligonucleotide
  Target: ATXN2; (-) strand; PAM type: YTN; PAM sequence: TTT
cataagtcagtactcttcaa

SEQ ID NO: 70421 - DNA, 20 bp, Artificial Sequence
  Description of Artificial Sequence: Synthetic oligonucleotide
  Target: ATXN2; (-) strand; PAM type: YTN; PAM sequence: CTT
tcataagtcagtactcttca

SEQ ID NO: 70422 - DNA, 20 bp, Artificial Sequence
  Description of Artificial Sequence: Synthetic oligonucleotide
  Target: ATXN2; (-) strand; PAM type: YTN; PAM sequence: TTG
ctttcataagtcagtactct

SEQ ID NO: 70423 - DNA, 20 bp, Artificial Sequence
  Description of Artificial Sequence: Synthetic oligonucleotide
  Target: ATXN2; (-) strand; PAM type: YTN; PAM sequence: TTT
gctttcataagtcagtactc

SEQ ID NO: 70424 - DNA, 20 bp, Artificial Sequence
  Description of Artificial Sequence: Synthetic oligonucleotide
  Target: ATXN2; (-) strand; PAM type: YTN; PAM sequence: CTA
catttgctttcataagtcag

SEQ ID NO: 70425 - DNA, 20 bp, Artificial Sequence
  Description of Artificial Sequence: Synthetic oligonucleotide
  Target: ATXN2; (-) strand; PAM type: YTN; PAM sequence: CTA
acatgtggatgctacatttg

SEQ ID NO: 70426 - DNA, 20 bp, Artificial Sequence
  Description of Artificial Sequence: Synthetic oligonucleotide
  Target: ATXN2; (-) strand; PAM type: YTN; PAM sequence: CTG
tgccagacagcagtatggtc

SEQ ID NO: 70427 - DNA, 20 bp, Artificial Sequence
  Description of Artificial Sequence: Synthetic oligonucleotide
  Target: ATXN2; (-) strand; PAM type: YTN; PAM sequence: TTC
ctgtgccagacagcagtatg

SEQ ID NO: 70428 - DNA, 20 bp, Artificial Sequence
  Description of Artificial Sequence: Synthetic oligonucleotide
  Target: ATXN2; (-) strand; PAM type: YTN; PAM sequence: TTT
cctgtgccagacagcagtat

SEQ ID NO: 70429 - DNA, 20 bp, Artificial Sequence
  Description of Artificial Sequence: Synthetic oligonucleotide
  Target: ATXN2; (-) strand; PAM type: YTN; PAM sequence: CTA
gagaaaatttcctgtgccag

SEQ ID NO: 70430 - DNA, 20 bp, Artificial Sequence
  Description of Artificial Sequence: Synthetic oligonucleotide
  Target: ATXN2; (-) strand; PAM type: YTN; PAM sequence: CTC
ccaactagagaaaatttcct

SEQ ID NO: 70431 - DNA, 20 bp, Artificial Sequence
  Description of Artificial Sequence: Synthetic oligonucleotide
  Target: ATXN2; (-) strand; PAM type: YTN; PAM sequence: CTA
actcccaactagagaaaatt

SEQ ID NO: 70432 - DNA, 20 bp, Artificial Sequence
  Description of Artificial Sequence: Synthetic oligonucleotide
  Target: ATXN2; (-) strand; PAM type: YTN; PAM sequence: CTG
agtctaactcccaactagag

SEQ ID NO: 70433 - DNA, 20 bp, Artificial Sequence
  Description of Artificial Sequence: Synthetic oligonucleotide
  Target: ATXN2; (-) strand; PAM type: YTN; PAM sequence: TTA
gctgagtctaactcccaact

SEQ ID NO: 70434 - DNA, 20 bp, Artificial Sequence
  Description of Artificial Sequence: Synthetic oligonucleotide
  Target: ATXN2; (-) strand; PAM type: YTN; PAM sequence: TTT
agctgagtctaactcccaac

SEQ ID NO: 70435 - DNA, 20 bp, Artificial Sequence
  Description of Artificial Sequence: Synthetic oligonucleotide
  Target: ATXN2; (-) strand; PAM type: YTN; PAM sequence: TTA
tttagctgagtctaactccc

SEQ ID NO: 70436 - DNA, 20 bp, Artificial Sequence
  Description of Artificial Sequence: Synthetic oligonucleotide
  Target: ATXN2; (-) strand; PAM type: YTN; PAM sequence: TTT
atttagctgagtctaactcc

SEQ ID NO: 70437 - DNA, 20 bp, Artificial Sequence
  Description of Artificial Sequence: Synthetic oligonucleotide
  Target: ATXN2; (-) strand; PAM type: YTN; PAM sequence: CTT
tatttagctgagtctaactc

SEQ ID NO: 70438 - DNA, 20 bp, Artificial Sequence
  Description of Artificial Sequence: Synthetic oligonucleotide
  Target: ATXN2; (-) strand; PAM type: YTN; PAM sequence: TTG
cccagtgggcctttatttag

SEQ ID NO: 70439 - DNA, 20 bp, Artificial Sequence
  Description of Artificial Sequence: Synthetic oligonucleotide
  Target: ATXN2; (-) strand; PAM type: YTN; PAM sequence: CTA
gtgccatcattgcccagtgg

SEQ ID NO: 70440 - DNA, 20 bp, Artificial Sequence
  Description of Artificial Sequence: Synthetic oligonucleotide
  Target: ATXN2; (-) strand; PAM type: YTN; PAM sequence: TTC
ctagtgccatcattgcccag

SEQ ID NO: 70441 - DNA, 20 bp, Artificial Sequence
  Description of Artificial Sequence: Synthetic oligonucleotide
  Target: ATXN2; (-) strand; PAM type: YTN; PAM sequence: TTT
cctagtgccatcattgccca

SEQ ID NO: 70442 - DNA, 20 bp, Artificial Sequence
  Description of Artificial Sequence: Synthetic oligonucleotide
  Target: ATXN2; (-) strand; PAM type: YTN; PAM sequence: CTA
cagagcgtttcctagtgcca

SEQ ID NO: 70443 - DNA, 20 bp, Artificial Sequence
  Description of Artificial Sequence: Synthetic oligonucleotide
  Target: ATXN2; (-) strand; PAM type: YTN; PAM sequence: CTG
tatctacagagcgtttccta

SEQ ID NO: 70444 - DNA, 20 bp, Artificial Sequence
  Description of Artificial Sequence: Synthetic oligonucleotide
  Target: ATXN2; (-) strand; PAM type: YTN; PAM sequence: TTA
aatgcaagcctgtatctaca

SEQ ID NO: 70445 - DNA, 20 bp, Artificial Sequence
  Description of Artificial Sequence: Synthetic oligonucleotide
  Target: ATXN2; (-) strand; PAM type: YTN; PAM sequence: TTT
aaatgcaagcctgtatctac

SEQ ID NO: 70446 - DNA, 20 bp, Artificial Sequence
  Description of Artificial Sequence: Synthetic oligonucleotide
  Target: ATXN2; (-) strand; PAM type: YTN; PAM sequence: CTA
tgggtccagtcatttaaatg

SEQ ID NO: 70447 - DNA, 20 bp, Artificial Sequence
  Description of Artificial Sequence: Synthetic oligonucleotide
  Target: ATXN2; (-) strand; PAM type: YTN; PAM sequence: TTC
gtagtaggtggtaccctatg

SEQ ID NO: 70448 - DNA, 20 bp, Artificial Sequence
  Description of Artificial Sequence: Synthetic oligonucleotide
  Target: ATXN2; (-) strand; PAM type: YTN; PAM sequence: TTA
gttcgtagtaggtggtaccc

SEQ ID NO: 70449 - DNA, 20 bp, Artificial Sequence
  Description of Artificial Sequence: Synthetic oligonucleotide
  Target: ATXN2; (-) strand; PAM type: YTN; PAM sequence: CTT
agttcgtagtaggtggtacc

SEQ ID NO: 70450 - DNA, 20 bp, Artificial Sequence
  Description of Artificial Sequence: Synthetic oligonucleotide
  Target: ATXN2; (-) strand; PAM type: YTN; PAM sequence: CTC
cttagttcgtagtaggtggt

SEQ ID NO: 70451 - DNA, 20 bp, Artificial Sequence
  Description of Artificial Sequence: Synthetic oligonucleotide
  Target: ATXN2; (-) strand; PAM type: YTN; PAM sequence: TTA
ctccttagttcgtagtaggt

SEQ ID NO: 70452 - DNA, 20 bp, Artificial Sequence
  Description of Artificial Sequence: Synthetic oligonucleotide
  Target: ATXN2; (-) strand; PAM type: YTN; PAM sequence: CTC
agcagagccagatcagcaga

SEQ ID NO: 70453 - DNA, 20 bp, Artificial Sequence
  Description of Artificial Sequence: Synthetic oligonucleotide
  Target: ATXN2; (-) strand; PAM type: YTN; PAM sequence: TTC
ctcagcagagccagatcagc

SEQ ID NO: 70454 - DNA, 20 bp, Artificial Sequence
  Description of Artificial Sequence: Synthetic oligonucleotide
  Target: ATXN2; (-) strand; PAM type: YTN; PAM sequence: TTA
tattcctcagcagagccaga

SEQ ID NO: 70455 - DNA, 20 bp, Artificial Sequence
  Description of Artificial Sequence: Synthetic oligonucleotide
  Target: ATXN2; (-) strand; PAM type: YTN; PAM sequence: CTT
atattcctcagcagagccag

SEQ ID NO: 70456 - DNA, 20 bp, Artificial Sequence
  Description of Artificial Sequence: Synthetic oligonucleotide
  Target: ATXN2; (-) strand; PAM type: YTN; PAM sequence: CTG
ggagcttatattcctcagca

SEQ ID NO: 70457 - DNA, 20 bp, Artificial Sequence
  Description of Artificial Sequence: Synthetic oligonucleotide
  Target: ATXN2; (-) strand; PAM type: YTN; PAM sequence: CTG
ggaaggaacagtggctggga

SEQ ID NO: 70458 - DNA, 20 bp, Artificial Sequence
  Description of Artificial Sequence: Synthetic oligonucleotide
  Target: ATXN2; (-) strand; PAM type: YTN; PAM sequence: TTA
cagtactgggaaggaacagt

SEQ ID NO: 70459 - DNA, 20 bp, Artificial Sequence
  Description of Artificial Sequence: Synthetic oligonucleotide
  Target: ATXN2; (-) strand; PAM type: YTN; PAM sequence: CTT
acagtactgggaaggaacag

SEQ ID NO: 70460 - DNA, 20 bp, Artificial Sequence
  Description of Artificial Sequence: Synthetic oligonucleotide
  Target: ATXN2; (-) strand; PAM type: YTN; PAM sequence: TTA
gtggcaacttacagtactgg

SEQ ID NO: 70461 - DNA, 20 bp, Artificial Sequence
  Description of Artificial Sequence: Synthetic oligonucleotide
  Target: ATXN2; (-) strand; PAM type: YTN; PAM sequence: CTT
agtggcaacttacagtactg

SEQ ID NO: 70462 - DNA, 20 bp, Artificial Sequence
  Description of Artificial Sequence: Synthetic oligonucleotide
  Target: ATXN2; (-) strand; PAM type: YTN; PAM sequence: CTC
ttagtggcaacttacagtac

SEQ ID NO: 70463 - DNA, 20 bp, Artificial Sequence
  Description of Artificial Sequence: Synthetic oligonucleotide
  Target: ATXN2; (-) strand; PAM type: YTN; PAM sequence: CTC
ctcttagtggcaacttacag

SEQ ID NO: 70464 - DNA, 20 bp, Artificial Sequence
  Description of Artificial Sequence: Synthetic oligonucleotide
  Target: ATXN2; (-) strand; PAM type: YTN; PAM sequence: TTC
ctcctcttagtggcaactta

SEQ ID NO: 70465 - DNA, 20 bp, Artificial Sequence
  Description of Artificial Sequence: Synthetic oligonucleotide
  Target: ATXN2; (-) strand; PAM type: YTN; PAM sequence: CTT
cctcctcttagtggcaactt

SEQ ID NO: 70466 - DNA, 20 bp, Artificial Sequence
  Description of Artificial Sequence: Synthetic oligonucleotide
  Target: ATXN2; (-) strand; PAM type: YTN; PAM sequence: TTC
gtcccttcctcctcttagtg

SEQ ID NO: 70467 - DNA, 20 bp, Artificial Sequence
  Description of Artificial Sequence: Synthetic oligonucleotide
  Target: ATXN2; (-) strand; PAM type: YTN; PAM sequence: TTG
attcgtcccttcctcctctt

SEQ ID NO: 70468 - DNA, 20 bp, Artificial Sequence
  Description of Artificial Sequence: Synthetic oligonucleotide
  Target: ATXN2; (-) strand; PAM type: YTN; PAM sequence: TTG
ttgattcgtcccttcctcct

SEQ ID NO: 70469 - DNA, 20 bp, Artificial Sequence
  Description of Artificial Sequence: Synthetic oligonucleotide
  Target: ATXN2; (-) strand; PAM type: YTN; PAM sequence: TTA
gttgttgattcgtcccttcc

SEQ ID NO: 70470 - DNA, 20 bp, Artificial Sequence
  Description of Artificial Sequence: Synthetic oligonucleotide
  Target: ATXN2; (-) strand; PAM type: YTN; PAM sequence: TTT
agttgttgattcgtcccttc

SEQ ID NO: 70471 - DNA, 20 bp, Artificial Sequence
  Description of Artificial Sequence: Synthetic oligonucleotide
  Target: ATXN2; (-) strand; PAM type: YTN; PAM sequence: TTG
tgtgtttagttgttgattcg

SEQ ID NO: 70472 - DNA, 20 bp, Artificial Sequence
  Description of Artificial Sequence: Synthetic oligonucleotide
  Target: ATXN2; (-) strand; PAM type: YTN; PAM sequence: TTG
taggagtattgtgtgtttag

SEQ ID NO: 70473 - DNA, 20 bp, Artificial Sequence
  Description of Artificial Sequence: Synthetic oligonucleotide
  Target: ATXN2; (-) strand; PAM type: YTN; PAM sequence: TTT
gtaggagtattgtgtgttta

SEQ ID NO: 70474 - DNA, 20 bp, Artificial Sequence
  Description of Artificial Sequence: Synthetic oligonucleotide
  Target: ATXN2; (-) strand; PAM type: YTN; PAM sequence: TTT
tgtaggagtattgtgtgttt

SEQ ID NO: 70475 - DNA, 20 bp, Artificial Sequence
  Description of Artificial Sequence: Synthetic oligonucleotide
  Target: ATXN2; (-) strand; PAM type: YTN; PAM sequence: CTT
ttgtaggagtattgtgtgtt

SEQ ID NO: 70476 - DNA, 20 bp, Artificial Sequence
  Description of Artificial Sequence: Synthetic oligonucleotide
  Target: ATXN2; (-) strand; PAM type: YTN; PAM sequence: CTC
ttttgtaggagtattgtgtg

SEQ ID NO: 70477 - DNA, 20 bp, Artificial Sequence
  Description of Artificial Sequence: Synthetic oligonucleotide
  Target: ATXN2; (-) strand; PAM type: YTN; PAM sequence: CTG
gaataacctcttttgtagga

SEQ ID NO: 70478 - DNA, 20 bp, Artificial Sequence
  Description of Artificial Sequence: Synthetic oligonucleotide
  Target: ATXN2; (-) strand; PAM type: YTN; PAM sequence: TTG
ccaaataaaaaatccatctg

SEQ ID NO: 70479 - DNA, 20 bp, Artificial Sequence
  Description of Artificial Sequence: Synthetic oligonucleotide
  Target: ATXN2; (-) strand; PAM type: YTN; PAM sequence: TTA
tagaagcattgccaaataaa

SEQ ID NO: 70480 - DNA, 20 bp, Artificial Sequence
  Description of Artificial Sequence: Synthetic oligonucleotide
  Target: ATXN2; (-) strand; PAM type: YTN; PAM sequence: TTA
gggagacaatgacagttata

SEQ ID NO: 70481 - DNA, 20 bp, Artificial Sequence
  Description of Artificial Sequence: Synthetic oligonucleotide
  Target: ATXN2; (-) strand; PAM type: YTN; PAM sequence: TTG
cccattagggagacaatgac

SEQ ID NO: 70482 - DNA, 20 bp, Artificial Sequence
  Description of Artificial Sequence: Synthetic oligonucleotide
  Target: ATXN2; (-) strand; PAM type: YTN; PAM sequence: TTT
gcccattagggagacaatga

SEQ ID NO: 70483 - DNA, 20 bp, Artificial Sequence
  Description of Artificial Sequence: Synthetic oligonucleotide
  Target: ATXN2; (-) strand; PAM type: YTN; PAM sequence: CTT
tgcccattagggagacaatg

SEQ ID NO: 70484 - DNA, 20 bp, Artificial Sequence
  Description of Artificial Sequence: Synthetic oligonucleotide
  Target: ATXN2; (-) strand; PAM type: YTN; PAM sequence: TTG
gcatcactttgcccattagg

SEQ ID NO: 70485 - DNA, 20 bp, Artificial Sequence
  Description of Artificial Sequence: Synthetic oligonucleotide
  Target: ATXN2; (-) strand; PAM type: YTN; PAM sequence: TTT
ggcatcactttgcccattag

SEQ ID NO: 70486 - DNA, 20 bp, Artificial Sequence
  Description of Artificial Sequence: Synthetic oligonucleotide
  Target: ATXN2; (-) strand; PAM type: YTN; PAM sequence: TTT
tggcatcactttgcccatta

SEQ ID NO: 70487 - DNA, 20 bp, Artificial Sequence
  Description of Artificial Sequence: Synthetic oligonucleotide
  Target: ATXN2; (-) strand; PAM type: YTN; PAM sequence: TTA
ttttggcatcactttgccca

SEQ ID NO: 70488 - DNA, 20 bp, Artificial Sequence
  Description of Artificial Sequence: Synthetic oligonucleotide
  Target: ATXN2; (-) strand; PAM type: YTN; PAM sequence: CTT
attttggcatcactttgccc

SEQ ID NO: 70489 - DNA, 20 bp, Artificial Sequence
  Description of Artificial Sequence: Synthetic oligonucleotide
  Target: ATXN2; (-) strand; PAM type: YTN; PAM sequence: TTC
ttattttggcatcactttgc

SEQ ID NO: 70490 - DNA, 20 bp, Artificial Sequence
  Description of Artificial Sequence: Synthetic oligonucleotide
  Target: ATXN2; (-) strand; PAM type: YTN; PAM sequence: TTT
cttattttggcatcactttg

SEQ ID NO: 70491 - DNA, 20 bp, Artificial Sequence
  Description of Artificial Sequence: Synthetic oligonucleotide
  Target: ATXN2; (-) strand; PAM type: YTN; PAM sequence: CTC
agatttcttattttggcatc

SEQ ID NO: 70492 - DNA, 20 bp, Artificial Sequence
  Description of Artificial Sequence: Synthetic oligonucleotide
  Target: ATXN2; (-) strand; PAM type: YTN; PAM sequence: CTG
gctcagatttcttattttgg

SEQ ID NO: 70493 - DNA, 20 bp, Artificial Sequence
  Description of Artificial Sequence: Synthetic oligonucleotide
  Target: ATXN2; (-) strand; PAM type: YTN; PAM sequence: TTG
ctggctcagatttcttattt

SEQ ID NO: 70494 - DNA, 20 bp, Artificial Sequence
  Description of Artificial Sequence: Synthetic oligonucleotide
  Target: ATXN2; (-) strand; PAM type: YTN; PAM sequence: TTT
gctggctcagatttcttatt

SEQ ID NO: 70495 - DNA, 20 bp, Artificial Sequence
  Description of Artificial Sequence: Synthetic oligonucleotide
  Target: ATXN2; (-) strand; PAM type: YTN; PAM sequence: TTA
aatttgctggctcagatttc

SEQ ID NO: 70496 - DNA, 20 bp, Artificial Sequence
  Description of Artificial Sequence: Synthetic oligonucleotide
  Target: ATXN2; (-) strand; PAM type: YTN; PAM sequence: CTT
aaatttgctggctcagattt

SEQ ID NO: 70497 - DNA, 20 bp, Artificial Sequence
  Description of Artificial Sequence: Synthetic oligonucleotide
  Target: ATXN2; (-) strand; PAM type: YTN; PAM sequence: TTC
catgcttaaatttgctggct

SEQ ID NO: 70498 - DNA, 20 bp, Artificial Sequence
  Description of Artificial Sequence: Synthetic oligonucleotide
  Target: ATXN2; (-) strand; PAM type: YTN; PAM sequence: TTG
aagttccatgcttaaatttg

SEQ ID NO: 70499 - DNA, 20 bp, Artificial Sequence
  Description of Artificial Sequence: Synthetic oligonucleotide
  Target: ATXN2; (-) strand; PAM type: YTN; PAM sequence: CTT
gaagttccatgcttaaattt

SEQ ID NO: 70500 - DNA, 20 bp, Artificial Sequence
  Description of Artificial Sequence: Synthetic oligonucleotide
  Target: ATXN2; (-) strand; PAM type: YTN; PAM sequence: CTA
ggcttgaagttccatgctta

SEQ ID NO: 70501 - DNA, 20 bp, Artificial Sequence
  Description of Artificial Sequence: Synthetic oligonucleotide
  Target: ATXN2; (-) strand; PAM type: YTN; PAM sequence: TTA
gctaggcttgaagttccatg

SEQ ID NO: 70502 - DNA, 20 bp, Artificial Sequence
  Description of Artificial Sequence: Synthetic oligonucleotide
  Target: ATXN2; (-) strand; PAM type: YTN; PAM sequence: TTA
gaattagctaggcttgaagt

SEQ ID NO: 70503 - DNA, 20 bp, Artificial Sequence
  Description of Artificial Sequence: Synthetic oligonucleotide
  Target: ATXN2; (-) strand; PAM type: YTN; PAM sequence: TTG
ggataagaagaggttagaat

SEQ ID NO: 70504 - DNA, 20 bp, Artificial Sequence
  Description of Artificial Sequence: Synthetic oligonucleotide
  Target: ATXN2; (-) strand; PAM type: YTN; PAM sequence: TTT
gggataagaagaggttagaa

SEQ ID NO: 70505 - DNA, 20 bp, Artificial Sequence
  Description of Artificial Sequence: Synthetic oligonucleotide
  Target: ATXN2; (-) strand; PAM type: YTN; PAM sequence: CTA
gtttgggataagaagaggtt

SEQ ID NO: 70506 - DNA, 20 bp, Artificial Sequence
  Description of Artificial Sequence: Synthetic oligonucleotide
  Target: ATXN2; (-) strand; PAM type: YTN; PAM sequence: CTA
cccacacctagtttgggata

SEQ ID NO: 70507 - DNA, 20 bp, Artificial Sequence
  Description of Artificial Sequence: Synthetic oligonucleotide
  Target: ATXN2; (-) strand; PAM type: YTN; PAM sequence: CTC
atacctacccacacctagtt

SEQ ID NO: 70508 - DNA, 20 bp, Artificial Sequence
  Description of Artificial Sequence: Synthetic oligonucleotide
  Target: ATXN2; (-) strand; PAM type: YTN; PAM sequence: CTG
atgtacaggtacacacactc

SEQ ID NO: 70509 - DNA, 20 bp, Artificial Sequence
  Description of Artificial Sequence: Synthetic oligonucleotide
  Target: ATXN2; (-) strand; PAM type: YTN; PAM sequence: TTC
cctgatgtacaggtacacac

SEQ ID NO: 70510 - DNA, 20 bp, Artificial Sequence
  Description of Artificial Sequence: Synthetic oligonucleotide
  Target: ATXN2; (-) strand; PAM type: YTN; PAM sequence: TTA
ttccctgatgtacaggtaca

SEQ ID NO: 70511 - DNA, 20 bp, Artificial Sequence
  Description of Artificial Sequence: Synthetic oligonucleotide
  Target: ATXN2; (-) strand; PAM type: YTN; PAM sequence: TTT
attccctgatgtacaggtac

SEQ ID NO: 70512 - DNA, 20 bp, Artificial Sequence
  Description of Artificial Sequence: Synthetic oligonucleotide
  Target: ATXN2; (-) strand; PAM type: YTN; PAM sequence: TTT
tattccctgatgtacaggta

SEQ ID NO: 70513 - DNA, 20 bp, Artificial Sequence
  Description of Artificial Sequence: Synthetic oligonucleotide
  Target: ATXN2; (-) strand; PAM type: YTN; PAM sequence: CTT
ttattccctgatgtacaggt

SEQ ID NO: 70514 - DNA, 20 bp, Artificial Sequence
  Description of Artificial Sequence: Synthetic oligonucleotide
  Target: ATXN2; (-) strand; PAM type: YTN; PAM sequence: TTA
atgcttttattccctgatgt

SEQ ID NO: 70515 - DNA, 20 bp, Artificial Sequence
  Description of Artificial Sequence: Synthetic oligonucleotide
  Target: ATXN2; (-) strand; PAM type: YTN; PAM sequence: CTA
agcccagaggtggattaatg

SEQ ID NO: 70516 - DNA, 20 bp, Artificial Sequence
  Description of Artificial Sequence: Synthetic oligonucleotide
  Target: ATXN2; (-) strand; PAM type: YTN; PAM sequence: CTG
gcagctaagcccagaggtgg

SEQ ID NO: 70517 - DNA, 20 bp, Artificial Sequence
  Description of Artificial Sequence: Synthetic oligonucleotide
  Target: ATXN2; (-) strand; PAM type: YTN; PAM sequence: CTG
gtggagctggcagctaagcc

SEQ ID NO: 70518 - DNA, 20 bp, Artificial Sequence
  Description of Artificial Sequence: Synthetic oligonucleotide
  Target: ATXN2; (-) strand; PAM type: YTN; PAM sequence: CTG
ctggtggagctggcagctaa

SEQ ID NO: 70519 - DNA, 20 bp, Artificial Sequence
  Description of Artificial Sequence: Synthetic oligonucleotide
  Target: ATXN2; (-) strand; PAM type: YTN; PAM sequence: CTA
gcaatgggagtagtgctgct

SEQ ID NO: 70520 - DNA, 20 bp, Artificial Sequence
  Description of Artificial Sequence: Synthetic oligonucleotide
  Target: ATXN2; (-) strand; PAM type: YTN; PAM sequence: TTG
ctagcaatgggagtagtgct

SEQ ID NO: 70521 - DNA, 20 bp, Artificial Sequence
  Description of Artificial Sequence: Synthetic oligonucleotide
  Target: ATXN2; (-) strand; PAM type: YTN; PAM sequence: TTA
gaattgctagcaatgggagt

SEQ ID NO: 70522 - DNA, 20 bp, Artificial Sequence
  Description of Artificial Sequence: Synthetic oligonucleotide
  Target: ATXN2; (-) strand; PAM type: YTN; PAM sequence: CTT
agaattgctagcaatgggag

SEQ ID NO: 70523 - DNA, 20 bp, Artificial Sequence
  Description of Artificial Sequence: Synthetic oligonucleotide
  Target: ATXN2; (-) strand; PAM type: YTN; PAM sequence: CTC
ttagaattgctagcaatggg

SEQ ID NO: 70524 - DNA, 20 bp, Artificial Sequence
  Description of Artificial Sequence: Synthetic oligonucleotide
  Target: ATXN2; (-) strand; PAM type: YTN; PAM sequence: TTG
gctcttagaattgctagcaa

SEQ ID NO: 70525 - DNA, 20 bp, Artificial Sequence
  Description of Artificial Sequence: Synthetic oligonucleotide
  Target: ATXN2; (-) strand; PAM type: YTN; PAM sequence: CTT
ggctcttagaattgctagca

SEQ ID NO: 70526 - DNA, 20 bp, Artificial Sequence
  Description of Artificial Sequence: Synthetic oligonucleotide
  Target: ATXN2; (-) strand; PAM type: YTN; PAM sequence: CTC
ttggctcttagaattgctag

SEQ ID NO: 70527 - DNA, 20 bp, Artificial Sequence
  Description of Artificial Sequence: Synthetic oligonucleotide
  Target: ATXN2; (-) strand; PAM type: YTN; PAM sequence: CTC
agcacactcttggctcttag

SEQ ID NO: 70528 - DNA, 20 bp, Artificial Sequence
  Description of Artificial Sequence: Synthetic oligonucleotide
  Target: ATXN2; (-) strand; PAM type: YTN; PAM sequence: CTC
cctcagcacactcttggctc

SEQ ID NO: 70529 - DNA, 20 bp, Artificial Sequence
  Description of Artificial Sequence: Synthetic oligonucleotide
  Target: ATXN2; (-) strand; PAM type: YTN; PAM sequence: CTG
gggaactccctcagcacact

SEQ ID NO: 70530 - DNA, 20 bp, Artificial Sequence
  Description of Artificial Sequence: Synthetic oligonucleotide
  Target: ATXN2; (-) strand; PAM type: YTN; PAM sequence: CTC
tggggaactccctcagcaca

SEQ ID NO: 70531 - DNA, 20 bp, Artificial Sequence
  Description of Artificial Sequence: Synthetic oligonucleotide
  Target: ATXN2; (-) strand; PAM type: YTN; PAM sequence: CTG
ctctggggaactccctcagc

SEQ ID NO: 70532 - DNA, 20 bp, Artificial Sequence
  Description of Artificial Sequence: Synthetic oligonucleotide
  Target: ATXN2; (-) strand; PAM type: YTN; PAM sequence: CTG
ctgctctggggaactccctc

SEQ ID NO: 70533 - DNA, 20 bp, Artificial Sequence
  Description of Artificial Sequence: Synthetic oligonucleotide
  Target: ATXN2; (-) strand; PAM type: YTN; PAM sequence: CTG
agtcctgctgctctggggaa

SEQ ID NO: 70534 - DNA, 20 bp, Artificial Sequence
  Description of Artificial Sequence: Synthetic oligonucleotide
  Target: ATXN2; (-) strand; PAM type: YTN; PAM sequence: TTC
cacccccagctgagtcctgc

SEQ ID NO: 70535 - DNA, 20 bp, Artificial Sequence
  Description of Artificial Sequence: Synthetic oligonucleotide
  Target: ATXN2; (-) strand; PAM type: YTN; PAM sequence: CTC
cattccacccccagctgagt

SEQ ID NO: 70536 - DNA, 20 bp, Artificial Sequence
  Description of Artificial Sequence: Synthetic oligonucleotide
  Target: ATXN2; (-) strand; PAM type: YTN; PAM sequence: CTA
gtgaatgctccattccaccc

SEQ ID NO: 70537 - DNA, 20 bp, Artificial Sequence
  Description of Artificial Sequence: Synthetic oligonucleotide
  Target: ATXN2; (-) strand; PAM type: YTN; PAM sequence: TTC
tagtgaatgctccattccac

SEQ ID NO: 70538 - DNA, 20 bp, Artificial Sequence
  Description of Artificial Sequence: Synthetic oligonucleotide
  Target: ATXN2; (-) strand; PAM type: YTN; PAM sequence: TTT
ctagtgaatgctccattcca

SEQ ID NO: 70539 - DNA, 20 bp, Artificial Sequence
  Description of Artificial Sequence: Synthetic oligonucleotide
  Target: ATXN2; (-) strand; PAM type: YTN; PAM sequence: TTC
agccatttctagtgaatgct

SEQ ID NO: 70540 - DNA, 20 bp, Artificial Sequence
  Description of Artificial Sequence: Synthetic oligonucleotide
  Target: ATXN2; (-) strand; PAM type: YTN; PAM sequence: TTC
caaaattcagccatttctag

SEQ ID NO: 70541 - DNA, 20 bp, Artificial Sequence
  Description of Artificial Sequence: Synthetic oligonucleotide
  Target: ATXN2; (-) strand; PAM type: YTN; PAM sequence: TTT
ccaaaattcagccatttcta

SEQ ID NO: 70542 - DNA, 20 bp, Artificial Sequence
  Description of Artificial Sequence: Synthetic oligonucleotide
  Target: ATXN2; (-) strand; PAM type: YTN; PAM sequence: TTT
tccaaaattcagccatttct

SEQ ID NO: 70543 - DNA, 20 bp, Artificial Sequence
  Description of Artificial Sequence: Synthetic oligonucleotide
  Target: ATXN2; (-) strand; PAM type: YTN; PAM sequence: TTA
gagagattttccaaaattca

SEQ ID NO: 70544 - DNA, 20 bp, Artificial Sequence
  Description of Artificial Sequence: Synthetic oligonucleotide
  Target: ATXN2; (-) strand; PAM type: YTN; PAM sequence: CTT
agagagattttccaaaattc

SEQ ID NO: 70545 - DNA, 20 bp, Artificial Sequence
  Description of Artificial Sequence: Synthetic oligonucleotide
  Target: ATXN2; (-) strand; PAM type: YTN; PAM sequence: CTC
ttagagagattttccaaaat

SEQ ID NO: 70546 - DNA, 20 bp, Artificial Sequence
  Description of Artificial Sequence: Synthetic oligonucleotide
  Target: ATXN2; (-) strand; PAM type: YTN; PAM sequence: TTA
gaatctcttagagagatttt

SEQ ID NO: 70547 - DNA, 20 bp, Artificial Sequence
  Description of Artificial Sequence: Synthetic oligonucleotide
  Target: ATXN2; (-) strand; PAM type: YTN; PAM sequence: CTT
agaatctcttagagagattt

SEQ ID NO: 70548 - DNA, 20 bp, Artificial Sequence
  Description of Artificial Sequence: Synthetic oligonucleotide
  Target: ATXN2; (-) strand; PAM type: YTN; PAM sequence: CTC
ttagaatctcttagagagat

SEQ ID NO: 70549 - DNA, 20 bp, Artificial Sequence
  Description of Artificial Sequence: Synthetic oligonucleotide
  Target: ATXN2; (-) strand; PAM type: YTN; PAM sequence: TTA
gtctcttagaatctcttaga

SEQ ID NO: 70550 - DNA, 20 bp, Artificial Sequence
  Description of Artificial Sequence: Synthetic oligonucleotide
  Target: ATXN2; (-) strand; PAM type: YTN; PAM sequence: TTG
gtaagatagcattagtctct

SEQ ID NO: 70551 - DNA, 20 bp, Artificial Sequence
  Description of Artificial Sequence: Synthetic oligonucleotide
  Target: ATXN2; (-) strand; PAM type: YTN; PAM sequence: TTC
agcaaagatgaggtgttggt

SEQ ID NO: 70552 - DNA, 20 bp, Artificial Sequence
  Description of Artificial Sequence: Synthetic oligonucleotide
  Target: ATXN2; (-) strand; PAM type: YTN; PAM sequence: TTT
cagcaaagatgaggtgttgg

SEQ ID NO: 70553 - DNA, 20 bp, Artificial Sequence
  Description of Artificial Sequence: Synthetic oligonucleotide
  Target: ATXN2; (-) strand; PAM type: YTN; PAM sequence: CTT
tcagcaaagatgaggtgttg

SEQ ID NO: 70554 - DNA, 20 bp, Artificial Sequence
  Description of Artificial Sequence: Synthetic oligonucleotide
  Target: ATXN2; (-) strand; PAM type: YTN; PAM sequence: CTA
gtgccatcagtagctttcag

SEQ ID NO: 70555 - DNA, 20 bp, Artificial Sequence
  Description of Artificial Sequence: Synthetic oligonucleotide
  Target: ATXN2; (-) strand; PAM type: YTN; PAM sequence: TTC
tagtgccatcagtagctttc

SEQ ID NO: 70556 - DNA, 20 bp, Artificial Sequence
  Description of Artificial Sequence: Synthetic oligonucleotide
  Target: ATXN2; (-) strand; PAM type: YTN; PAM sequence: TTT
ctagtgccatcagtagcttt

SEQ ID NO: 70557 - DNA, 20 bp, Artificial Sequence
  Description of Artificial Sequence: Synthetic oligonucleotide
  Target: ATXN2; (-) strand; PAM type: YTN; PAM sequence: TTA
gtatcaaataaggtcagatt

SEQ ID NO: 70558 - DNA, 20 bp, Artificial Sequence
  Description of Artificial Sequence: Synthetic oligonucleotide
  Target: ATXN2; (-) strand; PAM type: YTN; PAM sequence: TTC
aggttagtatcaaataaggt

SEQ ID NO: 70559 - DNA, 20 bp, Artificial Sequence
  Description of Artificial Sequence: Synthetic oligonucleotide
  Target: ATXN2; (-) strand; PAM type: YTN; PAM sequence: TTA
agataatgtagagaagaacg

SEQ ID NO: 70560 - DNA, 20 bp, Artificial Sequence
  Description of Artificial Sequence: Synthetic oligonucleotide
  Target: ATXN2; (-) strand; PAM type: YTN; PAM sequence: TTT
aagataatgtagagaagaac

SEQ ID NO: 70561 - DNA, 20 bp, Artificial Sequence
  Description of Artificial Sequence: Synthetic oligonucleotide
  Target: ATXN2; (-) strand; PAM type: YTN; PAM sequence: CTT
taagataatgtagagaagaa

SEQ ID NO: 70562 - DNA, 20 bp, Artificial Sequence
  Description of Artificial Sequence: Synthetic oligonucleotide
  Target: ATXN2; (-) strand; PAM type: YTN; PAM sequence: TTG
ccagcaatccacataacttt

SEQ ID NO: 70563 - DNA, 20 bp, Artificial Sequence
  Description of Artificial Sequence: Synthetic oligonucleotide
  Target: ATXN2; (-) strand; PAM type: YTN; PAM sequence: TTT
gccagcaatccacataactt

SEQ ID NO: 70564 - DNA, 20 bp, Artificial Sequence
  Description of Artificial Sequence: Synthetic oligonucleotide
  Target: ATXN2; (-) strand; PAM type: YTN; PAM sequence: TTT
tgccagcaatccacataact

SEQ ID NO: 70565 - DNA, 20 bp, Artificial Sequence
  Description of Artificial Sequence: Synthetic oligonucleotide
  Target: ATXN2; (-) strand; PAM type: YTN; PAM sequence: TTT
ttgccagcaatccacataac

SEQ ID NO: 70566 - DNA, 20 bp, Artificial Sequence
  Description of Artificial Sequence: Synthetic oligonucleotide
  Target: ATXN2; (-) strand; PAM type: YTN; PAM sequence: TTA
atttttgccagcaatccaca

SEQ ID NO: 70567 - DNA, 20 bp, Artificial Sequence
  Description of Artificial Sequence: Synthetic oligonucleotide
  Target: ATXN2; (-) strand; PAM type: YTN; PAM sequence: CTA
aattaatttttgccagcaat

SEQ ID NO: 70568 - DNA, 20 bp, Artificial Sequence
  Description of Artificial Sequence: Synthetic oligonucleotide
  Target: ATXN2; (-) strand; PAM type: YTN; PAM sequence: TTG
aaaatacacatggctaaatt

SEQ ID NO: 70569 - DNA, 20 bp, Artificial Sequence
  Description of Artificial Sequence: Synthetic oligonucleotide
  Target: ATXN2; (-) strand; PAM type: YTN; PAM sequence: CTT
gaaaatacacatggctaaat

SEQ ID NO: 70570 - DNA, 20 bp, Artificial Sequence
  Description of Artificial Sequence: Synthetic oligonucleotide
  Target: ATXN2; (-) strand; PAM type: YTN; PAM sequence: TTC
ttgaaaatacacatggctaa

SEQ ID NO: 70571 - DNA, 20 bp, Artificial Sequence
  Description of Artificial Sequence: Synthetic oligonucleotide
  Target: ATXN2; (-) strand; PAM type: YTN; PAM sequence: TTA
cattcttgaaaatacacatg

SEQ ID NO: 70572 - DNA, 20 bp, Artificial Sequence
  Description of Artificial Sequence: Synthetic oligonucleotide
  Target: ATXN2; (-) strand; PAM type: YTN; PAM sequence: TTT
acattcttgaaaatacacat

SEQ ID NO: 70573 - DNA, 20 bp, Artificial Sequence
  Description of Artificial Sequence: Synthetic oligonucleotide
  Target: ATXN2; (-) strand; PAM type: YTN; PAM sequence: TTT
tacattcttgaaaatacaca

SEQ ID NO: 70574 - DNA, 20 bp, Artificial Sequence
  Description of Artificial Sequence: Synthetic oligonucleotide
  Target: ATXN2; (-) strand; PAM type: YTN; PAM sequence: TTG
gaacattttacattcttgaa

SEQ ID NO: 70575 - DNA, 20 bp, Artificial Sequence
  Description of Artificial Sequence: Synthetic oligonucleotide
  Target: ATXN2; (-) strand; PAM type: YTN; PAM sequence: CTT
ggaacattttacattcttga

SEQ ID NO: 70576 - DNA, 20 bp, Artificial Sequence
  Description of Artificial Sequence: Synthetic oligonucleotide
  Target: ATXN2; (-) strand; PAM type: YTN; PAM sequence: TTC
ttggaacattttacattctt

SEQ ID NO: 70577 - DNA, 20 bp, Artificial Sequence
  Description of Artificial Sequence: Synthetic oligonucleotide
  Target: ATXN2; (-) strand; PAM type: YTN; PAM sequence: TTT
cttggaacattttacattct

SEQ ID NO: 70578 - DNA, 20 bp, Artificial Sequence
  Description of Artificial Sequence: Synthetic oligonucleotide
  Target: ATXN2; (-) strand; PAM type: YTN; PAM sequence: TTT
tcttggaacattttacattc

SEQ ID NO: 70579 - DNA, 20 bp, Artificial Sequence
  Description of Artificial Sequence: Synthetic oligonucleotide
  Target: ATXN2; (-) strand; PAM type: YTN; PAM sequence: TTG
atgttttcttggaacatttt

SEQ ID NO: 70580 - DNA, 20 bp, Artificial Sequence
  Description of Artificial Sequence: Synthetic oligonucleotide
  Target: ATXN2; (-) strand; PAM type: YTN; PAM sequence: TTT
gatgttttcttggaacattt

SEQ ID NO: 70581 - DNA, 20 bp, Artificial Sequence
  Description of Artificial Sequence: Synthetic oligonucleotide
  Target: ATXN2; (-) strand; PAM type: YTN; PAM sequence: TTA
tttgatgttttcttggaaca

SEQ ID NO: 70582 - DNA, 20 bp, Artificial Sequence
  Description of Artificial Sequence: Synthetic oligonucleotide
  Target: ATXN2; (-) strand; PAM type: YTN; PAM sequence: TTA
ttatttgatgttttcttgga

SEQ ID NO: 70583 - DNA, 20 bp, Artificial Sequence
  Description of Artificial Sequence: Synthetic oligonucleotide
  Target: ATXN2; (-) strand; PAM type: YTN; PAM sequence: TTA
aggtaggttattatttgatg

SEQ ID NO: 70584 - DNA, 20 bp, Artificial Sequence
  Description of Artificial Sequence: Synthetic oligonucleotide
  Target: ATXN2; (-) strand; PAM type: YTN; PAM sequence: CTT
aaggtaggttattatttgat

SEQ ID NO: 70585 - DNA, 20 bp, Artificial Sequence
  Description of Artificial Sequence: Synthetic oligonucleotide
  Target: ATXN2; (-) strand; PAM type: YTN; PAM sequence: TTC
aggatcttaaggtaggttat

SEQ ID NO: 70586 - DNA, 20 bp, Artificial Sequence
  Description of Artificial Sequence: Synthetic oligonucleotide
  Target: ATXN2; (-) strand; PAM type: YTN; PAM sequence: TTT
caggatcttaaggtaggtta

SEQ ID NO: 70587 - DNA, 20 bp, Artificial Sequence
  Description of Artificial Sequence: Synthetic oligonucleotide
  Target: ATXN2; (-) strand; PAM type: YTN; PAM sequence: TTA
aagggatttcaggatcttaa

SEQ ID NO: 70588 - DNA, 20 bp, Artificial Sequence
  Description of Artificial Sequence: Synthetic oligonucleotide
  Target: ATXN2; (-) strand; PAM type: YTN; PAM sequence: TTG
tgagaattaaagggatttca

SEQ ID NO: 70589 - DNA, 20 bp, Artificial Sequence
  Description of Artificial Sequence: Synthetic oligonucleotide
  Target: ATXN2; (-) strand; PAM type: YTN; PAM sequence: CTA
gtgttgtgagaattaaaggg

SEQ ID NO: 70590 - DNA, 20 bp, Artificial Sequence
  Description of Artificial Sequence: Synthetic oligonucleotide
  Target: ATXN2; (-) strand; PAM type: YTN; PAM sequence: TTG
tctagtgttgtgagaattaa

SEQ ID NO: 70591 - DNA, 20 bp, Artificial Sequence
  Description of Artificial Sequence: Synthetic oligonucleotide
  Target: ATXN2; (-) strand; PAM type: YTN; PAM sequence: TTT
gtctagtgttgtgagaatta

SEQ ID NO: 70592 - DNA, 20 bp, Artificial Sequence
  Description of Artificial Sequence: Synthetic oligonucleotide
  Target: ATXN2; (-) strand; PAM type: YTN; PAM sequence: TTT
tgtctagtgttgtgagaatt

SEQ ID NO: 70593 - DNA, 20 bp, Artificial Sequence
  Description of Artificial Sequence: Synthetic oligonucleotide
  Target: ATXN2; (-) strand; PAM type: YTN; PAM sequence: TTT
ttgtctagtgttgtgagaat

SEQ ID NO: 70594 - DNA, 20 bp, Artificial Sequence
  Description of Artificial Sequence: Synthetic oligonucleotide
  Target: ATXN2; (-) strand; PAM type: YTN; PAM sequence: TTT
tttgtctagtgttgtgagaa

SEQ ID NO: 70595 - DNA, 20 bp, Artificial Sequence
  Description of Artificial Sequence: Synthetic oligonucleotide
  Target: ATXN2; (-) strand; PAM type: YTN; PAM sequence: CTA
tagtgtagttttttgtctag

SEQ ID NO: 70596 - DNA, 20 bp, Artificial Sequence
  Description of Artificial Sequence: Synthetic oligonucleotide
  Target: ATXN2; (-) strand; PAM type: YTN; PAM sequence: TTC
ctatagtgtagttttttgtc

SEQ ID NO: 70597 - DNA, 20 bp, Artificial Sequence
  Description of Artificial Sequence: Synthetic oligonucleotide
  Target: ATXN2; (-) strand; PAM type: YTN; PAM sequence: TTT
cctatagtgtagttttttgt

SEQ ID NO: 70598 - DNA, 20 bp, Artificial Sequence
  Description of Artificial Sequence: Synthetic oligonucleotide
  Target: ATXN2; (-) strand; PAM type: YTN; PAM sequence: TTT
tcctatagtgtagttttttg

SEQ ID NO: 70599 - DNA, 20 bp, Artificial Sequence
  Description of Artificial Sequence: Synthetic oligonucleotide
  Target: ATXN2; (-) strand; PAM type: YTN; PAM sequence: TTG
gaattttcctatagtgtagt

SEQ ID NO: 70600 - DNA, 20 bp, Artificial Sequence
  Description of Artificial Sequence: Synthetic oligonucleotide
  Target: ATXN2; (-) strand; PAM type: YTN; PAM sequence: TTT
ggaattttcctatagtgtag

SEQ ID NO: 70601 - DNA, 20 bp, Artificial Sequence
  Description of Artificial Sequence: Synthetic oligonucleotide
  Target: ATXN2; (-) strand; PAM type: YTN; PAM sequence: CTC
gtttggaattttcctatagt

SEQ ID NO: 70602 - DNA, 20 bp, Artificial Sequence
  Description of Artificial Sequence: Synthetic oligonucleotide
  Target: ATXN2; (-) strand; PAM type: YTN; PAM sequence: TTC
cagaagataatatgactcgt

SEQ ID NO: 70603 - DNA, 20 bp, Artificial Sequence
  Description of Artificial Sequence: Synthetic oligonucleotide
  Target: ATXN2; (-) strand; PAM type: YTN; PAM sequence: CTT
ccagaagataatatgactcg

SEQ ID NO: 70604 - DNA, 20 bp, Artificial Sequence
  Description of Artificial Sequence: Synthetic oligonucleotide
  Target: ATXN2; (-) strand; PAM type: YTN; PAM sequence: TTC
ttccagaagataatatgact

SEQ ID NO: 70605 - DNA, 20 bp, Artificial Sequence
  Description of Artificial Sequence: Synthetic oligonucleotide
  Target: ATXN2; (-) strand; PAM type: YTN; PAM sequence: CTT
cttccagaagataatatgac

SEQ ID NO: 70606 - DNA, 20 bp, Artificial Sequence
  Description of Artificial Sequence: Synthetic oligonucleotide
  Target: ATXN2; (-) strand; PAM type: YTN; PAM sequence: TTG
cttcttccagaagataatat

SEQ ID NO: 70607 - DNA, 20 bp, Artificial Sequence
  Description of Artificial Sequence: Synthetic oligonucleotide
  Target: ATXN2; (-) strand; PAM type: YTN; PAM sequence: CTG
ttgcttcttccagaagataa

SEQ ID NO: 70608 - DNA, 20 bp, Artificial Sequence
  Description of Artificial Sequence: Synthetic oligonucleotide
  Target: ATXN2; (-) strand; PAM type: YTN; PAM sequence: TTA
gacgtaaaggaacagtcctg

SEQ ID NO: 70609 - DNA, 20 bp, Artificial Sequence
  Description of Artificial Sequence: Synthetic oligonucleotide
  Target: ATXN2; (-) strand; PAM type: YTN; PAM sequence: CTT
agacgtaaaggaacagtcct

SEQ ID NO: 70610 - DNA, 20 bp, Artificial Sequence
  Description of Artificial Sequence: Synthetic oligonucleotide
  Target: ATXN2; (-) strand; PAM type: YTN; PAM sequence: TTA
acaggatcttagacgtaaag

SEQ ID NO: 70611 - DNA, 20 bp, Artificial Sequence
  Description of Artificial Sequence: Synthetic oligonucleotide
  Target: ATXN2; (-) strand; PAM type: YTN; PAM sequence: TTA
agacattaacaggatcttag

SEQ ID NO: 70612 - DNA, 20 bp, Artificial Sequence
  Description of Artificial Sequence: Synthetic oligonucleotide
  Target: ATXN2; (-) strand; PAM type: YTN; PAM sequence: CTA
gtatgattaagacattaaca

SEQ ID NO: 70613 - DNA, 20 bp, Artificial Sequence
  Description of Artificial Sequence: Synthetic oligonucleotide
  Target: ATXN2; (-) strand; PAM type: YTN; PAM sequence: TTC
aaaaactagtatgattaaga

SEQ ID NO: 70614 - DNA, 20 bp, Artificial Sequence
  Description of Artificial Sequence: Synthetic oligonucleotide
  Target: ATXN2; (-) strand; PAM type: YTN; PAM sequence: TTT
caaaaactagtatgattaag

SEQ ID NO: 70615 - DNA, 20 bp, Artificial Sequence
  Description of Artificial Sequence: Synthetic oligonucleotide
  Target: ATXN2; (-) strand; PAM type: YTN; PAM sequence: TTT
tcaaaaactagtatgattaa

SEQ ID NO: 70616 - DNA, 20 bp, Artificial Sequence
  Description of Artificial Sequence: Synthetic oligonucleotide
  Target: ATXN2; (-) strand; PAM type: YTN; PAM sequence: CTT
ttcaaaaactagtatgatta

SEQ ID NO: 70617 - DNA, 20 bp, Artificial Sequence
  Description of Artificial Sequence: Synthetic oligonucleotide
  Target: ATXN2; (-) strand; PAM type: YTN; PAM sequence: TTA
aatgtgtgcttttcaaaaac

SEQ ID NO: 70618 - DNA, 20 bp, Artificial Sequence
  Description of Artificial Sequence: Synthetic oligonucleotide
  Target: ATXN2; (-) strand; PAM type: YTN; PAM sequence: CTT
aaatgtgtgcttttcaaaaa

SEQ ID NO: 70619 - DNA, 20 bp, Artificial Sequence
  Description of Artificial Sequence: Synthetic oligonucleotide
  Target: ATXN2; (-) strand; PAM type: YTN; PAM sequence: TTA
cttaaatgtgtgcttttcaa

SEQ ID NO: 70620 - DNA, 20 bp, Artificial Sequence
  Description of Artificial Sequence: Synthetic oligonucleotide
  Target: ATXN2; (-) strand; PAM type: YTN; PAM sequence: TTT
acttaaatgtgtgcttttca

SEQ ID NO: 70621 - DNA, 20 bp, Artificial Sequence
  Description of Artificial Sequence: Synthetic oligonucleotide
  Target: ATXN2; (-) strand; PAM type: YTN; PAM sequence: TTA
tttacttaaatgtgtgcttt

SEQ ID NO: 70622 - DNA, 20 bp, Artificial Sequence
  Description of Artificial Sequence: Synthetic oligonucleotide
  Target: ATXN2; (-) strand; PAM type: YTN; PAM sequence: TTT
atttacttaaatgtgtgctt

SEQ ID NO: 70623 - DNA, 20 bp, Artificial Sequence
  Description of Artificial Sequence: Synthetic oligonucleotide
  Target: ATXN2; (-) strand; PAM type: YTN; PAM sequence: CTT
tatttacttaaatgtgtgct

SEQ ID NO: 70624 - DNA, 20 bp, Artificial Sequence
  Description of Artificial Sequence: Synthetic oligonucleotide
  Target: ATXN2; (-) strand; PAM type: YTN; PAM sequence: CTA
aataaatgctttatttactt

SEQ ID NO: 70625 - DNA, 20 bp, Artificial Sequence
  Description of Artificial Sequence: Synthetic oligonucleotide
  Target: ATXN2; (-) strand; PAM type: YTN; PAM sequence: CTA
tctaaataaatgctttattt

SEQ ID NO: 70626 - DNA, 20 bp, Artificial Sequence
  Description of Artificial Sequence: Synthetic oligonucleotide
  Target: ATXN2; (-) strand; PAM type: YTN; PAM sequence: TTC
tatctaaataaatgctttat

SEQ ID NO: 70627 - DNA, 20 bp, Artificial Sequence
  Description of Artificial Sequence: Synthetic oligonucleotide
  Target: ATXN2; (-) strand; PAM type: YTN; PAM sequence: CTT
ctatctaaataaatgcttta

SEQ ID NO: 70628 - DNA, 20 bp, Artificial Sequence
  Description of Artificial Sequence: Synthetic oligonucleotide
  Target: ATXN2; (-) strand; PAM type: YTN; PAM sequence: CTG
agcttctatctaaataaatg

SEQ ID NO: 70629 - DNA, 20 bp, Artificial Sequence
  Description of Artificial Sequence: Synthetic oligonucleotide
  Target: ATXN2; (-) strand; PAM type: YTN; PAM sequence: TTA
atactgagcttctatctaaa

SEQ ID NO: 70630 - DNA, 20 bp, Artificial Sequence
  Description of Artificial Sequence: Synthetic oligonucleotide
  Target: ATXN2; (-) strand; PAM type: YTN; PAM sequence: TTT
aatactgagcttctatctaa

SEQ ID NO: 70631 - DNA, 20 bp, Artificial Sequence
  Description of Artificial Sequence: Synthetic oligonucleotide
  Target: ATXN2; (-) strand; PAM type: YTN; PAM sequence: TTT
taatactgagcttctatcta

SEQ ID NO: 70632 - DNA, 20 bp, Artificial Sequence
  Description of Artificial Sequence: Synthetic oligonucleotide
  Target: ATXN2; (-) strand; PAM type: YTN; PAM sequence: TTT
ttaatactgagcttctatct

SEQ ID NO: 70633 - DNA, 20 bp, Artificial Sequence
  Description of Artificial Sequence: Synthetic oligonucleotide
  Target: ATXN2; (-) strand; PAM type: YTN; PAM sequence: TTG
tttttaatactgagcttcta

SEQ ID NO: 70634 - DNA, 20 bp, Artificial Sequence
  Description of Artificial Sequence: Synthetic oligonucleotide
  Target: ATXN2; (-) strand; PAM type: YTN; PAM sequence: TTG
aatcaaaagagtattgtttt

SEQ ID NO: 70635 - DNA, 20 bp, Artificial Sequence
  Description of Artificial Sequence: Synthetic oligonucleotide
  Target: ATXN2; (-) strand; PAM type: YTN; PAM sequence: CTT
gaatcaaaagagtattgttt

SEQ ID NO: 70636 - DNA, 20 bp, Artificial Sequence
  Description of Artificial Sequence: Synthetic oligonucleotide
  Target: ATXN2; (-) strand; PAM type: YTN; PAM sequence: TTC
ttgaatcaaaagagtattgt

SEQ ID NO: 70637 - DNA, 20 bp, Artificial Sequence
  Description of Artificial Sequence: Synthetic oligonucleotide
  Target: ATXN2; (-) strand; PAM type: YTN; PAM sequence: TTT
cttgaatcaaaagagtattg

SEQ ID NO: 70638 - DNA, 20 bp, Artificial Sequence
  Description of Artificial Sequence: Synthetic oligonucleotide
  Target: ATXN2; (-) strand; PAM type: YTN; PAM sequence: TTA
atttcttgaatcaaaagagt

SEQ ID NO: 70639 - DNA, 20 bp, Artificial Sequence
  Description of Artificial Sequence: Synthetic oligonucleotide
  Target: ATXN2; (-) strand; PAM type: YTN; PAM sequence: TTT
aatttcttgaatcaaaagag

SEQ ID NO: 70640 - DNA, 20 bp, Artificial Sequence
  Description of Artificial Sequence: Synthetic oligonucleotide
  Target: ATXN2; (-) strand; PAM type: YTN; PAM sequence: CTT
taatttcttgaatcaaaaga

SEQ ID NO: 70641 - DNA, 20 bp, Artificial Sequence
  Description of Artificial Sequence: Synthetic oligonucleotide
  Target: ATXN2; (-) strand; PAM type: YTN; PAM sequence: TTC
gagctttaatttcttgaatc

SEQ ID NO: 70642 - DNA, 20 bp, Artificial Sequence
  Description of Artificial Sequence: Synthetic oligonucleotide
  Target: ATXN2; (-) strand; PAM type: YTN; PAM sequence: CTT
cgagctttaatttcttgaat

SEQ ID NO: 70643 - DNA, 20 bp, Artificial Sequence
  Description of Artificial Sequence: Synthetic oligonucleotide
  Target: ATXN2; (-) strand; PAM type: YTN; PAM sequence: CTG
cttcgagctttaatttcttg

SEQ ID NO: 70644 - DNA, 20 bp, Artificial Sequence
  Description of Artificial Sequence: Synthetic oligonucleotide
  Target: ATXN2; (-) strand; PAM type: YTN; PAM sequence: CTA
gctgcttcgagctttaattt

SEQ ID NO: 70645 - DNA, 20 bp, Artificial Sequence
  Description of Artificial Sequence: Synthetic oligonucleotide
  Target: ATXN2; (-) strand; PAM type: YTN; PAM sequence: CTC
tagctgcttcgagctttaat

SEQ ID NO: 70646 - DNA, 20 bp, Artificial Sequence
  Description of Artificial Sequence: Synthetic oligonucleotide
  Target: ATXN2; (-) strand; PAM type: YTN; PAM sequence: CTA
taaaaatctctagctgcttc

SEQ ID NO: 70647 - DNA, 20 bp, Artificial Sequence
  Description of Artificial Sequence: Synthetic oligonucleotide
  Target: ATXN2; (-) strand; PAM type: YTN; PAM sequence: TTC
tataaaaatctctagctgct

SEQ ID NO: 70648 - DNA, 20 bp, Artificial Sequence
  Description of Artificial Sequence: Synthetic oligonucleotide
  Target: ATXN2; (-) strand; PAM type: YTN; PAM sequence: TTA
tatggttctataaaaatctc

SEQ ID NO: 70649 - DNA, 20 bp, Artificial Sequence
  Description of Artificial Sequence: Synthetic oligonucleotide
  Target: ATXN2; (-) strand; PAM type: YTN; PAM sequence: TTT
atatggttctataaaaatct

SEQ ID NO: 70650 - DNA, 20 bp, Artificial Sequence
  Description of Artificial Sequence: Synthetic oligonucleotide
  Target: ATXN2; (-) strand; PAM type: YTN; PAM sequence: CTG
tagtgagaaaaaaatccgtt

SEQ ID NO: 70651 - DNA, 20 bp, Artificial Sequence
  Description of Artificial Sequence: Synthetic oligonucleotide
  Target: ATXN2; (-) strand; PAM type: YTN; PAM sequence: TTC
acacacacacacataccctg

SEQ ID NO: 70652 - DNA, 20 bp, Artificial Sequence
  Description of Artificial Sequence: Synthetic oligonucleotide
  Target: ATXN2; (-) strand; PAM type: YTN; PAM sequence: TTT
cacacacacacacataccct

SEQ ID NO: 70653 - DNA, 20 bp, Artificial Sequence
  Description of Artificial Sequence: Synthetic oligonucleotide
  Target: ATXN2; (-) strand; PAM type: YTN; PAM sequence: TTT
tcacacacacacacataccc

SEQ ID NO: 70654 - DNA, 20 bp, Artificial Sequence
  Description of Artificial Sequence: Synthetic oligonucleotide
  Target: ATXN2; (-) strand; PAM type: YTN; PAM sequence: CTA
aatattttcacacacacaca

SEQ ID NO: 70655 - DNA, 20 bp, Artificial Sequence
  Description of Artificial Sequence: Synthetic oligonucleotide
  Target: ATXN2; (-) strand; PAM type: YTN; PAM sequence: TTC
taaatattttcacacacaca

SEQ ID NO: 70656 - DNA, 20 bp, Artificial Sequence
  Description of Artificial Sequence: Synthetic oligonucleotide
  Target: ATXN2; (-) strand; PAM type: YTN; PAM sequence: TTT
ctaaatattttcacacacac

SEQ ID NO: 70657 - DNA, 20 bp, Artificial Sequence
  Description of Artificial Sequence: Synthetic oligonucleotide
  Target: ATXN2; (-) strand; PAM type: YTN; PAM sequence: CTT
tctaaatattttcacacaca

SEQ ID NO: 70658 - DNA, 20 bp, Artificial Sequence
  Description of Artificial Sequence: Synthetic oligonucleotide
  Target: ATXN2; (-) strand; PAM type: YTN; PAM sequence: CTC
aagactttctaaatattttc

SEQ ID NO: 70659 - DNA, 20 bp, Artificial Sequence
  Description of Artificial Sequence: Synthetic oligonucleotide
  Target: ATXN2; (-) strand; PAM type: YTN; PAM sequence: TTG
actcaagactttctaaatat

SEQ ID NO: 70660 - DNA, 20 bp, Artificial Sequence
  Description of Artificial Sequence: Synthetic oligonucleotide
  Target: ATXN2; (-) strand; PAM type: YTN; PAM sequence: CTT
gactcaagactttctaaata

SEQ ID NO: 70661 - DNA, 20 bp, Artificial Sequence
  Description of Artificial Sequence: Synthetic oligonucleotide
  Target: ATXN2; (-) strand; PAM type: YTN; PAM sequence: TTG
aagacggcttgactcaagac

SEQ ID NO: 70662 - DNA, 20 bp, Artificial Sequence
  Description of Artificial Sequence: Synthetic oligonucleotide
  Target: ATXN2; (-) strand; PAM type: YTN; PAM sequence: TTT
gaagacggcttgactcaaga

SEQ ID NO: 70663 - DNA, 20 bp, Artificial Sequence
  Description of Artificial Sequence: Synthetic oligonucleotide
  Target: ATXN2; (-) strand; PAM type: YTN; PAM sequence: TTG
gtttgaagacggcttgactc

SEQ ID NO: 70664 - DNA, 20 bp, Artificial Sequence
  Description of Artificial Sequence: Synthetic oligonucleotide
  Target: ATXN2; (-) strand; PAM type: YTN; PAM sequence: TTT
ggtttgaagacggcttgact

SEQ ID NO: 70665 - DNA, 20 bp, Artificial Sequence
  Description of Artificial Sequence: Synthetic oligonucleotide
  Target: ATXN2; (-) strand; PAM type: YTN; PAM sequence: TTT
tggtttgaagacggcttgac

SEQ ID NO: 70666 - DNA, 20 bp, Artificial Sequence
  Description of Artificial Sequence: Synthetic oligonucleotide
  Target: ATXN2; (-) strand; PAM type: YTN; PAM sequence: CTT
ttggtttgaagacggcttga

SEQ ID NO: 70667 - DNA, 20 bp, Artificial Sequence
  Description of Artificial Sequence: Synthetic oligonucleotide
  Target: ATXN2; (-) strand; PAM type: YTN; PAM sequence: TTG
ggatcttttggtttgaagac

SEQ ID NO: 70668 - DNA, 20 bp, Artificial Sequence
  Description of Artificial Sequence: Synthetic oligonucleotide
  Target: ATXN2; (-) strand; PAM type: YTN; PAM sequence: TTT
gggatcttttggtttgaaga

SEQ ID NO: 70669 - DNA, 20 bp, Artificial Sequence
  Description of Artificial Sequence: Synthetic oligonucleotide
  Target: ATXN2; (-) strand; PAM type: YTN; PAM sequence: TTG
tgtgtacatttgggatcttt

SEQ ID NO: 70670 - DNA, 20 bp, Artificial Sequence
  Description of Artificial Sequence: Synthetic oligonucleotide
  Target: ATXN2; (-) strand; PAM type: YTN; PAM sequence: TTT
gtgtgtacatttgggatctt

SEQ ID NO: 70671 - DNA, 20 bp, Artificial Sequence
  Description of Artificial Sequence: Synthetic oligonucleotide
  Target: ATXN2; (-) strand; PAM type: YTN; PAM sequence: CTT
tgtgtgtacatttgggatct

SEQ ID NO: 70672 - DNA, 20 bp, Artificial Sequence
  Description of Artificial Sequence: Synthetic oligonucleotide
  Target: ATXN2; (-) strand; PAM type: YTN; PAM sequence: CTA
ctttgtgtgtacatttggga

SEQ ID NO: 70673 - DNA, 20 bp, Artificial Sequence
  Description of Artificial Sequence: Synthetic oligonucleotide
  Target: ATXN2; (-) strand; PAM type: YTN; PAM sequence: TTA
agctactttgtgtgtacatt

SEQ ID NO: 70674 - DNA, 20 bp, Artificial Sequence
  Description of Artificial Sequence: Synthetic oligonucleotide
  Target: ATXN2; (-) strand; PAM type: YTN; PAM sequence: TTT
aagctactttgtgtgtacat

SEQ ID NO: 70675 - DNA, 20 bp, Artificial Sequence
  Description of Artificial Sequence: Synthetic oligonucleotide
  Target: ATXN2; (-) strand; PAM type: YTN; PAM sequence: CTG
taaaaacatatttaagctac

SEQ ID NO: 70676 - DNA, 20 bp, Artificial Sequence
  Description of Artificial Sequence: Synthetic oligonucleotide
  Target: ATXN2; (-) strand; PAM type: YTN; PAM sequence: TTA
gaataatactgtaaaaacat

SEQ ID NO: 70677 - DNA, 20 bp, Artificial Sequence
  Description of Artificial Sequence: Synthetic oligonucleotide
  Target: ATXN2; (-) strand; PAM type: YTN; PAM sequence: TTT
agaataatactgtaaaaaca

SEQ ID NO: 70678 - DNA, 20 bp, Artificial Sequence
  Description of Artificial Sequence: Synthetic oligonucleotide
  Target: ATXN2; (-) strand; PAM type: YTN; PAM sequence: TTG
tttagaataatactgtaaaa

SEQ ID NO: 70679 - DNA, 20 bp, Artificial Sequence
  Description of Artificial Sequence: Synthetic oligonucleotide
  Target: ATXN2; (-) strand; PAM type: YTN; PAM sequence: TTT
gtttagaataatactgtaaa

SEQ ID NO: 70680 - DNA, 20 bp, Artificial Sequence
  Description of Artificial Sequence: Synthetic oligonucleotide
  Target: ATXN2; (-) strand; PAM type: YTN; PAM sequence: TTA
gaaatttgtttagaataata

SEQ ID NO: 70681 - DNA, 20 bp, Artificial Sequence
  Description of Artificial Sequence: Synthetic oligonucleotide
  Target: ATXN2; (-) strand; PAM type: YTN; PAM sequence: TTT
agaaatttgtttagaataat

SEQ ID NO: 70682 - DNA, 20 bp, Artificial Sequence
  Description of Artificial Sequence: Synthetic oligonucleotide
  Target: ATXN2; (-) strand; PAM type: YTN; PAM sequence: TTT
tagaaatttgtttagaataa

SEQ ID NO: 70683 - DNA, 20 bp, Artificial Sequence
  Description of Artificial Sequence: Synthetic oligonucleotide
  Target: ATXN2; (-) strand; PAM type: YTN; PAM sequence: CTT
ttagaaatttgtttagaata

SEQ ID NO: 70684 - DNA, 20 bp, Artificial Sequence
  Description of Artificial Sequence: Synthetic oligonucleotide
  Target: ATXN2; (-) strand; PAM type: YTN; PAM sequence: TTG
gggatccttttagaaatttg

SEQ ID NO: 70685 - DNA, 20 bp, Artificial Sequence
  Description of Artificial Sequence: Synthetic oligonucleotide
  Target: ATXN2; (-) strand; PAM type: YTN; PAM sequence: CTT
ggggatccttttagaaattt

SEQ ID NO: 70686 - DNA, 20 bp, Artificial Sequence
  Description of Artificial Sequence: Synthetic oligonucleotide
  Target: ATXN2; (-) strand; PAM type: YTN; PAM sequence: TTA
cttggggatccttttagaaa

SEQ ID NO: 70687 - DNA, 20 bp, Artificial Sequence
  Description of Artificial Sequence: Synthetic oligonucleotide
  Target: ATXN2; (-) strand; PAM type: YTN; PAM sequence: CTT
acttggggatccttttagaa

SEQ ID NO: 70688 - DNA, 20 bp, Artificial Sequence
  Description of Artificial Sequence: Synthetic oligonucleotide
  Target: ATXN2; (-) strand; PAM type: YTN; PAM sequence: CTC
ttacttggggatccttttag

SEQ ID NO: 70689 - DNA, 20 bp, Artificial Sequence
  Description of Artificial Sequence: Synthetic oligonucleotide
  Target: ATXN2; (-) strand; PAM type: YTN; PAM sequence: CTG
gctcttacttggggatcctt

SEQ ID NO: 70690 - DNA, 20 bp, Artificial Sequence
  Description of Artificial Sequence: Synthetic oligonucleotide
  Target: ATXN2; (-) strand; PAM type: YTN; PAM sequence: TTC
cacactggctcttacttggg

SEQ ID NO: 70691 - DNA, 20 bp, Artificial Sequence
  Description of Artificial Sequence: Synthetic oligonucleotide
  Target: ATXN2; (-) strand; PAM type: YTN; PAM sequence: TTT
ccacactggctcttacttgg

SEQ ID NO: 70692 - DNA, 20 bp, Artificial Sequence
  Description of Artificial Sequence: Synthetic oligonucleotide
  Target: ATXN2; (-) strand; PAM type: YTN; PAM sequence: TTT
tccacactggctcttacttg

SEQ ID NO: 70693 - DNA, 20 bp, Artificial Sequence
  Description of Artificial Sequence: Synthetic oligonucleotide
  Target: ATXN2; (-) strand; PAM type: YTN; PAM sequence: CTT
ttccacactggctcttactt

SEQ ID NO: 70694 - DNA, 20 bp, Artificial Sequence
  Description of Artificial Sequence: Synthetic oligonucleotide
  Target: ATXN2; (-) strand; PAM type: YTN; PAM sequence: TTG
cttttccacactggctctta

SEQ ID NO: 70695 - DNA, 20 bp, Artificial Sequence
  Description of Artificial Sequence: Synthetic oligonucleotide
  Target: ATXN2; (-) strand; PAM type: YTN; PAM sequence: CTT
gcttttccacactggctctt

SEQ ID NO: 70696 - DNA, 20 bp, Artificial Sequence
  Description of Artificial Sequence: Synthetic oligonucleotide
  Target: ATXN2; (-) strand; PAM type: YTN; PAM sequence: TTG
cttgcttttccacactggct

SEQ ID NO: 70697 - DNA, 20 bp, Artificial Sequence
  Description of Artificial Sequence: Synthetic oligonucleotide
  Target: ATXN2; (-) strand; PAM type: YTN; PAM sequence: CTT
gcttgcttttccacactggc

SEQ ID NO: 70698 - DNA, 20 bp, Artificial Sequence
  Description of Artificial Sequence: Synthetic oligonucleotide
  Target: ATXN2; (-) strand; PAM type: YTN; PAM sequence: TTA
gacgcttgcttgcttttcca

SEQ ID NO: 70699 - DNA, 20 bp, Artificial Sequence
  Description of Artificial Sequence: Synthetic oligonucleotide
  Target: ATXN2; (-) strand; PAM type: YTN; PAM sequence: TTT
agacgcttgcttgcttttcc

SEQ ID NO: 70700 - DNA, 20 bp, Artificial Sequence
  Description of Artificial Sequence: Synthetic oligonucleotide
  Target: ATXN2; (-) strand; PAM type: YTN; PAM sequence: TTT
tagacgcttgcttgcttttc

SEQ ID NO: 70701 - DNA, 20 bp, Artificial Sequence
  Description of Artificial Sequence: Synthetic oligonucleotide
  Target: ATXN2; (-) strand; PAM type: YTN; PAM sequence: CTA
aagttttagacgcttgcttg

SEQ ID NO: 70702 - DNA, 20 bp, Artificial Sequence
  Description of Artificial Sequence: Synthetic oligonucleotide
  Target: ATXN2; (-) strand; PAM type: YTN; PAM sequence: CTG
ggtcctaaagttttagacgc

SEQ ID NO: 70703 - DNA, 20 bp, Artificial Sequence
  Description of Artificial Sequence: Synthetic oligonucleotide
  Target: ATXN2; (-) strand; PAM type: YTN; PAM sequence: CTG
gtcagtggaataaagcctgg

SEQ ID NO: 70704 - DNA, 20 bp, Artificial Sequence
  Description of Artificial Sequence: Synthetic oligonucleotide
  Target: ATXN2; (-) strand; PAM type: YTN; PAM sequence: TTC
tggtcagtggaataaagcct

SEQ ID NO: 70705 - DNA, 20 bp, Artificial Sequence
  Description of Artificial Sequence: Synthetic oligonucleotide
  Target: ATXN2; (-) strand; PAM type: YTN; PAM sequence: CTA
aattctggtcagtggaataa

SEQ ID NO: 70706 - DNA, 20 bp, Artificial Sequence
  Description of Artificial Sequence: Synthetic oligonucleotide
  Target: ATXN2; (-) strand; PAM type: YTN; PAM sequence: TTA
acacaacctaaattctggtc

SEQ ID NO: 70707 - DNA, 20 bp, Artificial Sequence
  Description of Artificial Sequence: Synthetic oligonucleotide
  Target: ATXN2; (-) strand; PAM type: YTN; PAM sequence: CTT
aacacaacctaaattctggt

SEQ ID NO: 70708 - DNA, 20 bp, Artificial Sequence
  Description of Artificial Sequence: Synthetic oligonucleotide
  Target: ATXN2; (-) strand; PAM type: YTN; PAM sequence: CTC
ttaacacaacctaaattctg

SEQ ID NO: 70709 - DNA, 20 bp, Artificial Sequence
  Description of Artificial Sequence: Synthetic oligonucleotide
  Target: ATXN2; (-) strand; PAM type: YTN; PAM sequence: TTA
ataatgccctcttaacacaa

SEQ ID NO: 70710 - DNA, 20 bp, Artificial Sequence
  Description of Artificial Sequence: Synthetic oligonucleotide
  Target: ATXN2; (-) strand; PAM type: YTN; PAM sequence: TTA
ttaataatgccctcttaaca

SEQ ID NO: 70711 - DNA, 20 bp, Artificial Sequence
  Description of Artificial Sequence: Synthetic oligonucleotide
  Target: ATXN2; (-) strand; PAM type: YTN; PAM sequence: TTT
attaataatgccctcttaac

SEQ ID NO: 70712 - DNA, 20 bp, Artificial Sequence
  Description of Artificial Sequence: Synthetic oligonucleotide
  Target: ATXN2; (-) strand; PAM type: YTN; PAM sequence: TTG
agaaaaatagatttattaat

SEQ ID NO: 70713 - DNA, 20 bp, Artificial Sequence
  Description of Artificial Sequence: Synthetic oligonucleotide
  Target: ATXN2; (-) strand; PAM type: YTN; PAM sequence: TTA
aaatgtagcattgagaaaaa

SEQ ID NO: 70714 - DNA, 20 bp, Artificial Sequence
  Description of Artificial Sequence: Synthetic oligonucleotide
  Target: ATXN2; (-) strand; PAM type: YTN; PAM sequence: TTA
agattaaaatgtagcattga

SEQ ID NO: 70715 - DNA, 20 bp, Artificial Sequence
  Description of Artificial Sequence: Synthetic oligonucleotide
  Target: ATXN2; (-) strand; PAM type: YTN; PAM sequence: TTT
aagattaaaatgtagcattg

SEQ ID NO: 70716 - DNA, 20 bp, Artificial Sequence
  Description of Artificial Sequence: Synthetic oligonucleotide
  Target: ATXN2; (-) strand; PAM type: YTN; PAM sequence: TTG
taaacagaagatttaagatt

SEQ ID NO: 70717 - DNA, 20 bp, Artificial Sequence
  Description of Artificial Sequence: Synthetic oligonucleotide
  Target: ATXN2; (-) strand; PAM type: YTN; PAM sequence: TTG
gtattgtaaacagaagattt

SEQ ID NO: 70718 - DNA, 20 bp, Artificial Sequence
  Description of Artificial Sequence: Synthetic oligonucleotide
  Target: ATXN2; (-) strand; PAM type: YTN; PAM sequence: TTT
ggtattgtaaacagaagatt

SEQ ID NO: 70719 - DNA, 20 bp, Artificial Sequence
  Description of Artificial Sequence: Synthetic oligonucleotide
  Target: ATXN2; (-) strand; PAM type: YTN; PAM sequence: TTA
aaaaaagtttggtattgtaa

SEQ ID NO: 70720 - DNA, 20 bp, Artificial Sequence
  Description of Artificial Sequence: Synthetic oligonucleotide
  Target: ATXN2; (-) strand; PAM type: YTN; PAM sequence: TTT
aaaaaaagtttggtattgta

SEQ ID NO: 70721 - DNA, 20 bp, Artificial Sequence
  Description of Artificial Sequence: Synthetic oligonucleotide
  Target: ATXN2; (-) strand; PAM type: YTN; PAM sequence: TTT
taaaaaaagtttggtattgt

SEQ ID NO: 70722 - DNA, 20 bp, Artificial Sequence
  Description of Artificial Sequence: Synthetic oligonucleotide
  Target: ATXN2; (-) strand; PAM type: YTN; PAM sequence: TTT
ttaaaaaaagtttggtattg

SEQ ID NO: 70723 - DNA, 20 bp, Artificial Sequence
  Description of Artificial Sequence: Synthetic oligonucleotide
  Target: ATXN2; (-) strand; PAM type: YTN; PAM sequence: TTT
tttaaaaaaagtttggtatt

SEQ ID NO: 70724 - DNA, 20 bp, Artificial Sequence
  Description of Artificial Sequence: Synthetic oligonucleotide
  Target: ATXN2; (-) strand; PAM type: YTN; PAM sequence: TTT
ttttaaaaaaagtttggtat

SEQ ID NO: 70725 - DNA, 20 bp, Artificial Sequence
  Description of Artificial Sequence: Synthetic oligonucleotide
  Target: ATXN2; (-) strand; PAM type: YTN; PAM sequence: TTT
tttttaaaaaaagtttggta

SEQ ID NO: 70726 - DNA, 20 bp, Artificial Sequence
  Description of Artificial Sequence: Synthetic oligonucleotide
  Target: ATXN2; (-) strand; PAM type: YTN; PAM sequence: CTT
ttttttaaaaaaagtttggt

SEQ ID NO: 70727 - DNA, 20 bp, Artificial Sequence
  Description of Artificial Sequence: Synthetic oligonucleotide
  Target: ATXN2; (-) strand; PAM type: YTN; PAM sequence: CTG
tgaatacttttttttaaaaa

SEQ ID NO: 70728 - DNA, 20 bp, Artificial Sequence
  Description of Artificial Sequence: Synthetic oligonucleotide
  Target: ATXN2; (-) strand; PAM type: YTN; PAM sequence: CTA
cataacctgtgaatactttt

SEQ ID NO: 70729 - DNA, 20 bp, Artificial Sequence
  Description of Artificial Sequence: Synthetic oligonucleotide
  Target: ATXN2; (-) strand; PAM type: YTN; PAM sequence: CTG
ctacataacctgtgaatact

SEQ ID NO: 70730 - DNA, 20 bp, Artificial Sequence
  Description of Artificial Sequence: Synthetic oligonucleotide
  Target: ATXN2; (-) strand; PAM type: YTN; PAM sequence: CTC
gaaagcgacagactgctaca

SEQ ID NO: 70731 - DNA, 20 bp, Artificial Sequence
  Description of Artificial Sequence: Synthetic oligonucleotide
  Target: ATXN2; (-) strand; PAM type: YTN; PAM sequence: CTG
tctcgaaagcgacagactgc

SEQ ID NO: 70732 - DNA, 20 bp, Artificial Sequence
  Description of Artificial Sequence: Synthetic oligonucleotide
  Target: ATXN2; (-) strand; PAM type: YTN; PAM sequence: TTC
tgtctcgaaagcgacagact

SEQ ID NO: 70733 - DNA, 20 bp, Artificial Sequence
  Description of Artificial Sequence: Synthetic oligonucleotide
  Target: ATXN2; (-) strand; PAM type: YTN; PAM sequence: TTT
ctgtctcgaaagcgacagac

SEQ ID NO: 70734 - DNA, 20 bp, Artificial Sequence
  Description of Artificial Sequence: Synthetic oligonucleotide
  Target: ATXN2; (-) strand; PAM type: YTN; PAM sequence: TTC
cccatttctgtctcgaaagc

SEQ ID NO: 70735 - DNA, 20 bp, Artificial Sequence
  Description of Artificial Sequence: Synthetic oligonucleotide
  Target: ATXN2; (-) strand; PAM type: YTN; PAM sequence: CTT
ccccatttctgtctcgaaag

SEQ ID NO: 70736 - DNA, 20 bp, Artificial Sequence
  Description of Artificial Sequence: Synthetic oligonucleotide
  Target: ATXN2; (-) strand; PAM type: YTN; PAM sequence: TTC
cccttccccatttctgtctc

SEQ ID NO: 70737 - DNA, 20 bp, Artificial Sequence
  Description of Artificial Sequence: Synthetic oligonucleotide
  Target: ATXN2; (-) strand; PAM type: YTN; PAM sequence: TTT
ccccttccccatttctgtct

SEQ ID NO: 70738 - DNA, 20 bp, Artificial Sequence
  Description of Artificial Sequence: Synthetic oligonucleotide
  Target: ATXN2; (-) strand; PAM type: YTN; PAM sequence: TTT
tccccttccccatttctgtc

SEQ ID NO: 70739 - DNA, 20 bp, Artificial Sequence
  Description of Artificial Sequence: Synthetic oligonucleotide
  Target: ATXN2; (-) strand; PAM type: YTN; PAM sequence: CTG
tgttttccccttccccattt

SEQ ID NO: 70740 - DNA, 20 bp, Artificial Sequence
  Description of Artificial Sequence: Synthetic oligonucleotide
  Target: ATXN2; (-) strand; PAM type: YTN; PAM sequence: TTC
tgtgttttccccttccccat

SEQ ID NO: 70741 - DNA, 20 bp, Artificial Sequence
  Description of Artificial Sequence: Synthetic oligonucleotide
  Target: ATXN2; (-) strand; PAM type: YTN; PAM sequence: CTT
ctgtgttttccccttcccca

SEQ ID NO: 70742 - DNA, 20 bp, Artificial Sequence
  Description of Artificial Sequence: Synthetic oligonucleotide
  Target: ATXN2; (-) strand; PAM type: YTN; PAM sequence: TTA
tagaatcacacttctgtgtt

SEQ ID NO: 70743 - DNA, 20 bp, Artificial Sequence
  Description of Artificial Sequence: Synthetic oligonucleotide
  Target: ATXN2; (-) strand; PAM type: YTN; PAM sequence: TTT
atagaatcacacttctgtgt

SEQ ID NO: 70744 - DNA, 20 bp, Artificial Sequence
  Description of Artificial Sequence: Synthetic oligonucleotide
  Target: ATXN2; (-) strand; PAM type: YTN; PAM sequence: CTT
tatagaatcacacttctgtg

SEQ ID NO: 70745 - DNA, 20 bp, Artificial Sequence
  Description of Artificial Sequence: Synthetic oligonucleotide
  Target: ATXN2; (-) strand; PAM type: YTN; PAM sequence: TTC
tttatagaatcacacttctg

SEQ ID NO: 70746 - DNA, 20 bp, Artificial Sequence
  Description of Artificial Sequence: Synthetic oligonucleotide
  Target: ATXN2; (-) strand; PAM type: YTN; PAM sequence: TTA
aaaccaaggaatatcattct

SEQ ID NO: 70747 - DNA, 20 bp, Artificial Sequence
  Description of Artificial Sequence: Synthetic oligonucleotide
  Target: ATXN2; (-) strand; PAM type: YTN; PAM sequence: TTT
aaaaccaaggaatatcattc

SEQ ID NO: 70748 - DNA, 20 bp, Artificial Sequence
  Description of Artificial Sequence: Synthetic oligonucleotide
  Target: ATXN2; (-) strand; PAM type: YTN; PAM sequence: TTT
taaaaccaaggaatatcatt

SEQ ID NO: 70749 - DNA, 20 bp, Artificial Sequence
  Description of Artificial Sequence: Synthetic oligonucleotide
  Target: ATXN2; (-) strand; PAM type: YTN; PAM sequence: TTG
gtgaaattttaaaaccaagg

SEQ ID NO: 70750 - DNA, 20 bp, Artificial Sequence
  Description of Artificial Sequence: Synthetic oligonucleotide
  Target: ATXN2; (-) strand; PAM type: YTN; PAM sequence: TTT
ggtgaaattttaaaaccaag

SEQ ID NO: 70751 - DNA, 20 bp, Artificial Sequence
  Description of Artificial Sequence: Synthetic oligonucleotide
  Target: ATXN2; (-) strand; PAM type: YTN; PAM sequence: TTT
tggtgaaattttaaaaccaa

SEQ ID NO: 70752 - DNA, 20 bp, Artificial Sequence
  Description of Artificial Sequence: Synthetic oligonucleotide
  Target: ATXN2; (-) strand; PAM type: YTN; PAM sequence: CTT
ttggtgaaattttaaaacca

SEQ ID NO: 70753 - DNA, 20 bp, Artificial Sequence
  Description of Artificial Sequence: Synthetic oligonucleotide
  Target: ATXN2; (-) strand; PAM type: YTN; PAM sequence: CTA
cttttggtgaaattttaaaa

SEQ ID NO: 70754 - DNA, 20 bp, Artificial Sequence
  Description of Artificial Sequence: Synthetic oligonucleotide
  Target: ATXN2; (-) strand; PAM type: YTN; PAM sequence: TTA
gaaagagctacttttggtga

SEQ ID NO: 70755 - DNA, 20 bp, Artificial Sequence
  Description of Artificial Sequence: Synthetic oligonucleotide
  Target: ATXN2; (-) strand; PAM type: YTN; PAM sequence: TTT
agaaagagctacttttggtg

SEQ ID NO: 70756 - DNA, 20 bp, Artificial Sequence
  Description of Artificial Sequence: Synthetic oligonucleotide
  Target: ATXN2; (-) strand; PAM type: YTN; PAM sequence: CTT
tagaaagagctacttttggt

SEQ ID NO: 70757 - DNA, 20 bp, Artificial Sequence
  Description of Artificial Sequence: Synthetic oligonucleotide
  Target: ATXN2; (-) strand; PAM type: YTN; PAM sequence: CTC
atctttagaaagagctactt

SEQ ID NO: 70758 - DNA, 20 bp, Artificial Sequence
  Description of Artificial Sequence: Synthetic oligonucleotide
  Target: ATXN2; (-) strand; PAM type: YTN; PAM sequence: TTA
ctcatctttagaaagagcta

SEQ ID NO: 70759 - DNA, 20 bp, Artificial Sequence
  Description of Artificial Sequence: Synthetic oligonucleotide
  Target: ATXN2; (-) strand; PAM type: YTN; PAM sequence: TTT
actcatctttagaaagagct

SEQ ID NO: 70760 - DNA, 20 bp, Artificial Sequence
  Description of Artificial Sequence: Synthetic oligonucleotide
  Target: ATXN2; (-) strand; PAM type: YTN; PAM sequence: CTT
tactcatctttagaaagagc

SEQ ID NO: 70761 - DNA, 20 bp, Artificial Sequence
  Description of Artificial Sequence: Synthetic oligonucleotide
  Target: ATXN2; (-) strand; PAM type: YTN; PAM sequence: CTA
agtcctttactcatctttag

SEQ ID NO: 70762 - DNA, 20 bp, Artificial Sequence
  Description of Artificial Sequence: Synthetic oligonucleotide
  Target: ATXN2; (-) strand; PAM type: YTN; PAM sequence: TTC
ccctaagtcctttactcatc

SEQ ID NO: 70763 - DNA, 20 bp, Artificial Sequence
  Description of Artificial Sequence: Synthetic oligonucleotide
  Target: ATXN2; (-) strand; PAM type: YTN; PAM sequence: CTT
cccctaagtcctttactcat

SEQ ID NO: 70764 - DNA, 20 bp, Artificial Sequence
  Description of Artificial Sequence: Synthetic oligonucleotide
  Target: ATXN2; (-) strand; PAM type: YTN; PAM sequence: CTG
cacatcttcccctaagtcct

SEQ ID NO: 70765 - DNA, 20 bp, Artificial Sequence
  Description of Artificial Sequence: Synthetic oligonucleotide
  Target: ATXN2; (-) strand; PAM type: YTN; PAM sequence: TTC
tgcacatcttcccctaagtc

SEQ ID NO: 70766 - DNA, 20 bp, Artificial Sequence
  Description of Artificial Sequence: Synthetic oligonucleotide
  Target: ATXN2; (-) strand; PAM type: YTN; PAM sequence: CTT
ctgcacatcttcccctaagt

SEQ ID NO: 70767 - DNA, 20 bp, Artificial Sequence
  Description of Artificial Sequence: Synthetic oligonucleotide
  Target: ATXN2; (-) strand; PAM type: YTN; PAM sequence: CTC
cacttctgcacatcttcccc

SEQ ID NO: 70768 - DNA, 20 bp, Artificial Sequence
  Description of Artificial Sequence: Synthetic oligonucleotide
  Target: ATXN2; (-) strand; PAM type: YTN; PAM sequence: CTC
tccacttctgcacatcttcc

SEQ ID NO: 70769 - DNA, 20 bp, Artificial Sequence
  Description of Artificial Sequence: Synthetic oligonucleotide
  Target: ATXN2; (-) strand; PAM type: YTN; PAM sequence: CTA
actctccacttctgcacatc

SEQ ID NO: 70770 - DNA, 20 bp, Artificial Sequence
  Description of Artificial Sequence: Synthetic oligonucleotide
  Target: ATXN2; (-) strand; PAM type: YTN; PAM sequence: TTC
gtgctaactctccacttctg

SEQ ID NO: 70771 - DNA, 20 bp, Artificial Sequence
  Description of Artificial Sequence: Synthetic oligonucleotide
  Target: ATXN2; (-) strand; PAM type: YTN; PAM sequence: TTT
cgtgctaactctccacttct

SEQ ID NO: 70772 - DNA, 20 bp, Artificial Sequence
  Description of Artificial Sequence: Synthetic oligonucleotide
  Target: ATXN2; (-) strand; PAM type: YTN; PAM sequence: CTC
atttcgtgctaactctccac

SEQ ID NO: 70773 - DNA, 20 bp, Artificial Sequence
  Description of Artificial Sequence: Synthetic oligonucleotide
  Target: ATXN2; (-) strand; PAM type: YTN; PAM sequence: CTG
atgatatagcctcatttcgt

SEQ ID NO: 70774 - DNA, 20 bp, Artificial Sequence
  Description of Artificial Sequence: Synthetic oligonucleotide
  Target: ATXN2; (-) strand; PAM type: YTN; PAM sequence: CTC
agcatcctgatgatatagcc

SEQ ID NO: 70775 - DNA, 20 bp, Artificial Sequence
  Description of Artificial Sequence: Synthetic oligonucleotide
  Target: ATXN2; (-) strand; PAM type: YTN; PAM sequence: TTC
tcagcatcctgatgatatag

SEQ ID NO: 70776 - DNA, 20 bp, Artificial Sequence
  Description of Artificial Sequence: Synthetic oligonucleotide
  Target: ATXN2; (-) strand; PAM type: YTN; PAM sequence: TTT
ctcagcatcctgatgatata

SEQ ID NO: 70777 - DNA, 20 bp, Artificial Sequence
  Description of Artificial Sequence: Synthetic oligonucleotide
  Target: ATXN2; (-) strand; PAM type: YTN; PAM sequence: TTT
tctcagcatcctgatgatat

SEQ ID NO: 70778 - DNA, 20 bp, Artificial Sequence
  Description of Artificial Sequence: Synthetic oligonucleotide
  Target: ATXN2; (-) strand; PAM type: YTN; PAM sequence: TTA
tagccagggattttctcagc

SEQ ID NO: 70779 - DNA, 20 bp, Artificial Sequence
  Description of Artificial Sequence: Synthetic oligonucleotide
  Target: ATXN2; (-) strand; PAM type: YTN; PAM sequence: CTT
atagccagggattttctcag

SEQ ID NO: 70780 - DNA, 20 bp, Artificial Sequence
  Description of Artificial Sequence: Synthetic oligonucleotide
  Target: ATXN2; (-) strand; PAM type: YTN; PAM sequence: TTA
cttatagccagggattttct

SEQ ID NO: 70781 - DNA, 20 bp, Artificial Sequence
  Description of Artificial Sequence: Synthetic oligonucleotide
  Target: ATXN2; (-) strand; PAM type: YTN; PAM sequence: CTG
aaatgcattacttatagcca

SEQ ID NO: 70782 - DNA, 20 bp, Artificial Sequence
  Description of Artificial Sequence: Synthetic oligonucleotide
  Target: ATXN2; (-) strand; PAM type: YTN; PAM sequence: TTG
gcctgaaatgcattacttat

SEQ ID NO: 70783 - DNA, 20 bp, Artificial Sequence
  Description of Artificial Sequence: Synthetic oligonucleotide
  Target: ATXN2; (-) strand; PAM type: YTN; PAM sequence: CTA
atgatgcaatgttggcctga

SEQ ID NO: 70784 - DNA, 20 bp, Artificial Sequence
  Description of Artificial Sequence: Synthetic oligonucleotide
  Target: ATXN2; (-) strand; PAM type: YTN; PAM sequence: CTA
gctaatgatgcaatgttggc

SEQ ID NO: 70785 - DNA, 20 bp, Artificial Sequence
  Description of Artificial Sequence: Synthetic oligonucleotide
  Target: ATXN2; (-) strand; PAM type: YTN; PAM sequence: TTC
tagctaatgatgcaatgttg

SEQ ID NO: 70786 - DNA, 20 bp, Artificial Sequence
  Description of Artificial Sequence: Synthetic oligonucleotide
  Target: ATXN2; (-) strand; PAM type: YTN; PAM sequence: TTT
ctagctaatgatgcaatgtt

SEQ ID NO: 70787 - DNA, 20 bp, Artificial Sequence
  Description of Artificial Sequence: Synthetic oligonucleotide
  Target: ATXN2; (-) strand; PAM type: YTN; PAM sequence: CTT
tctagctaatgatgcaatgt

SEQ ID NO: 70788 - DNA, 20 bp, Artificial Sequence
  Description of Artificial Sequence: Synthetic oligonucleotide
  Target: ATXN2; (-) strand; PAM type: YTN; PAM sequence: TTC
ctttctagctaatgatgcaa

SEQ ID NO: 70789 - DNA, 20 bp, Artificial Sequence
  Description of Artificial Sequence: Synthetic oligonucleotide
  Target: ATXN2; (-) strand; PAM type: YTN; PAM sequence: CTT
cctttctagctaatgatgca

SEQ ID NO: 70790 - DNA, 20 bp, Artificial Sequence
  Description of Artificial Sequence: Synthetic oligonucleotide
  Target: ATXN2; (-) strand; PAM type: YTN; PAM sequence: TTG
cttcctttctagctaatgat

SEQ ID NO: 70791 - DNA, 20 bp, Artificial Sequence
  Description of Artificial Sequence: Synthetic oligonucleotide
  Target: ATXN2; (-) strand; PAM type: YTN; PAM sequence: CTT
gcttcctttctagctaatga

SEQ ID NO: 70792 - DNA, 20 bp, Artificial Sequence
  Description of Artificial Sequence: Synthetic oligonucleotide
  Target: ATXN2; (-) strand; PAM type: YTN; PAM sequence: TTA
atagtgcagaatggataccc

SEQ ID NO: 70793 - DNA, 20 bp, Artificial Sequence
  Description of Artificial Sequence: Synthetic oligonucleotide
  Target: ATXN2; (-) strand; PAM type: YTN; PAM sequence: TTA
ttaatagtgcagaatggata

SEQ ID NO: 70794 - DNA, 20 bp, Artificial Sequence
  Description of Artificial Sequence: Synthetic oligonucleotide
  Target: ATXN2; (-) strand; PAM type: YTN; PAM sequence: TTA
cgatagtggatattattaat

SEQ ID NO: 70795 - DNA, 20 bp, Artificial Sequence
  Description of Artificial Sequence: Synthetic oligonucleotide
  Target: ATXN2; (-) strand; PAM type: YTN; PAM sequence: TTT
acgatagtggatattattaa

SEQ ID NO: 70796 - DNA, 20 bp, Artificial Sequence
  Description of Artificial Sequence: Synthetic oligonucleotide
  Target: ATXN2; (-) strand; PAM type: YTN; PAM sequence: CTG
taaaacaaatcagaatttac

SEQ ID NO: 70797 - DNA, 20 bp, Artificial Sequence
  Description of Artificial Sequence: Synthetic oligonucleotide
  Target: ATXN2; (-) strand; PAM type: YTN; PAM sequence: TTG
taaccactgtaaaacaaatc

SEQ ID NO: 70798 - DNA, 20 bp, Artificial Sequence
  Description of Artificial Sequence: Synthetic oligonucleotide
  Target: ATXN2; (-) strand; PAM type: YTN; PAM sequence: CTT
gtaaccactgtaaaacaaat

SEQ ID NO: 70799 - DNA, 20 bp, Artificial Sequence
  Description of Artificial Sequence: Synthetic oligonucleotide
  Target: ATXN2; (-) strand; PAM type: YTN; PAM sequence: TTA
aagaaacagaaacaaaaatc

SEQ ID NO: 70800 - DNA, 20 bp, Artificial Sequence
  Description of Artificial Sequence: Synthetic oligonucleotide
  Target: ATXN2; (-) strand; PAM type: YTN; PAM sequence: TTT
aaagaaacagaaacaaaaat

SEQ ID NO: 70801 - DNA, 20 bp, Artificial Sequence
  Description of Artificial Sequence: Synthetic oligonucleotide
  Target: ATXN2; (-) strand; PAM type: YTN; PAM sequence: TTT
taaagaaacagaaacaaaaa

SEQ ID NO: 70802 - DNA, 20 bp, Artificial Sequence
  Description of Artificial Sequence: Synthetic oligonucleotide
  Target: ATXN2; (-) strand; PAM type: YTN; PAM sequence: TTT
ttaaagaaacagaaacaaaa

SEQ ID NO: 70803 - DNA, 20 bp, Artificial Sequence
  Description of Artificial Sequence: Synthetic oligonucleotide
  Target: ATXN2; (-) strand; PAM type: YTN; PAM sequence: TTT
tttaaagaaacagaaacaaa

SEQ ID NO: 70804 - DNA, 20 bp, Artificial Sequence
  Description of Artificial Sequence: Synthetic oligonucleotide
  Target: ATXN2; (-) strand; PAM type: YTN; PAM sequence: TTT
ttttaaagaaacagaaacaa

SEQ ID NO: 70805 - DNA, 20 bp, Artificial Sequence
  Description of Artificial Sequence: Synthetic oligonucleotide
  Target: ATXN2; (-) strand; PAM type: YTN; PAM sequence: TTT
tttttaaagaaacagaaaca

SEQ ID NO: 70806 - DNA, 20 bp, Artificial Sequence
  Description of Artificial Sequence: Synthetic oligonucleotide
  Target: ATXN2; (-) strand; PAM type: YTN; PAM sequence: CTG
aaaaaacaaaaacaaaaaca

SEQ ID NO: 70807 - DNA, 20 bp, Artificial Sequence
  Description of Artificial Sequence: Synthetic oligonucleotide
  Target: ATXN2; (-) strand; PAM type: YTN; PAM sequence: CTC
tgaaaaaacaaaaacaaaaa

SEQ ID NO: 70808 - DNA, 20 bp, Artificial Sequence
  Description of Artificial Sequence: Synthetic oligonucleotide
  Target: ATXN2; (-) strand; PAM type: YTN; PAM sequence: CTC
cagcatgagtgacaaagacc

SEQ ID NO: 70809 - DNA, 20 bp, Artificial Sequence
  Description of Artificial Sequence: Synthetic oligonucleotide
  Target: ATXN2; (-) strand; PAM type: YTN; PAM sequence: CTA
cactccagcatgagtgacaa

SEQ ID NO: 70810 - DNA, 20 bp, Artificial Sequence
  Description of Artificial Sequence: Synthetic oligonucleotide
  Target: ATXN2; (-) strand; PAM type: YTN; PAM sequence: TTG
cggcactacactccagcatg

SEQ ID NO: 70811 - DNA, 20 bp, Artificial Sequence
  Description of Artificial Sequence: Synthetic oligonucleotide
  Target: ATXN2; (-) strand; PAM type: YTN; PAM sequence: CTG
cagtgattgcggcactacac

SEQ ID NO: 70812 - DNA, 20 bp, Artificial Sequence
  Description of Artificial Sequence: Synthetic oligonucleotide
  Target: ATXN2; (-) strand; PAM type: YTN; PAM sequence: TTG
agcccagggctgcagtgatt

SEQ ID NO: 70813 - DNA, 20 bp, Artificial Sequence
  Description of Artificial Sequence: Synthetic oligonucleotide
  Target: ATXN2; (-) strand; PAM type: YTN; PAM sequence: CTT
gagcccagggctgcagtgat

SEQ ID NO: 70814 - DNA, 20 bp, Artificial Sequence
  Description of Artificial Sequence: Synthetic oligonucleotide
  Target: ATXN2; (-) strand; PAM type: YTN; PAM sequence: TTG
cttgagcccagggctgcagt

SEQ ID NO: 70815 - DNA, 20 bp, Artificial Sequence
  Description of Artificial Sequence: Synthetic oligonucleotide
  Target: ATXN2; (-) strand; PAM type: YTN; PAM sequence: CTG
aggtgggaggattgcttgag

SEQ ID NO: 70816 - DNA, 20 bp, Artificial Sequence
  Description of Artificial Sequence: Synthetic oligonucleotide
  Target: ATXN2; (-) strand; PAM type: YTN; PAM sequence: TTG
ggaggctgaggtgggaggat

SEQ ID NO: 70817 - DNA, 20 bp, Artificial Sequence
  Description of Artificial Sequence: Synthetic oligonucleotide
  Target: ATXN2; (-) strand; PAM type: YTN; PAM sequence: CTT
gggaggctgaggtgggagga

SEQ ID NO: 70818 - DNA, 20 bp, Artificial Sequence
  Description of Artificial Sequence: Synthetic oligonucleotide
  Target: ATXN2; (-) strand; PAM type: YTN; PAM sequence: CTC
agcgacttgggaggctgagg

SEQ ID NO: 70819 - DNA, 20 bp, Artificial Sequence
  Description of Artificial Sequence: Synthetic oligonucleotide
  Target: ATXN2; (-) strand; PAM type: YTN; PAM sequence: CTG
taatctcagcgacttgggag

SEQ ID NO: 70820 - DNA, 20 bp, Artificial Sequence
  Description of Artificial Sequence: Synthetic oligonucleotide
  Target: ATXN2; (-) strand; PAM type: YTN; PAM sequence: CTC
atgcctgtaatctcagcgac

SEQ ID NO: 70821 - DNA, 20 bp, Artificial Sequence
  Description of Artificial Sequence: Synthetic oligonucleotide
  Target: ATXN2; (-) strand; PAM type: YTN; PAM sequence: CTG
ggcatagtggctcatgcctg

SEQ ID NO: 70822 - DNA, 20 bp, Artificial Sequence
  Description of Artificial Sequence: Synthetic oligonucleotide
  Target: ATXN2; (-) strand; PAM type: YTN; PAM sequence: TTG
ctgggcatagtggctcatgc

SEQ ID NO: 70823 - DNA, 20 bp, Artificial Sequence
  Description of Artificial Sequence: Synthetic oligonucleotide
  Target: ATXN2; (-) strand; PAM type: YTN; PAM sequence: CTT
gctgggcatagtggctcatg

SEQ ID NO: 70824 - DNA, 20 bp, Artificial Sequence
  Description of Artificial Sequence: Synthetic oligonucleotide
  Target: ATXN2; (-) strand; PAM type: YTN; PAM sequence: TTA
aaatccagacttgctgggca

SEQ ID NO: 70825 - DNA, 20 bp, Artificial Sequence
  Description of Artificial Sequence: Synthetic oligonucleotide
  Target: ATXN2; (-) strand; PAM type: YTN; PAM sequence: TTT
aaaatccagacttgctgggc

SEQ ID NO: 70826 - DNA, 20 bp, Artificial Sequence
  Description of Artificial Sequence: Synthetic oligonucleotide
  Target: ATXN2; (-) strand; PAM type: YTN; PAM sequence: TTT
taaaatccagacttgctggg

SEQ ID NO: 70827 - DNA, 20 bp, Artificial Sequence
  Description of Artificial Sequence: Synthetic oligonucleotide
  Target: ATXN2; (-) strand; PAM type: YTN; PAM sequence: TTT
ttaaaatccagacttgctgg

SEQ ID NO: 70828 - DNA, 20 bp, Artificial Sequence
  Description of Artificial Sequence: Synthetic oligonucleotide
  Target: ATXN2; (-) strand; PAM type: YTN; PAM sequence: TTT
tttaaaatccagacttgctg

SEQ ID NO: 70829 - DNA, 20 bp, Artificial Sequence
  Description of Artificial Sequence: Synthetic oligonucleotide
  Target: ATXN2; (-) strand; PAM type: YTN; PAM sequence: TTT
ttttaaaatccagacttgct

SEQ ID NO: 70830 - DNA, 20 bp, Artificial Sequence
  Description of Artificial Sequence: Synthetic oligonucleotide
  Target: ATXN2; (-) strand; PAM type: YTN; PAM sequence: TTT
tttttaaaatccagacttgc

SEQ ID NO: 70831 - DNA, 20 bp, Artificial Sequence
  Description of Artificial Sequence: Synthetic oligonucleotide
  Target: ATXN2; (-) strand; PAM type: YTN; PAM sequence: TTT
ttttttaaaatccagacttg

SEQ ID NO: 70832 - DNA, 20 bp, Artificial Sequence
  Description of Artificial Sequence: Synthetic oligonucleotide
  Target: ATXN2; (-) strand; PAM type: YTN; PAM sequence: TTT
tttttttaaaatccagactt

SEQ ID NO: 70833 - DNA, 20 bp, Artificial Sequence
  Description of Artificial Sequence: Synthetic oligonucleotide
  Target: ATXN2; (-) strand; PAM type: YTN; PAM sequence: TTT
ttttttttaaaatccagact

SEQ ID NO: 70834 - DNA, 20 bp, Artificial Sequence
  Description of Artificial Sequence: Synthetic oligonucleotide
  Target: ATXN2; (-) strand; PAM type: YTN; PAM sequence: TTT
tttttttttaaaatccagac

SEQ ID NO: 70835 - DNA, 20 bp, Artificial Sequence
  Description of Artificial Sequence: Synthetic oligonucleotide
  Target: ATXN2; (-) strand; PAM type: YTN; PAM sequence: CTA
ccaacagtgttttttttttt

SEQ ID NO: 70836 - DNA, 20 bp, Artificial Sequence
  Description of Artificial Sequence: Synthetic oligonucleotide
  Target: ATXN2; (-) strand; PAM type: YTN; PAM sequence: TTA
ctaccaacagtgtttttttt

SEQ ID NO: 70837 - DNA, 20 bp, Artificial Sequence
  Description of Artificial Sequence: Synthetic oligonucleotide
  Target: ATXN2; (-) strand; PAM type: YTN; PAM sequence: TTT
actaccaacagtgttttttt

SEQ ID NO: 70838 - DNA, 20 bp, Artificial Sequence
  Description of Artificial Sequence: Synthetic oligonucleotide
  Target: ATXN2; (-) strand; PAM type: YTN; PAM sequence: CTA
tttactaccaacagtgtttt

SEQ ID NO: 70839 - DNA, 20 bp, Artificial Sequence
  Description of Artificial Sequence: Synthetic oligonucleotide
  Target: ATXN2; (-) strand; PAM type: YTN; PAM sequence: TTG
tactatttactaccaacagt

SEQ ID NO: 70840 - DNA, 20 bp, Artificial Sequence
  Description of Artificial Sequence: Synthetic oligonucleotide
  Target: ATXN2; (-) strand; PAM type: YTN; PAM sequence: TTA
caacattgtactatttacta

SEQ ID NO: 70841 - DNA, 20 bp, Artificial Sequence
  Description of Artificial Sequence: Synthetic oligonucleotide
  Target: ATXN2; (-) strand; PAM type: YTN; PAM sequence: CTG
gttacaacattgtactattt

SEQ ID NO: 70842 - DNA, 20 bp, Artificial Sequence
  Description of Artificial Sequence: Synthetic oligonucleotide
  Target: ATXN2; (-) strand; PAM type: YTN; PAM sequence: TTG
caggaatcctggttacaaca

SEQ ID NO: 70843 - DNA, 20 bp, Artificial Sequence
  Description of Artificial Sequence: Synthetic oligonucleotide
  Target: ATXN2; (-) strand; PAM type: YTN; PAM sequence: TTT
gcaggaatcctggttacaac

SEQ ID NO: 70844 - DNA, 20 bp, Artificial Sequence
  Description of Artificial Sequence: Synthetic oligonucleotide
  Target: ATXN2; (-) strand; PAM type: YTN; PAM sequence: CTT
tgcaggaatcctggttacaa

SEQ ID NO: 70845 - DNA, 20 bp, Artificial Sequence
  Description of Artificial Sequence: Synthetic oligonucleotide
  Target: ATXN2; (-) strand; PAM type: YTN; PAM sequence: CTC
aactttgcaggaatcctggt

SEQ ID NO: 70846 - DNA, 20 bp, Artificial Sequence
  Description of Artificial Sequence: Synthetic oligonucleotide
  Target: ATXN2; (-) strand; PAM type: YTN; PAM sequence: TTC
tcaactttgcaggaatcctg

SEQ ID NO: 70847 - DNA, 20 bp, Artificial Sequence
  Description of Artificial Sequence: Synthetic oligonucleotide
  Target: ATXN2; (-) strand; PAM type: YTN; PAM sequence: TTT
ctcaactttgcaggaatcct

SEQ ID NO: 70848 - DNA, 20 bp, Artificial Sequence
  Description of Artificial Sequence: Synthetic oligonucleotide
  Target: ATXN2; (-) strand; PAM type: YTN; PAM sequence: TTT
tctcaactttgcaggaatcc

SEQ ID NO: 70849 - DNA, 20 bp, Artificial Sequence
  Description of Artificial Sequence: Synthetic oligonucleotide
  Target: ATXN2; (-) strand; PAM type: YTN; PAM sequence: TTT
ttctcaactttgcaggaatc

SEQ ID NO: 70850 - DNA, 20 bp, Artificial Sequence
  Description of Artificial Sequence: Synthetic oligonucleotide
  Target: ATXN2; (-) strand; PAM type: YTN; PAM sequence: TTT
tttctcaactttgcaggaat

SEQ ID NO: 70851 - DNA, 20 bp, Artificial Sequence
  Description of Artificial Sequence: Synthetic oligonucleotide
  Target: ATXN2; (-) strand; PAM type: YTN; PAM sequence: TTT
ttttctcaactttgcaggaa

SEQ ID NO: 70852 - DNA, 20 bp, Artificial Sequence
  Description of Artificial Sequence: Synthetic oligonucleotide
  Target: ATXN2; (-) strand; PAM type: YTN; PAM sequence: TTG
tttttttctcaactttgcag

SEQ ID NO: 70853 - DNA, 20 bp, Artificial Sequence
  Description of Artificial Sequence: Synthetic oligonucleotide
  Target: ATXN2; (-) strand; PAM type: YTN; PAM sequence: TTA
gagccagttgtttttttctc

SEQ ID NO: 70854 - DNA, 20 bp, Artificial Sequence
  Description of Artificial Sequence: Synthetic oligonucleotide
  Target: ATXN2; (-) strand; PAM type: YTN; PAM sequence: CTG
tagattagagccagttgttt

SEQ ID NO: 70855 - DNA, 20 bp, Artificial Sequence
  Description of Artificial Sequence: Synthetic oligonucleotide
  Target: ATXN2; (-) strand; PAM type: YTN; PAM sequence: TTG
cctgtagattagagccagtt

SEQ ID NO: 70856 - DNA, 20 bp, Artificial Sequence
  Description of Artificial Sequence: Synthetic oligonucleotide
  Target: ATXN2; (-) strand; PAM type: YTN; PAM sequence: TTC
ccacagttgcctgtagatta

SEQ ID NO: 70857 - DNA, 20 bp, Artificial Sequence
  Description of Artificial Sequence: Synthetic oligonucleotide
  Target: ATXN2; (-) strand; PAM type: YTN; PAM sequence: CTG
catgcaaattcccacagttg

SEQ ID NO: 70858 - DNA, 20 bp, Artificial Sequence
  Description of Artificial Sequence: Synthetic oligonucleotide
  Target: ATXN2; (-) strand; PAM type: YTN; PAM sequence: TTG
gtaaaatctgcatgcaaatt

SEQ ID NO: 70859 - DNA, 20 bp, Artificial Sequence
  Description of Artificial Sequence: Synthetic oligonucleotide
  Target: ATXN2; (-) strand; PAM type: YTN; PAM sequence: TTA
tggcattggtaaaatctgca

SEQ ID NO: 70860 - DNA, 20 bp, Artificial Sequence
  Description of Artificial Sequence: Synthetic oligonucleotide
  Target: ATXN2; (-) strand; PAM type: YTN; PAM sequence: CTT
atggcattggtaaaatctgc

SEQ ID NO: 70861 - DNA, 20 bp, Artificial Sequence
  Description of Artificial Sequence: Synthetic oligonucleotide
  Target: ATXN2; (-) strand; PAM type: YTN; PAM sequence: TTG
acttatggcattggtaaaat

SEQ ID NO: 70862 - DNA, 20 bp, Artificial Sequence
  Description of Artificial Sequence: Synthetic oligonucleotide
  Target: ATXN2; (-) strand; PAM type: YTN; PAM sequence: TTT
gacttatggcattggtaaaa

SEQ ID NO: 70863 - DNA, 20 bp, Artificial Sequence
  Description of Artificial Sequence: Synthetic oligonucleotide
  Target: ATXN2; (-) strand; PAM type: YTN; PAM sequence: CTT
tgacttatggcattggtaaa

SEQ ID NO: 70864 - DNA, 20 bp, Artificial Sequence
  Description of Artificial Sequence: Synthetic oligonucleotide
  Target: ATXN2; (-) strand; PAM type: YTN; PAM sequence: TTC
tttgacttatggcattggta

SEQ ID NO: 70865 - DNA, 20 bp, Artificial Sequence
  Description of Artificial Sequence: Synthetic oligonucleotide
  Target: ATXN2; (-) strand; PAM type: YTN; PAM sequence: TTA
atattctttgacttatggca

SEQ ID NO: 70866 - DNA, 20 bp, Artificial Sequence
  Description of Artificial Sequence: Synthetic oligonucleotide
  Target: ATXN2; (-) strand; PAM type: YTN; PAM sequence: CTC
accataggggatgatggaaa

SEQ ID NO: 70867 - DNA, 20 bp, Artificial Sequence
  Description of Artificial Sequence: Synthetic oligonucleotide
  Target: ATXN2; (-) strand; PAM type: YTN; PAM sequence: TTC
tcaccataggggatgatgga

SEQ ID NO: 70868 - DNA, 20 bp, Artificial Sequence
  Description of Artificial Sequence: Synthetic oligonucleotide
  Target: ATXN2; (-) strand; PAM type: YTN; PAM sequence: TTT
ctcaccataggggatgatgg

SEQ ID NO: 70869 - DNA, 20 bp, Artificial Sequence
  Description of Artificial Sequence: Synthetic oligonucleotide
  Target: ATXN2; (-) strand; PAM type: YTN; PAM sequence: TTG
tttctcaccataggggatga

SEQ ID NO: 70870 - DNA, 20 bp, Artificial Sequence
  Description of Artificial Sequence: Synthetic oligonucleotide
  Target: ATXN2; (-) strand; PAM type: YTN; PAM sequence: TTT
gtttctcaccataggggatg

SEQ ID NO: 70871 - DNA, 20 bp, Artificial Sequence
  Description of Artificial Sequence: Synthetic oligonucleotide
  Target: ATXN2; (-) strand; PAM type: YTN; PAM sequence: TTT
tgtttctcaccataggggat

SEQ ID NO: 70872 - DNA, 20 bp, Artificial Sequence
  Description of Artificial Sequence: Synthetic oligonucleotide
  Target: ATXN2; (-) strand; PAM type: YTN; PAM sequence: CTT
ttgtttctcaccatagggga

SEQ ID NO: 70873 - DNA, 20 bp, Artificial Sequence
  Description of Artificial Sequence: Synthetic oligonucleotide
  Target: ATXN2; (-) strand; PAM type: YTN; PAM sequence: TTA
caatgcttttgtttctcacc

SEQ ID NO: 70874 - DNA, 20 bp, Artificial Sequence
  Description of Artificial Sequence: Synthetic oligonucleotide
  Target: ATXN2; (-) strand; PAM type: YTN; PAM sequence: TTG
ttacaatgcttttgtttctc

SEQ ID NO: 70875 - DNA, 20 bp, Artificial Sequence
  Description of Artificial Sequence: Synthetic oligonucleotide
  Target: ATXN2; (-) strand; PAM type: YTN; PAM sequence: TTG
ttgttacaatgcttttgttt

SEQ ID NO: 70876 - DNA, 20 bp, Artificial Sequence
  Description of Artificial Sequence: Synthetic oligonucleotide
  Target: ATXN2; (-) strand; PAM type: YTN; PAM sequence: CTT
gttgttacaatgcttttgtt

SEQ ID NO: 70877 - DNA, 20 bp, Artificial Sequence
  Description of Artificial Sequence: Synthetic oligonucleotide
  Target: ATXN2; (-) strand; PAM type: YTN; PAM sequence: TTG
catcttgttgttacaatgct

SEQ ID NO: 70878 - DNA, 20 bp, Artificial Sequence
  Description of Artificial Sequence: Synthetic oligonucleotide
  Target: ATXN2; (-) strand; PAM type: YTN; PAM sequence: CTT
gcatcttgttgttacaatgc

SEQ ID NO: 70879 - DNA, 20 bp, Artificial Sequence
  Description of Artificial Sequence: Synthetic oligonucleotide
  Target: ATXN2; (-) strand; PAM type: YTN; PAM sequence: TTC
ttgcatcttgttgttacaat

SEQ ID NO: 70880 - DNA, 20 bp, Artificial Sequence
  Description of Artificial Sequence: Synthetic oligonucleotide
  Target: ATXN2; (-) strand; PAM type: YTN; PAM sequence: TTG
tattcttgcatcttgttgtt

SEQ ID NO: 70881 - DNA, 20 bp, Artificial Sequence
  Description of Artificial Sequence: Synthetic oligonucleotide
  Target: ATXN2; (-) strand; PAM type: YTN; PAM sequence: CTA
atagtcacgttgtattcttg

SEQ ID NO: 70882 - DNA, 20 bp, Artificial Sequence
  Description of Artificial Sequence: Synthetic oligonucleotide
  Target: ATXN2; (-) strand; PAM type: YTN; PAM sequence: TTC
taatagtcacgttgtattct

SEQ ID NO: 70883 - DNA, 20 bp, Artificial Sequence
  Description of Artificial Sequence: Synthetic oligonucleotide
  Target: ATXN2; (-) strand; PAM type: YTN; PAM sequence: TTT
ctaatagtcacgttgtattc

SEQ ID NO: 70884 - DNA, 20 bp, Artificial Sequence
  Description of Artificial Sequence: Synthetic oligonucleotide
  Target: ATXN2; (-) strand; PAM type: YTN; PAM sequence: TTT
tctaatagtcacgttgtatt

SEQ ID NO: 70885 - DNA, 20 bp, Artificial Sequence
  Description of Artificial Sequence: Synthetic oligonucleotide
  Target: ATXN2; (-) strand; PAM type: YTN; PAM sequence: CTT
ttctaatagtcacgttgtat

SEQ ID NO: 70886 - DNA, 20 bp, Artificial Sequence
  Description of Artificial Sequence: Synthetic oligonucleotide
  Target: ATXN2; (-) strand; PAM type: YTN; PAM sequence: TTC
agaaacaggtaacacttttc

SEQ ID NO: 70887 - DNA, 20 bp, Artificial Sequence
  Description of Artificial Sequence: Synthetic oligonucleotide
  Target: ATXN2; (-) strand; PAM type: YTN; PAM sequence: CTT
cagaaacaggtaacactttt

SEQ ID NO: 70888 - DNA, 20 bp, Artificial Sequence
  Description of Artificial Sequence: Synthetic oligonucleotide
  Target: ATXN2; (-) strand; PAM type: YTN; PAM sequence: TTC
cttcagaaacaggtaacact

SEQ ID NO: 70889 - DNA, 20 bp, Artificial Sequence
  Description of Artificial Sequence: Synthetic oligonucleotide
  Target: ATXN2; (-) strand; PAM type: YTN; PAM sequence: CTG
tagttccttcagaaacaggt

SEQ ID NO: 70890 - DNA, 20 bp, Artificial Sequence
  Description of Artificial Sequence: Synthetic oligonucleotide
  Target: ATXN2; (-) strand; PAM type: YTN; PAM sequence: CTA
tacctgtagttccttcagaa

SEQ ID NO: 70891 - DNA, 20 bp, Artificial Sequence
  Description of Artificial Sequence: Synthetic oligonucleotide
  Target: ATXN2; (-) strand; PAM type: YTN; PAM sequence: CTC
tatacctgtagttccttcag

SEQ ID NO: 70892 - DNA, 20 bp, Artificial Sequence
  Description of Artificial Sequence: Synthetic oligonucleotide
  Target: ATXN2; (-) strand; PAM type: YTN; PAM sequence: CTC
tctatacctgtagttccttc

SEQ ID NO: 70893 - DNA, 20 bp, Artificial Sequence
  Description of Artificial Sequence: Synthetic oligonucleotide
  Target: ATXN2; (-) strand; PAM type: YTN; PAM sequence: TTC
tctctatacctgtagttcct

SEQ ID NO: 70894 - DNA, 20 bp, Artificial Sequence
  Description of Artificial Sequence: Synthetic oligonucleotide
  Target: ATXN2; (-) strand; PAM type: YTN; PAM sequence: TTT
ctctctatacctgtagttcc

SEQ ID NO: 70895 - DNA, 20 bp, Artificial Sequence
  Description of Artificial Sequence: Synthetic oligonucleotide
  Target: ATXN2; (-) strand; PAM type: YTN; PAM sequence: TTT
tctctctatacctgtagttc

SEQ ID NO: 70896 - DNA, 20 bp, Artificial Sequence
  Description of Artificial Sequence: Synthetic oligonucleotide
  Target: ATXN2; (-) strand; PAM type: YTN; PAM sequence: TTT
ttctctctatacctgtagtt

SEQ ID NO: 70897 - DNA, 20 bp, Artificial Sequence
  Description of Artificial Sequence: Synthetic oligonucleotide
  Target: ATXN2; (-) strand; PAM type: YTN; PAM sequence: TTT
tttctctctatacctgtagt

SEQ ID NO: 70898 - DNA, 20 bp, Artificial Sequence
  Description of Artificial Sequence: Synthetic oligonucleotide
  Target: ATXN2; (-) strand; PAM type: YTN; PAM sequence: CTT
ttttctctctatacctgtag

SEQ ID NO: 70899 - DNA, 20 bp, Artificial Sequence
  Description of Artificial Sequence: Synthetic oligonucleotide
  Target: ATXN2; (-) strand; PAM type: YTN; PAM sequence: TTC
cttttttctctctatacctg

SEQ ID NO: 70900 - DNA, 20 bp, Artificial Sequence
  Description of Artificial Sequence: Synthetic oligonucleotide
  Target: ATXN2; (-) strand; PAM type: YTN; PAM sequence: TTT
ccttttttctctctatacct

SEQ ID NO: 70901 - DNA, 20 bp, Artificial Sequence
  Description of Artificial Sequence: Synthetic oligonucleotide
  Target: ATXN2; (-) strand; PAM type: YTN; PAM sequence: TTT
tccttttttctctctatacc

SEQ ID NO: 70902 - DNA, 20 bp, Artificial Sequence
  Description of Artificial Sequence: Synthetic oligonucleotide
  Target: ATXN2; (-) strand; PAM type: YTN; PAM sequence: TTT
ttccttttttctctctatac

SEQ ID NO: 70903 - DNA, 20 bp, Artificial Sequence
  Description of Artificial Sequence: Synthetic oligonucleotide
  Target: ATXN2; (-) strand; PAM type: YTN; PAM sequence: TTA
tgtttttccttttttctctc

SEQ ID NO: 70904 - DNA, 20 bp, Artificial Sequence
  Description of Artificial Sequence: Synthetic oligonucleotide
  Target: ATXN2; (-) strand; PAM type: YTN; PAM sequence: TTT
atgtttttccttttttctct

SEQ ID NO: 70905 - DNA, 20 bp, Artificial Sequence
  Description of Artificial Sequence: Synthetic oligonucleotide
  Target: ATXN2; (-) strand; PAM type: YTN; PAM sequence: TTT
tatgtttttccttttttctc

SEQ ID NO: 70906 - DNA, 20 bp, Artificial Sequence
  Description of Artificial Sequence: Synthetic oligonucleotide
  Target: ATXN2; (-) strand; PAM type: YTN; PAM sequence: TTT
ttatgtttttccttttttct

SEQ ID NO: 70907 - DNA, 20 bp, Artificial Sequence
  Description of Artificial Sequence: Synthetic oligonucleotide
  Target: ATXN2; (-) strand; PAM type: YTN; PAM sequence: CTG
atggtttttatgtttttcct

SEQ ID NO: 70908 - DNA, 20 bp, Artificial Sequence
  Description of Artificial Sequence: Synthetic oligonucleotide
  Target: ATXN2; (-) strand; PAM type: YTN; PAM sequence: CTC
atctgatggtttttatgttt

SEQ ID NO: 70909 - DNA, 20 bp, Artificial Sequence
  Description of Artificial Sequence: Synthetic oligonucleotide
  Target: ATXN2; (-) strand; PAM type: YTN; PAM sequence: TTA
tcatctcatctgatggtttt

SEQ ID NO: 70910 - DNA, 20 bp, Artificial Sequence
  Description of Artificial Sequence: Synthetic oligonucleotide
  Target: ATXN2; (-) strand; PAM type: YTN; PAM sequence: TTT
atcatctcatctgatggttt

SEQ ID NO: 70911 - DNA, 20 bp, Artificial Sequence
  Description of Artificial Sequence: Synthetic oligonucleotide
  Target: ATXN2; (-) strand; PAM type: YTN; PAM sequence: CTT
tatcatctcatctgatggtt

SEQ ID NO: 70912 - DNA, 20 bp, Artificial Sequence
  Description of Artificial Sequence: Synthetic oligonucleotide
  Target: ATXN2; (-) strand; PAM type: YTN; PAM sequence: TTC
tttatcatctcatctgatgg

SEQ ID NO: 70913 - DNA, 20 bp, Artificial Sequence
  Description of Artificial Sequence: Synthetic oligonucleotide
  Target: ATXN2; (-) strand; PAM type: YTN; PAM sequence: CTA
attctttatcatctcatctg

SEQ ID NO: 70914 - DNA, 20 bp, Artificial Sequence
  Description of Artificial Sequence: Synthetic oligonucleotide
  Target: ATXN2; (-) strand; PAM type: YTN; PAM sequence: TTG
aaaaactaattctttatcat

SEQ ID NO: 70915 - DNA, 20 bp, Artificial Sequence
  Description of Artificial Sequence: Synthetic oligonucleotide
  Target: ATXN2; (-) strand; PAM type: YTN; PAM sequence: TTA
taaattgaaaaactaattct

SEQ ID NO: 70916 - DNA, 20 bp, Artificial Sequence
  Description of Artificial Sequence: Synthetic oligonucleotide
  Target: ATXN2; (-) strand; PAM type: YTN; PAM sequence: TTT
ataaattgaaaaactaattc

SEQ ID NO: 70917 - DNA, 20 bp, Artificial Sequence
  Description of Artificial Sequence: Synthetic oligonucleotide
  Target: ATXN2; (-) strand; PAM type: YTN; PAM sequence: TTT
tataaattgaaaaactaatt

SEQ ID NO: 70918 - DNA, 20 bp, Artificial Sequence
  Description of Artificial Sequence: Synthetic oligonucleotide
  Target: ATXN2; (-) strand; PAM type: YTN; PAM sequence: CTT
ttataaattgaaaaactaat

SEQ ID NO: 70919 - DNA, 20 bp, Artificial Sequence
  Description of Artificial Sequence: Synthetic oligonucleotide
  Target: ATXN2; (-) strand; PAM type: YTN; PAM sequence: CTA
gaggcttttataaattgaaa

SEQ ID NO: 70920 - DNA, 20 bp, Artificial Sequence
  Description of Artificial Sequence: Synthetic oligonucleotide
  Target: ATXN2; (-) strand; PAM type: YTN; PAM sequence: CTA
gtctagaggcttttataaat

SEQ ID NO: 70921 - DNA, 20 bp, Artificial Sequence
  Description of Artificial Sequence: Synthetic oligonucleotide
  Target: ATXN2; (-) strand; PAM type: YTN; PAM sequence: CTG
ctagtctagaggcttttata

SEQ ID NO: 70922 - DNA, 20 bp, Artificial Sequence
  Description of Artificial Sequence: Synthetic oligonucleotide
  Target: ATXN2; (-) strand; PAM type: YTN; PAM sequence: CTC
caacatcgcctgctagtcta

SEQ ID NO: 70923 - DNA, 20 bp, Artificial Sequence
  Description of Artificial Sequence: Synthetic oligonucleotide
  Target: ATXN2; (-) strand; PAM type: YTN; PAM sequence: TTC
ctccaacatcgcctgctagt

SEQ ID NO: 70924 - DNA, 20 bp, Artificial Sequence
  Description of Artificial Sequence: Synthetic oligonucleotide
  Target: ATXN2; (-) strand; PAM type: YTN; PAM sequence: CTT
cctccaacatcgcctgctag

SEQ ID NO: 70925 - DNA, 20 bp, Artificial Sequence
  Description of Artificial Sequence: Synthetic oligonucleotide
  Target: ATXN2; (-) strand; PAM type: YTN; PAM sequence: TTC
ttcctccaacatcgcctgct

SEQ ID NO: 70926 - DNA, 20 bp, Artificial Sequence
  Description of Artificial Sequence: Synthetic oligonucleotide
  Target: ATXN2; (-) strand; PAM type: YTN; PAM sequence: TTT
cttcctccaacatcgcctgc

SEQ ID NO: 70927 - DNA, 20 bp, Artificial Sequence
  Description of Artificial Sequence: Synthetic oligonucleotide
  Target: ATXN2; (-) strand; PAM type: YTN; PAM sequence: TTG
tttcttcctccaacatcgcc

SEQ ID NO: 70928 - DNA, 20 bp, Artificial Sequence
  Description of Artificial Sequence: Synthetic oligonucleotide
  Target: ATXN2; (-) strand; PAM type: YTN; PAM sequence: TTT
gtttcttcctccaacatcgc

SEQ ID NO: 70929 - DNA, 20 bp, Artificial Sequence
  Description of Artificial Sequence: Synthetic oligonucleotide
  Target: ATXN2; (-) strand; PAM type: YTN; PAM sequence: TTT
tgtttcttcctccaacatcg

SEQ ID NO: 70930 - DNA, 20 bp, Artificial Sequence
  Description of Artificial Sequence: Synthetic oligonucleotide
  Target: ATXN2; (-) strand; PAM type: YTN; PAM sequence: CTG
gaggtgatacaattttgttt

SEQ ID NO: 70931 - DNA, 20 bp, Artificial Sequence
  Description of Artificial Sequence: Synthetic oligonucleotide
  Target: ATXN2; (-) strand; PAM type: YTN; PAM sequence: CTG
tgggggtagcatggaggtgg

SEQ ID NO: 70932 - DNA, 20 bp, Artificial Sequence
  Description of Artificial Sequence: Synthetic oligonucleotide
  Target: ATXN2; (-) strand; PAM type: YTN; PAM sequence: CTG
ctgtgggggtagcatggagg

SEQ ID NO: 70933 - DNA, 20 bp, Artificial Sequence
  Description of Artificial Sequence: Synthetic oligonucleotide
  Target: ATXN2; (-) strand; PAM type: YTN; PAM sequence: TTG
agagcccactgctgtggggg

SEQ ID NO: 70934 - DNA, 20 bp, Artificial Sequence
  Description of Artificial Sequence: Synthetic oligonucleotide
  Target: ATXN2; (-) strand; PAM type: YTN; PAM sequence: CTG
cccagaatcagaagagaagg

SEQ ID NO: 70935 - DNA, 20 bp, Artificial Sequence
  Description of Artificial Sequence: Synthetic oligonucleotide
  Target: ATXN2; (-) strand; PAM type: YTN; PAM sequence: TTC
tgcccagaatcagaagagaa

SEQ ID NO: 70936 - DNA, 20 bp, Artificial Sequence
  Description of Artificial Sequence: Synthetic oligonucleotide
  Target: ATXN2; (-) strand; PAM type: YTN; PAM sequence: TTT
ctgcccagaatcagaagaga

SEQ ID NO: 70937 - DNA, 20 bp, Artificial Sequence
  Description of Artificial Sequence: Synthetic oligonucleotide
  Target: ATXN2; (-) strand; PAM type: YTN; PAM sequence: CTA
agtttctgcccagaatcaga

SEQ ID NO: 70938 - DNA, 20 bp, Artificial Sequence
  Description of Artificial Sequence: Synthetic oligonucleotide
  Target: ATXN2; (-) strand; PAM type: YTN; PAM sequence: TTA
tgaccaccagcaggtggcat

SEQ ID NO: 70939 - DNA, 20 bp, Artificial Sequence
  Description of Artificial Sequence: Synthetic oligonucleotide
  Target: ATXN2; (-) strand; PAM type: YTN; PAM sequence: TTT
atgaccaccagcaggtggca

SEQ ID NO: 70940 - DNA, 20 bp, Artificial Sequence
  Description of Artificial Sequence: Synthetic oligonucleotide
  Target: ATXN2; (-) strand; PAM type: YTN; PAM sequence: CTT
tatgaccaccagcaggtggc

SEQ ID NO: 70941 - DNA, 20 bp, Artificial Sequence
  Description of Artificial Sequence: Synthetic oligonucleotide
  Target: ATXN2; (-) strand; PAM type: YTN; PAM sequence: TTC
tttatgaccaccagcaggtg

SEQ ID NO: 70942 - DNA, 20 bp, Artificial Sequence
  Description of Artificial Sequence: Synthetic oligonucleotide
  Target: ATXN2; (-) strand; PAM type: YTN; PAM sequence: TTT
ctttatgaccaccagcaggt

SEQ ID NO: 70943 - DNA, 20 bp, Artificial Sequence
  Description of Artificial Sequence: Synthetic oligonucleotide
  Target: ATXN2; (-) strand; PAM type: YTN; PAM sequence: TTG
gtcgagacatttctttatga

SEQ ID NO: 70944 - DNA, 20 bp, Artificial Sequence
  Description of Artificial Sequence: Synthetic oligonucleotide
  Target: ATXN2; (-) strand; PAM type: YTN; PAM sequence: TTC
acacgttggtcgagacattt

SEQ ID NO: 70945 - DNA, 20 bp, Artificial Sequence
  Description of Artificial Sequence: Synthetic oligonucleotide
  Target: ATXN2; (-) strand; PAM type: YTN; PAM sequence: CTG
gggatacccagaagaggttc

SEQ ID NO: 70946 - DNA, 20 bp, Artificial Sequence
  Description of Artificial Sequence: Synthetic oligonucleotide
  Target: ATXN2; (-) strand; PAM type: YTN; PAM sequence: CTG
ggtatggggctggggatacc

SEQ ID NO: 70947 - DNA, 20 bp, Artificial Sequence
  Description of Artificial Sequence: Synthetic oligonucleotide
  Target: ATXN2; (-) strand; PAM type: YTN; PAM sequence: TTC
ctgggtatggggctggggat

SEQ ID NO: 70948 - DNA, 20 bp, Artificial Sequence
  Description of Artificial Sequence: Synthetic oligonucleotide
  Target: ATXN2; (-) strand; PAM type: YTN; PAM sequence: TTT
cctgggtatggggctgggga

SEQ ID NO: 70949 - DNA, 20 bp, Artificial Sequence
  Description of Artificial Sequence: Synthetic oligonucleotide
  Target: ATXN2; (-) strand; PAM type: YTN; PAM sequence: CTG
tttcctgggtatggggctgg

SEQ ID NO: 70950 - DNA, 20 bp, Artificial Sequence
  Description of Artificial Sequence: Synthetic oligonucleotide
  Target: ATXN2; (-) strand; PAM type: YTN; PAM sequence: CTC
tgtttcctgggtatggggct

SEQ ID NO: 70951 - DNA, 20 bp, Artificial Sequence
  Description of Artificial Sequence: Synthetic oligonucleotide
  Target: ATXN2; (-) strand; PAM type: YTN; PAM sequence: CTG
aatatgtactctgtttcctg

SEQ ID NO: 70952 - DNA, 20 bp, Artificial Sequence
  Description of Artificial Sequence: Synthetic oligonucleotide
  Target: ATXN2; (-) strand; PAM type: YTN; PAM sequence: TTG
agaagctgaatatgtactct

SEQ ID NO: 70953 - DNA, 20 bp, Artificial Sequence
  Description of Artificial Sequence: Synthetic oligonucleotide
  Target: ATXN2; (-) strand; PAM type: YTN; PAM sequence: CTC
agaggtaaaagaggaaagat

SEQ ID NO: 70954 - DNA, 20 bp, Artificial Sequence
  Description of Artificial Sequence: Synthetic oligonucleotide
  Target: ATXN2; (-) strand; PAM type: YTN; PAM sequence: TTG
gctcagaggtaaaagaggaa

SEQ ID NO: 70955 - DNA, 20 bp, Artificial Sequence
  Description of Artificial Sequence: Synthetic oligonucleotide
  Target: ATXN2; (-) strand; PAM type: YTN; PAM sequence: TTA
ttggctcagaggtaaaagag

SEQ ID NO: 70956 - DNA, 20 bp, Artificial Sequence
  Description of Artificial Sequence: Synthetic oligonucleotide
  Target: ATXN2; (-) strand; PAM type: YTN; PAM sequence: TTC
agaggcattattggctcaga

SEQ ID NO: 70957 - DNA, 20 bp, Artificial Sequence
  Description of Artificial Sequence: Synthetic oligonucleotide
  Target: ATXN2; (-) strand; PAM type: YTN; PAM sequence: TTT
cagaggcattattggctcag

SEQ ID NO: 70958 - DNA, 20 bp, Artificial Sequence
  Description of Artificial Sequence: Synthetic oligonucleotide
  Target: ATXN2; (-) strand; PAM type: YTN; PAM sequence: TTT
tcagaggcattattggctca

SEQ ID NO: 70959 - DNA, 20 bp, Artificial Sequence
  Description of Artificial Sequence: Synthetic oligonucleotide
  Target: ATXN2; (-) strand; PAM type: YTN; PAM sequence: TTT
ttcagaggcattattggctc

SEQ ID NO: 70960 - DNA, 20 bp, Artificial Sequence
  Description of Artificial Sequence: Synthetic oligonucleotide
  Target: ATXN2; (-) strand; PAM type: YTN; PAM sequence: TTG
aatgatttttcagaggcatt

SEQ ID NO: 70961 - DNA, 20 bp, Artificial Sequence
  Description of Artificial Sequence: Synthetic oligonucleotide
  Target: ATXN2; (-) strand; PAM type: YTN; PAM sequence: TTT
gaatgatttttcagaggcat

SEQ ID NO: 70962 - DNA, 20 bp, Artificial Sequence
  Description of Artificial Sequence: Synthetic oligonucleotide
  Target: ATXN2; (-) strand; PAM type: YTN; PAM sequence: CTC
agacaagtttgaatgatttt

SEQ ID NO: 70963 - DNA, 20 bp, Artificial Sequence
  Description of Artificial Sequence: Synthetic oligonucleotide
  Target: ATXN2; (-) strand; PAM type: YTN; PAM sequence: TTA
aaaaatgctcagacaagttt

SEQ ID NO: 70964 - DNA, 20 bp, Artificial Sequence
  Description of Artificial Sequence: Synthetic oligonucleotide
  Target: ATXN2; (-) strand; PAM type: YTN; PAM sequence: TTT
aaaaaatgctcagacaagtt

SEQ ID NO: 70965 - DNA, 20 bp, Artificial Sequence
  Description of Artificial Sequence: Synthetic oligonucleotide
  Target: ATXN2; (-) strand; PAM type: YTN; PAM sequence: CTT
taaaaaatgctcagacaagt

SEQ ID NO: 70966 - DNA, 20 bp, Artificial Sequence
  Description of Artificial Sequence: Synthetic oligonucleotide
  Target: ATXN2; (-) strand; PAM type: YTN; PAM sequence: CTG
gccctttaaaaaatgctcag

SEQ ID NO: 70967 - DNA, 20 bp, Artificial Sequence
  Description of Artificial Sequence: Synthetic oligonucleotide
  Target: ATXN2; (-) strand; PAM type: YTN; PAM sequence: TTC
tggccctttaaaaaatgctc

SEQ ID NO: 70968 - DNA, 20 bp, Artificial Sequence
  Description of Artificial Sequence: Synthetic oligonucleotide
  Target: ATXN2; (-) strand; PAM type: YTN; PAM sequence: TTA
ttctggccctttaaaaaatg

SEQ ID NO: 70969 - DNA, 20 bp, Artificial Sequence
  Description of Artificial Sequence: Synthetic oligonucleotide
  Target: ATXN2; (-) strand; PAM type: YTN; PAM sequence: TTG
accattattctggcccttta

SEQ ID NO: 70970 - DNA, 20 bp, Artificial Sequence
  Description of Artificial Sequence: Synthetic oligonucleotide
  Target: ATXN2; (-) strand; PAM type: YTN; PAM sequence: TTT
gaccattattctggcccttt

SEQ ID NO: 70971 - DNA, 20 bp, Artificial Sequence
  Description of Artificial Sequence: Synthetic oligonucleotide
  Target: ATXN2; (-) strand; PAM type: YTN; PAM sequence: TTA
tttgaccattattctggccc

SEQ ID NO: 70972 - DNA, 20 bp, Artificial Sequence
  Description of Artificial Sequence: Synthetic oligonucleotide
  Target: ATXN2; (-) strand; PAM type: YTN; PAM sequence: TTA
gttatttgaccattattctg

SEQ ID NO: 70973 - DNA, 20 bp, Artificial Sequence
  Description of Artificial Sequence: Synthetic oligonucleotide
  Target: ATXN2; (-) strand; PAM type: YTN; PAM sequence: TTT
agttatttgaccattattct

SEQ ID NO: 70974 - DNA, 20 bp, Artificial Sequence
  Description of Artificial Sequence: Synthetic oligonucleotide
  Target: ATXN2; (-) strand; PAM type: YTN; PAM sequence: TTT
tagttatttgaccattattc

SEQ ID NO: 70975 - DNA, 20 bp, Artificial Sequence
  Description of Artificial Sequence: Synthetic oligonucleotide
  Target: ATXN2; (-) strand; PAM type: YTN; PAM sequence: CTA
ccattttagttatttgacca

SEQ ID NO: 70976 - DNA, 20 bp, Artificial Sequence
  Description of Artificial Sequence: Synthetic oligonucleotide
  Target: ATXN2; (-) strand; PAM type: YTN; PAM sequence: TTA
acactaccattttagttatt

SEQ ID NO: 70977 - DNA, 20 bp, Artificial Sequence
  Description of Artificial Sequence: Synthetic oligonucleotide
  Target: ATXN2; (-) strand; PAM type: YTN; PAM sequence: TTT
aacactaccattttagttat

SEQ ID NO: 70978 - DNA, 20 bp, Artificial Sequence
  Description of Artificial Sequence: Synthetic oligonucleotide
  Target: ATXN2; (-) strand; PAM type: YTN; PAM sequence: CTA
atgtttaacactaccatttt

SEQ ID NO: 70979 - DNA, 20 bp, Artificial Sequence
  Description of Artificial Sequence: Synthetic oligonucleotide
  Target: ATXN2; (-) strand; PAM type: YTN; PAM sequence: TTC
taatgtttaacactaccatt

SEQ ID NO: 70980 - DNA, 20 bp, Artificial Sequence
  Description of Artificial Sequence: Synthetic oligonucleotide
  Target: ATXN2; (-) strand; PAM type: YTN; PAM sequence: TTT
ctaatgtttaacactaccat

SEQ ID NO: 70981 - DNA, 20 bp, Artificial Sequence
  Description of Artificial Sequence: Synthetic oligonucleotide
  Target: ATXN2; (-) strand; PAM type: YTN; PAM sequence: TTA
tttctaatgtttaacactac

SEQ ID NO: 70982 - DNA, 20 bp, Artificial Sequence
  Description of Artificial Sequence: Synthetic oligonucleotide
  Target: ATXN2; (-) strand; PAM type: YTN; PAM sequence: TTT
atttctaatgtttaacacta

SEQ ID NO: 70983 - DNA, 20 bp, Artificial Sequence
  Description of Artificial Sequence: Synthetic oligonucleotide
  Target: ATXN2; (-) strand; PAM type: YTN; PAM sequence: TTA
agtatatttatttctaatgt

SEQ ID NO: 70984 - DNA, 20 bp, Artificial Sequence
  Description of Artificial Sequence: Synthetic oligonucleotide
  Target: ATXN2; (-) strand; PAM type: YTN; PAM sequence: TTT
aagtatatttatttctaatg

SEQ ID NO: 70985 - DNA, 20 bp, Artificial Sequence
  Description of Artificial Sequence: Synthetic oligonucleotide
  Target: ATXN2; (-) strand; PAM type: YTN; PAM sequence: TTA
tacatttaagtatatttatt

SEQ ID NO: 70986 - DNA, 20 bp, Artificial Sequence
  Description of Artificial Sequence: Synthetic oligonucleotide
  Target: ATXN2; (-) strand; PAM type: YTN; PAM sequence: TTT
atacatttaagtatatttat

SEQ ID NO: 70987 - DNA, 20 bp, Artificial Sequence
  Description of Artificial Sequence: Synthetic oligonucleotide
  Target: ATXN2; (-) strand; PAM type: YTN; PAM sequence: TTT
tatacatttaagtatattta

SEQ ID NO: 70988 - DNA, 20 bp, Artificial Sequence
  Description of Artificial Sequence: Synthetic oligonucleotide
  Target: ATXN2; (-) strand; PAM type: YTN; PAM sequence: TTT
ttatacatttaagtatattt

SEQ ID NO: 70989 - DNA, 20 bp, Artificial Sequence
  Description of Artificial Sequence: Synthetic oligonucleotide
  Target: ATXN2; (-) strand; PAM type: YTN; PAM sequence: TTA
tagtttttatacatttaagt

SEQ ID NO: 70990 - DNA, 20 bp, Artificial Sequence
  Description of Artificial Sequence: Synthetic oligonucleotide
  Target: ATXN2; (-) strand; PAM type: YTN; PAM sequence: TTT
atagtttttatacatttaag

SEQ ID NO: 70991 - DNA, 20 bp, Artificial Sequence
  Description of Artificial Sequence: Synthetic oligonucleotide
  Target: ATXN2; (-) strand; PAM type: YTN; PAM sequence: TTT
tatagtttttatacatttaa

SEQ ID NO: 70992 - DNA, 20 bp, Artificial Sequence
  Description of Artificial Sequence: Synthetic oligonucleotide
  Target: ATXN2; (-) strand; PAM type: YTN; PAM sequence: TTA
tgtcattttatagtttttat

SEQ ID NO: 70993 - DNA, 20 bp, Artificial Sequence
  Description of Artificial Sequence: Synthetic oligonucleotide
  Target: ATXN2; (-) strand; PAM type: YTN; PAM sequence: TTT
atgtcattttatagttttta

SEQ ID NO: 70994 - DNA, 20 bp, Artificial Sequence
  Description of Artificial Sequence: Synthetic oligonucleotide
  Target: ATXN2; (-) strand; PAM type: YTN; PAM sequence: TTT
tatgtcattttatagttttt

SEQ ID NO: 70995 - DNA, 20 bp, Artificial Sequence
  Description of Artificial Sequence: Synthetic oligonucleotide
  Target: ATXN2; (-) strand; PAM type: YTN; PAM sequence: TTC
atccagttttatgtcatttt

SEQ ID NO: 70996 - DNA, 20 bp, Artificial Sequence
  Description of Artificial Sequence: Synthetic oligonucleotide
  Target: ATXN2; (-) strand; PAM type: YTN; PAM sequence: TTT
catccagttttatgtcattt

SEQ ID NO: 70997 - DNA, 20 bp, Artificial Sequence
  Description of Artificial Sequence: Synthetic oligonucleotide
  Target: ATXN2; (-) strand; PAM type: YTN; PAM sequence: TTA
tttcatccagttttatgtca

SEQ ID NO: 70998 - DNA, 20 bp, Artificial Sequence
  Description of Artificial Sequence: Synthetic oligonucleotide
  Target: ATXN2; (-) strand; PAM type: YTN; PAM sequence: TTA
atgattatttcatccagttt

SEQ ID NO: 70999 - DNA, 20 bp, Artificial Sequence
  Description of Artificial Sequence: Synthetic oligonucleotide
  Target: ATXN2; (-) strand; PAM type: YTN; PAM sequence: CTG
atgttaatgattatttcatc

SEQ ID NO: 71000 - DNA, 20 bp, Artificial Sequence
  Description of Artificial Sequence: Synthetic oligonucleotide
  Target: ATXN2; (-) strand; PAM type: YTN; PAM sequence: TTA
aatctgatgttaatgattat

SEQ ID NO: 71001 - DNA, 20 bp, Artificial Sequence
  Description of Artificial Sequence: Synthetic oligonucleotide
  Target: ATXN2; (-) strand; PAM type: YTN; PAM sequence: TTG
tgatgttaaatctgatgtta

SEQ ID NO: 71002 - DNA, 20 bp, Artificial Sequence
  Description of Artificial Sequence: Synthetic oligonucleotide
  Target: ATXN2; (-) strand; PAM type: YTN; PAM sequence: TTT
gtgatgttaaatctgatgtt

SEQ ID NO: 71003 - DNA, 20 bp, Artificial Sequence
  Description of Artificial Sequence: Synthetic oligonucleotide
  Target: ATXN2; (-) strand; PAM type: YTN; PAM sequence: TTG
agggtttgtgatgttaaatc

SEQ ID NO: 71004 - DNA, 20 bp, Artificial Sequence
  Description of Artificial Sequence: Synthetic oligonucleotide
  Target: ATXN2; (-) strand; PAM type: YTN; PAM sequence: TTT
gagggtttgtgatgttaaat

SEQ ID NO: 71005 - DNA, 20 bp, Artificial Sequence
  Description of Artificial Sequence: Synthetic oligonucleotide
  Target: ATXN2; (-) strand; PAM type: YTN; PAM sequence: CTG
gaagcacatttgagggtttg

SEQ ID NO: 71006 - DNA, 20 bp, Artificial Sequence
  Description of Artificial Sequence: Synthetic oligonucleotide
  Target: ATXN2; (-) strand; PAM type: YTN; PAM sequence: CTC
tggaagcacatttgagggtt

SEQ ID NO: 71007 - DNA, 20 bp, Artificial Sequence
  Description of Artificial Sequence: Synthetic oligonucleotide
  Target: ATXN2; (-) strand; PAM type: YTN; PAM sequence: TTC
tctggaagcacatttgaggg

SEQ ID NO: 71008 - DNA, 20 bp, Artificial Sequence
  Description of Artificial Sequence: Synthetic oligonucleotide
  Target: ATXN2; (-) strand; PAM type: YTN; PAM sequence: CTT
ctctggaagcacatttgagg

SEQ ID NO: 71009 - DNA, 20 bp, Artificial Sequence
  Description of Artificial Sequence: Synthetic oligonucleotide
  Target: ATXN2; (-) strand; PAM type: YTN; PAM sequence: TTG
atgacttctctggaagcaca

SEQ ID NO: 71010 - DNA, 20 bp, Artificial Sequence
  Description of Artificial Sequence: Synthetic oligonucleotide
  Target: ATXN2; (-) strand; PAM type: YTN; PAM sequence: TTT
gatgacttctctggaagcac

SEQ ID NO: 71011 - DNA, 20 bp, Artificial Sequence
  Description of Artificial Sequence: Synthetic oligonucleotide
  Target: ATXN2; (-) strand; PAM type: YTN; PAM sequence: TTT
tgatgacttctctggaagca

SEQ ID NO: 71012 - DNA, 20 bp, Artificial Sequence
  Description of Artificial Sequence: Synthetic oligonucleotide
  Target: ATXN2; (-) strand; PAM type: YTN; PAM sequence: CTG
aggattttgatgacttctct

SEQ ID NO: 71013 - DNA, 20 bp, Artificial Sequence
  Description of Artificial Sequence: Synthetic oligonucleotide
  Target: ATXN2; (-) strand; PAM type: YTN; PAM sequence: TTA
gctgaggattttgatgactt

SEQ ID NO: 71014 - DNA, 20 bp, Artificial Sequence
  Description of Artificial Sequence: Synthetic oligonucleotide
  Target: ATXN2; (-) strand; PAM type: YTN; PAM sequence: TTG
agaagaaatggttagctgag

SEQ ID NO: 71015 - DNA, 20 bp, Artificial Sequence
  Description of Artificial Sequence: Synthetic oligonucleotide
  Target: ATXN2; (-) strand; PAM type: YTN; PAM sequence: TTA
gttgagaagaaatggttagc

SEQ ID NO: 71016 - DNA, 20 bp, Artificial Sequence
  Description of Artificial Sequence: Synthetic oligonucleotide
  Target: ATXN2; (-) strand; PAM type: YTN; PAM sequence: TTT
agttgagaagaaatggttag

SEQ ID NO: 71017 - DNA, 20 bp, Artificial Sequence
  Description of Artificial Sequence: Synthetic oligonucleotide
  Target: ATXN2; (-) strand; PAM type: YTN; PAM sequence: CTG
atttagttgagaagaaatgg

SEQ ID NO: 71018 - DNA, 20 bp, Artificial Sequence
  Description of Artificial Sequence: Synthetic oligonucleotide
  Target: ATXN2; (-) strand; PAM type: YTN; PAM sequence: TTG
agaaaaggctgatttagttg

SEQ ID NO: 71019 - DNA, 20 bp, Artificial Sequence
  Description of Artificial Sequence: Synthetic oligonucleotide
  Target: ATXN2; (-) strand; PAM type: YTN; PAM sequence: TTT
gagaaaaggctgatttagtt

SEQ ID NO: 71020 - DNA, 20 bp, Artificial Sequence
  Description of Artificial Sequence: Synthetic oligonucleotide
  Target: ATXN2; (-) strand; PAM type: YTN; PAM sequence: TTG
atgtttgagaaaaggctgat

SEQ ID NO: 71021 - DNA, 20 bp, Artificial Sequence
  Description of Artificial Sequence: Synthetic oligonucleotide
  Target: ATXN2; (-) strand; PAM type: YTN; PAM sequence: TTT
gatgtttgagaaaaggctga

SEQ ID NO: 71022 - DNA, 20 bp, Artificial Sequence
  Description of Artificial Sequence: Synthetic oligonucleotide
  Target: ATXN2; (-) strand; PAM type: YTN; PAM sequence: CTT
tgatgtttgagaaaaggctg

SEQ ID NO: 71023 - DNA, 20 bp, Artificial Sequence
  Description of Artificial Sequence: Synthetic oligonucleotide
  Target: ATXN2; (-) strand; PAM type: YTN; PAM sequence: TTA
tatggaactttgatgtttga

SEQ ID NO: 71024 - DNA, 20 bp, Artificial Sequence
  Description of Artificial Sequence: Synthetic oligonucleotide
  Target: ATXN2; (-) strand; PAM type: YTN; PAM sequence: TTT
atatggaactttgatgtttg

SEQ ID NO: 71025 - DNA, 20 bp, Artificial Sequence
  Description of Artificial Sequence: Synthetic oligonucleotide
  Target: ATXN2; (-) strand; PAM type: YTN; PAM sequence: TTA
ggtttatatggaactttgat

SEQ ID NO: 71026 - DNA, 20 bp, Artificial Sequence
  Description of Artificial Sequence: Synthetic oligonucleotide
  Target: ATXN2; (-) strand; PAM type: YTN; PAM sequence: TTT
aggtttatatggaactttga

SEQ ID NO: 71027 - DNA, 20 bp, Artificial Sequence
  Description of Artificial Sequence: Synthetic oligonucleotide
  Target: ATXN2; (-) strand; PAM type: YTN; PAM sequence: TTT
taggtttatatggaactttg

SEQ ID NO: 71028 - DNA, 20 bp, Artificial Sequence
  Description of Artificial Sequence: Synthetic oligonucleotide
  Target: ATXN2; (-) strand; PAM type: YTN; PAM sequence: TTT
ttaggtttatatggaacttt

SEQ ID NO: 71029 - DNA, 20 bp, Artificial Sequence
  Description of Artificial Sequence: Synthetic oligonucleotide
  Target: ATXN2; (-) strand; PAM type: YTN; PAM sequence: TTT
tttaggtttatatggaactt

SEQ ID NO: 71030 - DNA, 20 bp, Artificial Sequence
  Description of Artificial Sequence: Synthetic oligonucleotide
  Target: ATXN2; (-) strand; PAM type: YTN; PAM sequence: TTG
atcaaaacaatatgattttt

SEQ ID NO: 71031 - DNA, 20 bp, Artificial Sequence
  Description of Artificial Sequence: Synthetic oligonucleotide
  Target: ATXN2; (-) strand; PAM type: YTN; PAM sequence: TTG
aaagtgccgcaggaatagga

SEQ ID NO: 71032 - DNA, 20 bp, Artificial Sequence
  Description of Artificial Sequence: Synthetic oligonucleotide
  Target: ATXN2; (-) strand; PAM type: YTN; PAM sequence: TTG
ttgaaagtgccgcaggaata

SEQ ID NO: 71033 - DNA, 20 bp, Artificial Sequence
  Description of Artificial Sequence: Synthetic oligonucleotide
  Target: ATXN2; (-) strand; PAM type: YTN; PAM sequence: TTA
aaaagttgttgaaagtgccg

SEQ ID NO: 71034 - DNA, 20 bp, Artificial Sequence
  Description of Artificial Sequence: Synthetic oligonucleotide
  Target: ATXN2; (-) strand; PAM type: YTN; PAM sequence: CTT
aaaaagttgttgaaagtgcc

SEQ ID NO: 71035 - DNA, 20 bp, Artificial Sequence
  Description of Artificial Sequence: Synthetic oligonucleotide
  Target: ATXN2; (-) strand; PAM type: YTN; PAM sequence: CTG
tcttaaaaagttgttgaaag

SEQ ID NO: 71036 - DNA, 20 bp, Artificial Sequence
  Description of Artificial Sequence: Synthetic oligonucleotide
  Target: ATXN2; (-) strand; PAM type: YTN; PAM sequence: TTG
gtccacatataacgatgaca

SEQ ID NO: 71037 - DNA, 20 bp, Artificial Sequence
  Description of Artificial Sequence: Synthetic oligonucleotide
  Target: ATXN2; (-) strand; PAM type: YTN; PAM sequence: TTA
tatagtatatagattggtcc

SEQ ID NO: 71038 - DNA, 20 bp, Artificial Sequence
  Description of Artificial Sequence: Synthetic oligonucleotide
  Target: ATXN2; (-) strand; PAM type: YTN; PAM sequence: TTT
atatagtatatagattggtc

SEQ ID NO: 71039 - DNA, 20 bp, Artificial Sequence
  Description of Artificial Sequence: Synthetic oligonucleotide
  Target: ATXN2; (-) strand; PAM type: YTN; PAM sequence: CTT
tatatagtatatagattggt

SEQ ID NO: 71040 - DNA, 20 bp, Artificial Sequence
  Description of Artificial Sequence: Synthetic oligonucleotide
  Target: ATXN2; (-) strand; PAM type: YTN; PAM sequence: CTG
atactttatatagtatatag

SEQ ID NO: 71041 - DNA, 20 bp, Artificial Sequence
  Description of Artificial Sequence: Synthetic oligonucleotide
  Target: ATXN2; (-) strand; PAM type: YTN; PAM sequence: CTA
tatactgatactttatatag

SEQ ID NO: 71042 - DNA, 20 bp, Artificial Sequence
  Description of Artificial Sequence: Synthetic oligonucleotide
  Target: ATXN2; (-) strand; PAM type: YTN; PAM sequence: CTG
ataccaatctatatactgat

SEQ ID NO: 71043 - DNA, 20 bp, Artificial Sequence
  Description of Artificial Sequence: Synthetic oligonucleotide
  Target: ATXN2; (-) strand; PAM type: YTN; PAM sequence: CTA
aatagtcccactgataccaa

SEQ ID NO: 71044 - DNA, 20 bp, Artificial Sequence
  Description of Artificial Sequence: Synthetic oligonucleotide
  Target: ATXN2; (-) strand; PAM type: YTN; PAM sequence: CTA
aaaatgactaaatagtccca

SEQ ID NO: 71045 - DNA, 20 bp, Artificial Sequence
  Description of Artificial Sequence: Synthetic oligonucleotide
  Target: ATXN2; (-) strand; PAM type: YTN; PAM sequence: CTC
agtaagtgctaaaaatgact

SEQ ID NO: 71046 - DNA, 20 bp, Artificial Sequence
  Description of Artificial Sequence: Synthetic oligonucleotide
  Target: ATXN2; (-) strand; PAM type: YTN; PAM sequence: TTG
taggtactcagtaagtgcta

SEQ ID NO: 71047 - DNA, 20 bp, Artificial Sequence
  Description of Artificial Sequence: Synthetic oligonucleotide
  Target: ATXN2; (-) strand; PAM type: YTN; PAM sequence: TTA
tgagtgcattgtaggtactc

SEQ ID NO: 71048 - DNA, 20 bp, Artificial Sequence
  Description of Artificial Sequence: Synthetic oligonucleotide
  Target: ATXN2; (-) strand; PAM type: YTN; PAM sequence: CTT
atgagtgcattgtaggtact

SEQ ID NO: 71049 - DNA, 20 bp, Artificial Sequence
  Description of Artificial Sequence: Synthetic oligonucleotide
  Target: ATXN2; (-) strand; PAM type: YTN; PAM sequence: CTC
gtccagacttatgagtgcat

SEQ ID NO: 71050 - DNA, 20 bp, Artificial Sequence
  Description of Artificial Sequence: Synthetic oligonucleotide
  Target: ATXN2; (-) strand; PAM type: YTN; PAM sequence: TTG
tatcagtcaaatgtgaatcc

SEQ ID NO: 71051 - DNA, 20 bp, Artificial Sequence
  Description of Artificial Sequence: Synthetic oligonucleotide
  Target: ATXN2; (-) strand; PAM type: YTN; PAM sequence: CTG
ggaattgtatcagtcaaatg

SEQ ID NO: 71052 - DNA, 20 bp, Artificial Sequence
  Description of Artificial Sequence: Synthetic oligonucleotide
  Target: ATXN2; (-) strand; PAM type: YTN; PAM sequence: CTA
caggaaatgctgggaattgt

SEQ ID NO: 71053 - DNA, 20 bp, Artificial Sequence
  Description of Artificial Sequence: Synthetic oligonucleotide
  Target: ATXN2; (-) strand; PAM type: YTN; PAM sequence: TTC
ctacaggaaatgctgggaat

SEQ ID NO: 71054 - DNA, 20 bp, Artificial Sequence
  Description of Artificial Sequence: Synthetic oligonucleotide
  Target: ATXN2; (-) strand; PAM type: YTN; PAM sequence: CTA
gttcctacaggaaatgctgg

SEQ ID NO: 71055 - DNA, 20 bp, Artificial Sequence
  Description of Artificial Sequence: Synthetic oligonucleotide
  Target: ATXN2; (-) strand; PAM type: YTN; PAM sequence: CTC
ctagttcctacaggaaatgc

SEQ ID NO: 71056 - DNA, 20 bp, Artificial Sequence
  Description of Artificial Sequence: Synthetic oligonucleotide
  Target: ATXN2; (-) strand; PAM type: YTN; PAM sequence: TTA
cacccaggagctcctagttc

SEQ ID NO: 71057 - DNA, 20 bp, Artificial Sequence
  Description of Artificial Sequence: Synthetic oligonucleotide
  Target: ATXN2; (-) strand; PAM type: YTN; PAM sequence: CTT
acacccaggagctcctagtt

SEQ ID NO: 71058 - DNA, 20 bp, Artificial Sequence
  Description of Artificial Sequence: Synthetic oligonucleotide
  Target: ATXN2; (-) strand; PAM type: YTN; PAM sequence: CTC
ttacacccaggagctcctag

SEQ ID NO: 71059 - DNA, 20 bp, Artificial Sequence
  Description of Artificial Sequence: Synthetic oligonucleotide
  Target: ATXN2; (-) strand; PAM type: YTN; PAM sequence: CTA
gtctcttacacccaggagct

SEQ ID NO: 71060 - DNA, 20 bp, Artificial Sequence
  Description of Artificial Sequence: Synthetic oligonucleotide
  Target: ATXN2; (-) strand; PAM type: YTN; PAM sequence: CTG
taactagtctcttacaccca

SEQ ID NO: 71061 - DNA, 20 bp, Artificial Sequence
  Description of Artificial Sequence: Synthetic oligonucleotide
  Target: ATXN2; (-) strand; PAM type: YTN; PAM sequence: TTC
tgtaactagtctcttacacc

SEQ ID NO: 71062 - DNA, 20 bp, Artificial Sequence
  Description of Artificial Sequence: Synthetic oligonucleotide
  Target: ATXN2; (-) strand; PAM type: YTN; PAM sequence: TTT
ctgtaactagtctcttacac

SEQ ID NO: 71063 - DNA, 20 bp, Artificial Sequence
  Description of Artificial Sequence: Synthetic oligonucleotide
  Target: ATXN2; (-) strand; PAM type: YTN; PAM sequence: TTC
atttctgtaactagtctctt

SEQ ID NO: 71064 - DNA, 20 bp, Artificial Sequence
  Description of Artificial Sequence: Synthetic oligonucleotide
  Target: ATXN2; (-) strand; PAM type: YTN; PAM sequence: CTT
catttctgtaactagtctct

SEQ ID NO: 71065 - DNA, 20 bp, Artificial Sequence
  Description of Artificial Sequence: Synthetic oligonucleotide
  Target: ATXN2; (-) strand; PAM type: YTN; PAM sequence: TTG
cttcatttctgtaactagtc

SEQ ID NO: 71066 - DNA, 20 bp, Artificial Sequence
  Description of Artificial Sequence: Synthetic oligonucleotide
  Target: ATXN2; (-) strand; PAM type: YTN; PAM sequence: TTT
gcttcatttctgtaactagt

SEQ ID NO: 71067 - DNA, 20 bp, Artificial Sequence
  Description of Artificial Sequence: Synthetic oligonucleotide
  Target: ATXN2; (-) strand; PAM type: YTN; PAM sequence: CTA
aaagatttgcttcatttctg

SEQ ID NO: 71068 - DNA, 20 bp, Artificial Sequence
  Description of Artificial Sequence: Synthetic oligonucleotide
  Target: ATXN2; (-) strand; PAM type: YTN; PAM sequence: TTC
taaaagatttgcttcatttc

SEQ ID NO: 71069 - DNA, 20 bp, Artificial Sequence
  Description of Artificial Sequence: Synthetic oligonucleotide
  Target: ATXN2; (-) strand; PAM type: YTN; PAM sequence: TTC
gattctaaaagatttgcttc

SEQ ID NO: 71070 - DNA, 20 bp, Artificial Sequence
  Description of Artificial Sequence: Synthetic oligonucleotide
  Target: ATXN2; (-) strand; PAM type: YTN; PAM sequence: TTG
tattcgattctaaaagattt

SEQ ID NO: 71071 - DNA, 20 bp, Artificial Sequence
  Description of Artificial Sequence: Synthetic oligonucleotide
  Target: ATXN2; (-) strand; PAM type: YTN; PAM sequence: CTC
attgtattcgattctaaaag

SEQ ID NO: 71072 - DNA, 20 bp, Artificial Sequence
  Description of Artificial Sequence: Synthetic oligonucleotide
  Target: ATXN2; (-) strand; PAM type: YTN; PAM sequence: TTG
tagcactcattgtattcgat

SEQ ID NO: 71073 - DNA, 20 bp, Artificial Sequence
  Description of Artificial Sequence: Synthetic oligonucleotide
  Target: ATXN2; (-) strand; PAM type: YTN; PAM sequence: TTG
tattgtagcactcattgtat

SEQ ID NO: 71074 - DNA, 20 bp, Artificial Sequence
  Description of Artificial Sequence: Synthetic oligonucleotide
  Target: ATXN2; (-) strand; PAM type: YTN; PAM sequence: TTA
attgtattgtagcactcatt

SEQ ID NO: 71075 - DNA, 20 bp, Artificial Sequence
  Description of Artificial Sequence: Synthetic oligonucleotide
  Target: ATXN2; (-) strand; PAM type: YTN; PAM sequence: TTT
aattgtattgtagcactcat

SEQ ID NO: 71076 - DNA, 20 bp, Artificial Sequence
  Description of Artificial Sequence: Synthetic oligonucleotide
  Target: ATXN2; (-) strand; PAM type: YTN; PAM sequence: TTT
taattgtattgtagcactca

SEQ ID NO: 71077 - DNA, 20 bp, Artificial Sequence
  Description of Artificial Sequence: Synthetic oligonucleotide
  Target: ATXN2; (-) strand; PAM type: YTN; PAM sequence: TTT
ttaattgtattgtagcactc

SEQ ID NO: 71078 - DNA, 20 bp, Artificial Sequence
  Description of Artificial Sequence: Synthetic oligonucleotide
  Target: ATXN2; (-) strand; PAM type: YTN; PAM sequence: TTG
tttttaattgtattgtagca

SEQ ID NO: 71079 - DNA, 20 bp, Artificial Sequence
  Description of Artificial Sequence: Synthetic oligonucleotide
  Target: ATXN2; (-) strand; PAM type: YTN; PAM sequence: TTT
gtttttaattgtattgtagc

SEQ ID NO: 71080 - DNA, 20 bp, Artificial Sequence
  Description of Artificial Sequence: Synthetic oligonucleotide
  Target: ATXN2; (-) strand; PAM type: YTN; PAM sequence: CTT
tgtttttaattgtattgtag

SEQ ID NO: 71081 - DNA, 20 bp, Artificial Sequence
  Description of Artificial Sequence: Synthetic oligonucleotide
  Target: ATXN2; (-) strand; PAM type: YTN; PAM sequence: TTA
gaactttgtttttaattgta

SEQ ID NO: 71082 - DNA, 20 bp, Artificial Sequence
  Description of Artificial Sequence: Synthetic oligonucleotide
  Target: ATXN2; (-) strand; PAM type: YTN; PAM sequence: CTT
agaactttgtttttaattgt

SEQ ID NO: 71083 - DNA, 20 bp, Artificial Sequence
  Description of Artificial Sequence: Synthetic oligonucleotide
  Target: ATXN2; (-) strand; PAM type: YTN; PAM sequence: TTC
cttagaactttgtttttaat

SEQ ID NO: 71084 - DNA, 20 bp, Artificial Sequence
  Description of Artificial Sequence: Synthetic oligonucleotide
  Target: ATXN2; (-) strand; PAM type: YTN; PAM sequence: TTG
ttccttagaactttgttttt

SEQ ID NO: 71085 - DNA, 20 bp, Artificial Sequence
  Description of Artificial Sequence: Synthetic oligonucleotide
  Target: ATXN2; (-) strand; PAM type: YTN; PAM sequence: TTT
gttccttagaactttgtttt

SEQ ID NO: 71086 - DNA, 20 bp, Artificial Sequence
  Description of Artificial Sequence: Synthetic oligonucleotide
  Target: ATXN2; (-) strand; PAM type: YTN; PAM sequence: TTT
tgttccttagaactttgttt

SEQ ID NO: 71087 - DNA, 20 bp, Artificial Sequence
  Description of Artificial Sequence: Synthetic oligonucleotide
  Target: ATXN2; (-) strand; PAM type: YTN; PAM sequence: CTT
ttgttccttagaactttgtt

SEQ ID NO: 71088 - DNA, 20 bp, Artificial Sequence
  Description of Artificial Sequence: Synthetic oligonucleotide
  Target: ATXN2; (-) strand; PAM type: YTN; PAM sequence: TTA
gaaagcccagagccttttgt

SEQ ID NO: 71089 - DNA, 20 bp, Artificial Sequence
  Description of Artificial Sequence: Synthetic oligonucleotide
  Target: ATXN2; (-) strand; PAM type: YTN; PAM sequence: TTT
agaaagcccagagccttttg

SEQ ID NO: 71090 - DNA, 20 bp, Artificial Sequence
  Description of Artificial Sequence: Synthetic oligonucleotide
  Target: ATXN2; (-) strand; PAM type: YTN; PAM sequence: CTT
tagaaagcccagagcctttt

SEQ ID NO: 71091 - DNA, 20 bp, Artificial Sequence
  Description of Artificial Sequence: Synthetic oligonucleotide
  Target: ATXN2; (-) strand; PAM type: YTN; PAM sequence: CTG
tcactttagaaagcccagag

SEQ ID NO: 71092 - DNA, 20 bp, Artificial Sequence
  Description of Artificial Sequence: Synthetic oligonucleotide
  Target: ATXN2; (-) strand; PAM type: YTN; PAM sequence: CTG
tcactgtcactttagaaagc

SEQ ID NO: 71093 - DNA, 20 bp, Artificial Sequence
  Description of Artificial Sequence: Synthetic oligonucleotide
  Target: ATXN2; (-) strand; PAM type: YTN; PAM sequence: CTG
ataggctgtcactgtcactt

SEQ ID NO: 71094 - DNA, 20 bp, Artificial Sequence
  Description of Artificial Sequence: Synthetic oligonucleotide
  Target: ATXN2; (-) strand; PAM type: YTN; PAM sequence: TTG
ctgataggctgtcactgtca

SEQ ID NO: 71095 - DNA, 20 bp, Artificial Sequence
  Description of Artificial Sequence: Synthetic oligonucleotide
  Target: ATXN2; (-) strand; PAM type: YTN; PAM sequence: CTG
ttgctgataggctgtcactg

SEQ ID NO: 71096 - DNA, 20 bp, Artificial Sequence
  Description of Artificial Sequence: Synthetic oligonucleotide
  Target: ATXN2; (-) strand; PAM type: YTN; PAM sequence: CTA
gatcagctgttgctgatagg

SEQ ID NO: 71097 - DNA, 20 bp, Artificial Sequence
  Description of Artificial Sequence: Synthetic oligonucleotide
  Target: ATXN2; (-) strand; PAM type: YTN; PAM sequence: TTG
aaggcctagatcagctgttg

SEQ ID NO: 71098 - DNA, 20 bp, Artificial Sequence
  Description of Artificial Sequence: Synthetic oligonucleotide
  Target: ATXN2; (-) strand; PAM type: YTN; PAM sequence: CTT
gaaggcctagatcagctgtt

SEQ ID NO: 71099 - DNA, 20 bp, Artificial Sequence
  Description of Artificial Sequence: Synthetic oligonucleotide
  Target: ATXN2; (-) strand; PAM type: YTN; PAM sequence: TTC
ttgaaggcctagatcagctg

SEQ ID NO: 71100 - DNA, 20 bp, Artificial Sequence
  Description of Artificial Sequence: Synthetic oligonucleotide
  Target: ATXN2; (-) strand; PAM type: YTN; PAM sequence: TTG
tgttcttgaaggcctagatc

SEQ ID NO: 71101 - DNA, 20 bp, Artificial Sequence
  Description of Artificial Sequence: Synthetic oligonucleotide
  Target: ATXN2; (-) strand; PAM type: YTN; PAM sequence: CTT
gtgttcttgaaggcctagat

SEQ ID NO: 71102 - DNA, 20 bp, Artificial Sequence
  Description of Artificial Sequence: Synthetic oligonucleotide
  Target: ATXN2; (-) strand; PAM type: YTN; PAM sequence: TTC
ttgtgttcttgaaggcctag

SEQ ID NO: 71103 - DNA, 20 bp, Artificial Sequence
  Description of Artificial Sequence: Synthetic oligonucleotide
  Target: ATXN2; (-) strand; PAM type: YTN; PAM sequence: CTT
cttgtgttcttgaaggccta

SEQ ID NO: 71104 - DNA, 20 bp, Artificial Sequence
  Description of Artificial Sequence: Synthetic oligonucleotide
  Target: ATXN2; (-) strand; PAM type: YTN; PAM sequence: TTC
ttcttgtgttcttgaaggcc

SEQ ID NO: 71105 - DNA, 20 bp, Artificial Sequence
  Description of Artificial Sequence: Synthetic oligonucleotide
  Target: ATXN2; (-) strand; PAM type: YTN; PAM sequence: TTT
cttcttgtgttcttgaaggc

SEQ ID NO: 71106 - DNA, 20 bp, Artificial Sequence
  Description of Artificial Sequence: Synthetic oligonucleotide
  Target: ATXN2; (-) strand; PAM type: YTN; PAM sequence: TTT
tcttcttgtgttcttgaagg

SEQ ID NO: 71107 - DNA, 20 bp, Artificial Sequence
  Description of Artificial Sequence: Synthetic oligonucleotide
  Target: ATXN2; (-) strand; PAM type: YTN; PAM sequence: TTA
ttttcttcttgtgttcttga

SEQ ID NO: 71108 - DNA, 20 bp, Artificial Sequence
  Description of Artificial Sequence: Synthetic oligonucleotide
  Target: ATXN2; (-) strand; PAM type: YTN; PAM sequence: CTT
attttcttcttgtgttcttg

SEQ ID NO: 71109 - DNA, 20 bp, Artificial Sequence
  Description of Artificial Sequence: Synthetic oligonucleotide
  Target: ATXN2; (-) strand; PAM type: YTN; PAM sequence: TTC
ttattttcttcttgtgttct

SEQ ID NO: 71110 - DNA, 20 bp, Artificial Sequence
  Description of Artificial Sequence: Synthetic oligonucleotide
  Target: ATXN2; (-) strand; PAM type: YTN; PAM sequence: TTT
cttattttcttcttgtgttc

SEQ ID NO: 71111 - DNA, 20 bp, Artificial Sequence
  Description of Artificial Sequence: Synthetic oligonucleotide
  Target: ATXN2; (-) strand; PAM type: YTN; PAM sequence: CTT
tcttattttcttcttgtgtt

SEQ ID NO: 71112 - DNA, 20 bp, Artificial Sequence
  Description of Artificial Sequence: Synthetic oligonucleotide
  Target: ATXN2; (-) strand; PAM type: YTN; PAM sequence: TTC
ccctttcttattttcttctt

SEQ ID NO: 71113 - DNA, 20 bp, Artificial Sequence
  Description of Artificial Sequence: Synthetic oligonucleotide
  Target: ATXN2; (-) strand; PAM type: YTN; PAM sequence: CTT
cccctttcttattttcttct

SEQ ID NO: 71114 - DNA, 20 bp, Artificial Sequence
  Description of Artificial Sequence: Synthetic oligonucleotide
  Target: ATXN2; (-) strand; PAM type: YTN; PAM sequence: TTA
cttcccctttcttattttct

SEQ ID NO: 71115 - DNA, 20 bp, Artificial Sequence
  Description of Artificial Sequence: Synthetic oligonucleotide
  Target: ATXN2; (-) strand; PAM type: YTN; PAM sequence: TTT
acttcccctttcttattttc

SEQ ID NO: 71116 - DNA, 20 bp, Artificial Sequence
  Description of Artificial Sequence: Synthetic oligonucleotide
  Target: ATXN2; (-) strand; PAM type: YTN; PAM sequence: TTT
tacttcccctttcttatttt

SEQ ID NO: 71117 - DNA, 20 bp, Artificial Sequence
  Description of Artificial Sequence: Synthetic oligonucleotide
  Target: ATXN2; (-) strand; PAM type: YTN; PAM sequence: TTG
gaaccattttacttcccctt

SEQ ID NO: 71118 - DNA, 20 bp, Artificial Sequence
  Description of Artificial Sequence: Synthetic oligonucleotide
  Target: ATXN2; (-) strand; PAM type: YTN; PAM sequence: CTA
tgttggaaccattttacttc

SEQ ID NO: 71119 - DNA, 20 bp, Artificial Sequence
  Description of Artificial Sequence: Synthetic oligonucleotide
  Target: ATXN2; (-) strand; PAM type: YTN; PAM sequence: CTC
cagtctatgttggaaccatt

SEQ ID NO: 71120 - DNA, 20 bp, Artificial Sequence
  Description of Artificial Sequence: Synthetic oligonucleotide
  Target: ATXN2; (-) strand; PAM type: YTN; PAM sequence: TTA
atgccactccagtctatgtt

SEQ ID NO: 71121 - DNA, 20 bp, Artificial Sequence
  Description of Artificial Sequence: Synthetic oligonucleotide
  Target: ATXN2; (-) strand; PAM type: YTN; PAM sequence: TTT
aatgccactccagtctatgt

SEQ ID NO: 71122 - DNA, 20 bp, Artificial Sequence
  Description of Artificial Sequence: Synthetic oligonucleotide
  Target: ATXN2; (-) strand; PAM type: YTN; PAM sequence: TTT
taatgccactccagtctatg

SEQ ID NO: 71123 - DNA, 20 bp, Artificial Sequence
  Description of Artificial Sequence: Synthetic oligonucleotide
  Target: ATXN2; (-) strand; PAM type: YTN; PAM sequence: TTT
ttaatgccactccagtctat

SEQ ID NO: 71124 - DNA, 20 bp, Artificial Sequence
  Description of Artificial Sequence: Synthetic oligonucleotide
  Target: ATXN2; (-) strand; PAM type: YTN; PAM sequence: CTA
tacacgtatttttaatgcca

SEQ ID NO: 71125 - DNA, 20 bp, Artificial Sequence
  Description of Artificial Sequence: Synthetic oligonucleotide
  Target: ATXN2; (-) strand; PAM type: YTN; PAM sequence: CTC
ccagctatacacgtattttt

SEQ ID NO: 71126 - DNA, 20 bp, Artificial Sequence
  Description of Artificial Sequence: Synthetic oligonucleotide
  Target: ATXN2; (-) strand; PAM type: YTN; PAM sequence: TTA
caggcgtgagccaccgctcc

SEQ ID NO: 71127 - DNA, 20 bp, Artificial Sequence
  Description of Artificial Sequence: Synthetic oligonucleotide
  Target: ATXN2; (-) strand; PAM type: YTN; PAM sequence: CTG
agattacaggcgtgagccac

SEQ ID NO: 71128 - DNA, 20 bp, Artificial Sequence
  Description of Artificial Sequence: Synthetic oligonucleotide
  Target: ATXN2; (-) strand; PAM type: YTN; PAM sequence: CTC
ccaaaatgctgagattacag

SEQ ID NO: 71129 - DNA, 20 bp, Artificial Sequence
  Description of Artificial Sequence: Synthetic oligonucleotide
  Target: ATXN2; (-) strand; PAM type: YTN; PAM sequence: CTG
ggcctcccaaaatgctgaga

SEQ ID NO: 71130 - DNA, 20 bp, Artificial Sequence
  Description of Artificial Sequence: Synthetic oligonucleotide
  Target: ATXN2; (-) strand; PAM type: YTN; PAM sequence: CTG
actgggcctcccaaaatgct

SEQ ID NO: 71131 - DNA, 20 bp, Artificial Sequence
  Description of Artificial Sequence: Synthetic oligonucleotide
  Target: ATXN2; (-) strand; PAM type: YTN; PAM sequence: CTG
cctgactgggcctcccaaaa

SEQ ID NO: 71132 - DNA, 20 bp, Artificial Sequence
  Description of Artificial Sequence: Synthetic oligonucleotide
  Target: ATXN2; (-) strand; PAM type: YTN; PAM sequence: CTC
gtgatctgcctgactgggcc

SEQ ID NO: 71133 - DNA, 20 bp, Artificial Sequence
  Description of Artificial Sequence: Synthetic oligonucleotide
  Target: ATXN2; (-) strand; PAM type: YTN; PAM sequence: CTG
acctcgtgatctgcctgact

SEQ ID NO: 71134 - DNA, 20 bp, Artificial Sequence
  Description of Artificial Sequence: Synthetic oligonucleotide
  Target: ATXN2; (-) strand; PAM type: YTN; PAM sequence: CTC
ctgacctcgtgatctgcctg

SEQ ID NO: 71135 - DNA, 20 bp, Artificial Sequence
  Description of Artificial Sequence: Synthetic oligonucleotide
  Target: ATXN2; (-) strand; PAM type: YTN; PAM sequence: TTG
atctcctgacctcgtgatct

SEQ ID NO: 71136 - DNA, 20 bp, Artificial Sequence
  Description of Artificial Sequence: Synthetic oligonucleotide
  Target: ATXN2; (-) strand; PAM type: YTN; PAM sequence: CTT
gatctcctgacctcgtgatc

SEQ ID NO: 71137 - DNA, 20 bp, Artificial Sequence
  Description of Artificial Sequence: Synthetic oligonucleotide
  Target: ATXN2; (-) strand; PAM type: YTN; PAM sequence: TTA
accaggatggtcttgatctc

SEQ ID NO: 71138 - DNA, 20 bp, Artificial Sequence
  Description of Artificial Sequence: Synthetic oligonucleotide
  Target: ATXN2; (-) strand; PAM type: YTN; PAM sequence: TTC
accgtgttaaccaggatggt

SEQ ID NO: 71139 - DNA, 20 bp, Artificial Sequence
  Description of Artificial Sequence: Synthetic oligonucleotide
  Target: ATXN2; (-) strand; PAM type: YTN; PAM sequence: TTT
caccgtgttaaccaggatgg

SEQ ID NO: 71140 - DNA, 20 bp, Artificial Sequence
  Description of Artificial Sequence: Synthetic oligonucleotide
  Target: ATXN2; (-) strand; PAM type: YTN; PAM sequence: TTA
gtagagatggggtttcaccg

SEQ ID NO: 71141 - DNA, 20 bp, Artificial Sequence
  Description of Artificial Sequence: Synthetic oligonucleotide
  Target: ATXN2; (-) strand; PAM type: YTN; PAM sequence: TTT
agtagagatggggtttcacc

SEQ ID NO: 71142 - DNA, 20 bp, Artificial Sequence
  Description of Artificial Sequence: Synthetic oligonucleotide
  Target: ATXN2; (-) strand; PAM type: YTN; PAM sequence: TTT
tagtagagatggggtttcac

SEQ ID NO: 71143 - DNA, 20 bp, Artificial Sequence
  Description of Artificial Sequence: Synthetic oligonucleotide
  Target: ATXN2; (-) strand; PAM type: YTN; PAM sequence: TTT
ttagtagagatggggtttca

SEQ ID NO: 71144 - DNA, 20 bp, Artificial Sequence
  Description of Artificial Sequence: Synthetic oligonucleotide
  Target: ATXN2; (-) strand; PAM type: YTN; PAM sequence: TTG
tatttttagtagagatgggg

SEQ ID NO: 71145 - DNA, 20 bp, Artificial Sequence
  Description of Artificial Sequence: Synthetic oligonucleotide
  Target: ATXN2; (-) strand; PAM type: YTN; PAM sequence: TTT
gtatttttagtagagatggg

SEQ ID NO: 71146 - DNA, 20 bp, Artificial Sequence
  Description of Artificial Sequence: Synthetic oligonucleotide
  Target: ATXN2; (-) strand; PAM type: YTN; PAM sequence: TTT
tgtatttttagtagagatgg

SEQ ID NO: 71147 - DNA, 20 bp, Artificial Sequence
  Description of Artificial Sequence: Synthetic oligonucleotide
  Target: ATXN2; (-) strand; PAM type: YTN; PAM sequence: TTT
ttgtatttttagtagagatg

SEQ ID NO: 71148 - DNA, 20 bp, Artificial Sequence
  Description of Artificial Sequence: Synthetic oligonucleotide
  Target: ATXN2; (-) strand; PAM type: YTN; PAM sequence: CTT
tttgtatttttagtagagat

SEQ ID NO: 71149 - DNA, 20 bp, Artificial Sequence
  Description of Artificial Sequence: Synthetic oligonucleotide
  Target: ATXN2; (-) strand; PAM type: YTN; PAM sequence: CTA
actttttgtatttttagtag

SEQ ID NO: 71150 - DNA, 20 bp, Artificial Sequence
  Description of Artificial Sequence: Synthetic oligonucleotide
  Target: ATXN2; (-) strand; PAM type: YTN; PAM sequence: CTA
cgcccatctaactttttgta

SEQ ID NO: 71151 - DNA, 20 bp, Artificial Sequence
  Description of Artificial Sequence: Synthetic oligonucleotide
  Target: ATXN2; (-) strand; PAM type: YTN; PAM sequence: TTA
caggcgccggccactacgcc

SEQ ID NO: 71152 - DNA, 20 bp, Artificial Sequence
  Description of Artificial Sequence: Synthetic oligonucleotide
  Target: ATXN2; (-) strand; PAM type: YTN; PAM sequence: CTG
ggattacaggcgccggccac

SEQ ID NO: 71153 - DNA, 20 bp, Artificial Sequence
  Description of Artificial Sequence: Synthetic oligonucleotide
  Target: ATXN2; (-) strand; PAM type: YTN; PAM sequence: CTC
ccgagtagctgggattacag

SEQ ID NO: 71154 - DNA, 20 bp, Artificial Sequence
  Description of Artificial Sequence: Synthetic oligonucleotide
  Target: ATXN2; (-) strand; PAM type: YTN; PAM sequence: CTC
agcctcccgagtagctggga

SEQ ID NO: 71155 - DNA, 20 bp, Artificial Sequence
  Description of Artificial Sequence: Synthetic oligonucleotide
  Target: ATXN2; (-) strand; PAM type: YTN; PAM sequence: CTG
cctcagcctcccgagtagct

SEQ ID NO: 71156 - DNA, 20 bp, Artificial Sequence
  Description of Artificial Sequence: Synthetic oligonucleotide
  Target: ATXN2; (-) strand; PAM type: YTN; PAM sequence: CTC
ctgcctcagcctcccgagta

SEQ ID NO: 71157 - DNA, 20 bp, Artificial Sequence
  Description of Artificial Sequence: Synthetic oligonucleotide
  Target: ATXN2; (-) strand; PAM type: YTN; PAM sequence: TTC
tcctgcctcagcctcccgag

SEQ ID NO: 71158 - DNA, 20 bp, Artificial Sequence
  Description of Artificial Sequence: Synthetic oligonucleotide
  Target: ATXN2; (-) strand; PAM type: YTN; PAM sequence: TTC
acaccattctcctgcctcag

SEQ ID NO: 71159 - DNA, 20 bp, Artificial Sequence
  Description of Artificial Sequence: Synthetic oligonucleotide
  Target: ATXN2; (-) strand; PAM type: YTN; PAM sequence: CTG
gttcacaccattctcctgcc

SEQ ID NO: 71160 - DNA, 20 bp, Artificial Sequence
  Description of Artificial Sequence: Synthetic oligonucleotide
  Target: ATXN2; (-) strand; PAM type: YTN; PAM sequence: CTC
cctggttcacaccattctcc

SEQ ID NO: 71161 - DNA, 20 bp, Artificial Sequence
  Description of Artificial Sequence: Synthetic oligonucleotide
  Target: ATXN2; (-) strand; PAM type: YTN; PAM sequence: CTG
cctccctggttcacaccatt

SEQ ID NO: 71162 - DNA, 20 bp, Artificial Sequence
  Description of Artificial Sequence: Synthetic oligonucleotide
  Target: ATXN2; (-) strand; PAM type: YTN; PAM sequence: CTC
tgcctccctggttcacacca

SEQ ID NO: 71163 - DNA, 20 bp, Artificial Sequence
  Description of Artificial Sequence: Synthetic oligonucleotide
  Target: ATXN2; (-) strand; PAM type: YTN; PAM sequence: CTG
caagctctgcctccctggtt

SEQ ID NO: 71164 - DNA, 20 bp, Artificial Sequence
  Description of Artificial Sequence: Synthetic oligonucleotide
  Target: ATXN2; (-) strand; PAM type: YTN; PAM sequence: CTC
actgcaagctctgcctccct

SEQ ID NO: 71165 - DNA, 20 bp, Artificial Sequence
  Description of Artificial Sequence: Synthetic oligonucleotide
  Target: ATXN2; (-) strand; PAM type: YTN; PAM sequence: CTG
ctcactgcaagctctgcctc

SEQ ID NO: 71166 - DNA, 20 bp, Artificial Sequence
  Description of Artificial Sequence: Synthetic oligonucleotide
  Target: ATXN2; (-) strand; PAM type: YTN; PAM sequence: CTC
tgctcactgcaagctctgcc

SEQ ID NO: 71167 - DNA, 20 bp, Artificial Sequence
  Description of Artificial Sequence: Synthetic oligonucleotide
  Target: ATXN2; (-) strand; PAM type: YTN; PAM sequence: CTG
gagtgcagtggcgcgatctc

SEQ ID NO: 71168 - DNA, 20 bp, Artificial Sequence
  Description of Artificial Sequence: Synthetic oligonucleotide
  Target: ATXN2; (-) strand; PAM type: YTN; PAM sequence: TTG
tccaggctggagtgcagtgg

SEQ ID NO: 71169 - DNA, 20 bp, Artificial Sequence
  Description of Artificial Sequence: Synthetic oligonucleotide
  Target: ATXN2; (-) strand; PAM type: YTN; PAM sequence: CTG
ttgtccaggctggagtgcag

SEQ ID NO: 71170 - DNA, 20 bp, Artificial Sequence
  Description of Artificial Sequence: Synthetic oligonucleotide
  Target: ATXN2; (-) strand; PAM type: YTN; PAM sequence: CTC
tgttgtccaggctggagtgc

SEQ ID NO: 71171 - DNA, 20 bp, Artificial Sequence
  Description of Artificial Sequence: Synthetic oligonucleotide
  Target: ATXN2; (-) strand; PAM type: YTN; PAM sequence: CTC
gctctgttgtccaggctgga

SEQ ID NO: 71172 - DNA, 20 bp, Artificial Sequence
  Description of Artificial Sequence: Synthetic oligonucleotide
  Target: ATXN2; (-) strand; PAM type: YTN; PAM sequence: TTG
agatggagtctcgctctgtt

SEQ ID NO: 71173 - DNA, 20 bp, Artificial Sequence
  Description of Artificial Sequence: Synthetic oligonucleotide
  Target: ATXN2; (-) strand; PAM type: YTN; PAM sequence: TTT
gagatggagtctcgctctgt

SEQ ID NO: 71174 - DNA, 20 bp, Artificial Sequence
  Description of Artificial Sequence: Synthetic oligonucleotide
  Target: ATXN2; (-) strand; PAM type: YTN; PAM sequence: TTT
tgagatggagtctcgctctg

SEQ ID NO: 71175 - DNA, 20 bp, Artificial Sequence
  Description of Artificial Sequence: Synthetic oligonucleotide
  Target: ATXN2; (-) strand; PAM type: YTN; PAM sequence: TTT
ttgagatggagtctcgctct

SEQ ID NO: 71176 - DNA, 20 bp, Artificial Sequence
  Description of Artificial Sequence: Synthetic oligonucleotide
  Target: ATXN2; (-) strand; PAM type: YTN; PAM sequence: TTT
tttgagatggagtctcgctc

SEQ ID NO: 71177 - DNA, 20 bp, Artificial Sequence
  Description of Artificial Sequence: Synthetic oligonucleotide
  Target: ATXN2; (-) strand; PAM type: YTN; PAM sequence: TTT
ttttgagatggagtctcgct

SEQ ID NO: 71178 - DNA, 20 bp, Artificial Sequence
  Description of Artificial Sequence: Synthetic oligonucleotide
  Target: ATXN2; (-) strand; PAM type: YTN; PAM sequence: TTG
tttttttgagatggagtctc

SEQ ID NO: 71179 - DNA, 20 bp, Artificial Sequence
  Description of Artificial Sequence: Synthetic oligonucleotide
  Target: ATXN2; (-) strand; PAM type: YTN; PAM sequence: TTT
gtttttttgagatggagtct

SEQ ID NO: 71180 - DNA, 20 bp, Artificial Sequence
  Description of Artificial Sequence: Synthetic oligonucleotide
  Target: ATXN2; (-) strand; PAM type: YTN; PAM sequence: TTT
tgtttttttgagatggagtc

SEQ ID NO: 71181 - DNA, 20 bp, Artificial Sequence
  Description of Artificial Sequence: Synthetic oligonucleotide
  Target: ATXN2; (-) strand; PAM type: YTN; PAM sequence: TTT
ttgtttttttgagatggagt

SEQ ID NO: 71182 - DNA, 20 bp, Artificial Sequence
  Description of Artificial Sequence: Synthetic oligonucleotide
  Target: ATXN2; (-) strand; PAM type: YTN; PAM sequence: TTT
tttgtttttttgagatggag

SEQ ID NO: 71183 - DNA, 20 bp, Artificial Sequence
  Description of Artificial Sequence: Synthetic oligonucleotide
  Target: ATXN2; (-) strand; PAM type: YTN; PAM sequence: TTG
ttttttgtttttttgagatg

SEQ ID NO: 71184 - DNA, 20 bp, Artificial Sequence
  Description of Artificial Sequence: Synthetic oligonucleotide
  Target: ATXN2; (-) strand; PAM type: YTN; PAM sequence: TTT
gttttttgtttttttgagat

SEQ ID NO: 71185 - DNA, 20 bp, Artificial Sequence
  Description of Artificial Sequence: Synthetic oligonucleotide
  Target: ATXN2; (-) strand; PAM type: YTN; PAM sequence: TTT
tgttttttgtttttttgaga

SEQ ID NO: 71186 - DNA, 20 bp, Artificial Sequence
  Description of Artificial Sequence: Synthetic oligonucleotide
  Target: ATXN2; (-) strand; PAM type: YTN; PAM sequence: TTT
ttgttttttgtttttttgag

SEQ ID NO: 71187 - DNA, 20 bp, Artificial Sequence
  Description of Artificial Sequence: Synthetic oligonucleotide
  Target: ATXN2; (-) strand; PAM type: YTN; PAM sequence: TTT
tttgttttttgtttttttga

SEQ ID NO: 71188 - DNA, 20 bp, Artificial Sequence
  Description of Artificial Sequence: Synthetic oligonucleotide
  Target: ATXN2; (-) strand; PAM type: YTN; PAM sequence: TTT
ttttgttttttgtttttttg

SEQ ID NO: 71189 - DNA, 20 bp, Artificial Sequence
  Description of Artificial Sequence: Synthetic oligonucleotide
  Target: ATXN2; (-) strand; PAM type: YTN; PAM sequence: CTA
tacacatttttttgtttttt

SEQ ID NO: 71190 - DNA, 20 bp, Artificial Sequence
  Description of Artificial Sequence: Synthetic oligonucleotide
  Target: ATXN2; (-) strand; PAM type: YTN; PAM sequence: CTG
caccccgcctatacacattt

SEQ ID NO: 71191 - DNA, 20 bp, Artificial Sequence
  Description of Artificial Sequence: Synthetic oligonucleotide
  Target: ATXN2; (-) strand; PAM type: YTN; PAM sequence: TTA
caggcgtcagccactgcacc

SEQ ID NO: 71192 - DNA, 20 bp, Artificial Sequence
  Description of Artificial Sequence: Synthetic oligonucleotide
  Target: ATXN2; (-) strand; PAM type: YTN; PAM sequence: CTC
ccaaagtgatgggattacag

SEQ ID NO: 71193 - DNA, 20 bp, Artificial Sequence
  Description of Artificial Sequence: Synthetic oligonucleotide
  Target: ATXN2; (-) strand; PAM type: YTN; PAM sequence: CTC
ggcctcccaaagtgatggga

SEQ ID NO: 71194 - DNA, 20 bp, Artificial Sequence
  Description of Artificial Sequence: Synthetic oligonucleotide
  Target: ATXN2; (-) strand; PAM type: YTN; PAM sequence: CTC
aggtgatccgcccgcctcgg

SEQ ID NO: 71195 - DNA, 20 bp, Artificial Sequence
  Description of Artificial Sequence: Synthetic oligonucleotide
  Target: ATXN2; (-) strand; PAM type: YTN; PAM sequence: CTC
cggacctcaggtgatccgcc

SEQ ID NO: 71196 - DNA, 20 bp, Artificial Sequence
  Description of Artificial Sequence: Synthetic oligonucleotide
  Target: ATXN2; (-) strand; PAM type: YTN; PAM sequence: CTC
gaactccggacctcaggtga

SEQ ID NO: 71197 - DNA, 20 bp, Artificial Sequence
  Description of Artificial Sequence: Synthetic oligonucleotide
  Target: ATXN2; (-) strand; PAM type: YTN; PAM sequence: CTG
gtctcgaactccggacctca

SEQ ID NO: 71198 - DNA, 20 bp, Artificial Sequence
  Description of Artificial Sequence: Synthetic oligonucleotide
  Target: ATXN2; (-) strand; PAM type: YTN; PAM sequence: TTG
gtcaggctggtctcgaactc

SEQ ID NO: 71199 - DNA, 20 bp, Artificial Sequence
  Description of Artificial Sequence: Synthetic oligonucleotide
  Target: ATXN2; (-) strand; PAM type: YTN; PAM sequence: CTC
catgttggtcaggctggtct

SEQ ID NO: 71200 - DNA, 20 bp, Artificial Sequence
  Description of Artificial Sequence: Synthetic oligonucleotide
  Target: ATXN2; (-) strand; PAM type: YTN; PAM sequence: TTC
tccatgttggtcaggctggt

SEQ ID NO: 71201 - DNA, 20 bp, Artificial Sequence
  Description of Artificial Sequence: Synthetic oligonucleotide
  Target: ATXN2; (-) strand; PAM type: YTN; PAM sequence: TTT
ctccatgttggtcaggctgg

SEQ ID NO: 71202 - DNA, 20 bp, Artificial Sequence
  Description of Artificial Sequence: Synthetic oligonucleotide
  Target: ATXN2; (-) strand; PAM type: YTN; PAM sequence: TTA
gtagagatgggggtttctcc

SEQ ID NO: 71203 - DNA, 20 bp, Artificial Sequence
  Description of Artificial Sequence: Synthetic oligonucleotide
  Target: ATXN2; (-) strand; PAM type: YTN; PAM sequence: TTT
agtagagatgggggtttctc

SEQ ID NO: 71204 - DNA, 20 bp, Artificial Sequence
  Description of Artificial Sequence: Synthetic oligonucleotide
  Target: ATXN2; (-) strand; PAM type: YTN; PAM sequence: CTA
tatttagtagagatgggggt

SEQ ID NO: 71205 - DNA, 20 bp, Artificial Sequence
  Description of Artificial Sequence: Synthetic oligonucleotide
  Target: ATXN2; (-) strand; PAM type: YTN; PAM sequence: TTA
caggcatgcaccaccatgca

SEQ ID NO: 71206 - DNA, 20 bp, Artificial Sequence
  Description of Artificial Sequence: Synthetic oligonucleotide
  Target: ATXN2; (-) strand; PAM type: YTN; PAM sequence: CTG
ggattacaggcatgcaccac

SEQ ID NO: 71207 - DNA, 20 bp, Artificial Sequence
  Description of Artificial Sequence: Synthetic oligonucleotide
  Target: ATXN2; (-) strand; PAM type: YTN; PAM sequence: CTC
ccgagcagctgggattacag

SEQ ID NO: 71208 - DNA, 20 bp, Artificial Sequence
  Description of Artificial Sequence: Synthetic oligonucleotide
  Target: ATXN2; (-) strand; PAM type: YTN; PAM sequence: TTC
agcctcccgagcagctggga

SEQ ID NO: 71209 - DNA, 20 bp, Artificial Sequence
  Description of Artificial Sequence: Synthetic oligonucleotide
  Target: ATXN2; (-) strand; PAM type: YTN; PAM sequence: CTT
cagcctcccgagcagctggg

SEQ ID NO: 71210 - DNA, 20 bp, Artificial Sequence
  Description of Artificial Sequence: Synthetic oligonucleotide
  Target: ATXN2; (-) strand; PAM type: YTN; PAM sequence: CTG
cttcagcctcccgagcagct

SEQ ID NO: 71211 - DNA, 20 bp, Artificial Sequence
  Description of Artificial Sequence: Synthetic oligonucleotide
  Target: ATXN2; (-) strand; PAM type: YTN; PAM sequence: CTC
ctgcttcagcctcccgagca

SEQ ID NO: 71212 - DNA, 20 bp, Artificial Sequence
  Description of Artificial Sequence: Synthetic oligonucleotide
  Target: ATXN2; (-) strand; PAM type: YTN; PAM sequence: TTC
tcctgcttcagcctcccgag

SEQ ID NO: 71213 - DNA, 20 bp, Artificial Sequence
  Description of Artificial Sequence: Synthetic oligonucleotide
  Target: ATXN2; (-) strand; PAM type: YTN; PAM sequence: TTC
aagtgattctcctgcttcag

SEQ ID NO: 71214 - DNA, 20 bp, Artificial Sequence
  Description of Artificial Sequence: Synthetic oligonucleotide
  Target: ATXN2; (-) strand; PAM type: YTN; PAM sequence: CTC
ccaggttcaagtgattctcc

SEQ ID NO: 71215 - DNA, 20 bp, Artificial Sequence
  Description of Artificial Sequence: Synthetic oligonucleotide
  Target: ATXN2; (-) strand; PAM type: YTN; PAM sequence: CTG
cctcccaggttcaagtgatt

SEQ ID NO: 71216 - DNA, 20 bp, Artificial Sequence
  Description of Artificial Sequence: Synthetic oligonucleotide
  Target: ATXN2; (-) strand; PAM type: YTN; PAM sequence: CTC
tgcctcccaggttcaagtga

SEQ ID NO: 71217 - DNA, 20 bp, Artificial Sequence
  Description of Artificial Sequence: Synthetic oligonucleotide
  Target: ATXN2; (-) strand; PAM type: YTN; PAM sequence: CTC
accgcagcctctgcctccca

SEQ ID NO: 71218 - DNA, 20 bp, Artificial Sequence
  Description of Artificial Sequence: Synthetic oligonucleotide
  Target: ATXN2; (-) strand; PAM type: YTN; PAM sequence: CTC
ggctcaccgcagcctctgcc

SEQ ID NO: 71219 - DNA, 20 bp, Artificial Sequence
  Description of Artificial Sequence: Synthetic oligonucleotide
  Target: ATXN2; (-) strand; PAM type: YTN; PAM sequence: CTG
gagtgcaatggtgcgatctc

SEQ ID NO: 71220 - DNA, 20 bp, Artificial Sequence
  Description of Artificial Sequence: Synthetic oligonucleotide
  Target: ATXN2; (-) strand; PAM type: YTN; PAM sequence: TTA
cccaggctggagtgcaatgg

SEQ ID NO: 71221 - DNA, 20 bp, Artificial Sequence
  Description of Artificial Sequence: Synthetic oligonucleotide
  Target: ATXN2; (-) strand; PAM type: YTN; PAM sequence: TTG
ttacccaggctggagtgcaa

SEQ ID NO: 71222 - DNA, 20 bp, Artificial Sequence
  Description of Artificial Sequence: Synthetic oligonucleotide
  Target: ATXN2; (-) strand; PAM type: YTN; PAM sequence: CTT
gttacccaggctggagtgca

SEQ ID NO: 71223 - DNA, 20 bp, Artificial Sequence
  Description of Artificial Sequence: Synthetic oligonucleotide
  Target: ATXN2; (-) strand; PAM type: YTN; PAM sequence: CTC
ttgttacccaggctggagtg

SEQ ID NO: 71224 - DNA, 20 bp, Artificial Sequence
  Description of Artificial Sequence: Synthetic oligonucleotide
  Target: ATXN2; (-) strand; PAM type: YTN; PAM sequence: TTC
gctcttgttacccaggctgg

SEQ ID NO: 71225 - DNA, 20 bp, Artificial Sequence
  Description of Artificial Sequence: Synthetic oligonucleotide
  Target: ATXN2; (-) strand; PAM type: YTN; PAM sequence: TTT
cgctcttgttacccaggctg

SEQ ID NO: 71226 - DNA, 20 bp, Artificial Sequence
  Description of Artificial Sequence: Synthetic oligonucleotide
  Target: ATXN2; (-) strand; PAM type: YTN; PAM sequence: TTA
aacagagtttcgctcttgtt

SEQ ID NO: 71227 - DNA, 20 bp, Artificial Sequence
  Description of Artificial Sequence: Synthetic oligonucleotide
  Target: ATXN2; (-) strand; PAM type: YTN; PAM sequence: TTT
aaacagagtttcgctcttgt

SEQ ID NO: 71228 - DNA, 20 bp, Artificial Sequence
  Description of Artificial Sequence: Synthetic oligonucleotide
  Target: ATXN2; (-) strand; PAM type: YTN; PAM sequence: TTT
taaacagagtttcgctcttg

SEQ ID NO: 71229 - DNA, 20 bp, Artificial Sequence
  Description of Artificial Sequence: Synthetic oligonucleotide
  Target: ATXN2; (-) strand; PAM type: YTN; PAM sequence: TTA
attttaaacagagtttcgct

SEQ ID NO: 71230 - DNA, 20 bp, Artificial Sequence
  Description of Artificial Sequence: Synthetic oligonucleotide
  Target: ATXN2; (-) strand; PAM type: YTN; PAM sequence: TTT
aattttaaacagagtttcgc

SEQ ID NO: 71231 - DNA, 20 bp, Artificial Sequence
  Description of Artificial Sequence: Synthetic oligonucleotide
  Target: ATXN2; (-) strand; PAM type: YTN; PAM sequence: TTG
atttaattttaaacagagtt

SEQ ID NO: 71232 - DNA, 20 bp, Artificial Sequence
  Description of Artificial Sequence: Synthetic oligonucleotide
  Target: ATXN2; (-) strand; PAM type: YTN; PAM sequence: CTG
ttgatttaattttaaacaga

SEQ ID NO: 71233 - DNA, 20 bp, Artificial Sequence
  Description of Artificial Sequence: Synthetic oligonucleotide
  Target: ATXN2; (-) strand; PAM type: YTN; PAM sequence: CTG
tgcccagcctgttgatttaa

SEQ ID NO: 71234 - DNA, 20 bp, Artificial Sequence
  Description of Artificial Sequence: Synthetic oligonucleotide
  Target: ATXN2; (-) strand; PAM type: YTN; PAM sequence: TTA
cagatgtgagccactgtgcc

SEQ ID NO: 71235 - DNA, 20 bp, Artificial Sequence
  Description of Artificial Sequence: Synthetic oligonucleotide
  Target: ATXN2; (-) strand; PAM type: YTN; PAM sequence: CTG
ggattacagatgtgagccac

SEQ ID NO: 71236 - DNA, 20 bp, Artificial Sequence
  Description of Artificial Sequence: Synthetic oligonucleotide
  Target: ATXN2; (-) strand; PAM type: YTN; PAM sequence: CTC
ccaaagtgctgggattacag

SEQ ID NO: 71237 - DNA, 20 bp, Artificial Sequence
  Description of Artificial Sequence: Synthetic oligonucleotide
  Target: ATXN2; (-) strand; PAM type: YTN; PAM sequence: CTC
agcctcccaaagtgctggga

SEQ ID NO: 71238 - DNA, 20 bp, Artificial Sequence
  Description of Artificial Sequence: Synthetic oligonucleotide
  Target: ATXN2; (-) strand; PAM type: YTN; PAM sequence: CTC
atgatccacccgcctcagcc

SEQ ID NO: 71239 - DNA, 20 bp, Artificial Sequence
  Description of Artificial Sequence: Synthetic oligonucleotide
  Target: ATXN2; (-) strand; PAM type: YTN; PAM sequence: TTG
acctcatgatccacccgcct

SEQ ID NO: 71240 - DNA, 20 bp, Artificial Sequence
  Description of Artificial Sequence: Synthetic oligonucleotide
  Target: ATXN2; (-) strand; PAM type: YTN; PAM sequence: CTT
gacctcatgatccacccgcc

SEQ ID NO: 71241 - DNA, 20 bp, Artificial Sequence
  Description of Artificial Sequence: Synthetic oligonucleotide
  Target: ATXN2; (-) strand; PAM type: YTN; PAM sequence: CTC
ttgacctcatgatccacccg

SEQ ID NO: 71242 - DNA, 20 bp, Artificial Sequence
  Description of Artificial Sequence: Synthetic oligonucleotide
  Target: ATXN2; (-) strand; PAM type: YTN; PAM sequence: CTC
gatctcttgacctcatgatc

SEQ ID NO: 71243 - DNA, 20 bp, Artificial Sequence
  Description of Artificial Sequence: Synthetic oligonucleotide
  Target: ATXN2; (-) strand; PAM type: YTN; PAM sequence: TTG
gccaggatggtctcgatctc

SEQ ID NO: 71244 - DNA, 20 bp, Artificial Sequence
  Description of Artificial Sequence: Synthetic oligonucleotide
  Target: ATXN2; (-) strand; PAM type: YTN; PAM sequence: TTC
accatgttggccaggatggt

SEQ ID NO: 71245 - DNA, 20 bp, Artificial Sequence
  Description of Artificial Sequence: Synthetic oligonucleotide
  Target: ATXN2; (-) strand; PAM type: YTN; PAM sequence: TTT
caccatgttggccaggatgg

SEQ ID NO: 71246 - DNA, 20 bp, Artificial Sequence
  Description of Artificial Sequence: Synthetic oligonucleotide
  Target: ATXN2; (-) strand; PAM type: YTN; PAM sequence: TTA
gtagagacagggtttcacca

SEQ ID NO: 71247 - DNA, 20 bp, Artificial Sequence
  Description of Artificial Sequence: Synthetic oligonucleotide
  Target: ATXN2; (-) strand; PAM type: YTN; PAM sequence: TTT
agtagagacagggtttcacc

SEQ ID NO: 71248 - DNA, 20 bp, Artificial Sequence
  Description of Artificial Sequence: Synthetic oligonucleotide
  Target: ATXN2; (-) strand; PAM type: YTN; PAM sequence: TTT
tagtagagacagggtttcac

SEQ ID NO: 71249 - DNA, 20 bp, Artificial Sequence
  Description of Artificial Sequence: Synthetic oligonucleotide
  Target: ATXN2; (-) strand; PAM type: YTN; PAM sequence: TTT
ttagtagagacagggtttca

SEQ ID NO: 71250 - DNA, 20 bp, Artificial Sequence
  Description of Artificial Sequence: Synthetic oligonucleotide
  Target: ATXN2; (-) strand; PAM type: YTN; PAM sequence: TTG
tatttttagtagagacaggg

SEQ ID NO: 71251 - DNA, 20 bp, Artificial Sequence
  Description of Artificial Sequence: Synthetic oligonucleotide
  Target: ATXN2; (-) strand; PAM type: YTN; PAM sequence: TTT
gtatttttagtagagacagg

SEQ ID NO: 71252 - DNA, 20 bp, Artificial Sequence
  Description of Artificial Sequence: Synthetic oligonucleotide
  Target: ATXN2; (-) strand; PAM type: YTN; PAM sequence: TTT
tgtatttttagtagagacag

SEQ ID NO: 71253 - DNA, 20 bp, Artificial Sequence
  Description of Artificial Sequence: Synthetic oligonucleotide
  Target: ATXN2; (-) strand; PAM type: YTN; PAM sequence: TTT
ttgtatttttagtagagaca

SEQ ID NO: 71254 - DNA, 20 bp, Artificial Sequence
  Description of Artificial Sequence: Synthetic oligonucleotide
  Target: ATXN2; (-) strand; PAM type: YTN; PAM sequence: CTA
atttttgtatttttagtaga

SEQ ID NO: 71255 - DNA, 20 bp, Artificial Sequence
  Description of Artificial Sequence: Synthetic oligonucleotide
  Target: ATXN2; (-) strand; PAM type: YTN; PAM sequence: CTA
cctaatttttgtatttttag

SEQ ID NO: 71256 - DNA, 20 bp, Artificial Sequence
  Description of Artificial Sequence: Synthetic oligonucleotide
  Target: ATXN2; (-) strand; PAM type: YTN; PAM sequence: CTA
taggcgtgtaccaccacgcc

SEQ ID NO: 71257 - DNA, 20 bp, Artificial Sequence
  Description of Artificial Sequence: Synthetic oligonucleotide
  Target: ATXN2; (-) strand; PAM type: YTN; PAM sequence: CTG
ggactataggcgtgtaccac

SEQ ID NO: 71258 - DNA, 20 bp, Artificial Sequence
  Description of Artificial Sequence: Synthetic oligonucleotide
  Target: ATXN2; (-) strand; PAM type: YTN; PAM sequence: CTC
ccgagtagctgggactatag

SEQ ID NO: 71259 - DNA, 20 bp, Artificial Sequence
  Description of Artificial Sequence: Synthetic oligonucleotide
  Target: ATXN2; (-) strand; PAM type: YTN; PAM sequence: CTC
agcctcccgagtagctggga

SEQ ID NO: 71260 - DNA, 20 bp, Artificial Sequence
  Description of Artificial Sequence: Synthetic oligonucleotide
  Target: ATXN2; (-) strand; PAM type: YTN; PAM sequence: CTG
cctcagcctcccgagtagct

SEQ ID NO: 71261 - DNA, 20 bp, Artificial Sequence
  Description of Artificial Sequence: Synthetic oligonucleotide
  Target: ATXN2; (-) strand; PAM type: YTN; PAM sequence: TTC
gcctgcctcagcctcccgag

SEQ ID NO: 71262 - DNA, 20 bp, Artificial Sequence
  Description of Artificial Sequence: Synthetic oligonucleotide
  Target: ATXN2; (-) strand; PAM type: YTN; PAM sequence: TTC
aagcaattcgcctgcctcag

SEQ ID NO: 71263 - DNA, 20 bp, Artificial Sequence
  Description of Artificial Sequence: Synthetic oligonucleotide
  Target: ATXN2; (-) strand; PAM type: YTN; PAM sequence: TTC
aaggttcaagcaattcgcct

SEQ ID NO: 71264 - DNA, 20 bp, Artificial Sequence
  Description of Artificial Sequence: Synthetic oligonucleotide
  Target: ATXN2; (-) strand; PAM type: YTN; PAM sequence: TTC
aagcaattcaaggttcaagc

SEQ ID NO: 71265 - DNA, 20 bp, Artificial Sequence
  Description of Artificial Sequence: Synthetic oligonucleotide
  Target: ATXN2; (-) strand; PAM type: YTN; PAM sequence: CTA
gtagttcaagcaattcaagg

SEQ ID NO: 71266 - DNA, 20 bp, Artificial Sequence
  Description of Artificial Sequence: Synthetic oligonucleotide
  Target: ATXN2; (-) strand; PAM type: YTN; PAM sequence: CTC
cctagtagttcaagcaattc

SEQ ID NO: 71267 - DNA, 20 bp, Artificial Sequence
  Description of Artificial Sequence: Synthetic oligonucleotide
  Target: ATXN2; (-) strand; PAM type: YTN; PAM sequence: CTC
cgcctccctagtagttcaag

SEQ ID NO: 71268 - DNA, 20 bp, Artificial Sequence
  Description of Artificial Sequence: Synthetic oligonucleotide
  Target: ATXN2; (-) strand; PAM type: YTN; PAM sequence: CTA
caacctccgcctccctagta

SEQ ID NO: 71269 - DNA, 20 bp, Artificial Sequence
  Description of Artificial Sequence: Synthetic oligonucleotide
  Target: ATXN2; (-) strand; PAM type: YTN; PAM sequence: CTC
actacaacctccgcctccct

SEQ ID NO: 71270 - DNA, 20 bp, Artificial Sequence
  Description of Artificial Sequence: Synthetic oligonucleotide
  Target: ATXN2; (-) strand; PAM type: YTN; PAM sequence: TTG
gctcactacaacctccgcct

SEQ ID NO: 71271 - DNA, 20 bp, Artificial Sequence
  Description of Artificial Sequence: Synthetic oligonucleotide
  Target: ATXN2; (-) strand; PAM type: YTN; PAM sequence: CTT
ggctcactacaacctccgcc

SEQ ID NO: 71272 - DNA, 20 bp, Artificial Sequence
  Description of Artificial Sequence: Synthetic oligonucleotide
  Target: ATXN2; (-) strand; PAM type: YTN; PAM sequence: TTG
gagtgcagtggcgcaatctt

SEQ ID NO: 71273 - DNA, 20 bp, Artificial Sequence
  Description of Artificial Sequence: Synthetic oligonucleotide
  Target: ATXN2; (-) strand; PAM type: YTN; PAM sequence: CTC
gccaggttggagtgcagtgg

SEQ ID NO: 71274 - DNA, 20 bp, Artificial Sequence
  Description of Artificial Sequence: Synthetic oligonucleotide
  Target: ATXN2; (-) strand; PAM type: YTN; PAM sequence: CTC
tcgccaggttggagtgcagt

SEQ ID NO: 71275 - DNA, 20 bp, Artificial Sequence
  Description of Artificial Sequence: Synthetic oligonucleotide
  Target: ATXN2; (-) strand; PAM type: YTN; PAM sequence: CTC
gctctcgccaggttggagtg

SEQ ID NO: 71276 - DNA, 20 bp, Artificial Sequence
  Description of Artificial Sequence: Synthetic oligonucleotide
  Target: ATXN2; (-) strand; PAM type: YTN; PAM sequence: TTG
agacggagtctcgctctcgc

SEQ ID NO: 71277 - DNA, 20 bp, Artificial Sequence
  Description of Artificial Sequence: Synthetic oligonucleotide
  Target: ATXN2; (-) strand; PAM type: YTN; PAM sequence: TTT
gagacggagtctcgctctcg

SEQ ID NO: 71278 - DNA, 20 bp, Artificial Sequence
  Description of Artificial Sequence: Synthetic oligonucleotide
  Target: ATXN2; (-) strand; PAM type: YTN; PAM sequence: TTT
tgagacggagtctcgctctc

SEQ ID NO: 71279 - DNA, 20 bp, Artificial Sequence
  Description of Artificial Sequence: Synthetic oligonucleotide
  Target: ATXN2; (-) strand; PAM type: YTN; PAM sequence: TTT
ttgagacggagtctcgctct

SEQ ID NO: 71280 - DNA, 20 bp, Artificial Sequence
  Description of Artificial Sequence: Synthetic oligonucleotide
  Target: ATXN2; (-) strand; PAM type: YTN; PAM sequence: TTT
tttgagacggagtctcgctc

SEQ ID NO: 71281 - DNA, 20 bp, Artificial Sequence
  Description of Artificial Sequence: Synthetic oligonucleotide
  Target: ATXN2; (-) strand; PAM type: YTN; PAM sequence: TTA
ttttttgagacggagtctcg

SEQ ID NO: 71282 - DNA, 20 bp, Artificial Sequence
  Description of Artificial Sequence: Synthetic oligonucleotide
  Target: ATXN2; (-) strand; PAM type: YTN; PAM sequence: TTT
attttttgagacggagtctc

SEQ ID NO: 71283 - DNA, 20 bp, Artificial Sequence
  Description of Artificial Sequence: Synthetic oligonucleotide
  Target: ATXN2; (-) strand; PAM type: YTN; PAM sequence: TTA
tttattttttgagacggagt

SEQ ID NO: 71284 - DNA, 20 bp, Artificial Sequence
  Description of Artificial Sequence: Synthetic oligonucleotide
  Target: ATXN2; (-) strand; PAM type: YTN; PAM sequence: TTT
atttattttttgagacggag

SEQ ID NO: 71285 - DNA, 20 bp, Artificial Sequence
  Description of Artificial Sequence: Synthetic oligonucleotide
  Target: ATXN2; (-) strand; PAM type: YTN; PAM sequence: TTA
tttatttattttttgagacg

SEQ ID NO: 71286 - DNA, 20 bp, Artificial Sequence
  Description of Artificial Sequence: Synthetic oligonucleotide
  Target: ATXN2; (-) strand; PAM type: YTN; PAM sequence: TTT
atttatttattttttgagac

SEQ ID NO: 71287 - DNA, 20 bp, Artificial Sequence
  Description of Artificial Sequence: Synthetic oligonucleotide
  Target: ATXN2; (-) strand; PAM type: YTN; PAM sequence: TTT
tatttatttattttttgaga

SEQ ID NO: 71288 - DNA, 20 bp, Artificial Sequence
  Description of Artificial Sequence: Synthetic oligonucleotide
  Target: ATXN2; (-) strand; PAM type: YTN; PAM sequence: TTT
ttatttatttattttttgag

SEQ ID NO: 71289 - DNA, 20 bp, Artificial Sequence
  Description of Artificial Sequence: Synthetic oligonucleotide
  Target: ATXN2; (-) strand; PAM type: YTN; PAM sequence: TTT
tttatttatttattttttga

SEQ ID NO: 71290 - DNA, 20 bp, Artificial Sequence
  Description of Artificial Sequence: Synthetic oligonucleotide
  Target: ATXN2; (-) strand; PAM type: YTN; PAM sequence: TTA
tacacatattttttatttat

SEQ ID NO: 71291 - DNA, 20 bp, Artificial Sequence
  Description of Artificial Sequence: Synthetic oligonucleotide
  Target: ATXN2; (-) strand; PAM type: YTN; PAM sequence: TTT
atacacatattttttattta

SEQ ID NO: 71292 - DNA, 20 bp, Artificial Sequence
  Description of Artificial Sequence: Synthetic oligonucleotide
  Target: ATXN2; (-) strand; PAM type: YTN; PAM sequence: TTC
agaaaatgtttatacacata

SEQ ID NO: 71293 - DNA, 20 bp, Artificial Sequence
  Description of Artificial Sequence: Synthetic oligonucleotide
  Target: ATXN2; (-) strand; PAM type: YTN; PAM sequence: TTG
tgtacaattcagaaaatgtt

SEQ ID NO: 71294 - DNA, 20 bp, Artificial Sequence
  Description of Artificial Sequence: Synthetic oligonucleotide
  Target: ATXN2; (-) strand; PAM type: YTN; PAM sequence: CTT
gtgtacaattcagaaaatgt

SEQ ID NO: 71295 - DNA, 20 bp, Artificial Sequence
  Description of Artificial Sequence: Synthetic oligonucleotide
  Target: ATXN2; (-) strand; PAM type: YTN; PAM sequence: TTC
ttgtgtacaattcagaaaat

SEQ ID NO: 71296 - DNA, 20 bp, Artificial Sequence
  Description of Artificial Sequence: Synthetic oligonucleotide
  Target: ATXN2; (-) strand; PAM type: YTN; PAM sequence: CTG
tgttcttgtgtacaattcag

SEQ ID NO: 71297 - DNA, 20 bp, Artificial Sequence
  Description of Artificial Sequence: Synthetic oligonucleotide
  Target: ATXN2; (-) strand; PAM type: YTN; PAM sequence: CTG
gggaagcctgtgttcttgtg

SEQ ID NO: 71298 - DNA, 20 bp, Artificial Sequence
  Description of Artificial Sequence: Synthetic oligonucleotide
  Target: ATXN2; (-) strand; PAM type: YTN; PAM sequence: TTC
cctggggaagcctgtgttct

SEQ ID NO: 71299 - DNA, 20 bp, Artificial Sequence
  Description of Artificial Sequence: Synthetic oligonucleotide
  Target: ATXN2; (-) strand; PAM type: YTN; PAM sequence: CTT
ccctggggaagcctgtgttc

SEQ ID NO: 71300 - DNA, 20 bp, Artificial Sequence
  Description of Artificial Sequence: Synthetic oligonucleotide
  Target: ATXN2; (-) strand; PAM type: YTN; PAM sequence: CTA
acccccagtcccacttccct

SEQ ID NO: 71301 - DNA, 20 bp, Artificial Sequence
  Description of Artificial Sequence: Synthetic oligonucleotide
  Target: ATXN2; (-) strand; PAM type: YTN; PAM sequence: CTC
taacccccagtcccacttcc

SEQ ID NO: 71302 - DNA, 20 bp, Artificial Sequence
  Description of Artificial Sequence: Synthetic oligonucleotide
  Target: ATXN2; (-) strand; PAM type: YTN; PAM sequence: CTC
tctaacccccagtcccactt

SEQ ID NO: 71303 - DNA, 20 bp, Artificial Sequence
  Description of Artificial Sequence: Synthetic oligonucleotide
  Target: ATXN2; (-) strand; PAM type: YTN; PAM sequence: CTC
ctctctaacccccagtccca

SEQ ID NO: 71304 - DNA, 20 bp, Artificial Sequence
  Description of Artificial Sequence: Synthetic oligonucleotide
  Target: ATXN2; (-) strand; PAM type: YTN; PAM sequence: TTC
aatgaaaagataatctcctc

SEQ ID NO: 71305 - DNA, 20 bp, Artificial Sequence
  Description of Artificial Sequence: Synthetic oligonucleotide
  Target: ATXN2; (-) strand; PAM type: YTN; PAM sequence: TTA
gaacagatgagtattcaatg

SEQ ID NO: 71306 - DNA, 20 bp, Artificial Sequence
  Description of Artificial Sequence: Synthetic oligonucleotide
  Target: ATXN2; (-) strand; PAM type: YTN; PAM sequence: TTC
agttagaacagatgagtatt

SEQ ID NO: 71307 - DNA, 20 bp, Artificial Sequence
  Description of Artificial Sequence: Synthetic oligonucleotide
  Target: ATXN2; (-) strand; PAM type: YTN; PAM sequence: CTC
gtagtatacaattcagttag

SEQ ID NO: 71308 - DNA, 20 bp, Artificial Sequence
  Description of Artificial Sequence: Synthetic oligonucleotide
  Target: ATXN2; (-) strand; PAM type: YTN; PAM sequence: CTG
tataatacatggtgtagtag

SEQ ID NO: 71309 - DNA, 20 bp, Artificial Sequence
  Description of Artificial Sequence: Synthetic oligonucleotide
  Target: ATXN2; (-) strand; PAM type: YTN; PAM sequence: TTA
atataatctgtataatacat

SEQ ID NO: 71310 - DNA, 20 bp, Artificial Sequence
  Description of Artificial Sequence: Synthetic oligonucleotide
  Target: ATXN2; (-) strand; PAM type: YTN; PAM sequence: TTT
aatataatctgtataataca

SEQ ID NO: 71311 - DNA, 20 bp, Artificial Sequence
  Description of Artificial Sequence: Synthetic oligonucleotide
  Target: ATXN2; (-) strand; PAM type: YTN; PAM sequence: CTT
taatataatctgtataatac

SEQ ID NO: 71312 - DNA, 20 bp, Artificial Sequence
  Description of Artificial Sequence: Synthetic oligonucleotide
  Target: ATXN2; (-) strand; PAM type: YTN; PAM sequence: TTA
tagtctttaatataatctgt

SEQ ID NO: 71313 - DNA, 20 bp, Artificial Sequence
  Description of Artificial Sequence: Synthetic oligonucleotide
  Target: ATXN2; (-) strand; PAM type: YTN; PAM sequence: TTC
agtattatagtctttaatat

SEQ ID NO: 71314 - DNA, 20 bp, Artificial Sequence
  Description of Artificial Sequence: Synthetic oligonucleotide
  Target: ATXN2; (-) strand; PAM type: YTN; PAM sequence: CTT
cagtattatagtctttaata

SEQ ID NO: 71315 - DNA, 20 bp, Artificial Sequence
  Description of Artificial Sequence: Synthetic oligonucleotide
  Target: ATXN2; (-) strand; PAM type: YTN; PAM sequence: TTC
ttcagtattatagtctttaa

SEQ ID NO: 71316 - DNA, 20 bp, Artificial Sequence
  Description of Artificial Sequence: Synthetic oligonucleotide
  Target: ATXN2; (-) strand; PAM type: YTN; PAM sequence: TTA
ttcttcagtattatagtctt

SEQ ID NO: 71317 - DNA, 20 bp, Artificial Sequence
  Description of Artificial Sequence: Synthetic oligonucleotide
  Target: ATXN2; (-) strand; PAM type: YTN; PAM sequence: TTG
tgttattcttcagtattata

SEQ ID NO: 71318 - DNA, 20 bp, Artificial Sequence
  Description of Artificial Sequence: Synthetic oligonucleotide
  Target: ATXN2; (-) strand; PAM type: YTN; PAM sequence: TTT
gtgttattcttcagtattat

SEQ ID NO: 71319 - DNA, 20 bp, Artificial Sequence
  Description of Artificial Sequence: Synthetic oligonucleotide
  Target: ATXN2; (-) strand; PAM type: YTN; PAM sequence: CTT
tgtgttattcttcagtatta

SEQ ID NO: 71320 - DNA, 20 bp, Artificial Sequence
  Description of Artificial Sequence: Synthetic oligonucleotide
  Target: ATXN2; (-) strand; PAM type: YTN; PAM sequence: TTC
tttgtgttattcttcagtat

SEQ ID NO: 71321 - DNA, 20 bp, Artificial Sequence
  Description of Artificial Sequence: Synthetic oligonucleotide
  Target: ATXN2; (-) strand; PAM type: YTN; PAM sequence: TTT
ctttgtgttattcttcagta

SEQ ID NO: 71322 - DNA, 20 bp, Artificial Sequence
  Description of Artificial Sequence: Synthetic oligonucleotide
  Target: ATXN2; (-) strand; PAM type: YTN; PAM sequence: TTG
tttctttgtgttattcttca

SEQ ID NO: 71323 - DNA, 20 bp, Artificial Sequence
  Description of Artificial Sequence: Synthetic oligonucleotide
  Target: ATXN2; (-) strand; PAM type: YTN; PAM sequence: CTT
gtttctttgtgttattcttc

SEQ ID NO: 71324 - DNA, 20 bp, Artificial Sequence
  Description of Artificial Sequence: Synthetic oligonucleotide
  Target: ATXN2; (-) strand; PAM type: YTN; PAM sequence: TTA
tccccaacttgtttctttgt

SEQ ID NO: 71325 - DNA, 20 bp, Artificial Sequence
  Description of Artificial Sequence: Synthetic oligonucleotide
  Target: ATXN2; (-) strand; PAM type: YTN; PAM sequence: CTT
atccccaacttgtttctttg

SEQ ID NO: 71326 - DNA, 20 bp, Artificial Sequence
  Description of Artificial Sequence: Synthetic oligonucleotide
  Target: ATXN2; (-) strand; PAM type: YTN; PAM sequence: TTC
ttatccccaacttgtttctt

SEQ ID NO: 71327 - DNA, 20 bp, Artificial Sequence
  Description of Artificial Sequence: Synthetic oligonucleotide
  Target: ATXN2; (-) strand; PAM type: YTN; PAM sequence: TTT
cttatccccaacttgtttct

SEQ ID NO: 71328 - DNA, 20 bp, Artificial Sequence
  Description of Artificial Sequence: Synthetic oligonucleotide
  Target: ATXN2; (-) strand; PAM type: YTN; PAM sequence: CTG
tgtttcttatccccaacttg

SEQ ID NO: 71329 - DNA, 20 bp, Artificial Sequence
  Description of Artificial Sequence: Synthetic oligonucleotide
  Target: ATXN2; (-) strand; PAM type: YTN; PAM sequence: TTA
actgtgtttcttatccccaa

SEQ ID NO: 71330 - DNA, 20 bp, Artificial Sequence
  Description of Artificial Sequence: Synthetic oligonucleotide
  Target: ATXN2; (-) strand; PAM type: YTN; PAM sequence: CTT
aactgtgtttcttatcccca

SEQ ID NO: 71331 - DNA, 20 bp, Artificial Sequence
  Description of Artificial Sequence: Synthetic oligonucleotide
  Target: ATXN2; (-) strand; PAM type: YTN; PAM sequence: CTG
cacccttaactgtgtttctt

SEQ ID NO: 71332 - DNA, 20 bp, Artificial Sequence
  Description of Artificial Sequence: Synthetic oligonucleotide
  Target: ATXN2; (-) strand; PAM type: YTN; PAM sequence: TTC
cagtccatacatcctgcacc

SEQ ID NO: 71333 - DNA, 20 bp, Artificial Sequence
  Description of Artificial Sequence: Synthetic oligonucleotide
  Target: ATXN2; (-) strand; PAM type: YTN; PAM sequence: TTG
ttccagtccatacatcctgc

SEQ ID NO: 71334 - DNA, 20 bp, Artificial Sequence
  Description of Artificial Sequence: Synthetic oligonucleotide
  Target: ATXN2; (-) strand; PAM type: YTN; PAM sequence: TTG
ttgttccagtccatacatcc

SEQ ID NO: 71335 - DNA, 20 bp, Artificial Sequence
  Description of Artificial Sequence: Synthetic oligonucleotide
  Target: ATXN2; (-) strand; PAM type: YTN; PAM sequence: TTT
gttgttccagtccatacatc

SEQ ID NO: 71336 - DNA, 20 bp, Artificial Sequence
  Description of Artificial Sequence: Synthetic oligonucleotide
  Target: ATXN2; (-) strand; PAM type: YTN; PAM sequence: TTT
tgttgttccagtccatacat

SEQ ID NO: 71337 - DNA, 20 bp, Artificial Sequence
  Description of Artificial Sequence: Synthetic oligonucleotide
  Target: ATXN2; (-) strand; PAM type: YTN; PAM sequence: TTG
gttttgttgttccagtccat

SEQ ID NO: 71338 - DNA, 20 bp, Artificial Sequence
  Description of Artificial Sequence: Synthetic oligonucleotide
  Target: ATXN2; (-) strand; PAM type: YTN; PAM sequence: CTT
ggttttgttgttccagtcca

SEQ ID NO: 71339 - DNA, 20 bp, Artificial Sequence
  Description of Artificial Sequence: Synthetic oligonucleotide
  Target: ATXN2; (-) strand; PAM type: YTN; PAM sequence: CTG
tgcccttggttttgttgttc

SEQ ID NO: 71340 - DNA, 20 bp, Artificial Sequence
  Description of Artificial Sequence: Synthetic oligonucleotide
  Target: ATXN2; (-) strand; PAM type: YTN; PAM sequence: CTC
cacctgtgcccttggttttg

SEQ ID NO: 71341 - DNA, 20 bp, Artificial Sequence
  Description of Artificial Sequence: Synthetic oligonucleotide
  Target: ATXN2; (-) strand; PAM type: YTN; PAM sequence: CTG
aggagcgtggctccacctgt

SEQ ID NO: 71342 - DNA, 20 bp, Artificial Sequence
  Description of Artificial Sequence: Synthetic oligonucleotide
  Target: ATXN2; (-) strand; PAM type: YTN; PAM sequence: CTA
gcctgaggagcgtggctcca

SEQ ID NO: 71343 - DNA, 20 bp, Artificial Sequence
  Description of Artificial Sequence: Synthetic oligonucleotide
  Target: ATXN2; (-) strand; PAM type: YTN; PAM sequence: TTC
tagcctgaggagcgtggctc

SEQ ID NO: 71344 - DNA, 20 bp, Artificial Sequence
  Description of Artificial Sequence: Synthetic oligonucleotide
  Target: ATXN2; (-) strand; PAM type: YTN; PAM sequence: CTA
ccccattctagcctgaggag

SEQ ID NO: 71345 - DNA, 20 bp, Artificial Sequence
  Description of Artificial Sequence: Synthetic oligonucleotide
  Target: ATXN2; (-) strand; PAM type: YTN; PAM sequence: TTG
tcatcatacccctaccccat

SEQ ID NO: 71346 - DNA, 20 bp, Artificial Sequence
  Description of Artificial Sequence: Synthetic oligonucleotide
  Target: ATXN2; (-) strand; PAM type: YTN; PAM sequence: TTT
gtcatcatacccctacccca

SEQ ID NO: 71347 - DNA, 20 bp, Artificial Sequence
  Description of Artificial Sequence: Synthetic oligonucleotide
  Target: ATXN2; (-) strand; PAM type: YTN; PAM sequence: TTT
tgtcatcatacccctacccc

SEQ ID NO: 71348 - DNA, 20 bp, Artificial Sequence
  Description of Artificial Sequence: Synthetic oligonucleotide
  Target: ATXN2; (-) strand; PAM type: YTN; PAM sequence: CTT
ttgtcatcatacccctaccc

SEQ ID NO: 71349 - DNA, 20 bp, Artificial Sequence
  Description of Artificial Sequence: Synthetic oligonucleotide
  Target: ATXN2; (-) strand; PAM type: YTN; PAM sequence: CTC
ttttgtcatcatacccctac

SEQ ID NO: 71350 - DNA, 20 bp, Artificial Sequence
  Description of Artificial Sequence: Synthetic oligonucleotide
  Target: ATXN2; (-) strand; PAM type: YTN; PAM sequence: CTC
cccacagtcctcttttgtca

SEQ ID NO: 71351 - DNA, 20 bp, Artificial Sequence
  Description of Artificial Sequence: Synthetic oligonucleotide
  Target: ATXN2; (-) strand; PAM type: YTN; PAM sequence: CTA
gaggctccccacagtcctct

SEQ ID NO: 71352 - DNA, 20 bp, Artificial Sequence
  Description of Artificial Sequence: Synthetic oligonucleotide
  Target: ATXN2; (-) strand; PAM type: YTN; PAM sequence: CTA
atctagaggctccccacagt

SEQ ID NO: 71353 - DNA, 20 bp, Artificial Sequence
  Description of Artificial Sequence: Synthetic oligonucleotide
  Target: ATXN2; (-) strand; PAM type: YTN; PAM sequence: CTA
agaatccctaatctagaggc

SEQ ID NO: 71354 - DNA, 20 bp, Artificial Sequence
  Description of Artificial Sequence: Synthetic oligonucleotide
  Target: ATXN2; (-) strand; PAM type: YTN; PAM sequence: TTA
agaaaaaggctaagaatccc

SEQ ID NO: 71355 - DNA, 20 bp, Artificial Sequence
  Description of Artificial Sequence: Synthetic oligonucleotide
  Target: ATXN2; (-) strand; PAM type: YTN; PAM sequence: TTG
aaggggcccatggattaaga

SEQ ID NO: 71356 - DNA, 20 bp, Artificial Sequence
  Description of Artificial Sequence: Synthetic oligonucleotide
  Target: ATXN2; (-) strand; PAM type: YTN; PAM sequence: CTA
aaatattgaaggggcccatg

SEQ ID NO: 71357 - DNA, 20 bp, Artificial Sequence
  Description of Artificial Sequence: Synthetic oligonucleotide
  Target: ATXN2; (-) strand; PAM type: YTN; PAM sequence: TTC
cctaaaatattgaaggggcc

SEQ ID NO: 71358 - DNA, 20 bp, Artificial Sequence
  Description of Artificial Sequence: Synthetic oligonucleotide
  Target: ATXN2; (-) strand; PAM type: YTN; PAM sequence: CTT
ccctaaaatattgaaggggc

SEQ ID NO: 71359 - DNA, 20 bp, Artificial Sequence
  Description of Artificial Sequence: Synthetic oligonucleotide
  Target: ATXN2; (-) strand; PAM type: YTN; PAM sequence: TTC
ataggcttccctaaaatatt

SEQ ID NO: 71360 - DNA, 20 bp, Artificial Sequence
  Description of Artificial Sequence: Synthetic oligonucleotide
  Target: ATXN2; (-) strand; PAM type: YTN; PAM sequence: TTT
cataggcttccctaaaatat

SEQ ID NO: 71361 - DNA, 20 bp, Artificial Sequence
  Description of Artificial Sequence: Synthetic oligonucleotide
  Target: ATXN2; (-) strand; PAM type: YTN; PAM sequence: CTG
aatacggtttcataggcttc

SEQ ID NO: 71362 - DNA, 20 bp, Artificial Sequence
  Description of Artificial Sequence: Synthetic oligonucleotide
  Target: ATXN2; (-) strand; PAM type: YTN; PAM sequence: TTC
tgaatacggtttcataggct

SEQ ID NO: 71363 - DNA, 20 bp, Artificial Sequence
  Description of Artificial Sequence: Synthetic oligonucleotide
  Target: ATXN2; (-) strand; PAM type: YTN; PAM sequence: TTA
agtacattctgaatacggtt

SEQ ID NO: 71364 - DNA, 20 bp, Artificial Sequence
  Description of Artificial Sequence: Synthetic oligonucleotide
  Target: ATXN2; (-) strand; PAM type: YTN; PAM sequence: TTT
aagtacattctgaatacggt

SEQ ID NO: 71365 - DNA, 20 bp, Artificial Sequence
  Description of Artificial Sequence: Synthetic oligonucleotide
  Target: ATXN2; (-) strand; PAM type: YTN; PAM sequence: TTA
cgaatttaagtacattctga

SEQ ID NO: 71366 - DNA, 20 bp, Artificial Sequence
  Description of Artificial Sequence: Synthetic oligonucleotide
  Target: ATXN2; (-) strand; PAM type: YTN; PAM sequence: TTT
acgaatttaagtacattctg

SEQ ID NO: 71367 - DNA, 20 bp, Artificial Sequence
  Description of Artificial Sequence: Synthetic oligonucleotide
  Target: ATXN2; (-) strand; PAM type: YTN; PAM sequence: TTT
tacgaatttaagtacattct

SEQ ID NO: 71368 - DNA, 20 bp, Artificial Sequence
  Description of Artificial Sequence: Synthetic oligonucleotide
  Target: ATXN2; (-) strand; PAM type: YTN; PAM sequence: CTG
tgtattttacgaatttaagt

SEQ ID NO: 71369 - DNA, 20 bp, Artificial Sequence
  Description of Artificial Sequence: Synthetic oligonucleotide
  Target: ATXN2; (-) strand; PAM type: YTN; PAM sequence: TTC
ctgtgtattttacgaattta

SEQ ID NO: 71370 - DNA, 20 bp, Artificial Sequence
  Description of Artificial Sequence: Synthetic oligonucleotide
  Target: ATXN2; (-) strand; PAM type: YTN; PAM sequence: TTT
cctgtgtattttacgaattt

SEQ ID NO: 71371 - DNA, 20 bp, Artificial Sequence
  Description of Artificial Sequence: Synthetic oligonucleotide
  Target: ATXN2; (-) strand; PAM type: YTN; PAM sequence: TTG
atttcctgtgtattttacga

SEQ ID NO: 71372 - DNA, 20 bp, Artificial Sequence
  Description of Artificial Sequence: Synthetic oligonucleotide
  Target: ATXN2; (-) strand; PAM type: YTN; PAM sequence: TTT
gatttcctgtgtattttacg

SEQ ID NO: 71373 - DNA, 20 bp, Artificial Sequence
  Description of Artificial Sequence: Synthetic oligonucleotide
  Target: ATXN2; (-) strand; PAM type: YTN; PAM sequence: CTC
atttgatttcctgtgtattt

SEQ ID NO: 71374 - DNA, 20 bp, Artificial Sequence
  Description of Artificial Sequence: Synthetic oligonucleotide
  Target: ATXN2; (-) strand; PAM type: YTN; PAM sequence: TTC
tcatttgatttcctgtgtat

SEQ ID NO: 71375 - DNA, 20 bp, Artificial Sequence
  Description of Artificial Sequence: Synthetic oligonucleotide
  Target: ATXN2; (-) strand; PAM type: YTN; PAM sequence: TTG
ttctcatttgatttcctgtg

SEQ ID NO: 71376 - DNA, 20 bp, Artificial Sequence
  Description of Artificial Sequence: Synthetic oligonucleotide
  Target: ATXN2; (-) strand; PAM type: YTN; PAM sequence: CTT
gttctcatttgatttcctgt

SEQ ID NO: 71377 - DNA, 20 bp, Artificial Sequence
  Description of Artificial Sequence: Synthetic oligonucleotide
  Target: ATXN2; (-) strand; PAM type: YTN; PAM sequence: TTA
cttgttctcatttgatttcc

SEQ ID NO: 71378 - DNA, 20 bp, Artificial Sequence
  Description of Artificial Sequence: Synthetic oligonucleotide
  Target: ATXN2; (-) strand; PAM type: YTN; PAM sequence: TTG
ttacttgttctcatttgatt

SEQ ID NO: 71379 - DNA, 20 bp, Artificial Sequence
  Description of Artificial Sequence: Synthetic oligonucleotide
  Target: ATXN2; (-) strand; PAM type: YTN; PAM sequence: TTC
attgttacttgttctcattt

SEQ ID NO: 71380 - DNA, 20 bp, Artificial Sequence
  Description of Artificial Sequence: Synthetic oligonucleotide
  Target: ATXN2; (-) strand; PAM type: YTN; PAM sequence: TTT
cattgttacttgttctcatt

SEQ ID NO: 71381 - DNA, 20 bp, Artificial Sequence
  Description of Artificial Sequence: Synthetic oligonucleotide
  Target: ATXN2; (-) strand; PAM type: YTN; PAM sequence: CTG
catttcattgttacttgttc

SEQ ID NO: 71382 - DNA, 20 bp, Artificial Sequence
  Description of Artificial Sequence: Synthetic oligonucleotide
  Target: ATXN2; (-) strand; PAM type: YTN; PAM sequence: TTG
ataactgcatttcattgtta

SEQ ID NO: 71383 - DNA, 20 bp, Artificial Sequence
  Description of Artificial Sequence: Synthetic oligonucleotide
  Target: ATXN2; (-) strand; PAM type: YTN; PAM sequence: TTT
gataactgcatttcattgtt

SEQ ID NO: 71384 - DNA, 20 bp, Artificial Sequence
  Description of Artificial Sequence: Synthetic oligonucleotide
  Target: ATXN2; (-) strand; PAM type: YTN; PAM sequence: TTT
tgataactgcatttcattgt

SEQ ID NO: 71385 - DNA, 20 bp, Artificial Sequence
  Description of Artificial Sequence: Synthetic oligonucleotide
  Target: ATXN2; (-) strand; PAM type: YTN; PAM sequence: TTT
ttgataactgcatttcattg

SEQ ID NO: 71386 - DNA, 20 bp, Artificial Sequence
  Description of Artificial Sequence: Synthetic oligonucleotide
  Target: ATXN2; (-) strand; PAM type: YTN; PAM sequence: TTA
gtttttgataactgcatttc

SEQ ID NO: 71387 - DNA, 20 bp, Artificial Sequence
  Description of Artificial Sequence: Synthetic oligonucleotide
  Target: ATXN2; (-) strand; PAM type: YTN; PAM sequence: TTT
agtttttgataactgcattt

SEQ ID NO: 71388 - DNA, 20 bp, Artificial Sequence
  Description of Artificial Sequence: Synthetic oligonucleotide
  Target: ATXN2; (-) strand; PAM type: YTN; PAM sequence: TTT
tagtttttgataactgcatt

SEQ ID NO: 71389 - DNA, 20 bp, Artificial Sequence
  Description of Artificial Sequence: Synthetic oligonucleotide
  Target: ATXN2; (-) strand; PAM type: YTN; PAM sequence: TTT
ttagtttttgataactgcat

SEQ ID NO: 71390 - DNA, 20 bp, Artificial Sequence
  Description of Artificial Sequence: Synthetic oligonucleotide
  Target: ATXN2; (-) strand; PAM type: YTN; PAM sequence: TTT
tttagtttttgataactgca

SEQ ID NO: 71391 - DNA, 20 bp, Artificial Sequence
  Description of Artificial Sequence: Synthetic oligonucleotide
  Target: ATXN2; (-) strand; PAM type: YTN; PAM sequence: TTT
ttttagtttttgataactgc

SEQ ID NO: 71392 - DNA, 20 bp, Artificial Sequence
  Description of Artificial Sequence: Synthetic oligonucleotide
  Target: ATXN2; (-) strand; PAM type: YTN; PAM sequence: CTA
tgccaacagatttttttagt

SEQ ID NO: 71393 - DNA, 20 bp, Artificial Sequence
  Description of Artificial Sequence: Synthetic oligonucleotide
  Target: ATXN2; (-) strand; PAM type: YTN; PAM sequence: TTA
ctatgccaacagattttttt

SEQ ID NO: 71394 - DNA, 20 bp, Artificial Sequence
  Description of Artificial Sequence: Synthetic oligonucleotide
  Target: ATXN2; (-) strand; PAM type: YTN; PAM sequence: TTA
agaacatgtatgttactatg

SEQ ID NO: 71395 - DNA, 20 bp, Artificial Sequence
  Description of Artificial Sequence: Synthetic oligonucleotide
  Target: ATXN2; (-) strand; PAM type: YTN; PAM sequence: TTA
attaagaacatgtatgttac

SEQ ID NO: 71396 - DNA, 20 bp, Artificial Sequence
  Description of Artificial Sequence: Synthetic oligonucleotide
  Target: ATXN2; (-) strand; PAM type: YTN; PAM sequence: TTT
aattaagaacatgtatgtta

SEQ ID NO: 71397 - DNA, 20 bp, Artificial Sequence
  Description of Artificial Sequence: Synthetic oligonucleotide
  Target: ATXN2; (-) strand; PAM type: YTN; PAM sequence: CTT
taattaagaacatgtatgtt

SEQ ID NO: 71398 - DNA, 20 bp, Artificial Sequence
  Description of Artificial Sequence: Synthetic oligonucleotide
  Target: ATXN2; (-) strand; PAM type: YTN; PAM sequence: TTA
atgctttaattaagaacatg

SEQ ID NO: 71399 - DNA, 20 bp, Artificial Sequence
  Description of Artificial Sequence: Synthetic oligonucleotide
  Target: ATXN2; (-) strand; PAM type: YTN; PAM sequence: TTT
aatgctttaattaagaacat

SEQ ID NO: 71400 - DNA, 20 bp, Artificial Sequence
  Description of Artificial Sequence: Synthetic oligonucleotide
  Target: ATXN2; (-) strand; PAM type: YTN; PAM sequence: TTA
atatttaatgctttaattaa

SEQ ID NO: 71401 - DNA, 20 bp, Artificial Sequence
  Description of Artificial Sequence: Synthetic oligonucleotide
  Target: ATXN2; (-) strand; PAM type: YTN; PAM sequence: CTT
aatatttaatgctttaatta

SEQ ID NO: 71402 - DNA, 20 bp, Artificial Sequence
  Description of Artificial Sequence: Synthetic oligonucleotide
  Target: ATXN2; (-) strand; PAM type: YTN; PAM sequence: CTG
gatcttaatatttaatgctt

SEQ ID NO: 71403 - DNA, 20 bp, Artificial Sequence
  Description of Artificial Sequence: Synthetic oligonucleotide
  Target: ATXN2; (-) strand; PAM type: YTN; PAM sequence: TTA
ctggatcttaatatttaatg

SEQ ID NO: 71404 - DNA, 20 bp, Artificial Sequence
  Description of Artificial Sequence: Synthetic oligonucleotide
  Target: ATXN2; (-) strand; PAM type: YTN; PAM sequence: CTG
ttactggatcttaatattta

SEQ ID NO: 71405 - DNA, 20 bp, Artificial Sequence
  Description of Artificial Sequence: Synthetic oligonucleotide
  Target: ATXN2; (-) strand; PAM type: YTN; PAM sequence: TTA
aacctgttactggatcttaa

SEQ ID NO: 71406 - DNA, 20 bp, Artificial Sequence
  Description of Artificial Sequence: Synthetic oligonucleotide
  Target: ATXN2; (-) strand; PAM type: YTN; PAM sequence: TTA
ttaaacctgttactggatct

SEQ ID NO: 71407 - DNA, 20 bp, Artificial Sequence
  Description of Artificial Sequence: Synthetic oligonucleotide
  Target: ATXN2; (-) strand; PAM type: YTN; PAM sequence: TTA
taatagttattaaacctgtt

SEQ ID NO: 71408 - DNA, 20 bp, Artificial Sequence
  Description of Artificial Sequence: Synthetic oligonucleotide
  Target: ATXN2; (-) strand; PAM type: YTN; PAM sequence: TTT
ataatagttattaaacctgt

SEQ ID NO: 71409 - DNA, 20 bp, Artificial Sequence
  Description of Artificial Sequence: Synthetic oligonucleotide
  Target: ATXN2; (-) strand; PAM type: YTN; PAM sequence: TTA
aatttataatagttattaaa

SEQ ID NO: 71410 - DNA, 20 bp, Artificial Sequence
  Description of Artificial Sequence: Synthetic oligonucleotide
  Target: ATXN2; (-) strand; PAM type: YTN; PAM sequence: TTT
aaatttataatagttattaa

SEQ ID NO: 71411 - DNA, 20 bp, Artificial Sequence
  Description of Artificial Sequence: Synthetic oligonucleotide
  Target: ATXN2; (-) strand; PAM type: YTN; PAM sequence: CTT
taaatttataatagttatta

SEQ ID NO: 71412 - DNA, 20 bp, Artificial Sequence
  Description of Artificial Sequence: Synthetic oligonucleotide
  Target: ATXN2; (-) strand; PAM type: YTN; PAM sequence: CTC
tttaaatttataatagttat

SEQ ID NO: 71413 - DNA, 20 bp, Artificial Sequence
  Description of Artificial Sequence: Synthetic oligonucleotide
  Target: ATXN2; (-) strand; PAM type: YTN; PAM sequence: TTC
atcacctctttaaatttata

SEQ ID NO: 71414 - DNA, 20 bp, Artificial Sequence
  Description of Artificial Sequence: Synthetic oligonucleotide
  Target: ATXN2; (-) strand; PAM type: YTN; PAM sequence: TTA
tgtatgttcatcacctcttt

SEQ ID NO: 71415 - DNA, 20 bp, Artificial Sequence
  Description of Artificial Sequence: Synthetic oligonucleotide
  Target: ATXN2; (-) strand; PAM type: YTN; PAM sequence: TTA
ttatgtatgttcatcacctc

SEQ ID NO: 71416 - DNA, 20 bp, Artificial Sequence
  Description of Artificial Sequence: Synthetic oligonucleotide
  Target: ATXN2; (-) strand; PAM type: YTN; PAM sequence: TTC
aaattattatgtatgttcat

SEQ ID NO: 71417 - DNA, 20 bp, Artificial Sequence
  Description of Artificial Sequence: Synthetic oligonucleotide
  Target: ATXN2; (-) strand; PAM type: YTN; PAM sequence: CTT
caaattattatgtatgttca

SEQ ID NO: 71418 - DNA, 20 bp, Artificial Sequence
  Description of Artificial Sequence: Synthetic oligonucleotide
  Target: ATXN2; (-) strand; PAM type: YTN; PAM sequence: CTG
caccaggcttcaaattatta

SEQ ID NO: 71419 - DNA, 20 bp, Artificial Sequence
  Description of Artificial Sequence: Synthetic oligonucleotide
  Target: ATXN2; (-) strand; PAM type: YTN; PAM sequence: TTA
taggcatgtgccactgcacc

SEQ ID NO: 71420 - DNA, 20 bp, Artificial Sequence
  Description of Artificial Sequence: Synthetic oligonucleotide
  Target: ATXN2; (-) strand; PAM type: YTN; PAM sequence: CTG
ggattataggcatgtgccac

SEQ ID NO: 71421 - DNA, 20 bp, Artificial Sequence
  Description of Artificial Sequence: Synthetic oligonucleotide
  Target: ATXN2; (-) strand; PAM type: YTN; PAM sequence: CTG
agtagctgggattataggca

SEQ ID NO: 71422 - DNA, 20 bp, Artificial Sequence
  Description of Artificial Sequence: Synthetic oligonucleotide
  Target: ATXN2; (-) strand; PAM type: YTN; PAM sequence: CTC
ctgagtagctgggattatag

SEQ ID NO: 71423 - DNA, 20 bp, Artificial Sequence
  Description of Artificial Sequence: Synthetic oligonucleotide
  Target: ATXN2; (-) strand; PAM type: YTN; PAM sequence: CTC
agcctcctgagtagctggga

SEQ ID NO: 71424 - DNA, 20 bp, Artificial Sequence
  Description of Artificial Sequence: Synthetic oligonucleotide
  Target: ATXN2; (-) strand; PAM type: YTN; PAM sequence: CTC
ccacctcagcctcctgagta

SEQ ID NO: 71425 - DNA, 20 bp, Artificial Sequence
  Description of Artificial Sequence: Synthetic oligonucleotide
  Target: ATXN2; (-) strand; PAM type: YTN; PAM sequence: CTC
aggcagtcctcccacctcag

SEQ ID NO: 71426 - DNA, 20 bp, Artificial Sequence
  Description of Artificial Sequence: Synthetic oligonucleotide
  Target: ATXN2; (-) strand; PAM type: YTN; PAM sequence: TTG
tgggctcaggcagtcctccc

SEQ ID NO: 71427 - DNA, 20 bp, Artificial Sequence
  Description of Artificial Sequence: Synthetic oligonucleotide
  Target: ATXN2; (-) strand; PAM type: YTN; PAM sequence: CTT
gtgggctcaggcagtcctcc

SEQ ID NO: 71428 - DNA, 20 bp, Artificial Sequence
  Description of Artificial Sequence: Synthetic oligonucleotide
  Target: ATXN2; (-) strand; PAM type: YTN; PAM sequence: TTG
aacttgtgggctcaggcagt

SEQ ID NO: 71429 - DNA, 20 bp, Artificial Sequence
  Description of Artificial Sequence: Synthetic oligonucleotide
  Target: ATXN2; (-) strand; PAM type: YTN; PAM sequence: CTT
gaacttgtgggctcaggcag

SEQ ID NO: 71430 - DNA, 20 bp, Artificial Sequence
  Description of Artificial Sequence: Synthetic oligonucleotide
  Target: ATXN2; (-) strand; PAM type: YTN; PAM sequence: CTG
gccttgaacttgtgggctca

SEQ ID NO: 71431 - DNA, 20 bp, Artificial Sequence
  Description of Artificial Sequence: Synthetic oligonucleotide
  Target: ATXN2; (-) strand; PAM type: YTN; PAM sequence: CTC
tggccttgaacttgtgggct

SEQ ID NO: 71432 - DNA, 20 bp, Artificial Sequence
  Description of Artificial Sequence: Synthetic oligonucleotide
  Target: ATXN2; (-) strand; PAM type: YTN; PAM sequence: TTG
atatggtatccgctctggcc

SEQ ID NO: 71433 - DNA, 20 bp, Artificial Sequence
  Description of Artificial Sequence: Synthetic oligonucleotide
  Target: ATXN2; (-) strand; PAM type: YTN; PAM sequence: CTT
gatatggtatccgctctggc

SEQ ID NO: 71434 - DNA, 20 bp, Artificial Sequence
  Description of Artificial Sequence: Synthetic oligonucleotide
  Target: ATXN2; (-) strand; PAM type: YTN; PAM sequence: TTA
gaaacagaatcttgatatgg

SEQ ID NO: 71435 - DNA, 20 bp, Artificial Sequence
  Description of Artificial Sequence: Synthetic oligonucleotide
  Target: ATXN2; (-) strand; PAM type: YTN; PAM sequence: TTT
agaaacagaatcttgatatg

SEQ ID NO: 71436 - DNA, 20 bp, Artificial Sequence
  Description of Artificial Sequence: Synthetic oligonucleotide
  Target: ATXN2; (-) strand; PAM type: YTN; PAM sequence: TTT
tagaaacagaatcttgatat

SEQ ID NO: 71437 - DNA, 20 bp, Artificial Sequence
  Description of Artificial Sequence: Synthetic oligonucleotide
  Target: ATXN2; (-) strand; PAM type: YTN; PAM sequence: TTT
ttagaaacagaatcttgata

SEQ ID NO: 71438 - DNA, 20 bp, Artificial Sequence
  Description of Artificial Sequence: Synthetic oligonucleotide
  Target: ATXN2; (-) strand; PAM type: YTN; PAM sequence: TTA
tttttagaaacagaatcttg

SEQ ID NO: 71439 - DNA, 20 bp, Artificial Sequence
  Description of Artificial Sequence: Synthetic oligonucleotide
  Target: ATXN2; (-) strand; PAM type: YTN; PAM sequence: CTC
aaattatttttagaaacaga

SEQ ID NO: 71440 - DNA, 20 bp, Artificial Sequence
  Description of Artificial Sequence: Synthetic oligonucleotide
  Target: ATXN2; (-) strand; PAM type: YTN; PAM sequence: TTA
caggtgtgagccaccgcacc

SEQ ID NO: 71441 - DNA, 20 bp, Artificial Sequence
  Description of Artificial Sequence: Synthetic oligonucleotide
  Target: ATXN2; (-) strand; PAM type: YTN; PAM sequence: CTG
ggattacaggtgtgagccac

SEQ ID NO: 71442 - DNA, 20 bp, Artificial Sequence
  Description of Artificial Sequence: Synthetic oligonucleotide
  Target: ATXN2; (-) strand; PAM type: YTN; PAM sequence: TTC
caaagtgctgggattacagg

SEQ ID NO: 71443 - DNA, 20 bp, Artificial Sequence
  Description of Artificial Sequence: Synthetic oligonucleotide
  Target: ATXN2; (-) strand; PAM type: YTN; PAM sequence: CTT
ccaaagtgctgggattacag

SEQ ID NO: 71444 - DNA, 20 bp, Artificial Sequence
  Description of Artificial Sequence: Synthetic oligonucleotide
  Target: ATXN2; (-) strand; PAM type: YTN; PAM sequence: TTG
gcttccaaagtgctgggatt

SEQ ID NO: 71445 - DNA, 20 bp, Artificial Sequence
  Description of Artificial Sequence: Synthetic oligonucleotide
  Target: ATXN2; (-) strand; PAM type: YTN; PAM sequence: CTT
ggcttccaaagtgctgggat

SEQ ID NO: 71446 - DNA, 20 bp, Artificial Sequence
  Description of Artificial Sequence: Synthetic oligonucleotide
  Target: ATXN2; (-) strand; PAM type: YTN; PAM sequence: CTG
ccttggcttccaaagtgctg

SEQ ID NO: 71447 - DNA, 20 bp, Artificial Sequence
  Description of Artificial Sequence: Synthetic oligonucleotide
  Target: ATXN2; (-) strand; PAM type: YTN; PAM sequence: CTC
aagtgatccgcctgccttgg

SEQ ID NO: 71448 - DNA, 20 bp, Artificial Sequence
  Description of Artificial Sequence: Synthetic oligonucleotide
  Target: ATXN2; (-) strand; PAM type: YTN; PAM sequence: CTG
acctcaagtgatccgcctgc

SEQ ID NO: 71449 - DNA, 20 bp, Artificial Sequence
  Description of Artificial Sequence: Synthetic oligonucleotide
  Target: ATXN2; (-) strand; PAM type: YTN; PAM sequence: CTC
ctgacctcaagtgatccgcc

SEQ ID NO: 71450 - DNA, 20 bp, Artificial Sequence
  Description of Artificial Sequence: Synthetic oligonucleotide
  Target: ATXN2; (-) strand; PAM type: YTN; PAM sequence: CTG
gtcaccaactcctgacctca

SEQ ID NO: 71451 - DNA, 20 bp, Artificial Sequence
  Description of Artificial Sequence: Synthetic oligonucleotide
  Target: ATXN2; (-) strand; PAM type: YTN; PAM sequence: TTG
gccaggctggtcaccaactc

SEQ ID NO: 71452 - DNA, 20 bp, Artificial Sequence
  Description of Artificial Sequence: Synthetic oligonucleotide
  Target: ATXN2; (-) strand; PAM type: YTN; PAM sequence: TTC
accatattggccaggctggt

SEQ ID NO: 71453 - DNA, 20 bp, Artificial Sequence
  Description of Artificial Sequence: Synthetic oligonucleotide
  Target: ATXN2; (-) strand; PAM type: YTN; PAM sequence: TTT
caccatattggccaggctgg

SEQ ID NO: 71454 - DNA, 20 bp, Artificial Sequence
  Description of Artificial Sequence: Synthetic oligonucleotide
  Target: ATXN2; (-) strand; PAM type: YTN; PAM sequence: TTC
agtagagaaggggtttcacc

SEQ ID NO: 71455 - DNA, 20 bp, Artificial Sequence
  Description of Artificial Sequence: Synthetic oligonucleotide
  Target: ATXN2; (-) strand; PAM type: YTN; PAM sequence: TTT
cagtagagaaggggtttcac

SEQ ID NO: 71456 - DNA, 20 bp, Artificial Sequence
  Description of Artificial Sequence: Synthetic oligonucleotide
  Target: ATXN2; (-) strand; PAM type: YTN; PAM sequence: TTT
tcagtagagaaggggtttca

SEQ ID NO: 71457 - DNA, 20 bp, Artificial Sequence
  Description of Artificial Sequence: Synthetic oligonucleotide
  Target: ATXN2; (-) strand; PAM type: YTN; PAM sequence: TTG
tattttcagtagagaagggg

SEQ ID NO: 71458 - DNA, 20 bp, Artificial Sequence
  Description of Artificial Sequence: Synthetic oligonucleotide
  Target: ATXN2; (-) strand; PAM type: YTN; PAM sequence: TTT
gtattttcagtagagaaggg

SEQ ID NO: 71459 - DNA, 20 bp, Artificial Sequence
  Description of Artificial Sequence: Synthetic oligonucleotide
  Target: ATXN2; (-) strand; PAM type: YTN; PAM sequence: CTA
atgtttgtattttcagtaga

SEQ ID NO: 71460 - DNA, 20 bp, Artificial Sequence
  Description of Artificial Sequence: Synthetic oligonucleotide
  Target: ATXN2; (-) strand; PAM type: YTN; PAM sequence: CTA
gctaatgtttgtattttcag

SEQ ID NO: 71461 - DNA, 20 bp, Artificial Sequence
  Description of Artificial Sequence: Synthetic oligonucleotide
  Target: ATXN2; (-) strand; PAM type: YTN; PAM sequence: TTA
caggcgcacaccaccacgcc

SEQ ID NO: 71462 - DNA, 20 bp, Artificial Sequence
  Description of Artificial Sequence: Synthetic oligonucleotide
  Target: ATXN2; (-) strand; PAM type: YTN; PAM sequence: CTG
ggattacaggcgcacaccac

SEQ ID NO: 71463 - DNA, 20 bp, Artificial Sequence
  Description of Artificial Sequence: Synthetic oligonucleotide
  Target: ATXN2; (-) strand; PAM type: YTN; PAM sequence: CTG
agtagctgggattacaggcg

SEQ ID NO: 71464 - DNA, 20 bp, Artificial Sequence
  Description of Artificial Sequence: Synthetic oligonucleotide
  Target: ATXN2; (-) strand; PAM type: YTN; PAM sequence: CTC
ctgagtagctgggattacag

SEQ ID NO: 71465 - DNA, 20 bp, Artificial Sequence
  Description of Artificial Sequence: Synthetic oligonucleotide
  Target: ATXN2; (-) strand; PAM type: YTN; PAM sequence: CTC
agcctcctgagtagctggga

SEQ ID NO: 71466 - DNA, 20 bp, Artificial Sequence
  Description of Artificial Sequence: Synthetic oligonucleotide
  Target: ATXN2; (-) strand; PAM type: YTN; PAM sequence: CTG
cctcagcctcctgagtagct

SEQ ID NO: 71467 - DNA, 20 bp, Artificial Sequence
  Description of Artificial Sequence: Synthetic oligonucleotide
  Target: ATXN2; (-) strand; PAM type: YTN; PAM sequence: CTC
ctgcctcagcctcctgagta

SEQ ID NO: 71468 - DNA, 20 bp, Artificial Sequence
  Description of Artificial Sequence: Synthetic oligonucleotide
  Target: ATXN2; (-) strand; PAM type: YTN; PAM sequence: TTC
tcctgcctcagcctcctgag

SEQ ID NO: 71469 - DNA, 20 bp, Artificial Sequence
  Description of Artificial Sequence: Synthetic oligonucleotide
  Target: ATXN2; (-) strand; PAM type: YTN; PAM sequence: TTC
aaacgattctcctgcctcag

SEQ ID NO: 71470 - DNA, 20 bp, Artificial Sequence
  Description of Artificial Sequence: Synthetic oligonucleotide
  Target: ATXN2; (-) strand; PAM type: YTN; PAM sequence: CTG
ggttcaaacgattctcctgc

SEQ ID NO: 71471 - DNA, 20 bp, Artificial Sequence
  Description of Artificial Sequence: Synthetic oligonucleotide
  Target: ATXN2; (-) strand; PAM type: YTN; PAM sequence: CTC
ctgggttcaaacgattctcc

SEQ ID NO: 71472 - DNA, 20 bp, Artificial Sequence
  Description of Artificial Sequence: Synthetic oligonucleotide
  Target: ATXN2; (-) strand; PAM type: YTN; PAM sequence: CTG
cctcctgggttcaaacgatt

SEQ ID NO: 71473 - DNA, 20 bp, Artificial Sequence
  Description of Artificial Sequence: Synthetic oligonucleotide
  Target: ATXN2; (-) strand; PAM type: YTN; PAM sequence: CTC
tgcctcctgggttcaaacga

SEQ ID NO: 71474 - DNA, 20 bp, Artificial Sequence
  Description of Artificial Sequence: Synthetic oligonucleotide
  Target: ATXN2; (-) strand; PAM type: YTN; PAM sequence: TTG
caacctctgcctcctgggtt

SEQ ID NO: 71475 - DNA, 20 bp, Artificial Sequence
  Description of Artificial Sequence: Synthetic oligonucleotide
  Target: ATXN2; (-) strand; PAM type: YTN; PAM sequence: CTC
agcccattgcaacctctgcc

SEQ ID NO: 71476 - DNA, 20 bp, Artificial Sequence
  Description of Artificial Sequence: Synthetic oligonucleotide
  Target: ATXN2; (-) strand; PAM type: YTN; PAM sequence: CTG
agtgcagtggtgcagtctca

SEQ ID NO: 71477 - DNA, 20 bp, Artificial Sequence
  Description of Artificial Sequence: Synthetic oligonucleotide
  Target: ATXN2; (-) strand; PAM type: YTN; PAM sequence: CTC
ccaggctgagtgcagtggtg

SEQ ID NO: 71478 - DNA, 20 bp, Artificial Sequence
  Description of Artificial Sequence: Synthetic oligonucleotide
  Target: ATXN2; (-) strand; PAM type: YTN; PAM sequence: CTG
tctcccaggctgagtgcagt

SEQ ID NO: 71479 - DNA, 20 bp, Artificial Sequence
  Description of Artificial Sequence: Synthetic oligonucleotide
  Target: ATXN2; (-) strand; PAM type: YTN; PAM sequence: CTC
tgtctcccaggctgagtgca

SEQ ID NO: 71480 - DNA, 20 bp, Artificial Sequence
  Description of Artificial Sequence: Synthetic oligonucleotide
  Target: ATXN2; (-) strand; PAM type: YTN; PAM sequence: CTC
gctctgtctcccaggctgag

SEQ ID NO: 71481 - DNA, 20 bp, Artificial Sequence
  Description of Artificial Sequence: Synthetic oligonucleotide
  Target: ATXN2; (-) strand; PAM type: YTN; PAM sequence: TTG
agatggagtctcgctctgtc

SEQ ID NO: 71482 - DNA, 20 bp, Artificial Sequence
  Description of Artificial Sequence: Synthetic oligonucleotide
  Target: ATXN2; (-) strand; PAM type: YTN; PAM sequence: TTT
gagatggagtctcgctctgt

SEQ ID NO: 71483 - DNA, 20 bp, Artificial Sequence
  Description of Artificial Sequence: Synthetic oligonucleotide
  Target: ATXN2; (-) strand; PAM type: YTN; PAM sequence: TTT
tgagatggagtctcgctctg

SEQ ID NO: 71484 - DNA, 20 bp, Artificial Sequence
  Description of Artificial Sequence: Synthetic oligonucleotide
  Target: ATXN2; (-) strand; PAM type: YTN; PAM sequence: TTT
ttgagatggagtctcgctct

SEQ ID NO: 71485 - DNA, 20 bp, Artificial Sequence
  Description of Artificial Sequence: Synthetic oligonucleotide
  Target: ATXN2; (-) strand; PAM type: YTN; PAM sequence: TTA
tgtatatatatttttgagat

SEQ ID NO: 71486 - DNA, 20 bp, Artificial Sequence
  Description of Artificial Sequence: Synthetic oligonucleotide
  Target: ATXN2; (-) strand; PAM type: YTN; PAM sequence: TTT
atgtatatatatttttgaga

SEQ ID NO: 71487 - DNA, 20 bp, Artificial Sequence
  Description of Artificial Sequence: Synthetic oligonucleotide
  Target: ATXN2; (-) strand; PAM type: YTN; PAM sequence: TTT
tatgtatatatatttttgag

SEQ ID NO: 71488 - DNA, 20 bp, Artificial Sequence
  Description of Artificial Sequence: Synthetic oligonucleotide
  Target: ATXN2; (-) strand; PAM type: YTN; PAM sequence: TTA
ttttatgtatatatattttt

SEQ ID NO: 71489 - DNA, 20 bp, Artificial Sequence
  Description of Artificial Sequence: Synthetic oligonucleotide
  Target: ATXN2; (-) strand; PAM type: YTN; PAM sequence: TTA
ttattttatgtatatatatt

SEQ ID NO: 71490 - DNA, 20 bp, Artificial Sequence
  Description of Artificial Sequence: Synthetic oligonucleotide
  Target: ATXN2; (-) strand; PAM type: YTN; PAM sequence: CTC
aaattattattttatgtata

SEQ ID NO: 71491 - DNA, 20 bp, Artificial Sequence
  Description of Artificial Sequence: Synthetic oligonucleotide
  Target: ATXN2; (-) strand; PAM type: YTN; PAM sequence: TTA
tgggtatctcaaattattat

SEQ ID NO: 71492 - DNA, 20 bp, Artificial Sequence
  Description of Artificial Sequence: Synthetic oligonucleotide
  Target: ATXN2; (-) strand; PAM type: YTN; PAM sequence: TTG
atgttatgggtatctcaaat

SEQ ID NO: 71493 - DNA, 20 bp, Artificial Sequence
  Description of Artificial Sequence: Synthetic oligonucleotide
  Target: ATXN2; (-) strand; PAM type: YTN; PAM sequence: CTT
gatgttatgggtatctcaaa

SEQ ID NO: 71494 - DNA, 20 bp, Artificial Sequence
  Description of Artificial Sequence: Synthetic oligonucleotide
  Target: ATXN2; (-) strand; PAM type: YTN; PAM sequence: TTC
atatcgcttgatgttatggg

SEQ ID NO: 71495 - DNA, 20 bp, Artificial Sequence
  Description of Artificial Sequence: Synthetic oligonucleotide
  Target: ATXN2; (-) strand; PAM type: YTN; PAM sequence: TTT
catatcgcttgatgttatgg

SEQ ID NO: 71496 - DNA, 20 bp, Artificial Sequence
  Description of Artificial Sequence: Synthetic oligonucleotide
  Target: ATXN2; (-) strand; PAM type: YTN; PAM sequence: TTA
atttcatatcgcttgatgtt

SEQ ID NO: 71497 - DNA, 20 bp, Artificial Sequence
  Description of Artificial Sequence: Synthetic oligonucleotide
  Target: ATXN2; (-) strand; PAM type: YTN; PAM sequence: CTC
agttaatttcatatcgcttg

SEQ ID NO: 71498 - DNA, 20 bp, Artificial Sequence
  Description of Artificial Sequence: Synthetic oligonucleotide
  Target: ATXN2; (-) strand; PAM type: YTN; PAM sequence: CTA
tagaactcagttaatttcat

SEQ ID NO: 71499 - DNA, 20 bp, Artificial Sequence
  Description of Artificial Sequence: Synthetic oligonucleotide
  Target: ATXN2; (-) strand; PAM type: YTN; PAM sequence: TTA
agcacctatagaactcagtt

SEQ ID NO: 71500 - DNA, 20 bp, Artificial Sequence
  Description of Artificial Sequence: Synthetic oligonucleotide
  Target: ATXN2; (-) strand; PAM type: YTN; PAM sequence: CTT
aagcacctatagaactcagt

SEQ ID NO: 71501 - DNA, 20 bp, Artificial Sequence
  Description of Artificial Sequence: Synthetic oligonucleotide
  Target: ATXN2; (-) strand; PAM type: YTN; PAM sequence: TTA
tgacttaagcacctatagaa

SEQ ID NO: 71502 - DNA, 20 bp, Artificial Sequence
  Description of Artificial Sequence: Synthetic oligonucleotide
  Target: ATXN2; (-) strand; PAM type: YTN; PAM sequence: TTT
atgacttaagcacctataga

SEQ ID NO: 71503 - DNA, 20 bp, Artificial Sequence
  Description of Artificial Sequence: Synthetic oligonucleotide
  Target: ATXN2; (-) strand; PAM type: YTN; PAM sequence: TTA
gcagtatttatgacttaagc

SEQ ID NO: 71504 - DNA, 20 bp, Artificial Sequence
  Description of Artificial Sequence: Synthetic oligonucleotide
  Target: ATXN2; (-) strand; PAM type: YTN; PAM sequence: CTA
gtagtattagcagtatttat

SEQ ID NO: 71505 - DNA, 20 bp, Artificial Sequence
  Description of Artificial Sequence: Synthetic oligonucleotide
  Target: ATXN2; (-) strand; PAM type: YTN; PAM sequence: TTA
aaaatatgggcaacaaacaa

SEQ ID NO: 71506 - DNA, 20 bp, Artificial Sequence
  Description of Artificial Sequence: Synthetic oligonucleotide
  Target: ATXN2; (-) strand; PAM type: YTN; PAM sequence: TTT
aaaaatatgggcaacaaaca

SEQ ID NO: 71507 - DNA, 20 bp, Artificial Sequence
  Description of Artificial Sequence: Synthetic oligonucleotide
  Target: ATXN2; (-) strand; PAM type: YTN; PAM sequence: TTG
ccatttaaaaatatgggcaa

SEQ ID NO: 71508 - DNA, 20 bp, Artificial Sequence
  Description of Artificial Sequence: Synthetic oligonucleotide
  Target: ATXN2; (-) strand; PAM type: YTN; PAM sequence: TTT
gccatttaaaaatatgggca

SEQ ID NO: 71509 - DNA, 20 bp, Artificial Sequence
  Description of Artificial Sequence: Synthetic oligonucleotide
  Target: ATXN2; (-) strand; PAM type: YTN; PAM sequence: TTT
tgccatttaaaaatatgggc

SEQ ID NO: 71510 - DNA, 20 bp, Artificial Sequence
  Description of Artificial Sequence: Synthetic oligonucleotide
  Target: ATXN2; (-) strand; PAM type: YTN; PAM sequence: TTT
ttgccatttaaaaatatggg

SEQ ID NO: 71511 - DNA, 20 bp, Artificial Sequence
  Description of Artificial Sequence: Synthetic oligonucleotide
  Target: ATXN2; (-) strand; PAM type: YTN; PAM sequence: TTT
tttgccatttaaaaatatgg

SEQ ID NO: 71512 - DNA, 20 bp, Artificial Sequence
  Description of Artificial Sequence: Synthetic oligonucleotide
  Target: ATXN2; (-) strand; PAM type: YTN; PAM sequence: TTA
gcattttttgccatttaaaa

SEQ ID NO: 71513 - DNA, 20 bp, Artificial Sequence
  Description of Artificial Sequence: Synthetic oligonucleotide
  Target: ATXN2; (-) strand; PAM type: YTN; PAM sequence: TTT
agcattttttgccatttaaa

SEQ ID NO: 71514 - DNA, 20 bp, Artificial Sequence
  Description of Artificial Sequence: Synthetic oligonucleotide
  Target: ATXN2; (-) strand; PAM type: YTN; PAM sequence: TTC
aagtgaaatttagcattttt

SEQ ID NO: 71515 - DNA, 20 bp, Artificial Sequence
  Description of Artificial Sequence: Synthetic oligonucleotide
  Target: ATXN2; (-) strand; PAM type: YTN; PAM sequence: CTT
caagtgaaatttagcatttt

SEQ ID NO: 71516 - DNA, 20 bp, Artificial Sequence
  Description of Artificial Sequence: Synthetic oligonucleotide
  Target: ATXN2; (-) strand; PAM type: YTN; PAM sequence: CTA
accttcaagtgaaatttagc

SEQ ID NO: 71517 - DNA, 20 bp, Artificial Sequence
  Description of Artificial Sequence: Synthetic oligonucleotide
  Target: ATXN2; (-) strand; PAM type: YTN; PAM sequence: TTA
cactaaccttcaagtgaaat

SEQ ID NO: 71518 - DNA, 20 bp, Artificial Sequence
  Description of Artificial Sequence: Synthetic oligonucleotide
  Target: ATXN2; (-) strand; PAM type: YTN; PAM sequence: TTT
acactaaccttcaagtgaaa

SEQ ID NO: 71519 - DNA, 20 bp, Artificial Sequence
  Description of Artificial Sequence: Synthetic oligonucleotide
  Target: ATXN2; (-) strand; PAM type: YTN; PAM sequence: TTA
tttacactaaccttcaagtg

SEQ ID NO: 71520 - DNA, 20 bp, Artificial Sequence
  Description of Artificial Sequence: Synthetic oligonucleotide
  Target: ATXN2; (-) strand; PAM type: YTN; PAM sequence: TTT
atttacactaaccttcaagt

SEQ ID NO: 71521 - DNA, 20 bp, Artificial Sequence
  Description of Artificial Sequence: Synthetic oligonucleotide
  Target: ATXN2; (-) strand; PAM type: YTN; PAM sequence: CTT
tatttacactaaccttcaag

SEQ ID NO: 71522 - DNA, 20 bp, Artificial Sequence
  Description of Artificial Sequence: Synthetic oligonucleotide
  Target: ATXN2; (-) strand; PAM type: YTN; PAM sequence: TTA
catctttatttacactaacc

SEQ ID NO: 71523 - DNA, 20 bp, Artificial Sequence
  Description of Artificial Sequence: Synthetic oligonucleotide
  Target: ATXN2; (-) strand; PAM type: YTN; PAM sequence: TTT
acatctttatttacactaac

SEQ ID NO: 71524 - DNA, 20 bp, Artificial Sequence
  Description of Artificial Sequence: Synthetic oligonucleotide
  Target: ATXN2; (-) strand; PAM type: YTN; PAM sequence: TTG
gatgaagagaaatttacatc

SEQ ID NO: 71525 - DNA, 20 bp, Artificial Sequence
  Description of Artificial Sequence: Synthetic oligonucleotide
  Target: ATXN2; (-) strand; PAM type: YTN; PAM sequence: CTT
ggatgaagagaaatttacat

SEQ ID NO: 71526 - DNA, 20 bp, Artificial Sequence
  Description of Artificial Sequence: Synthetic oligonucleotide
  Target: ATXN2; (-) strand; PAM type: YTN; PAM sequence: TTG
atgaccttggatgaagagaa

SEQ ID NO: 71527 - DNA, 20 bp, Artificial Sequence
  Description of Artificial Sequence: Synthetic oligonucleotide
  Target: ATXN2; (-) strand; PAM type: YTN; PAM sequence: TTC
agggcattgatgaccttgga

SEQ ID NO: 71528 - DNA, 20 bp, Artificial Sequence
  Description of Artificial Sequence: Synthetic oligonucleotide
  Target: ATXN2; (-) strand; PAM type: YTN; PAM sequence: TTG
tggagagaattcagggcatt

SEQ ID NO: 71529 - DNA, 20 bp, Artificial Sequence
  Description of Artificial Sequence: Synthetic oligonucleotide
  Target: ATXN2; (-) strand; PAM type: YTN; PAM sequence: TTT
gtggagagaattcagggcat

SEQ ID NO: 71530 - DNA, 20 bp, Artificial Sequence
  Description of Artificial Sequence: Synthetic oligonucleotide
  Target: ATXN2; (-) strand; PAM type: YTN; PAM sequence: CTC
aaagaatttgtggagagaat

SEQ ID NO: 71531 - DNA, 20 bp, Artificial Sequence
  Description of Artificial Sequence: Synthetic oligonucleotide
  Target: ATXN2; (-) strand; PAM type: YTN; PAM sequence: TTC
tcaaagaatttgtggagaga

SEQ ID NO: 71532 - DNA, 20 bp, Artificial Sequence
  Description of Artificial Sequence: Synthetic oligonucleotide
  Target: ATXN2; (-) strand; PAM type: YTN; PAM sequence: CTG
tggattctcaaagaatttgt

SEQ ID NO: 71533 - DNA, 20 bp, Artificial Sequence
  Description of Artificial Sequence: Synthetic oligonucleotide
  Target: ATXN2; (-) strand; PAM type: YTN; PAM sequence: CTG
gatctgtggattctcaaaga

SEQ ID NO: 71534 - DNA, 20 bp, Artificial Sequence
  Description of Artificial Sequence: Synthetic oligonucleotide
  Target: ATXN2; (-) strand; PAM type: YTN; PAM sequence: TTC
acctggatctgtggattctc

SEQ ID NO: 71535 - DNA, 20 bp, Artificial Sequence
  Description of Artificial Sequence: Synthetic oligonucleotide
  Target: ATXN2; (-) strand; PAM type: YTN; PAM sequence: CTT
cacctggatctgtggattct

SEQ ID NO: 71536 - DNA, 20 bp, Artificial Sequence
  Description of Artificial Sequence: Synthetic oligonucleotide
  Target: ATXN2; (-) strand; PAM type: YTN; PAM sequence: TTC
ttcacctggatctgtggatt

SEQ ID NO: 71537 - DNA, 20 bp, Artificial Sequence
  Description of Artificial Sequence: Synthetic oligonucleotide
  Target: ATXN2; (-) strand; PAM type: YTN; PAM sequence: TTG
tcagtacaaagaggcaggat

SEQ ID NO: 71538 - DNA, 20 bp, Artificial Sequence
  Description of Artificial Sequence: Synthetic oligonucleotide
  Target: ATXN2; (-) strand; PAM type: YTN; PAM sequence: CTT
gtcagtacaaagaggcagga

SEQ ID NO: 71539 - DNA, 20 bp, Artificial Sequence
  Description of Artificial Sequence: Synthetic oligonucleotide
  Target: ATXN2; (-) strand; PAM type: YTN; PAM sequence: CTG
cttgtcagtacaaagaggca

SEQ ID NO: 71540 - DNA, 20 bp, Artificial Sequence
  Description of Artificial Sequence: Synthetic oligonucleotide
  Target: ATXN2; (-) strand; PAM type: YTN; PAM sequence: TTC
ctgcttgtcagtacaaagag

SEQ ID NO: 71541 - DNA, 20 bp, Artificial Sequence
  Description of Artificial Sequence: Synthetic oligonucleotide
  Target: ATXN2; (-) strand; PAM type: YTN; PAM sequence: CTT
cctgcttgtcagtacaaaga

SEQ ID NO: 71542 - DNA, 20 bp, Artificial Sequence
  Description of Artificial Sequence: Synthetic oligonucleotide
  Target: ATXN2; (-) strand; PAM type: YTN; PAM sequence: TTC
ttcctgcttgtcagtacaaa

SEQ ID NO: 71543 - DNA, 20 bp, Artificial Sequence
  Description of Artificial Sequence: Synthetic oligonucleotide
  Target: ATXN2; (-) strand; PAM type: YTN; PAM sequence: TTT
cttcctgcttgtcagtacaa

SEQ ID NO: 71544 - DNA, 20 bp, Artificial Sequence
  Description of Artificial Sequence: Synthetic oligonucleotide
  Target: ATXN2; (-) strand; PAM type: YTN; PAM sequence: CTT
tcttcctgcttgtcagtaca

SEQ ID NO: 71545 - DNA, 20 bp, Artificial Sequence
  Description of Artificial Sequence: Synthetic oligonucleotide
  Target: ATXN2; (-) strand; PAM type: YTN; PAM sequence: CTC
tttcttcctgcttgtcagta

SEQ ID NO: 71546 - DNA, 20 bp, Artificial Sequence
  Description of Artificial Sequence: Synthetic oligonucleotide
  Target: ATXN2; (-) strand; PAM type: YTN; PAM sequence: TTC
atggcagaggctctttcttc

SEQ ID NO: 71547 - DNA, 20 bp, Artificial Sequence
  Description of Artificial Sequence: Synthetic oligonucleotide
  Target: ATXN2; (-) strand; PAM type: YTN; PAM sequence: TTA
ttcatggcagaggctctttc

SEQ ID NO: 71548 - DNA, 20 bp, Artificial Sequence
  Description of Artificial Sequence: Synthetic oligonucleotide
  Target: ATXN2; (-) strand; PAM type: YTN; PAM sequence: TTT
attcatggcagaggctcttt

SEQ ID NO: 71549 - DNA, 20 bp, Artificial Sequence
  Description of Artificial Sequence: Synthetic oligonucleotide
  Target: ATXN2; (-) strand; PAM type: YTN; PAM sequence: CTT
tattcatggcagaggctctt

SEQ ID NO: 71550 - DNA, 20 bp, Artificial Sequence
  Description of Artificial Sequence: Synthetic oligonucleotide
  Target: ATXN2; (-) strand; PAM type: YTN; PAM sequence: TTG
ctttattcatggcagaggct

SEQ ID NO: 71551 - DNA, 20 bp, Artificial Sequence
  Description of Artificial Sequence: Synthetic oligonucleotide
  Target: ATXN2; (-) strand; PAM type: YTN; PAM sequence: TTT
gctttattcatggcagaggc

SEQ ID NO: 71552 - DNA, 20 bp, Artificial Sequence
  Description of Artificial Sequence: Synthetic oligonucleotide
  Target: ATXN2; (-) strand; PAM type: YTN; PAM sequence: CTA
tttgctttattcatggcaga

SEQ ID NO: 71553 - DNA, 20 bp, Artificial Sequence
  Description of Artificial Sequence: Synthetic oligonucleotide
  Target: ATXN2; (-) strand; PAM type: YTN; PAM sequence: CTC
acctatttgctttattcatg

SEQ ID NO: 71554 - DNA, 20 bp, Artificial Sequence
  Description of Artificial Sequence: Synthetic oligonucleotide
  Target: ATXN2; (-) strand; PAM type: YTN; PAM sequence: TTC
cagtccctcacctatttgct

SEQ ID NO: 71555 - DNA, 20 bp, Artificial Sequence
  Description of Artificial Sequence: Synthetic oligonucleotide
  Target: ATXN2; (-) strand; PAM type: YTN; PAM sequence: CTT
ccagtccctcacctatttgc

SEQ ID NO: 71556 - DNA, 20 bp, Artificial Sequence
  Description of Artificial Sequence: Synthetic oligonucleotide
  Target: ATXN2; (-) strand; PAM type: YTN; PAM sequence: CTC
cttccagtccctcacctatt

SEQ ID NO: 71557 - DNA, 20 bp, Artificial Sequence
  Description of Artificial Sequence: Synthetic oligonucleotide
  Target: ATXN2; (-) strand; PAM type: YTN; PAM sequence: TTG
atgaccactccttccagtcc

SEQ ID NO: 71558 - DNA, 20 bp, Artificial Sequence
  Description of Artificial Sequence: Synthetic oligonucleotide
  Target: ATXN2; (-) strand; PAM type: YTN; PAM sequence: CTT
gatgaccactccttccagtc

SEQ ID NO: 71559 - DNA, 20 bp, Artificial Sequence
  Description of Artificial Sequence: Synthetic oligonucleotide
  Target: ATXN2; (-) strand; PAM type: YTN; PAM sequence: CTG
cagccttgatgaccactcct

SEQ ID NO: 71560 - DNA, 20 bp, Artificial Sequence
  Description of Artificial Sequence: Synthetic oligonucleotide
  Target: ATXN2; (-) strand; PAM type: YTN; PAM sequence: TTC
tgcagccttgatgaccactc

SEQ ID NO: 71561 - DNA, 20 bp, Artificial Sequence
  Description of Artificial Sequence: Synthetic oligonucleotide
  Target: ATXN2; (-) strand; PAM type: YTN; PAM sequence: TTT
ctgcagccttgatgaccact

SEQ ID NO: 71562 - DNA, 20 bp, Artificial Sequence
  Description of Artificial Sequence: Synthetic oligonucleotide
  Target: ATXN2; (-) strand; PAM type: YTN; PAM sequence: CTA
tttctgcagccttgatgacc

SEQ ID NO: 71563 - DNA, 20 bp, Artificial Sequence
  Description of Artificial Sequence: Synthetic oligonucleotide
  Target: ATXN2; (-) strand; PAM type: YTN; PAM sequence: TTA
aacctatttctgcagccttg

SEQ ID NO: 71564 - DNA, 20 bp, Artificial Sequence
  Description of Artificial Sequence: Synthetic oligonucleotide
  Target: ATXN2; (-) strand; PAM type: YTN; PAM sequence: CTT
aaacctatttctgcagcctt

SEQ ID NO: 71565 - DNA, 20 bp, Artificial Sequence
  Description of Artificial Sequence: Synthetic oligonucleotide
  Target: ATXN2; (-) strand; PAM type: YTN; PAM sequence: TTC
cttaaacctatttctgcagc

SEQ ID NO: 71566 - DNA, 20 bp, Artificial Sequence
  Description of Artificial Sequence: Synthetic oligonucleotide
  Target: ATXN2; (-) strand; PAM type: YTN; PAM sequence: TTT
ccttaaacctatttctgcag

SEQ ID NO: 71567 - DNA, 20 bp, Artificial Sequence
  Description of Artificial Sequence: Synthetic oligonucleotide
  Target: ATXN2; (-) strand; PAM type: YTN; PAM sequence: TTT
tccttaaacctatttctgca

SEQ ID NO: 71568 - DNA, 20 bp, Artificial Sequence
  Description of Artificial Sequence: Synthetic oligonucleotide
  Target: ATXN2; (-) strand; PAM type: YTN; PAM sequence: TTT
ttccttaaacctatttctgc

SEQ ID NO: 71569 - DNA, 20 bp, Artificial Sequence
  Description of Artificial Sequence: Synthetic oligonucleotide
  Target: ATXN2; (-) strand; PAM type: YTN; PAM sequence: TTT
tttccttaaacctatttctg

SEQ ID NO: 71570 - DNA, 20 bp, Artificial Sequence
  Description of Artificial Sequence: Synthetic oligonucleotide
  Target: ATXN2; (-) strand; PAM type: YTN; PAM sequence: TTT
ttttccttaaacctatttct

SEQ ID NO: 71571 - DNA, 20 bp, Artificial Sequence
  Description of Artificial Sequence: Synthetic oligonucleotide
  Target: ATXN2; (-) strand; PAM type: YTN; PAM sequence: TTT
tttttccttaaacctatttc

SEQ ID NO: 71572 - DNA, 20 bp, Artificial Sequence
  Description of Artificial Sequence: Synthetic oligonucleotide
  Target: ATXN2; (-) strand; PAM type: YTN; PAM sequence: TTT
ttttttccttaaacctattt

SEQ ID NO: 71573 - DNA, 20 bp, Artificial Sequence
  Description of Artificial Sequence: Synthetic oligonucleotide
  Target: ATXN2; (-) strand; PAM type: YTN; PAM sequence: TTT
tttttttccttaaacctatt

SEQ ID NO: 71574 - DNA, 20 bp, Artificial Sequence
  Description of Artificial Sequence: Synthetic oligonucleotide
  Target: ATXN2; (-) strand; PAM type: YTN; PAM sequence: TTT
ttttttttccttaaacctat

SEQ ID NO: 71575 - DNA, 20 bp, Artificial Sequence
  Description of Artificial Sequence: Synthetic oligonucleotide
  Target: ATXN2; (-) strand; PAM type: YTN; PAM sequence: TTT
tttttttttccttaaaccta

SEQ ID NO: 71576 - DNA, 20 bp, Artificial Sequence
  Description of Artificial Sequence: Synthetic oligonucleotide
  Target: ATXN2; (-) strand; PAM type: YTN; PAM sequence: TTT
ttttttttttccttaaacct

SEQ ID NO: 71577 - DNA, 20 bp, Artificial Sequence
  Description of Artificial Sequence: Synthetic oligonucleotide
  Target: ATXN2; (-) strand; PAM type: YTN; PAM sequence: TTT
tttttttttttccttaaacc

SEQ ID NO: 71578 - DNA, 20 bp, Artificial Sequence
  Description of Artificial Sequence: Synthetic oligonucleotide
  Target: ATXN2; (-) strand; PAM type: YTN; PAM sequence: TTT
ttttttttttttccttaaac

SEQ ID NO: 71579 - DNA, 20 bp, Artificial Sequence
  Description of Artificial Sequence: Synthetic oligonucleotide
  Target: ATXN2; (-) strand; PAM type: YTN; PAM sequence: TTT
tttttttttttttccttaaa

SEQ ID NO: 71580 - DNA, 20 bp, Artificial Sequence
  Description of Artificial Sequence: Synthetic oligonucleotide
  Target: ATXN2; (-) strand; PAM type: YTN; PAM sequence: TTT
ttttttttttttttccttaa

SEQ ID NO: 71581 - DNA, 20 bp, Artificial Sequence
  Description of Artificial Sequence: Synthetic oligonucleotide
  Target: ATXN2; (-) strand; PAM type: YTN; PAM sequence: TTT
tttttttttttttttcctta

SEQ ID NO: 71582 - DNA, 20 bp, Artificial Sequence
  Description of Artificial Sequence: Synthetic oligonucleotide
  Target: ATXN2; (-) strand; PAM type: YTN; PAM sequence: CTT
ttttttttttttttttcctt

SEQ ID NO: 71583 - DNA, 20 bp, Artificial Sequence
  Description of Artificial Sequence: Synthetic oligonucleotide
  Target: ATXN2; (-) strand; PAM type: YTN; PAM sequence: TTC
agcagacttttttttttttt

SEQ ID NO: 71584 - DNA, 20 bp, Artificial Sequence
  Description of Artificial Sequence: Synthetic oligonucleotide
  Target: ATXN2; (-) strand; PAM type: YTN; PAM sequence: CTC
agaagagttcagcagacttt

SEQ ID NO: 71585 - DNA, 20 bp, Artificial Sequence
  Description of Artificial Sequence: Synthetic oligonucleotide
  Target: ATXN2; (-) strand; PAM type: YTN; PAM sequence: CTG
gagcctcagaagagttcagc

SEQ ID NO: 71586 - DNA, 20 bp, Artificial Sequence
  Description of Artificial Sequence: Synthetic oligonucleotide
  Target: ATXN2; (-) strand; PAM type: YTN; PAM sequence: TTG
ctggagcctcagaagagttc

SEQ ID NO: 71587 - DNA, 20 bp, Artificial Sequence
  Description of Artificial Sequence: Synthetic oligonucleotide
  Target: ATXN2; (-) strand; PAM type: YTN; PAM sequence: CTT
gctggagcctcagaagagtt

SEQ ID NO: 71588 - DNA, 20 bp, Artificial Sequence
  Description of Artificial Sequence: Synthetic oligonucleotide
  Target: ATXN2; (-) strand; PAM type: YTN; PAM sequence: CTC
ttgctggagcctcagaagag

SEQ ID NO: 71589 - DNA, 20 bp, Artificial Sequence
  Description of Artificial Sequence: Synthetic oligonucleotide
  Target: ATXN2; (-) strand; PAM type: YTN; PAM sequence: TTC
cagctcttgctggagcctca

SEQ ID NO: 71590 - DNA, 20 bp, Artificial Sequence
  Description of Artificial Sequence: Synthetic oligonucleotide
  Target: ATXN2; (-) strand; PAM type: YTN; PAM sequence: TTT
ccagctcttgctggagcctc

SEQ ID NO: 71591 - DNA, 20 bp, Artificial Sequence
  Description of Artificial Sequence: Synthetic oligonucleotide
  Target: ATXN2; (-) strand; PAM type: YTN; PAM sequence: TTA
ggaatgtagggtttccagct

SEQ ID NO: 71592 - DNA, 20 bp, Artificial Sequence
  Description of Artificial Sequence: Synthetic oligonucleotide
  Target: ATXN2; (-) strand; PAM type: YTN; PAM sequence: TTA
gttaggaatgtagggtttcc

SEQ ID NO: 71593 - DNA, 20 bp, Artificial Sequence
  Description of Artificial Sequence: Synthetic oligonucleotide
  Target: ATXN2; (-) strand; PAM type: YTN; PAM sequence: CTG
attagttaggaatgtagggt

SEQ ID NO: 71594 - DNA, 20 bp, Artificial Sequence
  Description of Artificial Sequence: Synthetic oligonucleotide
  Target: ATXN2; (-) strand; PAM type: YTN; PAM sequence: CTG
gggggctgattagttaggaa

SEQ ID NO: 71595 - DNA, 20 bp, Artificial Sequence
  Description of Artificial Sequence: Synthetic oligonucleotide
  Target: ATXN2; (-) strand; PAM type: YTN; PAM sequence: CTG
gagaaagtcccactgggggg

SEQ ID NO: 71596 - DNA, 20 bp, Artificial Sequence
  Description of Artificial Sequence: Synthetic oligonucleotide
  Target: ATXN2; (-) strand; PAM type: YTN; PAM sequence: CTG
ggtgtggctggagaaagtcc

SEQ ID NO: 71597 - DNA, 20 bp, Artificial Sequence
  Description of Artificial Sequence: Synthetic oligonucleotide
  Target: ATXN2; (-) strand; PAM type: YTN; PAM sequence: CTG
ctgggtgtggctggagaaag

SEQ ID NO: 71598 - DNA, 20 bp, Artificial Sequence
  Description of Artificial Sequence: Synthetic oligonucleotide
  Target: ATXN2; (-) strand; PAM type: YTN; PAM sequence: CTA
atccagcctgctgggtgtgg

SEQ ID NO: 71599 - DNA, 20 bp, Artificial Sequence
  Description of Artificial Sequence: Synthetic oligonucleotide
  Target: ATXN2; (-) strand; PAM type: YTN; PAM sequence: CTC
ctaatccagcctgctgggtg

SEQ ID NO: 71600 - DNA, 20 bp, Artificial Sequence
  Description of Artificial Sequence: Synthetic oligonucleotide
  Target: ATXN2; (-) strand; PAM type: YTN; PAM sequence: CTA
ctcctaatccagcctgctgg

SEQ ID NO: 71601 - DNA, 20 bp, Artificial Sequence
  Description of Artificial Sequence: Synthetic oligonucleotide
  Target: ATXN2; (-) strand; PAM type: YTN; PAM sequence: CTG
tctactcctaatccagcctg

SEQ ID NO: 71602 - DNA, 20 bp, Artificial Sequence
  Description of Artificial Sequence: Synthetic oligonucleotide
  Target: ATXN2; (-) strand; PAM type: YTN; PAM sequence: CTC
tgtctactcctaatccagcc

SEQ ID NO: 71603 - DNA, 20 bp, Artificial Sequence
  Description of Artificial Sequence: Synthetic oligonucleotide
  Target: ATXN2; (-) strand; PAM type: YTN; PAM sequence: TTA
aactctgtctactcctaatc

SEQ ID NO: 71604 - DNA, 20 bp, Artificial Sequence
  Description of Artificial Sequence: Synthetic oligonucleotide
  Target: ATXN2; (-) strand; PAM type: YTN; PAM sequence: CTT
aaactctgtctactcctaat

SEQ ID NO: 71605 - DNA, 20 bp, Artificial Sequence
  Description of Artificial Sequence: Synthetic oligonucleotide
  Target: ATXN2; (-) strand; PAM type: YTN; PAM sequence: CTA
agatcttaaactctgtctac

SEQ ID NO: 71606 - DNA, 20 bp, Artificial Sequence
  Description of Artificial Sequence: Synthetic oligonucleotide
  Target: ATXN2; (-) strand; PAM type: YTN; PAM sequence: CTC
taagatcttaaactctgtct

SEQ ID NO: 71607 - DNA, 20 bp, Artificial Sequence
  Description of Artificial Sequence: Synthetic oligonucleotide
  Target: ATXN2; (-) strand; PAM type: YTN; PAM sequence: TTC
ctctaagatcttaaactctg

SEQ ID NO: 71608 - DNA, 20 bp, Artificial Sequence
  Description of Artificial Sequence: Synthetic oligonucleotide
  Target: ATXN2; (-) strand; PAM type: YTN; PAM sequence: CTG
ttcctctaagatcttaaact

SEQ ID NO: 71609 - DNA, 20 bp, Artificial Sequence
  Description of Artificial Sequence: Synthetic oligonucleotide
  Target: ATXN2; (-) strand; PAM type: YTN; PAM sequence: CTC
tgttcctctaagatcttaaa

SEQ ID NO: 71610 - DNA, 20 bp, Artificial Sequence
  Description of Artificial Sequence: Synthetic oligonucleotide
  Target: ATXN2; (-) strand; PAM type: YTN; PAM sequence: TTC
tctgttcctctaagatctta

SEQ ID NO: 71611 - DNA, 20 bp, Artificial Sequence
  Description of Artificial Sequence: Synthetic oligonucleotide
  Target: ATXN2; (-) strand; PAM type: YTN; PAM sequence: CTC
acagtgttctctgttcctct

SEQ ID NO: 71612 - DNA, 20 bp, Artificial Sequence
  Description of Artificial Sequence: Synthetic oligonucleotide
  Target: ATXN2; (-) strand; PAM type: YTN; PAM sequence: TTG
cccctcacagtgttctctgt

SEQ ID NO: 71613 - DNA, 20 bp, Artificial Sequence
  Description of Artificial Sequence: Synthetic oligonucleotide
  Target: ATXN2; (-) strand; PAM type: YTN; PAM sequence: CTT
gcccctcacagtgttctctg

SEQ ID NO: 71614 - DNA, 20 bp, Artificial Sequence
  Description of Artificial Sequence: Synthetic oligonucleotide
  Target: ATXN2; (-) strand; PAM type: YTN; PAM sequence: TTC
ttgcccctcacagtgttctc

SEQ ID NO: 71615 - DNA, 20 bp, Artificial Sequence
  Description of Artificial Sequence: Synthetic oligonucleotide
  Target: ATXN2; (-) strand; PAM type: YTN; PAM sequence: CTT
cttgcccctcacagtgttct

SEQ ID NO: 71616 - DNA, 20 bp, Artificial Sequence
  Description of Artificial Sequence: Synthetic oligonucleotide
  Target: ATXN2; (-) strand; PAM type: YTN; PAM sequence: CTC
ttcttgcccctcacagtgtt

SEQ ID NO: 71617 - DNA, 20 bp, Artificial Sequence
  Description of Artificial Sequence: Synthetic oligonucleotide
  Target: ATXN2; (-) strand; PAM type: YTN; PAM sequence: TTC
tcttcttgcccctcacagtg

SEQ ID NO: 71618 - DNA, 20 bp, Artificial Sequence
  Description of Artificial Sequence: Synthetic oligonucleotide
  Target: ATXN2; (-) strand; PAM type: YTN; PAM sequence: CTA
ttctcttcttgcccctcaca

SEQ ID NO: 71619 - DNA, 20 bp, Artificial Sequence
  Description of Artificial Sequence: Synthetic oligonucleotide
  Target: ATXN2; (-) strand; PAM type: YTN; PAM sequence: TTC
tattctcttcttgcccctca

SEQ ID NO: 71620 - DNA, 20 bp, Artificial Sequence
  Description of Artificial Sequence: Synthetic oligonucleotide
  Target: ATXN2; (-) strand; PAM type: YTN; PAM sequence: CTT
ctattctcttcttgcccctc

SEQ ID NO: 71621 - DNA, 20 bp, Artificial Sequence
  Description of Artificial Sequence: Synthetic oligonucleotide
  Target: ATXN2; (-) strand; PAM type: YTN; PAM sequence: TTA
cacttctattctcttcttgc

SEQ ID NO: 71622 - DNA, 20 bp, Artificial Sequence
  Description of Artificial Sequence: Synthetic oligonucleotide
  Target: ATXN2; (-) strand; PAM type: YTN; PAM sequence: TTT
acacttctattctcttcttg

SEQ ID NO: 71623 - DNA, 20 bp, Artificial Sequence
  Description of Artificial Sequence: Synthetic oligonucleotide
  Target: ATXN2; (-) strand; PAM type: YTN; PAM sequence: CTT
tacacttctattctcttctt

SEQ ID NO: 71624 - DNA, 20 bp, Artificial Sequence
  Description of Artificial Sequence: Synthetic oligonucleotide
  Target: ATXN2; (-) strand; PAM type: YTN; PAM sequence: CTA
taaactttacacttctattc

SEQ ID NO: 71625 - DNA, 20 bp, Artificial Sequence
  Description of Artificial Sequence: Synthetic oligonucleotide
  Target: ATXN2; (-) strand; PAM type: YTN; PAM sequence: CTG
accacagctataaactttac

SEQ ID NO: 71626 - DNA, 20 bp, Artificial Sequence
  Description of Artificial Sequence: Synthetic oligonucleotide
  Target: ATXN2; (-) strand; PAM type: YTN; PAM sequence: CTC
tgaccacagctataaacttt

SEQ ID NO: 71627 - DNA, 20 bp, Artificial Sequence
  Description of Artificial Sequence: Synthetic oligonucleotide
  Target: ATXN2; (-) strand; PAM type: YTN; PAM sequence: CTA
ctctgaccacagctataaac

SEQ ID NO: 71628 - DNA, 20 bp, Artificial Sequence
  Description of Artificial Sequence: Synthetic oligonucleotide
  Target: ATXN2; (-) strand; PAM type: YTN; PAM sequence: TTC
aagatctactctgaccacag

SEQ ID NO: 71629 - DNA, 20 bp, Artificial Sequence
  Description of Artificial Sequence: Synthetic oligonucleotide
  Target: ATXN2; (-) strand; PAM type: YTN; PAM sequence: TTT
caagatctactctgaccaca

SEQ ID NO: 71630 - DNA, 20 bp, Artificial Sequence
  Description of Artificial Sequence: Synthetic oligonucleotide
  Target: ATXN2; (-) strand; PAM type: YTN; PAM sequence: TTT
tcaagatctactctgaccac

SEQ ID NO: 71631 - DNA, 20 bp, Artificial Sequence
  Description of Artificial Sequence: Synthetic oligonucleotide
  Target: ATXN2; (-) strand; PAM type: YTN; PAM sequence: CTT
ttcaagatctactctgacca

SEQ ID NO: 71632 - DNA, 20 bp, Artificial Sequence
  Description of Artificial Sequence: Synthetic oligonucleotide
  Target: ATXN2; (-) strand; PAM type: YTN; PAM sequence: TTC
cagaatgcttttcaagatct

SEQ ID NO: 71633 - DNA, 20 bp, Artificial Sequence
  Description of Artificial Sequence: Synthetic oligonucleotide
  Target: ATXN2; (-) strand; PAM type: YTN; PAM sequence: CTT
ccagaatgcttttcaagatc

SEQ ID NO: 71634 - DNA, 20 bp, Artificial Sequence
  Description of Artificial Sequence: Synthetic oligonucleotide
  Target: ATXN2; (-) strand; PAM type: YTN; PAM sequence: CTC
ttccagaatgcttttcaaga

SEQ ID NO: 71635 - DNA, 20 bp, Artificial Sequence
  Description of Artificial Sequence: Synthetic oligonucleotide
  Target: ATXN2; (-) strand; PAM type: YTN; PAM sequence: TTC
tcttccagaatgcttttcaa

SEQ ID NO: 71636 - DNA, 20 bp, Artificial Sequence
  Description of Artificial Sequence: Synthetic oligonucleotide
  Target: ATXN2; (-) strand; PAM type: YTN; PAM sequence: CTT
ctcttccagaatgcttttca

SEQ ID NO: 71637 - DNA, 20 bp, Artificial Sequence
  Description of Artificial Sequence: Synthetic oligonucleotide
  Target: ATXN2; (-) strand; PAM type: YTN; PAM sequence: CTG
cttctcttccagaatgcttt

SEQ ID NO: 71638 - DNA, 20 bp, Artificial Sequence
  Description of Artificial Sequence: Synthetic oligonucleotide
  Target: ATXN2; (-) strand; PAM type: YTN; PAM sequence: CTC
ggaaggaactgcttctcttc

SEQ ID NO: 71639 - DNA, 20 bp, Artificial Sequence
  Description of Artificial Sequence: Synthetic oligonucleotide
  Target: ATXN2; (-) strand; PAM type: YTN; PAM sequence: CTG
tgtcatcactcggaaggaac

SEQ ID NO: 71640 - DNA, 20 bp, Artificial Sequence
  Description of Artificial Sequence: Synthetic oligonucleotide
  Target: ATXN2; (-) strand; PAM type: YTN; PAM sequence: TTC
atgactgtgtcatcactcgg

SEQ ID NO: 71641 - DNA, 20 bp, Artificial Sequence
  Description of Artificial Sequence: Synthetic oligonucleotide
  Target: ATXN2; (-) strand; PAM type: YTN; PAM sequence: TTT
catgactgtgtcatcactcg

SEQ ID NO: 71642 - DNA, 20 bp, Artificial Sequence
  Description of Artificial Sequence: Synthetic oligonucleotide
  Target: ATXN2; (-) strand; PAM type: YTN; PAM sequence: CTT
tcatgactgtgtcatcactc

SEQ ID NO: 71643 - DNA, 20 bp, Artificial Sequence
  Description of Artificial Sequence: Synthetic oligonucleotide
  Target: ATXN2; (-) strand; PAM type: YTN; PAM sequence: CTG
ctttcatgactgtgtcatca

SEQ ID NO: 71644 - DNA, 20 bp, Artificial Sequence
  Description of Artificial Sequence: Synthetic oligonucleotide
  Target: ATXN2; (-) strand; PAM type: YTN; PAM sequence: TTG
tagcatcctgctttcatgac

SEQ ID NO: 71645 - DNA, 20 bp, Artificial Sequence
  Description of Artificial Sequence: Synthetic oligonucleotide
  Target: ATXN2; (-) strand; PAM type: YTN; PAM sequence: CTC
cacggcgttgtagcatcctg

SEQ ID NO: 71646 - DNA, 20 bp, Artificial Sequence
  Description of Artificial Sequence: Synthetic oligonucleotide
  Target: ATXN2; (-) strand; PAM type: YTN; PAM sequence: TTC
acctccacggcgttgtagca

SEQ ID NO: 71647 - DNA, 20 bp, Artificial Sequence
  Description of Artificial Sequence: Synthetic oligonucleotide
  Target: ATXN2; (-) strand; PAM type: YTN; PAM sequence: TTT
cacctccacggcgttgtagc

SEQ ID NO: 71648 - DNA, 20 bp, Artificial Sequence
  Description of Artificial Sequence: Synthetic oligonucleotide
  Target: ATXN2; (-) strand; PAM type: YTN; PAM sequence: CTT
tcacctccacggcgttgtag

SEQ ID NO: 71649 - DNA, 20 bp, Artificial Sequence
  Description of Artificial Sequence: Synthetic oligonucleotide
  Target: ATXN2; (-) strand; PAM type: YTN; PAM sequence: TTC
catacatccctttcacctcc

SEQ ID NO: 71650 - DNA, 20 bp, Artificial Sequence
  Description of Artificial Sequence: Synthetic oligonucleotide
  Target: ATXN2; (-) strand; PAM type: YTN; PAM sequence: CTG
ttccatacatccctttcacc

SEQ ID NO: 71651 - DNA, 20 bp, Artificial Sequence
  Description of Artificial Sequence: Synthetic oligonucleotide
  Target: ATXN2; (-) strand; PAM type: YTN; PAM sequence: TTC
tgttccatacatccctttca

SEQ ID NO: 71652 - DNA, 20 bp, Artificial Sequence
  Description of Artificial Sequence: Synthetic oligonucleotide
  Target: ATXN2; (-) strand; PAM type: YTN; PAM sequence: CTA
agttctgttccatacatccc

SEQ ID NO: 71653 - DNA, 20 bp, Artificial Sequence
  Description of Artificial Sequence: Synthetic oligonucleotide
  Target: ATXN2; (-) strand; PAM type: YTN; PAM sequence: CTC
ctaagttctgttccatacat

SEQ ID NO: 71654 - DNA, 20 bp, Artificial Sequence
  Description of Artificial Sequence: Synthetic oligonucleotide
  Target: ATXN2; (-) strand; PAM type: YTN; PAM sequence: TTA
ggaaacatagcctcctaagt

SEQ ID NO: 71655 - DNA, 20 bp, Artificial Sequence
  Description of Artificial Sequence: Synthetic oligonucleotide
  Target: ATXN2; (-) strand; PAM type: YTN; PAM sequence: TTT
aggaaacatagcctcctaag

SEQ ID NO: 71656 - DNA, 20 bp, Artificial Sequence
  Description of Artificial Sequence: Synthetic oligonucleotide
  Target: ATXN2; (-) strand; PAM type: YTN; PAM sequence: CTT
taggaaacatagcctcctaa

SEQ ID NO: 71657 - DNA, 20 bp, Artificial Sequence
  Description of Artificial Sequence: Synthetic oligonucleotide
  Target: ATXN2; (-) strand; PAM type: YTN; PAM sequence: TTC
tttaggaaacatagcctcct

SEQ ID NO: 71658 - DNA, 20 bp, Artificial Sequence
  Description of Artificial Sequence: Synthetic oligonucleotide
  Target: ATXN2; (-) strand; PAM type: YTN; PAM sequence: CTA
ttctttaggaaacatagcct

SEQ ID NO: 71659 - DNA, 20 bp, Artificial Sequence
  Description of Artificial Sequence: Synthetic oligonucleotide
  Target: ATXN2; (-) strand; PAM type: YTN; PAM sequence: TTG
gagaacactattctttagga

SEQ ID NO: 71660 - DNA, 20 bp, Artificial Sequence
  Description of Artificial Sequence: Synthetic oligonucleotide
  Target: ATXN2; (-) strand; PAM type: YTN; PAM sequence: TTT
ggagaacactattctttagg

SEQ ID NO: 71661 - DNA, 20 bp, Artificial Sequence
  Description of Artificial Sequence: Synthetic oligonucleotide
  Target: ATXN2; (-) strand; PAM type: YTN; PAM sequence: TTC
aaatggatcatttggagaac

SEQ ID NO: 71662 - DNA, 20 bp, Artificial Sequence
  Description of Artificial Sequence: Synthetic oligonucleotide
  Target: ATXN2; (-) strand; PAM type: YTN; PAM sequence: TTT
caaatggatcatttggagaa

SEQ ID NO: 71663 - DNA, 20 bp, Artificial Sequence
  Description of Artificial Sequence: Synthetic oligonucleotide
  Target: ATXN2; (-) strand; PAM type: YTN; PAM sequence: TTT
tcaaatggatcatttggaga

SEQ ID NO: 71664 - DNA, 20 bp, Artificial Sequence
  Description of Artificial Sequence: Synthetic oligonucleotide
  Target: ATXN2; (-) strand; PAM type: YTN; PAM sequence: TTA
ttttcaaatggatcatttgg

SEQ ID NO: 71665 - DNA, 20 bp, Artificial Sequence
  Description of Artificial Sequence: Synthetic oligonucleotide
  Target: ATXN2; (-) strand; PAM type: YTN; PAM sequence: TTT
attttcaaatggatcatttg

SEQ ID NO: 71666 - DNA, 20 bp, Artificial Sequence
  Description of Artificial Sequence: Synthetic oligonucleotide
  Target: ATXN2; (-) strand; PAM type: YTN; PAM sequence: TTG
gaataatttattttcaaatg

SEQ ID NO: 71667 - DNA, 20 bp, Artificial Sequence
  Description of Artificial Sequence: Synthetic oligonucleotide
  Target: ATXN2; (-) strand; PAM type: YTN; PAM sequence: CTG
tagtgtgtgttggaataatt

SEQ ID NO: 71668 - DNA, 20 bp, Artificial Sequence
  Description of Artificial Sequence: Synthetic oligonucleotide
  Target: ATXN2; (-) strand; PAM type: YTN; PAM sequence: CTG
aaggacaactgtagtgtgtg

SEQ ID NO: 71669 - DNA, 20 bp, Artificial Sequence
  Description of Artificial Sequence: Synthetic oligonucleotide
  Target: ATXN2; (-) strand; PAM type: YTN; PAM sequence: TTA
gaaccaatcccccatagatg

SEQ ID NO: 71670 - DNA, 20 bp, Artificial Sequence
  Description of Artificial Sequence: Synthetic oligonucleotide
  Target: ATXN2; (-) strand; PAM type: YTN; PAM sequence: CTA
gggggtattagaaccaatcc

SEQ ID NO: 71671 - DNA, 20 bp, Artificial Sequence
  Description of Artificial Sequence: Synthetic oligonucleotide
  Target: ATXN2; (-) strand; PAM type: YTN; PAM sequence: TTG
gtatccctagggggtattag

SEQ ID NO: 71672 - DNA, 20 bp, Artificial Sequence
  Description of Artificial Sequence: Synthetic oligonucleotide
  Target: ATXN2; (-) strand; PAM type: YTN; PAM sequence: TTT
ggtatccctagggggtatta

SEQ ID NO: 71673 - DNA, 20 bp, Artificial Sequence
  Description of Artificial Sequence: Synthetic oligonucleotide
  Target: ATXN2; (-) strand; PAM type: YTN; PAM sequence: TTT
tggtatccctagggggtatt

SEQ ID NO: 71674 - DNA, 20 bp, Artificial Sequence
  Description of Artificial Sequence: Synthetic oligonucleotide
  Target: ATXN2; (-) strand; PAM type: YTN; PAM sequence: CTG
gattttggtatccctagggg

SEQ ID NO: 71675 - DNA, 20 bp, Artificial Sequence
  Description of Artificial Sequence: Synthetic oligonucleotide
  Target: ATXN2; (-) strand; PAM type: YTN; PAM sequence: TTA
agcatccctggattttggta

SEQ ID NO: 71676 - DNA, 20 bp, Artificial Sequence
  Description of Artificial Sequence: Synthetic oligonucleotide
  Target: ATXN2; (-) strand; PAM type: YTN; PAM sequence: CTT
aagcatccctggattttggt

SEQ ID NO: 71677 - DNA, 20 bp, Artificial Sequence
  Description of Artificial Sequence: Synthetic oligonucleotide
  Target: ATXN2; (-) strand; PAM type: YTN; PAM sequence: TTG
tatcagggacttaagcatcc

SEQ ID NO: 71678 - DNA, 20 bp, Artificial Sequence
  Description of Artificial Sequence: Synthetic oligonucleotide
  Target: ATXN2; (-) strand; PAM type: YTN; PAM sequence: TTT
gtatcagggacttaagcatc

SEQ ID NO: 71679 - DNA, 20 bp, Artificial Sequence
  Description of Artificial Sequence: Synthetic oligonucleotide
  Target: ATXN2; (-) strand; PAM type: YTN; PAM sequence: CTT
tgtatcagggacttaagcat

SEQ ID NO: 71680 - DNA, 20 bp, Artificial Sequence
  Description of Artificial Sequence: Synthetic oligonucleotide
  Target: ATXN2; (-) strand; PAM type: YTN; PAM sequence: CTA
caccactttgtatcagggac

SEQ ID NO: 71681 - DNA, 20 bp, Artificial Sequence
  Description of Artificial Sequence: Synthetic oligonucleotide
  Target: ATXN2; (-) strand; PAM type: YTN; PAM sequence: TTA
aagtatgcgagagtatgcaa

SEQ ID NO: 71682 - DNA, 20 bp, Artificial Sequence
  Description of Artificial Sequence: Synthetic oligonucleotide
  Target: ATXN2; (-) strand; PAM type: YTN; PAM sequence: TTT
aaagtatgcgagagtatgca

SEQ ID NO: 71683 - DNA, 20 bp, Artificial Sequence
  Description of Artificial Sequence: Synthetic oligonucleotide
  Target: ATXN2; (-) strand; PAM type: YTN; PAM sequence: CTA
gaggtttaaagtatgcgaga

SEQ ID NO: 71684 - DNA, 20 bp, Artificial Sequence
  Description of Artificial Sequence: Synthetic oligonucleotide
  Target: ATXN2; (-) strand; PAM type: YTN; PAM sequence: TTA
taggtaacctagaggtttaa

SEQ ID NO: 71685 - DNA, 20 bp, Artificial Sequence
  Description of Artificial Sequence: Synthetic oligonucleotide
  Target: ATXN2; (-) strand; PAM type: YTN; PAM sequence: TTA
ggtattataggtaacctaga

SEQ ID NO: 71686 - DNA, 20 bp, Artificial Sequence
  Description of Artificial Sequence: Synthetic oligonucleotide
  Target: ATXN2; (-) strand; PAM type: YTN; PAM sequence: TTG
tattaggtattataggtaac

SEQ ID NO: 71687 - DNA, 20 bp, Artificial Sequence
  Description of Artificial Sequence: Synthetic oligonucleotide
  Target: ATXN2; (-) strand; PAM type: YTN; PAM sequence: TTT
gtattaggtattataggtaa

SEQ ID NO: 71688 - DNA, 20 bp, Artificial Sequence
  Description of Artificial Sequence: Synthetic oligonucleotide
  Target: ATXN2; (-) strand; PAM type: YTN; PAM sequence: CTT
tgtattaggtattataggta

SEQ ID NO: 71689 - DNA, 20 bp, Artificial Sequence
  Description of Artificial Sequence: Synthetic oligonucleotide
  Target: ATXN2; (-) strand; PAM type: YTN; PAM sequence: TTA
ctttgtattaggtattatag

SEQ ID NO: 71690 - DNA, 20 bp, Artificial Sequence
  Description of Artificial Sequence: Synthetic oligonucleotide
  Target: ATXN2; (-) strand; PAM type: YTN; PAM sequence: TTT
actttgtattaggtattata

SEQ ID NO: 71691 - DNA, 20 bp, Artificial Sequence
  Description of Artificial Sequence: Synthetic oligonucleotide
  Target: ATXN2; (-) strand; PAM type: YTN; PAM sequence: TTC
cgtagcatttactttgtatt

SEQ ID NO: 71692 - DNA, 20 bp, Artificial Sequence
  Description of Artificial Sequence: Synthetic oligonucleotide
  Target: ATXN2; (-) strand; PAM type: YTN; PAM sequence: TTT
ccgtagcatttactttgtat

SEQ ID NO: 71693 - DNA, 20 bp, Artificial Sequence
  Description of Artificial Sequence: Synthetic oligonucleotide
  Target: ATXN2; (-) strand; PAM type: YTN; PAM sequence: CTA
tttccgtagcatttactttg

SEQ ID NO: 71694 - DNA, 20 bp, Artificial Sequence
  Description of Artificial Sequence: Synthetic oligonucleotide
  Target: ATXN2; (-) strand; PAM type: YTN; PAM sequence: TTA
agcagtaccacaactatttc

SEQ ID NO: 71695 - DNA, 20 bp, Artificial Sequence
  Description of Artificial Sequence: Synthetic oligonucleotide
  Target: ATXN2; (-) strand; PAM type: YTN; PAM sequence: CTT
aagcagtaccacaactattt

SEQ ID NO: 71696 - DNA, 20 bp, Artificial Sequence
  Description of Artificial Sequence: Synthetic oligonucleotide
  Target: ATXN2; (-) strand; PAM type: YTN; PAM sequence: TTC
cttaagcagtaccacaacta

SEQ ID NO: 71697 - DNA, 20 bp, Artificial Sequence
  Description of Artificial Sequence: Synthetic oligonucleotide
  Target: ATXN2; (-) strand; PAM type: YTN; PAM sequence: TTA
ttccttaagcagtaccacaa

SEQ ID NO: 71698 - DNA, 20 bp, Artificial Sequence
  Description of Artificial Sequence: Synthetic oligonucleotide
  Target: ATXN2; (-) strand; PAM type: YTN; PAM sequence: TTG
tcattattccttaagcagta

SEQ ID NO: 71699 - DNA, 20 bp, Artificial Sequence
  Description of Artificial Sequence: Synthetic oligonucleotide
  Target: ATXN2; (-) strand; PAM type: YTN; PAM sequence: CTT
gtcattattccttaagcagt

SEQ ID NO: 71700 - DNA, 20 bp, Artificial Sequence
  Description of Artificial Sequence: Synthetic oligonucleotide
  Target: ATXN2; (-) strand; PAM type: YTN; PAM sequence: TTC
ttgtcattattccttaagca

SEQ ID NO: 71701 - DNA, 20 bp, Artificial Sequence
  Description of Artificial Sequence: Synthetic oligonucleotide
  Target: ATXN2; (-) strand; PAM type: YTN; PAM sequence: TTT
cttgtcattattccttaagc

SEQ ID NO: 71702 - DNA, 20 bp, Artificial Sequence
  Description of Artificial Sequence: Synthetic oligonucleotide
  Target: ATXN2; (-) strand; PAM type: YTN; PAM sequence: TTT
tcttgtcattattccttaag

SEQ ID NO: 71703 - DNA, 20 bp, Artificial Sequence
  Description of Artificial Sequence: Synthetic oligonucleotide
  Target: ATXN2; (-) strand; PAM type: YTN; PAM sequence: TTT
ttcttgtcattattccttaa

SEQ ID NO: 71704 - DNA, 20 bp, Artificial Sequence
  Description of Artificial Sequence: Synthetic oligonucleotide
  Target: ATXN2; (-) strand; PAM type: YTN; PAM sequence: TTT
tttcttgtcattattcctta

SEQ ID NO: 71705 - DNA, 20 bp, Artificial Sequence
  Description of Artificial Sequence: Synthetic oligonucleotide
  Target: ATXN2; (-) strand; PAM type: YTN; PAM sequence: TTT
ttttcttgtcattattcctt

SEQ ID NO: 71706 - DNA, 20 bp, Artificial Sequence
  Description of Artificial Sequence: Synthetic oligonucleotide
  Target: ATXN2; (-) strand; PAM type: YTN; PAM sequence: CTT
tttttcttgtcattattcct

SEQ ID NO: 71707 - DNA, 20 bp, Artificial Sequence
  Description of Artificial Sequence: Synthetic oligonucleotide
  Target: ATXN2; (-) strand; PAM type: YTN; PAM sequence: CTG
aacatgtacagacttttttt

SEQ ID NO: 71708 - DNA, 20 bp, Artificial Sequence
  Description of Artificial Sequence: Synthetic oligonucleotide
  Target: ATXN2; (-) strand; PAM type: YTN; PAM sequence: CTA
tactgaacatgtacagactt

SEQ ID NO: 71709 - DNA, 20 bp, Artificial Sequence
  Description of Artificial Sequence: Synthetic oligonucleotide
  Target: ATXN2; (-) strand; PAM type: YTN; PAM sequence: TTA
tatgggaaatcaaaagcatc

SEQ ID NO: 71710 - DNA, 20 bp, Artificial Sequence
  Description of Artificial Sequence: Synthetic oligonucleotide
  Target: ATXN2; (-) strand; PAM type: YTN; PAM sequence: CTG
aaaagaaaaaaaaaaattat

SEQ ID NO: 71711 - DNA, 20 bp, Artificial Sequence
  Description of Artificial Sequence: Synthetic oligonucleotide
  Target: ATXN2; (-) strand; PAM type: YTN; PAM sequence: CTG
tctgaaaagaaaaaaaaaaa

SEQ ID NO: 71712 - DNA, 20 bp, Artificial Sequence
  Description of Artificial Sequence: Synthetic oligonucleotide
  Target: ATXN2; (-) strand; PAM type: YTN; PAM sequence: CTG
cgcaacagagtgtgagaaga

SEQ ID NO: 71713 - DNA, 20 bp, Artificial Sequence
  Description of Artificial Sequence: Synthetic oligonucleotide
  Target: ATXN2; (-) strand; PAM type: YTN; PAM sequence: CTC
cagcctgcgcaacagagtgt

SEQ ID NO: 71714 - DNA, 20 bp, Artificial Sequence
  Description of Artificial Sequence: Synthetic oligonucleotide
  Target: ATXN2; (-) strand; PAM type: YTN; PAM sequence: CTG
cactccagcctgcgcaacag

SEQ ID NO: 71715 - DNA, 20 bp, Artificial Sequence
  Description of Artificial Sequence: Synthetic oligonucleotide
  Target: ATXN2; (-) strand; PAM type: YTN; PAM sequence: TTG
tgtcactgcactccagcctg

SEQ ID NO: 71716 - DNA, 20 bp, Artificial Sequence
  Description of Artificial Sequence: Synthetic oligonucleotide
  Target: ATXN2; (-) strand; PAM type: YTN; PAM sequence: CTG
agattgtgtcactgcactcc

SEQ ID NO: 71717 - DNA, 20 bp, Artificial Sequence
  Description of Artificial Sequence: Synthetic oligonucleotide
  Target: ATXN2; (-) strand; PAM type: YTN; PAM sequence: TTC
catgagctgagattgtgtca

SEQ ID NO: 71718 - DNA, 20 bp, Artificial Sequence
  Description of Artificial Sequence: Synthetic oligonucleotide
  Target: ATXN2; (-) strand; PAM type: YTN; PAM sequence: TTT
ccatgagctgagattgtgtc

SEQ ID NO: 71719 - DNA, 20 bp, Artificial Sequence
  Description of Artificial Sequence: Synthetic oligonucleotide
  Target: ATXN2; (-) strand; PAM type: YTN; PAM sequence: CTG
agaagtagaggtttccatga

SEQ ID NO: 71720 - DNA, 20 bp, Artificial Sequence
  Description of Artificial Sequence: Synthetic oligonucleotide
  Target: ATXN2; (-) strand; PAM type: YTN; PAM sequence: TTG
aacctgagaagtagaggttt

SEQ ID NO: 71721 - DNA, 20 bp, Artificial Sequence
  Description of Artificial Sequence: Synthetic oligonucleotide
  Target: ATXN2; (-) strand; PAM type: YTN; PAM sequence: CTT
gaacctgagaagtagaggtt

SEQ ID NO: 71722 - DNA, 20 bp, Artificial Sequence
  Description of Artificial Sequence: Synthetic oligonucleotide
  Target: ATXN2; (-) strand; PAM type: YTN; PAM sequence: TTG
cttgaacctgagaagtagag

SEQ ID NO: 71723 - DNA, 20 bp, Artificial Sequence
  Description of Artificial Sequence: Synthetic oligonucleotide
  Target: ATXN2; (-) strand; PAM type: YTN; PAM sequence: TTT
gcttgaacctgagaagtaga

SEQ ID NO: 71724 - DNA, 20 bp, Artificial Sequence
  Description of Artificial Sequence: Synthetic oligonucleotide
  Target: ATXN2; (-) strand; PAM type: YTN; PAM sequence: TTG
agacaagcaatttgcttgaa

SEQ ID NO: 71725 - DNA, 20 bp, Artificial Sequence
  Description of Artificial Sequence: Synthetic oligonucleotide
  Target: ATXN2; (-) strand; PAM type: YTN; PAM sequence: CTC
gagaggttgagacaagcaat

SEQ ID NO: 71726 - DNA, 20 bp, Artificial Sequence
  Description of Artificial Sequence: Synthetic oligonucleotide
  Target: ATXN2; (-) strand; PAM type: YTN; PAM sequence: CTA
ctcgagaggttgagacaagc

SEQ ID NO: 71727 - DNA, 20 bp, Artificial Sequence
  Description of Artificial Sequence: Synthetic oligonucleotide
  Target: ATXN2; (-) strand; PAM type: YTN; PAM sequence: CTG
gccatggtagtgcacatgtg

SEQ ID NO: 71728 - DNA, 20 bp, Artificial Sequence
  Description of Artificial Sequence: Synthetic oligonucleotide
  Target: ATXN2; (-) strand; PAM type: YTN; PAM sequence: TTA
gctggccatggtagtgcaca

SEQ ID NO: 71729 - DNA, 20 bp, Artificial Sequence
  Description of Artificial Sequence: Synthetic oligonucleotide
  Target: ATXN2; (-) strand; PAM type: YTN; PAM sequence: CTA
taagtacaaaaaattagctg

SEQ ID NO: 71730 - DNA, 20 bp, Artificial Sequence
  Description of Artificial Sequence: Synthetic oligonucleotide
  Target: ATXN2; (-) strand; PAM type: YTN; PAM sequence: CTA
ctataagtacaaaaaattag

SEQ ID NO: 71731 - DNA, 20 bp, Artificial Sequence
  Description of Artificial Sequence: Synthetic oligonucleotide
  Target: ATXN2; (-) strand; PAM type: YTN; PAM sequence: CTC
tactataagtacaaaaaatt

SEQ ID NO: 71732 - DNA, 20 bp, Artificial Sequence
  Description of Artificial Sequence: Synthetic oligonucleotide
  Target: ATXN2; (-) strand; PAM type: YTN; PAM sequence: CTA
gctctactataagtacaaaa

SEQ ID NO: 71733 - DNA, 20 bp, Artificial Sequence
  Description of Artificial Sequence: Synthetic oligonucleotide
  Target: ATXN2; (-) strand; PAM type: YTN; PAM sequence: CTG
gccaacatggcaaaacccta

SEQ ID NO: 71734 - DNA, 20 bp, Artificial Sequence
  Description of Artificial Sequence: Synthetic oligonucleotide
  Target: ATXN2; (-) strand; PAM type: YTN; PAM sequence: TTC
aagaccagcctggccaacat

SEQ ID NO: 71735 - DNA, 20 bp, Artificial Sequence
  Description of Artificial Sequence: Synthetic oligonucleotide
  Target: ATXN2; (-) strand; PAM type: YTN; PAM sequence: CTG
aggtcaggagttcaagacca

SEQ ID NO: 71736 - DNA, 20 bp, Artificial Sequence
  Description of Artificial Sequence: Synthetic oligonucleotide
  Target: ATXN2; (-) strand; PAM type: YTN; PAM sequence: CTG
aggcagatggatcacctgag

SEQ ID NO: 71737 - DNA, 20 bp, Artificial Sequence
  Description of Artificial Sequence: Synthetic oligonucleotide
  Target: ATXN2; (-) strand; PAM type: YTN; PAM sequence: TTA
gggaggctgaggcagatgga

SEQ ID NO: 71738 - DNA, 20 bp, Artificial Sequence
  Description of Artificial Sequence: Synthetic oligonucleotide
  Target: ATXN2; (-) strand; PAM type: YTN; PAM sequence: CTT
agggaggctgaggcagatgg

SEQ ID NO: 71739 - DNA, 20 bp, Artificial Sequence
  Description of Artificial Sequence: Synthetic oligonucleotide
  Target: ATXN2; (-) strand; PAM type: YTN; PAM sequence: TTC
cagcacttagggaggctgag

SEQ ID NO: 71740 - DNA, 20 bp, Artificial Sequence
  Description of Artificial Sequence: Synthetic oligonucleotide
  Target: ATXN2; (-) strand; PAM type: YTN; PAM sequence: CTG
taattccagcacttagggag

SEQ ID NO: 71741 - DNA, 20 bp, Artificial Sequence
  Description of Artificial Sequence: Synthetic oligonucleotide
  Target: ATXN2; (-) strand; PAM type: YTN; PAM sequence: CTG
tgggtcacacctgtaattcc

SEQ ID NO: 71742 - DNA, 20 bp, Artificial Sequence
  Description of Artificial Sequence: Synthetic oligonucleotide
  Target: ATXN2; (-) strand; PAM type: YTN; PAM sequence: CTG
gggctgtgggtcacacctgt

SEQ ID NO: 71743 - DNA, 20 bp, Artificial Sequence
  Description of Artificial Sequence: Synthetic oligonucleotide
  Target: ATXN2; (-) strand; PAM type: YTN; PAM sequence: TTC
aaccaaccatggatccaaaa

SEQ ID NO: 71744 - DNA, 20 bp, Artificial Sequence
  Description of Artificial Sequence: Synthetic oligonucleotide
  Target: ATXN2; (-) strand; PAM type: YTN; PAM sequence: CTG
tgaattcaaccaaccatgga

SEQ ID NO: 71745 - DNA, 20 bp, Artificial Sequence
  Description of Artificial Sequence: Synthetic oligonucleotide
  Target: ATXN2; (-) strand; PAM type: YTN; PAM sequence: TTA
cacagctgtgaattcaacca

SEQ ID NO: 71746 - DNA, 20 bp, Artificial Sequence
  Description of Artificial Sequence: Synthetic oligonucleotide
  Target: ATXN2; (-) strand; PAM type: YTN; PAM sequence: CTA
tccatgggttacacagctgt

SEQ ID NO: 71747 - DNA, 20 bp, Artificial Sequence
  Description of Artificial Sequence: Synthetic oligonucleotide
  Target: ATXN2; (-) strand; PAM type: YTN; PAM sequence: CTC
tatccatgggttacacagct

SEQ ID NO: 71748 - DNA, 20 bp, Artificial Sequence
  Description of Artificial Sequence: Synthetic oligonucleotide
  Target: ATXN2; (-) strand; PAM type: YTN; PAM sequence: CTC
tctatccatgggttacacag

SEQ ID NO: 71749 - DNA, 20 bp, Artificial Sequence
  Description of Artificial Sequence: Synthetic oligonucleotide
  Target: ATXN2; (-) strand; PAM type: YTN; PAM sequence: TTG
caaatacagtcagccctctc

SEQ ID NO: 71750 - DNA, 20 bp, Artificial Sequence
  Description of Artificial Sequence: Synthetic oligonucleotide
  Target: ATXN2; (-) strand; PAM type: YTN; PAM sequence: TTT
gcaaatacagtcagccctct

SEQ ID NO: 71751 - DNA, 20 bp, Artificial Sequence
  Description of Artificial Sequence: Synthetic oligonucleotide
  Target: ATXN2; (-) strand; PAM type: YTN; PAM sequence: TTA
gtttgcaaatacagtcagcc

SEQ ID NO: 71752 - DNA, 20 bp, Artificial Sequence
  Description of Artificial Sequence: Synthetic oligonucleotide
  Target: ATXN2; (-) strand; PAM type: YTN; PAM sequence: TTC
aaatgttagtttgcaaatac

SEQ ID NO: 71753 - DNA, 20 bp, Artificial Sequence
  Description of Artificial Sequence: Synthetic oligonucleotide
  Target: ATXN2; (-) strand; PAM type: YTN; PAM sequence: CTT
caaatgttagtttgcaaata

SEQ ID NO: 71754 - DNA, 20 bp, Artificial Sequence
  Description of Artificial Sequence: Synthetic oligonucleotide
  Target: ATXN2; (-) strand; PAM type: YTN; PAM sequence: CTG
atgtcttcaaatgttagttt

SEQ ID NO: 71755 - DNA, 20 bp, Artificial Sequence
  Description of Artificial Sequence: Synthetic oligonucleotide
  Target: ATXN2; (-) strand; PAM type: YTN; PAM sequence: CTG
ggacactgatgtcttcaaat

SEQ ID NO: 71756 - DNA, 20 bp, Artificial Sequence
  Description of Artificial Sequence: Synthetic oligonucleotide
  Target: ATXN2; (-) strand; PAM type: YTN; PAM sequence: TTG
tggctgggacactgatgtct

SEQ ID NO: 71757 - DNA, 20 bp, Artificial Sequence
  Description of Artificial Sequence: Synthetic oligonucleotide
  Target: ATXN2; (-) strand; PAM type: YTN; PAM sequence: TTT
gtggctgggacactgatgtc

SEQ ID NO: 71758 - DNA, 20 bp, Artificial Sequence
  Description of Artificial Sequence: Synthetic oligonucleotide
  Target: ATXN2; (-) strand; PAM type: YTN; PAM sequence: TTT
tgtggctgggacactgatgt

SEQ ID NO: 71759 - DNA, 20 bp, Artificial Sequence
  Description of Artificial Sequence: Synthetic oligonucleotide
  Target: ATXN2; (-) strand; PAM type: YTN; PAM sequence: TTA
gttttgtggctgggacactg

SEQ ID NO: 71760 - DNA, 20 bp, Artificial Sequence
  Description of Artificial Sequence: Synthetic oligonucleotide
  Target: ATXN2; (-) strand; PAM type: YTN; PAM sequence: CTT
agttttgtggctgggacact

SEQ ID NO: 71761 - DNA, 20 bp, Artificial Sequence
  Description of Artificial Sequence: Synthetic oligonucleotide
  Target: ATXN2; (-) strand; PAM type: YTN; PAM sequence: TTC
ttagttttgtggctgggaca

SEQ ID NO: 71762 - DNA, 20 bp, Artificial Sequence
  Description of Artificial Sequence: Synthetic oligonucleotide
  Target: ATXN2; (-) strand; PAM type: YTN; PAM sequence: TTT
cttagttttgtggctgggac

SEQ ID NO: 71763 - DNA, 20 bp, Artificial Sequence
  Description of Artificial Sequence: Synthetic oligonucleotide
  Target: ATXN2; (-) strand; PAM type: YTN; PAM sequence: TTC
atttcttagttttgtggctg

SEQ ID NO: 71764 - DNA, 20 bp, Artificial Sequence
  Description of Artificial Sequence: Synthetic oligonucleotide
  Target: ATXN2; (-) strand; PAM type: YTN; PAM sequence: TTA
ccattcatttcttagttttg

SEQ ID NO: 71765 - DNA, 20 bp, Artificial Sequence
  Description of Artificial Sequence: Synthetic oligonucleotide
  Target: ATXN2; (-) strand; PAM type: YTN; PAM sequence: TTG
taattaccattcatttctta

SEQ ID NO: 71766 - DNA, 20 bp, Artificial Sequence
  Description of Artificial Sequence: Synthetic oligonucleotide
  Target: ATXN2; (-) strand; PAM type: YTN; PAM sequence: TTA
aaattgtaattaccattcat

SEQ ID NO: 71767 - DNA, 20 bp, Artificial Sequence
  Description of Artificial Sequence: Synthetic oligonucleotide
  Target: ATXN2; (-) strand; PAM type: YTN; PAM sequence: TTA
cataggcatgataccataga

SEQ ID NO: 71768 - DNA, 20 bp, Artificial Sequence
  Description of Artificial Sequence: Synthetic oligonucleotide
  Target: ATXN2; (-) strand; PAM type: YTN; PAM sequence: CTT
acataggcatgataccatag

SEQ ID NO: 71769 - DNA, 20 bp, Artificial Sequence
  Description of Artificial Sequence: Synthetic oligonucleotide
  Target: ATXN2; (-) strand; PAM type: YTN; PAM sequence: CTC
ttacataggcatgataccat

SEQ ID NO: 71770 - DNA, 20 bp, Artificial Sequence
  Description of Artificial Sequence: Synthetic oligonucleotide
  Target: ATXN2; (-) strand; PAM type: YTN; PAM sequence: TTC
tcttacataggcatgatacc

SEQ ID NO: 71771 - DNA, 20 bp, Artificial Sequence
  Description of Artificial Sequence: Synthetic oligonucleotide
  Target: ATXN2; (-) strand; PAM type: YTN; PAM sequence: TTT
ctcttacataggcatgatac

SEQ ID NO: 71772 - DNA, 20 bp, Artificial Sequence
  Description of Artificial Sequence: Synthetic oligonucleotide
  Target: ATXN2; (-) strand; PAM type: YTN; PAM sequence: TTT
tctcttacataggcatgata

SEQ ID NO: 71773 - DNA, 20 bp, Artificial Sequence
  Description of Artificial Sequence: Synthetic oligonucleotide
  Target: ATXN2; (-) strand; PAM type: YTN; PAM sequence: TTT
ttctcttacataggcatgat

SEQ ID NO: 71774 - DNA, 20 bp, Artificial Sequence
  Description of Artificial Sequence: Synthetic oligonucleotide
  Target: ATXN2; (-) strand; PAM type: YTN; PAM sequence: TTT
tttctcttacataggcatga

SEQ ID NO: 71775 - DNA, 20 bp, Artificial Sequence
  Description of Artificial Sequence: Synthetic oligonucleotide
  Target: ATXN2; (-) strand; PAM type: YTN; PAM sequence: TTT
ttttctcttacataggcatg

SEQ ID NO: 71776 - DNA, 20 bp, Artificial Sequence
  Description of Artificial Sequence: Synthetic oligonucleotide
  Target: ATXN2; (-) strand; PAM type: YTN; PAM sequence: TTT
tttttctcttacataggcat

SEQ ID NO: 71777 - DNA, 20 bp, Artificial Sequence
  Description of Artificial Sequence: Synthetic oligonucleotide
  Target: ATXN2; (-) strand; PAM type: YTN; PAM sequence: TTT
ttttttctcttacataggca

SEQ ID NO: 71778 - DNA, 20 bp, Artificial Sequence
  Description of Artificial Sequence: Synthetic oligonucleotide
  Target: ATXN2; (-) strand; PAM type: YTN; PAM sequence: CTG
tttttttttctcttacatag

SEQ ID NO: 71779 - DNA, 20 bp, Artificial Sequence
  Description of Artificial Sequence: Synthetic oligonucleotide
  Target: ATXN2; (-) strand; PAM type: YTN; PAM sequence: CTA
aaccagggaataactgtttt

SEQ ID NO: 71780 - DNA, 20 bp, Artificial Sequence
  Description of Artificial Sequence: Synthetic oligonucleotide
  Target: ATXN2; (-) strand; PAM type: YTN; PAM sequence: CTC
ctaaaccagggaataactgt

SEQ ID NO: 71781 - DNA, 20 bp, Artificial Sequence
  Description of Artificial Sequence: Synthetic oligonucleotide
  Target: ATXN2; (-) strand; PAM type: YTN; PAM sequence: TTA
tactcctaaaccagggaata

SEQ ID NO: 71782 - DNA, 20 bp, Artificial Sequence
  Description of Artificial Sequence: Synthetic oligonucleotide
  Target: ATXN2; (-) strand; PAM type: YTN; PAM sequence: TTT
atactcctaaaccagggaat

SEQ ID NO: 71783 - DNA, 20 bp, Artificial Sequence
  Description of Artificial Sequence: Synthetic oligonucleotide
  Target: ATXN2; (-) strand; PAM type: YTN; PAM sequence: TTT
tatactcctaaaccagggaa

SEQ ID NO: 71784 - DNA, 20 bp, Artificial Sequence
  Description of Artificial Sequence: Synthetic oligonucleotide
  Target: ATXN2; (-) strand; PAM type: YTN; PAM sequence: CTA
gacccaattttatactccta

SEQ ID NO: 71785 - DNA, 20 bp, Artificial Sequence
  Description of Artificial Sequence: Synthetic oligonucleotide
  Target: ATXN2; (-) strand; PAM type: YTN; PAM sequence: CTC
actagacccaattttatact

SEQ ID NO: 71786 - DNA, 20 bp, Artificial Sequence
  Description of Artificial Sequence: Synthetic oligonucleotide
  Target: ATXN2; (-) strand; PAM type: YTN; PAM sequence: TTA
tactcactagacccaatttt

SEQ ID NO: 71787 - DNA, 20 bp, Artificial Sequence
  Description of Artificial Sequence: Synthetic oligonucleotide
  Target: ATXN2; (-) strand; PAM type: YTN; PAM sequence: TTT
atactcactagacccaattt

SEQ ID NO: 71788 - DNA, 20 bp, Artificial Sequence
  Description of Artificial Sequence: Synthetic oligonucleotide
  Target: ATXN2; (-) strand; PAM type: YTN; PAM sequence: TTT
tatactcactagacccaatt

SEQ ID NO: 71789 - DNA, 20 bp, Artificial Sequence
  Description of Artificial Sequence: Synthetic oligonucleotide
  Target: ATXN2; (-) strand; PAM type: YTN; PAM sequence: TTT
ttatactcactagacccaat

SEQ ID NO: 71790 - DNA, 20 bp, Artificial Sequence
  Description of Artificial Sequence: Synthetic oligonucleotide
  Target: ATXN2; (-) strand; PAM type: YTN; PAM sequence: TTA
aaaaatatttttatactcac

SEQ ID NO: 71791 - DNA, 20 bp, Artificial Sequence
  Description of Artificial Sequence: Synthetic oligonucleotide
  Target: ATXN2; (-) strand; PAM type: YTN; PAM sequence: TTT
aaaaaatatttttatactca

SEQ ID NO: 71792 - DNA, 20 bp, Artificial Sequence
  Description of Artificial Sequence: Synthetic oligonucleotide
  Target: ATXN2; (-) strand; PAM type: YTN; PAM sequence: TTT
taaaaaatatttttatactc

SEQ ID NO: 71793 - DNA, 20 bp, Artificial Sequence
  Description of Artificial Sequence: Synthetic oligonucleotide
  Target: ATXN2; (-) strand; PAM type: YTN; PAM sequence: TTA
tattttaaaaaatattttta

SEQ ID NO: 71794 - DNA, 20 bp, Artificial Sequence
  Description of Artificial Sequence: Synthetic oligonucleotide
  Target: ATXN2; (-) strand; PAM type: YTN; PAM sequence: TTT
atattttaaaaaatattttt

SEQ ID NO: 71795 - DNA, 20 bp, Artificial Sequence
  Description of Artificial Sequence: Synthetic oligonucleotide
  Target: ATXN2; (-) strand; PAM type: YTN; PAM sequence: TTT
tatattttaaaaaatatttt

SEQ ID NO: 71796 - DNA, 20 bp, Artificial Sequence
  Description of Artificial Sequence: Synthetic oligonucleotide
  Target: ATXN2; (-) strand; PAM type: YTN; PAM sequence: TTT
ttatattttaaaaaatattt

SEQ ID NO: 71797 - DNA, 20 bp, Artificial Sequence
  Description of Artificial Sequence: Synthetic oligonucleotide
  Target: ATXN2; (-) strand; PAM type: YTN; PAM sequence: TTA
tgtttttatattttaaaaaa

SEQ ID NO: 71798 - DNA, 20 bp, Artificial Sequence
  Description of Artificial Sequence: Synthetic oligonucleotide
  Target: ATXN2; (-) strand; PAM type: YTN; PAM sequence: TTT
atgtttttatattttaaaaa

SEQ ID NO: 71799 - DNA, 20 bp, Artificial Sequence
  Description of Artificial Sequence: Synthetic oligonucleotide
  Target: ATXN2; (-) strand; PAM type: YTN; PAM sequence: TTT
tatgtttttatattttaaaa

SEQ ID NO: 71800 - DNA, 20 bp, Artificial Sequence
  Description of Artificial Sequence: Synthetic oligonucleotide
  Target: ATXN2; (-) strand; PAM type: YTN; PAM sequence: TTT
ttatgtttttatattttaaa

SEQ ID NO: 71801 - DNA, 20 bp, Artificial Sequence
  Description of Artificial Sequence: Synthetic oligonucleotide
  Target: ATXN2; (-) strand; PAM type: YTN; PAM sequence: TTA
tatttttatgtttttatatt

SEQ ID NO: 71802 - DNA, 20 bp, Artificial Sequence
  Description of Artificial Sequence: Synthetic oligonucleotide
  Target: ATXN2; (-) strand; PAM type: YTN; PAM sequence: TTA
ttatatttttatgtttttat

SEQ ID NO: 71803 - DNA, 20 bp, Artificial Sequence
  Description of Artificial Sequence: Synthetic oligonucleotide
  Target: ATXN2; (-) strand; PAM type: YTN; PAM sequence: TTT
attatatttttatgttttta

SEQ ID NO: 71804 - DNA, 20 bp, Artificial Sequence
  Description of Artificial Sequence: Synthetic oligonucleotide
  Target: ATXN2; (-) strand; PAM type: YTN; PAM sequence: TTA
tatttattatatttttatgt

SEQ ID NO: 71805 - DNA, 20 bp, Artificial Sequence
  Description of Artificial Sequence: Synthetic oligonucleotide
  Target: ATXN2; (-) strand; PAM type: YTN; PAM sequence: TTT
atatttattatatttttatg

SEQ ID NO: 71806 - DNA, 20 bp, Artificial Sequence
  Description of Artificial Sequence: Synthetic oligonucleotide
  Target: ATXN2; (-) strand; PAM type: YTN; PAM sequence: TTA
tttatatttattatattttt

SEQ ID NO: 71807 - DNA, 20 bp, Artificial Sequence
  Description of Artificial Sequence: Synthetic oligonucleotide
  Target: ATXN2; (-) strand; PAM type: YTN; PAM sequence: TTT
atttatatttattatatttt

SEQ ID NO: 71808 - DNA, 20 bp, Artificial Sequence
  Description of Artificial Sequence: Synthetic oligonucleotide
  Target: ATXN2; (-) strand; PAM type: YTN; PAM sequence: TTA
atttatttatatttattata

SEQ ID NO: 71809 - DNA, 20 bp, Artificial Sequence
  Description of Artificial Sequence: Synthetic oligonucleotide
  Target: ATXN2; (-) strand; PAM type: YTN; PAM sequence: CTT
aatttatttatatttattat

SEQ ID NO: 71810 - DNA, 20 bp, Artificial Sequence
  Description of Artificial Sequence: Synthetic oligonucleotide
  Target: ATXN2; (-) strand; PAM type: YTN; PAM sequence: TTA
aacttaatttatttatattt

SEQ ID NO: 71811 - DNA, 20 bp, Artificial Sequence
  Description of Artificial Sequence: Synthetic oligonucleotide
  Target: ATXN2; (-) strand; PAM type: YTN; PAM sequence: TTT
aaacttaatttatttatatt

SEQ ID NO: 71812 - DNA, 20 bp, Artificial Sequence
  Description of Artificial Sequence: Synthetic oligonucleotide
  Target: ATXN2; (-) strand; PAM type: YTN; PAM sequence: TTT
taaacttaatttatttatat

SEQ ID NO: 71813 - DNA, 20 bp, Artificial Sequence
  Description of Artificial Sequence: Synthetic oligonucleotide
  Target: ATXN2; (-) strand; PAM type: YTN; PAM sequence: TTT
ttaaacttaatttatttata

SEQ ID NO: 71814 - DNA, 20 bp, Artificial Sequence
  Description of Artificial Sequence: Synthetic oligonucleotide
  Target: ATXN2; (-) strand; PAM type: YTN; PAM sequence: TTA
tatttttaaacttaatttat

SEQ ID NO: 71815 - DNA, 20 bp, Artificial Sequence
  Description of Artificial Sequence: Synthetic oligonucleotide
  Target: ATXN2; (-) strand; PAM type: YTN; PAM sequence: CTT
atatttttaaacttaattta

SEQ ID NO: 71816 - DNA, 20 bp, Artificial Sequence
  Description of Artificial Sequence: Synthetic oligonucleotide
  Target: ATXN2; (-) strand; PAM type: YTN; PAM sequence: CTG
aaatacttatatttttaaac

SEQ ID NO: 71817 - DNA, 20 bp, Artificial Sequence
  Description of Artificial Sequence: Synthetic oligonucleotide
  Target: ATXN2; (-) strand; PAM type: YTN; PAM sequence: TTC
ccaagtgtgagccaccactg

SEQ ID NO: 71818 - DNA, 20 bp, Artificial Sequence
  Description of Artificial Sequence: Synthetic oligonucleotide
  Target: ATXN2; (-) strand; PAM type: YTN; PAM sequence: CTT
cccaagtgtgagccaccact

SEQ ID NO: 71819 - DNA, 20 bp, Artificial Sequence
  Description of Artificial Sequence: Synthetic oligonucleotide
  Target: ATXN2; (-) strand; PAM type: YTN; PAM sequence: TTG
gcttcccaagtgtgagccac

SEQ ID NO: 71820 - DNA, 20 bp, Artificial Sequence
  Description of Artificial Sequence: Synthetic oligonucleotide
  Target: ATXN2; (-) strand; PAM type: YTN; PAM sequence: CTT
ggcttcccaagtgtgagcca

SEQ ID NO: 71821 - DNA, 20 bp, Artificial Sequence
  Description of Artificial Sequence: Synthetic oligonucleotide
  Target: ATXN2; (-) strand; PAM type: YTN; PAM sequence: CTG
ccttggcttcccaagtgtga

SEQ ID NO: 71822 - DNA, 20 bp, Artificial Sequence
  Description of Artificial Sequence: Synthetic oligonucleotide
  Target: ATXN2; (-) strand; PAM type: YTN; PAM sequence: CTC
aggcagtccacctgccttgg

SEQ ID NO: 71823 - DNA, 20 bp, Artificial Sequence
  Description of Artificial Sequence: Synthetic oligonucleotide
  Target: ATXN2; (-) strand; PAM type: YTN; PAM sequence: CTG
agctcaggcagtccacctgc

SEQ ID NO: 71824 - DNA, 20 bp, Artificial Sequence
  Description of Artificial Sequence: Synthetic oligonucleotide
  Target: ATXN2; (-) strand; PAM type: YTN; PAM sequence: CTC
ctgagctcaggcagtccacc

SEQ ID NO: 71825 - DNA, 20 bp, Artificial Sequence
  Description of Artificial Sequence: Synthetic oligonucleotide
  Target: ATXN2; (-) strand; PAM type: YTN; PAM sequence: TTC
gaactcctgagctcaggcag

SEQ ID NO: 71826 - DNA, 20 bp, Artificial Sequence
  Description of Artificial Sequence: Synthetic oligonucleotide
  Target: ATXN2; (-) strand; PAM type: YTN; PAM sequence: TTT
cgaactcctgagctcaggca

SEQ ID NO: 71827 - DNA, 20 bp, Artificial Sequence
  Description of Artificial Sequence: Synthetic oligonucleotide
  Target: ATXN2; (-) strand; PAM type: YTN; PAM sequence: TTG
gtttcgaactcctgagctca

SEQ ID NO: 71828 - DNA, 20 bp, Artificial Sequence
  Description of Artificial Sequence: Synthetic oligonucleotide
  Target: ATXN2; (-) strand; PAM type: YTN; PAM sequence: TTG
cccaggttggtttcgaactc

SEQ ID NO: 71829 - DNA, 20 bp, Artificial Sequence
  Description of Artificial Sequence: Synthetic oligonucleotide
  Target: ATXN2; (-) strand; PAM type: YTN; PAM sequence: TTG
ccgtgttgcccaggttggtt

SEQ ID NO: 71830 - DNA, 20 bp, Artificial Sequence
  Description of Artificial Sequence: Synthetic oligonucleotide
  Target: ATXN2; (-) strand; PAM type: YTN; PAM sequence: TTT
gccgtgttgcccaggttggt

SEQ ID NO: 71831 - DNA, 20 bp, Artificial Sequence
  Description of Artificial Sequence: Synthetic oligonucleotide
  Target: ATXN2; (-) strand; PAM type: YTN; PAM sequence: TTT
tgccgtgttgcccaggttgg

SEQ ID NO: 71832 - DNA, 20 bp, Artificial Sequence
  Description of Artificial Sequence: Synthetic oligonucleotide
  Target: ATXN2; (-) strand; PAM type: YTN; PAM sequence: TTG
gtagagacaggattttgccg

SEQ ID NO: 71833 - DNA, 20 bp, Artificial Sequence
  Description of Artificial Sequence: Synthetic oligonucleotide
  Target: ATXN2; (-) strand; PAM type: YTN; PAM sequence: TTT
ggtagagacaggattttgcc

SEQ ID NO: 71834 - DNA, 20 bp, Artificial Sequence
  Description of Artificial Sequence: Synthetic oligonucleotide
  Target: ATXN2; (-) strand; PAM type: YTN; PAM sequence: TTT
tggtagagacaggattttgc

SEQ ID NO: 71835 - DNA, 20 bp, Artificial Sequence
  Description of Artificial Sequence: Synthetic oligonucleotide
  Target: ATXN2; (-) strand; PAM type: YTN; PAM sequence: TTT
ttggtagagacaggattttg

SEQ ID NO: 71836 - DNA, 20 bp, Artificial Sequence
  Description of Artificial Sequence: Synthetic oligonucleotide
  Target: ATXN2; (-) strand; PAM type: YTN; PAM sequence: TTA
tatttttggtagagacagga

SEQ ID NO: 71837 - DNA, 20 bp, Artificial Sequence
  Description of Artificial Sequence: Synthetic oligonucleotide
  Target: ATXN2; (-) strand; PAM type: YTN; PAM sequence: TTT
atatttttggtagagacagg

SEQ ID NO: 71838 - DNA, 20 bp, Artificial Sequence
  Description of Artificial Sequence: Synthetic oligonucleotide
  Target: ATXN2; (-) strand; PAM type: YTN; PAM sequence: TTT
tatatttttggtagagacag

SEQ ID NO: 71839 - DNA, 20 bp, Artificial Sequence
  Description of Artificial Sequence: Synthetic oligonucleotide
  Target: ATXN2; (-) strand; PAM type: YTN; PAM sequence: TTT
ttatatttttggtagagaca

SEQ ID NO: 71840 - DNA, 20 bp, Artificial Sequence
  Description of Artificial Sequence: Synthetic oligonucleotide
  Target: ATXN2; (-) strand; PAM type: YTN; PAM sequence: TTT
tttatatttttggtagagac

SEQ ID NO: 71841 - DNA, 20 bp, Artificial Sequence
  Description of Artificial Sequence: Synthetic oligonucleotide
  Target: ATXN2; (-) strand; PAM type: YTN; PAM sequence: CTA
attttttatatttttggtag

SEQ ID NO: 71842 - DNA, 20 bp, Artificial Sequence
  Description of Artificial Sequence: Synthetic oligonucleotide
  Target: ATXN2; (-) strand; PAM type: YTN; PAM sequence: CTG
gctaattttttatatttttg

SEQ ID NO: 71843 - DNA, 20 bp, Artificial Sequence
  Description of Artificial Sequence: Synthetic oligonucleotide
  Target: ATXN2; (-) strand; PAM type: YTN; PAM sequence: CTG
ggaccacaggtgcgcatcac

SEQ ID NO: 71844 - DNA, 20 bp, Artificial Sequence
  Description of Artificial Sequence: Synthetic oligonucleotide
  Target: ATXN2; (-) strand; PAM type: YTN; PAM sequence: CTC
ccgagtacctgggaccacag

SEQ ID NO: 71845 - DNA, 20 bp, Artificial Sequence
  Description of Artificial Sequence: Synthetic oligonucleotide
  Target: ATXN2; (-) strand; PAM type: YTN; PAM sequence: CTC
agcctcccgagtacctggga

SEQ ID NO: 71846 - DNA, 20 bp, Artificial Sequence
  Description of Artificial Sequence: Synthetic oligonucleotide
  Target: ATXN2; (-) strand; PAM type: YTN; PAM sequence: CTC
ccacctcagcctcccgagta

SEQ ID NO: 71847 - DNA, 20 bp, Artificial Sequence
  Description of Artificial Sequence: Synthetic oligonucleotide
  Target: ATXN2; (-) strand; PAM type: YTN; PAM sequence: TTC
tcccacctcagcctcccgag

SEQ ID NO: 71848 - DNA, 20 bp, Artificial Sequence
  Description of Artificial Sequence: Synthetic oligonucleotide
  Target: ATXN2; (-) strand; PAM type: YTN; PAM sequence: CTC
aagtgattctcccacctcag

SEQ ID NO: 71849 - DNA, 20 bp, Artificial Sequence
  Description of Artificial Sequence: Synthetic oligonucleotide
  Target: ATXN2; (-) strand; PAM type: YTN; PAM sequence: CTC
ccaggctcaagtgattctcc

SEQ ID NO: 71850 - DNA, 20 bp, Artificial Sequence
  Description of Artificial Sequence: Synthetic oligonucleotide
  Target: ATXN2; (-) strand; PAM type: YTN; PAM sequence: CTC
ctcccaggctcaagtgattc

SEQ ID NO: 71851 - DNA, 20 bp, Artificial Sequence
  Description of Artificial Sequence: Synthetic oligonucleotide
  Target: ATXN2; (-) strand; PAM type: YTN; PAM sequence: CTC
ctcctcccaggctcaagtga

SEQ ID NO: 71852 - DNA, 20 bp, Artificial Sequence
  Description of Artificial Sequence: Synthetic oligonucleotide
  Target: ATXN2; (-) strand; PAM type: YTN; PAM sequence: CTC
accgcaacctcctcctccca

SEQ ID NO: 71853 - DNA, 20 bp, Artificial Sequence
  Description of Artificial Sequence: Synthetic oligonucleotide
  Target: ATXN2; (-) strand; PAM type: YTN; PAM sequence: TTG
gctcaccgcaacctcctcct

SEQ ID NO: 71854 - DNA, 20 bp, Artificial Sequence
  Description of Artificial Sequence: Synthetic oligonucleotide
  Target: ATXN2; (-) strand; PAM type: YTN; PAM sequence: CTT
ggctcaccgcaacctcctcc

SEQ ID NO: 71855 - DNA, 20 bp, Artificial Sequence
  Description of Artificial Sequence: Synthetic oligonucleotide
  Target: ATXN2; (-) strand; PAM type: YTN; PAM sequence: TTG
gagtgtggtgatgcagatct

SEQ ID NO: 71856 - DNA, 20 bp, Artificial Sequence
  Description of Artificial Sequence: Synthetic oligonucleotide
  Target: ATXN2; (-) strand; PAM type: YTN; PAM sequence: CTG
aggttggagtgtggtgatgc

SEQ ID NO: 71857 - DNA, 20 bp, Artificial Sequence
  Description of Artificial Sequence: Synthetic oligonucleotide
  Target: ATXN2; (-) strand; PAM type: YTN; PAM sequence: CTA
tcactgaggttggagtgtgg

SEQ ID NO: 71858 - DNA, 20 bp, Artificial Sequence
  Description of Artificial Sequence: Synthetic oligonucleotide
  Target: ATXN2; (-) strand; PAM type: YTN; PAM sequence: CTC
tatcactgaggttggagtgt

SEQ ID NO: 71859 - DNA, 20 bp, Artificial Sequence
  Description of Artificial Sequence: Synthetic oligonucleotide
  Target: ATXN2; (-) strand; PAM type: YTN; PAM sequence: CTC
actctatcactgaggttgga

SEQ ID NO: 71860 - DNA, 20 bp, Artificial Sequence
  Description of Artificial Sequence: Synthetic oligonucleotide
  Target: ATXN2; (-) strand; PAM type: YTN; PAM sequence: TTA
tatacggggtctcactctat

SEQ ID NO: 71861 - DNA, 20 bp, Artificial Sequence
  Description of Artificial Sequence: Synthetic oligonucleotide
  Target: ATXN2; (-) strand; PAM type: YTN; PAM sequence: TTT
atatacggggtctcactcta

SEQ ID NO: 71862 - DNA, 20 bp, Artificial Sequence
  Description of Artificial Sequence: Synthetic oligonucleotide
  Target: ATXN2; (-) strand; PAM type: YTN; PAM sequence: TTT
tatatacggggtctcactct

SEQ ID NO: 71863 - DNA, 20 bp, Artificial Sequence
  Description of Artificial Sequence: Synthetic oligonucleotide
  Target: ATXN2; (-) strand; PAM type: YTN; PAM sequence: TTT
ttatatacggggtctcactc

SEQ ID NO: 71864 - DNA, 20 bp, Artificial Sequence
  Description of Artificial Sequence: Synthetic oligonucleotide
  Target: ATXN2; (-) strand; PAM type: YTN; PAM sequence: TTT
tttatatacggggtctcact

SEQ ID NO: 71865 - DNA, 20 bp, Artificial Sequence
  Description of Artificial Sequence: Synthetic oligonucleotide
  Target: ATXN2; (-) strand; PAM type: YTN; PAM sequence: TTA
catgtatatattttttatat

SEQ ID NO: 71866 - DNA, 20 bp, Artificial Sequence
  Description of Artificial Sequence: Synthetic oligonucleotide
  Target: ATXN2; (-) strand; PAM type: YTN; PAM sequence: TTT
acatgtatatattttttata

SEQ ID NO: 71867 - DNA, 20 bp, Artificial Sequence
  Description of Artificial Sequence: Synthetic oligonucleotide
  Target: ATXN2; (-) strand; PAM type: YTN; PAM sequence: TTG
aaaagtttacatgtatatat

SEQ ID NO: 71868 - DNA, 20 bp, Artificial Sequence
  Description of Artificial Sequence: Synthetic oligonucleotide
  Target: ATXN2; (-) strand; PAM type: YTN; PAM sequence: TTT
gaaaagtttacatgtatata

SEQ ID NO: 71869 - DNA, 20 bp, Artificial Sequence
  Description of Artificial Sequence: Synthetic oligonucleotide
  Target: ATXN2; (-) strand; PAM type: YTN; PAM sequence: TTT
tgaaaagtttacatgtatat

SEQ ID NO: 71870 - DNA, 20 bp, Artificial Sequence
  Description of Artificial Sequence: Synthetic oligonucleotide
  Target: ATXN2; (-) strand; PAM type: YTN; PAM sequence: TTT
ttgaaaagtttacatgtata

SEQ ID NO: 71871 - DNA, 20 bp, Artificial Sequence
  Description of Artificial Sequence: Synthetic oligonucleotide
  Target: ATXN2; (-) strand; PAM type: YTN; PAM sequence: TTG
atttttgaaaagtttacatg

SEQ ID NO: 71872 - DNA, 20 bp, Artificial Sequence
  Description of Artificial Sequence: Synthetic oligonucleotide
  Target: ATXN2; (-) strand; PAM type: YTN; PAM sequence: TTG
attgatttttgaaaagttta

SEQ ID NO: 71873 - DNA, 20 bp, Artificial Sequence
  Description of Artificial Sequence: Synthetic oligonucleotide
  Target: ATXN2; (-) strand; PAM type: YTN; PAM sequence: TTT
gattgatttttgaaaagttt

SEQ ID NO: 71874 - DNA, 20 bp, Artificial Sequence
  Description of Artificial Sequence: Synthetic oligonucleotide
  Target: ATXN2; (-) strand; PAM type: YTN; PAM sequence: CTT
tgattgatttttgaaaagtt

SEQ ID NO: 71875 - DNA, 20 bp, Artificial Sequence
  Description of Artificial Sequence: Synthetic oligonucleotide
  Target: ATXN2; (-) strand; PAM type: YTN; PAM sequence: TTC
ctttgattgatttttgaaaa

SEQ ID NO: 71876 - DNA, 20 bp, Artificial Sequence
  Description of Artificial Sequence: Synthetic oligonucleotide
  Target: ATXN2; (-) strand; PAM type: YTN; PAM sequence: TTC
aacatatatatattcctttg

SEQ ID NO: 71877 - DNA, 20 bp, Artificial Sequence
  Description of Artificial Sequence: Synthetic oligonucleotide
  Target: ATXN2; (-) strand; PAM type: YTN; PAM sequence: TTA
cagataacaggtgttcaaca

SEQ ID NO: 71878 - DNA, 20 bp, Artificial Sequence
  Description of Artificial Sequence: Synthetic oligonucleotide
  Target: ATXN2; (-) strand; PAM type: YTN; PAM sequence: CTT
acagataacaggtgttcaac

SEQ ID NO: 71879 - DNA, 20 bp, Artificial Sequence
  Description of Artificial Sequence: Synthetic oligonucleotide
  Target: ATXN2; (-) strand; PAM type: YTN; PAM sequence: CTA
gtatatatacagtgacttac

SEQ ID NO: 71880 - DNA, 20 bp, Artificial Sequence
  Description of Artificial Sequence: Synthetic oligonucleotide
  Target: ATXN2; (-) strand; PAM type: YTN; PAM sequence: TTA
aggaaatgcgtcccccccaa

SEQ ID NO: 71881 - DNA, 20 bp, Artificial Sequence
  Description of Artificial Sequence: Synthetic oligonucleotide
  Target: ATXN2; (-) strand; PAM type: YTN; PAM sequence: TTA
tagaattaaggaaatgcgtc

SEQ ID NO: 71882 - DNA, 20 bp, Artificial Sequence
  Description of Artificial Sequence: Synthetic oligonucleotide
  Target: ATXN2; (-) strand; PAM type: YTN; PAM sequence: TTT
atagaattaaggaaatgcgt

SEQ ID NO: 71883 - DNA, 20 bp, Artificial Sequence
  Description of Artificial Sequence: Synthetic oligonucleotide
  Target: ATXN2; (-) strand; PAM type: YTN; PAM sequence: TTC
agaaaacaaatttatagaat

SEQ ID NO: 71884 - DNA, 20 bp, Artificial Sequence
  Description of Artificial Sequence: Synthetic oligonucleotide
  Target: ATXN2; (-) strand; PAM type: YTN; PAM sequence: CTG
gagttcagaaaacaaattta

SEQ ID NO: 71885 - DNA, 20 bp, Artificial Sequence
  Description of Artificial Sequence: Synthetic oligonucleotide
  Target: ATXN2; (-) strand; PAM type: YTN; PAM sequence: TTC
tggagttcagaaaacaaatt

SEQ ID NO: 71886 - DNA, 20 bp, Artificial Sequence
  Description of Artificial Sequence: Synthetic oligonucleotide
  Target: ATXN2; (-) strand; PAM type: YTN; PAM sequence: TTT
ctggagttcagaaaacaaat

SEQ ID NO: 71887 - DNA, 20 bp, Artificial Sequence
  Description of Artificial Sequence: Synthetic oligonucleotide
  Target: ATXN2; (-) strand; PAM type: YTN; PAM sequence: TTT
tctggagttcagaaaacaaa

SEQ ID NO: 71888 - DNA, 20 bp, Artificial Sequence
  Description of Artificial Sequence: Synthetic oligonucleotide
  Target: ATXN2; (-) strand; PAM type: YTN; PAM sequence: CTT
ttctggagttcagaaaacaa

SEQ ID NO: 71889 - DNA, 20 bp, Artificial Sequence
  Description of Artificial Sequence: Synthetic oligonucleotide
  Target: ATXN2; (-) strand; PAM type: YTN; PAM sequence: TTA
aacttttctggagttcagaa

SEQ ID NO: 71890 - DNA, 20 bp, Artificial Sequence
  Description of Artificial Sequence: Synthetic oligonucleotide
  Target: ATXN2; (-) strand; PAM type: YTN; PAM sequence: CTC
ccaatgcattaaacttttct

SEQ ID NO: 71891 - DNA, 20 bp, Artificial Sequence
  Description of Artificial Sequence: Synthetic oligonucleotide
  Target: ATXN2; (-) strand; PAM type: YTN; PAM sequence: CTC
tcccaatgcattaaactttt

SEQ ID NO: 71892 - DNA, 20 bp, Artificial Sequence
  Description of Artificial Sequence: Synthetic oligonucleotide
  Target: ATXN2; (-) strand; PAM type: YTN; PAM sequence: CTC
tctcccaatgcattaaactt

SEQ ID NO: 71893 - DNA, 20 bp, Artificial Sequence
  Description of Artificial Sequence: Synthetic oligonucleotide
  Target: ATXN2; (-) strand; PAM type: YTN; PAM sequence: TTC
tctctcccaatgcattaaac

SEQ ID NO: 71894 - DNA, 20 bp, Artificial Sequence
  Description of Artificial Sequence: Synthetic oligonucleotide
  Target: ATXN2; (-) strand; PAM type: YTN; PAM sequence: TTT
ctctctcccaatgcattaaa

SEQ ID NO: 71895 - DNA, 20 bp, Artificial Sequence
  Description of Artificial Sequence: Synthetic oligonucleotide
  Target: ATXN2; (-) strand; PAM type: YTN; PAM sequence: TTT
tctctctcccaatgcattaa

SEQ ID NO: 71896 - DNA, 20 bp, Artificial Sequence
  Description of Artificial Sequence: Synthetic oligonucleotide
  Target: ATXN2; (-) strand; PAM type: YTN; PAM sequence: TTA
ccggtatattttctctctcc

SEQ ID NO: 71897 - DNA, 20 bp, Artificial Sequence
  Description of Artificial Sequence: Synthetic oligonucleotide
  Target: ATXN2; (-) strand; PAM type: YTN; PAM sequence: TTT
accggtatattttctctctc

SEQ ID NO: 71898 - DNA, 20 bp, Artificial Sequence
  Description of Artificial Sequence: Synthetic oligonucleotide
  Target: ATXN2; (-) strand; PAM type: YTN; PAM sequence: TTT
taccggtatattttctctct

SEQ ID NO: 71899 - DNA, 20 bp, Artificial Sequence
  Description of Artificial Sequence: Synthetic oligonucleotide
  Target: ATXN2; (-) strand; PAM type: YTN; PAM sequence: TTT
ttaccggtatattttctctc

SEQ ID NO: 71900 - DNA, 20 bp, Artificial Sequence
  Description of Artificial Sequence: Synthetic oligonucleotide
  Target: ATXN2; (-) strand; PAM type: YTN; PAM sequence: TTT
tttaccggtatattttctct

SEQ ID NO: 71901 - DNA, 20 bp, Artificial Sequence
  Description of Artificial Sequence: Synthetic oligonucleotide
  Target: ATXN2; (-) strand; PAM type: YTN; PAM sequence: CTT
ttttaccggtatattttctc

SEQ ID NO: 71902 - DNA, 20 bp, Artificial Sequence
  Description of Artificial Sequence: Synthetic oligonucleotide
  Target: ATXN2; (-) strand; PAM type: YTN; PAM sequence: TTC
acgaagcagtatgtagtgtc

SEQ ID NO: 71903 - DNA, 20 bp, Artificial Sequence
  Description of Artificial Sequence: Synthetic oligonucleotide
  Target: ATXN2; (-) strand; PAM type: YTN; PAM sequence: CTT
cacgaagcagtatgtagtgt

SEQ ID NO: 71904 - DNA, 20 bp, Artificial Sequence
  Description of Artificial Sequence: Synthetic oligonucleotide
  Target: ATXN2; (-) strand; PAM type: YTN; PAM sequence: CTC
atcttcacgaagcagtatgt

SEQ ID NO: 71905 - DNA, 20 bp, Artificial Sequence
  Description of Artificial Sequence: Synthetic oligonucleotide
  Target: ATXN2; (-) strand; PAM type: YTN; PAM sequence: CTC
catcatgtaccaaacactca

SEQ ID NO: 71906 - DNA, 20 bp, Artificial Sequence
  Description of Artificial Sequence: Synthetic oligonucleotide
  Target: ATXN2; (-) strand; PAM type: YTN; PAM sequence: TTG
gagaaccagtggtctccatc

SEQ ID NO: 71907 - DNA, 20 bp, Artificial Sequence
  Description of Artificial Sequence: Synthetic oligonucleotide
  Target: ATXN2; (-) strand; PAM type: YTN; PAM sequence: CTG
aagacatcatagggtgtcat

SEQ ID NO: 71908 - DNA, 20 bp, Artificial Sequence
  Description of Artificial Sequence: Synthetic oligonucleotide
  Target: ATXN2; (-) strand; PAM type: YTN; PAM sequence: CTG
gggtgtcctgaagacatcat

SEQ ID NO: 71909 - DNA, 20 bp, Artificial Sequence
  Description of Artificial Sequence: Synthetic oligonucleotide
  Target: ATXN2; (-) strand; PAM type: YTN; PAM sequence: TTC
tggggtgtcctgaagacatc

SEQ ID NO: 71910 - DNA, 20 bp, Artificial Sequence
  Description of Artificial Sequence: Synthetic oligonucleotide
  Target: ATXN2; (-) strand; PAM type: YTN; PAM sequence: CTT
ctggggtgtcctgaagacat

SEQ ID NO: 71911 - DNA, 20 bp, Artificial Sequence
  Description of Artificial Sequence: Synthetic oligonucleotide
  Target: ATXN2; (-) strand; PAM type: YTN; PAM sequence: TTG
ccttctggggtgtcctgaag

SEQ ID NO: 71912 - DNA, 20 bp, Artificial Sequence
  Description of Artificial Sequence: Synthetic oligonucleotide
  Target: ATXN2; (-) strand; PAM type: YTN; PAM sequence: CTT
gccttctggggtgtcctgaa

SEQ ID NO: 71913 - DNA, 20 bp, Artificial Sequence
  Description of Artificial Sequence: Synthetic oligonucleotide
  Target: ATXN2; (-) strand; PAM type: YTN; PAM sequence: TTC
ccttgccttctggggtgtcc

SEQ ID NO: 71914 - DNA, 20 bp, Artificial Sequence
  Description of Artificial Sequence: Synthetic oligonucleotide
  Target: ATXN2; (-) strand; PAM type: YTN; PAM sequence: TTT
cccttgccttctggggtgtc

SEQ ID NO: 71915 - DNA, 20 bp, Artificial Sequence
  Description of Artificial Sequence: Synthetic oligonucleotide
  Target: ATXN2; (-) strand; PAM type: YTN; PAM sequence: CTT
tcccttgccttctggggtgt

SEQ ID NO: 71916 - DNA, 20 bp, Artificial Sequence
  Description of Artificial Sequence: Synthetic oligonucleotide
  Target: ATXN2; (-) strand; PAM type: YTN; PAM sequence: CTC
cactttcccttgccttctgg

SEQ ID NO: 71917 - DNA, 20 bp, Artificial Sequence
  Description of Artificial Sequence: Synthetic oligonucleotide
  Target: ATXN2; (-) strand; PAM type: YTN; PAM sequence: TTA
ctccactttcccttgccttc

SEQ ID NO: 71918 - DNA, 20 bp, Artificial Sequence
  Description of Artificial Sequence: Synthetic oligonucleotide
  Target: ATXN2; (-) strand; PAM type: YTN; PAM sequence: CTT
actccactttcccttgcctt

SEQ ID NO: 71919 - DNA, 20 bp, Artificial Sequence
  Description of Artificial Sequence: Synthetic oligonucleotide
  Target: ATXN2; (-) strand; PAM type: YTN; PAM sequence: CTA
cttactccactttcccttgc

SEQ ID NO: 71920 - DNA, 20 bp, Artificial Sequence
  Description of Artificial Sequence: Synthetic oligonucleotide
  Target: ATXN2; (-) strand; PAM type: YTN; PAM sequence: CTC
cctacttactccactttccc

SEQ ID NO: 71921 - DNA, 20 bp, Artificial Sequence
  Description of Artificial Sequence: Synthetic oligonucleotide
  Target: ATXN2; (-) strand; PAM type: YTN; PAM sequence: CTA
gctccctacttactccactt

SEQ ID NO: 71922 - DNA, 20 bp, Artificial Sequence
  Description of Artificial Sequence: Synthetic oligonucleotide
  Target: ATXN2; (-) strand; PAM type: YTN; PAM sequence: CTA
gtgatgtcctagctccctac

SEQ ID NO: 71923 - DNA, 20 bp, Artificial Sequence
  Description of Artificial Sequence: Synthetic oligonucleotide
  Target: ATXN2; (-) strand; PAM type: YTN; PAM sequence: TTG
gaagaagagctagtgatgtc

SEQ ID NO: 71924 - DNA, 20 bp, Artificial Sequence
  Description of Artificial Sequence: Synthetic oligonucleotide
  Target: ATXN2; (-) strand; PAM type: YTN; PAM sequence: TTG
gttggaagaagagctagtga

SEQ ID NO: 71925 - DNA, 20 bp, Artificial Sequence
  Description of Artificial Sequence: Synthetic oligonucleotide
  Target: ATXN2; (-) strand; PAM type: YTN; PAM sequence: TTT
ggttggaagaagagctagtg

SEQ ID NO: 71926 - DNA, 20 bp, Artificial Sequence
  Description of Artificial Sequence: Synthetic oligonucleotide
  Target: ATXN2; (-) strand; PAM type: YTN; PAM sequence: CTT
tggttggaagaagagctagt

SEQ ID NO: 71927 - DNA, 20 bp, Artificial Sequence
  Description of Artificial Sequence: Synthetic oligonucleotide
  Target: ATXN2; (-) strand; PAM type: YTN; PAM sequence: TTA
aaacaaggctttggttggaa

SEQ ID NO: 71928 - DNA, 20 bp, Artificial Sequence
  Description of Artificial Sequence: Synthetic oligonucleotide
  Target: ATXN2; (-) strand; PAM type: YTN; PAM sequence: TTA
gttaaaacaaggctttggtt

SEQ ID NO: 71929 - DNA, 20 bp, Artificial Sequence
  Description of Artificial Sequence: Synthetic oligonucleotide
  Target: ATXN2; (-) strand; PAM type: YTN; PAM sequence: CTT
agttaaaacaaggctttggt

SEQ ID NO: 71930 - DNA, 20 bp, Artificial Sequence
  Description of Artificial Sequence: Synthetic oligonucleotide
  Target: ATXN2; (-) strand; PAM type: YTN; PAM sequence: CTC
ttagttaaaacaaggctttg

SEQ ID NO: 71931 - DNA, 20 bp, Artificial Sequence
  Description of Artificial Sequence: Synthetic oligonucleotide
  Target: ATXN2; (-) strand; PAM type: YTN; PAM sequence: CTG
actcttagttaaaacaaggc

SEQ ID NO: 71932 - DNA, 20 bp, Artificial Sequence
  Description of Artificial Sequence: Synthetic oligonucleotide
  Target: ATXN2; (-) strand; PAM type: YTN; PAM sequence: CTG
atgagatcccatgctgactc

SEQ ID NO: 71933 - DNA, 20 bp, Artificial Sequence
  Description of Artificial Sequence: Synthetic oligonucleotide
  Target: ATXN2; (-) strand; PAM type: YTN; PAM sequence: CTC
tgatgagatcccatgctgac

SEQ ID NO: 71934 - DNA, 20 bp, Artificial Sequence
  Description of Artificial Sequence: Synthetic oligonucleotide
  Target: ATXN2; (-) strand; PAM type: YTN; PAM sequence: TTC
cctctgatgagatcccatgc

SEQ ID NO: 71935 - DNA, 20 bp, Artificial Sequence
  Description of Artificial Sequence: Synthetic oligonucleotide
  Target: ATXN2; (-) strand; PAM type: YTN; PAM sequence: TTT
ccctctgatgagatcccatg

SEQ ID NO: 71936 - DNA, 20 bp, Artificial Sequence
  Description of Artificial Sequence: Synthetic oligonucleotide
  Target: ATXN2; (-) strand; PAM type: YTN; PAM sequence: TTT
tccctctgatgagatcccat

SEQ ID NO: 71937 - DNA, 20 bp, Artificial Sequence
  Description of Artificial Sequence: Synthetic oligonucleotide
  Target: ATXN2; (-) strand; PAM type: YTN; PAM sequence: TTT
ttccctctgatgagatccca

SEQ ID NO: 71938 - DNA, 20 bp, Artificial Sequence
  Description of Artificial Sequence: Synthetic oligonucleotide
  Target: ATXN2; (-) strand; PAM type: YTN; PAM sequence: TTT
tttccctctgatgagatccc

SEQ ID NO: 71939 - DNA, 20 bp, Artificial Sequence
  Description of Artificial Sequence: Synthetic oligonucleotide
  Target: ATXN2; (-) strand; PAM type: YTN; PAM sequence: TTT
ttttccctctgatgagatcc

SEQ ID NO: 71940 - DNA, 20 bp, Artificial Sequence
  Description of Artificial Sequence: Synthetic oligonucleotide
  Target: ATXN2; (-) strand; PAM type: YTN; PAM sequence: TTA
gtatagaataggtcagtttt

SEQ ID NO: 71941 - DNA, 20 bp, Artificial Sequence
  Description of Artificial Sequence: Synthetic oligonucleotide
  Target: ATXN2; (-) strand; PAM type: YTN; PAM sequence: TTT
agtatagaataggtcagttt

SEQ ID NO: 71942 - DNA, 20 bp, Artificial Sequence
  Description of Artificial Sequence: Synthetic oligonucleotide
  Target: ATXN2; (-) strand; PAM type: YTN; PAM sequence: TTT
tagtatagaataggtcagtt

SEQ ID NO: 71943 - DNA, 20 bp, Artificial Sequence
  Description of Artificial Sequence: Synthetic oligonucleotide
  Target: ATXN2; (-) strand; PAM type: YTN; PAM sequence: TTT
ttagtatagaataggtcagt

SEQ ID NO: 71944 - DNA, 20 bp, Artificial Sequence
  Description of Artificial Sequence: Synthetic oligonucleotide
  Target: ATXN2; (-) strand; PAM type: YTN; PAM sequence: CTT
tttagtatagaataggtcag

SEQ ID NO: 71945 - DNA, 20 bp, Artificial Sequence
  Description of Artificial Sequence: Synthetic oligonucleotide
  Target: ATXN2; (-) strand; PAM type: YTN; PAM sequence: TTC
tttttagtatagaataggtc

SEQ ID NO: 71946 - DNA, 20 bp, Artificial Sequence
  Description of Artificial Sequence: Synthetic oligonucleotide
  Target: ATXN2; (-) strand; PAM type: YTN; PAM sequence: TTT
ctttttagtatagaataggt

SEQ ID NO: 71947 - DNA, 20 bp, Artificial Sequence
  Description of Artificial Sequence: Synthetic oligonucleotide
  Target: ATXN2; (-) strand; PAM type: YTN; PAM sequence: TTT
tctttttagtatagaatagg

SEQ ID NO: 71948 - DNA, 20 bp, Artificial Sequence
  Description of Artificial Sequence: Synthetic oligonucleotide
  Target: ATXN2; (-) strand; PAM type: YTN; PAM sequence: TTA
acattttctttttagtatag

SEQ ID NO: 71949 - DNA, 20 bp, Artificial Sequence
  Description of Artificial Sequence: Synthetic oligonucleotide
  Target: ATXN2; (-) strand; PAM type: YTN; PAM sequence: TTT
aacattttctttttagtata

SEQ ID NO: 71950 - DNA, 20 bp, Artificial Sequence
  Description of Artificial Sequence: Synthetic oligonucleotide
  Target: ATXN2; (-) strand; PAM type: YTN; PAM sequence: CTT
taacattttctttttagtat

SEQ ID NO: 71951 - DNA, 20 bp, Artificial Sequence
  Description of Artificial Sequence: Synthetic oligonucleotide
  Target: ATXN2; (-) strand; PAM type: YTN; PAM sequence: TTA
caggtgtgagtcaccatgcc

SEQ ID NO: 71952 - DNA, 20 bp, Artificial Sequence
  Description of Artificial Sequence: Synthetic oligonucleotide
  Target: ATXN2; (-) strand; PAM type: YTN; PAM sequence: CTG
ggattacaggtgtgagtcac

SEQ ID NO: 71953 - DNA, 20 bp, Artificial Sequence
  Description of Artificial Sequence: Synthetic oligonucleotide
  Target: ATXN2; (-) strand; PAM type: YTN; PAM sequence: CTC
cccaagtgctgggattacag

SEQ ID NO: 71954 - DNA, 20 bp, Artificial Sequence
  Description of Artificial Sequence: Synthetic oligonucleotide
  Target: ATXN2; (-) strand; PAM type: YTN; PAM sequence: CTC
agcctccccaagtgctggga

SEQ ID NO: 71955 - DNA, 20 bp, Artificial Sequence
  Description of Artificial Sequence: Synthetic oligonucleotide
  Target: ATXN2; (-) strand; PAM type: YTN; PAM sequence: CTC
ccatctcagcctccccaagt

SEQ ID NO: 71956 - DNA, 20 bp, Artificial Sequence
  Description of Artificial Sequence: Synthetic oligonucleotide
  Target: ATXN2; (-) strand; PAM type: YTN; PAM sequence: TTG
atcctcccatctcagcctcc

SEQ ID NO: 71957 - DNA, 20 bp, Artificial Sequence
  Description of Artificial Sequence: Synthetic oligonucleotide
  Target: ATXN2; (-) strand; PAM type: YTN; PAM sequence: CTT
gatcctcccatctcagcctc

SEQ ID NO: 71958 - DNA, 20 bp, Artificial Sequence
  Description of Artificial Sequence: Synthetic oligonucleotide
  Target: ATXN2; (-) strand; PAM type: YTN; PAM sequence: CTC
acttgatcctcccatctcag

SEQ ID NO: 71959 - DNA, 20 bp, Artificial Sequence
  Description of Artificial Sequence: Synthetic oligonucleotide
  Target: ATXN2; (-) strand; PAM type: YTN; PAM sequence: CTG
ggctcacttgatcctcccat

SEQ ID NO: 71960 - DNA, 20 bp, Artificial Sequence
  Description of Artificial Sequence: Synthetic oligonucleotide
  Target: ATXN2; (-) strand; PAM type: YTN; PAM sequence: CTC
ctgggctcacttgatcctcc

SEQ ID NO: 71961 - DNA, 20 bp, Artificial Sequence
  Description of Artificial Sequence: Synthetic oligonucleotide
  Target: ATXN2; (-) strand; PAM type: YTN; PAM sequence: TTG
aactcctgggctcacttgat

SEQ ID NO: 71962 - DNA, 20 bp, Artificial Sequence
  Description of Artificial Sequence: Synthetic oligonucleotide
  Target: ATXN2; (-) strand; PAM type: YTN; PAM sequence: CTT
gaactcctgggctcacttga

SEQ ID NO: 71963 - DNA, 20 bp, Artificial Sequence
  Description of Artificial Sequence: Synthetic oligonucleotide
  Target: ATXN2; (-) strand; PAM type: YTN; PAM sequence: CTG
atcttgaactcctgggctca

SEQ ID NO: 71964 - DNA, 20 bp, Artificial Sequence
  Description of Artificial Sequence: Synthetic oligonucleotide
  Target: ATXN2; (-) strand; PAM type: YTN; PAM sequence: TTG
cacaggctgatcttgaactc

SEQ ID NO: 71965 - DNA, 20 bp, Artificial Sequence
  Description of Artificial Sequence: Synthetic oligonucleotide
  Target: ATXN2; (-) strand; PAM type: YTN; PAM sequence: CTG
tgttgcacaggctgatcttg

SEQ ID NO: 71966 - DNA, 20 bp, Artificial Sequence
  Description of Artificial Sequence: Synthetic oligonucleotide
  Target: ATXN2; (-) strand; PAM type: YTN; PAM sequence: CTC
actgtgttgcacaggctgat

SEQ ID NO: 71967 - DNA, 20 bp, Artificial Sequence
  Description of Artificial Sequence: Synthetic oligonucleotide
  Target: ATXN2; (-) strand; PAM type: YTN; PAM sequence: TTG
tagagacagatgtctcactg

SEQ ID NO: 71968 - DNA, 20 bp, Artificial Sequence
  Description of Artificial Sequence: Synthetic oligonucleotide
  Target: ATXN2; (-) strand; PAM type: YTN; PAM sequence: TTT
gtagagacagatgtctcact

SEQ ID NO: 71969 - DNA, 20 bp, Artificial Sequence
  Description of Artificial Sequence: Synthetic oligonucleotide
  Target: ATXN2; (-) strand; PAM type: YTN; PAM sequence: TTT
tgtagagacagatgtctcac

SEQ ID NO: 71970 - DNA, 20 bp, Artificial Sequence
  Description of Artificial Sequence: Synthetic oligonucleotide
  Target: ATXN2; (-) strand; PAM type: YTN; PAM sequence: TTT
ttgtagagacagatgtctca

SEQ ID NO: 71971 - DNA, 20 bp, Artificial Sequence
  Description of Artificial Sequence: Synthetic oligonucleotide
  Target: ATXN2; (-) strand; PAM type: YTN; PAM sequence: TTA
gtttttgtagagacagatgt

SEQ ID NO: 71972 - DNA, 20 bp, Artificial Sequence
  Description of Artificial Sequence: Synthetic oligonucleotide
  Target: ATXN2; (-) strand; PAM type: YTN; PAM sequence: TTT
agtttttgtagagacagatg

SEQ ID NO: 71973 - DNA, 20 bp, Artificial Sequence
  Description of Artificial Sequence: Synthetic oligonucleotide
  Target: ATXN2; (-) strand; PAM type: YTN; PAM sequence: TTA
gtttagtttttgtagagaca

SEQ ID NO: 71974 - DNA, 20 bp, Artificial Sequence
  Description of Artificial Sequence: Synthetic oligonucleotide
  Target: ATXN2; (-) strand; PAM type: YTN; PAM sequence: TTT
agtttagtttttgtagagac

SEQ ID NO: 71975 - DNA, 20 bp, Artificial Sequence
  Description of Artificial Sequence: Synthetic oligonucleotide
  Target: ATXN2; (-) strand; PAM type: YTN; PAM sequence: TTT
tagtttagtttttgtagaga

SEQ ID NO: 71976 - DNA, 20 bp, Artificial Sequence
  Description of Artificial Sequence: Synthetic oligonucleotide
  Target: ATXN2; (-) strand; PAM type: YTN; PAM sequence: TTT
ttagtttagtttttgtagag

SEQ ID NO: 71977 - DNA, 20 bp, Artificial Sequence
  Description of Artificial Sequence: Synthetic oligonucleotide
  Target: ATXN2; (-) strand; PAM type: YTN; PAM sequence: TTT
tttagtttagtttttgtaga

SEQ ID NO: 71978 - DNA, 20 bp, Artificial Sequence
  Description of Artificial Sequence: Synthetic oligonucleotide
  Target: ATXN2; (-) strand; PAM type: YTN; PAM sequence: TTT
ttttagtttagtttttgtag

SEQ ID NO: 71979 - DNA, 20 bp, Artificial Sequence
  Description of Artificial Sequence: Synthetic oligonucleotide
  Target: ATXN2; (-) strand; PAM type: YTN; PAM sequence: TTT
tttttagtttagtttttgta

SEQ ID NO: 71980 - DNA, 20 bp, Artificial Sequence
  Description of Artificial Sequence: Synthetic oligonucleotide
  Target: ATXN2; (-) strand; PAM type: YTN; PAM sequence: TTG
ttttttttagtttagttttt

SEQ ID NO: 71981 - DNA, 20 bp, Artificial Sequence
  Description of Artificial Sequence: Synthetic oligonucleotide
  Target: ATXN2; (-) strand; PAM type: YTN; PAM sequence: TTT
gttttttttagtttagtttt

SEQ ID NO: 71982 - DNA, 20 bp, Artificial Sequence
  Description of Artificial Sequence: Synthetic oligonucleotide
  Target: ATXN2; (-) strand; PAM type: YTN; PAM sequence: TTG
tttgttttttttagtttagt

SEQ ID NO: 71983 - DNA, 20 bp, Artificial Sequence
  Description of Artificial Sequence: Synthetic oligonucleotide
  Target: ATXN2; (-) strand; PAM type: YTN; PAM sequence: TTT
gtttgttttttttagtttag

SEQ ID NO: 71984 - DNA, 20 bp, Artificial Sequence
  Description of Artificial Sequence: Synthetic oligonucleotide
  Target: ATXN2; (-) strand; PAM type: YTN; PAM sequence: TTT
tgtttgttttttttagttta

SEQ ID NO: 71985 - DNA, 20 bp, Artificial Sequence
  Description of Artificial Sequence: Synthetic oligonucleotide
  Target: ATXN2; (-) strand; PAM type: YTN; PAM sequence: TTT
ttgtttgttttttttagttt

SEQ ID NO: 71986 - DNA, 20 bp, Artificial Sequence
  Description of Artificial Sequence: Synthetic oligonucleotide
  Target: ATXN2; (-) strand; PAM type: YTN; PAM sequence: TTT
tttgtttgttttttttagtt

SEQ ID NO: 71987 - DNA, 20 bp, Artificial Sequence
  Description of Artificial Sequence: Synthetic oligonucleotide
  Target: ATXN2; (-) strand; PAM type: YTN; PAM sequence: TTT
ttttgtttgttttttttagt

SEQ ID NO: 71988 - DNA, 20 bp, Artificial Sequence
  Description of Artificial Sequence: Synthetic oligonucleotide
  Target: ATXN2; (-) strand; PAM type: YTN; PAM sequence: CTA
atttttttgtttgttttttt

SEQ ID NO: 71989 - DNA, 20 bp, Artificial Sequence
  Description of Artificial Sequence: Synthetic oligonucleotide
  Target: ATXN2; (-) strand; PAM type: YTN; PAM sequence: CTG
gctaatttttttgtttgttt

SEQ ID NO: 71990 - DNA, 20 bp, Artificial Sequence
  Description of Artificial Sequence: Synthetic oligonucleotide
  Target: ATXN2; (-) strand; PAM type: YTN; PAM sequence: CTA
cctggctaatttttttgttt

SEQ ID NO: 71991 - DNA, 20 bp, Artificial Sequence
  Description of Artificial Sequence: Synthetic oligonucleotide
  Target: ATXN2; (-) strand; PAM type: YTN; PAM sequence: CTC
cccatgcaccaccctacctg

SEQ ID NO: 71992 - DNA, 20 bp, Artificial Sequence
  Description of Artificial Sequence: Synthetic oligonucleotide
  Target: ATXN2; (-) strand; PAM type: YTN; PAM sequence: TTC
agcctccccatgcaccaccc

SEQ ID NO: 71993 - DNA, 20 bp, Artificial Sequence
  Description of Artificial Sequence: Synthetic oligonucleotide
  Target: ATXN2; (-) strand; PAM type: YTN; PAM sequence: TTT
cagcctccccatgcaccacc

SEQ ID NO: 71994 - DNA, 20 bp, Artificial Sequence
  Description of Artificial Sequence: Synthetic oligonucleotide
  Target: ATXN2; (-) strand; PAM type: YTN; PAM sequence: CTC
ccatttcagcctccccatgc

SEQ ID NO: 71995 - DNA, 20 bp, Artificial Sequence
  Description of Artificial Sequence: Synthetic oligonucleotide
  Target: ATXN2; (-) strand; PAM type: YTN; PAM sequence: TTC
tcccatttcagcctccccat

SEQ ID NO: 71996 - DNA, 20 bp, Artificial Sequence
  Description of Artificial Sequence: Synthetic oligonucleotide
  Target: ATXN2; (-) strand; PAM type: YTN; PAM sequence: CTG
ttctcccatttcagcctccc

SEQ ID NO: 71997 - DNA, 20 bp, Artificial Sequence
  Description of Artificial Sequence: Synthetic oligonucleotide
  Target: ATXN2; (-) strand; PAM type: YTN; PAM sequence: CTC
aagctgttctcccatttcag

SEQ ID NO: 71998 - DNA, 20 bp, Artificial Sequence
  Description of Artificial Sequence: Synthetic oligonucleotide
  Target: ATXN2; (-) strand; PAM type: YTN; PAM sequence: CTG
ggctcaagctgttctcccat

SEQ ID NO: 71999 - DNA, 20 bp, Artificial Sequence
  Description of Artificial Sequence: Synthetic oligonucleotide
  Target: ATXN2; (-) strand; PAM type: YTN; PAM sequence: TTC
ctgggctcaagctgttctcc

SEQ ID NO: 72000 - DNA, 20 bp, Artificial Sequence
  Description of Artificial Sequence: Synthetic oligonucleotide
  Target: ATXN2; (-) strand; PAM type: YTN; PAM sequence: CTT
cctgggctcaagctgttctc

SEQ ID NO: 72001 - DNA, 20 bp, Artificial Sequence
  Description of Artificial Sequence: Synthetic oligonucleotide
  Target: ATXN2; (-) strand; PAM type: YTN; PAM sequence: CTG
cttcctgggctcaagctgtt

SEQ ID NO: 72002 - DNA, 20 bp, Artificial Sequence
  Description of Artificial Sequence: Synthetic oligonucleotide
  Target: ATXN2; (-) strand; PAM type: YTN; PAM sequence: TTA
ctgcttcctgggctcaagct

SEQ ID NO: 72003 - DNA, 20 bp, Artificial Sequence
  Description of Artificial Sequence: Synthetic oligonucleotide
  Target: ATXN2; (-) strand; PAM type: YTN; PAM sequence: CTT
actgcttcctgggctcaagc

SEQ ID NO: 72004 - DNA, 20 bp, Artificial Sequence
  Description of Artificial Sequence: Synthetic oligonucleotide
  Target: ATXN2; (-) strand; PAM type: YTN; PAM sequence: CTA
gaatgcagtggcgccatcat

SEQ ID NO: 72005 - DNA, 20 bp, Artificial Sequence
  Description of Artificial Sequence: Synthetic oligonucleotide
  Target: ATXN2; (-) strand; PAM type: YTN; PAM sequence: CTA
ctagaatgcagtggcgccat

SEQ ID NO: 72006 - DNA, 20 bp, Artificial Sequence
  Description of Artificial Sequence: Synthetic oligonucleotide
  Target: ATXN2; (-) strand; PAM type: YTN; PAM sequence: CTG
tcacccctactagaatgcag

SEQ ID NO: 72007 - DNA, 20 bp, Artificial Sequence
  Description of Artificial Sequence: Synthetic oligonucleotide
  Target: ATXN2; (-) strand; PAM type: YTN; PAM sequence: CTC
tgtcacccctactagaatgc

SEQ ID NO: 72008 - DNA, 20 bp, Artificial Sequence
  Description of Artificial Sequence: Synthetic oligonucleotide
  Target: ATXN2; (-) strand; PAM type: YTN; PAM sequence: CTC
tctgtcacccctactagaat

SEQ ID NO: 72009 - DNA, 20 bp, Artificial Sequence
  Description of Artificial Sequence: Synthetic oligonucleotide
  Target: ATXN2; (-) strand; PAM type: YTN; PAM sequence: CTC
tctctgtcacccctactaga

SEQ ID NO: 72010 - DNA, 20 bp, Artificial Sequence
  Description of Artificial Sequence: Synthetic oligonucleotide
  Target: ATXN2; (-) strand; PAM type: YTN; PAM sequence: TTG
agaaagggtctctctctgtc

SEQ ID NO: 72011 - DNA, 20 bp, Artificial Sequence
  Description of Artificial Sequence: Synthetic oligonucleotide
  Target: ATXN2; (-) strand; PAM type: YTN; PAM sequence: TTG
ttgagaaagggtctctctct

SEQ ID NO: 72012 - DNA, 20 bp, Artificial Sequence
  Description of Artificial Sequence: Synthetic oligonucleotide
  Target: ATXN2; (-) strand; PAM type: YTN; PAM sequence: TTT
gttgagaaagggtctctctc

SEQ ID NO: 72013 - DNA, 20 bp, Artificial Sequence
  Description of Artificial Sequence: Synthetic oligonucleotide
  Target: ATXN2; (-) strand; PAM type: YTN; PAM sequence: TTA
tttgttgagaaagggtctct

SEQ ID NO: 72014 - DNA, 20 bp, Artificial Sequence
  Description of Artificial Sequence: Synthetic oligonucleotide
  Target: ATXN2; (-) strand; PAM type: YTN; PAM sequence: TTT
atttgttgagaaagggtctc

SEQ ID NO: 72015 - DNA, 20 bp, Artificial Sequence
  Description of Artificial Sequence: Synthetic oligonucleotide
  Target: ATXN2; (-) strand; PAM type: YTN; PAM sequence: TTG
tatgtatttatttgttgaga

SEQ ID NO: 72016 - DNA, 20 bp, Artificial Sequence
  Description of Artificial Sequence: Synthetic oligonucleotide
  Target: ATXN2; (-) strand; PAM type: YTN; PAM sequence: TTT
gtatgtatttatttgttgag

SEQ ID NO: 72017 - DNA, 20 bp, Artificial Sequence
  Description of Artificial Sequence: Synthetic oligonucleotide
  Target: ATXN2; (-) strand; PAM type: YTN; PAM sequence: TTA
tgtttgtatgtatttatttg

SEQ ID NO: 72018 - DNA, 20 bp, Artificial Sequence
  Description of Artificial Sequence: Synthetic oligonucleotide
  Target: ATXN2; (-) strand; PAM type: YTN; PAM sequence: TTT
atgtttgtatgtatttattt

SEQ ID NO: 72019 - DNA, 20 bp, Artificial Sequence
  Description of Artificial Sequence: Synthetic oligonucleotide
  Target: ATXN2; (-) strand; PAM type: YTN; PAM sequence: TTA
atttatgtttgtatgtattt

SEQ ID NO: 72020 - DNA, 20 bp, Artificial Sequence
  Description of Artificial Sequence: Synthetic oligonucleotide
  Target: ATXN2; (-) strand; PAM type: YTN; PAM sequence: TTA
aattaatttatgtttgtatg

SEQ ID NO: 72021 - DNA, 20 bp, Artificial Sequence
  Description of Artificial Sequence: Synthetic oligonucleotide
  Target: ATXN2; (-) strand; PAM type: YTN; PAM sequence: TTT
aaattaatttatgtttgtat

SEQ ID NO: 72022 - DNA, 20 bp, Artificial Sequence
  Description of Artificial Sequence: Synthetic oligonucleotide
  Target: ATXN2; (-) strand; PAM type: YTN; PAM sequence: TTT
taaattaatttatgtttgta

SEQ ID NO: 72023 - DNA, 20 bp, Artificial Sequence
  Description of Artificial Sequence: Synthetic oligonucleotide
  Target: ATXN2; (-) strand; PAM type: YTN; PAM sequence: TTA
cattttaaattaatttatgt

SEQ ID NO: 72024 - DNA, 20 bp, Artificial Sequence
  Description of Artificial Sequence: Synthetic oligonucleotide
  Target: ATXN2; (-) strand; PAM type: YTN; PAM sequence: TTT
acattttaaattaatttatg

SEQ ID NO: 72025 - DNA, 20 bp, Artificial Sequence
  Description of Artificial Sequence: Synthetic oligonucleotide
  Target: ATXN2; (-) strand; PAM type: YTN; PAM sequence: CTT
tacattttaaattaatttat

SEQ ID NO: 72026 - DNA, 20 bp, Artificial Sequence
  Description of Artificial Sequence: Synthetic oligonucleotide
  Target: ATXN2; (-) strand; PAM type: YTN; PAM sequence: TTA
aactttacattttaaattaa

SEQ ID NO: 72027 - DNA, 20 bp, Artificial Sequence
  Description of Artificial Sequence: Synthetic oligonucleotide
  Target: ATXN2; (-) strand; PAM type: YTN; PAM sequence: CTG
ttaaactttacattttaaat

SEQ ID NO: 72028 - DNA, 20 bp, Artificial Sequence
  Description of Artificial Sequence: Synthetic oligonucleotide
  Target: ATXN2; (-) strand; PAM type: YTN; PAM sequence: CTG
taacaatggctgttaaactt

SEQ ID NO: 72029 - DNA, 20 bp, Artificial Sequence
  Description of Artificial Sequence: Synthetic oligonucleotide
  Target: ATXN2; (-) strand; PAM type: YTN; PAM sequence: TTG
cctgtaacaatggctgttaa

SEQ ID NO: 72030 - DNA, 20 bp, Artificial Sequence
  Description of Artificial Sequence: Synthetic oligonucleotide
  Target: ATXN2; (-) strand; PAM type: YTN; PAM sequence: TTA
ttgcctgtaacaatggctgt

SEQ ID NO: 72031 - DNA, 20 bp, Artificial Sequence
  Description of Artificial Sequence: Synthetic oligonucleotide
  Target: ATXN2; (-) strand; PAM type: YTN; PAM sequence: TTT
attgcctgtaacaatggctg

SEQ ID NO: 72032 - DNA, 20 bp, Artificial Sequence
  Description of Artificial Sequence: Synthetic oligonucleotide
  Target: ATXN2; (-) strand; PAM type: YTN; PAM sequence: TTT
tattgcctgtaacaatggct

SEQ ID NO: 72033 - DNA, 20 bp, Artificial Sequence
  Description of Artificial Sequence: Synthetic oligonucleotide
  Target: ATXN2; (-) strand; PAM type: YTN; PAM sequence: TTT
ttattgcctgtaacaatggc

SEQ ID NO: 72034 - DNA, 20 bp, Artificial Sequence
  Description of Artificial Sequence: Synthetic oligonucleotide
  Target: ATXN2; (-) strand; PAM type: YTN; PAM sequence: TTG
tttttattgcctgtaacaat

SEQ ID NO: 72035 - DNA, 20 bp, Artificial Sequence
  Description of Artificial Sequence: Synthetic oligonucleotide
  Target: ATXN2; (-) strand; PAM type: YTN; PAM sequence: TTT
gtttttattgcctgtaacaa

SEQ ID NO: 72036 - DNA, 20 bp, Artificial Sequence
  Description of Artificial Sequence: Synthetic oligonucleotide
  Target: ATXN2; (-) strand; PAM type: YTN; PAM sequence: TTG
tggtttgtttttattgcctg

SEQ ID NO: 72037 - DNA, 20 bp, Artificial Sequence
  Description of Artificial Sequence: Synthetic oligonucleotide
  Target: ATXN2; (-) strand; PAM type: YTN; PAM sequence: CTC
attgtggtttgtttttattg

SEQ ID NO: 72038 - DNA, 20 bp, Artificial Sequence
  Description of Artificial Sequence: Synthetic oligonucleotide
  Target: ATXN2; (-) strand; PAM type: YTN; PAM sequence: CTG
ctcattgtggtttgttttta

SEQ ID NO: 72039 - DNA, 20 bp, Artificial Sequence
  Description of Artificial Sequence: Synthetic oligonucleotide
  Target: ATXN2; (-) strand; PAM type: YTN; PAM sequence: TTC
cctgctcattgtggtttgtt

SEQ ID NO: 72040 - DNA, 20 bp, Artificial Sequence
  Description of Artificial Sequence: Synthetic oligonucleotide
  Target: ATXN2; (-) strand; PAM type: YTN; PAM sequence: CTT
ccctgctcattgtggtttgt

SEQ ID NO: 72041 - DNA, 20 bp, Artificial Sequence
  Description of Artificial Sequence: Synthetic oligonucleotide
  Target: ATXN2; (-) strand; PAM type: YTN; PAM sequence: CTG
accttccctgctcattgtgg

SEQ ID NO: 72042 - DNA, 20 bp, Artificial Sequence
  Description of Artificial Sequence: Synthetic oligonucleotide
  Target: ATXN2; (-) strand; PAM type: YTN; PAM sequence: CTC
tgaccttccctgctcattgt

SEQ ID NO: 72043 - DNA, 20 bp, Artificial Sequence
  Description of Artificial Sequence: Synthetic oligonucleotide
  Target: ATXN2; (-) strand; PAM type: YTN; PAM sequence: TTC
tctgaccttccctgctcatt

SEQ ID NO: 72044 - DNA, 20 bp, Artificial Sequence
  Description of Artificial Sequence: Synthetic oligonucleotide
  Target: ATXN2; (-) strand; PAM type: YTN; PAM sequence: CTT
ctctgaccttccctgctcat

SEQ ID NO: 72045 - DNA, 20 bp, Artificial Sequence
  Description of Artificial Sequence: Synthetic oligonucleotide
  Target: ATXN2; (-) strand; PAM type: YTN; PAM sequence: TTA
gagtcttctctgaccttccc

SEQ ID NO: 72046 - DNA, 20 bp, Artificial Sequence
  Description of Artificial Sequence: Synthetic oligonucleotide
  Target: ATXN2; (-) strand; PAM type: YTN; PAM sequence: TTT
agagtcttctctgaccttcc

SEQ ID NO: 72047 - DNA, 20 bp, Artificial Sequence
  Description of Artificial Sequence: Synthetic oligonucleotide
  Target: ATXN2; (-) strand; PAM type: YTN; PAM sequence: TTT
tagagtcttctctgaccttc

SEQ ID NO: 72048 - DNA, 20 bp, Artificial Sequence
  Description of Artificial Sequence: Synthetic oligonucleotide
  Target: ATXN2; (-) strand; PAM type: YTN; PAM sequence: TTT
ttagagtcttctctgacctt

SEQ ID NO: 72049 - DNA, 20 bp, Artificial Sequence
  Description of Artificial Sequence: Synthetic oligonucleotide
  Target: ATXN2; (-) strand; PAM type: YTN; PAM sequence: CTT
tttagagtcttctctgacct

SEQ ID NO: 72050 - DNA, 20 bp, Artificial Sequence
  Description of Artificial Sequence: Synthetic oligonucleotide
  Target: ATXN2; (-) strand; PAM type: YTN; PAM sequence: CTG
tcctttttagagtcttctct

SEQ ID NO: 72051 - DNA, 20 bp, Artificial Sequence
  Description of Artificial Sequence: Synthetic oligonucleotide
  Target: ATXN2; (-) strand; PAM type: YTN; PAM sequence: TTC
aaaaccaagcccacatctgt

SEQ ID NO: 72052 - DNA, 20 bp, Artificial Sequence
  Description of Artificial Sequence: Synthetic oligonucleotide
  Target: ATXN2; (-) strand; PAM type: YTN; PAM sequence: TTT
caaaaccaagcccacatctg

SEQ ID NO: 72053 - DNA, 20 bp, Artificial Sequence
  Description of Artificial Sequence: Synthetic oligonucleotide
  Target: ATXN2; (-) strand; PAM type: YTN; PAM sequence: TTT
tcaaaaccaagcccacatct

SEQ ID NO: 72054 - DNA, 20 bp, Artificial Sequence
  Description of Artificial Sequence: Synthetic oligonucleotide
  Target: ATXN2; (-) strand; PAM type: YTN; PAM sequence: TTT
ttcaaaaccaagcccacatc

SEQ ID NO: 72055 - DNA, 20 bp, Artificial Sequence
  Description of Artificial Sequence: Synthetic oligonucleotide
  Target: ATXN2; (-) strand; PAM type: YTN; PAM sequence: CTT
tttcaaaaccaagcccacat

SEQ ID NO: 72056 - DNA, 20 bp, Artificial Sequence
  Description of Artificial Sequence: Synthetic oligonucleotide
  Target: ATXN2; (-) strand; PAM type: YTN; PAM sequence: TTA
gatactttttcaaaaccaag

SEQ ID NO: 72057 - DNA, 20 bp, Artificial Sequence
  Description of Artificial Sequence: Synthetic oligonucleotide
  Target: ATXN2; (-) strand; PAM type: YTN; PAM sequence: TTT
agatactttttcaaaaccaa

SEQ ID NO: 72058 - DNA, 20 bp, Artificial Sequence
  Description of Artificial Sequence: Synthetic oligonucleotide
  Target: ATXN2; (-) strand; PAM type: YTN; PAM sequence: TTT
tagatactttttcaaaacca

SEQ ID NO: 72059 - DNA, 20 bp, Artificial Sequence
  Description of Artificial Sequence: Synthetic oligonucleotide
  Target: ATXN2; (-) strand; PAM type: YTN; PAM sequence: CTA
gagttttagatactttttca

SEQ ID NO: 72060 - DNA, 20 bp, Artificial Sequence
  Description of Artificial Sequence: Synthetic oligonucleotide
  Target: ATXN2; (-) strand; PAM type: YTN; PAM sequence: CTA
actagagttttagatacttt

SEQ ID NO: 72061 - DNA, 20 bp, Artificial Sequence
  Description of Artificial Sequence: Synthetic oligonucleotide
  Target: ATXN2; (-) strand; PAM type: YTN; PAM sequence: TTA
ctaactagagttttagatac

SEQ ID NO: 72062 - DNA, 20 bp, Artificial Sequence
  Description of Artificial Sequence: Synthetic oligonucleotide
  Target: ATXN2; (-) strand; PAM type: YTN; PAM sequence: CTT
actaactagagttttagata

SEQ ID NO: 72063 - DNA, 20 bp, Artificial Sequence
  Description of Artificial Sequence: Synthetic oligonucleotide
  Target: ATXN2; (-) strand; PAM type: YTN; PAM sequence: CTA
ccttactaactagagtttta

SEQ ID NO: 72064 - DNA, 20 bp, Artificial Sequence
  Description of Artificial Sequence: Synthetic oligonucleotide
  Target: ATXN2; (-) strand; PAM type: YTN; PAM sequence: TTA
atcccaacgtgaagaatcta

SEQ ID NO: 72065 - DNA, 20 bp, Artificial Sequence
  Description of Artificial Sequence: Synthetic oligonucleotide
  Target: ATXN2; (-) strand; PAM type: YTN; PAM sequence: TTT
aatcccaacgtgaagaatct

SEQ ID NO: 72066 - DNA, 20 bp, Artificial Sequence
  Description of Artificial Sequence: Synthetic oligonucleotide
  Target: ATXN2; (-) strand; PAM type: YTN; PAM sequence: CTG
gatttaatcccaacgtgaag

SEQ ID NO: 72067 - DNA, 20 bp, Artificial Sequence
  Description of Artificial Sequence: Synthetic oligonucleotide
  Target: ATXN2; (-) strand; PAM type: YTN; PAM sequence: CTC
ctggatttaatcccaacgtg

SEQ ID NO: 72068 - DNA, 20 bp, Artificial Sequence
  Description of Artificial Sequence: Synthetic oligonucleotide
  Target: ATXN2; (-) strand; PAM type: YTN; PAM sequence: TTA
ctcctggatttaatcccaac

SEQ ID NO: 72069 - DNA, 20 bp, Artificial Sequence
  Description of Artificial Sequence: Synthetic oligonucleotide
  Target: ATXN2; (-) strand; PAM type: YTN; PAM sequence: TTT
actcctggatttaatcccaa

SEQ ID NO: 72070 - DNA, 20 bp, Artificial Sequence
  Description of Artificial Sequence: Synthetic oligonucleotide
  Target: ATXN2; (-) strand; PAM type: YTN; PAM sequence: TTT
tactcctggatttaatccca

SEQ ID NO: 72071 - DNA, 20 bp, Artificial Sequence
  Description of Artificial Sequence: Synthetic oligonucleotide
  Target: ATXN2; (-) strand; PAM type: YTN; PAM sequence: CTT
ttactcctggatttaatccc

SEQ ID NO: 72072 - DNA, 20 bp, Artificial Sequence
  Description of Artificial Sequence: Synthetic oligonucleotide
  Target: ATXN2; (-) strand; PAM type: YTN; PAM sequence: TTC
ttttactcctggatttaatc

SEQ ID NO: 72073 - DNA, 20 bp, Artificial Sequence
  Description of Artificial Sequence: Synthetic oligonucleotide
  Target: ATXN2; (-) strand; PAM type: YTN; PAM sequence: CTT
cttttactcctggatttaat

SEQ ID NO: 72074 - DNA, 20 bp, Artificial Sequence
  Description of Artificial Sequence: Synthetic oligonucleotide
  Target: ATXN2; (-) strand; PAM type: YTN; PAM sequence: TTC
ttcttttactcctggattta

SEQ ID NO: 72075 - DNA, 20 bp, Artificial Sequence
  Description of Artificial Sequence: Synthetic oligonucleotide
  Target: ATXN2; (-) strand; PAM type: YTN; PAM sequence: CTT
cttcttttactcctggattt

SEQ ID NO: 72076 - DNA, 20 bp, Artificial Sequence
  Description of Artificial Sequence: Synthetic oligonucleotide
  Target: ATXN2; (-) strand; PAM type: YTN; PAM sequence: CTG
tgccttcttcttttactcct

SEQ ID NO: 72077 - DNA, 20 bp, Artificial Sequence
  Description of Artificial Sequence: Synthetic oligonucleotide
  Target: ATXN2; (-) strand; PAM type: YTN; PAM sequence: TTA
caggcgtgagccaccgcggc

SEQ ID NO: 72078 - DNA, 20 bp, Artificial Sequence
  Description of Artificial Sequence: Synthetic oligonucleotide
  Target: ATXN2; (-) strand; PAM type: YTN; PAM sequence: CTG
ggattacaggcgtgagccac

SEQ ID NO: 72079 - DNA, 20 bp, Artificial Sequence
  Description of Artificial Sequence: Synthetic oligonucleotide
  Target: ATXN2; (-) strand; PAM type: YTN; PAM sequence: TTG
ctgggattacaggcgtgagc

SEQ ID NO: 72080 - DNA, 20 bp, Artificial Sequence
  Description of Artificial Sequence: Synthetic oligonucleotide
  Target: ATXN2; (-) strand; PAM type: YTN; PAM sequence: CTC
ccaaattgctgggattacag

SEQ ID NO: 72081 - DNA, 20 bp, Artificial Sequence
  Description of Artificial Sequence: Synthetic oligonucleotide
  Target: ATXN2; (-) strand; PAM type: YTN; PAM sequence: TTG
ggctcccaaattgctgggat

SEQ ID NO: 72082 - DNA, 20 bp, Artificial Sequence
  Description of Artificial Sequence: Synthetic oligonucleotide
  Target: ATXN2; (-) strand; PAM type: YTN; PAM sequence: CTT
gggctcccaaattgctggga

SEQ ID NO: 72083 - DNA, 20 bp, Artificial Sequence
  Description of Artificial Sequence: Synthetic oligonucleotide
  Target: ATXN2; (-) strand; PAM type: YTN; PAM sequence: CTG
ccttgggctcccaaattgct

SEQ ID NO: 72084 - DNA, 20 bp, Artificial Sequence
  Description of Artificial Sequence: Synthetic oligonucleotide
  Target: ATXN2; (-) strand; PAM type: YTN; PAM sequence: TTG
tgatccacctgccttgggct

SEQ ID NO: 72085 - DNA, 20 bp, Artificial Sequence
  Description of Artificial Sequence: Synthetic oligonucleotide
  Target: ATXN2; (-) strand; PAM type: YTN; PAM sequence: CTT
gtgatccacctgccttgggc

SEQ ID NO: 72086 - DNA, 20 bp, Artificial Sequence
  Description of Artificial Sequence: Synthetic oligonucleotide
  Target: ATXN2; (-) strand; PAM type: YTN; PAM sequence: CTG
accttgtgatccacctgcct

SEQ ID NO: 72087 - DNA, 20 bp, Artificial Sequence
  Description of Artificial Sequence: Synthetic oligonucleotide
  Target: ATXN2; (-) strand; PAM type: YTN; PAM sequence: CTC
ctgaccttgtgatccacctg

SEQ ID NO: 72088 - DNA, 20 bp, Artificial Sequence
  Description of Artificial Sequence: Synthetic oligonucleotide
  Target: ATXN2; (-) strand; PAM type: YTN; PAM sequence: CTC
gaactcctgaccttgtgatc

SEQ ID NO: 72089 - DNA, 20 bp, Artificial Sequence
  Description of Artificial Sequence: Synthetic oligonucleotide
  Target: ATXN2; (-) strand; PAM type: YTN; PAM sequence: CTG
gtctcgaactcctgaccttg

SEQ ID NO: 72090 - DNA, 20 bp, Artificial Sequence
  Description of Artificial Sequence: Synthetic oligonucleotide
  Target: ATXN2; (-) strand; PAM type: YTN; PAM sequence: TTC
ccaggctggtctcgaactcc

SEQ ID NO: 72091 - DNA, 20 bp, Artificial Sequence
  Description of Artificial Sequence: Synthetic oligonucleotide
  Target: ATXN2; (-) strand; PAM type: YTN; PAM sequence: TTT
cccaggctggtctcgaactc

SEQ ID NO: 72092 - DNA, 20 bp, Artificial Sequence
  Description of Artificial Sequence: Synthetic oligonucleotide
  Target: ATXN2; (-) strand; PAM type: YTN; PAM sequence: CTG
tgtttcccaggctggtctcg

SEQ ID NO: 72093 - DNA, 20 bp, Artificial Sequence
  Description of Artificial Sequence: Synthetic oligonucleotide
  Target: ATXN2; (-) strand; PAM type: YTN; PAM sequence: TTC
actgtgtttcccaggctggt

SEQ ID NO: 72094 - DNA, 20 bp, Artificial Sequence
  Description of Artificial Sequence: Synthetic oligonucleotide
  Target: ATXN2; (-) strand; PAM type: YTN; PAM sequence: TTT
cactgtgtttcccaggctgg

SEQ ID NO: 72095 - DNA, 20 bp, Artificial Sequence
  Description of Artificial Sequence: Synthetic oligonucleotide
  Target: ATXN2; (-) strand; PAM type: YTN; PAM sequence: TTA
gtagagatgggtttcactgt

SEQ ID NO: 72096 - DNA, 20 bp, Artificial Sequence
  Description of Artificial Sequence: Synthetic oligonucleotide
  Target: ATXN2; (-) strand; PAM type: YTN; PAM sequence: TTT
agtagagatgggtttcactg

SEQ ID NO: 72097 - DNA, 20 bp, Artificial Sequence
  Description of Artificial Sequence: Synthetic oligonucleotide
  Target: ATXN2; (-) strand; PAM type: YTN; PAM sequence: TTT
tagtagagatgggtttcact

SEQ ID NO: 72098 - DNA, 20 bp, Artificial Sequence
  Description of Artificial Sequence: Synthetic oligonucleotide
  Target: ATXN2; (-) strand; PAM type: YTN; PAM sequence: TTT
ttagtagagatgggtttcac

SEQ ID NO: 72099 - DNA, 20 bp, Artificial Sequence
  Description of Artificial Sequence: Synthetic oligonucleotide
  Target: ATXN2; (-) strand; PAM type: YTN; PAM sequence: TTG
tatttttagtagagatgggt

SEQ ID NO: 72100 - DNA, 20 bp, Artificial Sequence
  Description of Artificial Sequence: Synthetic oligonucleotide
  Target: ATXN2; (-) strand; PAM type: YTN; PAM sequence: TTT
gtatttttagtagagatggg

SEQ ID NO: 72101 - DNA, 20 bp, Artificial Sequence
  Description of Artificial Sequence: Synthetic oligonucleotide
  Target: ATXN2; (-) strand; PAM type: YTN; PAM sequence: TTT
tgtatttttagtagagatgg

SEQ ID NO: 72102 - DNA, 20 bp, Artificial Sequence
  Description of Artificial Sequence: Synthetic oligonucleotide
  Target: ATXN2; (-) strand; PAM type: YTN; PAM sequence: CTT
ttgtatttttagtagagatg

SEQ ID NO: 72103 - DNA, 20 bp, Artificial Sequence
  Description of Artificial Sequence: Synthetic oligonucleotide
  Target: ATXN2; (-) strand; PAM type: YTN; PAM sequence: CTA
acttttgtatttttagtaga

SEQ ID NO: 72104 - DNA, 20 bp, Artificial Sequence
  Description of Artificial Sequence: Synthetic oligonucleotide
  Target: ATXN2; (-) strand; PAM type: YTN; PAM sequence: CTG
ctaacttttgtatttttagt

SEQ ID NO: 72105 - DNA, 20 bp, Artificial Sequence
  Description of Artificial Sequence: Synthetic oligonucleotide
  Target: ATXN2; (-) strand; PAM type: YTN; PAM sequence: CTG
agacgacaggcgcgcgccac

SEQ ID NO: 72106 - DNA, 20 bp, Artificial Sequence
  Description of Artificial Sequence: Synthetic oligonucleotide
  Target: ATXN2; (-) strand; PAM type: YTN; PAM sequence: CTC
ccgagaagctgagacgacag

SEQ ID NO: 72107 - DNA, 20 bp, Artificial Sequence
  Description of Artificial Sequence: Synthetic oligonucleotide
  Target: ATXN2; (-) strand; PAM type: YTN; PAM sequence: CTG
agcctcccgagaagctgaga

SEQ ID NO: 72108 - DNA, 20 bp, Artificial Sequence
  Description of Artificial Sequence: Synthetic oligonucleotide
  Target: ATXN2; (-) strand; PAM type: YTN; PAM sequence: CTG
cctgagcctcccgagaagct

SEQ ID NO: 72109 - DNA, 20 bp, Artificial Sequence
  Description of Artificial Sequence: Synthetic oligonucleotide
  Target: ATXN2; (-) strand; PAM type: YTN; PAM sequence: CTC
ctgcctgagcctcccgagaa

SEQ ID NO: 72110 - DNA, 20 bp, Artificial Sequence
  Description of Artificial Sequence: Synthetic oligonucleotide
  Target: ATXN2; (-) strand; PAM type: YTN; PAM sequence: TTC
tcctgcctgagcctcccgag

SEQ ID NO: 72111 - DNA, 20 bp, Artificial Sequence
  Description of Artificial Sequence: Synthetic oligonucleotide
  Target: ATXN2; (-) strand; PAM type: YTN; PAM sequence: TTC
cagtgattctcctgcctgag

SEQ ID NO: 72112 - DNA, 20 bp, Artificial Sequence
  Description of Artificial Sequence: Synthetic oligonucleotide
  Target: ATXN2; (-) strand; PAM type: YTN; PAM sequence: CTC
ccgggttccagtgattctcc

SEQ ID NO: 72113 - DNA, 20 bp, Artificial Sequence
  Description of Artificial Sequence: Synthetic oligonucleotide
  Target: ATXN2; (-) strand; PAM type: YTN; PAM sequence: CTG
cctcccgggttccagtgatt

SEQ ID NO: 72114 - DNA, 20 bp, Artificial Sequence
  Description of Artificial Sequence: Synthetic oligonucleotide
  Target: ATXN2; (-) strand; PAM type: YTN; PAM sequence: CTC
tgcctcccgggttccagtga

SEQ ID NO: 72115 - DNA, 20 bp, Artificial Sequence
  Description of Artificial Sequence: Synthetic oligonucleotide
  Target: ATXN2; (-) strand; PAM type: YTN; PAM sequence: CTC
accacaacctctgcctcccg

SEQ ID NO: 72116 - DNA, 20 bp, Artificial Sequence
  Description of Artificial Sequence: Synthetic oligonucleotide
  Target: ATXN2; (-) strand; PAM type: YTN; PAM sequence: TTG
gctcaccacaacctctgcct

SEQ ID NO: 72117 - DNA, 20 bp, Artificial Sequence
  Description of Artificial Sequence: Synthetic oligonucleotide
  Target: ATXN2; (-) strand; PAM type: YTN; PAM sequence: CTT
ggctcaccacaacctctgcc

SEQ ID NO: 72118 - DNA, 20 bp, Artificial Sequence
  Description of Artificial Sequence: Synthetic oligonucleotide
  Target: ATXN2; (-) strand; PAM type: YTN; PAM sequence: TTG
gagtgcagtggcgcgatctt

SEQ ID NO: 72119 - DNA, 20 bp, Artificial Sequence
  Description of Artificial Sequence: Synthetic oligonucleotide
  Target: ATXN2; (-) strand; PAM type: YTN; PAM sequence: TTG
cccaggttggagtgcagtgg

SEQ ID NO: 72120 - DNA, 20 bp, Artificial Sequence
  Description of Artificial Sequence: Synthetic oligonucleotide
  Target: ATXN2; (-) strand; PAM type: YTN; PAM sequence: CTG
ttgcccaggttggagtgcag

SEQ ID NO: 72121 - DNA, 20 bp, Artificial Sequence
  Description of Artificial Sequence: Synthetic oligonucleotide
  Target: ATXN2; (-) strand; PAM type: YTN; PAM sequence: CTC
tgttgcccaggttggagtgc

SEQ ID NO: 72122 - DNA, 20 bp, Artificial Sequence
  Description of Artificial Sequence: Synthetic oligonucleotide
  Target: ATXN2; (-) strand; PAM type: YTN; PAM sequence: CTC
actctgttgcccaggttgga

SEQ ID NO: 72123 - DNA, 20 bp, Artificial Sequence
  Description of Artificial Sequence: Synthetic oligonucleotide
  Target: ATXN2; (-) strand; PAM type: YTN; PAM sequence: TTG
gagtctcactctgttgccca

SEQ ID NO: 72124 - DNA, 20 bp, Artificial Sequence
  Description of Artificial Sequence: Synthetic oligonucleotide
  Target: ATXN2; (-) strand; PAM type: YTN; PAM sequence: TTG
agttggagtctcactctgtt

SEQ ID NO: 72125 - DNA, 20 bp, Artificial Sequence
  Description of Artificial Sequence: Synthetic oligonucleotide
  Target: ATXN2; (-) strand; PAM type: YTN; PAM sequence: TTT
gagttggagtctcactctgt

SEQ ID NO: 72126 - DNA, 20 bp, Artificial Sequence
  Description of Artificial Sequence: Synthetic oligonucleotide
  Target: ATXN2; (-) strand; PAM type: YTN; PAM sequence: TTT
tgagttggagtctcactctg

SEQ ID NO: 72127 - DNA, 20 bp, Artificial Sequence
  Description of Artificial Sequence: Synthetic oligonucleotide
  Target: ATXN2; (-) strand; PAM type: YTN; PAM sequence: TTT
ttgagttggagtctcactct

SEQ ID NO: 72128 - DNA, 20 bp, Artificial Sequence
  Description of Artificial Sequence: Synthetic oligonucleotide
  Target: ATXN2; (-) strand; PAM type: YTN; PAM sequence: TTG
tttttgagttggagtctcac

SEQ ID NO: 72129 - DNA, 20 bp, Artificial Sequence
  Description of Artificial Sequence: Synthetic oligonucleotide
  Target: ATXN2; (-) strand; PAM type: YTN; PAM sequence: TTT
gtttttgagttggagtctca

SEQ ID NO: 72130 - DNA, 20 bp, Artificial Sequence
  Description of Artificial Sequence: Synthetic oligonucleotide
  Target: ATXN2; (-) strand; PAM type: YTN; PAM sequence: TTG
tttgtttttgagttggagtc

SEQ ID NO: 72131 - DNA, 20 bp, Artificial Sequence
  Description of Artificial Sequence: Synthetic oligonucleotide
  Target: ATXN2; (-) strand; PAM type: YTN; PAM sequence: TTT
gtttgtttttgagttggagt

SEQ ID NO: 72132 - DNA, 20 bp, Artificial Sequence
  Description of Artificial Sequence: Synthetic oligonucleotide
  Target: ATXN2; (-) strand; PAM type: YTN; PAM sequence: TTT
tgtttgtttttgagttggag

SEQ ID NO: 72133 - DNA, 20 bp, Artificial Sequence
  Description of Artificial Sequence: Synthetic oligonucleotide
  Target: ATXN2; (-) strand; PAM type: YTN; PAM sequence: TTT
ttgtttgtttttgagttgga

SEQ ID NO: 72134 - DNA, 20 bp, Artificial Sequence
  Description of Artificial Sequence: Synthetic oligonucleotide
  Target: ATXN2; (-) strand; PAM type: YTN; PAM sequence: TTT
tttgtttgtttttgagttgg

SEQ ID NO: 72135 - DNA, 20 bp, Artificial Sequence
  Description of Artificial Sequence: Synthetic oligonucleotide
  Target: ATXN2; (-) strand; PAM type: YTN; PAM sequence: TTT
ttttgtttgtttttgagttg

SEQ ID NO: 72136 - DNA, 20 bp, Artificial Sequence
  Description of Artificial Sequence: Synthetic oligonucleotide
  Target: ATXN2; (-) strand; PAM type: YTN; PAM sequence: CTT
tttttgtttgtttttgagtt

SEQ ID NO: 72137 - DNA, 20 bp, Artificial Sequence
  Description of Artificial Sequence: Synthetic oligonucleotide
  Target: ATXN2; (-) strand; PAM type: YTN; PAM sequence: TTC
tttttttgtttgtttttgag

SEQ ID NO: 72138 - DNA, 20 bp, Artificial Sequence
  Description of Artificial Sequence: Synthetic oligonucleotide
  Target: ATXN2; (-) strand; PAM type: YTN; PAM sequence: CTT
ctttttttgtttgtttttga

SEQ ID NO: 72139 - DNA, 20 bp, Artificial Sequence
  Description of Artificial Sequence: Synthetic oligonucleotide
  Target: ATXN2; (-) strand; PAM type: YTN; PAM sequence: TTG
tgccttctttttttgtttgt

SEQ ID NO: 72140 - DNA, 20 bp, Artificial Sequence
  Description of Artificial Sequence: Synthetic oligonucleotide
  Target: ATXN2; (-) strand; PAM type: YTN; PAM sequence: TTT
gtgccttctttttttgtttg

SEQ ID NO: 72141 - DNA, 20 bp, Artificial Sequence
  Description of Artificial Sequence: Synthetic oligonucleotide
  Target: ATXN2; (-) strand; PAM type: YTN; PAM sequence: CTT
tgtgccttctttttttgttt

SEQ ID NO: 72142 - DNA, 20 bp, Artificial Sequence
  Description of Artificial Sequence: Synthetic oligonucleotide
  Target: ATXN2; (-) strand; PAM type: YTN; PAM sequence: TTA
gacatcaccaactttgtgcc

SEQ ID NO: 72143 - DNA, 20 bp, Artificial Sequence
  Description of Artificial Sequence: Synthetic oligonucleotide
  Target: ATXN2; (-) strand; PAM type: YTN; PAM sequence: CTG
tgtgttagacatcaccaact

SEQ ID NO: 72144 - DNA, 20 bp, Artificial Sequence
  Description of Artificial Sequence: Synthetic oligonucleotide
  Target: ATXN2; (-) strand; PAM type: YTN; PAM sequence: TTC
tgtgtgttagacatcaccaa

SEQ ID NO: 72145 - DNA, 20 bp, Artificial Sequence
  Description of Artificial Sequence: Synthetic oligonucleotide
  Target: ATXN2; (-) strand; PAM type: YTN; PAM sequence: CTG
gcatgttctgtgtgttagac

SEQ ID NO: 72146 - DNA, 20 bp, Artificial Sequence
  Description of Artificial Sequence: Synthetic oligonucleotide
  Target: ATXN2; (-) strand; PAM type: YTN; PAM sequence: CTA
agctggcatgttctgtgtgt

SEQ ID NO: 72147 - DNA, 20 bp, Artificial Sequence
  Description of Artificial Sequence: Synthetic oligonucleotide
  Target: ATXN2; (-) strand; PAM type: YTN; PAM sequence: CTA
ctaagctggcatgttctgtg

SEQ ID NO: 72148 - DNA, 20 bp, Artificial Sequence
  Description of Artificial Sequence: Synthetic oligonucleotide
  Target: ATXN2; (-) strand; PAM type: YTN; PAM sequence: TTG
acctactaagctggcatgtt

SEQ ID NO: 72149 - DNA, 20 bp, Artificial Sequence
  Description of Artificial Sequence: Synthetic oligonucleotide
  Target: ATXN2; (-) strand; PAM type: YTN; PAM sequence: TTA
ttgacctactaagctggcat

SEQ ID NO: 72150 - DNA, 20 bp, Artificial Sequence
  Description of Artificial Sequence: Synthetic oligonucleotide
  Target: ATXN2; (-) strand; PAM type: YTN; PAM sequence: CTT
attgacctactaagctggca

SEQ ID NO: 72151 - DNA, 20 bp, Artificial Sequence
  Description of Artificial Sequence: Synthetic oligonucleotide
  Target: ATXN2; (-) strand; PAM type: YTN; PAM sequence: CTA
cttattgacctactaagctg

SEQ ID NO: 72152 - DNA, 20 bp, Artificial Sequence
  Description of Artificial Sequence: Synthetic oligonucleotide
  Target: ATXN2; (-) strand; PAM type: YTN; PAM sequence: TTA
atctacttattgacctacta

SEQ ID NO: 72153 - DNA, 20 bp, Artificial Sequence
  Description of Artificial Sequence: Synthetic oligonucleotide
  Target: ATXN2; (-) strand; PAM type: YTN; PAM sequence: TTC
ccaatgttaatctacttatt

SEQ ID NO: 72154 - DNA, 20 bp, Artificial Sequence
  Description of Artificial Sequence: Synthetic oligonucleotide
  Target: ATXN2; (-) strand; PAM type: YTN; PAM sequence: TTT
cccaatgttaatctacttat

SEQ ID NO: 72155 - DNA, 20 bp, Artificial Sequence
  Description of Artificial Sequence: Synthetic oligonucleotide
  Target: ATXN2; (-) strand; PAM type: YTN; PAM sequence: CTA
tttcccaatgttaatctact

SEQ ID NO: 72156 - DNA, 20 bp, Artificial Sequence
  Description of Artificial Sequence: Synthetic oligonucleotide
  Target: ATXN2; (-) strand; PAM type: YTN; PAM sequence: TTA
caggcgtgagccaccgcgcc

SEQ ID NO: 72157 - DNA, 20 bp, Artificial Sequence
  Description of Artificial Sequence: Synthetic oligonucleotide
  Target: ATXN2; (-) strand; PAM type: YTN; PAM sequence: CTG
ggattacaggcgtgagccac

SEQ ID NO: 72158 - DNA, 20 bp, Artificial Sequence
  Description of Artificial Sequence: Synthetic oligonucleotide
  Target: ATXN2; (-) strand; PAM type: YTN; PAM sequence: CTC
ccaaagtgctgggattacag

SEQ ID NO: 72159 - DNA, 20 bp, Artificial Sequence
  Description of Artificial Sequence: Synthetic oligonucleotide
  Target: ATXN2; (-) strand; PAM type: YTN; PAM sequence: CTC
ggcctcccaaagtgctggga

SEQ ID NO: 72160 - DNA, 20 bp, Artificial Sequence
  Description of Artificial Sequence: Synthetic oligonucleotide
  Target: ATXN2; (-) strand; PAM type: YTN; PAM sequence: CTC
gtgatccgcccacctcggcc

SEQ ID NO: 72161 - DNA, 20 bp, Artificial Sequence
  Description of Artificial Sequence: Synthetic oligonucleotide
  Target: ATXN2; (-) strand; PAM type: YTN; PAM sequence: CTG
acctcgtgatccgcccacct

SEQ ID NO: 72162 - DNA, 20 bp, Artificial Sequence
  Description of Artificial Sequence: Synthetic oligonucleotide
  Target: ATXN2; (-) strand; PAM type: YTN; PAM sequence: CTC
ctgacctcgtgatccgccca

SEQ ID NO: 72163 - DNA, 20 bp, Artificial Sequence
  Description of Artificial Sequence: Synthetic oligonucleotide
  Target: ATXN2; (-) strand; PAM type: YTN; PAM sequence: CTC
gatctcctgacctcgtgatc

SEQ ID NO: 72164 - DNA, 20 bp, Artificial Sequence
  Description of Artificial Sequence: Synthetic oligonucleotide
  Target: ATXN2; (-) strand; PAM type: YTN; PAM sequence: TTA
gccgggatggtctcgatctc

SEQ ID NO: 72165 - DNA, 20 bp, Artificial Sequence
  Description of Artificial Sequence: Synthetic oligonucleotide
  Target: ATXN2; (-) strand; PAM type: YTN; PAM sequence: TTT
agccgggatggtctcgatct

SEQ ID NO: 72166 - DNA, 20 bp, Artificial Sequence
  Description of Artificial Sequence: Synthetic oligonucleotide
  Target: ATXN2; (-) strand; PAM type: YTN; PAM sequence: TTT
tagccgggatggtctcgatc

SEQ ID NO: 72167 - DNA, 20 bp, Artificial Sequence
  Description of Artificial Sequence: Synthetic oligonucleotide
  Target: ATXN2; (-) strand; PAM type: YTN; PAM sequence: TTC
accgttttagccgggatggt

SEQ ID NO: 72168 - DNA, 20 bp, Artificial Sequence
  Description of Artificial Sequence: Synthetic oligonucleotide
  Target: ATXN2; (-) strand; PAM type: YTN; PAM sequence: TTT
caccgttttagccgggatgg

SEQ ID NO: 72169 - DNA, 20 bp, Artificial Sequence
  Description of Artificial Sequence: Synthetic oligonucleotide
  Target: ATXN2; (-) strand; PAM type: YTN; PAM sequence: TTA
gtagagacggggtttcaccg

SEQ ID NO: 72170 - DNA, 20 bp, Artificial Sequence
  Description of Artificial Sequence: Synthetic oligonucleotide
  Target: ATXN2; (-) strand; PAM type: YTN; PAM sequence: TTT
agtagagacggggtttcacc

SEQ ID NO: 72171 - DNA, 20 bp, Artificial Sequence
  Description of Artificial Sequence: Synthetic oligonucleotide
  Target: ATXN2; (-) strand; PAM type: YTN; PAM sequence: TTT
tagtagagacggggtttcac

SEQ ID NO: 72172 - DNA, 20 bp, Artificial Sequence
  Description of Artificial Sequence: Synthetic oligonucleotide
  Target: ATXN2; (-) strand; PAM type: YTN; PAM sequence: TTT
ttagtagagacggggtttca

SEQ ID NO: 72173 - DNA, 20 bp, Artificial Sequence
  Description of Artificial Sequence: Synthetic oligonucleotide
  Target: ATXN2; (-) strand; PAM type: YTN; PAM sequence: TTG
tatttttagtagagacgggg

SEQ ID NO: 72174 - DNA, 20 bp, Artificial Sequence
  Description of Artificial Sequence: Synthetic oligonucleotide
  Target: ATXN2; (-) strand; PAM type: YTN; PAM sequence: TTT
gtatttttagtagagacggg

SEQ ID NO: 72175 - DNA, 20 bp, Artificial Sequence
  Description of Artificial Sequence: Synthetic oligonucleotide
  Target: ATXN2; (-) strand; PAM type: YTN; PAM sequence: TTT
tgtatttttagtagagacgg

SEQ ID NO: 72176 - DNA, 20 bp, Artificial Sequence
  Description of Artificial Sequence: Synthetic oligonucleotide
  Target: ATXN2; (-) strand; PAM type: YTN; PAM sequence: TTT
ttgtatttttagtagagacg

SEQ ID NO: 72177 - DNA, 20 bp, Artificial Sequence
  Description of Artificial Sequence: Synthetic oligonucleotide
  Target: ATXN2; (-) strand; PAM type: YTN; PAM sequence: TTT
tttgtatttttagtagagac

SEQ ID NO: 72178 - DNA, 20 bp, Artificial Sequence
  Description of Artificial Sequence: Synthetic oligonucleotide
  Target: ATXN2; (-) strand; PAM type: YTN; PAM sequence: CTA
attttttgtatttttagtag

SEQ ID NO: 72179 - DNA, 20 bp, Artificial Sequence
  Description of Artificial Sequence: Synthetic oligonucleotide
  Target: ATXN2; (-) strand; PAM type: YTN; PAM sequence: CTA
cgcccggctaattttttgta

SEQ ID NO: 72180 - DNA, 20 bp, Artificial Sequence
  Description of Artificial Sequence: Synthetic oligonucleotide
  Target: ATXN2; (-) strand; PAM type: YTN; PAM sequence: CTA
caggcgcccgccactacgcc

SEQ ID NO: 72181 - DNA, 20 bp, Artificial Sequence
  Description of Artificial Sequence: Synthetic oligonucleotide
  Target: ATXN2; (-) strand; PAM type: YTN; PAM sequence: CTG
ggactacaggcgcccgccac

SEQ ID NO: 72182 - DNA, 20 bp, Artificial Sequence
  Description of Artificial Sequence: Synthetic oligonucleotide
  Target: ATXN2; (-) strand; PAM type: YTN; PAM sequence: CTC
ccaagtagctgggactacag

SEQ ID NO: 72183 - DNA, 20 bp, Artificial Sequence
  Description of Artificial Sequence: Synthetic oligonucleotide
  Target: ATXN2; (-) strand; PAM type: YTN; PAM sequence: CTC
agcctcccaagtagctggga

SEQ ID NO: 72184 - DNA, 20 bp, Artificial Sequence
  Description of Artificial Sequence: Synthetic oligonucleotide
  Target: ATXN2; (-) strand; PAM type: YTN; PAM sequence: CTG
cctcagcctcccaagtagct

SEQ ID NO: 72185 - DNA, 20 bp, Artificial Sequence
  Description of Artificial Sequence: Synthetic oligonucleotide
  Target: ATXN2; (-) strand; PAM type: YTN; PAM sequence: CTC
ctgcctcagcctcccaagta

SEQ ID NO: 72186 - DNA, 20 bp, Artificial Sequence
  Description of Artificial Sequence: Synthetic oligonucleotide
  Target: ATXN2; (-) strand; PAM type: YTN; PAM sequence: TTC
tcctgcctcagcctcccaag

SEQ ID NO: 72187 - DNA, 20 bp, Artificial Sequence
  Description of Artificial Sequence: Synthetic oligonucleotide
  Target: ATXN2; (-) strand; PAM type: YTN; PAM sequence: TTC
acgccattctcctgcctcag

SEQ ID NO: 72188 - DNA, 20 bp, Artificial Sequence
  Description of Artificial Sequence: Synthetic oligonucleotide
  Target: ATXN2; (-) strand; PAM type: YTN; PAM sequence: CTG
ggttcacgccattctcctgc

SEQ ID NO: 72189 - DNA, 20 bp, Artificial Sequence
  Description of Artificial Sequence: Synthetic oligonucleotide
  Target: ATXN2; (-) strand; PAM type: YTN; PAM sequence: CTC
ctgggttcacgccattctcc

SEQ ID NO: 72190 - DNA, 20 bp, Artificial Sequence
  Description of Artificial Sequence: Synthetic oligonucleotide
  Target: ATXN2; (-) strand; PAM type: YTN; PAM sequence: CTC
cgcctcctgggttcacgcca

SEQ ID NO: 72191 - DNA, 20 bp, Artificial Sequence
  Description of Artificial Sequence: Synthetic oligonucleotide
  Target: ATXN2; (-) strand; PAM type: YTN; PAM sequence: CTG
caagctccgcctcctgggtt

SEQ ID NO: 72192 - DNA, 20 bp, Artificial Sequence
  Description of Artificial Sequence: Synthetic oligonucleotide
  Target: ATXN2; (-) strand; PAM type: YTN; PAM sequence: CTC
actgcaagctccgcctcctg

SEQ ID NO: 72193 - DNA, 20 bp, Artificial Sequence
  Description of Artificial Sequence: Synthetic oligonucleotide
  Target: ATXN2; (-) strand; PAM type: YTN; PAM sequence: CTC
ggctcactgcaagctccgcc

SEQ ID NO: 72194 - DNA, 20 bp, Artificial Sequence
  Description of Artificial Sequence: Synthetic oligonucleotide
  Target: ATXN2; (-) strand; PAM type: YTN; PAM sequence: CTG
gagtgcagtggcgggatctc

SEQ ID NO: 72195 - DNA, 20 bp, Artificial Sequence
  Description of Artificial Sequence: Synthetic oligonucleotide
  Target: ATXN2; (-) strand; PAM type: YTN; PAM sequence: CTG
tcgcccaggctggagtgcag

SEQ ID NO: 72196 - DNA, 20 bp, Artificial Sequence
  Description of Artificial Sequence: Synthetic oligonucleotide
  Target: ATXN2; (-) strand; PAM type: YTN; PAM sequence: CTC
tgtcgcccaggctggagtgc

SEQ ID NO: 72197 - DNA, 20 bp, Artificial Sequence
  Description of Artificial Sequence: Synthetic oligonucleotide
  Target: ATXN2; (-) strand; PAM type: YTN; PAM sequence: CTC
gctctgtcgcccaggctgga

SEQ ID NO: 72198 - DNA, 20 bp, Artificial Sequence
  Description of Artificial Sequence: Synthetic oligonucleotide
  Target: ATXN2; (-) strand; PAM type: YTN; PAM sequence: TTG
agacggagtctcgctctgtc

SEQ ID NO: 72199 - DNA, 20 bp, Artificial Sequence
  Description of Artificial Sequence: Synthetic oligonucleotide
  Target: ATXN2; (-) strand; PAM type: YTN; PAM sequence: TTT
gagacggagtctcgctctgt

SEQ ID NO: 72200 - DNA, 20 bp, Artificial Sequence
  Description of Artificial Sequence: Synthetic oligonucleotide
  Target: ATXN2; (-) strand; PAM type: YTN; PAM sequence: TTT
tgagacggagtctcgctctg

SEQ ID NO: 72201 - DNA, 20 bp, Artificial Sequence
  Description of Artificial Sequence: Synthetic oligonucleotide
  Target: ATXN2; (-) strand; PAM type: YTN; PAM sequence: TTT
ttgagacggagtctcgctct

SEQ ID NO: 72202 - DNA, 20 bp, Artificial Sequence
  Description of Artificial Sequence: Synthetic oligonucleotide
  Target: ATXN2; (-) strand; PAM type: YTN; PAM sequence: TTT
tttgagacggagtctcgctc

SEQ ID NO: 72203 - DNA, 20 bp, Artificial Sequence
  Description of Artificial Sequence: Synthetic oligonucleotide
  Target: ATXN2; (-) strand; PAM type: YTN; PAM sequence: TTT
ttttgagacggagtctcgct

SEQ ID NO: 72204 - DNA, 20 bp, Artificial Sequence
  Description of Artificial Sequence: Synthetic oligonucleotide
  Target: ATXN2; (-) strand; PAM type: YTN; PAM sequence: TTT
tttttgagacggagtctcgc

SEQ ID NO: 72205 - DNA, 20 bp, Artificial Sequence
  Description of Artificial Sequence: Synthetic oligonucleotide
  Target: ATXN2; (-) strand; PAM type: YTN; PAM sequence: TTT
ttttttgagacggagtctcg

SEQ ID NO: 72206 - DNA, 20 bp, Artificial Sequence
  Description of Artificial Sequence: Synthetic oligonucleotide
  Target: ATXN2; (-) strand; PAM type: YTN; PAM sequence: TTT
tttttttgagacggagtctc

SEQ ID NO: 72207 - DNA, 20 bp, Artificial Sequence
  Description of Artificial Sequence: Synthetic oligonucleotide
  Target: ATXN2; (-) strand; PAM type: YTN; PAM sequence: TTT
ttttttttgagacggagtct

SEQ ID NO: 72208 - DNA, 20 bp, Artificial Sequence
  Description of Artificial Sequence: Synthetic oligonucleotide
  Target: ATXN2; (-) strand; PAM type: YTN; PAM sequence: TTT
tttttttttgagacggagtc

SEQ ID NO: 72209 - DNA, 20 bp, Artificial Sequence
  Description of Artificial Sequence: Synthetic oligonucleotide
  Target: ATXN2; (-) strand; PAM type: YTN; PAM sequence: TTT
ttttttttttgagacggagt

SEQ ID NO: 72210 - DNA, 20 bp, Artificial Sequence
  Description of Artificial Sequence: Synthetic oligonucleotide
  Target: ATXN2; (-) strand; PAM type: YTN; PAM sequence: TTT
tttttttttttgagacggag

SEQ ID NO: 72211 - DNA, 20 bp, Artificial Sequence
  Description of Artificial Sequence: Synthetic oligonucleotide
  Target: ATXN2; (-) strand; PAM type: YTN; PAM sequence: TTT
ttttttttttttgagacgga

SEQ ID NO: 72212 - DNA, 20 bp, Artificial Sequence
  Description of Artificial Sequence: Synthetic oligonucleotide
  Target: ATXN2; (-) strand; PAM type: YTN; PAM sequence: TTT
tttttttttttttgagacgg

SEQ ID NO: 72213 - DNA, 20 bp, Artificial Sequence
  Description of Artificial Sequence: Synthetic oligonucleotide
  Target: ATXN2; (-) strand; PAM type: YTN; PAM sequence: TTT
ttttttttttttttgagacg

SEQ ID NO: 72214 - DNA, 20 bp, Artificial Sequence
  Description of Artificial Sequence: Synthetic oligonucleotide
  Target: ATXN2; (-) strand; PAM type: YTN; PAM sequence: TTC
ccaatgtttttttttttttt

SEQ ID NO: 72215 - DNA, 20 bp, Artificial Sequence
  Description of Artificial Sequence: Synthetic oligonucleotide
  Target: ATXN2; (-) strand; PAM type: YTN; PAM sequence: TTT
cccaatgttttttttttttt

SEQ ID NO: 72216 - DNA, 20 bp, Artificial Sequence
  Description of Artificial Sequence: Synthetic oligonucleotide
  Target: ATXN2; (-) strand; PAM type: YTN; PAM sequence: TTA
tttcccaatgtttttttttt

SEQ ID NO: 72217 - DNA, 20 bp, Artificial Sequence
  Description of Artificial Sequence: Synthetic oligonucleotide
  Target: ATXN2; (-) strand; PAM type: YTN; PAM sequence: CTC
attatttcccaatgtttttt

SEQ ID NO: 72218 - DNA, 20 bp, Artificial Sequence
  Description of Artificial Sequence: Synthetic oligonucleotide
  Target: ATXN2; (-) strand; PAM type: YTN; PAM sequence: CTC
tcattatttcccaatgtttt

SEQ ID NO: 72219 - DNA, 20 bp, Artificial Sequence
  Description of Artificial Sequence: Synthetic oligonucleotide
  Target: ATXN2; (-) strand; PAM type: YTN; PAM sequence: TTA
tctctcattatttcccaatg

SEQ ID NO: 72220 - DNA, 20 bp, Artificial Sequence
  Description of Artificial Sequence: Synthetic oligonucleotide
  Target: ATXN2; (-) strand; PAM type: YTN; PAM sequence: CTT
atctctcattatttcccaat

SEQ ID NO: 72221 - DNA, 20 bp, Artificial Sequence
  Description of Artificial Sequence: Synthetic oligonucleotide
  Target: ATXN2; (-) strand; PAM type: YTN; PAM sequence: TTC
aaccttatctctcattattt

SEQ ID NO: 72222 - DNA, 20 bp, Artificial Sequence
  Description of Artificial Sequence: Synthetic oligonucleotide
  Target: ATXN2; (-) strand; PAM type: YTN; PAM sequence: TTT
caaccttatctctcattatt

SEQ ID NO: 72223 - DNA, 20 bp, Artificial Sequence
  Description of Artificial Sequence: Synthetic oligonucleotide
  Target: ATXN2; (-) strand; PAM type: YTN; PAM sequence: TTT
tcaaccttatctctcattat

SEQ ID NO: 72224 - DNA, 20 bp, Artificial Sequence
  Description of Artificial Sequence: Synthetic oligonucleotide
  Target: ATXN2; (-) strand; PAM type: YTN; PAM sequence: TTT
ttcaaccttatctctcatta

SEQ ID NO: 72225 - DNA, 20 bp, Artificial Sequence
  Description of Artificial Sequence: Synthetic oligonucleotide
  Target: ATXN2; (-) strand; PAM type: YTN; PAM sequence: CTT
tttcaaccttatctctcatt

SEQ ID NO: 72226 - DNA, 20 bp, Artificial Sequence
  Description of Artificial Sequence: Synthetic oligonucleotide
  Target: ATXN2; (-) strand; PAM type: YTN; PAM sequence: CTC
tttttcaaccttatctctca

SEQ ID NO: 72227 - DNA, 20 bp, Artificial Sequence
  Description of Artificial Sequence: Synthetic oligonucleotide
  Target: ATXN2; (-) strand; PAM type: YTN; PAM sequence: TTC
tctttttcaaccttatctct

SEQ ID NO: 72228 - DNA, 20 bp, Artificial Sequence
  Description of Artificial Sequence: Synthetic oligonucleotide
  Target: ATXN2; (-) strand; PAM type: YTN; PAM sequence: CTT
ctctttttcaaccttatctc

SEQ ID NO: 72229 - DNA, 20 bp, Artificial Sequence
  Description of Artificial Sequence: Synthetic oligonucleotide
  Target: ATXN2; (-) strand; PAM type: YTN; PAM sequence: TTC
ccagtggaacttctcttttt

SEQ ID NO: 72230 - DNA, 20 bp, Artificial Sequence
  Description of Artificial Sequence: Synthetic oligonucleotide
  Target: ATXN2; (-) strand; PAM type: YTN; PAM sequence: CTT
cccagtggaacttctctttt

SEQ ID NO: 72231 - DNA, 20 bp, Artificial Sequence
  Description of Artificial Sequence: Synthetic oligonucleotide
  Target: ATXN2; (-) strand; PAM type: YTN; PAM sequence: CTA
tacagggcccttcccagtgg

SEQ ID NO: 72232 - DNA, 20 bp, Artificial Sequence
  Description of Artificial Sequence: Synthetic oligonucleotide
  Target: ATXN2; (-) strand; PAM type: YTN; PAM sequence: TTG
ggatgctatacagggccctt

SEQ ID NO: 72233 - DNA, 20 bp, Artificial Sequence
  Description of Artificial Sequence: Synthetic oligonucleotide
  Target: ATXN2; (-) strand; PAM type: YTN; PAM sequence: TTA
cagaataaagttgggatgct

SEQ ID NO: 72234 - DNA, 20 bp, Artificial Sequence
  Description of Artificial Sequence: Synthetic oligonucleotide
  Target: ATXN2; (-) strand; PAM type: YTN; PAM sequence: TTT
acagaataaagttgggatgc

SEQ ID NO: 72235 - DNA, 20 bp, Artificial Sequence
  Description of Artificial Sequence: Synthetic oligonucleotide
  Target: ATXN2; (-) strand; PAM type: YTN; PAM sequence: TTG
tttacagaataaagttggga

SEQ ID NO: 72236 - DNA, 20 bp, Artificial Sequence
  Description of Artificial Sequence: Synthetic oligonucleotide
  Target: ATXN2; (-) strand; PAM type: YTN; PAM sequence: CTG
ttgtttacagaataaagttg

SEQ ID NO: 72237 - DNA, 20 bp, Artificial Sequence
  Description of Artificial Sequence: Synthetic oligonucleotide
  Target: ATXN2; (-) strand; PAM type: YTN; PAM sequence: TTC
agtggccactgttgtttaca

SEQ ID NO: 72238 - DNA, 20 bp, Artificial Sequence
  Description of Artificial Sequence: Synthetic oligonucleotide
  Target: ATXN2; (-) strand; PAM type: YTN; PAM sequence: CTT
cagtggccactgttgtttac

SEQ ID NO: 72239 - DNA, 20 bp, Artificial Sequence
  Description of Artificial Sequence: Synthetic oligonucleotide
  Target: ATXN2; (-) strand; PAM type: YTN; PAM sequence: CTC
aaaatcttcagtggccactg

SEQ ID NO: 72240 - DNA, 20 bp, Artificial Sequence
  Description of Artificial Sequence: Synthetic oligonucleotide
  Target: ATXN2; (-) strand; PAM type: YTN; PAM sequence: TTG
ctcaaaatcttcagtggcca

SEQ ID NO: 72241 - DNA, 20 bp, Artificial Sequence
  Description of Artificial Sequence: Synthetic oligonucleotide
  Target: ATXN2; (-) strand; PAM type: YTN; PAM sequence: CTT
gctcaaaatcttcagtggcc

SEQ ID NO: 72242 - DNA, 20 bp, Artificial Sequence
  Description of Artificial Sequence: Synthetic oligonucleotide
  Target: ATXN2; (-) strand; PAM type: YTN; PAM sequence: CTC
atcccttgctcaaaatcttc

SEQ ID NO: 72243 - DNA, 20 bp, Artificial Sequence
  Description of Artificial Sequence: Synthetic oligonucleotide
  Target: ATXN2; (-) strand; PAM type: YTN; PAM sequence: TTA
gatcatctcatcccttgctc

SEQ ID NO: 72244 - DNA, 20 bp, Artificial Sequence
  Description of Artificial Sequence: Synthetic oligonucleotide
  Target: ATXN2; (-) strand; PAM type: YTN; PAM sequence: TTA
ttagatcatctcatcccttg

SEQ ID NO: 72245 - DNA, 20 bp, Artificial Sequence
  Description of Artificial Sequence: Synthetic oligonucleotide
  Target: ATXN2; (-) strand; PAM type: YTN; PAM sequence: TTT
attagatcatctcatccctt

SEQ ID NO: 72246 - DNA, 20 bp, Artificial Sequence
  Description of Artificial Sequence: Synthetic oligonucleotide
  Target: ATXN2; (-) strand; PAM type: YTN; PAM sequence: TTT
tattagatcatctcatccct

SEQ ID NO: 72247 - DNA, 20 bp, Artificial Sequence
  Description of Artificial Sequence: Synthetic oligonucleotide
  Target: ATXN2; (-) strand; PAM type: YTN; PAM sequence: CTT
ttattagatcatctcatccc

SEQ ID NO: 72248 - DNA, 20 bp, Artificial Sequence
  Description of Artificial Sequence: Synthetic oligonucleotide
  Target: ATXN2; (-) strand; PAM type: YTN; PAM sequence: TTG
cttttattagatcatctcat

SEQ ID NO: 72249 - DNA, 20 bp, Artificial Sequence
  Description of Artificial Sequence: Synthetic oligonucleotide
  Target: ATXN2; (-) strand; PAM type: YTN; PAM sequence: TTA
gacattgcttttattagatc

SEQ ID NO: 72250 - DNA, 20 bp, Artificial Sequence
  Description of Artificial Sequence: Synthetic oligonucleotide
  Target: ATXN2; (-) strand; PAM type: YTN; PAM sequence: CTT
agacattgcttttattagat

SEQ ID NO: 72251 - DNA, 20 bp, Artificial Sequence
  Description of Artificial Sequence: Synthetic oligonucleotide
  Target: ATXN2; (-) strand; PAM type: YTN; PAM sequence: TTC
ttagacattgcttttattag

SEQ ID NO: 72252 - DNA, 20 bp, Artificial Sequence
  Description of Artificial Sequence: Synthetic oligonucleotide
  Target: ATXN2; (-) strand; PAM type: YTN; PAM sequence: TTG
acataaagaaattcttagac

SEQ ID NO: 72253 - DNA, 20 bp, Artificial Sequence
  Description of Artificial Sequence: Synthetic oligonucleotide
  Target: ATXN2; (-) strand; PAM type: YTN; PAM sequence: TTG
ggcattgacataaagaaatt

SEQ ID NO: 72254 - DNA, 20 bp, Artificial Sequence
  Description of Artificial Sequence: Synthetic oligonucleotide
  Target: ATXN2; (-) strand; PAM type: YTN; PAM sequence: CTT
gggcattgacataaagaaat

SEQ ID NO: 72255 - DNA, 20 bp, Artificial Sequence
  Description of Artificial Sequence: Synthetic oligonucleotide
  Target: ATXN2; (-) strand; PAM type: YTN; PAM sequence: TTC
agtcaatcttgggcattgac

SEQ ID NO: 72256 - DNA, 20 bp, Artificial Sequence
  Description of Artificial Sequence: Synthetic oligonucleotide
  Target: ATXN2; (-) strand; PAM type: YTN; PAM sequence: TTT
cagtcaatcttgggcattga

SEQ ID NO: 72257 - DNA, 20 bp, Artificial Sequence
  Description of Artificial Sequence: Synthetic oligonucleotide
  Target: ATXN2; (-) strand; PAM type: YTN; PAM sequence: TTT
tcagtcaatcttgggcattg

SEQ ID NO: 72258 - DNA, 20 bp, Artificial Sequence
  Description of Artificial Sequence: Synthetic oligonucleotide
  Target: ATXN2; (-) strand; PAM type: YTN; PAM sequence: CTC
attttcagtcaatcttgggc

SEQ ID NO: 72259 - DNA, 20 bp, Artificial Sequence
  Description of Artificial Sequence: Synthetic oligonucleotide
  Target: ATXN2; (-) strand; PAM type: YTN; PAM sequence: TTC
tcattttcagtcaatcttgg

SEQ ID NO: 72260 - DNA, 20 bp, Artificial Sequence
  Description of Artificial Sequence: Synthetic oligonucleotide
  Target: ATXN2; (-) strand; PAM type: YTN; PAM sequence: TTT
ctcattttcagtcaatcttg

SEQ ID NO: 72261 - DNA, 20 bp, Artificial Sequence
  Description of Artificial Sequence: Synthetic oligonucleotide
  Target: ATXN2; (-) strand; PAM type: YTN; PAM sequence: TTC
cagatttctcattttcagtc

SEQ ID NO: 72262 - DNA, 20 bp, Artificial Sequence
  Description of Artificial Sequence: Synthetic oligonucleotide
  Target: ATXN2; (-) strand; PAM type: YTN; PAM sequence: CTT
ccagatttctcattttcagt

SEQ ID NO: 72263 - DNA, 20 bp, Artificial Sequence
  Description of Artificial Sequence: Synthetic oligonucleotide
  Target: ATXN2; (-) strand; PAM type: YTN; PAM sequence: TTG
tcttccagatttctcatttt

SEQ ID NO: 72264 - DNA, 20 bp, Artificial Sequence
  Description of Artificial Sequence: Synthetic oligonucleotide
  Target: ATXN2; (-) strand; PAM type: YTN; PAM sequence: CTT
gtcttccagatttctcattt

SEQ ID NO: 72265 - DNA, 20 bp, Artificial Sequence
  Description of Artificial Sequence: Synthetic oligonucleotide
  Target: ATXN2; (-) strand; PAM type: YTN; PAM sequence: CTA
aacaacttgtcttccagatt

SEQ ID NO: 72266 - DNA, 20 bp, Artificial Sequence
  Description of Artificial Sequence: Synthetic oligonucleotide
  Target: ATXN2; (-) strand; PAM type: YTN; PAM sequence: CTC
ctaaacaacttgtcttccag

SEQ ID NO: 72267 - DNA, 20 bp, Artificial Sequence
  Description of Artificial Sequence: Synthetic oligonucleotide
  Target: ATXN2; (-) strand; PAM type: YTN; PAM sequence: TTA
taatctcctaaacaacttgt

SEQ ID NO: 72268 - DNA, 20 bp, Artificial Sequence
  Description of Artificial Sequence: Synthetic oligonucleotide
  Target: ATXN2; (-) strand; PAM type: YTN; PAM sequence: TTG
ttataatctcctaaacaact

SEQ ID NO: 72269 - DNA, 20 bp, Artificial Sequence
  Description of Artificial Sequence: Synthetic oligonucleotide
  Target: ATXN2; (-) strand; PAM type: YTN; PAM sequence: TTC
caccaaggcaaatattgtta

SEQ ID NO: 72270 - DNA, 20 bp, Artificial Sequence
  Description of Artificial Sequence: Synthetic oligonucleotide
  Target: ATXN2; (-) strand; PAM type: YTN; PAM sequence: CTT
ccaccaaggcaaatattgtt

SEQ ID NO: 72271 - DNA, 20 bp, Artificial Sequence
  Description of Artificial Sequence: Synthetic oligonucleotide
  Target: ATXN2; (-) strand; PAM type: YTN; PAM sequence: TTC
ttccaccaaggcaaatattg

SEQ ID NO: 72272 - DNA, 20 bp, Artificial Sequence
  Description of Artificial Sequence: Synthetic oligonucleotide
  Target: ATXN2; (-) strand; PAM type: YTN; PAM sequence: TTT
cttccaccaaggcaaatatt

SEQ ID NO: 72273 - DNA, 20 bp, Artificial Sequence
  Description of Artificial Sequence: Synthetic oligonucleotide
  Target: ATXN2; (-) strand; PAM type: YTN; PAM sequence: TTT
tcttccaccaaggcaaatat

SEQ ID NO: 72274 - DNA, 20 bp, Artificial Sequence
  Description of Artificial Sequence: Synthetic oligonucleotide
  Target: ATXN2; (-) strand; PAM type: YTN; PAM sequence: TTG
ttttcttccaccaaggcaaa

SEQ ID NO: 72275 - DNA, 20 bp, Artificial Sequence
  Description of Artificial Sequence: Synthetic oligonucleotide
  Target: ATXN2; (-) strand; PAM type: YTN; PAM sequence: CTT
gttttcttccaccaaggcaa

SEQ ID NO: 72276 - DNA, 20 bp, Artificial Sequence
  Description of Artificial Sequence: Synthetic oligonucleotide
  Target: ATXN2; (-) strand; PAM type: YTN; PAM sequence: TTA
acagtgaaaatagaaaataa

SEQ ID NO: 72277 - DNA, 20 bp, Artificial Sequence
  Description of Artificial Sequence: Synthetic oligonucleotide
  Target: ATXN2; (-) strand; PAM type: YTN; PAM sequence: TTT
aacagtgaaaatagaaaata

SEQ ID NO: 72278 - DNA, 20 bp, Artificial Sequence
  Description of Artificial Sequence: Synthetic oligonucleotide
  Target: ATXN2; (-) strand; PAM type: YTN; PAM sequence: TTC
aaaacgtgtgtaccaaaaga

SEQ ID NO: 72279 - DNA, 20 bp, Artificial Sequence
  Description of Artificial Sequence: Synthetic oligonucleotide
  Target: ATXN2; (-) strand; PAM type: YTN; PAM sequence: TTA
tatatgcacacatggtaaaa

SEQ ID NO: 72280 - DNA, 20 bp, Artificial Sequence
  Description of Artificial Sequence: Synthetic oligonucleotide
  Target: ATXN2; (-) strand; PAM type: YTN; PAM sequence: TTA
aaaattatatatgcacacat

SEQ ID NO: 72281 - DNA, 20 bp, Artificial Sequence
  Description of Artificial Sequence: Synthetic oligonucleotide
  Target: ATXN2; (-) strand; PAM type: YTN; PAM sequence: TTT
aaaaattatatatgcacaca

SEQ ID NO: 72282 - DNA, 20 bp, Artificial Sequence
  Description of Artificial Sequence: Synthetic oligonucleotide
  Target: ATXN2; (-) strand; PAM type: YTN; PAM sequence: CTT
taaaaattatatatgcacac

SEQ ID NO: 72283 - DNA, 20 bp, Artificial Sequence
  Description of Artificial Sequence: Synthetic oligonucleotide
  Target: ATXN2; (-) strand; PAM type: YTN; PAM sequence: TTA
ctttaaaaattatatatgca

SEQ ID NO: 72284 - DNA, 20 bp, Artificial Sequence
  Description of Artificial Sequence: Synthetic oligonucleotide
  Target: ATXN2; (-) strand; PAM type: YTN; PAM sequence: TTT
actttaaaaattatatatgc

SEQ ID NO: 72285 - DNA, 20 bp, Artificial Sequence
  Description of Artificial Sequence: Synthetic oligonucleotide
  Target: ATXN2; (-) strand; PAM type: YTN; PAM sequence: CTT
tactttaaaaattatatatg

SEQ ID NO: 72286 - DNA, 20 bp, Artificial Sequence
  Description of Artificial Sequence: Synthetic oligonucleotide
  Target: ATXN2; (-) strand; PAM type: YTN; PAM sequence: TTA
caactttactttaaaaatta

SEQ ID NO: 72287 - DNA, 20 bp, Artificial Sequence
  Description of Artificial Sequence: Synthetic oligonucleotide
  Target: ATXN2; (-) strand; PAM type: YTN; PAM sequence: TTT
acaactttactttaaaaatt

SEQ ID NO: 72288 - DNA, 20 bp, Artificial Sequence
  Description of Artificial Sequence: Synthetic oligonucleotide
  Target: ATXN2; (-) strand; PAM type: YTN; PAM sequence: CTG
tttacaactttactttaaaa

SEQ ID NO: 72289 - DNA, 20 bp, Artificial Sequence
  Description of Artificial Sequence: Synthetic oligonucleotide
  Target: ATXN2; (-) strand; PAM type: YTN; PAM sequence: TTC
tgtttacaactttactttaa

SEQ ID NO: 72290 - DNA, 20 bp, Artificial Sequence
  Description of Artificial Sequence: Synthetic oligonucleotide
  Target: ATXN2; (-) strand; PAM type: YTN; PAM sequence: TTT
ctgtttacaactttacttta

SEQ ID NO: 72291 - DNA, 20 bp, Artificial Sequence
  Description of Artificial Sequence: Synthetic oligonucleotide
  Target: ATXN2; (-) strand; PAM type: YTN; PAM sequence: TTT
tctgtttacaactttacttt

SEQ ID NO: 72292 - DNA, 20 bp, Artificial Sequence
  Description of Artificial Sequence: Synthetic oligonucleotide
  Target: ATXN2; (-) strand; PAM type: YTN; PAM sequence: TTT
ttctgtttacaactttactt

SEQ ID NO: 72293 - DNA, 20 bp, Artificial Sequence
  Description of Artificial Sequence: Synthetic oligonucleotide
  Target: ATXN2; (-) strand; PAM type: YTN; PAM sequence: TTT
tttctgtttacaactttact

SEQ ID NO: 72294 - DNA, 20 bp, Artificial Sequence
  Description of Artificial Sequence: Synthetic oligonucleotide
  Target: ATXN2; (-) strand; PAM type: YTN; PAM sequence: TTT
ttttctgtttacaactttac

SEQ ID NO: 72295 - DNA, 20 bp, Artificial Sequence
  Description of Artificial Sequence: Synthetic oligonucleotide
  Target: ATXN2; (-) strand; PAM type: YTN; PAM sequence: TTT
tttttctgtttacaacttta

SEQ ID NO: 72296 - DNA, 20 bp, Artificial Sequence
  Description of Artificial Sequence: Synthetic oligonucleotide
  Target: ATXN2; (-) strand; PAM type: YTN; PAM sequence: TTT
ttttttctgtttacaacttt

SEQ ID NO: 72297 - DNA, 20 bp, Artificial Sequence
  Description of Artificial Sequence: Synthetic oligonucleotide
  Target: ATXN2; (-) strand; PAM type: YTN; PAM sequence: TTT
tttttttctgtttacaactt

SEQ ID NO: 72298 - DNA, 20 bp, Artificial Sequence
  Description of Artificial Sequence: Synthetic oligonucleotide
  Target: ATXN2; (-) strand; PAM type: YTN; PAM sequence: CTG
tagattttttttttctgttt

SEQ ID NO: 72299 - DNA, 20 bp, Artificial Sequence
  Description of Artificial Sequence: Synthetic oligonucleotide
  Target: ATXN2; (-) strand; PAM type: YTN; PAM sequence: CTC
actgtagattttttttttct

SEQ ID NO: 72300 - DNA, 20 bp, Artificial Sequence
  Description of Artificial Sequence: Synthetic oligonucleotide
  Target: ATXN2; (-) strand; PAM type: YTN; PAM sequence: CTA
gtgggagagtaagaagtagt

SEQ ID NO: 72301 - DNA, 20 bp, Artificial Sequence
  Description of Artificial Sequence: Synthetic oligonucleotide
  Target: ATXN2; (-) strand; PAM type: YTN; PAM sequence: TTA
tacccatcctagtgggagag

SEQ ID NO: 72302 - DNA, 20 bp, Artificial Sequence
  Description of Artificial Sequence: Synthetic oligonucleotide
  Target: ATXN2; (-) strand; PAM type: YTN; PAM sequence: TTG
attatacccatcctagtggg

SEQ ID NO: 72303 - DNA, 20 bp, Artificial Sequence
  Description of Artificial Sequence: Synthetic oligonucleotide
  Target: ATXN2; (-) strand; PAM type: YTN; PAM sequence: TTT
gattatacccatcctagtgg

SEQ ID NO: 72304 - DNA, 20 bp, Artificial Sequence
  Description of Artificial Sequence: Synthetic oligonucleotide
  Target: ATXN2; (-) strand; PAM type: YTN; PAM sequence: CTT
tgattatacccatcctagtg

SEQ ID NO: 72305 - DNA, 20 bp, Artificial Sequence
  Description of Artificial Sequence: Synthetic oligonucleotide
  Target: ATXN2; (-) strand; PAM type: YTN; PAM sequence: CTC
tttgattatacccatcctag

SEQ ID NO: 72306 - DNA, 20 bp, Artificial Sequence
  Description of Artificial Sequence: Synthetic oligonucleotide
  Target: ATXN2; (-) strand; PAM type: YTN; PAM sequence: CTG
tctctttgattatacccatc

SEQ ID NO: 72307 - DNA, 20 bp, Artificial Sequence
  Description of Artificial Sequence: Synthetic oligonucleotide
  Target: ATXN2; (-) strand; PAM type: YTN; PAM sequence: TTG
tctgtctctttgattatacc

SEQ ID NO: 72308 - DNA, 20 bp, Artificial Sequence
  Description of Artificial Sequence: Synthetic oligonucleotide
  Target: ATXN2; (-) strand; PAM type: YTN; PAM sequence: TTA
ttgtctgtctctttgattat

SEQ ID NO: 72309 - DNA, 20 bp, Artificial Sequence
  Description of Artificial Sequence: Synthetic oligonucleotide
  Target: ATXN2; (-) strand; PAM type: YTN; PAM sequence: TTG
ttattgtctgtctctttgat

SEQ ID NO: 72310 - DNA, 20 bp, Artificial Sequence
  Description of Artificial Sequence: Synthetic oligonucleotide
  Target: ATXN2; (-) strand; PAM type: YTN; PAM sequence: TTT
gttattgtctgtctctttga

SEQ ID NO: 72311 - DNA, 20 bp, Artificial Sequence
  Description of Artificial Sequence: Synthetic oligonucleotide
  Target: ATXN2; (-) strand; PAM type: YTN; PAM sequence: CTC
accagcatttgttattgtct

SEQ ID NO: 72312 - DNA, 20 bp, Artificial Sequence
  Description of Artificial Sequence: Synthetic oligonucleotide
  Target: ATXN2; (-) strand; PAM type: YTN; PAM sequence: TTC
acatcctcaccagcatttgt

SEQ ID NO: 72313 - DNA, 20 bp, Artificial Sequence
  Description of Artificial Sequence: Synthetic oligonucleotide
  Target: ATXN2; (-) strand; PAM type: YTN; PAM sequence: TTT
cacatcctcaccagcatttg

SEQ ID NO: 72314 - DNA, 20 bp, Artificial Sequence
  Description of Artificial Sequence: Synthetic oligonucleotide
  Target: ATXN2; (-) strand; PAM type: YTN; PAM sequence: TTT
tcacatcctcaccagcattt

SEQ ID NO: 72315 - DNA, 20 bp, Artificial Sequence
  Description of Artificial Sequence: Synthetic oligonucleotide
  Target: ATXN2; (-) strand; PAM type: YTN; PAM sequence: TTT
ttcacatcctcaccagcatt

SEQ ID NO: 72316 - DNA, 20 bp, Artificial Sequence
  Description of Artificial Sequence: Synthetic oligonucleotide
  Target: ATXN2; (-) strand; PAM type: YTN; PAM sequence: TTA
tgtttttcacatcctcacca

SEQ ID NO: 72317 - DNA, 20 bp, Artificial Sequence
  Description of Artificial Sequence: Synthetic oligonucleotide
  Target: ATXN2; (-) strand; PAM type: YTN; PAM sequence: CTT
atgtttttcacatcctcacc

SEQ ID NO: 72318 - DNA, 20 bp, Artificial Sequence
  Description of Artificial Sequence: Synthetic oligonucleotide
  Target: ATXN2; (-) strand; PAM type: YTN; PAM sequence: TTC
ttatgtttttcacatcctca

SEQ ID NO: 72319 - DNA, 20 bp, Artificial Sequence
  Description of Artificial Sequence: Synthetic oligonucleotide
  Target: ATXN2; (-) strand; PAM type: YTN; PAM sequence: TTT
cttatgtttttcacatcctc

SEQ ID NO: 72320 - DNA, 20 bp, Artificial Sequence
  Description of Artificial Sequence: Synthetic oligonucleotide
  Target: ATXN2; (-) strand; PAM type: YTN; PAM sequence: CTG
aggtttcttatgtttttcac

SEQ ID NO: 72321 - DNA, 20 bp, Artificial Sequence
  Description of Artificial Sequence: Synthetic oligonucleotide
  Target: ATXN2; (-) strand; PAM type: YTN; PAM sequence: CTA
gcagtgtctgaggtttctta

SEQ ID NO: 72322 - DNA, 20 bp, Artificial Sequence
  Description of Artificial Sequence: Synthetic oligonucleotide
  Target: ATXN2; (-) strand; PAM type: YTN; PAM sequence: CTA
ctagcagtgtctgaggtttc

SEQ ID NO: 72323 - DNA, 20 bp, Artificial Sequence
  Description of Artificial Sequence: Synthetic oligonucleotide
  Target: ATXN2; (-) strand; PAM type: YTN; PAM sequence: TTA
caatcctactagcagtgtct

SEQ ID NO: 72324 - DNA, 20 bp, Artificial Sequence
  Description of Artificial Sequence: Synthetic oligonucleotide
  Target: ATXN2; (-) strand; PAM type: YTN; PAM sequence: TTT
acaatcctactagcagtgtc

SEQ ID NO: 72325 - DNA, 20 bp, Artificial Sequence
  Description of Artificial Sequence: Synthetic oligonucleotide
  Target: ATXN2; (-) strand; PAM type: YTN; PAM sequence: TTT
tacaatcctactagcagtgt

SEQ ID NO: 72326 - DNA, 20 bp, Artificial Sequence
  Description of Artificial Sequence: Synthetic oligonucleotide
  Target: ATXN2; (-) strand; PAM type: YTN; PAM sequence: CTG
tatcattttacaatcctact

SEQ ID NO: 72327 - DNA, 20 bp, Artificial Sequence
  Description of Artificial Sequence: Synthetic oligonucleotide
  Target: ATXN2; (-) strand; PAM type: YTN; PAM sequence: TTC
caacgtagctgtatcatttt

SEQ ID NO: 72328 - DNA, 20 bp, Artificial Sequence
  Description of Artificial Sequence: Synthetic oligonucleotide
  Target: ATXN2; (-) strand; PAM type: YTN; PAM sequence: TTT
ccaacgtagctgtatcattt

SEQ ID NO: 72329 - DNA, 20 bp, Artificial Sequence
  Description of Artificial Sequence: Synthetic oligonucleotide
  Target: ATXN2; (-) strand; PAM type: YTN; PAM sequence: CTG
tttccaacgtagctgtatca

SEQ ID NO: 72330 - DNA, 20 bp, Artificial Sequence
  Description of Artificial Sequence: Synthetic oligonucleotide
  Target: ATXN2; (-) strand; PAM type: YTN; PAM sequence: CTA
catagctgtttccaacgtag

SEQ ID NO: 72331 - DNA, 20 bp, Artificial Sequence
  Description of Artificial Sequence: Synthetic oligonucleotide
  Target: ATXN2; (-) strand; PAM type: YTN; PAM sequence: TTA
caatcctacatagctgtttc

SEQ ID NO: 72332 - DNA, 20 bp, Artificial Sequence
  Description of Artificial Sequence: Synthetic oligonucleotide
  Target: ATXN2; (-) strand; PAM type: YTN; PAM sequence: TTT
acaatcctacatagctgttt

SEQ ID NO: 72333 - DNA, 20 bp, Artificial Sequence
  Description of Artificial Sequence: Synthetic oligonucleotide
  Target: ATXN2; (-) strand; PAM type: YTN; PAM sequence: TTT
tacaatcctacatagctgtt

SEQ ID NO: 72334 - DNA, 20 bp, Artificial Sequence
  Description of Artificial Sequence: Synthetic oligonucleotide
  Target: ATXN2; (-) strand; PAM type: YTN; PAM sequence: CTG
tatcattttacaatcctaca

SEQ ID NO: 72335 - DNA, 20 bp, Artificial Sequence
  Description of Artificial Sequence: Synthetic oligonucleotide
  Target: ATXN2; (-) strand; PAM type: YTN; PAM sequence: CTG
ggcatagtggctgtatcatt

SEQ ID NO: 72336 - DNA, 20 bp, Artificial Sequence
  Description of Artificial Sequence: Synthetic oligonucleotide
  Target: ATXN2; (-) strand; PAM type: YTN; PAM sequence: TTC
ctgggcatagtggctgtatc

SEQ ID NO: 72337 - DNA, 20 bp, Artificial Sequence
  Description of Artificial Sequence: Synthetic oligonucleotide
  Target: ATXN2; (-) strand; PAM type: YTN; PAM sequence: TTT
cctgggcatagtggctgtat

SEQ ID NO: 72338 - DNA, 20 bp, Artificial Sequence
  Description of Artificial Sequence: Synthetic oligonucleotide
  Target: ATXN2; (-) strand; PAM type: YTN; PAM sequence: CTG
atttcctgggcatagtggct

SEQ ID NO: 72339 - DNA, 20 bp, Artificial Sequence
  Description of Artificial Sequence: Synthetic oligonucleotide
  Target: ATXN2; (-) strand; PAM type: YTN; PAM sequence: TTG
cacaggctgatttcctgggc

SEQ ID NO: 72340 - DNA, 20 bp, Artificial Sequence
  Description of Artificial Sequence: Synthetic oligonucleotide
  Target: ATXN2; (-) strand; PAM type: YTN; PAM sequence: CTG
ttgcacaggctgatttcctg

SEQ ID NO: 72341 - DNA, 20 bp, Artificial Sequence
  Description of Artificial Sequence: Synthetic oligonucleotide
  Target: ATXN2; (-) strand; PAM type: YTN; PAM sequence: CTC
actgttgcacaggctgattt

SEQ ID NO: 72342 - DNA, 20 bp, Artificial Sequence
  Description of Artificial Sequence: Synthetic oligonucleotide
  Target: ATXN2; (-) strand; PAM type: YTN; PAM sequence: TTG
gggtctcactgttgcacagg

SEQ ID NO: 72343 - DNA, 20 bp, Artificial Sequence
  Description of Artificial Sequence: Synthetic oligonucleotide
  Target: ATXN2; (-) strand; PAM type: YTN; PAM sequence: TTG
aaaatagagttggggtctca

SEQ ID NO: 72344 - DNA, 20 bp, Artificial Sequence
  Description of Artificial Sequence: Synthetic oligonucleotide
  Target: ATXN2; (-) strand; PAM type: YTN; PAM sequence: TTT
gaaaatagagttggggtctc

SEQ ID NO: 72345 - DNA, 20 bp, Artificial Sequence
  Description of Artificial Sequence: Synthetic oligonucleotide
  Target: ATXN2; (-) strand; PAM type: YTN; PAM sequence: TTT
tgaaaatagagttggggtct

SEQ ID NO: 72346 - DNA, 20 bp, Artificial Sequence
  Description of Artificial Sequence: Synthetic oligonucleotide
  Target: ATXN2; (-) strand; PAM type: YTN; PAM sequence: TTT
ttgaaaatagagttggggtc

SEQ ID NO: 72347 - DNA, 20 bp, Artificial Sequence
  Description of Artificial Sequence: Synthetic oligonucleotide
  Target: ATXN2; (-) strand; PAM type: YTN; PAM sequence: TTT
tttgaaaatagagttggggt

SEQ ID NO: 72348 - DNA, 20 bp, Artificial Sequence
  Description of Artificial Sequence: Synthetic oligonucleotide
  Target: ATXN2; (-) strand; PAM type: YTN; PAM sequence: TTA
ttttttgaaaatagagttgg

SEQ ID NO: 72349 - DNA, 20 bp, Artificial Sequence
  Description of Artificial Sequence: Synthetic oligonucleotide
  Target: ATXN2; (-) strand; PAM type: YTN; PAM sequence: TTA
ttattttttgaaaatagagt

SEQ ID NO: 72350 - DNA, 20 bp, Artificial Sequence
  Description of Artificial Sequence: Synthetic oligonucleotide
  Target: ATXN2; (-) strand; PAM type: YTN; PAM sequence: TTT
attattttttgaaaatagag

SEQ ID NO: 72351 - DNA, 20 bp, Artificial Sequence
  Description of Artificial Sequence: Synthetic oligonucleotide
  Target: ATXN2; (-) strand; PAM type: YTN; PAM sequence: TTT
tattattttttgaaaataga

SEQ ID NO: 72352 - DNA, 20 bp, Artificial Sequence
  Description of Artificial Sequence: Synthetic oligonucleotide
  Target: ATXN2; (-) strand; PAM type: YTN; PAM sequence: TTT
ttattattttttgaaaatag

SEQ ID NO: 72353 - DNA, 20 bp, Artificial Sequence
  Description of Artificial Sequence: Synthetic oligonucleotide
  Target: ATXN2; (-) strand; PAM type: YTN; PAM sequence: CTT
tttattattttttgaaaata

SEQ ID NO: 72354 - DNA, 20 bp, Artificial Sequence
  Description of Artificial Sequence: Synthetic oligonucleotide
  Target: ATXN2; (-) strand; PAM type: YTN; PAM sequence: TTC
tttttattattttttgaaaa

SEQ ID NO: 72355 - DNA, 20 bp, Artificial Sequence
  Description of Artificial Sequence: Synthetic oligonucleotide
  Target: ATXN2; (-) strand; PAM type: YTN; PAM sequence: TTT
ctttttattattttttgaaa

SEQ ID NO: 72356 - DNA, 20 bp, Artificial Sequence
  Description of Artificial Sequence: Synthetic oligonucleotide
  Target: ATXN2; (-) strand; PAM type: YTN; PAM sequence: TTT
tctttttattattttttgaa

SEQ ID NO: 72357 - DNA, 20 bp, Artificial Sequence
  Description of Artificial Sequence: Synthetic oligonucleotide
  Target: ATXN2; (-) strand; PAM type: YTN; PAM sequence: TTG
ttttctttttattatttttt

SEQ ID NO: 72358 - DNA, 20 bp, Artificial Sequence
  Description of Artificial Sequence: Synthetic oligonucleotide
  Target: ATXN2; (-) strand; PAM type: YTN; PAM sequence: TTT
gttttctttttattattttt

SEQ ID NO: 72359 - DNA, 20 bp, Artificial Sequence
  Description of Artificial Sequence: Synthetic oligonucleotide
  Target: ATXN2; (-) strand; PAM type: YTN; PAM sequence: TTT
tgttttctttttattatttt

SEQ ID NO: 72360 - DNA, 20 bp, Artificial Sequence
  Description of Artificial Sequence: Synthetic oligonucleotide
  Target: ATXN2; (-) strand; PAM type: YTN; PAM sequence: CTG
ttttgttttctttttattat

SEQ ID NO: 72361 - DNA, 20 bp, Artificial Sequence
  Description of Artificial Sequence: Synthetic oligonucleotide
  Target: ATXN2; (-) strand; PAM type: YTN; PAM sequence: TTG
ggctgttttgttttcttttt

SEQ ID NO: 72362 - DNA, 20 bp, Artificial Sequence
  Description of Artificial Sequence: Synthetic oligonucleotide
  Target: ATXN2; (-) strand; PAM type: YTN; PAM sequence: CTG
ttgggctgttttgttttctt

SEQ ID NO: 72363 - DNA, 20 bp, Artificial Sequence
  Description of Artificial Sequence: Synthetic oligonucleotide
  Target: ATXN2; (-) strand; PAM type: YTN; PAM sequence: TTA
cataactgttgggctgtttt

SEQ ID NO: 72364 - DNA, 20 bp, Artificial Sequence
  Description of Artificial Sequence: Synthetic oligonucleotide
  Target: ATXN2; (-) strand; PAM type: YTN; PAM sequence: TTT
acataactgttgggctgttt

SEQ ID NO: 72365 - DNA, 20 bp, Artificial Sequence
  Description of Artificial Sequence: Synthetic oligonucleotide
  Target: ATXN2; (-) strand; PAM type: YTN; PAM sequence: TTT
tacataactgttgggctgtt

SEQ ID NO: 72366 - DNA, 20 bp, Artificial Sequence
  Description of Artificial Sequence: Synthetic oligonucleotide
  Target: ATXN2; (-) strand; PAM type: YTN; PAM sequence: CTT
ttacataactgttgggctgt

SEQ ID NO: 72367 - DNA, 20 bp, Artificial Sequence
  Description of Artificial Sequence: Synthetic oligonucleotide
  Target: ATXN2; (-) strand; PAM type: YTN; PAM sequence: TTG
aaccttttacataactgttg

SEQ ID NO: 72368 - DNA, 20 bp, Artificial Sequence
  Description of Artificial Sequence: Synthetic oligonucleotide
  Target: ATXN2; (-) strand; PAM type: YTN; PAM sequence: CTA
tgttgaaccttttacataac

SEQ ID NO: 72369 - DNA, 20 bp, Artificial Sequence
  Description of Artificial Sequence: Synthetic oligonucleotide
  Target: ATXN2; (-) strand; PAM type: YTN; PAM sequence: CTA
aatctatgttgaacctttta

SEQ ID NO: 72370 - DNA, 20 bp, Artificial Sequence
  Description of Artificial Sequence: Synthetic oligonucleotide
  Target: ATXN2; (-) strand; PAM type: YTN; PAM sequence: CTC
gtatgctaaatctatgttga

SEQ ID NO: 72371 - DNA, 20 bp, Artificial Sequence
  Description of Artificial Sequence: Synthetic oligonucleotide
  Target: ATXN2; (-) strand; PAM type: YTN; PAM sequence: CTG
gctcgtatgctaaatctatg

SEQ ID NO: 72372 - DNA, 20 bp, Artificial Sequence
  Description of Artificial Sequence: Synthetic oligonucleotide
  Target: ATXN2; (-) strand; PAM type: YTN; PAM sequence: TTG
ctggctcgtatgctaaatct

SEQ ID NO: 72373 - DNA, 20 bp, Artificial Sequence
  Description of Artificial Sequence: Synthetic oligonucleotide
  Target: ATXN2; (-) strand; PAM type: YTN; PAM sequence: CTG
caagataattgctggctcgt

SEQ ID NO: 72374 - DNA, 20 bp, Artificial Sequence
  Description of Artificial Sequence: Synthetic oligonucleotide
  Target: ATXN2; (-) strand; PAM type: YTN; PAM sequence: CTC
atacatacatacacatacct

SEQ ID NO: 72375 - DNA, 20 bp, Artificial Sequence
  Description of Artificial Sequence: Synthetic oligonucleotide
  Target: ATXN2; (-) strand; PAM type: YTN; PAM sequence: CTC
atgggggtgtgtgtgtatgc

SEQ ID NO: 72376 - DNA, 20 bp, Artificial Sequence
  Description of Artificial Sequence: Synthetic oligonucleotide
  Target: ATXN2; (-) strand; PAM type: YTN; PAM sequence: TTC
tcatgggggtgtgtgtgtat

SEQ ID NO: 72377 - DNA, 20 bp, Artificial Sequence
  Description of Artificial Sequence: Synthetic oligonucleotide
  Target: ATXN2; (-) strand; PAM type: YTN; PAM sequence: TTC
aattctcatgggggtgtgtg

SEQ ID NO: 72378 - DNA, 20 bp, Artificial Sequence
  Description of Artificial Sequence: Synthetic oligonucleotide
  Target: ATXN2; (-) strand; PAM type: YTN; PAM sequence: TTT
caattctcatgggggtgtgt

SEQ ID NO: 72379 - DNA, 20 bp, Artificial Sequence
  Description of Artificial Sequence: Synthetic oligonucleotide
  Target: ATXN2; (-) strand; PAM type: YTN; PAM sequence: TTT
tcaattctcatgggggtgtg

SEQ ID NO: 72380 - DNA, 20 bp, Artificial Sequence
  Description of Artificial Sequence: Synthetic oligonucleotide
  Target: ATXN2; (-) strand; PAM type: YTN; PAM sequence: CTG
cgtgtggacataggttttca

SEQ ID NO: 72381 - DNA, 20 bp, Artificial Sequence
  Description of Artificial Sequence: Synthetic oligonucleotide
  Target: ATXN2; (-) strand; PAM type: YTN; PAM sequence: CTC
aaaaaaaaaaaaaaaaaaaa

SEQ ID NO: 72382 - DNA, 20 bp, Artificial Sequence
  Description of Artificial Sequence: Synthetic oligonucleotide
  Target: ATXN2; (-) strand; PAM type: YTN; PAM sequence: TTC
atctcaaaaaaaaaaaaaaa

SEQ ID NO: 72383 - DNA, 20 bp, Artificial Sequence
  Description of Artificial Sequence: Synthetic oligonucleotide
  Target: ATXN2; (-) strand; PAM type: YTN; PAM sequence: CTT
catctcaaaaaaaaaaaaaa

SEQ ID NO: 72384 - DNA, 20 bp, Artificial Sequence
  Description of Artificial Sequence: Synthetic oligonucleotide
  Target: ATXN2; (-) strand; PAM type: YTN; PAM sequence: CTG
ggtgacagagtgaaacttca

SEQ ID NO: 72385 - DNA, 20 bp, Artificial Sequence
  Description of Artificial Sequence: Synthetic oligonucleotide
  Target: ATXN2; (-) strand; PAM type: YTN; PAM sequence: CTC
cagcctgggtgacagagtga

SEQ ID NO: 72386 - DNA, 20 bp, Artificial Sequence
  Description of Artificial Sequence: Synthetic oligonucleotide
  Target: ATXN2; (-) strand; PAM type: YTN; PAM sequence: CTG
cactccagcctgggtgacag

SEQ ID NO: 72387 - DNA, 20 bp, Artificial Sequence
  Description of Artificial Sequence: Synthetic oligonucleotide
  Target: ATXN2; (-) strand; PAM type: YTN; PAM sequence: CTA
cagtgagccgagatcacgcc

SEQ ID NO: 72388 - DNA, 20 bp, Artificial Sequence
  Description of Artificial Sequence: Synthetic oligonucleotide
  Target: ATXN2; (-) strand; PAM type: YTN; PAM sequence: CTG
ggaagccgaggctacagtga

SEQ ID NO: 72389 - DNA, 20 bp, Artificial Sequence
  Description of Artificial Sequence: Synthetic oligonucleotide
  Target: ATXN2; (-) strand; PAM type: YTN; PAM sequence: TTG
aagctgggaagccgaggcta

SEQ ID NO: 72390 - DNA, 20 bp, Artificial Sequence
  Description of Artificial Sequence: Synthetic oligonucleotide
  Target: ATXN2; (-) strand; PAM type: YTN; PAM sequence: CTT
gaagctgggaagccgaggct

SEQ ID NO: 72391 - DNA, 20 bp, Artificial Sequence
  Description of Artificial Sequence: Synthetic oligonucleotide
  Target: ATXN2; (-) strand; PAM type: YTN; PAM sequence: CTG
aggcagagaatcacttgaag

SEQ ID NO: 72392 - DNA, 20 bp, Artificial Sequence
  Description of Artificial Sequence: Synthetic oligonucleotide
  Target: ATXN2; (-) strand; PAM type: YTN; PAM sequence: CTA
gggaggctgaggcagagaat

SEQ ID NO: 72393 - DNA, 20 bp, Artificial Sequence
  Description of Artificial Sequence: Synthetic oligonucleotide
  Target: ATXN2; (-) strand; PAM type: YTN; PAM sequence: CTA
ctagggaggctgaggcagag

SEQ ID NO: 72394 - DNA, 20 bp, Artificial Sequence
  Description of Artificial Sequence: Synthetic oligonucleotide
  Target: ATXN2; (-) strand; PAM type: YTN; PAM sequence: CTC
agctactagggaggctgagg

SEQ ID NO: 72395 - DNA, 20 bp, Artificial Sequence
  Description of Artificial Sequence: Synthetic oligonucleotide
  Target: ATXN2; (-) strand; PAM type: YTN; PAM sequence: CTG
taatctcagctactagggag

SEQ ID NO: 72396 - DNA, 20 bp, Artificial Sequence
  Description of Artificial Sequence: Synthetic oligonucleotide
  Target: ATXN2; (-) strand; PAM type: YTN; PAM sequence: CTG
ggtgtggtggcgtgcacctg

SEQ ID NO: 72397 - DNA, 20 bp, Artificial Sequence
  Description of Artificial Sequence: Synthetic oligonucleotide
  Target: ATXN2; (-) strand; PAM type: YTN; PAM sequence: CTA
aaaatacaaaaatgagctgg

SEQ ID NO: 72398 - DNA, 20 bp, Artificial Sequence
  Description of Artificial Sequence: Synthetic oligonucleotide
  Target: ATXN2; (-) strand; PAM type: YTN; PAM sequence: CTA
ctaaaaatacaaaaatgagc

SEQ ID NO: 72399 - DNA, 20 bp, Artificial Sequence
  Description of Artificial Sequence: Synthetic oligonucleotide
  Target: ATXN2; (-) strand; PAM type: YTN; PAM sequence: CTC
tactaaaaatacaaaaatga

SEQ ID NO: 72400 - DNA, 20 bp, Artificial Sequence
  Description of Artificial Sequence: Synthetic oligonucleotide
  Target: ATXN2; (-) strand; PAM type: YTN; PAM sequence: CTG
tctctactaaaaatacaaaa

SEQ ID NO: 72401 - DNA, 20 bp, Artificial Sequence
  Description of Artificial Sequence: Synthetic oligonucleotide
  Target: ATXN2; (-) strand; PAM type: YTN; PAM sequence: CTG
cccaacatggtgaaaccctg

SEQ ID NO: 72402 - DNA, 20 bp, Artificial Sequence
  Description of Artificial Sequence: Synthetic oligonucleotide
  Target: ATXN2; (-) strand; PAM type: YTN; PAM sequence: TTC
gagaccagcctgcccaacat

SEQ ID NO: 72403 - DNA, 20 bp, Artificial Sequence
  Description of Artificial Sequence: Synthetic oligonucleotide
  Target: ATXN2; (-) strand; PAM type: YTN; PAM sequence: TTG
aggccgggagttcgagacca

SEQ ID NO: 72404 - DNA, 20 bp, Artificial Sequence
  Description of Artificial Sequence: Synthetic oligonucleotide
  Target: ATXN2; (-) strand; PAM type: YTN; PAM sequence: TTT
gaggccgggagttcgagacc

SEQ ID NO: 72405 - DNA, 20 bp, Artificial Sequence
  Description of Artificial Sequence: Synthetic oligonucleotide
  Target: ATXN2; (-) strand; PAM type: YTN; PAM sequence: CTG
gcagatcatttgaggccggg

SEQ ID NO: 72406 - DNA, 20 bp, Artificial Sequence
  Description of Artificial Sequence: Synthetic oligonucleotide
  Target: ATXN2; (-) strand; PAM type: YTN; PAM sequence: CTG
gggctggcagatcatttgag

SEQ ID NO: 72407 - DNA, 20 bp, Artificial Sequence
  Description of Artificial Sequence: Synthetic oligonucleotide
  Target: ATXN2; (-) strand; PAM type: YTN; PAM sequence: TTG
ggaggctggggctggcagat

SEQ ID NO: 72408 - DNA, 20 bp, Artificial Sequence
  Description of Artificial Sequence: Synthetic oligonucleotide
  Target: ATXN2; (-) strand; PAM type: YTN; PAM sequence: TTT
gggaggctggggctggcaga

SEQ ID NO: 72409 - DNA, 20 bp, Artificial Sequence
  Description of Artificial Sequence: Synthetic oligonucleotide
  Target: ATXN2; (-) strand; PAM type: YTN; PAM sequence: CTT
tgggaggctggggctggcag

SEQ ID NO: 72410 - DNA, 20 bp, Artificial Sequence
  Description of Artificial Sequence: Synthetic oligonucleotide
  Target: ATXN2; (-) strand; PAM type: YTN; PAM sequence: CTG
taatcccagcactttgggag

SEQ ID NO: 72411 - DNA, 20 bp, Artificial Sequence
  Description of Artificial Sequence: Synthetic oligonucleotide
  Target: ATXN2; (-) strand; PAM type: YTN; PAM sequence: CTC
tgtaatcccagcactttggg

SEQ ID NO: 72412 - DNA, 20 bp, Artificial Sequence
  Description of Artificial Sequence: Synthetic oligonucleotide
  Target: ATXN2; (-) strand; PAM type: YTN; PAM sequence: CTC
atgcctctgtaatcccagca

SEQ ID NO: 72413 - DNA, 20 bp, Artificial Sequence
  Description of Artificial Sequence: Synthetic oligonucleotide
  Target: ATXN2; (-) strand; PAM type: YTN; PAM sequence: TTG
tgtgggccgggtgtggtggc

SEQ ID NO: 72414 - DNA, 20 bp, Artificial Sequence
  Description of Artificial Sequence: Synthetic oligonucleotide
  Target: ATXN2; (-) strand; PAM type: YTN; PAM sequence: TTT
gtgtgggccgggtgtggtgg

SEQ ID NO: 72415 - DNA, 20 bp, Artificial Sequence
  Description of Artificial Sequence: Synthetic oligonucleotide
  Target: ATXN2; (-) strand; PAM type: YTN; PAM sequence: TTT
tgtgtgggccgggtgtggtg

SEQ ID NO: 72416 - DNA, 20 bp, Artificial Sequence
  Description of Artificial Sequence: Synthetic oligonucleotide
  Target: ATXN2; (-) strand; PAM type: YTN; PAM sequence: TTT
ttgtgtgggccgggtgtggt

SEQ ID NO: 72417 - DNA, 20 bp, Artificial Sequence
  Description of Artificial Sequence: Synthetic oligonucleotide
  Target: ATXN2; (-) strand; PAM type: YTN; PAM sequence: TTA
aagtttttgtgtgggccggg

SEQ ID NO: 72418 - DNA, 20 bp, Artificial Sequence
  Description of Artificial Sequence: Synthetic oligonucleotide
  Target: ATXN2; (-) strand; PAM type: YTN; PAM sequence: TTT
aaagtttttgtgtgggccgg

SEQ ID NO: 72419 - DNA, 20 bp, Artificial Sequence
  Description of Artificial Sequence: Synthetic oligonucleotide
  Target: ATXN2; (-) strand; PAM type: YTN; PAM sequence: TTT
taaagtttttgtgtgggccg

SEQ ID NO: 72420 - DNA, 20 bp, Artificial Sequence
  Description of Artificial Sequence: Synthetic oligonucleotide
  Target: ATXN2; (-) strand; PAM type: YTN; PAM sequence: CTT
ttaaagtttttgtgtgggcc

SEQ ID NO: 72421 - DNA, 20 bp, Artificial Sequence
  Description of Artificial Sequence: Synthetic oligonucleotide
  Target: ATXN2; (-) strand; PAM type: YTN; PAM sequence: CTG
cgaacagtgacttttaaagt

SEQ ID NO: 72422 - DNA, 20 bp, Artificial Sequence
  Description of Artificial Sequence: Synthetic oligonucleotide
  Target: ATXN2; (-) strand; PAM type: YTN; PAM sequence: CTG
ctgcgaacagtgacttttaa

SEQ ID NO: 72423 - DNA, 20 bp, Artificial Sequence
  Description of Artificial Sequence: Synthetic oligonucleotide
  Target: ATXN2; (-) strand; PAM type: YTN; PAM sequence: TTA
tacataatcctgctgcgaac

SEQ ID NO: 72424 - DNA, 20 bp, Artificial Sequence
  Description of Artificial Sequence: Synthetic oligonucleotide
  Target: ATXN2; (-) strand; PAM type: YTN; PAM sequence: TTT
atacataatcctgctgcgaa

SEQ ID NO: 72425 - DNA, 20 bp, Artificial Sequence
  Description of Artificial Sequence: Synthetic oligonucleotide
  Target: ATXN2; (-) strand; PAM type: YTN; PAM sequence: TTG
atttatacataatcctgctg

SEQ ID NO: 72426 - DNA, 20 bp, Artificial Sequence
  Description of Artificial Sequence: Synthetic oligonucleotide
  Target: ATXN2; (-) strand; PAM type: YTN; PAM sequence: TTT
gatttatacataatcctgct

SEQ ID NO: 72427 - DNA, 20 bp, Artificial Sequence
  Description of Artificial Sequence: Synthetic oligonucleotide
  Target: ATXN2; (-) strand; PAM type: YTN; PAM sequence: TTT
tgatttatacataatcctgc

SEQ ID NO: 72428 - DNA, 20 bp, Artificial Sequence
  Description of Artificial Sequence: Synthetic oligonucleotide
  Target: ATXN2; (-) strand; PAM type: YTN; PAM sequence: CTT
ttgatttatacataatcctg

SEQ ID NO: 72429 - DNA, 20 bp, Artificial Sequence
  Description of Artificial Sequence: Synthetic oligonucleotide
  Target: ATXN2; (-) strand; PAM type: YTN; PAM sequence: TTC
caccttttgatttatacata

SEQ ID NO: 72430 - DNA, 20 bp, Artificial Sequence
  Description of Artificial Sequence: Synthetic oligonucleotide
  Target: ATXN2; (-) strand; PAM type: YTN; PAM sequence: TTT
ccaccttttgatttatacat

SEQ ID NO: 72431 - DNA, 20 bp, Artificial Sequence
  Description of Artificial Sequence: Synthetic oligonucleotide
  Target: ATXN2; (-) strand; PAM type: YTN; PAM sequence: TTG
tttccaccttttgatttata

SEQ ID NO: 72432 - DNA, 20 bp, Artificial Sequence
  Description of Artificial Sequence: Synthetic oligonucleotide
  Target: ATXN2; (-) strand; PAM type: YTN; PAM sequence: TTC
attgtttccaccttttgatt

SEQ ID NO: 72433 - DNA, 20 bp, Artificial Sequence
  Description of Artificial Sequence: Synthetic oligonucleotide
  Target: ATXN2; (-) strand; PAM type: YTN; PAM sequence: TTT
cattgtttccaccttttgat

SEQ ID NO: 72434 - DNA, 20 bp, Artificial Sequence
  Description of Artificial Sequence: Synthetic oligonucleotide
  Target: ATXN2; (-) strand; PAM type: YTN; PAM sequence: TTT
tcattgtttccaccttttga

SEQ ID NO: 72435 - DNA, 20 bp, Artificial Sequence
  Description of Artificial Sequence: Synthetic oligonucleotide
  Target: ATXN2; (-) strand; PAM type: YTN; PAM sequence: TTG
gtggacattttcattgtttc

SEQ ID NO: 72436 - DNA, 20 bp, Artificial Sequence
  Description of Artificial Sequence: Synthetic oligonucleotide
  Target: ATXN2; (-) strand; PAM type: YTN; PAM sequence: TTC
atcagttggtggacattttc

SEQ ID NO: 72437 - DNA, 20 bp, Artificial Sequence
  Description of Artificial Sequence: Synthetic oligonucleotide
  Target: ATXN2; (-) strand; PAM type: YTN; PAM sequence: TTA
ttcatcagttggtggacatt

SEQ ID NO: 72438 - DNA, 20 bp, Artificial Sequence
  Description of Artificial Sequence: Synthetic oligonucleotide
  Target: ATXN2; (-) strand; PAM type: YTN; PAM sequence: TTT
attcatcagttggtggacat

SEQ ID NO: 72439 - DNA, 20 bp, Artificial Sequence
  Description of Artificial Sequence: Synthetic oligonucleotide
  Target: ATXN2; (-) strand; PAM type: YTN; PAM sequence: TTG
tttattcatcagttggtgga

SEQ ID NO: 72440 - DNA, 20 bp, Artificial Sequence
  Description of Artificial Sequence: Synthetic oligonucleotide
  Target: ATXN2; (-) strand; PAM type: YTN; PAM sequence: TTT
gtttattcatcagttggtgg

SEQ ID NO: 72441 - DNA, 20 bp, Artificial Sequence
  Description of Artificial Sequence: Synthetic oligonucleotide
  Target: ATXN2; (-) strand; PAM type: YTN; PAM sequence: TTT
tgtttattcatcagttggtg

SEQ ID NO: 72442 - DNA, 20 bp, Artificial Sequence
  Description of Artificial Sequence: Synthetic oligonucleotide
  Target: ATXN2; (-) strand; PAM type: YTN; PAM sequence: CTA
cattttgtttattcatcagt

SEQ ID NO: 72443 - DNA, 20 bp, Artificial Sequence
  Description of Artificial Sequence: Synthetic oligonucleotide
  Target: ATXN2; (-) strand; PAM type: YTN; PAM sequence: TTA
cacaggtacactacattttg

SEQ ID NO: 72444 - DNA, 20 bp, Artificial Sequence
  Description of Artificial Sequence: Synthetic oligonucleotide
  Target: ATXN2; (-) strand; PAM type: YTN; PAM sequence: TTA
tacagttacacaggtacact

SEQ ID NO: 72445 - DNA, 20 bp, Artificial Sequence
  Description of Artificial Sequence: Synthetic oligonucleotide
  Target: ATXN2; (-) strand; PAM type: YTN; PAM sequence: TTC
cattatacagttacacaggt

SEQ ID NO: 72446 - DNA, 20 bp, Artificial Sequence
  Description of Artificial Sequence: Synthetic oligonucleotide
  Target: ATXN2; (-) strand; PAM type: YTN; PAM sequence: TTC
atggccaaatattccattat

SEQ ID NO: 72447 - DNA, 20 bp, Artificial Sequence
  Description of Artificial Sequence: Synthetic oligonucleotide
  Target: ATXN2; (-) strand; PAM type: YTN; PAM sequence: TTT
catggccaaatattccatta

SEQ ID NO: 72448 - DNA, 20 bp, Artificial Sequence
  Description of Artificial Sequence: Synthetic oligonucleotide
  Target: ATXN2; (-) strand; PAM type: YTN; PAM sequence: TTT
tcatggccaaatattccatt

SEQ ID NO: 72449 - DNA, 20 bp, Artificial Sequence
  Description of Artificial Sequence: Synthetic oligonucleotide
  Target: ATXN2; (-) strand; PAM type: YTN; PAM sequence: TTT
ttcatggccaaatattccat

SEQ ID NO: 72450 - DNA, 20 bp, Artificial Sequence
  Description of Artificial Sequence: Synthetic oligonucleotide
  Target: ATXN2; (-) strand; PAM type: YTN; PAM sequence: CTT
tttcatggccaaatattcca

SEQ ID NO: 72451 - DNA, 20 bp, Artificial Sequence
  Description of Artificial Sequence: Synthetic oligonucleotide
  Target: ATXN2; (-) strand; PAM type: YTN; PAM sequence: TTC
tttttcatggccaaatattc

SEQ ID NO: 72452 - DNA, 20 bp, Artificial Sequence
  Description of Artificial Sequence: Synthetic oligonucleotide
  Target: ATXN2; (-) strand; PAM type: YTN; PAM sequence: TTT
ctttttcatggccaaatatt

SEQ ID NO: 72453 - DNA, 20 bp, Artificial Sequence
  Description of Artificial Sequence: Synthetic oligonucleotide
  Target: ATXN2; (-) strand; PAM type: YTN; PAM sequence: CTT
tctttttcatggccaaatat

SEQ ID NO: 72454 - DNA, 20 bp, Artificial Sequence
  Description of Artificial Sequence: Synthetic oligonucleotide
  Target: ATXN2; (-) strand; PAM type: YTN; PAM sequence: TTC
tttctttttcatggccaaat

SEQ ID NO: 72455 - DNA, 20 bp, Artificial Sequence
  Description of Artificial Sequence: Synthetic oligonucleotide
  Target: ATXN2; (-) strand; PAM type: YTN; PAM sequence: CTT
ctttctttttcatggccaaa

SEQ ID NO: 72456 - DNA, 20 bp, Artificial Sequence
  Description of Artificial Sequence: Synthetic oligonucleotide
  Target: ATXN2; (-) strand; PAM type: YTN; PAM sequence: TTA
gtacttctttctttttcatg

SEQ ID NO: 72457 - DNA, 20 bp, Artificial Sequence
  Description of Artificial Sequence: Synthetic oligonucleotide
  Target: ATXN2; (-) strand; PAM type: YTN; PAM sequence: CTG
tagcatgtattagtacttct

SEQ ID NO: 72458 - DNA, 20 bp, Artificial Sequence
  Description of Artificial Sequence: Synthetic oligonucleotide
  Target: ATXN2; (-) strand; PAM type: YTN; PAM sequence: TTC
catgctgtagcatgtattag

SEQ ID NO: 72459 - DNA, 20 bp, Artificial Sequence
  Description of Artificial Sequence: Synthetic oligonucleotide
  Target: ATXN2; (-) strand; PAM type: YTN; PAM sequence: CTT
ccatgctgtagcatgtatta

SEQ ID NO: 72460 - DNA, 20 bp, Artificial Sequence
  Description of Artificial Sequence: Synthetic oligonucleotide
  Target: ATXN2; (-) strand; PAM type: YTN; PAM sequence: TTC
ttccatgctgtagcatgtat

SEQ ID NO: 72461 - DNA, 20 bp, Artificial Sequence
  Description of Artificial Sequence: Synthetic oligonucleotide
  Target: ATXN2; (-) strand; PAM type: YTN; PAM sequence: TTT
cttccatgctgtagcatgta

SEQ ID NO: 72462 - DNA, 20 bp, Artificial Sequence
  Description of Artificial Sequence: Synthetic oligonucleotide
  Target: ATXN2; (-) strand; PAM type: YTN; PAM sequence: TTA
gtatgtttcttccatgctgt

SEQ ID NO: 72463 - DNA, 20 bp, Artificial Sequence
  Description of Artificial Sequence: Synthetic oligonucleotide
  Target: ATXN2; (-) strand; PAM type: YTN; PAM sequence: CTT
agtatgtttcttccatgctg

SEQ ID NO: 72464 - DNA, 20 bp, Artificial Sequence
  Description of Artificial Sequence: Synthetic oligonucleotide
  Target: ATXN2; (-) strand; PAM type: YTN; PAM sequence: TTC
acttagtatgtttcttccat

SEQ ID NO: 72465 - DNA, 20 bp, Artificial Sequence
  Description of Artificial Sequence: Synthetic oligonucleotide
  Target: ATXN2; (-) strand; PAM type: YTN; PAM sequence: TTT
cacttagtatgtttcttcca

SEQ ID NO: 72466 - DNA, 20 bp, Artificial Sequence
  Description of Artificial Sequence: Synthetic oligonucleotide
  Target: ATXN2; (-) strand; PAM type: YTN; PAM sequence: TTG
tttcacttagtatgtttctt

SEQ ID NO: 72467 - DNA, 20 bp, Artificial Sequence
  Description of Artificial Sequence: Synthetic oligonucleotide
  Target: ATXN2; (-) strand; PAM type: YTN; PAM sequence: CTT
gtttcacttagtatgtttct

SEQ ID NO: 72468 - DNA, 20 bp, Artificial Sequence
  Description of Artificial Sequence: Synthetic oligonucleotide
  Target: ATXN2; (-) strand; PAM type: YTN; PAM sequence: TTA
tgataggcttgtttcactta

SEQ ID NO: 72469 - DNA, 20 bp, Artificial Sequence
  Description of Artificial Sequence: Synthetic oligonucleotide
  Target: ATXN2; (-) strand; PAM type: YTN; PAM sequence: CTG
gccatatatattatgatagg

SEQ ID NO: 72470 - DNA, 20 bp, Artificial Sequence
  Description of Artificial Sequence: Synthetic oligonucleotide
  Target: ATXN2; (-) strand; PAM type: YTN; PAM sequence: TTG
cagccatgagccaccgcatc

SEQ ID NO: 72471 - DNA, 20 bp, Artificial Sequence
  Description of Artificial Sequence: Synthetic oligonucleotide
  Target: ATXN2; (-) strand; PAM type: YTN; PAM sequence: CTG
ggattgcagccatgagccac

SEQ ID NO: 72472 - DNA, 20 bp, Artificial Sequence
  Description of Artificial Sequence: Synthetic oligonucleotide
  Target: ATXN2; (-) strand; PAM type: YTN; PAM sequence: CTC
ccaaagtgctgggattgcag

SEQ ID NO: 72473 - DNA, 20 bp, Artificial Sequence
  Description of Artificial Sequence: Synthetic oligonucleotide
  Target: ATXN2; (-) strand; PAM type: YTN; PAM sequence: CTC
ggactcccaaagtgctggga

SEQ ID NO: 72474 - DNA, 20 bp, Artificial Sequence
  Description of Artificial Sequence: Synthetic oligonucleotide
  Target: ATXN2; (-) strand; PAM type: YTN; PAM sequence: CTG
cccacctcggactcccaaag

SEQ ID NO: 72475 - DNA, 20 bp, Artificial Sequence
  Description of Artificial Sequence: Synthetic oligonucleotide
  Target: ATXN2; (-) strand; PAM type: YTN; PAM sequence: CTC
aagtgatctgcccacctcgg

SEQ ID NO: 72476 - DNA, 20 bp, Artificial Sequence
  Description of Artificial Sequence: Synthetic oligonucleotide
  Target: ATXN2; (-) strand; PAM type: YTN; PAM sequence: CTG
acctcaagtgatctgcccac

SEQ ID NO: 72477 - DNA, 20 bp, Artificial Sequence
  Description of Artificial Sequence: Synthetic oligonucleotide
  Target: ATXN2; (-) strand; PAM type: YTN; PAM sequence: TTC
ctgacctcaagtgatctgcc

SEQ ID NO: 72478 - DNA, 20 bp, Artificial Sequence
  Description of Artificial Sequence: Synthetic oligonucleotide
  Target: ATXN2; (-) strand; PAM type: YTN; PAM sequence: CTC
gaattcctgacctcaagtga

SEQ ID NO: 72479 - DNA, 20 bp, Artificial Sequence
  Description of Artificial Sequence: Synthetic oligonucleotide
  Target: ATXN2; (-) strand; PAM type: YTN; PAM sequence: CTG
gtctcgaattcctgacctca

SEQ ID NO: 72480 - DNA, 20 bp, Artificial Sequence
  Description of Artificial Sequence: Synthetic oligonucleotide
  Target: ATXN2; (-) strand; PAM type: YTN; PAM sequence: TTG
gccaggctggtctcgaattc

SEQ ID NO: 72481 - DNA, 20 bp, Artificial Sequence
  Description of Artificial Sequence: Synthetic oligonucleotide
  Target: ATXN2; (-) strand; PAM type: YTN; PAM sequence: TTG
caccatgttggccaggctgg

SEQ ID NO: 72482 - DNA, 20 bp, Artificial Sequence
  Description of Artificial Sequence: Synthetic oligonucleotide
  Target: ATXN2; (-) strand; PAM type: YTN; PAM sequence: TTA
gtaaagacggggttgcacca

SEQ ID NO: 72483 - DNA, 20 bp, Artificial Sequence
  Description of Artificial Sequence: Synthetic oligonucleotide
  Target: ATXN2; (-) strand; PAM type: YTN; PAM sequence: TTT
agtaaagacggggttgcacc

SEQ ID NO: 72484 - DNA, 20 bp, Artificial Sequence
  Description of Artificial Sequence: Synthetic oligonucleotide
  Target: ATXN2; (-) strand; PAM type: YTN; PAM sequence: TTT
tagtaaagacggggttgcac

SEQ ID NO: 72485 - DNA, 20 bp, Artificial Sequence
  Description of Artificial Sequence: Synthetic oligonucleotide
  Target: ATXN2; (-) strand; PAM type: YTN; PAM sequence: TTT
ttagtaaagacggggttgca

SEQ ID NO: 72486 - DNA, 20 bp, Artificial Sequence
  Description of Artificial Sequence: Synthetic oligonucleotide
  Target: ATXN2; (-) strand; PAM type: YTN; PAM sequence: TTA
tatttttagtaaagacgggg

SEQ ID NO: 72487 - DNA, 20 bp, Artificial Sequence
  Description of Artificial Sequence: Synthetic oligonucleotide
  Target: ATXN2; (-) strand; PAM type: YTN; PAM sequence: TTT
atatttttagtaaagacggg

SEQ ID NO: 72488 - DNA, 20 bp, Artificial Sequence
  Description of Artificial Sequence: Synthetic oligonucleotide
  Target: ATXN2; (-) strand; PAM type: YTN; PAM sequence: TTT
tatatttttagtaaagacgg

SEQ ID NO: 72489 - DNA, 20 bp, Artificial Sequence
  Description of Artificial Sequence: Synthetic oligonucleotide
  Target: ATXN2; (-) strand; PAM type: YTN; PAM sequence: CTA
attttatatttttagtaaag

SEQ ID NO: 72490 - DNA, 20 bp, Artificial Sequence
  Description of Artificial Sequence: Synthetic oligonucleotide
  Target: ATXN2; (-) strand; PAM type: YTN; PAM sequence: CTA
ctaattttatatttttagta

SEQ ID NO: 72491 - DNA, 20 bp, Artificial Sequence
  Description of Artificial Sequence: Synthetic oligonucleotide
  Target: ATXN2; (-) strand; PAM type: YTN; PAM sequence: CTG
ccaccacacctactaatttt

SEQ ID NO: 72492 - DNA, 20 bp, Artificial Sequence
  Description of Artificial Sequence: Synthetic oligonucleotide
  Target: ATXN2; (-) strand; PAM type: YTN; PAM sequence: CTA
taggcgcctgccaccacacc

SEQ ID NO: 72493 - DNA, 20 bp, Artificial Sequence
  Description of Artificial Sequence: Synthetic oligonucleotide
  Target: ATXN2; (-) strand; PAM type: YTN; PAM sequence: CTG
ggactataggcgcctgccac

SEQ ID NO: 72494 - DNA, 20 bp, Artificial Sequence
  Description of Artificial Sequence: Synthetic oligonucleotide
  Target: ATXN2; (-) strand; PAM type: YTN; PAM sequence: TTG
agtagctgggactataggcg

SEQ ID NO: 72495 - DNA, 20 bp, Artificial Sequence
  Description of Artificial Sequence: Synthetic oligonucleotide
  Target: ATXN2; (-) strand; PAM type: YTN; PAM sequence: CTT
gagtagctgggactataggc

SEQ ID NO: 72496 - DNA, 20 bp, Artificial Sequence
  Description of Artificial Sequence: Synthetic oligonucleotide
  Target: ATXN2; (-) strand; PAM type: YTN; PAM sequence: CTC
ttgagtagctgggactatag

SEQ ID NO: 72497 - DNA, 20 bp, Artificial Sequence
  Description of Artificial Sequence: Synthetic oligonucleotide
  Target: ATXN2; (-) strand; PAM type: YTN; PAM sequence: CTC
agcctcttgagtagctggga

SEQ ID NO: 72498 - DNA, 20 bp, Artificial Sequence
  Description of Artificial Sequence: Synthetic oligonucleotide
  Target: ATXN2; (-) strand; PAM type: YTN; PAM sequence: CTG
cctcagcctcttgagtagct

SEQ ID NO: 72499 - DNA, 20 bp, Artificial Sequence
  Description of Artificial Sequence: Synthetic oligonucleotide
  Target: ATXN2; (-) strand; PAM type: YTN; PAM sequence: CTC
ctgcctcagcctcttgagta

SEQ ID NO: 72500 - DNA, 20 bp, Artificial Sequence
  Description of Artificial Sequence: Synthetic oligonucleotide
  Target: ATXN2; (-) strand; PAM type: YTN; PAM sequence: TTC
tcctgcctcagcctcttgag

SEQ ID NO: 72501 - DNA, 20 bp, Artificial Sequence
  Description of Artificial Sequence: Synthetic oligonucleotide
  Target: ATXN2; (-) strand; PAM type: YTN; PAM sequence: TTG
aagcgattctcctgcctcag

SEQ ID NO: 72502 - DNA, 20 bp, Artificial Sequence
  Description of Artificial Sequence: Synthetic oligonucleotide
  Target: ATXN2; (-) strand; PAM type: YTN; PAM sequence: CTC
ccaggttgaagcgattctcc

SEQ ID NO: 72503 - DNA, 20 bp, Artificial Sequence
  Description of Artificial Sequence: Synthetic oligonucleotide
  Target: ATXN2; (-) strand; PAM type: YTN; PAM sequence: CTG
cctcccaggttgaagcgatt

SEQ ID NO: 72504 - DNA, 20 bp, Artificial Sequence
  Description of Artificial Sequence: Synthetic oligonucleotide
  Target: ATXN2; (-) strand; PAM type: YTN; PAM sequence: CTC
tgcctcccaggttgaagcga

SEQ ID NO: 72505 - DNA, 20 bp, Artificial Sequence
  Description of Artificial Sequence: Synthetic oligonucleotide
  Target: ATXN2; (-) strand; PAM type: YTN; PAM sequence: CTG
catcctctgcctcccaggtt

SEQ ID NO: 72506 - DNA, 20 bp, Artificial Sequence
  Description of Artificial Sequence: Synthetic oligonucleotide
  Target: ATXN2; (-) strand; PAM type: YTN; PAM sequence: CTC
actgcatcctctgcctccca

SEQ ID NO: 72507 - DNA, 20 bp, Artificial Sequence
  Description of Artificial Sequence: Synthetic oligonucleotide
  Target: ATXN2; (-) strand; PAM type: YTN; PAM sequence: TTG
cagctcactgcatcctctgc

SEQ ID NO: 72508 - DNA, 20 bp, Artificial Sequence
  Description of Artificial Sequence: Synthetic oligonucleotide
  Target: ATXN2; (-) strand; PAM type: YTN; PAM sequence: CTG
gagcgcagtggcatgattgc

SEQ ID NO: 72509 - DNA, 20 bp, Artificial Sequence
  Description of Artificial Sequence: Synthetic oligonucleotide
  Target: ATXN2; (-) strand; PAM type: YTN; PAM sequence: CTG
tgtcgcccaggctggagcgc

SEQ ID NO: 72510 - DNA, 20 bp, Artificial Sequence
  Description of Artificial Sequence: Synthetic oligonucleotide
  Target: ATXN2; (-) strand; PAM type: YTN; PAM sequence: CTC
actgtgtcgcccaggctgga

SEQ ID NO: 72511 - DNA, 20 bp, Artificial Sequence
  Description of Artificial Sequence: Synthetic oligonucleotide
  Target: ATXN2; (-) strand; PAM type: YTN; PAM sequence: TTG
aaacagagtctcactgtgtc

SEQ ID NO: 72512 - DNA, 20 bp, Artificial Sequence
  Description of Artificial Sequence: Synthetic oligonucleotide
  Target: ATXN2; (-) strand; PAM type: YTN; PAM sequence: TTT
gaaacagagtctcactgtgt

SEQ ID NO: 72513 - DNA, 20 bp, Artificial Sequence
  Description of Artificial Sequence: Synthetic oligonucleotide
  Target: ATXN2; (-) strand; PAM type: YTN; PAM sequence: TTT
tgaaacagagtctcactgtg

SEQ ID NO: 72514 - DNA, 20 bp, Artificial Sequence
  Description of Artificial Sequence: Synthetic oligonucleotide
  Target: ATXN2; (-) strand; PAM type: YTN; PAM sequence: TTT
ttgaaacagagtctcactgt

SEQ ID NO: 72515 - DNA, 20 bp, Artificial Sequence
  Description of Artificial Sequence: Synthetic oligonucleotide
  Target: ATXN2; (-) strand; PAM type: YTN; PAM sequence: TTT
tttgaaacagagtctcactg

SEQ ID NO: 72516 - DNA, 20 bp, Artificial Sequence
  Description of Artificial Sequence: Synthetic oligonucleotide
  Target: ATXN2; (-) strand; PAM type: YTN; PAM sequence: TTT
ttttgaaacagagtctcact

SEQ ID NO: 72517 - DNA, 20 bp, Artificial Sequence
  Description of Artificial Sequence: Synthetic oligonucleotide
  Target: ATXN2; (-) strand; PAM type: YTN; PAM sequence: TTT
tttttgaaacagagtctcac

SEQ ID NO: 72518 - DNA, 20 bp, Artificial Sequence
  Description of Artificial Sequence: Synthetic oligonucleotide
  Target: ATXN2; (-) strand; PAM type: YTN; PAM sequence: TTT
ttttttgaaacagagtctca

SEQ ID NO: 72519 - DNA, 20 bp, Artificial Sequence
  Description of Artificial Sequence: Synthetic oligonucleotide
  Target: ATXN2; (-) strand; PAM type: YTN; PAM sequence: TTT
tttttttgaaacagagtctc

SEQ ID NO: 72520 - DNA, 20 bp, Artificial Sequence
  Description of Artificial Sequence: Synthetic oligonucleotide
  Target: ATXN2; (-) strand; PAM type: YTN; PAM sequence: TTT
ttttttttgaaacagagtct

SEQ ID NO: 72521 - DNA, 20 bp, Artificial Sequence
  Description of Artificial Sequence: Synthetic oligonucleotide
  Target: ATXN2; (-) strand; PAM type: YTN; PAM sequence: TTT
tttttttttgaaacagagtc

SEQ ID NO: 72522 - DNA, 20 bp, Artificial Sequence
  Description of Artificial Sequence: Synthetic oligonucleotide
  Target: ATXN2; (-) strand; PAM type: YTN; PAM sequence: CTT
ttttttttttgaaacagagt

SEQ ID NO: 72523 - DNA, 20 bp, Artificial Sequence
  Description of Artificial Sequence: Synthetic oligonucleotide
  Target: ATXN2; (-) strand; PAM type: YTN; PAM sequence: TTC
ttttttttttttgaaacaga

SEQ ID NO: 72524 - DNA, 20 bp, Artificial Sequence
  Description of Artificial Sequence: Synthetic oligonucleotide
  Target: ATXN2; (-) strand; PAM type: YTN; PAM sequence: TTT
cttttttttttttgaaacag

SEQ ID NO: 72525 - DNA, 20 bp, Artificial Sequence
  Description of Artificial Sequence: Synthetic oligonucleotide
  Target: ATXN2; (-) strand; PAM type: YTN; PAM sequence: TTT
tcttttttttttttgaaaca

SEQ ID NO: 72526 - DNA, 20 bp, Artificial Sequence
  Description of Artificial Sequence: Synthetic oligonucleotide
  Target: ATXN2; (-) strand; PAM type: YTN; PAM sequence: TTT
ttcttttttttttttgaaac

SEQ ID NO: 72527 - DNA, 20 bp, Artificial Sequence
  Description of Artificial Sequence: Synthetic oligonucleotide
  Target: ATXN2; (-) strand; PAM type: YTN; PAM sequence: TTT
tttcttttttttttttgaaa

SEQ ID NO: 72528 - DNA, 20 bp, Artificial Sequence
  Description of Artificial Sequence: Synthetic oligonucleotide
  Target: ATXN2; (-) strand; PAM type: YTN; PAM sequence: TTT
ttttcttttttttttttgaa

SEQ ID NO: 72529 - DNA, 20 bp, Artificial Sequence
  Description of Artificial Sequence: Synthetic oligonucleotide
  Target: ATXN2; (-) strand; PAM type: YTN; PAM sequence: TTT
tttttcttttttttttttga

SEQ ID NO: 72530 - DNA, 20 bp, Artificial Sequence
  Description of Artificial Sequence: Synthetic oligonucleotide
  Target: ATXN2; (-) strand; PAM type: YTN; PAM sequence: TTT
ttttttcttttttttttttg

SEQ ID NO: 72531 - DNA, 20 bp, Artificial Sequence
  Description of Artificial Sequence: Synthetic oligonucleotide
  Target: ATXN2; (-) strand; PAM type: YTN; PAM sequence: CTT
tttttttctttttttttttt

SEQ ID NO: 72532 - DNA, 20 bp, Artificial Sequence
  Description of Artificial Sequence: Synthetic oligonucleotide
  Target: ATXN2; (-) strand; PAM type: YTN; PAM sequence: TTA
atggaatcatataatatata

SEQ ID NO: 72533 - DNA, 20 bp, Artificial Sequence
  Description of Artificial Sequence: Synthetic oligonucleotide
  Target: ATXN2; (-) strand; PAM type: YTN; PAM sequence: TTG
cgtattaatggaatcatata

SEQ ID NO: 72534 - DNA, 20 bp, Artificial Sequence
  Description of Artificial Sequence: Synthetic oligonucleotide
  Target: ATXN2; (-) strand; PAM type: YTN; PAM sequence: CTG
gacattgcgtattaatggaa

SEQ ID NO: 72535 - DNA, 20 bp, Artificial Sequence
  Description of Artificial Sequence: Synthetic oligonucleotide
  Target: ATXN2; (-) strand; PAM type: YTN; PAM sequence: TTC
tggacattgcgtattaatgg

SEQ ID NO: 72536 - DNA, 20 bp, Artificial Sequence
  Description of Artificial Sequence: Synthetic oligonucleotide
  Target: ATXN2; (-) strand; PAM type: YTN; PAM sequence: TTG
cccattctggacattgcgta

SEQ ID NO: 72537 - DNA, 20 bp, Artificial Sequence
  Description of Artificial Sequence: Synthetic oligonucleotide
  Target: ATXN2; (-) strand; PAM type: YTN; PAM sequence: TTT
gcccattctggacattgcgt

SEQ ID NO: 72538 - DNA, 20 bp, Artificial Sequence
  Description of Artificial Sequence: Synthetic oligonucleotide
  Target: ATXN2; (-) strand; PAM type: YTN; PAM sequence: TTC
ataggtttgcccattctgga

SEQ ID NO: 72539 - DNA, 20 bp, Artificial Sequence
  Description of Artificial Sequence: Synthetic oligonucleotide
  Target: ATXN2; (-) strand; PAM type: YTN; PAM sequence: CTT
cataggtttgcccattctgg

SEQ ID NO: 72540 - DNA, 20 bp, Artificial Sequence
  Description of Artificial Sequence: Synthetic oligonucleotide
  Target: ATXN2; (-) strand; PAM type: YTN; PAM sequence: TTG
tcttcataggtttgcccatt

SEQ ID NO: 72541 - DNA, 20 bp, Artificial Sequence
  Description of Artificial Sequence: Synthetic oligonucleotide
  Target: ATXN2; (-) strand; PAM type: YTN; PAM sequence: TTA
ttgtcttcataggtttgccc

SEQ ID NO: 72542 - DNA, 20 bp, Artificial Sequence
  Description of Artificial Sequence: Synthetic oligonucleotide
  Target: ATXN2; (-) strand; PAM type: YTN; PAM sequence: TTT
attgtcttcataggtttgcc

SEQ ID NO: 72543 - DNA, 20 bp, Artificial Sequence
  Description of Artificial Sequence: Synthetic oligonucleotide
  Target: ATXN2; (-) strand; PAM type: YTN; PAM sequence: TTG
atttattgtcttcataggtt

SEQ ID NO: 72544 - DNA, 20 bp, Artificial Sequence
  Description of Artificial Sequence: Synthetic oligonucleotide
  Target: ATXN2; (-) strand; PAM type: YTN; PAM sequence: CTA
ttgatttattgtcttcatag

SEQ ID NO: 72545 - DNA, 20 bp, Artificial Sequence
  Description of Artificial Sequence: Synthetic oligonucleotide
  Target: ATXN2; (-) strand; PAM type: YTN; PAM sequence: CTC
caggcaactattgatttatt

SEQ ID NO: 72546 - DNA, 20 bp, Artificial Sequence
  Description of Artificial Sequence: Synthetic oligonucleotide
  Target: ATXN2; (-) strand; PAM type: YTN; PAM sequence: TTC
cccagctccaggcaactatt

SEQ ID NO: 72547 - DNA, 20 bp, Artificial Sequence
  Description of Artificial Sequence: Synthetic oligonucleotide
  Target: ATXN2; (-) strand; PAM type: YTN; PAM sequence: TTT
ccccagctccaggcaactat

SEQ ID NO: 72548 - DNA, 20 bp, Artificial Sequence
  Description of Artificial Sequence: Synthetic oligonucleotide
  Target: ATXN2; (-) strand; PAM type: YTN; PAM sequence: TTT
tccccagctccaggcaacta

SEQ ID NO: 72549 - DNA, 20 bp, Artificial Sequence
  Description of Artificial Sequence: Synthetic oligonucleotide
  Target: ATXN2; (-) strand; PAM type: YTN; PAM sequence: TTC
aattttccccagctccaggc

SEQ ID NO: 72550 - DNA, 20 bp, Artificial Sequence
  Description of Artificial Sequence: Synthetic oligonucleotide
  Target: ATXN2; (-) strand; PAM type: YTN; PAM sequence: TTT
caattttccccagctccagg

SEQ ID NO: 72551 - DNA, 20 bp, Artificial Sequence
  Description of Artificial Sequence: Synthetic oligonucleotide
  Target: ATXN2; (-) strand; PAM type: YTN; PAM sequence: TTG
tttcaattttccccagctcc

SEQ ID NO: 72552 - DNA, 20 bp, Artificial Sequence
  Description of Artificial Sequence: Synthetic oligonucleotide
  Target: ATXN2; (-) strand; PAM type: YTN; PAM sequence: TTT
gtttcaattttccccagctc

SEQ ID NO: 72553 - DNA, 20 bp, Artificial Sequence
  Description of Artificial Sequence: Synthetic oligonucleotide
  Target: ATXN2; (-) strand; PAM type: YTN; PAM sequence: CTG
tttgtttcaattttccccag

SEQ ID NO: 72554 - DNA, 20 bp, Artificial Sequence
  Description of Artificial Sequence: Synthetic oligonucleotide
  Target: ATXN2; (-) strand; PAM type: YTN; PAM sequence: CTC
tgtttgtttcaattttcccc

SEQ ID NO: 72555 - DNA, 20 bp, Artificial Sequence
  Description of Artificial Sequence: Synthetic oligonucleotide
  Target: ATXN2; (-) strand; PAM type: YTN; PAM sequence: CTC
tctgtttgtttcaattttcc

SEQ ID NO: 72556 - DNA, 20 bp, Artificial Sequence
  Description of Artificial Sequence: Synthetic oligonucleotide
  Target: ATXN2; (-) strand; PAM type: YTN; PAM sequence: TTC
ctctctgtttgtttcaattt

SEQ ID NO: 72557 - DNA, 20 bp, Artificial Sequence
  Description of Artificial Sequence: Synthetic oligonucleotide
  Target: ATXN2; (-) strand; PAM type: YTN; PAM sequence: TTA
gcagttcctctctgtttgtt

SEQ ID NO: 72558 - DNA, 20 bp, Artificial Sequence
  Description of Artificial Sequence: Synthetic oligonucleotide
  Target: ATXN2; (-) strand; PAM type: YTN; PAM sequence: CTT
agcagttcctctctgtttgt

SEQ ID NO: 72559 - DNA, 20 bp, Artificial Sequence
  Description of Artificial Sequence: Synthetic oligonucleotide
  Target: ATXN2; (-) strand; PAM type: YTN; PAM sequence: CTG
aaccccttagcagttcctct

SEQ ID NO: 72560 - DNA, 20 bp, Artificial Sequence
  Description of Artificial Sequence: Synthetic oligonucleotide
  Target: ATXN2; (-) strand; PAM type: YTN; PAM sequence: CTC
tgaaccccttagcagttcct

SEQ ID NO: 72561 - DNA, 20 bp, Artificial Sequence
  Description of Artificial Sequence: Synthetic oligonucleotide
  Target: ATXN2; (-) strand; PAM type: YTN; PAM sequence: CTG
aaaagaaactctgaacccct

SEQ ID NO: 72562 - DNA, 20 bp, Artificial Sequence
  Description of Artificial Sequence: Synthetic oligonucleotide
  Target: ATXN2; (-) strand; PAM type: YTN; PAM sequence: TTC
atcaccctgaaaagaaactc

SEQ ID NO: 72563 - DNA, 20 bp, Artificial Sequence
  Description of Artificial Sequence: Synthetic oligonucleotide
  Target: ATXN2; (-) strand; PAM type: YTN; PAM sequence: TTT
catcaccctgaaaagaaact

SEQ ID NO: 72564 - DNA, 20 bp, Artificial Sequence
  Description of Artificial Sequence: Synthetic oligonucleotide
  Target: ATXN2; (-) strand; PAM type: YTN; PAM sequence: TTT
tcatcaccctgaaaagaaac

SEQ ID NO: 72565 - DNA, 20 bp, Artificial Sequence
  Description of Artificial Sequence: Synthetic oligonucleotide
  Target: ATXN2; (-) strand; PAM type: YTN; PAM sequence: TTA
cattttcatcaccctgaaaa

SEQ ID NO: 72566 - DNA, 20 bp, Artificial Sequence
  Description of Artificial Sequence: Synthetic oligonucleotide
  Target: ATXN2; (-) strand; PAM type: YTN; PAM sequence: TTT
acattttcatcaccctgaaa

SEQ ID NO: 72567 - DNA, 20 bp, Artificial Sequence
  Description of Artificial Sequence: Synthetic oligonucleotide
  Target: ATXN2; (-) strand; PAM type: YTN; PAM sequence: CTA
caatcaatttacattttcat

SEQ ID NO: 72568 - DNA, 20 bp, Artificial Sequence
  Description of Artificial Sequence: Synthetic oligonucleotide
  Target: ATXN2; (-) strand; PAM type: YTN; PAM sequence: TTG
tgcaaccatcactacaatca

SEQ ID NO: 72569 - DNA, 20 bp, Artificial Sequence
  Description of Artificial Sequence: Synthetic oligonucleotide
  Target: ATXN2; (-) strand; PAM type: YTN; PAM sequence: TTC
acagcattgtgcaaccatca

SEQ ID NO: 72570 - DNA, 20 bp, Artificial Sequence
  Description of Artificial Sequence: Synthetic oligonucleotide
  Target: ATXN2; (-) strand; PAM type: YTN; PAM sequence: TTA
aaatatattcacagcattgt

SEQ ID NO: 72571 - DNA, 20 bp, Artificial Sequence
  Description of Artificial Sequence: Synthetic oligonucleotide
  Target: ATXN2; (-) strand; PAM type: YTN; PAM sequence: TTT
aaaatatattcacagcattg

SEQ ID NO: 72572 - DNA, 20 bp, Artificial Sequence
  Description of Artificial Sequence: Synthetic oligonucleotide
  Target: ATXN2; (-) strand; PAM type: YTN; PAM sequence: TTT
taaaatatattcacagcatt

SEQ ID NO: 72573 - DNA, 20 bp, Artificial Sequence
  Description of Artificial Sequence: Synthetic oligonucleotide
  Target: ATXN2; (-) strand; PAM type: YTN; PAM sequence: TTT
ttaaaatatattcacagcat

SEQ ID NO: 72574 - DNA, 20 bp, Artificial Sequence
  Description of Artificial Sequence: Synthetic oligonucleotide
  Target: ATXN2; (-) strand; PAM type: YTN; PAM sequence: TTT
tttaaaatatattcacagca

SEQ ID NO: 72575 - DNA, 20 bp, Artificial Sequence
  Description of Artificial Sequence: Synthetic oligonucleotide
  Target: ATXN2; (-) strand; PAM type: YTN; PAM sequence: CTC
ccagcccattttttaaaata

SEQ ID NO: 72576 - DNA, 20 bp, Artificial Sequence
  Description of Artificial Sequence: Synthetic oligonucleotide
  Target: ATXN2; (-) strand; PAM type: YTN; PAM sequence: CTG
ctcccagcccattttttaaa

SEQ ID NO: 72577 - DNA, 20 bp, Artificial Sequence
  Description of Artificial Sequence: Synthetic oligonucleotide
  Target: ATXN2; (-) strand; PAM type: YTN; PAM sequence: CTC
tgctcccagcccatttttta

SEQ ID NO: 72578 - DNA, 20 bp, Artificial Sequence
  Description of Artificial Sequence: Synthetic oligonucleotide
  Target: ATXN2; (-) strand; PAM type: YTN; PAM sequence: TTA
caggcatgaacctctgctcc

SEQ ID NO: 72579 - DNA, 20 bp, Artificial Sequence
  Description of Artificial Sequence: Synthetic oligonucleotide
  Target: ATXN2; (-) strand; PAM type: YTN; PAM sequence: CTG
ggattacaggcatgaacctc

SEQ ID NO: 72580 - DNA, 20 bp, Artificial Sequence
  Description of Artificial Sequence: Synthetic oligonucleotide
  Target: ATXN2; (-) strand; PAM type: YTN; PAM sequence: CTC
ccaaagtgctgggattacag

SEQ ID NO: 72581 - DNA, 20 bp, Artificial Sequence
  Description of Artificial Sequence: Synthetic oligonucleotide
  Target: ATXN2; (-) strand; PAM type: YTN; PAM sequence: CTG
ccccagcctcccaaagtgct

SEQ ID NO: 72582 - DNA, 20 bp, Artificial Sequence
  Description of Artificial Sequence: Synthetic oligonucleotide
  Target: ATXN2; (-) strand; PAM type: YTN; PAM sequence: CTC
ctgccccagcctcccaaagt

SEQ ID NO: 72583 - DNA, 20 bp, Artificial Sequence
  Description of Artificial Sequence: Synthetic oligonucleotide
  Target: ATXN2; (-) strand; PAM type: YTN; PAM sequence: CTC
aaatgatcctcctgccccag

SEQ ID NO: 72584 - DNA, 20 bp, Artificial Sequence
  Description of Artificial Sequence: Synthetic oligonucleotide
  Target: ATXN2; (-) strand; PAM type: YTN; PAM sequence: CTG
ggcctcaaatgatcctcctg

SEQ ID NO: 72585 - DNA, 20 bp, Artificial Sequence
  Description of Artificial Sequence: Synthetic oligonucleotide
  Target: ATXN2; (-) strand; PAM type: YTN; PAM sequence: CTC
tgggcctcaaatgatcctcc

SEQ ID NO: 72586 - DNA, 20 bp, Artificial Sequence
  Description of Artificial Sequence: Synthetic oligonucleotide
  Target: ATXN2; (-) strand; PAM type: YTN; PAM sequence: CTC
aaactctgggcctcaaatga

SEQ ID NO: 72587 - DNA, 20 bp, Artificial Sequence
  Description of Artificial Sequence: Synthetic oligonucleotide
  Target: ATXN2; (-) strand; PAM type: YTN; PAM sequence: CTG
gtctcaaactctgggcctca

SEQ ID NO: 72588 - DNA, 20 bp, Artificial Sequence
  Description of Artificial Sequence: Synthetic oligonucleotide
  Target: ATXN2; (-) strand; PAM type: YTN; PAM sequence: TTG
cccaggctggtctcaaactc

SEQ ID NO: 72589 - DNA, 20 bp, Artificial Sequence
  Description of Artificial Sequence: Synthetic oligonucleotide
  Target: ATXN2; (-) strand; PAM type: YTN; PAM sequence: TTA
tgttgcccaggctggtctca

SEQ ID NO: 72590 - DNA, 20 bp, Artificial Sequence
  Description of Artificial Sequence: Synthetic oligonucleotide
  Target: ATXN2; (-) strand; PAM type: YTN; PAM sequence: CTC
attatgttgcccaggctggt

SEQ ID NO: 72591 - DNA, 20 bp, Artificial Sequence
  Description of Artificial Sequence: Synthetic oligonucleotide
  Target: ATXN2; (-) strand; PAM type: YTN; PAM sequence: TTG
atgaggtctcattatgttgc

SEQ ID NO: 72592 - DNA, 20 bp, Artificial Sequence
  Description of Artificial Sequence: Synthetic oligonucleotide
  Target: ATXN2; (-) strand; PAM type: YTN; PAM sequence: TTT
gatgaggtctcattatgttg

SEQ ID NO: 72593 - DNA, 20 bp, Artificial Sequence
  Description of Artificial Sequence: Synthetic oligonucleotide
  Target: ATXN2; (-) strand; PAM type: YTN; PAM sequence: TTG
tttgatgaggtctcattatg

SEQ ID NO: 72594 - DNA, 20 bp, Artificial Sequence
  Description of Artificial Sequence: Synthetic oligonucleotide
  Target: ATXN2; (-) strand; PAM type: YTN; PAM sequence: TTT
gtttgatgaggtctcattat

SEQ ID NO: 72595 - DNA, 20 bp, Artificial Sequence
  Description of Artificial Sequence: Synthetic oligonucleotide
  Target: ATXN2; (-) strand; PAM type: YTN; PAM sequence: TTT
tgtttgatgaggtctcatta

SEQ ID NO: 72596 - DNA, 20 bp, Artificial Sequence
  Description of Artificial Sequence: Synthetic oligonucleotide
  Target: ATXN2; (-) strand; PAM type: YTN; PAM sequence: TTT
ttgtttgatgaggtctcatt

SEQ ID NO: 72597 - DNA, 20 bp, Artificial Sequence
  Description of Artificial Sequence: Synthetic oligonucleotide
  Target: ATXN2; (-) strand; PAM type: YTN; PAM sequence: TTT
tttgtttgatgaggtctcat

SEQ ID NO: 72598 - DNA, 20 bp, Artificial Sequence
  Description of Artificial Sequence: Synthetic oligonucleotide
  Target: ATXN2; (-) strand; PAM type: YTN; PAM sequence: TTA
ttttttgtttgatgaggtct

SEQ ID NO: 72599 - DNA, 20 bp, Artificial Sequence
  Description of Artificial Sequence: Synthetic oligonucleotide
  Target: ATXN2; (-) strand; PAM type: YTN; PAM sequence: TTG
ttattttttgtttgatgagg

SEQ ID NO: 72600 - DNA, 20 bp, Artificial Sequence
  Description of Artificial Sequence: Synthetic oligonucleotide
  Target: ATXN2; (-) strand; PAM type: YTN; PAM sequence: TTG
ttgttattttttgtttgatg

SEQ ID NO: 72601 - DNA, 20 bp, Artificial Sequence
  Description of Artificial Sequence: Synthetic oligonucleotide
  Target: ATXN2; (-) strand; PAM type: YTN; PAM sequence: TTT
gttgttattttttgtttgat

SEQ ID NO: 72602 - DNA, 20 bp, Artificial Sequence
  Description of Artificial Sequence: Synthetic oligonucleotide
  Target: ATXN2; (-) strand; PAM type: YTN; PAM sequence: TTT
tgttgttattttttgtttga

SEQ ID NO: 72603 - DNA, 20 bp, Artificial Sequence
  Description of Artificial Sequence: Synthetic oligonucleotide
  Target: ATXN2; (-) strand; PAM type: YTN; PAM sequence: TTT
ttgttgttattttttgtttg

SEQ ID NO: 72604 - DNA, 20 bp, Artificial Sequence
  Description of Artificial Sequence: Synthetic oligonucleotide
  Target: ATXN2; (-) strand; PAM type: YTN; PAM sequence: CTA
atttttgttgttattttttg

SEQ ID NO: 72605 - DNA, 20 bp, Artificial Sequence
  Description of Artificial Sequence: Synthetic oligonucleotide
  Target: ATXN2; (-) strand; PAM type: YTN; PAM sequence: CTG
gctaatttttgttgttattt

SEQ ID NO: 72606 - DNA, 20 bp, Artificial Sequence
  Description of Artificial Sequence: Synthetic oligonucleotide
  Target: ATXN2; (-) strand; PAM type: YTN; PAM sequence: CTC
ctggctaatttttgttgtta

SEQ ID NO: 72607 - DNA, 20 bp, Artificial Sequence
  Description of Artificial Sequence: Synthetic oligonucleotide
  Target: ATXN2; (-) strand; PAM type: YTN; PAM sequence: CTG
cagatgtgtatcaccactcc

SEQ ID NO: 72608 - DNA, 20 bp, Artificial Sequence
  Description of Artificial Sequence: Synthetic oligonucleotide
  Target: ATXN2; (-) strand; PAM type: YTN; PAM sequence: CTG
ggactgcagatgtgtatcac

SEQ ID NO: 72609 - DNA, 20 bp, Artificial Sequence
  Description of Artificial Sequence: Synthetic oligonucleotide
  Target: ATXN2; (-) strand; PAM type: YTN; PAM sequence: TTA
agctgggactgcagatgtgt

SEQ ID NO: 72610 - DNA, 20 bp, Artificial Sequence
  Description of Artificial Sequence: Synthetic oligonucleotide
  Target: ATXN2; (-) strand; PAM type: YTN; PAM sequence: CTG
attaagctgggactgcagat

SEQ ID NO: 72611 - DNA, 20 bp, Artificial Sequence
  Description of Artificial Sequence: Synthetic oligonucleotide
  Target: ATXN2; (-) strand; PAM type: YTN; PAM sequence: CTC
ctgattaagctgggactgca

SEQ ID NO: 72612 - DNA, 20 bp, Artificial Sequence
  Description of Artificial Sequence: Synthetic oligonucleotide
  Target: ATXN2; (-) strand; PAM type: YTN; PAM sequence: TTA
gcctcctgattaagctggga

SEQ ID NO: 72613 - DNA, 20 bp, Artificial Sequence
  Description of Artificial Sequence: Synthetic oligonucleotide
  Target: ATXN2; (-) strand; PAM type: YTN; PAM sequence: CTT
agcctcctgattaagctggg

SEQ ID NO: 72614 - DNA, 20 bp, Artificial Sequence
  Description of Artificial Sequence: Synthetic oligonucleotide
  Target: ATXN2; (-) strand; PAM type: YTN; PAM sequence: TTC
accttagcctcctgattaag

SEQ ID NO: 72615 - DNA, 20 bp, Artificial Sequence
  Description of Artificial Sequence: Synthetic oligonucleotide
  Target: ATXN2; (-) strand; PAM type: YTN; PAM sequence: TTC
aggtgattcaccttagcctc

SEQ ID NO: 72616 - DNA, 20 bp, Artificial Sequence
  Description of Artificial Sequence: Synthetic oligonucleotide
  Target: ATXN2; (-) strand; PAM type: YTN; PAM sequence: CTC
atgggttcaggtgattcacc

SEQ ID NO: 72617 - DNA, 20 bp, Artificial Sequence
  Description of Artificial Sequence: Synthetic oligonucleotide
  Target: ATXN2; (-) strand; PAM type: YTN; PAM sequence: CTC
aaactcatgggttcaggtga

SEQ ID NO: 72618 - DNA, 20 bp, Artificial Sequence
  Description of Artificial Sequence: Synthetic oligonucleotide
  Target: ATXN2; (-) strand; PAM type: YTN; PAM sequence: CTC
accataacctcaaactcatg

SEQ ID NO: 72619 - DNA, 20 bp, Artificial Sequence
  Description of Artificial Sequence: Synthetic oligonucleotide
  Target: ATXN2; (-) strand; PAM type: YTN; PAM sequence: CTG
gagtgcagtggcgccatcgt

SEQ ID NO: 72620 - DNA, 20 bp, Artificial Sequence
  Description of Artificial Sequence: Synthetic oligonucleotide
  Target: ATXN2; (-) strand; PAM type: YTN; PAM sequence: TTG
tccaggctggagtgcagtgg

SEQ ID NO: 72621 - DNA, 20 bp, Artificial Sequence
  Description of Artificial Sequence: Synthetic oligonucleotide
  Target: ATXN2; (-) strand; PAM type: YTN; PAM sequence: TTG
ttgtccaggctggagtgcag

SEQ ID NO: 72622 - DNA, 20 bp, Artificial Sequence
  Description of Artificial Sequence: Synthetic oligonucleotide
  Target: ATXN2; (-) strand; PAM type: YTN; PAM sequence: TTT
gttgtccaggctggagtgca

SEQ ID NO: 72623 - DNA, 20 bp, Artificial Sequence
  Description of Artificial Sequence: Synthetic oligonucleotide
  Target: ATXN2; (-) strand; PAM type: YTN; PAM sequence: TTT
tgttgtccaggctggagtgc

SEQ ID NO: 72624 - DNA, 20 bp, Artificial Sequence
  Description of Artificial Sequence: Synthetic oligonucleotide
  Target: ATXN2; (-) strand; PAM type: YTN; PAM sequence: CTC
attttgttgtccaggctgga

SEQ ID NO: 72625 - DNA, 20 bp, Artificial Sequence
  Description of Artificial Sequence: Synthetic oligonucleotide
  Target: ATXN2; (-) strand; PAM type: YTN; PAM sequence: TTG
agacagggtctcattttgtt

SEQ ID NO: 72626 - DNA, 20 bp, Artificial Sequence
  Description of Artificial Sequence: Synthetic oligonucleotide
  Target: ATXN2; (-) strand; PAM type: YTN; PAM sequence: TTT
gagacagggtctcattttgt

SEQ ID NO: 72627 - DNA, 20 bp, Artificial Sequence
  Description of Artificial Sequence: Synthetic oligonucleotide
  Target: ATXN2; (-) strand; PAM type: YTN; PAM sequence: TTT
tgagacagggtctcattttg

SEQ ID NO: 72628 - DNA, 20 bp, Artificial Sequence
  Description of Artificial Sequence: Synthetic oligonucleotide
  Target: ATXN2; (-) strand; PAM type: YTN; PAM sequence: CTA
ttttgagacagggtctcatt

SEQ ID NO: 72629 - DNA, 20 bp, Artificial Sequence
  Description of Artificial Sequence: Synthetic oligonucleotide
  Target: ATXN2; (-) strand; PAM type: YTN; PAM sequence: TTC
tattttgagacagggtctca

SEQ ID NO: 72630 - DNA, 20 bp, Artificial Sequence
  Description of Artificial Sequence: Synthetic oligonucleotide
  Target: ATXN2; (-) strand; PAM type: YTN; PAM sequence: CTT
ctattttgagacagggtctc

SEQ ID NO: 72631 - DNA, 20 bp, Artificial Sequence
  Description of Artificial Sequence: Synthetic oligonucleotide
  Target: ATXN2; (-) strand; PAM type: YTN; PAM sequence: TTC
ttctattttgagacagggtc

SEQ ID NO: 72632 - DNA, 20 bp, Artificial Sequence
  Description of Artificial Sequence: Synthetic oligonucleotide
  Target: ATXN2; (-) strand; PAM type: YTN; PAM sequence: TTT
cttctattttgagacagggt

SEQ ID NO: 72633 - DNA, 20 bp, Artificial Sequence
  Description of Artificial Sequence: Synthetic oligonucleotide
  Target: ATXN2; (-) strand; PAM type: YTN; PAM sequence: TTT
tcttctattttgagacaggg

SEQ ID NO: 72634 - DNA, 20 bp, Artificial Sequence
  Description of Artificial Sequence: Synthetic oligonucleotide
  Target: ATXN2; (-) strand; PAM type: YTN; PAM sequence: TTT
ttcttctattttgagacagg

SEQ ID NO: 72635 - DNA, 20 bp, Artificial Sequence
  Description of Artificial Sequence: Synthetic oligonucleotide
  Target: ATXN2; (-) strand; PAM type: YTN; PAM sequence: TTT
tttcttctattttgagacag

SEQ ID NO: 72636 - DNA, 20 bp, Artificial Sequence
  Description of Artificial Sequence: Synthetic oligonucleotide
  Target: ATXN2; (-) strand; PAM type: YTN; PAM sequence: TTT
ttttcttctattttgagaca

SEQ ID NO: 72637 - DNA, 20 bp, Artificial Sequence
  Description of Artificial Sequence: Synthetic oligonucleotide
  Target: ATXN2; (-) strand; PAM type: YTN; PAM sequence: TTT
tttttcttctattttgagac

SEQ ID NO: 72638 - DNA, 20 bp, Artificial Sequence
  Description of Artificial Sequence: Synthetic oligonucleotide
  Target: ATXN2; (-) strand; PAM type: YTN; PAM sequence: TTT
ttttttcttctattttgaga

SEQ ID NO: 72639 - DNA, 20 bp, Artificial Sequence
  Description of Artificial Sequence: Synthetic oligonucleotide
  Target: ATXN2; (-) strand; PAM type: YTN; PAM sequence: TTT
tttttttcttctattttgag

SEQ ID NO: 72640 - DNA, 20 bp, Artificial Sequence
  Description of Artificial Sequence: Synthetic oligonucleotide
  Target: ATXN2; (-) strand; PAM type: YTN; PAM sequence: TTT
ttttttttcttctattttga

SEQ ID NO: 72641 - DNA, 20 bp, Artificial Sequence
  Description of Artificial Sequence: Synthetic oligonucleotide
  Target: ATXN2; (-) strand; PAM type: YTN; PAM sequence: TTA
ggtttttttttttcttctat

SEQ ID NO: 72642 - DNA, 20 bp, Artificial Sequence
  Description of Artificial Sequence: Synthetic oligonucleotide
  Target: ATXN2; (-) strand; PAM type: YTN; PAM sequence: TTG
agatagggagaaaattaggt

SEQ ID NO: 72643 - DNA, 20 bp, Artificial Sequence
  Description of Artificial Sequence: Synthetic oligonucleotide
  Target: ATXN2; (-) strand; PAM type: YTN; PAM sequence: TTT
gagatagggagaaaattagg

SEQ ID NO: 72644 - DNA, 20 bp, Artificial Sequence
  Description of Artificial Sequence: Synthetic oligonucleotide
  Target: ATXN2; (-) strand; PAM type: YTN; PAM sequence: TTC
atttgagatagggagaaaat

SEQ ID NO: 72645 - DNA, 20 bp, Artificial Sequence
  Description of Artificial Sequence: Synthetic oligonucleotide
  Target: ATXN2; (-) strand; PAM type: YTN; PAM sequence: TTA
atcattcatttgagataggg

SEQ ID NO: 72646 - DNA, 20 bp, Artificial Sequence
  Description of Artificial Sequence: Synthetic oligonucleotide
  Target: ATXN2; (-) strand; PAM type: YTN; PAM sequence: TTT
aatcattcatttgagatagg

SEQ ID NO: 72647 - DNA, 20 bp, Artificial Sequence
  Description of Artificial Sequence: Synthetic oligonucleotide
  Target: ATXN2; (-) strand; PAM type: YTN; PAM sequence: CTA
gaaaatttaatcattcattt

SEQ ID NO: 72648 - DNA, 20 bp, Artificial Sequence
  Description of Artificial Sequence: Synthetic oligonucleotide
  Target: ATXN2; (-) strand; PAM type: YTN; PAM sequence: TTA
tcgtagtgctagaaaattta

SEQ ID NO: 72649 - DNA, 20 bp, Artificial Sequence
  Description of Artificial Sequence: Synthetic oligonucleotide
  Target: ATXN2; (-) strand; PAM type: YTN; PAM sequence: TTT
atcgtagtgctagaaaattt

SEQ ID NO: 72650 - DNA, 20 bp, Artificial Sequence
  Description of Artificial Sequence: Synthetic oligonucleotide
  Target: ATXN2; (-) strand; PAM type: YTN; PAM sequence: CTT
tatcgtagtgctagaaaatt

SEQ ID NO: 72651 - DNA, 20 bp, Artificial Sequence
  Description of Artificial Sequence: Synthetic oligonucleotide
  Target: ATXN2; (-) strand; PAM type: YTN; PAM sequence: CTC
actttatcgtagtgctagaa

SEQ ID NO: 72652 - DNA, 20 bp, Artificial Sequence
  Description of Artificial Sequence: Synthetic oligonucleotide
  Target: ATXN2; (-) strand; PAM type: YTN; PAM sequence: TTA
tctcactttatcgtagtgct

SEQ ID NO: 72653 - DNA, 20 bp, Artificial Sequence
  Description of Artificial Sequence: Synthetic oligonucleotide
  Target: ATXN2; (-) strand; PAM type: YTN; PAM sequence: TTT
atctcactttatcgtagtgc

SEQ ID NO: 72654 - DNA, 20 bp, Artificial Sequence
  Description of Artificial Sequence: Synthetic oligonucleotide
  Target: ATXN2; (-) strand; PAM type: YTN; PAM sequence: TTT
tatctcactttatcgtagtg

SEQ ID NO: 72655 - DNA, 20 bp, Artificial Sequence
  Description of Artificial Sequence: Synthetic oligonucleotide
  Target: ATXN2; (-) strand; PAM type: YTN; PAM sequence: CTA
ttttatctcactttatcgta

SEQ ID NO: 72656 - DNA, 20 bp, Artificial Sequence
  Description of Artificial Sequence: Synthetic oligonucleotide
  Target: ATXN2; (-) strand; PAM type: YTN; PAM sequence: TTC
tattttatctcactttatcg

SEQ ID NO: 72657 - DNA, 20 bp, Artificial Sequence
  Description of Artificial Sequence: Synthetic oligonucleotide
  Target: ATXN2; (-) strand; PAM type: YTN; PAM sequence: TTT
ctattttatctcactttatc

SEQ ID NO: 72658 - DNA, 20 bp, Artificial Sequence
  Description of Artificial Sequence: Synthetic oligonucleotide
  Target: ATXN2; (-) strand; PAM type: YTN; PAM sequence: TTT
tctattttatctcactttat

SEQ ID NO: 72659 - DNA, 20 bp, Artificial Sequence
  Description of Artificial Sequence: Synthetic oligonucleotide
  Target: ATXN2; (-) strand; PAM type: YTN; PAM sequence: TTT
ttctattttatctcacttta

SEQ ID NO: 72660 - DNA, 20 bp, Artificial Sequence
  Description of Artificial Sequence: Synthetic oligonucleotide
  Target: ATXN2; (-) strand; PAM type: YTN; PAM sequence: TTT
tttctattttatctcacttt

SEQ ID NO: 72661 - DNA, 20 bp, Artificial Sequence
  Description of Artificial Sequence: Synthetic oligonucleotide
  Target: ATXN2; (-) strand; PAM type: YTN; PAM sequence: TTT
ttttctattttatctcactt

SEQ ID NO: 72662 - DNA, 20 bp, Artificial Sequence
  Description of Artificial Sequence: Synthetic oligonucleotide
  Target: ATXN2; (-) strand; PAM type: YTN; PAM sequence: TTT
tttttctattttatctcact

SEQ ID NO: 72663 - DNA, 20 bp, Artificial Sequence
  Description of Artificial Sequence: Synthetic oligonucleotide
  Target: ATXN2; (-) strand; PAM type: YTN; PAM sequence: TTA
gggattttttttctatttta

SEQ ID NO: 72664 - DNA, 20 bp, Artificial Sequence
  Description of Artificial Sequence: Synthetic oligonucleotide
  Target: ATXN2; (-) strand; PAM type: YTN; PAM sequence: CTT
agggattttttttctatttt

SEQ ID NO: 72665 - DNA, 20 bp, Artificial Sequence
  Description of Artificial Sequence: Synthetic oligonucleotide
  Target: ATXN2; (-) strand; PAM type: YTN; PAM sequence: CTC
ttagggattttttttctatt

SEQ ID NO: 72666 - DNA, 20 bp, Artificial Sequence
  Description of Artificial Sequence: Synthetic oligonucleotide
  Target: ATXN2; (-) strand; PAM type: YTN; PAM sequence: TTC
tcttagggattttttttcta

SEQ ID NO: 72667 - DNA, 20 bp, Artificial Sequence
  Description of Artificial Sequence: Synthetic oligonucleotide
  Target: ATXN2; (-) strand; PAM type: YTN; PAM sequence: TTT
ctcttagggattttttttct

SEQ ID NO: 72668 - DNA, 20 bp, Artificial Sequence
  Description of Artificial Sequence: Synthetic oligonucleotide
  Target: ATXN2; (-) strand; PAM type: YTN; PAM sequence: TTT
tctcttagggattttttttc

SEQ ID NO: 72669 - DNA, 20 bp, Artificial Sequence
  Description of Artificial Sequence: Synthetic oligonucleotide
  Target: ATXN2; (-) strand; PAM type: YTN; PAM sequence: TTT
ttctcttagggatttttttt

SEQ ID NO: 72670 - DNA, 20 bp, Artificial Sequence
  Description of Artificial Sequence: Synthetic oligonucleotide
  Target: ATXN2; (-) strand; PAM type: YTN; PAM sequence: TTA
aataggatatatttttctct

SEQ ID NO: 72671 - DNA, 20 bp, Artificial Sequence
  Description of Artificial Sequence: Synthetic oligonucleotide
  Target: ATXN2; (-) strand; PAM type: YTN; PAM sequence: CTT
aaataggatatatttttctc

SEQ ID NO: 72672 - DNA, 20 bp, Artificial Sequence
  Description of Artificial Sequence: Synthetic oligonucleotide
  Target: ATXN2; (-) strand; PAM type: YTN; PAM sequence: TTA
cttaaataggatatattttt

SEQ ID NO: 72673 - DNA, 20 bp, Artificial Sequence
  Description of Artificial Sequence: Synthetic oligonucleotide
  Target: ATXN2; (-) strand; PAM type: YTN; PAM sequence: TTA
ttacttaaataggatatatt

SEQ ID NO: 72674 - DNA, 20 bp, Artificial Sequence
  Description of Artificial Sequence: Synthetic oligonucleotide
  Target: ATXN2; (-) strand; PAM type: YTN; PAM sequence: TTT
attacttaaataggatatat

SEQ ID NO: 72675 - DNA, 20 bp, Artificial Sequence
  Description of Artificial Sequence: Synthetic oligonucleotide
  Target: ATXN2; (-) strand; PAM type: YTN; PAM sequence: TTT
tattacttaaataggatata

SEQ ID NO: 72676 - DNA, 20 bp, Artificial Sequence
  Description of Artificial Sequence: Synthetic oligonucleotide
  Target: ATXN2; (-) strand; PAM type: YTN; PAM sequence: TTT
ttattacttaaataggatat

SEQ ID NO: 72677 - DNA, 20 bp, Artificial Sequence
  Description of Artificial Sequence: Synthetic oligonucleotide
  Target: ATXN2; (-) strand; PAM type: YTN; PAM sequence: CTT
tttattacttaaataggata

SEQ ID NO: 72678 - DNA, 20 bp, Artificial Sequence
  Description of Artificial Sequence: Synthetic oligonucleotide
  Target: ATXN2; (-) strand; PAM type: YTN; PAM sequence: CTG
ctttttattacttaaatagg

SEQ ID NO: 72679 - DNA, 20 bp, Artificial Sequence
  Description of Artificial Sequence: Synthetic oligonucleotide
  Target: ATXN2; (-) strand; PAM type: YTN; PAM sequence: TTA
gtaaggaaaataaatactgc

SEQ ID NO: 72680 - DNA, 20 bp, Artificial Sequence
  Description of Artificial Sequence: Synthetic oligonucleotide
  Target: ATXN2; (-) strand; PAM type: YTN; PAM sequence: CTC
acaaacagaatgtattagta

SEQ ID NO: 72681 - DNA, 20 bp, Artificial Sequence
  Description of Artificial Sequence: Synthetic oligonucleotide
  Target: ATXN2; (-) strand; PAM type: YTN; PAM sequence: CTC
tcacaaacagaatgtattag

SEQ ID NO: 72682 - DNA, 20 bp, Artificial Sequence
  Description of Artificial Sequence: Synthetic oligonucleotide
  Target: ATXN2; (-) strand; PAM type: YTN; PAM sequence: TTG
tacctctcacaaacagaatg

SEQ ID NO: 72683 - DNA, 20 bp, Artificial Sequence
  Description of Artificial Sequence: Synthetic oligonucleotide
  Target: ATXN2; (-) strand; PAM type: YTN; PAM sequence: TTT
gtacctctcacaaacagaat

SEQ ID NO: 72684 - DNA, 20 bp, Artificial Sequence
  Description of Artificial Sequence: Synthetic oligonucleotide
  Target: ATXN2; (-) strand; PAM type: YTN; PAM sequence: CTG
aagaatccaatttgtacctc

SEQ ID NO: 72685 - DNA, 20 bp, Artificial Sequence
  Description of Artificial Sequence: Synthetic oligonucleotide
  Target: ATXN2; (-) strand; PAM type: YTN; PAM sequence: TTA
actgaagaatccaatttgta

SEQ ID NO: 72686 - DNA, 20 bp, Artificial Sequence
  Description of Artificial Sequence: Synthetic oligonucleotide
  Target: ATXN2; (-) strand; PAM type: YTN; PAM sequence: TTT
aactgaagaatccaatttgt

SEQ ID NO: 72687 - DNA, 20 bp, Artificial Sequence
  Description of Artificial Sequence: Synthetic oligonucleotide
  Target: ATXN2; (-) strand; PAM type: YTN; PAM sequence: TTT
taactgaagaatccaatttg

SEQ ID NO: 72688 - DNA, 20 bp, Artificial Sequence
  Description of Artificial Sequence: Synthetic oligonucleotide
  Target: ATXN2; (-) strand; PAM type: YTN; PAM sequence: TTG
aattttaactgaagaatcca

SEQ ID NO: 72689 - DNA, 20 bp, Artificial Sequence
  Description of Artificial Sequence: Synthetic oligonucleotide
  Target: ATXN2; (-) strand; PAM type: YTN; PAM sequence: CTT
gaattttaactgaagaatcc

SEQ ID NO: 72690 - DNA, 20 bp, Artificial Sequence
  Description of Artificial Sequence: Synthetic oligonucleotide
  Target: ATXN2; (-) strand; PAM type: YTN; PAM sequence: TTC
ccttgaattttaactgaaga

SEQ ID NO: 72691 - DNA, 20 bp, Artificial Sequence
  Description of Artificial Sequence: Synthetic oligonucleotide
  Target: ATXN2; (-) strand; PAM type: YTN; PAM sequence: TTT
cccttgaattttaactgaag

SEQ ID NO: 72692 - DNA, 20 bp, Artificial Sequence
  Description of Artificial Sequence: Synthetic oligonucleotide
  Target: ATXN2; (-) strand; PAM type: YTN; PAM sequence: TTT
tcccttgaattttaactgaa

SEQ ID NO: 72693 - DNA, 20 bp, Artificial Sequence
  Description of Artificial Sequence: Synthetic oligonucleotide
  Target: ATXN2; (-) strand; PAM type: YTN; PAM sequence: TTA
taaatgttttcccttgaatt

SEQ ID NO: 72694 - DNA, 20 bp, Artificial Sequence
  Description of Artificial Sequence: Synthetic oligonucleotide
  Target: ATXN2; (-) strand; PAM type: YTN; PAM sequence: CTT
ataaatgttttcccttgaat

SEQ ID NO: 72695 - DNA, 20 bp, Artificial Sequence
  Description of Artificial Sequence: Synthetic oligonucleotide
  Target: ATXN2; (-) strand; PAM type: YTN; PAM sequence: TTA
tcttataaatgttttccctt

SEQ ID NO: 72696 - DNA, 20 bp, Artificial Sequence
  Description of Artificial Sequence: Synthetic oligonucleotide
  Target: ATXN2; (-) strand; PAM type: YTN; PAM sequence: TTT
atcttataaatgttttccct

SEQ ID NO: 72697 - DNA, 20 bp, Artificial Sequence
  Description of Artificial Sequence: Synthetic oligonucleotide
  Target: ATXN2; (-) strand; PAM type: YTN; PAM sequence: TTT
tatcttataaatgttttccc

SEQ ID NO: 72698 - DNA, 20 bp, Artificial Sequence
  Description of Artificial Sequence: Synthetic oligonucleotide
  Target: ATXN2; (-) strand; PAM type: YTN; PAM sequence: CTA
agatgatgtattttatctta

SEQ ID NO: 72699 - DNA, 20 bp, Artificial Sequence
  Description of Artificial Sequence: Synthetic oligonucleotide
  Target: ATXN2; (-) strand; PAM type: YTN; PAM sequence: TTA
gtcaaactaagatgatgtat

SEQ ID NO: 72700 - DNA, 20 bp, Artificial Sequence
  Description of Artificial Sequence: Synthetic oligonucleotide
  Target: ATXN2; (-) strand; PAM type: YTN; PAM sequence: CTT
agtcaaactaagatgatgta

SEQ ID NO: 72701 - DNA, 20 bp, Artificial Sequence
  Description of Artificial Sequence: Synthetic oligonucleotide
  Target: ATXN2; (-) strand; PAM type: YTN; PAM sequence: TTA
atgggcttagtcaaactaag

SEQ ID NO: 72702 - DNA, 20 bp, Artificial Sequence
  Description of Artificial Sequence: Synthetic oligonucleotide
  Target: ATXN2; (-) strand; PAM type: YTN; PAM sequence: TTT
aatgggcttagtcaaactaa

SEQ ID NO: 72703 - DNA, 20 bp, Artificial Sequence
  Description of Artificial Sequence: Synthetic oligonucleotide
  Target: ATXN2; (-) strand; PAM type: YTN; PAM sequence: TTA
tttaatgggcttagtcaaac

SEQ ID NO: 72704 - DNA, 20 bp, Artificial Sequence
  Description of Artificial Sequence: Synthetic oligonucleotide
  Target: ATXN2; (-) strand; PAM type: YTN; PAM sequence: CTT
atttaatgggcttagtcaaa

SEQ ID NO: 72705 - DNA, 20 bp, Artificial Sequence
  Description of Artificial Sequence: Synthetic oligonucleotide
  Target: ATXN2; (-) strand; PAM type: YTN; PAM sequence: TTA
tcttatttaatgggcttagt

SEQ ID NO: 72706 - DNA, 20 bp, Artificial Sequence
  Description of Artificial Sequence: Synthetic oligonucleotide
  Target: ATXN2; (-) strand; PAM type: YTN; PAM sequence: TTT
atcttatttaatgggcttag

SEQ ID NO: 72707 - DNA, 20 bp, Artificial Sequence
  Description of Artificial Sequence: Synthetic oligonucleotide
  Target: ATXN2; (-) strand; PAM type: YTN; PAM sequence: TTT
tatcttatttaatgggctta

SEQ ID NO: 72708 - DNA, 20 bp, Artificial Sequence
  Description of Artificial Sequence: Synthetic oligonucleotide
  Target: ATXN2; (-) strand; PAM type: YTN; PAM sequence: CTT
ttatcttatttaatgggctt

SEQ ID NO: 72709 - DNA, 20 bp, Artificial Sequence
  Description of Artificial Sequence: Synthetic oligonucleotide
  Target: ATXN2; (-) strand; PAM type: YTN; PAM sequence: TTG
cagtgccttttatcttattt

SEQ ID NO: 72710 - DNA, 20 bp, Artificial Sequence
  Description of Artificial Sequence: Synthetic oligonucleotide
  Target: ATXN2; (-) strand; PAM type: YTN; PAM sequence: CTA
attgcagtgccttttatctt

SEQ ID NO: 72711 - DNA, 20 bp, Artificial Sequence
  Description of Artificial Sequence: Synthetic oligonucleotide
  Target: ATXN2; (-) strand; PAM type: YTN; PAM sequence: TTA
ctaattgcagtgccttttat

SEQ ID NO: 72712 - DNA, 20 bp, Artificial Sequence
  Description of Artificial Sequence: Synthetic oligonucleotide
  Target: ATXN2; (-) strand; PAM type: YTN; PAM sequence: TTC
aaaaaaaaaaaggttactaa

SEQ ID NO: 72713 - DNA, 20 bp, Artificial Sequence
  Description of Artificial Sequence: Synthetic oligonucleotide
  Target: ATXN2; (-) strand; PAM type: YTN; PAM sequence: TTT
caaaaaaaaaaaggttacta

SEQ ID NO: 72714 - DNA, 20 bp, Artificial Sequence
  Description of Artificial Sequence: Synthetic oligonucleotide
  Target: ATXN2; (-) strand; PAM type: YTN; PAM sequence: CTG
gtttcaaaaaaaaaaaggtt

SEQ ID NO: 72715 - DNA, 20 bp, Artificial Sequence
  Description of Artificial Sequence: Synthetic oligonucleotide
  Target: ATXN2; (-) strand; PAM type: YTN; PAM sequence: CTG
cagtgagccaagtgagaccc

SEQ ID NO: 72716 - DNA, 20 bp, Artificial Sequence
  Description of Artificial Sequence: Synthetic oligonucleotide
  Target: ATXN2; (-) strand; PAM type: YTN; PAM sequence: TTG
aggctgcagtgagccaagtg

SEQ ID NO: 72717 - DNA, 20 bp, Artificial Sequence
  Description of Artificial Sequence: Synthetic oligonucleotide
  Target: ATXN2; (-) strand; PAM type: YTN; PAM sequence: CTG
agcgcagggagattgaggct

SEQ ID NO: 72718 - DNA, 20 bp, Artificial Sequence
  Description of Artificial Sequence: Synthetic oligonucleotide
  Target: ATXN2; (-) strand; PAM type: YTN; PAM sequence: TTC
gggtggcagaggtgagagga

SEQ ID NO: 72719 - DNA, 20 bp, Artificial Sequence
  Description of Artificial Sequence: Synthetic oligonucleotide
  Target: ATXN2; (-) strand; PAM type: YTN; PAM sequence: CTA
ttcgggtggcagaggtgaga

SEQ ID NO: 72720 - DNA, 20 bp, Artificial Sequence
  Description of Artificial Sequence: Synthetic oligonucleotide
  Target: ATXN2; (-) strand; PAM type: YTN; PAM sequence: CTG
tagtcccagctattcgggtg

SEQ ID NO: 72721 - DNA, 20 bp, Artificial Sequence
  Description of Artificial Sequence: Synthetic oligonucleotide
  Target: ATXN2; (-) strand; PAM type: YTN; PAM sequence: CTA
caaaaaaaatacaaaaagta

SEQ ID NO: 72722 - DNA, 20 bp, Artificial Sequence
  Description of Artificial Sequence: Synthetic oligonucleotide
  Target: ATXN2; (-) strand; PAM type: YTN; PAM sequence: TTC
tacaaaaaaaatacaaaaag

SEQ ID NO: 72723 - DNA, 20 bp, Artificial Sequence
  Description of Artificial Sequence: Synthetic oligonucleotide
  Target: ATXN2; (-) strand; PAM type: YTN; PAM sequence: TTT
ctacaaaaaaaatacaaaaa

SEQ ID NO: 72724 - DNA, 20 bp, Artificial Sequence
  Description of Artificial Sequence: Synthetic oligonucleotide
  Target: ATXN2; (-) strand; PAM type: YTN; PAM sequence: CTG
ggcaatatggtggaaccccg

SEQ ID NO: 72725 - DNA, 20 bp, Artificial Sequence
  Description of Artificial Sequence: Synthetic oligonucleotide
  Target: ATXN2; (-) strand; PAM type: YTN; PAM sequence: TTC
aagaccagcctgggcaatat

SEQ ID NO: 72726 - DNA, 20 bp, Artificial Sequence
  Description of Artificial Sequence: Synthetic oligonucleotide
  Target: ATXN2; (-) strand; PAM type: YTN; PAM sequence: TTG
agcccagtagttcaagacca

SEQ ID NO: 72727 - DNA, 20 bp, Artificial Sequence
  Description of Artificial Sequence: Synthetic oligonucleotide
  Target: ATXN2; (-) strand; PAM type: YTN; PAM sequence: CTT
gagcccagtagttcaagacc

SEQ ID NO: 72728 - DNA, 20 bp, Artificial Sequence
  Description of Artificial Sequence: Synthetic oligonucleotide
  Target: ATXN2; (-) strand; PAM type: YTN; PAM sequence: TTG
cttgagcccagtagttcaag

SEQ ID NO: 72729 - DNA, 20 bp, Artificial Sequence
  Description of Artificial Sequence: Synthetic oligonucleotide
  Target: ATXN2; (-) strand; PAM type: YTN; PAM sequence: TTG
ggaggccaaggcagatgaat

SEQ ID NO: 72730 - DNA, 20 bp, Artificial Sequence
  Description of Artificial Sequence: Synthetic oligonucleotide
  Target: ATXN2; (-) strand; PAM type: YTN; PAM sequence: TTT
gggaggccaaggcagatgaa

SEQ ID NO: 72731 - DNA, 20 bp, Artificial Sequence
  Description of Artificial Sequence: Synthetic oligonucleotide
  Target: ATXN2; (-) strand; PAM type: YTN; PAM sequence: CTT
tgggaggccaaggcagatga

SEQ ID NO: 72732 - DNA, 20 bp, Artificial Sequence
  Description of Artificial Sequence: Synthetic oligonucleotide
  Target: ATXN2; (-) strand; PAM type: YTN; PAM sequence: CTC
agcactttgggaggccaagg

SEQ ID NO: 72733 - DNA, 20 bp, Artificial Sequence
  Description of Artificial Sequence: Synthetic oligonucleotide
  Target: ATXN2; (-) strand; PAM type: YTN; PAM sequence: CTG
taatctcagcactttgggag

SEQ ID NO: 72734 - DNA, 20 bp, Artificial Sequence
  Description of Artificial Sequence: Synthetic oligonucleotide
  Target: ATXN2; (-) strand; PAM type: YTN; PAM sequence: TTC
ctgtaatctcagcactttgg

SEQ ID NO: 72735 - DNA, 20 bp, Artificial Sequence
  Description of Artificial Sequence: Synthetic oligonucleotide
  Target: ATXN2; (-) strand; PAM type: YTN; PAM sequence: CTC
attcctgtaatctcagcact

SEQ ID NO: 72736 - DNA, 20 bp, Artificial Sequence
  Description of Artificial Sequence: Synthetic oligonucleotide
  Target: ATXN2; (-) strand; PAM type: YTN; PAM sequence: CTG
ggtacagtggctcattcctg

SEQ ID NO: 72737 - DNA, 20 bp, Artificial Sequence
  Description of Artificial Sequence: Synthetic oligonucleotide
  Target: ATXN2; (-) strand; PAM type: YTN; PAM sequence: CTG
gctgggtacagtggctcatt

SEQ ID NO: 72738 - DNA, 20 bp, Artificial Sequence
  Description of Artificial Sequence: Synthetic oligonucleotide
  Target: ATXN2; (-) strand; PAM type: YTN; PAM sequence: TTA
ctggctgggtacagtggctc

SEQ ID NO: 72739 - DNA, 20 bp, Artificial Sequence
  Description of Artificial Sequence: Synthetic oligonucleotide
  Target: ATXN2; (-) strand; PAM type: YTN; PAM sequence: TTA
aaaacataaaattactggct

SEQ ID NO: 72740 - DNA, 20 bp, Artificial Sequence
  Description of Artificial Sequence: Synthetic oligonucleotide
  Target: ATXN2; (-) strand; PAM type: YTN; PAM sequence: TTT
aaaaacataaaattactggc

SEQ ID NO: 72741 - DNA, 20 bp, Artificial Sequence
  Description of Artificial Sequence: Synthetic oligonucleotide
  Target: ATXN2; (-) strand; PAM type: YTN; PAM sequence: CTT
taaaaacataaaattactgg

SEQ ID NO: 72742 - DNA, 20 bp, Artificial Sequence
  Description of Artificial Sequence: Synthetic oligonucleotide
  Target: ATXN2; (-) strand; PAM type: YTN; PAM sequence: TTG
ctttaaaaacataaaattac

SEQ ID NO: 72743 - DNA, 20 bp, Artificial Sequence
  Description of Artificial Sequence: Synthetic oligonucleotide
  Target: ATXN2; (-) strand; PAM type: YTN; PAM sequence: TTA
agaaaattgctttaaaaaca

SEQ ID NO: 72744 - DNA, 20 bp, Artificial Sequence
  Description of Artificial Sequence: Synthetic oligonucleotide
  Target: ATXN2; (-) strand; PAM type: YTN; PAM sequence: CTT
aagaaaattgctttaaaaac

SEQ ID NO: 72745 - DNA, 20 bp, Artificial Sequence
  Description of Artificial Sequence: Synthetic oligonucleotide
  Target: ATXN2; (-) strand; PAM type: YTN; PAM sequence: TTA
gagcttaagaaaattgcttt

SEQ ID NO: 72746 - DNA, 20 bp, Artificial Sequence
  Description of Artificial Sequence: Synthetic oligonucleotide
  Target: ATXN2; (-) strand; PAM type: YTN; PAM sequence: TTT
agagcttaagaaaattgctt

SEQ ID NO: 72747 - DNA, 20 bp, Artificial Sequence
  Description of Artificial Sequence: Synthetic oligonucleotide
  Target: ATXN2; (-) strand; PAM type: YTN; PAM sequence: CTA
atttagagcttaagaaaatt

SEQ ID NO: 72748 - DNA, 20 bp, Artificial Sequence
  Description of Artificial Sequence: Synthetic oligonucleotide
  Target: ATXN2; (-) strand; PAM type: YTN; PAM sequence: TTA
gctaatttagagcttaagaa

SEQ ID NO: 72749 - DNA, 20 bp, Artificial Sequence
  Description of Artificial Sequence: Synthetic oligonucleotide
  Target: ATXN2; (-) strand; PAM type: YTN; PAM sequence: TTA
agttagctaatttagagctt

SEQ ID NO: 72750 - DNA, 20 bp, Artificial Sequence
  Description of Artificial Sequence: Synthetic oligonucleotide
  Target: ATXN2; (-) strand; PAM type: YTN; PAM sequence: TTT
aagttagctaatttagagct

SEQ ID NO: 72751 - DNA, 20 bp, Artificial Sequence
  Description of Artificial Sequence: Synthetic oligonucleotide
  Target: ATXN2; (-) strand; PAM type: YTN; PAM sequence: TTT
taagttagctaatttagagc

SEQ ID NO: 72752 - DNA, 20 bp, Artificial Sequence
  Description of Artificial Sequence: Synthetic oligonucleotide
  Target: ATXN2; (-) strand; PAM type: YTN; PAM sequence: TTC
aaattttaagttagctaatt

SEQ ID NO: 72753 - DNA, 20 bp, Artificial Sequence
  Description of Artificial Sequence: Synthetic oligonucleotide
  Target: ATXN2; (-) strand; PAM type: YTN; PAM sequence: TTC
agttcaaattttaagttagc

SEQ ID NO: 72754 - DNA, 20 bp, Artificial Sequence
  Description of Artificial Sequence: Synthetic oligonucleotide
  Target: ATXN2; (-) strand; PAM type: YTN; PAM sequence: TTT
cagttcaaattttaagttag

SEQ ID NO: 72755 - DNA, 20 bp, Artificial Sequence
  Description of Artificial Sequence: Synthetic oligonucleotide
  Target: ATXN2; (-) strand; PAM type: YTN; PAM sequence: TTT
tcagttcaaattttaagtta

SEQ ID NO: 72756 - DNA, 20 bp, Artificial Sequence
  Description of Artificial Sequence: Synthetic oligonucleotide
  Target: ATXN2; (-) strand; PAM type: YTN; PAM sequence: CTA
aacaattttcagttcaaatt

SEQ ID NO: 72757 - DNA, 20 bp, Artificial Sequence
  Description of Artificial Sequence: Synthetic oligonucleotide
  Target: ATXN2; (-) strand; PAM type: YTN; PAM sequence: TTC
taaacaattttcagttcaaa

SEQ ID NO: 72758 - DNA, 20 bp, Artificial Sequence
  Description of Artificial Sequence: Synthetic oligonucleotide
  Target: ATXN2; (-) strand; PAM type: YTN; PAM sequence: TTT
ctaaacaattttcagttcaa

SEQ ID NO: 72759 - DNA, 20 bp, Artificial Sequence
  Description of Artificial Sequence: Synthetic oligonucleotide
  Target: ATXN2; (-) strand; PAM type: YTN; PAM sequence: CTG
ataccatttctaaacaattt

SEQ ID NO: 72760 - DNA, 20 bp, Artificial Sequence
  Description of Artificial Sequence: Synthetic oligonucleotide
  Target: ATXN2; (-) strand; PAM type: YTN; PAM sequence: TTA
actgataccatttctaaaca

SEQ ID NO: 72761 - DNA, 20 bp, Artificial Sequence
  Description of Artificial Sequence: Synthetic oligonucleotide
  Target: ATXN2; (-) strand; PAM type: YTN; PAM sequence: TTT
aactgataccatttctaaac

SEQ ID NO: 72762 - DNA, 20 bp, Artificial Sequence
  Description of Artificial Sequence: Synthetic oligonucleotide
  Target: ATXN2; (-) strand; PAM type: YTN; PAM sequence: TTT
taactgataccatttctaaa

SEQ ID NO: 72763 - DNA, 20 bp, Artificial Sequence
  Description of Artificial Sequence: Synthetic oligonucleotide
  Target: ATXN2; (-) strand; PAM type: YTN; PAM sequence: TTG
aagtaaaatacagcaccatt

SEQ ID NO: 72764 - DNA, 20 bp, Artificial Sequence
  Description of Artificial Sequence: Synthetic oligonucleotide
  Target: ATXN2; (-) strand; PAM type: YTN; PAM sequence: TTT
gaagtaaaatacagcaccat

SEQ ID NO: 72765 - DNA, 20 bp, Artificial Sequence
  Description of Artificial Sequence: Synthetic oligonucleotide
  Target: ATXN2; (-) strand; PAM type: YTN; PAM sequence: TTT
tgaagtaaaatacagcacca

SEQ ID NO: 72766 - DNA, 20 bp, Artificial Sequence
  Description of Artificial Sequence: Synthetic oligonucleotide
  Target: ATXN2; (-) strand; PAM type: YTN; PAM sequence: TTG
attttgaagtaaaatacagc

SEQ ID NO: 72767 - DNA, 20 bp, Artificial Sequence
  Description of Artificial Sequence: Synthetic oligonucleotide
  Target: ATXN2; (-) strand; PAM type: YTN; PAM sequence: TTA
gttgattttgaagtaaaata

SEQ ID NO: 72768 - DNA, 20 bp, Artificial Sequence
  Description of Artificial Sequence: Synthetic oligonucleotide
  Target: ATXN2; (-) strand; PAM type: YTN; PAM sequence: TTT
agttgattttgaagtaaaat

SEQ ID NO: 72769 - DNA, 20 bp, Artificial Sequence
  Description of Artificial Sequence: Synthetic oligonucleotide
  Target: ATXN2; (-) strand; PAM type: YTN; PAM sequence: TTT
tagttgattttgaagtaaaa

SEQ ID NO: 72770 - DNA, 20 bp, Artificial Sequence
  Description of Artificial Sequence: Synthetic oligonucleotide
  Target: ATXN2; (-) strand; PAM type: YTN; PAM sequence: TTT
ttagttgattttgaagtaaa

SEQ ID NO: 72771 - DNA, 20 bp, Artificial Sequence
  Description of Artificial Sequence: Synthetic oligonucleotide
  Target: ATXN2; (-) strand; PAM type: YTN; PAM sequence: TTT
tttagttgattttgaagtaa

SEQ ID NO: 72772 - DNA, 20 bp, Artificial Sequence
  Description of Artificial Sequence: Synthetic oligonucleotide
  Target: ATXN2; (-) strand; PAM type: YTN; PAM sequence: TTA
ttttttagttgattttgaag

SEQ ID NO: 72773 - DNA, 20 bp, Artificial Sequence
  Description of Artificial Sequence: Synthetic oligonucleotide
  Target: ATXN2; (-) strand; PAM type: YTN; PAM sequence: TTA
ttattttttagttgattttg

SEQ ID NO: 72774 - DNA, 20 bp, Artificial Sequence
  Description of Artificial Sequence: Synthetic oligonucleotide
  Target: ATXN2; (-) strand; PAM type: YTN; PAM sequence: TTT
attattttttagttgatttt

SEQ ID NO: 72775 - DNA, 20 bp, Artificial Sequence
  Description of Artificial Sequence: Synthetic oligonucleotide
  Target: ATXN2; (-) strand; PAM type: YTN; PAM sequence: TTT
tattattttttagttgattt

SEQ ID NO: 72776 - DNA, 20 bp, Artificial Sequence
  Description of Artificial Sequence: Synthetic oligonucleotide
  Target: ATXN2; (-) strand; PAM type: YTN; PAM sequence: TTT
ttattattttttagttgatt

SEQ ID NO: 72777 - DNA, 20 bp, Artificial Sequence
  Description of Artificial Sequence: Synthetic oligonucleotide
  Target: ATXN2; (-) strand; PAM type: YTN; PAM sequence: TTT
tttattattttttagttgat

SEQ ID NO: 72778 - DNA, 20 bp, Artificial Sequence
  Description of Artificial Sequence: Synthetic oligonucleotide
  Target: ATXN2; (-) strand; PAM type: YTN; PAM sequence: TTG
agttttttattattttttag

SEQ ID NO: 72779 - DNA, 20 bp, Artificial Sequence
  Description of Artificial Sequence: Synthetic oligonucleotide
  Target: ATXN2; (-) strand; PAM type: YTN; PAM sequence: TTT
gagttttttattatttttta

SEQ ID NO: 72780 - DNA, 20 bp, Artificial Sequence
  Description of Artificial Sequence: Synthetic oligonucleotide
  Target: ATXN2; (-) strand; PAM type: YTN; PAM sequence: TTA
gtaagtttgagttttttatt

SEQ ID NO: 72781 - DNA, 20 bp, Artificial Sequence
  Description of Artificial Sequence: Synthetic oligonucleotide
  Target: ATXN2; (-) strand; PAM type: YTN; PAM sequence: CTG
attagtaagtttgagttttt

SEQ ID NO: 72782 - DNA, 20 bp, Artificial Sequence
  Description of Artificial Sequence: Synthetic oligonucleotide
  Target: ATXN2; (-) strand; PAM type: YTN; PAM sequence: TTC
agaggaatctgattagtaag

SEQ ID NO: 72783 - DNA, 20 bp, Artificial Sequence
  Description of Artificial Sequence: Synthetic oligonucleotide
  Target: ATXN2; (-) strand; PAM type: YTN; PAM sequence: TTT
cagaggaatctgattagtaa

SEQ ID NO: 72784 - DNA, 20 bp, Artificial Sequence
  Description of Artificial Sequence: Synthetic oligonucleotide
  Target: ATXN2; (-) strand; PAM type: YTN; PAM sequence: CTT
tcagaggaatctgattagta

SEQ ID NO: 72785 - DNA, 20 bp, Artificial Sequence
  Description of Artificial Sequence: Synthetic oligonucleotide
  Target: ATXN2; (-) strand; PAM type: YTN; PAM sequence: CTC
agctttcagaggaatctgat

SEQ ID NO: 72786 - DNA, 20 bp, Artificial Sequence
  Description of Artificial Sequence: Synthetic oligonucleotide
  Target: ATXN2; (-) strand; PAM type: YTN; PAM sequence: TTC
actcagctttcagaggaatc

SEQ ID NO: 72787 - DNA, 20 bp, Artificial Sequence
  Description of Artificial Sequence: Synthetic oligonucleotide
  Target: ATXN2; (-) strand; PAM type: YTN; PAM sequence: CTT
cactcagctttcagaggaat

SEQ ID NO: 72788 - DNA, 20 bp, Artificial Sequence
  Description of Artificial Sequence: Synthetic oligonucleotide
  Target: ATXN2; (-) strand; PAM type: YTN; PAM sequence: TTG
atcttcactcagctttcaga

SEQ ID NO: 72789 - DNA, 20 bp, Artificial Sequence
  Description of Artificial Sequence: Synthetic oligonucleotide
  Target: ATXN2; (-) strand; PAM type: YTN; PAM sequence: CTA
ttgatcttcactcagctttc

SEQ ID NO: 72790 - DNA, 20 bp, Artificial Sequence
  Description of Artificial Sequence: Synthetic oligonucleotide
  Target: ATXN2; (-) strand; PAM type: YTN; PAM sequence: CTG
tagagcatgggctattgatc

SEQ ID NO: 72791 - DNA, 20 bp, Artificial Sequence
  Description of Artificial Sequence: Synthetic oligonucleotide
  Target: ATXN2; (-) strand; PAM type: YTN; PAM sequence: TTC
tgtagagcatgggctattga

SEQ ID NO: 72792 - DNA, 20 bp, Artificial Sequence
  Description of Artificial Sequence: Synthetic oligonucleotide
  Target: ATXN2; (-) strand; PAM type: YTN; PAM sequence: TTG
attctgtagagcatgggcta

SEQ ID NO: 72793 - DNA, 20 bp, Artificial Sequence
  Description of Artificial Sequence: Synthetic oligonucleotide
  Target: ATXN2; (-) strand; PAM type: YTN; PAM sequence: TTT
gattctgtagagcatgggct

SEQ ID NO: 72794 - DNA, 20 bp, Artificial Sequence
  Description of Artificial Sequence: Synthetic oligonucleotide
  Target: ATXN2; (-) strand; PAM type: YTN; PAM sequence: TTG
atgtatatttgattctgtag

SEQ ID NO: 72795 - DNA, 20 bp, Artificial Sequence
  Description of Artificial Sequence: Synthetic oligonucleotide
  Target: ATXN2; (-) strand; PAM type: YTN; PAM sequence: TTT
gatgtatatttgattctgta

SEQ ID NO: 72796 - DNA, 20 bp, Artificial Sequence
  Description of Artificial Sequence: Synthetic oligonucleotide
  Target: ATXN2; (-) strand; PAM type: YTN; PAM sequence: CTG
tagaatttgatgtatatttg

SEQ ID NO: 72797 - DNA, 20 bp, Artificial Sequence
  Description of Artificial Sequence: Synthetic oligonucleotide
  Target: ATXN2; (-) strand; PAM type: YTN; PAM sequence: TTG
ctgtagaatttgatgtatat

SEQ ID NO: 72798 - DNA, 20 bp, Artificial Sequence
  Description of Artificial Sequence: Synthetic oligonucleotide
  Target: ATXN2; (-) strand; PAM type: YTN; PAM sequence: TTT
gctgtagaatttgatgtata

SEQ ID NO: 72799 - DNA, 20 bp, Artificial Sequence
  Description of Artificial Sequence: Synthetic oligonucleotide
  Target: ATXN2; (-) strand; PAM type: YTN; PAM sequence: CTT
tgctgtagaatttgatgtat

SEQ ID NO: 72800 - DNA, 20 bp, Artificial Sequence
  Description of Artificial Sequence: Synthetic oligonucleotide
  Target: ATXN2; (-) strand; PAM type: YTN; PAM sequence: CTC
aggctttgctgtagaatttg

SEQ ID NO: 72801 - DNA, 20 bp, Artificial Sequence
  Description of Artificial Sequence: Synthetic oligonucleotide
  Target: ATXN2; (-) strand; PAM type: YTN; PAM sequence: TTG
caccactcaggctttgctgt

SEQ ID NO: 72802 - DNA, 20 bp, Artificial Sequence
  Description of Artificial Sequence: Synthetic oligonucleotide
  Target: ATXN2; (-) strand; PAM type: YTN; PAM sequence: TTT
gcaccactcaggctttgctg

SEQ ID NO: 72803 - DNA, 20 bp, Artificial Sequence
  Description of Artificial Sequence: Synthetic oligonucleotide
  Target: ATXN2; (-) strand; PAM type: YTN; PAM sequence: TTT
tgcaccactcaggctttgct

SEQ ID NO: 72804 - DNA, 20 bp, Artificial Sequence
  Description of Artificial Sequence: Synthetic oligonucleotide
  Target: ATXN2; (-) strand; PAM type: YTN; PAM sequence: TTA
gttttgcaccactcaggctt

SEQ ID NO: 72805 - DNA, 20 bp, Artificial Sequence
  Description of Artificial Sequence: Synthetic oligonucleotide
  Target: ATXN2; (-) strand; PAM type: YTN; PAM sequence: TTG
ttagttttgcaccactcagg

SEQ ID NO: 72806 - DNA, 20 bp, Artificial Sequence
  Description of Artificial Sequence: Synthetic oligonucleotide
  Target: ATXN2; (-) strand; PAM type: YTN; PAM sequence: CTT
gttagttttgcaccactcag

SEQ ID NO: 72807 - DNA, 20 bp, Artificial Sequence
  Description of Artificial Sequence: Synthetic oligonucleotide
  Target: ATXN2; (-) strand; PAM type: YTN; PAM sequence: TTC
ttgttagttttgcaccactc

SEQ ID NO: 72808 - DNA, 20 bp, Artificial Sequence
  Description of Artificial Sequence: Synthetic oligonucleotide
  Target: ATXN2; (-) strand; PAM type: YTN; PAM sequence: TTG
ttcttgttagttttgcacca

SEQ ID NO: 72809 - DNA, 20 bp, Artificial Sequence
  Description of Artificial Sequence: Synthetic oligonucleotide
  Target: ATXN2; (-) strand; PAM type: YTN; PAM sequence: CTT
gttcttgttagttttgcacc

SEQ ID NO: 72810 - DNA, 20 bp, Artificial Sequence
  Description of Artificial Sequence: Synthetic oligonucleotide
  Target: ATXN2; (-) strand; PAM type: YTN; PAM sequence: TTC
ttgttcttgttagttttgca

SEQ ID NO: 72811 - DNA, 20 bp, Artificial Sequence
  Description of Artificial Sequence: Synthetic oligonucleotide
  Target: ATXN2; (-) strand; PAM type: YTN; PAM sequence: TTT
cttgttcttgttagttttgc

SEQ ID NO: 72812 - DNA, 20 bp, Artificial Sequence
  Description of Artificial Sequence: Synthetic oligonucleotide
  Target: ATXN2; (-) strand; PAM type: YTN; PAM sequence: TTT
tcttgttcttgttagttttg

SEQ ID NO: 72813 - DNA, 20 bp, Artificial Sequence
  Description of Artificial Sequence: Synthetic oligonucleotide
  Target: ATXN2; (-) strand; PAM type: YTN; PAM sequence: TTT
ttcttgttcttgttagtttt

SEQ ID NO: 72814 - DNA, 20 bp, Artificial Sequence
  Description of Artificial Sequence: Synthetic oligonucleotide
  Target: ATXN2; (-) strand; PAM type: YTN; PAM sequence: TTT
tttcttgttcttgttagttt

SEQ ID NO: 72815 - DNA, 20 bp, Artificial Sequence
  Description of Artificial Sequence: Synthetic oligonucleotide
  Target: ATXN2; (-) strand; PAM type: YTN; PAM sequence: TTC
catattttttcttgttcttg

SEQ ID NO: 72816 - DNA, 20 bp, Artificial Sequence
  Description of Artificial Sequence: Synthetic oligonucleotide
  Target: ATXN2; (-) strand; PAM type: YTN; PAM sequence: TTT
ccatattttttcttgttctt

SEQ ID NO: 72817 - DNA, 20 bp, Artificial Sequence
  Description of Artificial Sequence: Synthetic oligonucleotide
  Target: ATXN2; (-) strand; PAM type: YTN; PAM sequence: CTC
atgaagtgaatttccatatt

SEQ ID NO: 72818 - DNA, 20 bp, Artificial Sequence
  Description of Artificial Sequence: Synthetic oligonucleotide
  Target: ATXN2; (-) strand; PAM type: YTN; PAM sequence: TTA
aatacagcaaacctcatgaa

SEQ ID NO: 72819 - DNA, 20 bp, Artificial Sequence
  Description of Artificial Sequence: Synthetic oligonucleotide
  Target: ATXN2; (-) strand; PAM type: YTN; PAM sequence: TTT
aaatacagcaaacctcatga

SEQ ID NO: 72820 - DNA, 20 bp, Artificial Sequence
  Description of Artificial Sequence: Synthetic oligonucleotide
  Target: ATXN2; (-) strand; PAM type: YTN; PAM sequence: TTT
taaatacagcaaacctcatg

SEQ ID NO: 72821 - DNA, 20 bp, Artificial Sequence
  Description of Artificial Sequence: Synthetic oligonucleotide
  Target: ATXN2; (-) strand; PAM type: YTN; PAM sequence: TTT
ttaaatacagcaaacctcat

SEQ ID NO: 72822 - DNA, 20 bp, Artificial Sequence
  Description of Artificial Sequence: Synthetic oligonucleotide
  Target: ATXN2; (-) strand; PAM type: YTN; PAM sequence: TTT
tttaaatacagcaaacctca

SEQ ID NO: 72823 - DNA, 20 bp, Artificial Sequence
  Description of Artificial Sequence: Synthetic oligonucleotide
  Target: ATXN2; (-) strand; PAM type: YTN; PAM sequence: TTT
ttttaaatacagcaaacctc

SEQ ID NO: 72824 - DNA, 20 bp, Artificial Sequence
  Description of Artificial Sequence: Synthetic oligonucleotide
  Target: ATXN2; (-) strand; PAM type: YTN; PAM sequence: TTG
tttttttaaatacagcaaac

SEQ ID NO: 72825 - DNA, 20 bp, Artificial Sequence
  Description of Artificial Sequence: Synthetic oligonucleotide
  Target: ATXN2; (-) strand; PAM type: YTN; PAM sequence: CTT
gtttttttaaatacagcaaa

SEQ ID NO: 72826 - DNA, 20 bp, Artificial Sequence
  Description of Artificial Sequence: Synthetic oligonucleotide
  Target: ATXN2; (-) strand; PAM type: YTN; PAM sequence: CTG
tcaccttgtttttttaaata

SEQ ID NO: 72827 - DNA, 20 bp, Artificial Sequence
  Description of Artificial Sequence: Synthetic oligonucleotide
  Target: ATXN2; (-) strand; PAM type: YTN; PAM sequence: TTA
cgtacgtggaatctgtcacc

SEQ ID NO: 72828 - DNA, 20 bp, Artificial Sequence
  Description of Artificial Sequence: Synthetic oligonucleotide
  Target: ATXN2; (-) strand; PAM type: YTN; PAM sequence: CTA
gtattacgtacgtggaatct

SEQ ID NO: 72829 - DNA, 20 bp, Artificial Sequence
  Description of Artificial Sequence: Synthetic oligonucleotide
  Target: ATXN2; (-) strand; PAM type: YTN; PAM sequence: TTA
ggagatagtgtgggaatcag

SEQ ID NO: 72830 - DNA, 20 bp, Artificial Sequence
  Description of Artificial Sequence: Synthetic oligonucleotide
  Target: ATXN2; (-) strand; PAM type: YTN; PAM sequence: TTT
aggagatagtgtgggaatca

SEQ ID NO: 72831 - DNA, 20 bp, Artificial Sequence
  Description of Artificial Sequence: Synthetic oligonucleotide
  Target: ATXN2; (-) strand; PAM type: YTN; PAM sequence: TTT
taggagatagtgtgggaatc

SEQ ID NO: 72832 - DNA, 20 bp, Artificial Sequence
  Description of Artificial Sequence: Synthetic oligonucleotide
  Target: ATXN2; (-) strand; PAM type: YTN; PAM sequence: TTT
ttaggagatagtgtgggaat

SEQ ID NO: 72833 - DNA, 20 bp, Artificial Sequence
  Description of Artificial Sequence: Synthetic oligonucleotide
  Target: ATXN2; (-) strand; PAM type: YTN; PAM sequence: CTT
tttaggagatagtgtgggaa

SEQ ID NO: 72834 - DNA, 20 bp, Artificial Sequence
  Description of Artificial Sequence: Synthetic oligonucleotide
  Target: ATXN2; (-) strand; PAM type: YTN; PAM sequence: TTG
atctttttaggagatagtgt

SEQ ID NO: 72835 - DNA, 20 bp, Artificial Sequence
  Description of Artificial Sequence: Synthetic oligonucleotide
  Target: ATXN2; (-) strand; PAM type: YTN; PAM sequence: TTT
gatctttttaggagatagtg

SEQ ID NO: 72836 - DNA, 20 bp, Artificial Sequence
  Description of Artificial Sequence: Synthetic oligonucleotide
  Target: ATXN2; (-) strand; PAM type: YTN; PAM sequence: TTT
tgatctttttaggagatagt

SEQ ID NO: 72837 - DNA, 20 bp, Artificial Sequence
  Description of Artificial Sequence: Synthetic oligonucleotide
  Target: ATXN2; (-) strand; PAM type: YTN; PAM sequence: CTT
ttgatctttttaggagatag

SEQ ID NO: 72838 - DNA, 20 bp, Artificial Sequence
  Description of Artificial Sequence: Synthetic oligonucleotide
  Target: ATXN2; (-) strand; PAM type: YTN; PAM sequence: TTC
ttttgatctttttaggagat

SEQ ID NO: 72839 - DNA, 20 bp, Artificial Sequence
  Description of Artificial Sequence: Synthetic oligonucleotide
  Target: ATXN2; (-) strand; PAM type: YTN; PAM sequence: CTT
cttttgatctttttaggaga

SEQ ID NO: 72840 - DNA, 20 bp, Artificial Sequence
  Description of Artificial Sequence: Synthetic oligonucleotide
  Target: ATXN2; (-) strand; PAM type: YTN; PAM sequence: CTA
aaacttcttttgatcttttt

SEQ ID NO: 72841 - DNA, 20 bp, Artificial Sequence
  Description of Artificial Sequence: Synthetic oligonucleotide
  Target: ATXN2; (-) strand; PAM type: YTN; PAM sequence: TTC
taaaacttcttttgatcttt

SEQ ID NO: 72842 - DNA, 20 bp, Artificial Sequence
  Description of Artificial Sequence: Synthetic oligonucleotide
  Target: ATXN2; (-) strand; PAM type: YTN; PAM sequence: TTT
ctaaaacttcttttgatctt

SEQ ID NO: 72843 - DNA, 20 bp, Artificial Sequence
  Description of Artificial Sequence: Synthetic oligonucleotide
  Target: ATXN2; (-) strand; PAM type: YTN; PAM sequence: TTT
tctaaaacttcttttgatct

SEQ ID NO: 72844 - DNA, 20 bp, Artificial Sequence
  Description of Artificial Sequence: Synthetic oligonucleotide
  Target: ATXN2; (-) strand; PAM type: YTN; PAM sequence: CTT
ttctaaaacttcttttgatc

SEQ ID NO: 72845 - DNA, 20 bp, Artificial Sequence
  Description of Artificial Sequence: Synthetic oligonucleotide
  Target: ATXN2; (-) strand; PAM type: YTN; PAM sequence: TTG
gaatcttttctaaaacttct

SEQ ID NO: 72846 - DNA, 20 bp, Artificial Sequence
  Description of Artificial Sequence: Synthetic oligonucleotide
  Target: ATXN2; (-) strand; PAM type: YTN; PAM sequence: TTG
tattggaatcttttctaaaa

SEQ ID NO: 72847 - DNA, 20 bp, Artificial Sequence
  Description of Artificial Sequence: Synthetic oligonucleotide
  Target: ATXN2; (-) strand; PAM type: YTN; PAM sequence: TTT
gtattggaatcttttctaaa

SEQ ID NO: 72848 - DNA, 20 bp, Artificial Sequence
  Description of Artificial Sequence: Synthetic oligonucleotide
  Target: ATXN2; (-) strand; PAM type: YTN; PAM sequence: CTT
tgtattggaatcttttctaa

SEQ ID NO: 72849 - DNA, 20 bp, Artificial Sequence
  Description of Artificial Sequence: Synthetic oligonucleotide
  Target: ATXN2; (-) strand; PAM type: YTN; PAM sequence: TTC
acccataaacagtatctttg

SEQ ID NO: 72850 - DNA, 20 bp, Artificial Sequence
  Description of Artificial Sequence: Synthetic oligonucleotide
  Target: ATXN2; (-) strand; PAM type: YTN; PAM sequence: CTA
atggagaaaatgaaaacaga

SEQ ID NO: 72851 - DNA, 20 bp, Artificial Sequence
  Description of Artificial Sequence: Synthetic oligonucleotide
  Target: ATXN2; (-) strand; PAM type: YTN; PAM sequence: CTG
atccagaagcctaatggaga

SEQ ID NO: 72852 - DNA, 20 bp, Artificial Sequence
  Description of Artificial Sequence: Synthetic oligonucleotide
  Target: ATXN2; (-) strand; PAM type: YTN; PAM sequence: TTA
aaatagatcctgatccagaa

SEQ ID NO: 72853 - DNA, 20 bp, Artificial Sequence
  Description of Artificial Sequence: Synthetic oligonucleotide
  Target: ATXN2; (-) strand; PAM type: YTN; PAM sequence: CTT
aaaatagatcctgatccaga

SEQ ID NO: 72854 - DNA, 20 bp, Artificial Sequence
  Description of Artificial Sequence: Synthetic oligonucleotide
  Target: ATXN2; (-) strand; PAM type: YTN; PAM sequence: CTC
cccacttaaaatagatcctg

SEQ ID NO: 72855 - DNA, 20 bp, Artificial Sequence
  Description of Artificial Sequence: Synthetic oligonucleotide
  Target: ATXN2; (-) strand; PAM type: YTN; PAM sequence: CTC
ctccccacttaaaatagatc

SEQ ID NO: 72856 - DNA, 20 bp, Artificial Sequence
  Description of Artificial Sequence: Synthetic oligonucleotide
  Target: ATXN2; (-) strand; PAM type: YTN; PAM sequence: CTC
ctcctccccacttaaaatag

SEQ ID NO: 72857 - DNA, 20 bp, Artificial Sequence
  Description of Artificial Sequence: Synthetic oligonucleotide
  Target: ATXN2; (-) strand; PAM type: YTN; PAM sequence: TTC
ctcctcctccccacttaaaa

SEQ ID NO: 72858 - DNA, 20 bp, Artificial Sequence
  Description of Artificial Sequence: Synthetic oligonucleotide
  Target: ATXN2; (-) strand; PAM type: YTN; PAM sequence: TTT
cctcctcctccccacttaaa

SEQ ID NO: 72859 - DNA, 20 bp, Artificial Sequence
  Description of Artificial Sequence: Synthetic oligonucleotide
  Target: ATXN2; (-) strand; PAM type: YTN; PAM sequence: TTT
tcctcctcctccccacttaa

SEQ ID NO: 72860 - DNA, 20 bp, Artificial Sequence
  Description of Artificial Sequence: Synthetic oligonucleotide
  Target: ATXN2; (-) strand; PAM type: YTN; PAM sequence: CTT
ttcctcctcctccccactta

SEQ ID NO: 72861 - DNA, 20 bp, Artificial Sequence
  Description of Artificial Sequence: Synthetic oligonucleotide
  Target: ATXN2; (-) strand; PAM type: YTN; PAM sequence: CTA
gcttttcctcctcctcccca

SEQ ID NO: 72862 - DNA, 20 bp, Artificial Sequence
  Description of Artificial Sequence: Synthetic oligonucleotide
  Target: ATXN2; (-) strand; PAM type: YTN; PAM sequence: TTC
aggtagctagcttttcctcc

SEQ ID NO: 72863 - DNA, 20 bp, Artificial Sequence
  Description of Artificial Sequence: Synthetic oligonucleotide
  Target: ATXN2; (-) strand; PAM type: YTN; PAM sequence: TTT
caggtagctagcttttcctc

SEQ ID NO: 72864 - DNA, 20 bp, Artificial Sequence
  Description of Artificial Sequence: Synthetic oligonucleotide
  Target: ATXN2; (-) strand; PAM type: YTN; PAM sequence: CTT
tcaggtagctagcttttcct

SEQ ID NO: 72865 - DNA, 20 bp, Artificial Sequence
  Description of Artificial Sequence: Synthetic oligonucleotide
  Target: ATXN2; (-) strand; PAM type: YTN; PAM sequence: TTC
tttcaggtagctagcttttc

SEQ ID NO: 72866 - DNA, 20 bp, Artificial Sequence
  Description of Artificial Sequence: Synthetic oligonucleotide
  Target: ATXN2; (-) strand; PAM type: YTN; PAM sequence: TTT
ctttcaggtagctagctttt

SEQ ID NO: 72867 - DNA, 20 bp, Artificial Sequence
  Description of Artificial Sequence: Synthetic oligonucleotide
  Target: ATXN2; (-) strand; PAM type: YTN; PAM sequence: TTG
agatggcacaaatttctttc

SEQ ID NO: 72868 - DNA, 20 bp, Artificial Sequence
  Description of Artificial Sequence: Synthetic oligonucleotide
  Target: ATXN2; (-) strand; PAM type: YTN; PAM sequence: TTT
gagatggcacaaatttcttt

SEQ ID NO: 72869 - DNA, 20 bp, Artificial Sequence
  Description of Artificial Sequence: Synthetic oligonucleotide
  Target: ATXN2; (-) strand; PAM type: YTN; PAM sequence: TTT
tgagatggcacaaatttctt

SEQ ID NO: 72870 - DNA, 20 bp, Artificial Sequence
  Description of Artificial Sequence: Synthetic oligonucleotide
  Target: ATXN2; (-) strand; PAM type: YTN; PAM sequence: TTC
atattttgagatggcacaaa

SEQ ID NO: 72871 - DNA, 20 bp, Artificial Sequence
  Description of Artificial Sequence: Synthetic oligonucleotide
  Target: ATXN2; (-) strand; PAM type: YTN; PAM sequence: TTT
catattttgagatggcacaa

SEQ ID NO: 72872 - DNA, 20 bp, Artificial Sequence
  Description of Artificial Sequence: Synthetic oligonucleotide
  Target: ATXN2; (-) strand; PAM type: YTN; PAM sequence: CTA
atttcatattttgagatggc

SEQ ID NO: 72873 - DNA, 20 bp, Artificial Sequence
  Description of Artificial Sequence: Synthetic oligonucleotide
  Target: ATXN2; (-) strand; PAM type: YTN; PAM sequence: CTA
ggctaatttcatattttgag

SEQ ID NO: 72874 - DNA, 20 bp, Artificial Sequence
  Description of Artificial Sequence: Synthetic oligonucleotide
  Target: ATXN2; (-) strand; PAM type: YTN; PAM sequence: CTA
tcacaccaggcctaggctaa

SEQ ID NO: 72875 - DNA, 20 bp, Artificial Sequence
  Description of Artificial Sequence: Synthetic oligonucleotide
  Target: ATXN2; (-) strand; PAM type: YTN; PAM sequence: TTA
agctatcacaccaggcctag

SEQ ID NO: 72876 - DNA, 20 bp, Artificial Sequence
  Description of Artificial Sequence: Synthetic oligonucleotide
  Target: ATXN2; (-) strand; PAM type: YTN; PAM sequence: CTT
aagctatcacaccaggccta

SEQ ID NO: 72877 - DNA, 20 bp, Artificial Sequence
  Description of Artificial Sequence: Synthetic oligonucleotide
  Target: ATXN2; (-) strand; PAM type: YTN; PAM sequence: TTA
caggcttaagctatcacacc

SEQ ID NO: 72878 - DNA, 20 bp, Artificial Sequence
  Description of Artificial Sequence: Synthetic oligonucleotide
  Target: ATXN2; (-) strand; PAM type: YTN; PAM sequence: CTC
ggattacaggcttaagctat

SEQ ID NO: 72879 - DNA, 20 bp, Artificial Sequence
  Description of Artificial Sequence: Synthetic oligonucleotide
  Target: ATXN2; (-) strand; PAM type: YTN; PAM sequence: CTC
ccaaagtgctcggattacag

SEQ ID NO: 72880 - DNA, 20 bp, Artificial Sequence
  Description of Artificial Sequence: Synthetic oligonucleotide
  Target: ATXN2; (-) strand; PAM type: YTN; PAM sequence: CTC
agcctcccaaagtgctcgga

SEQ ID NO: 72881 - DNA, 20 bp, Artificial Sequence
  Description of Artificial Sequence: Synthetic oligonucleotide
  Target: ATXN2; (-) strand; PAM type: YTN; PAM sequence: TTG
cctcagcctcccaaagtgct

SEQ ID NO: 72882 - DNA, 20 bp, Artificial Sequence
  Description of Artificial Sequence: Synthetic oligonucleotide
  Target: ATXN2; (-) strand; PAM type: YTN; PAM sequence: TTT
gcctcagcctcccaaagtgc

SEQ ID NO: 72883 - DNA, 20 bp, Artificial Sequence
  Description of Artificial Sequence: Synthetic oligonucleotide
  Target: ATXN2; (-) strand; PAM type: YTN; PAM sequence: CTT
tgcctcagcctcccaaagtg

SEQ ID NO: 72884 - DNA, 20 bp, Artificial Sequence
  Description of Artificial Sequence: Synthetic oligonucleotide
  Target: ATXN2; (-) strand; PAM type: YTN; PAM sequence: CTC
tttgcctcagcctcccaaag

SEQ ID NO: 72885 - DNA, 20 bp, Artificial Sequence
  Description of Artificial Sequence: Synthetic oligonucleotide
  Target: ATXN2; (-) strand; PAM type: YTN; PAM sequence: CTG
agcccaagcaatcctctttg

SEQ ID NO: 72886 - DNA, 20 bp, Artificial Sequence
  Description of Artificial Sequence: Synthetic oligonucleotide
  Target: ATXN2; (-) strand; PAM type: YTN; PAM sequence: CTC
ctgagcccaagcaatcctct

SEQ ID NO: 72887 - DNA, 20 bp, Artificial Sequence
  Description of Artificial Sequence: Synthetic oligonucleotide
  Target: ATXN2; (-) strand; PAM type: YTN; PAM sequence: TTG
aactcctgagcccaagcaat

SEQ ID NO: 72888 - DNA, 20 bp, Artificial Sequence
  Description of Artificial Sequence: Synthetic oligonucleotide
  Target: ATXN2; (-) strand; PAM type: YTN; PAM sequence: CTT
gaactcctgagcccaagcaa

SEQ ID NO: 72889 - DNA, 20 bp, Artificial Sequence
  Description of Artificial Sequence: Synthetic oligonucleotide
  Target: ATXN2; (-) strand; PAM type: YTN; PAM sequence: CTG
tcttgaactcctgagcccaa

SEQ ID NO: 72890 - DNA, 20 bp, Artificial Sequence
  Description of Artificial Sequence: Synthetic oligonucleotide
  Target: ATXN2; (-) strand; PAM type: YTN; PAM sequence: TTG
cccaggctgtcttgaactcc

SEQ ID NO: 72891 - DNA, 20 bp, Artificial Sequence
  Description of Artificial Sequence: Synthetic oligonucleotide
  Target: ATXN2; (-) strand; PAM type: YTN; PAM sequence: CTA
tgttgcccaggctgtcttga

SEQ ID NO: 72892 - DNA, 20 bp, Artificial Sequence
  Description of Artificial Sequence: Synthetic oligonucleotide
  Target: ATXN2; (-) strand; PAM type: YTN; PAM sequence: TTA
agtagagacgaggtcccact

SEQ ID NO: 72893 - DNA, 20 bp, Artificial Sequence
  Description of Artificial Sequence: Synthetic oligonucleotide
  Target: ATXN2; (-) strand; PAM type: YTN; PAM sequence: TTT
aagtagagacgaggtcccac

SEQ ID NO: 72894 - DNA, 20 bp, Artificial Sequence
  Description of Artificial Sequence: Synthetic oligonucleotide
  Target: ATXN2; (-) strand; PAM type: YTN; PAM sequence: TTT
taagtagagacgaggtccca

SEQ ID NO: 72895 - DNA, 20 bp, Artificial Sequence
  Description of Artificial Sequence: Synthetic oligonucleotide
  Target: ATXN2; (-) strand; PAM type: YTN; PAM sequence: TTT
ttaagtagagacgaggtccc

SEQ ID NO: 72896 - DNA, 20 bp, Artificial Sequence
  Description of Artificial Sequence: Synthetic oligonucleotide
  Target: ATXN2; (-) strand; PAM type: YTN; PAM sequence: TTT
tttaagtagagacgaggtcc

SEQ ID NO: 72897 - DNA, 20 bp, Artificial Sequence
  Description of Artificial Sequence: Synthetic oligonucleotide
  Target: ATXN2; (-) strand; PAM type: YTN; PAM sequence: CTT
ttttaagtagagacgaggtc

SEQ ID NO: 72898 - DNA, 20 bp, Artificial Sequence
  Description of Artificial Sequence: Synthetic oligonucleotide
  Target: ATXN2; (-) strand; PAM type: YTN; PAM sequence: TTC
ttttttaagtagagacgagg

SEQ ID NO: 72899 - DNA, 20 bp, Artificial Sequence
  Description of Artificial Sequence: Synthetic oligonucleotide
  Target: ATXN2; (-) strand; PAM type: YTN; PAM sequence: TTT
cttttttaagtagagacgag

SEQ ID NO: 72900 - DNA, 20 bp, Artificial Sequence
  Description of Artificial Sequence: Synthetic oligonucleotide
  Target: ATXN2; (-) strand; PAM type: YTN; PAM sequence: TTT
tcttttttaagtagagacga

SEQ ID NO: 72901 - DNA, 20 bp, Artificial Sequence
  Description of Artificial Sequence: Synthetic oligonucleotide
  Target: ATXN2; (-) strand; PAM type: YTN; PAM sequence: TTT
ttcttttttaagtagagacg

SEQ ID NO: 72902 - DNA, 20 bp, Artificial Sequence
  Description of Artificial Sequence: Synthetic oligonucleotide
  Target: ATXN2; (-) strand; PAM type: YTN; PAM sequence: TTA
gaatttttcttttttaagta

SEQ ID NO: 72903 - DNA, 20 bp, Artificial Sequence
  Description of Artificial Sequence: Synthetic oligonucleotide
  Target: ATXN2; (-) strand; PAM type: YTN; PAM sequence: TTT
agaatttttcttttttaagt

SEQ ID NO: 72904 - DNA, 20 bp, Artificial Sequence
  Description of Artificial Sequence: Synthetic oligonucleotide
  Target: ATXN2; (-) strand; PAM type: YTN; PAM sequence: TTT
tagaatttttcttttttaag

SEQ ID NO: 72905 - DNA, 20 bp, Artificial Sequence
  Description of Artificial Sequence: Synthetic oligonucleotide
  Target: ATXN2; (-) strand; PAM type: YTN; PAM sequence: TTT
ttagaatttttcttttttaa

SEQ ID NO: 72906 - DNA, 20 bp, Artificial Sequence
  Description of Artificial Sequence: Synthetic oligonucleotide
  Target: ATXN2; (-) strand; PAM type: YTN; PAM sequence: CTT
tttagaatttttctttttta

SEQ ID NO: 72907 - DNA, 20 bp, Artificial Sequence
  Description of Artificial Sequence: Synthetic oligonucleotide
  Target: ATXN2; (-) strand; PAM type: YTN; PAM sequence: CTC
tttttagaatttttcttttt

SEQ ID NO: 72908 - DNA, 20 bp, Artificial Sequence
  Description of Artificial Sequence: Synthetic oligonucleotide
  Target: ATXN2; (-) strand; PAM type: YTN; PAM sequence: CTC
tctttttagaatttttcttt

SEQ ID NO: 72909 - DNA, 20 bp, Artificial Sequence
  Description of Artificial Sequence: Synthetic oligonucleotide
  Target: ATXN2; (-) strand; PAM type: YTN; PAM sequence: TTC
actctctttttagaattttt

SEQ ID NO: 72910 - DNA, 20 bp, Artificial Sequence
  Description of Artificial Sequence: Synthetic oligonucleotide
  Target: ATXN2; (-) strand; PAM type: YTN; PAM sequence: TTT
cactctctttttagaatttt

SEQ ID NO: 72911 - DNA, 20 bp, Artificial Sequence
  Description of Artificial Sequence: Synthetic oligonucleotide
  Target: ATXN2; (-) strand; PAM type: YTN; PAM sequence: CTT
tcactctctttttagaattt

SEQ ID NO: 72912 - DNA, 20 bp, Artificial Sequence
  Description of Artificial Sequence: Synthetic oligonucleotide
  Target: ATXN2; (-) strand; PAM type: YTN; PAM sequence: CTC
tttcactctctttttagaat

SEQ ID NO: 72913 - DNA, 20 bp, Artificial Sequence
  Description of Artificial Sequence: Synthetic oligonucleotide
  Target: ATXN2; (-) strand; PAM type: YTN; PAM sequence: CTG
tctctttcactctcttttta

SEQ ID NO: 72914 - DNA, 20 bp, Artificial Sequence
  Description of Artificial Sequence: Synthetic oligonucleotide
  Target: ATXN2; (-) strand; PAM type: YTN; PAM sequence: CTC
tgtctctttcactctctttt

SEQ ID NO: 72915 - DNA, 20 bp, Artificial Sequence
  Description of Artificial Sequence: Synthetic oligonucleotide
  Target: ATXN2; (-) strand; PAM type: YTN; PAM sequence: CTC
tctgtctctttcactctctt

SEQ ID NO: 72916 - DNA, 20 bp, Artificial Sequence
  Description of Artificial Sequence: Synthetic oligonucleotide
  Target: ATXN2; (-) strand; PAM type: YTN; PAM sequence: TTC
tctctgtctctttcactctc

SEQ ID NO: 72917 - DNA, 20 bp, Artificial Sequence
  Description of Artificial Sequence: Synthetic oligonucleotide
  Target: ATXN2; (-) strand; PAM type: YTN; PAM sequence: TTT
ctctctgtctctttcactct

SEQ ID NO: 72918 - DNA, 20 bp, Artificial Sequence
  Description of Artificial Sequence: Synthetic oligonucleotide
  Target: ATXN2; (-) strand; PAM type: YTN; PAM sequence: CTT
tctctctgtctctttcactc

SEQ ID NO: 72919 - DNA, 20 bp, Artificial Sequence
  Description of Artificial Sequence: Synthetic oligonucleotide
  Target: ATXN2; (-) strand; PAM type: YTN; PAM sequence: CTC
tttctctctgtctctttcac

SEQ ID NO: 72920 - DNA, 20 bp, Artificial Sequence
  Description of Artificial Sequence: Synthetic oligonucleotide
  Target: ATXN2; (-) strand; PAM type: YTN; PAM sequence: CTC
tctttctctctgtctctttc

SEQ ID NO: 72921 - DNA, 20 bp, Artificial Sequence
  Description of Artificial Sequence: Synthetic oligonucleotide
  Target: ATXN2; (-) strand; PAM type: YTN; PAM sequence: TTC
tctctttctctctgtctctt

SEQ ID NO: 72922 - DNA, 20 bp, Artificial Sequence
  Description of Artificial Sequence: Synthetic oligonucleotide
  Target: ATXN2; (-) strand; PAM type: YTN; PAM sequence: TTT
ctctctttctctctgtctct

SEQ ID NO: 72923 - DNA, 20 bp, Artificial Sequence
  Description of Artificial Sequence: Synthetic oligonucleotide
  Target: ATXN2; (-) strand; PAM type: YTN; PAM sequence: TTA
tttctctctttctctctgtc

SEQ ID NO: 72924 - DNA, 20 bp, Artificial Sequence
  Description of Artificial Sequence: Synthetic oligonucleotide
  Target: ATXN2; (-) strand; PAM type: YTN; PAM sequence: CTT
atttctctctttctctctgt

SEQ ID NO: 72925 - DNA, 20 bp, Artificial Sequence
  Description of Artificial Sequence: Synthetic oligonucleotide
  Target: ATXN2; (-) strand; PAM type: YTN; PAM sequence: CTC
cttatttctctctttctctc

SEQ ID NO: 72926 - DNA, 20 bp, Artificial Sequence
  Description of Artificial Sequence: Synthetic oligonucleotide
  Target: ATXN2; (-) strand; PAM type: YTN; PAM sequence: TTC
tccttatttctctctttctc

SEQ ID NO: 72927 - DNA, 20 bp, Artificial Sequence
  Description of Artificial Sequence: Synthetic oligonucleotide
  Target: ATXN2; (-) strand; PAM type: YTN; PAM sequence: TTT
ctccttatttctctctttct

SEQ ID NO: 72928 - DNA, 20 bp, Artificial Sequence
  Description of Artificial Sequence: Synthetic oligonucleotide
  Target: ATXN2; (-) strand; PAM type: YTN; PAM sequence: CTG
atttctccttatttctctct

SEQ ID NO: 72929 - DNA, 20 bp, Artificial Sequence
  Description of Artificial Sequence: Synthetic oligonucleotide
  Target: ATXN2; (-) strand; PAM type: YTN; PAM sequence: TTG
gactgatttctccttatttc

SEQ ID NO: 72930 - DNA, 20 bp, Artificial Sequence
  Description of Artificial Sequence: Synthetic oligonucleotide
  Target: ATXN2; (-) strand; PAM type: YTN; PAM sequence: CTC
aaacgatgattggactgatt

SEQ ID NO: 72931 - DNA, 20 bp, Artificial Sequence
  Description of Artificial Sequence: Synthetic oligonucleotide
  Target: ATXN2; (-) strand; PAM type: YTN; PAM sequence: TTA
taaagaagtgctcaaacgat

SEQ ID NO: 72932 - DNA, 20 bp, Artificial Sequence
  Description of Artificial Sequence: Synthetic oligonucleotide
  Target: ATXN2; (-) strand; PAM type: YTN; PAM sequence: TTT
ataaagaagtgctcaaacga

SEQ ID NO: 72933 - DNA, 20 bp, Artificial Sequence
  Description of Artificial Sequence: Synthetic oligonucleotide
  Target: ATXN2; (-) strand; PAM type: YTN; PAM sequence: TTT
tataaagaagtgctcaaacg

SEQ ID NO: 72934 - DNA, 20 bp, Artificial Sequence
  Description of Artificial Sequence: Synthetic oligonucleotide
  Target: ATXN2; (-) strand; PAM type: YTN; PAM sequence: CTT
ttataaagaagtgctcaaac

SEQ ID NO: 72935 - DNA, 20 bp, Artificial Sequence
  Description of Artificial Sequence: Synthetic oligonucleotide
  Target: ATXN2; (-) strand; PAM type: YTN; PAM sequence: CTG
aaaatagtaccttttataaa

SEQ ID NO: 72936 - DNA, 20 bp, Artificial Sequence
  Description of Artificial Sequence: Synthetic oligonucleotide
  Target: ATXN2; (-) strand; PAM type: YTN; PAM sequence: CTG
agctgaaaatagtacctttt

SEQ ID NO: 72937 - DNA, 20 bp, Artificial Sequence
  Description of Artificial Sequence: Synthetic oligonucleotide
  Target: ATXN2; (-) strand; PAM type: YTN; PAM sequence: TTC
tgagctgaaaatagtacctt

SEQ ID NO: 72938 - DNA, 20 bp, Artificial Sequence
  Description of Artificial Sequence: Synthetic oligonucleotide
  Target: ATXN2; (-) strand; PAM type: YTN; PAM sequence: CTT
ctgagctgaaaatagtacct

SEQ ID NO: 72939 - DNA, 20 bp, Artificial Sequence
  Description of Artificial Sequence: Synthetic oligonucleotide
  Target: ATXN2; (-) strand; PAM type: YTN; PAM sequence: TTA
acttctgagctgaaaatagt

SEQ ID NO: 72940 - DNA, 20 bp, Artificial Sequence
  Description of Artificial Sequence: Synthetic oligonucleotide
  Target: ATXN2; (-) strand; PAM type: YTN; PAM sequence: TTT
aacttctgagctgaaaatag

SEQ ID NO: 72941 - DNA, 20 bp, Artificial Sequence
  Description of Artificial Sequence: Synthetic oligonucleotide
  Target: ATXN2; (-) strand; PAM type: YTN; PAM sequence: CTT
taacttctgagctgaaaata

SEQ ID NO: 72942 - DNA, 20 bp, Artificial Sequence
  Description of Artificial Sequence: Synthetic oligonucleotide
  Target: ATXN2; (-) strand; PAM type: YTN; PAM sequence: CTC
tttaacttctgagctgaaaa

SEQ ID NO: 72943 - DNA, 20 bp, Artificial Sequence
  Description of Artificial Sequence: Synthetic oligonucleotide
  Target: ATXN2; (-) strand; PAM type: YTN; PAM sequence: TTC
tctttaacttctgagctgaa

SEQ ID NO: 72944 - DNA, 20 bp, Artificial Sequence
  Description of Artificial Sequence: Synthetic oligonucleotide
  Target: ATXN2; (-) strand; PAM type: YTN; PAM sequence: TTT
ctctttaacttctgagctga

SEQ ID NO: 72945 - DNA, 20 bp, Artificial Sequence
  Description of Artificial Sequence: Synthetic oligonucleotide
  Target: ATXN2; (-) strand; PAM type: YTN; PAM sequence: CTT
tctctttaacttctgagctg

SEQ ID NO: 72946 - DNA, 20 bp, Artificial Sequence
  Description of Artificial Sequence: Synthetic oligonucleotide
  Target: ATXN2; (-) strand; PAM type: YTN; PAM sequence: TTC
tttctctttaacttctgagc

SEQ ID NO: 72947 - DNA, 20 bp, Artificial Sequence
  Description of Artificial Sequence: Synthetic oligonucleotide
  Target: ATXN2; (-) strand; PAM type: YTN; PAM sequence: TTT
ctttctctttaacttctgag

SEQ ID NO: 72948 - DNA, 20 bp, Artificial Sequence
  Description of Artificial Sequence: Synthetic oligonucleotide
  Target: ATXN2; (-) strand; PAM type: YTN; PAM sequence: TTT
tctttctctttaacttctga

SEQ ID NO: 72949 - DNA, 20 bp, Artificial Sequence
  Description of Artificial Sequence: Synthetic oligonucleotide
  Target: ATXN2; (-) strand; PAM type: YTN; PAM sequence: TTT
ttctttctctttaacttctg

SEQ ID NO: 72950 - DNA, 20 bp, Artificial Sequence
  Description of Artificial Sequence: Synthetic oligonucleotide
  Target: ATXN2; (-) strand; PAM type: YTN; PAM sequence: TTT
tttctttctctttaacttct

SEQ ID NO: 72951 - DNA, 20 bp, Artificial Sequence
  Description of Artificial Sequence: Synthetic oligonucleotide
  Target: ATXN2; (-) strand; PAM type: YTN; PAM sequence: TTT
ttttctttctctttaacttc

SEQ ID NO: 72952 - DNA, 20 bp, Artificial Sequence
  Description of Artificial Sequence: Synthetic oligonucleotide
  Target: ATXN2; (-) strand; PAM type: YTN; PAM sequence: CTT
tttttctttctctttaactt

SEQ ID NO: 72953 - DNA, 20 bp, Artificial Sequence
  Description of Artificial Sequence: Synthetic oligonucleotide
  Target: ATXN2; (-) strand; PAM type: YTN; PAM sequence: TTC
tttttttctttctctttaac

SEQ ID NO: 72954 - DNA, 20 bp, Artificial Sequence
  Description of Artificial Sequence: Synthetic oligonucleotide
  Target: ATXN2; (-) strand; PAM type: YTN; PAM sequence: CTT
ctttttttctttctctttaa

SEQ ID NO: 72955 - DNA, 20 bp, Artificial Sequence
  Description of Artificial Sequence: Synthetic oligonucleotide
  Target: ATXN2; (-) strand; PAM type: YTN; PAM sequence: TTA
caggcatgagccatcgcacc

SEQ ID NO: 72956 - DNA, 20 bp, Artificial Sequence
  Description of Artificial Sequence: Synthetic oligonucleotide
  Target: ATXN2; (-) strand; PAM type: YTN; PAM sequence: CTG
ggattacaggcatgagccat

SEQ ID NO: 72957 - DNA, 20 bp, Artificial Sequence
  Description of Artificial Sequence: Synthetic oligonucleotide
  Target: ATXN2; (-) strand; PAM type: YTN; PAM sequence: CTC
ccaaagtgctgggattacag

SEQ ID NO: 72958 - DNA, 20 bp, Artificial Sequence
  Description of Artificial Sequence: Synthetic oligonucleotide
  Target: ATXN2; (-) strand; PAM type: YTN; PAM sequence: CTC
ggcctcccaaagtgctggga

SEQ ID NO: 72959 - DNA, 20 bp, Artificial Sequence
  Description of Artificial Sequence: Synthetic oligonucleotide
  Target: ATXN2; (-) strand; PAM type: YTN; PAM sequence: CTC
gtgatccatccgcctcggcc

SEQ ID NO: 72960 - DNA, 20 bp, Artificial Sequence
  Description of Artificial Sequence: Synthetic oligonucleotide
  Target: ATXN2; (-) strand; PAM type: YTN; PAM sequence: CTG
acctcgtgatccatccgcct

SEQ ID NO: 72961 - DNA, 20 bp, Artificial Sequence
  Description of Artificial Sequence: Synthetic oligonucleotide
  Target: ATXN2; (-) strand; PAM type: YTN; PAM sequence: CTC
ctgacctcgtgatccatccg

SEQ ID NO: 72962 - DNA, 20 bp, Artificial Sequence
  Description of Artificial Sequence: Synthetic oligonucleotide
  Target: ATXN2; (-) strand; PAM type: YTN; PAM sequence: CTC
aatctcctgacctcgtgatc

SEQ ID NO: 72963 - DNA, 20 bp, Artificial Sequence
  Description of Artificial Sequence: Synthetic oligonucleotide
  Target: ATXN2; (-) strand; PAM type: YTN; PAM sequence: TTA
gccaaggtggtctcaatctc

SEQ ID NO: 72964 - DNA, 20 bp, Artificial Sequence
  Description of Artificial Sequence: Synthetic oligonucleotide
  Target: ATXN2; (-) strand; PAM type: YTN; PAM sequence: TTC
accgtgttagccaaggtggt

SEQ ID NO: 72965 - DNA, 20 bp, Artificial Sequence
  Description of Artificial Sequence: Synthetic oligonucleotide
  Target: ATXN2; (-) strand; PAM type: YTN; PAM sequence: TTT
caccgtgttagccaaggtgg

SEQ ID NO: 72966 - DNA, 20 bp, Artificial Sequence
  Description of Artificial Sequence: Synthetic oligonucleotide
  Target: ATXN2; (-) strand; PAM type: YTN; PAM sequence: TTA
gtagagacggggtttcaccg

SEQ ID NO: 72967 - DNA, 20 bp, Artificial Sequence
  Description of Artificial Sequence: Synthetic oligonucleotide
  Target: ATXN2; (-) strand; PAM type: YTN; PAM sequence: TTT
agtagagacggggtttcacc

SEQ ID NO: 72968 - DNA, 20 bp, Artificial Sequence
  Description of Artificial Sequence: Synthetic oligonucleotide
  Target: ATXN2; (-) strand; PAM type: YTN; PAM sequence: TTT
tagtagagacggggtttcac

SEQ ID NO: 72969 - DNA, 20 bp, Artificial Sequence
  Description of Artificial Sequence: Synthetic oligonucleotide
  Target: ATXN2; (-) strand; PAM type: YTN; PAM sequence: TTT
ttagtagagacggggtttca

SEQ ID NO: 72970 - DNA, 20 bp, Artificial Sequence
  Description of Artificial Sequence: Synthetic oligonucleotide
  Target: ATXN2; (-) strand; PAM type: YTN; PAM sequence: TTG
tatttttagtagagacgggg

SEQ ID NO: 72971 - DNA, 20 bp, Artificial Sequence
  Description of Artificial Sequence: Synthetic oligonucleotide
  Target: ATXN2; (-) strand; PAM type: YTN; PAM sequence: TTT
gtatttttagtagagacggg

SEQ ID NO: 72972 - DNA, 20 bp, Artificial Sequence
  Description of Artificial Sequence: Synthetic oligonucleotide
  Target: ATXN2; (-) strand; PAM type: YTN; PAM sequence: TTT
tgtatttttagtagagacgg

SEQ ID NO: 72973 - DNA, 20 bp, Artificial Sequence
  Description of Artificial Sequence: Synthetic oligonucleotide
  Target: ATXN2; (-) strand; PAM type: YTN; PAM sequence: TTT
ttgtatttttagtagagacg

SEQ ID NO: 72974 - DNA, 20 bp, Artificial Sequence
  Description of Artificial Sequence: Synthetic oligonucleotide
  Target: ATXN2; (-) strand; PAM type: YTN; PAM sequence: TTT
tttgtatttttagtagagac

SEQ ID NO: 72975 - DNA, 20 bp, Artificial Sequence
  Description of Artificial Sequence: Synthetic oligonucleotide
  Target: ATXN2; (-) strand; PAM type: YTN; PAM sequence: CTA
attttttgtatttttagtag

SEQ ID NO: 72976 - DNA, 20 bp, Artificial Sequence
  Description of Artificial Sequence: Synthetic oligonucleotide
  Target: ATXN2; (-) strand; PAM type: YTN; PAM sequence: CTA
gaggtacccgccacagcgcc

SEQ ID NO: 72977 - DNA, 20 bp, Artificial Sequence
  Description of Artificial Sequence: Synthetic oligonucleotide
  Target: ATXN2; (-) strand; PAM type: YTN; PAM sequence: CTG
ggactagaggtacccgccac

SEQ ID NO: 72978 - DNA, 20 bp, Artificial Sequence
  Description of Artificial Sequence: Synthetic oligonucleotide
  Target: ATXN2; (-) strand; PAM type: YTN; PAM sequence: CTC
ccgggtagctgggactagag

SEQ ID NO: 72979 - DNA, 20 bp, Artificial Sequence
  Description of Artificial Sequence: Synthetic oligonucleotide
  Target: ATXN2; (-) strand; PAM type: YTN; PAM sequence: CTC
agcctcccgggtagctggga

SEQ ID NO: 72980 - DNA, 20 bp, Artificial Sequence
  Description of Artificial Sequence: Synthetic oligonucleotide
  Target: ATXN2; (-) strand; PAM type: YTN; PAM sequence: CTG
cctcagcctcccgggtagct

SEQ ID NO: 72981 - DNA, 20 bp, Artificial Sequence
  Description of Artificial Sequence: Synthetic oligonucleotide
  Target: ATXN2; (-) strand; PAM type: YTN; PAM sequence: CTC
ctgcctcagcctcccgggta

SEQ ID NO: 72982 - DNA, 20 bp, Artificial Sequence
  Description of Artificial Sequence: Synthetic oligonucleotide
  Target: ATXN2; (-) strand; PAM type: YTN; PAM sequence: TTC
tcctgcctcagcctcccggg

SEQ ID NO: 72983 - DNA, 20 bp, Artificial Sequence
  Description of Artificial Sequence: Synthetic oligonucleotide
  Target: ATXN2; (-) strand; PAM type: YTN; PAM sequence: TTT
ctcctgcctcagcctcccgg

SEQ ID NO: 72984 - DNA, 20 bp, Artificial Sequence
  Description of Artificial Sequence: Synthetic oligonucleotide
  Target: ATXN2; (-) strand; PAM type: YTN; PAM sequence: TTT
tctcctgcctcagcctcccg

SEQ ID NO: 72985 - DNA, 20 bp, Artificial Sequence
  Description of Artificial Sequence: Synthetic oligonucleotide
  Target: ATXN2; (-) strand; PAM type: YTN; PAM sequence: TTC
atgccattttctcctgcctc

SEQ ID NO: 72986 - DNA, 20 bp, Artificial Sequence
  Description of Artificial Sequence: Synthetic oligonucleotide
  Target: ATXN2; (-) strand; PAM type: YTN; PAM sequence: CTC
ccgggttcatgccattttct

SEQ ID NO: 72987 - DNA, 20 bp, Artificial Sequence
  Description of Artificial Sequence: Synthetic oligonucleotide
  Target: ATXN2; (-) strand; PAM type: YTN; PAM sequence: CTC
cgcctcccgggttcatgcca

SEQ ID NO: 72988 - DNA, 20 bp, Artificial Sequence
  Description of Artificial Sequence: Synthetic oligonucleotide
  Target: ATXN2; (-) strand; PAM type: YTN; PAM sequence: CTG
caagctccgcctcccgggtt

SEQ ID NO: 72989 - DNA, 20 bp, Artificial Sequence
  Description of Artificial Sequence: Synthetic oligonucleotide
  Target: ATXN2; (-) strand; PAM type: YTN; PAM sequence: CTC
actgcaagctccgcctcccg

SEQ ID NO: 72990 - DNA, 20 bp, Artificial Sequence
  Description of Artificial Sequence: Synthetic oligonucleotide
  Target: ATXN2; (-) strand; PAM type: YTN; PAM sequence: CTC
ggctcactgcaagctccgcc

SEQ ID NO: 72991 - DNA, 20 bp, Artificial Sequence
  Description of Artificial Sequence: Synthetic oligonucleotide
  Target: ATXN2; (-) strand; PAM type: YTN; PAM sequence: CTG
gagtgcagtagcgcgatctc

SEQ ID NO: 72992 - DNA, 20 bp, Artificial Sequence
  Description of Artificial Sequence: Synthetic oligonucleotide
  Target: ATXN2; (-) strand; PAM type: YTN; PAM sequence: TTG
cccaggctggagtgcagtag

SEQ ID NO: 72993 - DNA, 20 bp, Artificial Sequence
  Description of Artificial Sequence: Synthetic oligonucleotide
  Target: ATXN2; (-) strand; PAM type: YTN; PAM sequence: CTG
ttgcccaggctggagtgcag

SEQ ID NO: 72994 - DNA, 20 bp, Artificial Sequence
  Description of Artificial Sequence: Synthetic oligonucleotide
  Target: ATXN2; (-) strand; PAM type: YTN; PAM sequence: CTC
tgttgcccaggctggagtgc

SEQ ID NO: 72995 - DNA, 20 bp, Artificial Sequence
  Description of Artificial Sequence: Synthetic oligonucleotide
  Target: ATXN2; (-) strand; PAM type: YTN; PAM sequence: TTG
ctctgttgcccaggctggag

SEQ ID NO: 72996 - DNA, 20 bp, Artificial Sequence
  Description of Artificial Sequence: Synthetic oligonucleotide
  Target: ATXN2; (-) strand; PAM type: YTN; PAM sequence: CTT
gctctgttgcccaggctgga

SEQ ID NO: 72997 - DNA, 20 bp, Artificial Sequence
  Description of Artificial Sequence: Synthetic oligonucleotide
  Target: ATXN2; (-) strand; PAM type: YTN; PAM sequence: TTG
agacagagtcttgctctgtt

SEQ ID NO: 72998 - DNA, 20 bp, Artificial Sequence
  Description of Artificial Sequence: Synthetic oligonucleotide
  Target: ATXN2; (-) strand; PAM type: YTN; PAM sequence: TTT
gagacagagtcttgctctgt

SEQ ID NO: 72999 - DNA, 20 bp, Artificial Sequence
  Description of Artificial Sequence: Synthetic oligonucleotide
  Target: ATXN2; (-) strand; PAM type: YTN; PAM sequence: TTT
tgagacagagtcttgctctg

SEQ ID NO: 73000 - DNA, 20 bp, Artificial Sequence
  Description of Artificial Sequence: Synthetic oligonucleotide
  Target: ATXN2; (-) strand; PAM type: YTN; PAM sequence: TTT
ttgagacagagtcttgctct

SEQ ID NO: 73001 - DNA, 20 bp, Artificial Sequence
  Description of Artificial Sequence: Synthetic oligonucleotide
  Target: ATXN2; (-) strand; PAM type: YTN; PAM sequence: TTA
tttttgagacagagtcttgc

SEQ ID NO: 73002 - DNA, 20 bp, Artificial Sequence
  Description of Artificial Sequence: Synthetic oligonucleotide
  Target: ATXN2; (-) strand; PAM type: YTN; PAM sequence: TTT
atttttgagacagagtcttg

SEQ ID NO: 73003 - DNA, 20 bp, Artificial Sequence
  Description of Artificial Sequence: Synthetic oligonucleotide
  Target: ATXN2; (-) strand; PAM type: YTN; PAM sequence: TTT
tatttttgagacagagtctt

SEQ ID NO: 73004 - DNA, 20 bp, Artificial Sequence
  Description of Artificial Sequence: Synthetic oligonucleotide
  Target: ATXN2; (-) strand; PAM type: YTN; PAM sequence: TTT
ttatttttgagacagagtct

SEQ ID NO: 73005 - DNA, 20 bp, Artificial Sequence
  Description of Artificial Sequence: Synthetic oligonucleotide
  Target: ATXN2; (-) strand; PAM type: YTN; PAM sequence: TTT
tttatttttgagacagagtc

SEQ ID NO: 73006 - DNA, 20 bp, Artificial Sequence
  Description of Artificial Sequence: Synthetic oligonucleotide
  Target: ATXN2; (-) strand; PAM type: YTN; PAM sequence: TTA
ttttttatttttgagacaga

SEQ ID NO: 73007 - DNA, 20 bp, Artificial Sequence
  Description of Artificial Sequence: Synthetic oligonucleotide
  Target: ATXN2; (-) strand; PAM type: YTN; PAM sequence: TTT
attttttatttttgagacag

SEQ ID NO: 73008 - DNA, 20 bp, Artificial Sequence
  Description of Artificial Sequence: Synthetic oligonucleotide
  Target: ATXN2; (-) strand; PAM type: YTN; PAM sequence: TTT
tattttttatttttgagaca

SEQ ID NO: 73009 - DNA, 20 bp, Artificial Sequence
  Description of Artificial Sequence: Synthetic oligonucleotide
  Target: ATXN2; (-) strand; PAM type: YTN; PAM sequence: TTT
ttattttttatttttgagac

SEQ ID NO: 73010 - DNA, 20 bp, Artificial Sequence
  Description of Artificial Sequence: Synthetic oligonucleotide
  Target: ATXN2; (-) strand; PAM type: YTN; PAM sequence: TTA
tttttattttttatttttga

SEQ ID NO: 73011 - DNA, 20 bp, Artificial Sequence
  Description of Artificial Sequence: Synthetic oligonucleotide
  Target: ATXN2; (-) strand; PAM type: YTN; PAM sequence: TTT
atttttattttttatttttg

SEQ ID NO: 73012 - DNA, 20 bp, Artificial Sequence
  Description of Artificial Sequence: Synthetic oligonucleotide
  Target: ATXN2; (-) strand; PAM type: YTN; PAM sequence: TTT
tatttttattttttattttt

SEQ ID NO: 73013 - DNA, 20 bp, Artificial Sequence
  Description of Artificial Sequence: Synthetic oligonucleotide
  Target: ATXN2; (-) strand; PAM type: YTN; PAM sequence: TTT
ttatttttattttttatttt

SEQ ID NO: 73014 - DNA, 20 bp, Artificial Sequence
  Description of Artificial Sequence: Synthetic oligonucleotide
  Target: ATXN2; (-) strand; PAM type: YTN; PAM sequence: TTT
tttatttttattttttattt

SEQ ID NO: 73015 - DNA, 20 bp, Artificial Sequence
  Description of Artificial Sequence: Synthetic oligonucleotide
  Target: ATXN2; (-) strand; PAM type: YTN; PAM sequence: TTT
ttttatttttattttttatt

SEQ ID NO: 73016 - DNA, 20 bp, Artificial Sequence
  Description of Artificial Sequence: Synthetic oligonucleotide
  Target: ATXN2; (-) strand; PAM type: YTN; PAM sequence: CTT
tttttatttttattttttat

SEQ ID NO: 73017 - DNA, 20 bp, Artificial Sequence
  Description of Artificial Sequence: Synthetic oligonucleotide
  Target: ATXN2; (-) strand; PAM type: YTN; PAM sequence: TTC
tttttttatttttatttttt

SEQ ID NO: 73018 - DNA, 20 bp, Artificial Sequence
  Description of Artificial Sequence: Synthetic oligonucleotide
  Target: ATXN2; (-) strand; PAM type: YTN; PAM sequence: TTT
ctttttttatttttattttt

SEQ ID NO: 73019 - DNA, 20 bp, Artificial Sequence
  Description of Artificial Sequence: Synthetic oligonucleotide
  Target: ATXN2; (-) strand; PAM type: YTN; PAM sequence: TTT
tctttttttatttttatttt

SEQ ID NO: 73020 - DNA, 20 bp, Artificial Sequence
  Description of Artificial Sequence: Synthetic oligonucleotide
  Target: ATXN2; (-) strand; PAM type: YTN; PAM sequence: TTT
ttctttttttatttttattt

SEQ ID NO: 73021 - DNA, 20 bp, Artificial Sequence
  Description of Artificial Sequence: Synthetic oligonucleotide
  Target: ATXN2; (-) strand; PAM type: YTN; PAM sequence: TTT
tttctttttttatttttatt

SEQ ID NO: 73022 - DNA, 20 bp, Artificial Sequence
  Description of Artificial Sequence: Synthetic oligonucleotide
  Target: ATXN2; (-) strand; PAM type: YTN; PAM sequence: CTT
ttttctttttttatttttat

SEQ ID NO: 73023 - DNA, 20 bp, Artificial Sequence
  Description of Artificial Sequence: Synthetic oligonucleotide
  Target: ATXN2; (-) strand; PAM type: YTN; PAM sequence: TTC
ttttttctttttttattttt

SEQ ID NO: 73024 - DNA, 20 bp, Artificial Sequence
  Description of Artificial Sequence: Synthetic oligonucleotide
  Target: ATXN2; (-) strand; PAM type: YTN; PAM sequence: CTT
cttttttctttttttatttt

SEQ ID NO: 73025 - DNA, 20 bp, Artificial Sequence
  Description of Artificial Sequence: Synthetic oligonucleotide
  Target: ATXN2; (-) strand; PAM type: YTN; PAM sequence: TTC
ttcttttttctttttttatt

SEQ ID NO: 73026 - DNA, 20 bp, Artificial Sequence
  Description of Artificial Sequence: Synthetic oligonucleotide
  Target: ATXN2; (-) strand; PAM type: YTN; PAM sequence: TTT
cttcttttttctttttttat

SEQ ID NO: 73027 - DNA, 20 bp, Artificial Sequence
  Description of Artificial Sequence: Synthetic oligonucleotide
  Target: ATXN2; (-) strand; PAM type: YTN; PAM sequence: TTT
tcttcttttttcttttttta

SEQ ID NO: 73028 - DNA, 20 bp, Artificial Sequence
  Description of Artificial Sequence: Synthetic oligonucleotide
  Target: ATXN2; (-) strand; PAM type: YTN; PAM sequence: CTA
cagaatcattttcttctttt

SEQ ID NO: 73029 - DNA, 20 bp, Artificial Sequence
  Description of Artificial Sequence: Synthetic oligonucleotide
  Target: ATXN2; (-) strand; PAM type: YTN; PAM sequence: TTC
tacagaatcattttcttctt

SEQ ID NO: 73030 - DNA, 20 bp, Artificial Sequence
  Description of Artificial Sequence: Synthetic oligonucleotide
  Target: ATXN2; (-) strand; PAM type: YTN; PAM sequence: CTT
ctacagaatcattttcttct

SEQ ID NO: 73031 - DNA, 20 bp, Artificial Sequence
  Description of Artificial Sequence: Synthetic oligonucleotide
  Target: ATXN2; (-) strand; PAM type: YTN; PAM sequence: TTC
ttctacagaatcattttctt

SEQ ID NO: 73032 - DNA, 20 bp, Artificial Sequence
  Description of Artificial Sequence: Synthetic oligonucleotide
  Target: ATXN2; (-) strand; PAM type: YTN; PAM sequence: TTA
gttcttctacagaatcattt

SEQ ID NO: 73033 - DNA, 20 bp, Artificial Sequence
  Description of Artificial Sequence: Synthetic oligonucleotide
  Target: ATXN2; (-) strand; PAM type: YTN; PAM sequence: CTT
agttcttctacagaatcatt

SEQ ID NO: 73034 - DNA, 20 bp, Artificial Sequence
  Description of Artificial Sequence: Synthetic oligonucleotide
  Target: ATXN2; (-) strand; PAM type: YTN; PAM sequence: TTG
tcttagttcttctacagaat

SEQ ID NO: 73035 - DNA, 20 bp, Artificial Sequence
  Description of Artificial Sequence: Synthetic oligonucleotide
  Target: ATXN2; (-) strand; PAM type: YTN; PAM sequence: TTT
gtcttagttcttctacagaa

SEQ ID NO: 73036 - DNA, 20 bp, Artificial Sequence
  Description of Artificial Sequence: Synthetic oligonucleotide
  Target: ATXN2; (-) strand; PAM type: YTN; PAM sequence: TTT
tgtcttagttcttctacaga

SEQ ID NO: 73037 - DNA, 20 bp, Artificial Sequence
  Description of Artificial Sequence: Synthetic oligonucleotide
  Target: ATXN2; (-) strand; PAM type: YTN; PAM sequence: TTT
ttgtcttagttcttctacag

SEQ ID NO: 73038 - DNA, 20 bp, Artificial Sequence
  Description of Artificial Sequence: Synthetic oligonucleotide
  Target: ATXN2; (-) strand; PAM type: YTN; PAM sequence: TTT
tttgtcttagttcttctaca

SEQ ID NO: 73039 - DNA, 20 bp, Artificial Sequence
  Description of Artificial Sequence: Synthetic oligonucleotide
  Target: ATXN2; (-) strand; PAM type: YTN; PAM sequence: TTT
ttttgtcttagttcttctac

SEQ ID NO: 73040 - DNA, 20 bp, Artificial Sequence
  Description of Artificial Sequence: Synthetic oligonucleotide
  Target: ATXN2; (-) strand; PAM type: YTN; PAM sequence: CTT
tttttgtcttagttcttcta

SEQ ID NO: 73041 - DNA, 20 bp, Artificial Sequence
  Description of Artificial Sequence: Synthetic oligonucleotide
  Target: ATXN2; (-) strand; PAM type: YTN; PAM sequence: TTA
ctttttttgtcttagttctt

SEQ ID NO: 73042 - DNA, 20 bp, Artificial Sequence
  Description of Artificial Sequence: Synthetic oligonucleotide
  Target: ATXN2; (-) strand; PAM type: YTN; PAM sequence: TTT
actttttttgtcttagttct

SEQ ID NO: 73043 - DNA, 20 bp, Artificial Sequence
  Description of Artificial Sequence: Synthetic oligonucleotide
  Target: ATXN2; (-) strand; PAM type: YTN; PAM sequence: CTG
aatttactttttttgtctta

SEQ ID NO: 73044 - DNA, 20 bp, Artificial Sequence
  Description of Artificial Sequence: Synthetic oligonucleotide
  Target: ATXN2; (-) strand; PAM type: YTN; PAM sequence: TTC
tgaatttactttttttgtct

SEQ ID NO: 73045 - DNA, 20 bp, Artificial Sequence
  Description of Artificial Sequence: Synthetic oligonucleotide
  Target: ATXN2; (-) strand; PAM type: YTN; PAM sequence: TTT
ctgaatttactttttttgtc

SEQ ID NO: 73046 - DNA, 20 bp, Artificial Sequence
  Description of Artificial Sequence: Synthetic oligonucleotide
  Target: ATXN2; (-) strand; PAM type: YTN; PAM sequence: TTG
aacatttctgaatttacttt

SEQ ID NO: 73047 - DNA, 20 bp, Artificial Sequence
  Description of Artificial Sequence: Synthetic oligonucleotide
  Target: ATXN2; (-) strand; PAM type: YTN; PAM sequence: CTT
gaacatttctgaatttactt

SEQ ID NO: 73048 - DNA, 20 bp, Artificial Sequence
  Description of Artificial Sequence: Synthetic oligonucleotide
  Target: ATXN2; (-) strand; PAM type: YTN; PAM sequence: TTC
ttgaacatttctgaatttac

SEQ ID NO: 73049 - DNA, 20 bp, Artificial Sequence
  Description of Artificial Sequence: Synthetic oligonucleotide
  Target: ATXN2; (-) strand; PAM type: YTN; PAM sequence: TTG
attcttgaacatttctgaat

SEQ ID NO: 73050 - DNA, 20 bp, Artificial Sequence
  Description of Artificial Sequence: Synthetic oligonucleotide
  Target: ATXN2; (-) strand; PAM type: YTN; PAM sequence: TTT
gattcttgaacatttctgaa

SEQ ID NO: 73051 - DNA, 20 bp, Artificial Sequence
  Description of Artificial Sequence: Synthetic oligonucleotide
  Target: ATXN2; (-) strand; PAM type: YTN; PAM sequence: TTT
tgattcttgaacatttctga

SEQ ID NO: 73052 - DNA, 20 bp, Artificial Sequence
  Description of Artificial Sequence: Synthetic oligonucleotide
  Target: ATXN2; (-) strand; PAM type: YTN; PAM sequence: TTT
ttgattcttgaacatttctg

SEQ ID NO: 73053 - DNA, 20 bp, Artificial Sequence
  Description of Artificial Sequence: Synthetic oligonucleotide
  Target: ATXN2; (-) strand; PAM type: YTN; PAM sequence: TTT
tttgattcttgaacatttct

SEQ ID NO: 73054 - DNA, 20 bp, Artificial Sequence
  Description of Artificial Sequence: Synthetic oligonucleotide
  Target: ATXN2; (-) strand; PAM type: YTN; PAM sequence: CTG
ttttttgattcttgaacatt

SEQ ID NO: 73055 - DNA, 20 bp, Artificial Sequence
  Description of Artificial Sequence: Synthetic oligonucleotide
  Target: ATXN2; (-) strand; PAM type: YTN; PAM sequence: TTC
tgttttttgattcttgaaca

SEQ ID NO: 73056 - DNA, 20 bp, Artificial Sequence
  Description of Artificial Sequence: Synthetic oligonucleotide
  Target: ATXN2; (-) strand; PAM type: YTN; PAM sequence: CTA
aattctgttttttgattctt

SEQ ID NO: 73057 - DNA, 20 bp, Artificial Sequence
  Description of Artificial Sequence: Synthetic oligonucleotide
  Target: ATXN2; (-) strand; PAM type: YTN; PAM sequence: TTC
ctaaattctgttttttgatt

SEQ ID NO: 73058 - DNA, 20 bp, Artificial Sequence
  Description of Artificial Sequence: Synthetic oligonucleotide
  Target: ATXN2; (-) strand; PAM type: YTN; PAM sequence: TTC
aattcctaaattctgttttt

SEQ ID NO: 73059 - DNA, 20 bp, Artificial Sequence
  Description of Artificial Sequence: Synthetic oligonucleotide
  Target: ATXN2; (-) strand; PAM type: YTN; PAM sequence: TTT
caattcctaaattctgtttt

SEQ ID NO: 73060 - DNA, 20 bp, Artificial Sequence
  Description of Artificial Sequence: Synthetic oligonucleotide
  Target: ATXN2; (-) strand; PAM type: YTN; PAM sequence: TTG
gcatttcaattcctaaattc

SEQ ID NO: 73061 - DNA, 20 bp, Artificial Sequence
  Description of Artificial Sequence: Synthetic oligonucleotide
  Target: ATXN2; (-) strand; PAM type: YTN; PAM sequence: CTA
atagtattggcatttcaatt

SEQ ID NO: 73062 - DNA, 20 bp, Artificial Sequence
  Description of Artificial Sequence: Synthetic oligonucleotide
  Target: ATXN2; (-) strand; PAM type: YTN; PAM sequence: TTC
actaatagtattggcatttc

SEQ ID NO: 73063 - DNA, 20 bp, Artificial Sequence
  Description of Artificial Sequence: Synthetic oligonucleotide
  Target: ATXN2; (-) strand; PAM type: YTN; PAM sequence: CTT
cactaatagtattggcattt

SEQ ID NO: 73064 - DNA, 20 bp, Artificial Sequence
  Description of Artificial Sequence: Synthetic oligonucleotide
  Target: ATXN2; (-) strand; PAM type: YTN; PAM sequence: TTC
ttcactaatagtattggcat

SEQ ID NO: 73065 - DNA, 20 bp, Artificial Sequence
  Description of Artificial Sequence: Synthetic oligonucleotide
  Target: ATXN2; (-) strand; PAM type: YTN; PAM sequence: CTA
ttcttcactaatagtattgg

SEQ ID NO: 73066 - DNA, 20 bp, Artificial Sequence
  Description of Artificial Sequence: Synthetic oligonucleotide
  Target: ATXN2; (-) strand; PAM type: YTN; PAM sequence: CTA
ctattcttcactaatagtat

SEQ ID NO: 73067 - DNA, 20 bp, Artificial Sequence
  Description of Artificial Sequence: Synthetic oligonucleotide
  Target: ATXN2; (-) strand; PAM type: YTN; PAM sequence: TTA
taaaatgactactattcttc

SEQ ID NO: 73068 - DNA, 20 bp, Artificial Sequence
  Description of Artificial Sequence: Synthetic oligonucleotide
  Target: ATXN2; (-) strand; PAM type: YTN; PAM sequence: TTG
ttataaaatgactactattc

SEQ ID NO: 73069 - DNA, 20 bp, Artificial Sequence
  Description of Artificial Sequence: Synthetic oligonucleotide
  Target: ATXN2; (-) strand; PAM type: YTN; PAM sequence: TTG
agaataagttgttataaaat

SEQ ID NO: 73070 - DNA, 20 bp, Artificial Sequence
  Description of Artificial Sequence: Synthetic oligonucleotide
  Target: ATXN2; (-) strand; PAM type: YTN; PAM sequence: TTT
gagaataagttgttataaaa

SEQ ID NO: 73071 - DNA, 20 bp, Artificial Sequence
  Description of Artificial Sequence: Synthetic oligonucleotide
  Target: ATXN2; (-) strand; PAM type: YTN; PAM sequence: TTG
ccataggtttgagaataagt

SEQ ID NO: 73072 - DNA, 20 bp, Artificial Sequence
  Description of Artificial Sequence: Synthetic oligonucleotide
  Target: ATXN2; (-) strand; PAM type: YTN; PAM sequence: TTT
gccataggtttgagaataag

SEQ ID NO: 73073 - DNA, 20 bp, Artificial Sequence
  Description of Artificial Sequence: Synthetic oligonucleotide
  Target: ATXN2; (-) strand; PAM type: YTN; PAM sequence: TTT
tgccataggtttgagaataa

SEQ ID NO: 73074 - DNA, 20 bp, Artificial Sequence
  Description of Artificial Sequence: Synthetic oligonucleotide
  Target: ATXN2; (-) strand; PAM type: YTN; PAM sequence: CTT
ttgccataggtttgagaata

SEQ ID NO: 73075 - DNA, 20 bp, Artificial Sequence
  Description of Artificial Sequence: Synthetic oligonucleotide
  Target: ATXN2; (-) strand; PAM type: YTN; PAM sequence: CTG
aacacttttgccataggttt

SEQ ID NO: 73076 - DNA, 20 bp, Artificial Sequence
  Description of Artificial Sequence: Synthetic oligonucleotide
  Target: ATXN2; (-) strand; PAM type: YTN; PAM sequence: TTC
tgaacacttttgccataggt

SEQ ID NO: 73077 - DNA, 20 bp, Artificial Sequence
  Description of Artificial Sequence: Synthetic oligonucleotide
  Target: ATXN2; (-) strand; PAM type: YTN; PAM sequence: CTA
attctgaacacttttgccat

SEQ ID NO: 73078 - DNA, 20 bp, Artificial Sequence
  Description of Artificial Sequence: Synthetic oligonucleotide
  Target: ATXN2; (-) strand; PAM type: YTN; PAM sequence: TTA
acctaattctgaacactttt

SEQ ID NO: 73079 - DNA, 20 bp, Artificial Sequence
  Description of Artificial Sequence: Synthetic oligonucleotide
  Target: ATXN2; (-) strand; PAM type: YTN; PAM sequence: CTT
aacctaattctgaacacttt

SEQ ID NO: 73080 - DNA, 20 bp, Artificial Sequence
  Description of Artificial Sequence: Synthetic oligonucleotide
  Target: ATXN2; (-) strand; PAM type: YTN; PAM sequence: TTC
cttaacctaattctgaacac

SEQ ID NO: 73081 - DNA, 20 bp, Artificial Sequence
  Description of Artificial Sequence: Synthetic oligonucleotide
  Target: ATXN2; (-) strand; PAM type: YTN; PAM sequence: TTT
ccttaacctaattctgaaca

SEQ ID NO: 73082 - DNA, 20 bp, Artificial Sequence
  Description of Artificial Sequence: Synthetic oligonucleotide
  Target: ATXN2; (-) strand; PAM type: YTN; PAM sequence: TTT
tccttaacctaattctgaac

SEQ ID NO: 73083 - DNA, 20 bp, Artificial Sequence
  Description of Artificial Sequence: Synthetic oligonucleotide
  Target: ATXN2; (-) strand; PAM type: YTN; PAM sequence: CTT
ttccttaacctaattctgaa

SEQ ID NO: 73084 - DNA, 20 bp, Artificial Sequence
  Description of Artificial Sequence: Synthetic oligonucleotide
  Target: ATXN2; (-) strand; PAM type: YTN; PAM sequence: CTG
acttttccttaacctaattc

SEQ ID NO: 73085 - DNA, 20 bp, Artificial Sequence
  Description of Artificial Sequence: Synthetic oligonucleotide
  Target: ATXN2; (-) strand; PAM type: YTN; PAM sequence: TTA
ctgacttttccttaacctaa

SEQ ID NO: 73086 - DNA, 20 bp, Artificial Sequence
  Description of Artificial Sequence: Synthetic oligonucleotide
  Target: ATXN2; (-) strand; PAM type: YTN; PAM sequence: TTT
actgacttttccttaaccta

SEQ ID NO: 73087 - DNA, 20 bp, Artificial Sequence
  Description of Artificial Sequence: Synthetic oligonucleotide
  Target: ATXN2; (-) strand; PAM type: YTN; PAM sequence: TTT
tactgacttttccttaacct

SEQ ID NO: 73088 - DNA, 20 bp, Artificial Sequence
  Description of Artificial Sequence: Synthetic oligonucleotide
  Target: ATXN2; (-) strand; PAM type: YTN; PAM sequence: TTC
attttactgacttttcctta

SEQ ID NO: 73089 - DNA, 20 bp, Artificial Sequence
  Description of Artificial Sequence: Synthetic oligonucleotide
  Target: ATXN2; (-) strand; PAM type: YTN; PAM sequence: TTT
cattttactgacttttcctt

SEQ ID NO: 73090 - DNA, 20 bp, Artificial Sequence
  Description of Artificial Sequence: Synthetic oligonucleotide
  Target: ATXN2; (-) strand; PAM type: YTN; PAM sequence: TTA
atttcattttactgactttt

SEQ ID NO: 73091 - DNA, 20 bp, Artificial Sequence
  Description of Artificial Sequence: Synthetic oligonucleotide
  Target: ATXN2; (-) strand; PAM type: YTN; PAM sequence: TTG
gaattaatttcattttactg

SEQ ID NO: 73092 - DNA, 20 bp, Artificial Sequence
  Description of Artificial Sequence: Synthetic oligonucleotide
  Target: ATXN2; (-) strand; PAM type: YTN; PAM sequence: CTG
taagaattggaattaatttc

SEQ ID NO: 73093 - DNA, 20 bp, Artificial Sequence
  Description of Artificial Sequence: Synthetic oligonucleotide
  Target: ATXN2; (-) strand; PAM type: YTN; PAM sequence: TTG
tacagctgtaagaattggaa

SEQ ID NO: 73094 - DNA, 20 bp, Artificial Sequence
  Description of Artificial Sequence: Synthetic oligonucleotide
  Target: ATXN2; (-) strand; PAM type: YTN; PAM sequence: TTT
gtacagctgtaagaattgga

SEQ ID NO: 73095 - DNA, 20 bp, Artificial Sequence
  Description of Artificial Sequence: Synthetic oligonucleotide
  Target: ATXN2; (-) strand; PAM type: YTN; PAM sequence: TTG
ccagggaaacagaaaagata

SEQ ID NO: 73096 - DNA, 20 bp, Artificial Sequence
  Description of Artificial Sequence: Synthetic oligonucleotide
  Target: ATXN2; (-) strand; PAM type: YTN; PAM sequence: TTT
gccagggaaacagaaaagat

SEQ ID NO: 73097 - DNA, 20 bp, Artificial Sequence
  Description of Artificial Sequence: Synthetic oligonucleotide
  Target: ATXN2; (-) strand; PAM type: YTN; PAM sequence: TTA
catatttgccagggaaacag

SEQ ID NO: 73098 - DNA, 20 bp, Artificial Sequence
  Description of Artificial Sequence: Synthetic oligonucleotide
  Target: ATXN2; (-) strand; PAM type: YTN; PAM sequence: TTT
acatatttgccagggaaaca

SEQ ID NO: 73099 - DNA, 20 bp, Artificial Sequence
  Description of Artificial Sequence: Synthetic oligonucleotide
  Target: ATXN2; (-) strand; PAM type: YTN; PAM sequence: TTT
tacatatttgccagggaaac

SEQ ID NO: 73100 - DNA, 20 bp, Artificial Sequence
  Description of Artificial Sequence: Synthetic oligonucleotide
  Target: ATXN2; (-) strand; PAM type: YTN; PAM sequence: CTA
taaaatgttttacatatttg

SEQ ID NO: 73101 - DNA, 20 bp, Artificial Sequence
  Description of Artificial Sequence: Synthetic oligonucleotide
  Target: ATXN2; (-) strand; PAM type: YTN; PAM sequence: TTA
gaaaagaatccgaatctata

SEQ ID NO: 73102 - DNA, 20 bp, Artificial Sequence
  Description of Artificial Sequence: Synthetic oligonucleotide
  Target: ATXN2; (-) strand; PAM type: YTN; PAM sequence: TTA
ttagaaaagaatccgaatct

SEQ ID NO: 73103 - DNA, 20 bp, Artificial Sequence
  Description of Artificial Sequence: Synthetic oligonucleotide
  Target: ATXN2; (-) strand; PAM type: YTN; PAM sequence: TTT
attagaaaagaatccgaatc

SEQ ID NO: 73104 - DNA, 20 bp, Artificial Sequence
  Description of Artificial Sequence: Synthetic oligonucleotide
  Target: ATXN2; (-) strand; PAM type: YTN; PAM sequence: TTT
tattagaaaagaatccgaat

SEQ ID NO: 73105 - DNA, 20 bp, Artificial Sequence
  Description of Artificial Sequence: Synthetic oligonucleotide
  Target: ATXN2; (-) strand; PAM type: YTN; PAM sequence: TTT
ttattagaaaagaatccgaa

SEQ ID NO: 73106 - DNA, 20 bp, Artificial Sequence
  Description of Artificial Sequence: Synthetic oligonucleotide
  Target: ATXN2; (-) strand; PAM type: YTN; PAM sequence: TTT
tttattagaaaagaatccga

SEQ ID NO: 73107 - DNA, 20 bp, Artificial Sequence
  Description of Artificial Sequence: Synthetic oligonucleotide
  Target: ATXN2; (-) strand; PAM type: YTN; PAM sequence: CTG
ttttttattagaaaagaatc

SEQ ID NO: 73108 - DNA, 20 bp, Artificial Sequence
  Description of Artificial Sequence: Synthetic oligonucleotide
  Target: ATXN2; (-) strand; PAM type: YTN; PAM sequence: TTC
tgttttttattagaaaagaa

SEQ ID NO: 73109 - DNA, 20 bp, Artificial Sequence
  Description of Artificial Sequence: Synthetic oligonucleotide
  Target: ATXN2; (-) strand; PAM type: YTN; PAM sequence: TTG
ttctgttttttattagaaaa

SEQ ID NO: 73110 - DNA, 20 bp, Artificial Sequence
  Description of Artificial Sequence: Synthetic oligonucleotide
  Target: ATXN2; (-) strand; PAM type: YTN; PAM sequence: TTG
aacagttgttctgtttttta

SEQ ID NO: 73111 - DNA, 20 bp, Artificial Sequence
  Description of Artificial Sequence: Synthetic oligonucleotide
  Target: ATXN2; (-) strand; PAM type: YTN; PAM sequence: CTT
gaacagttgttctgtttttt

SEQ ID NO: 73112 - DNA, 20 bp, Artificial Sequence
  Description of Artificial Sequence: Synthetic oligonucleotide
  Target: ATXN2; (-) strand; PAM type: YTN; PAM sequence: TTA
agtgggcatgtgtacttgaa

SEQ ID NO: 73113 - DNA, 20 bp, Artificial Sequence
  Description of Artificial Sequence: Synthetic oligonucleotide
  Target: ATXN2; (-) strand; PAM type: YTN; PAM sequence: CTG
ggaaagaatattaagtgggc

SEQ ID NO: 73114 - DNA, 20 bp, Artificial Sequence
  Description of Artificial Sequence: Synthetic oligonucleotide
  Target: ATXN2; (-) strand; PAM type: YTN; PAM sequence: CTC
ctgggaaagaatattaagtg

SEQ ID NO: 73115 - DNA, 20 bp, Artificial Sequence
  Description of Artificial Sequence: Synthetic oligonucleotide
  Target: ATXN2; (-) strand; PAM type: YTN; PAM sequence: TTC
atactcctgggaaagaatat

SEQ ID NO: 73116 - DNA, 20 bp, Artificial Sequence
  Description of Artificial Sequence: Synthetic oligonucleotide
  Target: ATXN2; (-) strand; PAM type: YTN; PAM sequence: TTT
catactcctgggaaagaata

SEQ ID NO: 73117 - DNA, 20 bp, Artificial Sequence
  Description of Artificial Sequence: Synthetic oligonucleotide
  Target: ATXN2; (-) strand; PAM type: YTN; PAM sequence: CTA
tttcatactcctgggaaaga

SEQ ID NO: 73118 - DNA, 20 bp, Artificial Sequence
  Description of Artificial Sequence: Synthetic oligonucleotide
  Target: ATXN2; (-) strand; PAM type: YTN; PAM sequence: TTC
tatttcatactcctgggaaa

SEQ ID NO: 73119 - DNA, 20 bp, Artificial Sequence
  Description of Artificial Sequence: Synthetic oligonucleotide
  Target: ATXN2; (-) strand; PAM type: YTN; PAM sequence: TTT
ctatttcatactcctgggaa

SEQ ID NO: 73120 - DNA, 20 bp, Artificial Sequence
  Description of Artificial Sequence: Synthetic oligonucleotide
  Target: ATXN2; (-) strand; PAM type: YTN; PAM sequence: CTA
tttctatttcatactcctgg

SEQ ID NO: 73121 - DNA, 20 bp, Artificial Sequence
  Description of Artificial Sequence: Synthetic oligonucleotide
  Target: ATXN2; (-) strand; PAM type: YTN; PAM sequence: TTC
tatttctatttcatactcct

SEQ ID NO: 73122 - DNA, 20 bp, Artificial Sequence
  Description of Artificial Sequence: Synthetic oligonucleotide
  Target: ATXN2; (-) strand; PAM type: YTN; PAM sequence: TTG
ttctatttctatttcatact

SEQ ID NO: 73123 - DNA, 20 bp, Artificial Sequence
  Description of Artificial Sequence: Synthetic oligonucleotide
  Target: ATXN2; (-) strand; PAM type: YTN; PAM sequence: TTT
gttctatttctatttcatac

SEQ ID NO: 73124 - DNA, 20 bp, Artificial Sequence
  Description of Artificial Sequence: Synthetic oligonucleotide
  Target: ATXN2; (-) strand; PAM type: YTN; PAM sequence: TTT
tgttctatttctatttcata

SEQ ID NO: 73125 - DNA, 20 bp, Artificial Sequence
  Description of Artificial Sequence: Synthetic oligonucleotide
  Target: ATXN2; (-) strand; PAM type: YTN; PAM sequence: CTA
ttttgttctatttctatttc

SEQ ID NO: 73126 - DNA, 20 bp, Artificial Sequence
  Description of Artificial Sequence: Synthetic oligonucleotide
  Target: ATXN2; (-) strand; PAM type: YTN; PAM sequence: TTC
tattttgttctatttctatt

SEQ ID NO: 73127 - DNA, 20 bp, Artificial Sequence
  Description of Artificial Sequence: Synthetic oligonucleotide
  Target: ATXN2; (-) strand; PAM type: YTN; PAM sequence: TTT
ctattttgttctatttctat

SEQ ID NO: 73128 - DNA, 20 bp, Artificial Sequence
  Description of Artificial Sequence: Synthetic oligonucleotide
  Target: ATXN2; (-) strand; PAM type: YTN; PAM sequence: CTA
atttctattttgttctattt

SEQ ID NO: 73129 - DNA, 20 bp, Artificial Sequence
  Description of Artificial Sequence: Synthetic oligonucleotide
  Target: ATXN2; (-) strand; PAM type: YTN; PAM sequence: CTC
taatttctattttgttctat

SEQ ID NO: 73130 - DNA, 20 bp, Artificial Sequence
  Description of Artificial Sequence: Synthetic oligonucleotide
  Target: ATXN2; (-) strand; PAM type: YTN; PAM sequence: TTA
tctctaatttctattttgtt

SEQ ID NO: 73131 - DNA, 20 bp, Artificial Sequence
  Description of Artificial Sequence: Synthetic oligonucleotide
  Target: ATXN2; (-) strand; PAM type: YTN; PAM sequence: CTA
gtaataaagcaagagaagga

SEQ ID NO: 73132 - DNA, 20 bp, Artificial Sequence
  Description of Artificial Sequence: Synthetic oligonucleotide
  Target: ATXN2; (-) strand; PAM type: YTN; PAM sequence: TTA
aaactagtaataaagcaaga

SEQ ID NO: 73133 - DNA, 20 bp, Artificial Sequence
  Description of Artificial Sequence: Synthetic oligonucleotide
  Target: ATXN2; (-) strand; PAM type: YTN; PAM sequence: TTA
tgcatgcagatatattaaaa

SEQ ID NO: 73134 - DNA, 20 bp, Artificial Sequence
  Description of Artificial Sequence: Synthetic oligonucleotide
  Target: ATXN2; (-) strand; PAM type: YTN; PAM sequence: CTT
atgcatgcagatatattaaa

SEQ ID NO: 73135 - DNA, 20 bp, Artificial Sequence
  Description of Artificial Sequence: Synthetic oligonucleotide
  Target: ATXN2; (-) strand; PAM type: YTN; PAM sequence: TTC
aatggagtcttatgcatgca

SEQ ID NO: 73136 - DNA, 20 bp, Artificial Sequence
  Description of Artificial Sequence: Synthetic oligonucleotide
  Target: ATXN2; (-) strand; PAM type: YTN; PAM sequence: TTT
caatggagtcttatgcatgc

SEQ ID NO: 73137 - DNA, 20 bp, Artificial Sequence
  Description of Artificial Sequence: Synthetic oligonucleotide
  Target: ATXN2; (-) strand; PAM type: YTN; PAM sequence: TTG
gatggtttcaatggagtctt

SEQ ID NO: 73138 - DNA, 20 bp, Artificial Sequence
  Description of Artificial Sequence: Synthetic oligonucleotide
  Target: ATXN2; (-) strand; PAM type: YTN; PAM sequence: CTT
ggatggtttcaatggagtct

SEQ ID NO: 73139 - DNA, 20 bp, Artificial Sequence
  Description of Artificial Sequence: Synthetic oligonucleotide
  Target: ATXN2; (-) strand; PAM type: YTN; PAM sequence: TTG
tcttggatggtttcaatgga

SEQ ID NO: 73140 - DNA, 20 bp, Artificial Sequence
  Description of Artificial Sequence: Synthetic oligonucleotide
  Target: ATXN2; (-) strand; PAM type: YTN; PAM sequence: CTT
gtcttggatggtttcaatgg

SEQ ID NO: 73141 - DNA, 20 bp, Artificial Sequence
  Description of Artificial Sequence: Synthetic oligonucleotide
  Target: ATXN2; (-) strand; PAM type: YTN; PAM sequence: CTC
ttgtcttggatggtttcaat

SEQ ID NO: 73142 - DNA, 20 bp, Artificial Sequence
  Description of Artificial Sequence: Synthetic oligonucleotide
  Target: ATXN2; (-) strand; PAM type: YTN; PAM sequence: TTC
tcttgtcttggatggtttca

SEQ ID NO: 73143 - DNA, 20 bp, Artificial Sequence
  Description of Artificial Sequence: Synthetic oligonucleotide
  Target: ATXN2; (-) strand; PAM type: YTN; PAM sequence: TTT
ctcttgtcttggatggtttc

SEQ ID NO: 73144 - DNA, 20 bp, Artificial Sequence
  Description of Artificial Sequence: Synthetic oligonucleotide
  Target: ATXN2; (-) strand; PAM type: YTN; PAM sequence: TTT
tctcttgtcttggatggttt

SEQ ID NO: 73145 - DNA, 20 bp, Artificial Sequence
  Description of Artificial Sequence: Synthetic oligonucleotide
  Target: ATXN2; (-) strand; PAM type: YTN; PAM sequence: TTT
ttctcttgtcttggatggtt

SEQ ID NO: 73146 - DNA, 20 bp, Artificial Sequence
  Description of Artificial Sequence: Synthetic oligonucleotide
  Target: ATXN2; (-) strand; PAM type: YTN; PAM sequence: TTT
tttctcttgtcttggatggt

SEQ ID NO: 73147 - DNA, 20 bp, Artificial Sequence
  Description of Artificial Sequence: Synthetic oligonucleotide
  Target: ATXN2; (-) strand; PAM type: YTN; PAM sequence: TTT
ttttctcttgtcttggatgg

SEQ ID NO: 73148 - DNA, 20 bp, Artificial Sequence
  Description of Artificial Sequence: Synthetic oligonucleotide
  Target: ATXN2; (-) strand; PAM type: YTN; PAM sequence: TTA
tttttttctcttgtcttgga

SEQ ID NO: 73149 - DNA, 20 bp, Artificial Sequence
  Description of Artificial Sequence: Synthetic oligonucleotide
  Target: ATXN2; (-) strand; PAM type: YTN; PAM sequence: TTA
gtattatttttttctcttgt

SEQ ID NO: 73150 - DNA, 20 bp, Artificial Sequence
  Description of Artificial Sequence: Synthetic oligonucleotide
  Target: ATXN2; (-) strand; PAM type: YTN; PAM sequence: TTT
agtattatttttttctcttg

SEQ ID NO: 73151 - DNA, 20 bp, Artificial Sequence
  Description of Artificial Sequence: Synthetic oligonucleotide
  Target: ATXN2; (-) strand; PAM type: YTN; PAM sequence: TTT
tagtattatttttttctctt

SEQ ID NO: 73152 - DNA, 20 bp, Artificial Sequence
  Description of Artificial Sequence: Synthetic oligonucleotide
  Target: ATXN2; (-) strand; PAM type: YTN; PAM sequence: CTA
gttttagtattatttttttc

SEQ ID NO: 73153 - DNA, 20 bp, Artificial Sequence
  Description of Artificial Sequence: Synthetic oligonucleotide
  Target: ATXN2; (-) strand; PAM type: YTN; PAM sequence: CTA
tctagttttagtattatttt

SEQ ID NO: 73154 - DNA, 20 bp, Artificial Sequence
  Description of Artificial Sequence: Synthetic oligonucleotide
  Target: ATXN2; (-) strand; PAM type: YTN; PAM sequence: TTA
ctatctagttttagtattat

SEQ ID NO: 73155 - DNA, 20 bp, Artificial Sequence
  Description of Artificial Sequence: Synthetic oligonucleotide
  Target: ATXN2; (-) strand; PAM type: YTN; PAM sequence: CTT
actatctagttttagtatta

SEQ ID NO: 73156 - DNA, 20 bp, Artificial Sequence
  Description of Artificial Sequence: Synthetic oligonucleotide
  Target: ATXN2; (-) strand; PAM type: YTN; PAM sequence: CTA
atatacttactatctagttt

SEQ ID NO: 73157 - DNA, 20 bp, Artificial Sequence
  Description of Artificial Sequence: Synthetic oligonucleotide
  Target: ATXN2; (-) strand; PAM type: YTN; PAM sequence: TTG
tgtaatgctaatatacttac

SEQ ID NO: 73158 - DNA, 20 bp, Artificial Sequence
  Description of Artificial Sequence: Synthetic oligonucleotide
  Target: ATXN2; (-) strand; PAM type: YTN; PAM sequence: CTG
atagggttgtgtaatgctaa

SEQ ID NO: 73159 - DNA, 20 bp, Artificial Sequence
  Description of Artificial Sequence: Synthetic oligonucleotide
  Target: ATXN2; (-) strand; PAM type: YTN; PAM sequence: TTA
ctgatagggttgtgtaatgc

SEQ ID NO: 73160 - DNA, 20 bp, Artificial Sequence
  Description of Artificial Sequence: Synthetic oligonucleotide
  Target: ATXN2; (-) strand; PAM type: YTN; PAM sequence: TTT
actgatagggttgtgtaatg

SEQ ID NO: 73161 - DNA, 20 bp, Artificial Sequence
  Description of Artificial Sequence: Synthetic oligonucleotide
  Target: ATXN2; (-) strand; PAM type: YTN; PAM sequence: CTG
tttactgatagggttgtgta

SEQ ID NO: 73162 - DNA, 20 bp, Artificial Sequence
  Description of Artificial Sequence: Synthetic oligonucleotide
  Target: ATXN2; (-) strand; PAM type: YTN; PAM sequence: TTC
agtaagactgtttactgata

SEQ ID NO: 73163 - DNA, 20 bp, Artificial Sequence
  Description of Artificial Sequence: Synthetic oligonucleotide
  Target: ATXN2; (-) strand; PAM type: YTN; PAM sequence: TTT
cagtaagactgtttactgat

SEQ ID NO: 73164 - DNA, 20 bp, Artificial Sequence
  Description of Artificial Sequence: Synthetic oligonucleotide
  Target: ATXN2; (-) strand; PAM type: YTN; PAM sequence: TTT
tcagtaagactgtttactga

SEQ ID NO: 73165 - DNA, 20 bp, Artificial Sequence
  Description of Artificial Sequence: Synthetic oligonucleotide
  Target: ATXN2; (-) strand; PAM type: YTN; PAM sequence: TTC
caggacattttcagtaagac

SEQ ID NO: 73166 - DNA, 20 bp, Artificial Sequence
  Description of Artificial Sequence: Synthetic oligonucleotide
  Target: ATXN2; (-) strand; PAM type: YTN; PAM sequence: TTT
ccaggacattttcagtaaga

SEQ ID NO: 73167 - DNA, 20 bp, Artificial Sequence
  Description of Artificial Sequence: Synthetic oligonucleotide
  Target: ATXN2; (-) strand; PAM type: YTN; PAM sequence: TTA
ggtaaagaataggtaagtaa

SEQ ID NO: 73168 - DNA, 20 bp, Artificial Sequence
  Description of Artificial Sequence: Synthetic oligonucleotide
  Target: ATXN2; (-) strand; PAM type: YTN; PAM sequence: CTA
ttaggtaaagaataggtaag

SEQ ID NO: 73169 - DNA, 20 bp, Artificial Sequence
  Description of Artificial Sequence: Synthetic oligonucleotide
  Target: ATXN2; (-) strand; PAM type: YTN; PAM sequence: CTC
tattaggtaaagaataggta

SEQ ID NO: 73170 - DNA, 20 bp, Artificial Sequence
  Description of Artificial Sequence: Synthetic oligonucleotide
  Target: ATXN2; (-) strand; PAM type: YTN; PAM sequence: CTC
tctattaggtaaagaatagg

SEQ ID NO: 73171 - DNA, 20 bp, Artificial Sequence
  Description of Artificial Sequence: Synthetic oligonucleotide
  Target: ATXN2; (-) strand; PAM type: YTN; PAM sequence: TTA
aactctctattaggtaaaga

SEQ ID NO: 73172 - DNA, 20 bp, Artificial Sequence
  Description of Artificial Sequence: Synthetic oligonucleotide
  Target: ATXN2; (-) strand; PAM type: YTN; PAM sequence: CTT
aaactctctattaggtaaag

SEQ ID NO: 73173 - DNA, 20 bp, Artificial Sequence
  Description of Artificial Sequence: Synthetic oligonucleotide
  Target: ATXN2; (-) strand; PAM type: YTN; PAM sequence: TTC
ttaaactctctattaggtaa

SEQ ID NO: 73174 - DNA, 20 bp, Artificial Sequence
  Description of Artificial Sequence: Synthetic oligonucleotide
  Target: ATXN2; (-) strand; PAM type: YTN; PAM sequence: TTA
agtaaaacaagtagcattct

SEQ ID NO: 73175 - DNA, 20 bp, Artificial Sequence
  Description of Artificial Sequence: Synthetic oligonucleotide
  Target: ATXN2; (-) strand; PAM type: YTN; PAM sequence: TTT
aagtaaaacaagtagcattc

SEQ ID NO: 73176 - DNA, 20 bp, Artificial Sequence
  Description of Artificial Sequence: Synthetic oligonucleotide
  Target: ATXN2; (-) strand; PAM type: YTN; PAM sequence: CTA
gtgggatggtttaagtaaaa

SEQ ID NO: 73177 - DNA, 20 bp, Artificial Sequence
  Description of Artificial Sequence: Synthetic oligonucleotide
  Target: ATXN2; (-) strand; PAM type: YTN; PAM sequence: CTG
ctagtgggatggtttaagta

SEQ ID NO: 73178 - DNA, 20 bp, Artificial Sequence
  Description of Artificial Sequence: Synthetic oligonucleotide
  Target: ATXN2; (-) strand; PAM type: YTN; PAM sequence: TTA
acactgctagtgggatggtt

SEQ ID NO: 73179 - DNA, 20 bp, Artificial Sequence
  Description of Artificial Sequence: Synthetic oligonucleotide
  Target: ATXN2; (-) strand; PAM type: YTN; PAM sequence: CTT
aacactgctagtgggatggt

SEQ ID NO: 73180 - DNA, 20 bp, Artificial Sequence
  Description of Artificial Sequence: Synthetic oligonucleotide
  Target: ATXN2; (-) strand; PAM type: YTN; PAM sequence: TTG
caaaacacttaacactgcta

SEQ ID NO: 73181 - DNA, 20 bp, Artificial Sequence
  Description of Artificial Sequence: Synthetic oligonucleotide
  Target: ATXN2; (-) strand; PAM type: YTN; PAM sequence: CTG
agggagttgcaaaacactta

SEQ ID NO: 73182 - DNA, 20 bp, Artificial Sequence
  Description of Artificial Sequence: Synthetic oligonucleotide
  Target: ATXN2; (-) strand; PAM type: YTN; PAM sequence: TTA
gtggtactgagggagttgca

SEQ ID NO: 73183 - DNA, 20 bp, Artificial Sequence
  Description of Artificial Sequence: Synthetic oligonucleotide
  Target: ATXN2; (-) strand; PAM type: YTN; PAM sequence: CTT
agtggtactgagggagttgc

SEQ ID NO: 73184 - DNA, 20 bp, Artificial Sequence
  Description of Artificial Sequence: Synthetic oligonucleotide
  Target: ATXN2; (-) strand; PAM type: YTN; PAM sequence: CTA
cttagtggtactgagggagt

SEQ ID NO: 73185 - DNA, 20 bp, Artificial Sequence
  Description of Artificial Sequence: Synthetic oligonucleotide
  Target: ATXN2; (-) strand; PAM type: YTN; PAM sequence: CTA
ctacttagtggtactgaggg

SEQ ID NO: 73186 - DNA, 20 bp, Artificial Sequence
  Description of Artificial Sequence: Synthetic oligonucleotide
  Target: ATXN2; (-) strand; PAM type: YTN; PAM sequence: TTA
ctactacttagtggtactga

SEQ ID NO: 73187 - DNA, 20 bp, Artificial Sequence
  Description of Artificial Sequence: Synthetic oligonucleotide
  Target: ATXN2; (-) strand; PAM type: YTN; PAM sequence: CTG
aatggtaaatgtgagaaaga

SEQ ID NO: 73188 - DNA, 20 bp, Artificial Sequence
  Description of Artificial Sequence: Synthetic oligonucleotide
  Target: ATXN2; (-) strand; PAM type: YTN; PAM sequence: TTG
cgctgaatggtaaatgtgag

SEQ ID NO: 73189 - DNA, 20 bp, Artificial Sequence
  Description of Artificial Sequence: Synthetic oligonucleotide
  Target: ATXN2; (-) strand; PAM type: YTN; PAM sequence: CTT
gcgctgaatggtaaatgtga

SEQ ID NO: 73190 - DNA, 20 bp, Artificial Sequence
  Description of Artificial Sequence: Synthetic oligonucleotide
  Target: ATXN2; (-) strand; PAM type: YTN; PAM sequence: CTA
tcagcttgcgctgaatggta

SEQ ID NO: 73191 - DNA, 20 bp, Artificial Sequence
  Description of Artificial Sequence: Synthetic oligonucleotide
  Target: ATXN2; (-) strand; PAM type: YTN; PAM sequence: TTG
tctatcagcttgcgctgaat

SEQ ID NO: 73192 - DNA, 20 bp, Artificial Sequence
  Description of Artificial Sequence: Synthetic oligonucleotide
  Target: ATXN2; (-) strand; PAM type: YTN; PAM sequence: TTA
aagcagtggaatatgattgt

SEQ ID NO: 73193 - DNA, 20 bp, Artificial Sequence
  Description of Artificial Sequence: Synthetic oligonucleotide
  Target: ATXN2; (-) strand; PAM type: YTN; PAM sequence: TTT
aaagcagtggaatatgattg

SEQ ID NO: 73194 - DNA, 20 bp, Artificial Sequence
  Description of Artificial Sequence: Synthetic oligonucleotide
  Target: ATXN2; (-) strand; PAM type: YTN; PAM sequence: TTT
taaagcagtggaatatgatt

SEQ ID NO: 73195 - DNA, 20 bp, Artificial Sequence
  Description of Artificial Sequence: Synthetic oligonucleotide
  Target: ATXN2; (-) strand; PAM type: YTN; PAM sequence: TTC
agttttaaagcagtggaata

SEQ ID NO: 73196 - DNA, 20 bp, Artificial Sequence
  Description of Artificial Sequence: Synthetic oligonucleotide
  Target: ATXN2; (-) strand; PAM type: YTN; PAM sequence: TTA
aagaaattcagttttaaagc

SEQ ID NO: 73197 - DNA, 20 bp, Artificial Sequence
  Description of Artificial Sequence: Synthetic oligonucleotide
  Target: ATXN2; (-) strand; PAM type: YTN; PAM sequence: TTT
aaagaaattcagttttaaag

SEQ ID NO: 73198 - DNA, 20 bp, Artificial Sequence
  Description of Artificial Sequence: Synthetic oligonucleotide
  Target: ATXN2; (-) strand; PAM type: YTN; PAM sequence: TTT
taaagaaattcagttttaaa

SEQ ID NO: 73199 - DNA, 20 bp, Artificial Sequence
  Description of Artificial Sequence: Synthetic oligonucleotide
  Target: ATXN2; (-) strand; PAM type: YTN; PAM sequence: TTT
ttaaagaaattcagttttaa

SEQ ID NO: 73200 - DNA, 20 bp, Artificial Sequence
  Description of Artificial Sequence: Synthetic oligonucleotide
  Target: ATXN2; (-) strand; PAM type: YTN; PAM sequence: TTG
tatttttaaagaaattcagt

SEQ ID NO: 73201 - DNA, 20 bp, Artificial Sequence
  Description of Artificial Sequence: Synthetic oligonucleotide
  Target: ATXN2; (-) strand; PAM type: YTN; PAM sequence: TTA
ttgtatttttaaagaaattc

SEQ ID NO: 73202 - DNA, 20 bp, Artificial Sequence
  Description of Artificial Sequence: Synthetic oligonucleotide
  Target: ATXN2; (-) strand; PAM type: YTN; PAM sequence: TTT
attgtatttttaaagaaatt

SEQ ID NO: 73203 - DNA, 20 bp, Artificial Sequence
  Description of Artificial Sequence: Synthetic oligonucleotide
  Target: ATXN2; (-) strand; PAM type: YTN; PAM sequence: TTT
tattgtatttttaaagaaat

SEQ ID NO: 73204 - DNA, 20 bp, Artificial Sequence
  Description of Artificial Sequence: Synthetic oligonucleotide
  Target: ATXN2; (-) strand; PAM type: YTN; PAM sequence: TTA
ttttattgtatttttaaaga

SEQ ID NO: 73205 - DNA, 20 bp, Artificial Sequence
  Description of Artificial Sequence: Synthetic oligonucleotide
  Target: ATXN2; (-) strand; PAM type: YTN; PAM sequence: TTT
attttattgtatttttaaag

SEQ ID NO: 73206 - DNA, 20 bp, Artificial Sequence
  Description of Artificial Sequence: Synthetic oligonucleotide
  Target: ATXN2; (-) strand; PAM type: YTN; PAM sequence: TTT
tattttattgtatttttaaa

SEQ ID NO: 73207 - DNA, 20 bp, Artificial Sequence
  Description of Artificial Sequence: Synthetic oligonucleotide
  Target: ATXN2; (-) strand; PAM type: YTN; PAM sequence: TTT
ttattttattgtatttttaa

SEQ ID NO: 73208 - DNA, 20 bp, Artificial Sequence
  Description of Artificial Sequence: Synthetic oligonucleotide
  Target: ATXN2; (-) strand; PAM type: YTN; PAM sequence: TTA
tttttattttattgtatttt

SEQ ID NO: 73209 - DNA, 20 bp, Artificial Sequence
  Description of Artificial Sequence: Synthetic oligonucleotide
  Target: ATXN2; (-) strand; PAM type: YTN; PAM sequence: TTT
atttttattttattgtattt

SEQ ID NO: 73210 - DNA, 20 bp, Artificial Sequence
  Description of Artificial Sequence: Synthetic oligonucleotide
  Target: ATXN2; (-) strand; PAM type: YTN; PAM sequence: TTA
agaaatgcagtttattttta

SEQ ID NO: 73211 - DNA, 20 bp, Artificial Sequence
  Description of Artificial Sequence: Synthetic oligonucleotide
  Target: ATXN2; (-) strand; PAM type: YTN; PAM sequence: TTT
aagaaatgcagtttattttt

SEQ ID NO: 73212 - DNA, 20 bp, Artificial Sequence
  Description of Artificial Sequence: Synthetic oligonucleotide
  Target: ATXN2; (-) strand; PAM type: YTN; PAM sequence: TTG
taatgatttaagaaatgcag

SEQ ID NO: 73213 - DNA, 20 bp, Artificial Sequence
  Description of Artificial Sequence: Synthetic oligonucleotide
  Target: ATXN2; (-) strand; PAM type: YTN; PAM sequence: CTT
gtaatgatttaagaaatgca

SEQ ID NO: 73214 - DNA, 20 bp, Artificial Sequence
  Description of Artificial Sequence: Synthetic oligonucleotide
  Target: ATXN2; (-) strand; PAM type: YTN; PAM sequence: CTC
acttgtaatgatttaagaaa

SEQ ID NO: 73215 - DNA, 20 bp, Artificial Sequence
  Description of Artificial Sequence: Synthetic oligonucleotide
  Target: ATXN2; (-) strand; PAM type: YTN; PAM sequence: CTC
ctcacttgtaatgatttaag

SEQ ID NO: 73216 - DNA, 20 bp, Artificial Sequence
  Description of Artificial Sequence: Synthetic oligonucleotide
  Target: ATXN2; (-) strand; PAM type: YTN; PAM sequence: TTA
aaaatgaccagtgaatgtat

SEQ ID NO: 73217 - DNA, 20 bp, Artificial Sequence
  Description of Artificial Sequence: Synthetic oligonucleotide
  Target: ATXN2; (-) strand; PAM type: YTN; PAM sequence: TTT
aaaaatgaccagtgaatgta

SEQ ID NO: 73218 - DNA, 20 bp, Artificial Sequence
  Description of Artificial Sequence: Synthetic oligonucleotide
  Target: ATXN2; (-) strand; PAM type: YTN; PAM sequence: TTT
taaaaatgaccagtgaatgt

SEQ ID NO: 73219 - DNA, 20 bp, Artificial Sequence
  Description of Artificial Sequence: Synthetic oligonucleotide
  Target: ATXN2; (-) strand; PAM type: YTN; PAM sequence: CTG
ggaaaagtagaaaaatagtt

SEQ ID NO: 73220 - DNA, 20 bp, Artificial Sequence
  Description of Artificial Sequence: Synthetic oligonucleotide
  Target: ATXN2; (-) strand; PAM type: YTN; PAM sequence: TTA
aaaagacatgccacaaactg

SEQ ID NO: 73221 - DNA, 20 bp, Artificial Sequence
  Description of Artificial Sequence: Synthetic oligonucleotide
  Target: ATXN2; (-) strand; PAM type: YTN; PAM sequence: TTT
aaaaagacatgccacaaact

SEQ ID NO: 73222 - DNA, 20 bp, Artificial Sequence
  Description of Artificial Sequence: Synthetic oligonucleotide
  Target: ATXN2; (-) strand; PAM type: YTN; PAM sequence: TTA
gacgtgtccaaaagtaccat

SEQ ID NO: 73223 - DNA, 20 bp, Artificial Sequence
  Description of Artificial Sequence: Synthetic oligonucleotide
  Target: ATXN2; (-) strand; PAM type: YTN; PAM sequence: CTT
agacgtgtccaaaagtacca

SEQ ID NO: 73224 - DNA, 20 bp, Artificial Sequence
  Description of Artificial Sequence: Synthetic oligonucleotide
  Target: ATXN2; (-) strand; PAM type: YTN; PAM sequence: CTC
aaaaaaaaaaaaaaaaaaga

SEQ ID NO: 73225 - DNA, 20 bp, Artificial Sequence
  Description of Artificial Sequence: Synthetic oligonucleotide
  Target: ATXN2; (-) strand; PAM type: YTN; PAM sequence: CTC
catctcaaaaaaaaaaaaaa

SEQ ID NO: 73226 - DNA, 20 bp, Artificial Sequence
  Description of Artificial Sequence: Synthetic oligonucleotide
  Target: ATXN2; (-) strand; PAM type: YTN; PAM sequence: TTG
ggcgacagagtgactccatc

SEQ ID NO: 73227 - DNA, 20 bp, Artificial Sequence
  Description of Artificial Sequence: Synthetic oligonucleotide
  Target: ATXN2; (-) strand; PAM type: YTN; PAM sequence: CTT
gggcgacagagtgactccat

SEQ ID NO: 73228 - DNA, 20 bp, Artificial Sequence
  Description of Artificial Sequence: Synthetic oligonucleotide
  Target: ATXN2; (-) strand; PAM type: YTN; PAM sequence: CTC
cagcttgggcgacagagtga

SEQ ID NO: 73229 - DNA, 20 bp, Artificial Sequence
  Description of Artificial Sequence: Synthetic oligonucleotide
  Target: ATXN2; (-) strand; PAM type: YTN; PAM sequence: TTG
tgccacatcactccagcttg

SEQ ID NO: 73230 - DNA, 20 bp, Artificial Sequence
  Description of Artificial Sequence: Synthetic oligonucleotide
  Target: ATXN2; (-) strand; PAM type: YTN; PAM sequence: TTG
cagtgagccgagattgtgcc

SEQ ID NO: 73231 - DNA, 20 bp, Artificial Sequence
  Description of Artificial Sequence: Synthetic oligonucleotide
  Target: ATXN2; (-) strand; PAM type: YTN; PAM sequence: TTG
ggaagtggaggttgcagtga

SEQ ID NO: 73232 - DNA, 20 bp, Artificial Sequence
  Description of Artificial Sequence: Synthetic oligonucleotide
  Target: ATXN2; (-) strand; PAM type: YTN; PAM sequence: TTT
gggaagtggaggttgcagtg

SEQ ID NO: 73233 - DNA, 20 bp, Artificial Sequence
  Description of Artificial Sequence: Synthetic oligonucleotide
  Target: ATXN2; (-) strand; PAM type: YTN; PAM sequence: TTG
aatttgggaagtggaggttg

SEQ ID NO: 73234 - DNA, 20 bp, Artificial Sequence
  Description of Artificial Sequence: Synthetic oligonucleotide
  Target: ATXN2; (-) strand; PAM type: YTN; PAM sequence: CTT
gaatttgggaagtggaggtt

SEQ ID NO: 73235 - DNA, 20 bp, Artificial Sequence
  Description of Artificial Sequence: Synthetic oligonucleotide
  Target: ATXN2; (-) strand; PAM type: YTN; PAM sequence: TTG
cttgaatttgggaagtggag

SEQ ID NO: 73236 - DNA, 20 bp, Artificial Sequence
  Description of Artificial Sequence: Synthetic oligonucleotide
  Target: ATXN2; (-) strand; PAM type: YTN; PAM sequence: CTA
aggcaggagaattgcttgaa

SEQ ID NO: 73237 - DNA, 20 bp, Artificial Sequence
  Description of Artificial Sequence: Synthetic oligonucleotide
  Target: ATXN2; (-) strand; PAM type: YTN; PAM sequence: CTC
aggaggctaaggcaggagaa

SEQ ID NO: 73238 - DNA, 20 bp, Artificial Sequence
  Description of Artificial Sequence: Synthetic oligonucleotide
  Target: ATXN2; (-) strand; PAM type: YTN; PAM sequence: CTA
ctcaggaggctaaggcagga

SEQ ID NO: 73239 - DNA, 20 bp, Artificial Sequence
  Description of Artificial Sequence: Synthetic oligonucleotide
  Target: ATXN2; (-) strand; PAM type: YTN; PAM sequence: CTG
taatcccagctactcaggag

SEQ ID NO: 73240 - DNA, 20 bp, Artificial Sequence
  Description of Artificial Sequence: Synthetic oligonucleotide
  Target: ATXN2; (-) strand; PAM type: YTN; PAM sequence: TTA
gtcaggcatggtagcacatg

SEQ ID NO: 73241 - DNA, 20 bp, Artificial Sequence
  Description of Artificial Sequence: Synthetic oligonucleotide
  Target: ATXN2; (-) strand; PAM type: YTN; PAM sequence: CTA
aaaatacaaaaaaattagtc

SEQ ID NO: 73242 - DNA, 20 bp, Artificial Sequence
  Description of Artificial Sequence: Synthetic oligonucleotide
  Target: ATXN2; (-) strand; PAM type: YTN; PAM sequence: CTA
ctaaaaatacaaaaaaatta

SEQ ID NO: 73243 - DNA, 20 bp, Artificial Sequence
  Description of Artificial Sequence: Synthetic oligonucleotide
  Target: ATXN2; (-) strand; PAM type: YTN; PAM sequence: CTC
tactaaaaatacaaaaaaat

SEQ ID NO: 73244 - DNA, 20 bp, Artificial Sequence
  Description of Artificial Sequence: Synthetic oligonucleotide
  Target: ATXN2; (-) strand; PAM type: YTN; PAM sequence: CTG
gtgaaaccccatctctacta

SEQ ID NO: 73245 - DNA, 20 bp, Artificial Sequence
  Description of Artificial Sequence: Synthetic oligonucleotide
  Target: ATXN2; (-) strand; PAM type: YTN; PAM sequence: CTG
gtcaacctggtgaaacccca

SEQ ID NO: 73246 - DNA, 20 bp, Artificial Sequence
  Description of Artificial Sequence: Synthetic oligonucleotide
  Target: ATXN2; (-) strand; PAM type: YTN; PAM sequence: TTG
agaccaacctggtcaacctg

SEQ ID NO: 73247 - DNA, 20 bp, Artificial Sequence
  Description of Artificial Sequence: Synthetic oligonucleotide
  Target: ATXN2; (-) strand; PAM type: YTN; PAM sequence: TTT
gagaccaacctggtcaacct

SEQ ID NO: 73248 - DNA, 20 bp, Artificial Sequence
  Description of Artificial Sequence: Synthetic oligonucleotide
  Target: ATXN2; (-) strand; PAM type: YTN; PAM sequence: TTG
aggtcaggagtttgagacca

SEQ ID NO: 73249 - DNA, 20 bp, Artificial Sequence
  Description of Artificial Sequence: Synthetic oligonucleotide
  Target: ATXN2; (-) strand; PAM type: YTN; PAM sequence: CTT
gaggtcaggagtttgagacc

SEQ ID NO: 73250 - DNA, 20 bp, Artificial Sequence
  Description of Artificial Sequence: Synthetic oligonucleotide
  Target: ATXN2; (-) strand; PAM type: YTN; PAM sequence: TTG
ggaggccaaagcgggtggat

SEQ ID NO: 73251 - DNA, 20 bp, Artificial Sequence
  Description of Artificial Sequence: Synthetic oligonucleotide
  Target: ATXN2; (-) strand; PAM type: YTN; PAM sequence: TTT
gggaggccaaagcgggtgga

SEQ ID NO: 73252 - DNA, 20 bp, Artificial Sequence
  Description of Artificial Sequence: Synthetic oligonucleotide
  Target: ATXN2; (-) strand; PAM type: YTN; PAM sequence: CTT
tgggaggccaaagcgggtgg

SEQ ID NO: 73253 - DNA, 20 bp, Artificial Sequence
  Description of Artificial Sequence: Synthetic oligonucleotide
  Target: ATXN2; (-) strand; PAM type: YTN; PAM sequence: TTG
taatcccagcactttgggag

SEQ ID NO: 73254 - DNA, 20 bp, Artificial Sequence
  Description of Artificial Sequence: Synthetic oligonucleotide
  Target: ATXN2; (-) strand; PAM type: YTN; PAM sequence: CTT
gtaatcccagcactttggga

SEQ ID NO: 73255 - DNA, 20 bp, Artificial Sequence
  Description of Artificial Sequence: Synthetic oligonucleotide
  Target: ATXN2; (-) strand; PAM type: YTN; PAM sequence: CTC
acgcttgtaatcccagcact

SEQ ID NO: 73256 - DNA, 20 bp, Artificial Sequence
  Description of Artificial Sequence: Synthetic oligonucleotide
  Target: ATXN2; (-) strand; PAM type: YTN; PAM sequence: TTA
ggccgggtgtggtgctcacg

SEQ ID NO: 73257 - DNA, 20 bp, Artificial Sequence
  Description of Artificial Sequence: Synthetic oligonucleotide
  Target: ATXN2; (-) strand; PAM type: YTN; PAM sequence: TTT
aggccgggtgtggtgctcac

SEQ ID NO: 73258 - DNA, 20 bp, Artificial Sequence
  Description of Artificial Sequence: Synthetic oligonucleotide
  Target: ATXN2; (-) strand; PAM type: YTN; PAM sequence: TTA
aagatttaggccgggtgtgg

SEQ ID NO: 73259 - DNA, 20 bp, Artificial Sequence
  Description of Artificial Sequence: Synthetic oligonucleotide
  Target: ATXN2; (-) strand; PAM type: YTN; PAM sequence: TTA
taaagagattaaagatttag

SEQ ID NO: 73260 - DNA, 20 bp, Artificial Sequence
  Description of Artificial Sequence: Synthetic oligonucleotide
  Target: ATXN2; (-) strand; PAM type: YTN; PAM sequence: TTG
attataaagagattaaagat

SEQ ID NO: 73261 - DNA, 20 bp, Artificial Sequence
  Description of Artificial Sequence: Synthetic oligonucleotide
  Target: ATXN2; (-) strand; PAM type: YTN; PAM sequence: TTT
gattataaagagattaaaga

SEQ ID NO: 73262 - DNA, 20 bp, Artificial Sequence
  Description of Artificial Sequence: Synthetic oligonucleotide
  Target: ATXN2; (-) strand; PAM type: YTN; PAM sequence: CTT
tgattataaagagattaaag

SEQ ID NO: 73263 - DNA, 20 bp, Artificial Sequence
  Description of Artificial Sequence: Synthetic oligonucleotide
  Target: ATXN2; (-) strand; PAM type: YTN; PAM sequence: CTA
ccagagcaaaaaaatcatga

SEQ ID NO: 73264 - DNA, 20 bp, Artificial Sequence
  Description of Artificial Sequence: Synthetic oligonucleotide
  Target: ATXN2; (-) strand; PAM type: YTN; PAM sequence: TTA
taagcatgactaccagagca

SEQ ID NO: 73265 - DNA, 20 bp, Artificial Sequence
  Description of Artificial Sequence: Synthetic oligonucleotide
  Target: ATXN2; (-) strand; PAM type: YTN; PAM sequence: TTT
ataagcatgactaccagagc

SEQ ID NO: 73266 - DNA, 20 bp, Artificial Sequence
  Description of Artificial Sequence: Synthetic oligonucleotide
  Target: ATXN2; (-) strand; PAM type: YTN; PAM sequence: CTT
tataagcatgactaccagag

SEQ ID NO: 73267 - DNA, 20 bp, Artificial Sequence
  Description of Artificial Sequence: Synthetic oligonucleotide
  Target: ATXN2; (-) strand; PAM type: YTN; PAM sequence: TTG
agtggagaaggactttataa

SEQ ID NO: 73268 - DNA, 20 bp, Artificial Sequence
  Description of Artificial Sequence: Synthetic oligonucleotide
  Target: ATXN2; (-) strand; PAM type: YTN; PAM sequence: TTT
gagtggagaaggactttata

SEQ ID NO: 73269 - DNA, 20 bp, Artificial Sequence
  Description of Artificial Sequence: Synthetic oligonucleotide
  Target: ATXN2; (-) strand; PAM type: YTN; PAM sequence: TTT
tgagtggagaaggactttat

SEQ ID NO: 73270 - DNA, 20 bp, Artificial Sequence
  Description of Artificial Sequence: Synthetic oligonucleotide
  Target: ATXN2; (-) strand; PAM type: YTN; PAM sequence: TTA
attttgagtggagaaggact

SEQ ID NO: 73271 - DNA, 20 bp, Artificial Sequence
  Description of Artificial Sequence: Synthetic oligonucleotide
  Target: ATXN2; (-) strand; PAM type: YTN; PAM sequence: TTT
aattttgagtggagaaggac

SEQ ID NO: 73272 - DNA, 20 bp, Artificial Sequence
  Description of Artificial Sequence: Synthetic oligonucleotide
  Target: ATXN2; (-) strand; PAM type: YTN; PAM sequence: TTG
tttaattttgagtggagaag

SEQ ID NO: 73273 - DNA, 20 bp, Artificial Sequence
  Description of Artificial Sequence: Synthetic oligonucleotide
  Target: ATXN2; (-) strand; PAM type: YTN; PAM sequence: TTT
gtttaattttgagtggagaa

SEQ ID NO: 73274 - DNA, 20 bp, Artificial Sequence
  Description of Artificial Sequence: Synthetic oligonucleotide
  Target: ATXN2; (-) strand; PAM type: YTN; PAM sequence: CTG
tgaatttgtttaattttgag

SEQ ID NO: 73275 - DNA, 20 bp, Artificial Sequence
  Description of Artificial Sequence: Synthetic oligonucleotide
  Target: ATXN2; (-) strand; PAM type: YTN; PAM sequence: CTG
gagcaaatctgtgaatttgt

SEQ ID NO: 73276 - DNA, 20 bp, Artificial Sequence
  Description of Artificial Sequence: Synthetic oligonucleotide
  Target: ATXN2; (-) strand; PAM type: YTN; PAM sequence: CTA
cactggagcaaatctgtgaa

SEQ ID NO: 73277 - DNA, 20 bp, Artificial Sequence
  Description of Artificial Sequence: Synthetic oligonucleotide
  Target: ATXN2; (-) strand; PAM type: YTN; PAM sequence: TTA
aacaaaacaacacccagact

SEQ ID NO: 73278 - DNA, 20 bp, Artificial Sequence
  Description of Artificial Sequence: Synthetic oligonucleotide
  Target: ATXN2; (-) strand; PAM type: YTN; PAM sequence: CTG
tgattaaacaaaacaacacc

SEQ ID NO: 73279 - DNA, 20 bp, Artificial Sequence
  Description of Artificial Sequence: Synthetic oligonucleotide
  Target: ATXN2; (-) strand; PAM type: YTN; PAM sequence: TTA
atgagaaaactgtgattaaa

SEQ ID NO: 73280 - DNA, 20 bp, Artificial Sequence
  Description of Artificial Sequence: Synthetic oligonucleotide
  Target: ATXN2; (-) strand; PAM type: YTN; PAM sequence: CTG
ataaataaaaccaaatagat

SEQ ID NO: 73281 - DNA, 20 bp, Artificial Sequence
  Description of Artificial Sequence: Synthetic oligonucleotide
  Target: ATXN2; (-) strand; PAM type: YTN; PAM sequence: TTC
acactgataaataaaaccaa

SEQ ID NO: 73282 - DNA, 20 bp, Artificial Sequence
  Description of Artificial Sequence: Synthetic oligonucleotide
  Target: ATXN2; (-) strand; PAM type: YTN; PAM sequence: CTT
cacactgataaataaaacca

SEQ ID NO: 73283 - DNA, 20 bp, Artificial Sequence
  Description of Artificial Sequence: Synthetic oligonucleotide
  Target: ATXN2; (-) strand; PAM type: YTN; PAM sequence: CTA
cttcacactgataaataaaa

SEQ ID NO: 73284 - DNA, 20 bp, Artificial Sequence
  Description of Artificial Sequence: Synthetic oligonucleotide
  Target: ATXN2; (-) strand; PAM type: YTN; PAM sequence: TTA
gatacctacttcacactgat

SEQ ID NO: 73285 - DNA, 20 bp, Artificial Sequence
  Description of Artificial Sequence: Synthetic oligonucleotide
  Target: ATXN2; (-) strand; PAM type: YTN; PAM sequence: TTG
gggacaaattagatacctac

SEQ ID NO: 73286 - DNA, 20 bp, Artificial Sequence
  Description of Artificial Sequence: Synthetic oligonucleotide
  Target: ATXN2; (-) strand; PAM type: YTN; PAM sequence: CTG
ggacattggggacaaattag

SEQ ID NO: 73287 - DNA, 20 bp, Artificial Sequence
  Description of Artificial Sequence: Synthetic oligonucleotide
  Target: ATXN2; (-) strand; PAM type: YTN; PAM sequence: TTC
tgggacattggggacaaatt

SEQ ID NO: 73288 - DNA, 20 bp, Artificial Sequence
  Description of Artificial Sequence: Synthetic oligonucleotide
  Target: ATXN2; (-) strand; PAM type: YTN; PAM sequence: TTC
agtaaatgattctgggacat

SEQ ID NO: 73289 - DNA, 20 bp, Artificial Sequence
  Description of Artificial Sequence: Synthetic oligonucleotide
  Target: ATXN2; (-) strand; PAM type: YTN; PAM sequence: TTA
ttcagtaaatgattctggga

SEQ ID NO: 73290 - DNA, 20 bp, Artificial Sequence
  Description of Artificial Sequence: Synthetic oligonucleotide
  Target: ATXN2; (-) strand; PAM type: YTN; PAM sequence: CTG
gaggaaaggtggattattca

SEQ ID NO: 73291 - DNA, 20 bp, Artificial Sequence
  Description of Artificial Sequence: Synthetic oligonucleotide
  Target: ATXN2; (-) strand; PAM type: YTN; PAM sequence: TTC
tggaggaaaggtggattatt

SEQ ID NO: 73292 - DNA, 20 bp, Artificial Sequence
  Description of Artificial Sequence: Synthetic oligonucleotide
  Target: ATXN2; (-) strand; PAM type: YTN; PAM sequence: TTA
attctggaggaaaggtggat

SEQ ID NO: 73293 - DNA, 20 bp, Artificial Sequence
  Description of Artificial Sequence: Synthetic oligonucleotide
  Target: ATXN2; (-) strand; PAM type: YTN; PAM sequence: TTT
aattctggaggaaaggtgga

SEQ ID NO: 73294 - DNA, 20 bp, Artificial Sequence
  Description of Artificial Sequence: Synthetic oligonucleotide
  Target: ATXN2; (-) strand; PAM type: YTN; PAM sequence: CTT
taattctggaggaaaggtgg

SEQ ID NO: 73295 - DNA, 20 bp, Artificial Sequence
  Description of Artificial Sequence: Synthetic oligonucleotide
  Target: ATXN2; (-) strand; PAM type: YTN; PAM sequence: TTA
atatgcaatatagcacttta

SEQ ID NO: 73296 - DNA, 20 bp, Artificial Sequence
  Description of Artificial Sequence: Synthetic oligonucleotide
  Target: ATXN2; (-) strand; PAM type: YTN; PAM sequence: TTA
ttaatatgcaatatagcact

SEQ ID NO: 73297 - DNA, 20 bp, Artificial Sequence
  Description of Artificial Sequence: Synthetic oligonucleotide
  Target: ATXN2; (-) strand; PAM type: YTN; PAM sequence: TTT
attaatatgcaatatagcac

SEQ ID NO: 73298 - DNA, 20 bp, Artificial Sequence
  Description of Artificial Sequence: Synthetic oligonucleotide
  Target: ATXN2; (-) strand; PAM type: YTN; PAM sequence: TTT
tattaatatgcaatatagca

SEQ ID NO: 73299 - DNA, 20 bp, Artificial Sequence
  Description of Artificial Sequence: Synthetic oligonucleotide
  Target: ATXN2; (-) strand; PAM type: YTN; PAM sequence: TTA
tgtgggtattttattaatat

SEQ ID NO: 73300 - DNA, 20 bp, Artificial Sequence
  Description of Artificial Sequence: Synthetic oligonucleotide
  Target: ATXN2; (-) strand; PAM type: YTN; PAM sequence: TTT
atgtgggtattttattaata

SEQ ID NO: 73301 - DNA, 20 bp, Artificial Sequence
  Description of Artificial Sequence: Synthetic oligonucleotide
  Target: ATXN2; (-) strand; PAM type: YTN; PAM sequence: CTG
aatttatgtgggtattttat

SEQ ID NO: 73302 - DNA, 20 bp, Artificial Sequence
  Description of Artificial Sequence: Synthetic oligonucleotide
  Target: ATXN2; (-) strand; PAM type: YTN; PAM sequence: CTA
cgtatggagcatccaaaact

SEQ ID NO: 73303 - DNA, 20 bp, Artificial Sequence
  Description of Artificial Sequence: Synthetic oligonucleotide
  Target: ATXN2; (-) strand; PAM type: YTN; PAM sequence: CTG
tcacagtggctacgtatgga

SEQ ID NO: 73304 - DNA, 20 bp, Artificial Sequence
  Description of Artificial Sequence: Synthetic oligonucleotide
  Target: ATXN2; (-) strand; PAM type: YTN; PAM sequence: TTA
taactgtcacagtggctacg

SEQ ID NO: 73305 - DNA, 20 bp, Artificial Sequence
  Description of Artificial Sequence: Synthetic oligonucleotide
  Target: ATXN2; (-) strand; PAM type: YTN; PAM sequence: TTC
aaaaaaaaaaaaaaaaaaaa

SEQ ID NO: 73306 - DNA, 20 bp, Artificial Sequence
  Description of Artificial Sequence: Synthetic oligonucleotide
  Target: ATXN2; (-) strand; PAM type: YTN; PAM sequence: TTT
caaaaaaaaaaaaaaaaaaa

SEQ ID NO: 73307 - DNA, 20 bp, Artificial Sequence
  Description of Artificial Sequence: Synthetic oligonucleotide
  Target: ATXN2; (-) strand; PAM type: YTN; PAM sequence: CTG
tttcaaaaaaaaaaaaaaaa

SEQ ID NO: 73308 - DNA, 20 bp, Artificial Sequence
  Description of Artificial Sequence: Synthetic oligonucleotide
  Target: ATXN2; (-) strand; PAM type: YTN; PAM sequence: CTC
tgtttcaaaaaaaaaaaaaa

SEQ ID NO: 73309 - DNA, 20 bp, Artificial Sequence
  Description of Artificial Sequence: Synthetic oligonucleotide
  Target: ATXN2; (-) strand; PAM type: YTN; PAM sequence: CTG
ggcaacaagagtaaaactct

SEQ ID NO: 73310 - DNA, 20 bp, Artificial Sequence
  Description of Artificial Sequence: Synthetic oligonucleotide
  Target: ATXN2; (-) strand; PAM type: YTN; PAM sequence: CTC
cagcctgggcaacaagagta

SEQ ID NO: 73311 - DNA, 20 bp, Artificial Sequence
  Description of Artificial Sequence: Synthetic oligonucleotide
  Target: ATXN2; (-) strand; PAM type: YTN; PAM sequence: TTG
cactccagcctgggcaacaa

SEQ ID NO: 73312 - DNA, 20 bp, Artificial Sequence
  Description of Artificial Sequence: Synthetic oligonucleotide
  Target: ATXN2; (-) strand; PAM type: YTN; PAM sequence: TTG
cagtgagccgagatcgcgcc

SEQ ID NO: 73313 - DNA, 20 bp, Artificial Sequence
  Description of Artificial Sequence: Synthetic oligonucleotide
  Target: ATXN2; (-) strand; PAM type: YTN; PAM sequence: CTC
gggaggtggaggttgcagtg

SEQ ID NO: 73314 - DNA, 20 bp, Artificial Sequence
  Description of Artificial Sequence: Synthetic oligonucleotide
  Target: ATXN2; (-) strand; PAM type: YTN; PAM sequence: TTG
aactcgggaggtggaggttg

SEQ ID NO: 73315 - DNA, 20 bp, Artificial Sequence
  Description of Artificial Sequence: Synthetic oligonucleotide
  Target: ATXN2; (-) strand; PAM type: YTN; PAM sequence: CTT
gaactcgggaggtggaggtt

SEQ ID NO: 73316 - DNA, 20 bp, Artificial Sequence
  Description of Artificial Sequence: Synthetic oligonucleotide
  Target: ATXN2; (-) strand; PAM type: YTN; PAM sequence: CTG
aggcaggagaatcgcttgaa

SEQ ID NO: 73317 - DNA, 20 bp, Artificial Sequence
  Description of Artificial Sequence: Synthetic oligonucleotide
  Target: ATXN2; (-) strand; PAM type: YTN; PAM sequence: CTC
gggaggctgaggcaggagaa

SEQ ID NO: 73318 - DNA, 20 bp, Artificial Sequence
  Description of Artificial Sequence: Synthetic oligonucleotide
  Target: ATXN2; (-) strand; PAM type: YTN; PAM sequence: CTA
ctcgggaggctgaggcagga

SEQ ID NO: 73319 - DNA, 20 bp, Artificial Sequence
  Description of Artificial Sequence: Synthetic oligonucleotide
  Target: ATXN2; (-) strand; PAM type: YTN; PAM sequence: CTG
tagtcccagctactcgggag

SEQ ID NO: 73320 - DNA, 20 bp, Artificial Sequence
  Description of Artificial Sequence: Synthetic oligonucleotide
  Target: ATXN2; (-) strand; PAM type: YTN; PAM sequence: TTA
gccggtcatggtggcgcata

SEQ ID NO: 73321 - DNA, 20 bp, Artificial Sequence
  Description of Artificial Sequence: Synthetic oligonucleotide
  Target: ATXN2; (-) strand; PAM type: YTN; PAM sequence: CTA
aaaatacaaaattagccggt

SEQ ID NO: 73322 - DNA, 20 bp, Artificial Sequence
  Description of Artificial Sequence: Synthetic oligonucleotide
  Target: ATXN2; (-) strand; PAM type: YTN; PAM sequence: CTA
ctaaaaatacaaaattagcc

SEQ ID NO: 73323 - DNA, 20 bp, Artificial Sequence
  Description of Artificial Sequence: Synthetic oligonucleotide
  Target: ATXN2; (-) strand; PAM type: YTN; PAM sequence: CTC
tactaaaaatacaaaattag

SEQ ID NO: 73324 - DNA, 20 bp, Artificial Sequence
  Description of Artificial Sequence: Synthetic oligonucleotide
  Target: ATXN2; (-) strand; PAM type: YTN; PAM sequence: CTG
accaacatggagaaaccccg

SEQ ID NO: 73325 - DNA, 20 bp, Artificial Sequence
  Description of Artificial Sequence: Synthetic oligonucleotide
  Target: ATXN2; (-) strand; PAM type: YTN; PAM sequence: CTG
aggcaggcagatcatgacca

SEQ ID NO: 73326 - DNA, 20 bp, Artificial Sequence
  Description of Artificial Sequence: Synthetic oligonucleotide
  Target: ATXN2; (-) strand; PAM type: YTN; PAM sequence: TTG
ggaggctgaggcaggcagat

SEQ ID NO: 73327 - DNA, 20 bp, Artificial Sequence
  Description of Artificial Sequence: Synthetic oligonucleotide
  Target: ATXN2; (-) strand; PAM type: YTN; PAM sequence: TTT
gggaggctgaggcaggcaga

SEQ ID NO: 73328 - DNA, 20 bp, Artificial Sequence
  Description of Artificial Sequence: Synthetic oligonucleotide
  Target: ATXN2; (-) strand; PAM type: YTN; PAM sequence: CTT
tgggaggctgaggcaggcag

SEQ ID NO: 73329 - DNA, 20 bp, Artificial Sequence
  Description of Artificial Sequence: Synthetic oligonucleotide
  Target: ATXN2; (-) strand; PAM type: YTN; PAM sequence: TTC
cagcactttgggaggctgag

SEQ ID NO: 73330 - DNA, 20 bp, Artificial Sequence
  Description of Artificial Sequence: Synthetic oligonucleotide
  Target: ATXN2; (-) strand; PAM type: YTN; PAM sequence: CTA
taattccagcactttgggag

SEQ ID NO: 73331 - DNA, 20 bp, Artificial Sequence
  Description of Artificial Sequence: Synthetic oligonucleotide
  Target: ATXN2; (-) strand; PAM type: YTN; PAM sequence: CTC
acgcctataattccagcact

SEQ ID NO: 73332 - DNA, 20 bp, Artificial Sequence
  Description of Artificial Sequence: Synthetic oligonucleotide
  Target: ATXN2; (-) strand; PAM type: YTN; PAM sequence: CTG
ggtgcggtggctcacgccta

SEQ ID NO: 73333 - DNA, 20 bp, Artificial Sequence
  Description of Artificial Sequence: Synthetic oligonucleotide
  Target: ATXN2; (-) strand; PAM type: YTN; PAM sequence: TTG
tcagctgggtgcggtggctc

SEQ ID NO: 73334 - DNA, 20 bp, Artificial Sequence
  Description of Artificial Sequence: Synthetic oligonucleotide
  Target: ATXN2; (-) strand; PAM type: YTN; PAM sequence: CTT
gtcagctgggtgcggtggct

SEQ ID NO: 73335 - DNA, 20 bp, Artificial Sequence
  Description of Artificial Sequence: Synthetic oligonucleotide
  Target: ATXN2; (-) strand; PAM type: YTN; PAM sequence: TTA
aaacataacttgtcagctgg

SEQ ID NO: 73336 - DNA, 20 bp, Artificial Sequence
  Description of Artificial Sequence: Synthetic oligonucleotide
  Target: ATXN2; (-) strand; PAM type: YTN; PAM sequence: CTA
caaaatatgtcagaattaaa

SEQ ID NO: 73337 - DNA, 20 bp, Artificial Sequence
  Description of Artificial Sequence: Synthetic oligonucleotide
  Target: ATXN2; (-) strand; PAM type: YTN; PAM sequence: TTG
ccctacaaaatatgtcagaa

SEQ ID NO: 73338 - DNA, 20 bp, Artificial Sequence
  Description of Artificial Sequence: Synthetic oligonucleotide
  Target: ATXN2; (-) strand; PAM type: YTN; PAM sequence: CTT
gccctacaaaatatgtcaga

SEQ ID NO: 73339 - DNA, 20 bp, Artificial Sequence
  Description of Artificial Sequence: Synthetic oligonucleotide
  Target: ATXN2; (-) strand; PAM type: YTN; PAM sequence: TTC
cacaagagtcataaaggagg

SEQ ID NO: 73340 - DNA, 20 bp, Artificial Sequence
  Description of Artificial Sequence: Synthetic oligonucleotide
  Target: ATXN2; (-) strand; PAM type: YTN; PAM sequence: TTT
ccacaagagtcataaaggag

SEQ ID NO: 73341 - DNA, 20 bp, Artificial Sequence
  Description of Artificial Sequence: Synthetic oligonucleotide
  Target: ATXN2; (-) strand; PAM type: YTN; PAM sequence: TTT
tccacaagagtcataaagga

SEQ ID NO: 73342 - DNA, 20 bp, Artificial Sequence
  Description of Artificial Sequence: Synthetic oligonucleotide
  Target: ATXN2; (-) strand; PAM type: YTN; PAM sequence: TTT
ttccacaagagtcataaagg

SEQ ID NO: 73343 - DNA, 20 bp, Artificial Sequence
  Description of Artificial Sequence: Synthetic oligonucleotide
  Target: ATXN2; (-) strand; PAM type: YTN; PAM sequence: TTT
tttccacaagagtcataaag

SEQ ID NO: 73344 - DNA, 20 bp, Artificial Sequence
  Description of Artificial Sequence: Synthetic oligonucleotide
  Target: ATXN2; (-) strand; PAM type: YTN; PAM sequence: TTT
ttttccacaagagtcataaa

SEQ ID NO: 73345 - DNA, 20 bp, Artificial Sequence
  Description of Artificial Sequence: Synthetic oligonucleotide
  Target: ATXN2; (-) strand; PAM type: YTN; PAM sequence: TTG
gaaatttttttccacaagag

SEQ ID NO: 73346 - DNA, 20 bp, Artificial Sequence
  Description of Artificial Sequence: Synthetic oligonucleotide
  Target: ATXN2; (-) strand; PAM type: YTN; PAM sequence: TTT
ggaaatttttttccacaaga

SEQ ID NO: 73347 - DNA, 20 bp, Artificial Sequence
  Description of Artificial Sequence: Synthetic oligonucleotide
  Target: ATXN2; (-) strand; PAM type: YTN; PAM sequence: CTT
tggaaatttttttccacaag

SEQ ID NO: 73348 - DNA, 20 bp, Artificial Sequence
  Description of Artificial Sequence: Synthetic oligonucleotide
  Target: ATXN2; (-) strand; PAM type: YTN; PAM sequence: TTA
acagaagaactttggaaatt

SEQ ID NO: 73349 - DNA, 20 bp, Artificial Sequence
  Description of Artificial Sequence: Synthetic oligonucleotide
  Target: ATXN2; (-) strand; PAM type: YTN; PAM sequence: TTA
tgtgtattaacagaagaact

SEQ ID NO: 73350 - DNA, 20 bp, Artificial Sequence
  Description of Artificial Sequence: Synthetic oligonucleotide
  Target: ATXN2; (-) strand; PAM type: YTN; PAM sequence: TTA
gattatgtgtattaacagaa

SEQ ID NO: 73351 - DNA, 20 bp, Artificial Sequence
  Description of Artificial Sequence: Synthetic oligonucleotide
  Target: ATXN2; (-) strand; PAM type: YTN; PAM sequence: TTA
ttagattatgtgtattaaca

SEQ ID NO: 73352 - DNA, 20 bp, Artificial Sequence
  Description of Artificial Sequence: Synthetic oligonucleotide
  Target: ATXN2; (-) strand; PAM type: YTN; PAM sequence: CTT
attagattatgtgtattaac

SEQ ID NO: 73353 - DNA, 20 bp, Artificial Sequence
  Description of Artificial Sequence: Synthetic oligonucleotide
  Target: ATXN2; (-) strand; PAM type: YTN; PAM sequence: CTA
aagcttattagattatgtgt

SEQ ID NO: 73354 - DNA, 20 bp, Artificial Sequence
  Description of Artificial Sequence: Synthetic oligonucleotide
  Target: ATXN2; (-) strand; PAM type: YTN; PAM sequence: TTC
taaagcttattagattatgt

SEQ ID NO: 73355 - DNA, 20 bp, Artificial Sequence
  Description of Artificial Sequence: Synthetic oligonucleotide
  Target: ATXN2; (-) strand; PAM type: YTN; PAM sequence: TTG
acaaaatgattctaaagctt

SEQ ID NO: 73356 - DNA, 20 bp, Artificial Sequence
  Description of Artificial Sequence: Synthetic oligonucleotide
  Target: ATXN2; (-) strand; PAM type: YTN; PAM sequence: TTG
tagaaattgacaaaatgatt

SEQ ID NO: 73357 - DNA, 20 bp, Artificial Sequence
  Description of Artificial Sequence: Synthetic oligonucleotide
  Target: ATXN2; (-) strand; PAM type: YTN; PAM sequence: TTT
gtagaaattgacaaaatgat

SEQ ID NO: 73358 - DNA, 20 bp, Artificial Sequence
  Description of Artificial Sequence: Synthetic oligonucleotide
  Target: ATXN2; (-) strand; PAM type: YTN; PAM sequence: TTT
tgtagaaattgacaaaatga

SEQ ID NO: 73359 - DNA, 20 bp, Artificial Sequence
  Description of Artificial Sequence: Synthetic oligonucleotide
  Target: ATXN2; (-) strand; PAM type: YTN; PAM sequence: TTT
ttgtagaaattgacaaaatg

SEQ ID NO: 73360 - DNA, 20 bp, Artificial Sequence
  Description of Artificial Sequence: Synthetic oligonucleotide
  Target: ATXN2; (-) strand; PAM type: YTN; PAM sequence: TTA
taatatatatatatatatcc

SEQ ID NO: 73361 - DNA, 20 bp, Artificial Sequence
  Description of Artificial Sequence: Synthetic oligonucleotide
  Target: ATXN2; (-) strand; PAM type: YTN; PAM sequence: TTT
ataatatatatatatatatc

SEQ ID NO: 73362 - DNA, 20 bp, Artificial Sequence
  Description of Artificial Sequence: Synthetic oligonucleotide
  Target: ATXN2; (-) strand; PAM type: YTN; PAM sequence: TTT
tataatatatatatatatat

SEQ ID NO: 73363 - DNA, 20 bp, Artificial Sequence
  Description of Artificial Sequence: Synthetic oligonucleotide
  Target: ATXN2; (-) strand; PAM type: YTN; PAM sequence: TTT
ttataatatatatatatata

SEQ ID NO: 73364 - DNA, 20 bp, Artificial Sequence
  Description of Artificial Sequence: Synthetic oligonucleotide
  Target: ATXN2; (-) strand; PAM type: YTN; PAM sequence: CTC
aaaaaaaaaaaaatttttat

SEQ ID NO: 73365 - DNA, 20 bp, Artificial Sequence
  Description of Artificial Sequence: Synthetic oligonucleotide
  Target: ATXN2; (-) strand; PAM type: YTN; PAM sequence: CTC
catctcaaaaaaaaaaaaat

SEQ ID NO: 73366 - DNA, 20 bp, Artificial Sequence
  Description of Artificial Sequence: Synthetic oligonucleotide
  Target: ATXN2; (-) strand; PAM type: YTN; PAM sequence: CTC
cagccgggtgactccatctc

SEQ ID NO: 73367 - DNA, 20 bp, Artificial Sequence
  Description of Artificial Sequence: Synthetic oligonucleotide
  Target: ATXN2; (-) strand; PAM type: YTN; PAM sequence: TTG
cactccagccgggtgactcc

SEQ ID NO: 73368 - DNA, 20 bp, Artificial Sequence
  Description of Artificial Sequence: Synthetic oligonucleotide
  Target: ATXN2; (-) strand; PAM type: YTN; PAM sequence: CTG
agattgcactccagccgggt

SEQ ID NO: 73369 - DNA, 20 bp, Artificial Sequence
  Description of Artificial Sequence: Synthetic oligonucleotide
  Target: ATXN2; (-) strand; PAM type: YTN; PAM sequence: TTG
cagtgagctgagattgcact

SEQ ID NO: 73370 - DNA, 20 bp, Artificial Sequence
  Description of Artificial Sequence: Synthetic oligonucleotide
  Target: ATXN2; (-) strand; PAM type: YTN; PAM sequence: CTC
gaaccccgtaggtggaggtt

SEQ ID NO: 73371 - DNA, 20 bp, Artificial Sequence
  Description of Artificial Sequence: Synthetic oligonucleotide
  Target: ATXN2; (-) strand; PAM type: YTN; PAM sequence: TTA
ctcgaaccccgtaggtggag

SEQ ID NO: 73372 - DNA, 20 bp, Artificial Sequence
  Description of Artificial Sequence: Synthetic oligonucleotide
  Target: ATXN2; (-) strand; PAM type: YTN; PAM sequence: CTG
aggcaggagaattactcgaa

SEQ ID NO: 73373 - DNA, 20 bp, Artificial Sequence
  Description of Artificial Sequence: Synthetic oligonucleotide
  Target: ATXN2; (-) strand; PAM type: YTN; PAM sequence: TTG
ggaagctgaggcaggagaat

SEQ ID NO: 73374 - DNA, 20 bp, Artificial Sequence
  Description of Artificial Sequence: Synthetic oligonucleotide
  Target: ATXN2; (-) strand; PAM type: YTN; PAM sequence: CTT
gggaagctgaggcaggagaa

SEQ ID NO: 73375 - DNA, 20 bp, Artificial Sequence
  Description of Artificial Sequence: Synthetic oligonucleotide
  Target: ATXN2; (-) strand; PAM type: YTN; PAM sequence: CTA
cttgggaagctgaggcagga

SEQ ID NO: 73376 - DNA, 20 bp, Artificial Sequence
  Description of Artificial Sequence: Synthetic oligonucleotide
  Target: ATXN2; (-) strand; PAM type: YTN; PAM sequence: CTG
gacatggtggcaggtaccag

SEQ ID NO: 73377 - DNA, 20 bp, Artificial Sequence
  Description of Artificial Sequence: Synthetic oligonucleotide
  Target: ATXN2; (-) strand; PAM type: YTN; PAM sequence: CTA
aaaatacaaaaatcatctgg

SEQ ID NO: 73378 - DNA, 20 bp, Artificial Sequence
  Description of Artificial Sequence: Synthetic oligonucleotide
  Target: ATXN2; (-) strand; PAM type: YTN; PAM sequence: CTA
ctaaaaatacaaaaatcatc

SEQ ID NO: 73379 - DNA, 20 bp, Artificial Sequence
  Description of Artificial Sequence: Synthetic oligonucleotide
  Target: ATXN2; (-) strand; PAM type: YTN; PAM sequence: CTC
tactaaaaatacaaaaatca

SEQ ID NO: 73380 - DNA, 20 bp, Artificial Sequence
  Description of Artificial Sequence: Synthetic oligonucleotide
  Target: ATXN2; (-) strand; PAM type: YTN; PAM sequence: CTG
tctctactaaaaatacaaaa

SEQ ID NO: 73381 - DNA, 20 bp, Artificial Sequence
  Description of Artificial Sequence: Synthetic oligonucleotide
  Target: ATXN2; (-) strand; PAM type: YTN; PAM sequence: CTG
gccaacatggtgaaaccctg

SEQ ID NO: 73382 - DNA, 20 bp, Artificial Sequence
  Description of Artificial Sequence: Synthetic oligonucleotide
  Target: ATXN2; (-) strand; PAM type: YTN; PAM sequence: TTG
agaccagcctggccaacatg

SEQ ID NO: 73383 - DNA, 20 bp, Artificial Sequence
  Description of Artificial Sequence: Synthetic oligonucleotide
  Target: ATXN2; (-) strand; PAM type: YTN; PAM sequence: TTT
gagaccagcctggccaacat

SEQ ID NO: 73384 - DNA, 20 bp, Artificial Sequence
  Description of Artificial Sequence: Synthetic oligonucleotide
  Target: ATXN2; (-) strand; PAM type: YTN; PAM sequence: TTG
aggacgggagtttgagacca

SEQ ID NO: 73385 - DNA, 20 bp, Artificial Sequence
  Description of Artificial Sequence: Synthetic oligonucleotide
  Target: ATXN2; (-) strand; PAM type: YTN; PAM sequence: CTT
gaggacgggagtttgagacc

SEQ ID NO: 73386 - DNA, 20 bp, Artificial Sequence
  Description of Artificial Sequence: Synthetic oligonucleotide
  Target: ATXN2; (-) strand; PAM type: YTN; PAM sequence: CTG
aggtgggccgatcacttgag

SEQ ID NO: 73387 - DNA, 20 bp, Artificial Sequence
  Description of Artificial Sequence: Synthetic oligonucleotide
  Target: ATXN2; (-) strand; PAM type: YTN; PAM sequence: TTG
gaaggctgaggtgggccgat

SEQ ID NO: 73388 - DNA, 20 bp, Artificial Sequence
  Description of Artificial Sequence: Synthetic oligonucleotide
  Target: ATXN2; (-) strand; PAM type: YTN; PAM sequence: TTT
ggaaggctgaggtgggccga

SEQ ID NO: 73389 - DNA, 20 bp, Artificial Sequence
  Description of Artificial Sequence: Synthetic oligonucleotide
  Target: ATXN2; (-) strand; PAM type: YTN; PAM sequence: CTT
tggaaggctgaggtgggccg

SEQ ID NO: 73390 - DNA, 20 bp, Artificial Sequence
  Description of Artificial Sequence: Synthetic oligonucleotide
  Target: ATXN2; (-) strand; PAM type: YTN; PAM sequence: CTG
taatcccagcactttggaag

SEQ ID NO: 73391 - DNA, 20 bp, Artificial Sequence
  Description of Artificial Sequence: Synthetic oligonucleotide
  Target: ATXN2; (-) strand; PAM type: YTN; PAM sequence: CTC
acgcctgtaatcccagcact

SEQ ID NO: 73392 - DNA, 20 bp, Artificial Sequence
  Description of Artificial Sequence: Synthetic oligonucleotide
  Target: ATXN2; (-) strand; PAM type: YTN; PAM sequence: TTG
gctcacgcctgtaatcccag

SEQ ID NO: 73393 - DNA, 20 bp, Artificial Sequence
  Description of Artificial Sequence: Synthetic oligonucleotide
  Target: ATXN2; (-) strand; PAM type: YTN; PAM sequence: TTG
gccgggcacgttggctcacg

SEQ ID NO: 73394 - DNA, 20 bp, Artificial Sequence
  Description of Artificial Sequence: Synthetic oligonucleotide
  Target: ATXN2; (-) strand; PAM type: YTN; PAM sequence: TTT
ggccgggcacgttggctcac

SEQ ID NO: 73395 - DNA, 20 bp, Artificial Sequence
  Description of Artificial Sequence: Synthetic oligonucleotide
  Target: ATXN2; (-) strand; PAM type: YTN; PAM sequence: TTT
tggccgggcacgttggctca

SEQ ID NO: 73396 - DNA, 20 bp, Artificial Sequence
  Description of Artificial Sequence: Synthetic oligonucleotide
  Target: ATXN2; (-) strand; PAM type: YTN; PAM sequence: TTC
agttttggccgggcacgttg

SEQ ID NO: 73397 - DNA, 20 bp, Artificial Sequence
  Description of Artificial Sequence: Synthetic oligonucleotide
  Target: ATXN2; (-) strand; PAM type: YTN; PAM sequence: CTA
aagataatatattcagtttt

SEQ ID NO: 73398 - DNA, 20 bp, Artificial Sequence
  Description of Artificial Sequence: Synthetic oligonucleotide
  Target: ATXN2; (-) strand; PAM type: YTN; PAM sequence: CTC
taaagataatatattcagtt

SEQ ID NO: 73399 - DNA, 20 bp, Artificial Sequence
  Description of Artificial Sequence: Synthetic oligonucleotide
  Target: ATXN2; (-) strand; PAM type: YTN; PAM sequence: CTC
aaataaatctctaaagataa

SEQ ID NO: 73400 - DNA, 20 bp, Artificial Sequence
  Description of Artificial Sequence: Synthetic oligonucleotide
  Target: ATXN2; (-) strand; PAM type: YTN; PAM sequence: TTC
ctcaaataaatctctaaaga

SEQ ID NO: 73401 - DNA, 20 bp, Artificial Sequence
  Description of Artificial Sequence: Synthetic oligonucleotide
  Target: ATXN2; (-) strand; PAM type: YTN; PAM sequence: TTT
cctcaaataaatctctaaag

SEQ ID NO: 73402 - DNA, 20 bp, Artificial Sequence
  Description of Artificial Sequence: Synthetic oligonucleotide
  Target: ATXN2; (-) strand; PAM type: YTN; PAM sequence: TTT
tcctcaaataaatctctaaa

SEQ ID NO: 73403 - DNA, 20 bp, Artificial Sequence
  Description of Artificial Sequence: Synthetic oligonucleotide
  Target: ATXN2; (-) strand; PAM type: YTN; PAM sequence: TTG
tcaattttcctcaaataaat

SEQ ID NO: 73404 - DNA, 20 bp, Artificial Sequence
  Description of Artificial Sequence: Synthetic oligonucleotide
  Target: ATXN2; (-) strand; PAM type: YTN; PAM sequence: CTA
caacgttgtcaattttcctc

SEQ ID NO: 73405 - DNA, 20 bp, Artificial Sequence
  Description of Artificial Sequence: Synthetic oligonucleotide
  Target: ATXN2; (-) strand; PAM type: YTN; PAM sequence: TTA
atactacaacgttgtcaatt

SEQ ID NO: 73406 - DNA, 20 bp, Artificial Sequence
  Description of Artificial Sequence: Synthetic oligonucleotide
  Target: ATXN2; (-) strand; PAM type: YTN; PAM sequence: TTT
aatactacaacgttgtcaat

SEQ ID NO: 73407 - DNA, 20 bp, Artificial Sequence
  Description of Artificial Sequence: Synthetic oligonucleotide
  Target: ATXN2; (-) strand; PAM type: YTN; PAM sequence: TTA
tttaatactacaacgttgtc

SEQ ID NO: 73408 - DNA, 20 bp, Artificial Sequence
  Description of Artificial Sequence: Synthetic oligonucleotide
  Target: ATXN2; (-) strand; PAM type: YTN; PAM sequence: TTG
aatggaattatttaatacta

SEQ ID NO: 73409 - DNA, 20 bp, Artificial Sequence
  Description of Artificial Sequence: Synthetic oligonucleotide
  Target: ATXN2; (-) strand; PAM type: YTN; PAM sequence: TTT
gaatggaattatttaatact

SEQ ID NO: 73410 - DNA, 20 bp, Artificial Sequence
  Description of Artificial Sequence: Synthetic oligonucleotide
  Target: ATXN2; (-) strand; PAM type: YTN; PAM sequence: CTT
tgaatggaattatttaatac

SEQ ID NO: 73411 - DNA, 20 bp, Artificial Sequence
  Description of Artificial Sequence: Synthetic oligonucleotide
  Target: ATXN2; (-) strand; PAM type: YTN; PAM sequence: CTA
aatggaaacatgccatactt

SEQ ID NO: 73412 - DNA, 20 bp, Artificial Sequence
  Description of Artificial Sequence: Synthetic oligonucleotide
  Target: ATXN2; (-) strand; PAM type: YTN; PAM sequence: TTG
gctaaatggaaacatgccat

SEQ ID NO: 73413 - DNA, 20 bp, Artificial Sequence
  Description of Artificial Sequence: Synthetic oligonucleotide
  Target: ATXN2; (-) strand; PAM type: YTN; PAM sequence: TTT
ggctaaatggaaacatgcca

SEQ ID NO: 73414 - DNA, 20 bp, Artificial Sequence
  Description of Artificial Sequence: Synthetic oligonucleotide
  Target: ATXN2; (-) strand; PAM type: YTN; PAM sequence: CTG
aaggagacataaaagtagat

SEQ ID NO: 73415 - DNA, 20 bp, Artificial Sequence
  Description of Artificial Sequence: Synthetic oligonucleotide
  Target: ATXN2; (-) strand; PAM type: YTN; PAM sequence: TTA
tgaagacacagctgaaggag

SEQ ID NO: 73416 - DNA, 20 bp, Artificial Sequence
  Description of Artificial Sequence: Synthetic oligonucleotide
  Target: ATXN2; (-) strand; PAM type: YTN; PAM sequence: TTT
atgaagacacagctgaagga

SEQ ID NO: 73417 - DNA, 20 bp, Artificial Sequence
  Description of Artificial Sequence: Synthetic oligonucleotide
  Target: ATXN2; (-) strand; PAM type: YTN; PAM sequence: TTG
aagatttatgaagacacagc

SEQ ID NO: 73418 - DNA, 20 bp, Artificial Sequence
  Description of Artificial Sequence: Synthetic oligonucleotide
  Target: ATXN2; (-) strand; PAM type: YTN; PAM sequence: CTC
aaaaacaaaaataagcatag

SEQ ID NO: 73419 - DNA, 20 bp, Artificial Sequence
  Description of Artificial Sequence: Synthetic oligonucleotide
  Target: ATXN2; (-) strand; PAM type: YTN; PAM sequence: CTG
tctcaaaaacaaaaataagc

SEQ ID NO: 73420 - DNA, 20 bp, Artificial Sequence
  Description of Artificial Sequence: Synthetic oligonucleotide
  Target: ATXN2; (-) strand; PAM type: YTN; PAM sequence: CTC
tgtctcaaaaacaaaaataa

SEQ ID NO: 73421 - DNA, 20 bp, Artificial Sequence
  Description of Artificial Sequence: Synthetic oligonucleotide
  Target: ATXN2; (-) strand; PAM type: YTN; PAM sequence: CTG
ggtgacagagccagactctg

SEQ ID NO: 73422 - DNA, 20 bp, Artificial Sequence
  Description of Artificial Sequence: Synthetic oligonucleotide
  Target: ATXN2; (-) strand; PAM type: YTN; PAM sequence: CTC
cagcctgggtgacagagcca

SEQ ID NO: 73423 - DNA, 20 bp, Artificial Sequence
  Description of Artificial Sequence: Synthetic oligonucleotide
  Target: ATXN2; (-) strand; PAM type: YTN; PAM sequence: CTG
cactccagcctgggtgacag

SEQ ID NO: 73424 - DNA, 20 bp, Artificial Sequence
  Description of Artificial Sequence: Synthetic oligonucleotide
  Target: ATXN2; (-) strand; PAM type: YTN; PAM sequence: TTG
caatgagccgagatggtggt

SEQ ID NO: 73425 - DNA, 20 bp, Artificial Sequence
  Description of Artificial Sequence: Synthetic oligonucleotide
  Target: ATXN2; (-) strand; PAM type: YTN; PAM sequence: TTT
gcaatgagccgagatggtgg

SEQ ID NO: 73426 - DNA, 20 bp, Artificial Sequence
  Description of Artificial Sequence: Synthetic oligonucleotide
  Target: ATXN2; (-) strand; PAM type: YTN; PAM sequence: TTG
aatccaggagacggagtttg

SEQ ID NO: 73427 - DNA, 20 bp, Artificial Sequence
  Description of Artificial Sequence: Synthetic oligonucleotide
  Target: ATXN2; (-) strand; PAM type: YTN; PAM sequence: CTT
gaatccaggagacggagttt

SEQ ID NO: 73428 - DNA, 20 bp, Artificial Sequence
  Description of Artificial Sequence: Synthetic oligonucleotide
  Target: ATXN2; (-) strand; PAM type: YTN; PAM sequence: CTG
aggcaggagaatcgcttgaa

SEQ ID NO: 73429 - DNA, 20 bp, Artificial Sequence
  Description of Artificial Sequence: Synthetic oligonucleotide
  Target: ATXN2; (-) strand; PAM type: YTN; PAM sequence: TTG
ggaggctgaggcaggagaat

SEQ ID NO: 73430 - DNA, 20 bp, Artificial Sequence
  Description of Artificial Sequence: Synthetic oligonucleotide
  Target: ATXN2; (-) strand; PAM type: YTN; PAM sequence: CTT
gggaggctgaggcaggagaa

SEQ ID NO: 73431 - DNA, 20 bp, Artificial Sequence
  Description of Artificial Sequence: Synthetic oligonucleotide
  Target: ATXN2; (-) strand; PAM type: YTN; PAM sequence: CTA
cttgggaggctgaggcagga

SEQ ID NO: 73432 - DNA, 20 bp, Artificial Sequence
  Description of Artificial Sequence: Synthetic oligonucleotide
  Target: ATXN2; (-) strand; PAM type: YTN; PAM sequence: CTG
taatcccagctacttgggag

SEQ ID NO: 73433 - DNA, 20 bp, Artificial Sequence
  Description of Artificial Sequence: Synthetic oligonucleotide
  Target: ATXN2; (-) strand; PAM type: YTN; PAM sequence: CTG
ggcgaggtgacgggcacctg

SEQ ID NO: 73434 - DNA, 20 bp, Artificial Sequence
  Description of Artificial Sequence: Synthetic oligonucleotide
  Target: ATXN2; (-) strand; PAM type: YTN; PAM sequence: TTA
gctgggcgaggtgacgggca

SEQ ID NO: 73435 - DNA, 20 bp, Artificial Sequence
  Description of Artificial Sequence: Synthetic oligonucleotide
  Target: ATXN2; (-) strand; PAM type: YTN; PAM sequence: CTA
aaaatacaaaaattagctgg

SEQ ID NO: 73436 - DNA, 20 bp, Artificial Sequence
  Description of Artificial Sequence: Synthetic oligonucleotide
  Target: ATXN2; (-) strand; PAM type: YTN; PAM sequence: CTA
ctaaaaatacaaaaattagc

SEQ ID NO: 73437 - DNA, 20 bp, Artificial Sequence
  Description of Artificial Sequence: Synthetic oligonucleotide
  Target: ATXN2; (-) strand; PAM type: YTN; PAM sequence: CTC
tactaaaaatacaaaaatta

SEQ ID NO: 73438 - DNA, 20 bp, Artificial Sequence
  Description of Artificial Sequence: Synthetic oligonucleotide
  Target: ATXN2; (-) strand; PAM type: YTN; PAM sequence: CTG
gccgacatggctctactaaa

SEQ ID NO: 73439 - DNA, 20 bp, Artificial Sequence
  Description of Artificial Sequence: Synthetic oligonucleotide
  Target: ATXN2; (-) strand; PAM type: YTN; PAM sequence: TTG
gagaccagcctggccgacat

SEQ ID NO: 73440 - DNA, 20 bp, Artificial Sequence
  Description of Artificial Sequence: Synthetic oligonucleotide
  Target: ATXN2; (-) strand; PAM type: YTN; PAM sequence: CTG
aggtaaggagttggagacca

SEQ ID NO: 73441 - DNA, 20 bp, Artificial Sequence
  Description of Artificial Sequence: Synthetic oligonucleotide
  Target: ATXN2; (-) strand; PAM type: YTN; PAM sequence: CTC
aaaaacaaaccagccaggcg

SEQ ID NO: 73442 - DNA, 20 bp, Artificial Sequence
  Description of Artificial Sequence: Synthetic oligonucleotide
  Target: ATXN2; (-) strand; PAM type: YTN; PAM sequence: TTG
tctcaaaaacaaaccagcca

SEQ ID NO: 73443 - DNA, 20 bp, Artificial Sequence
  Description of Artificial Sequence: Synthetic oligonucleotide
  Target: ATXN2; (-) strand; PAM type: YTN; PAM sequence: CTT
gtctcaaaaacaaaccagcc

SEQ ID NO: 73444 - DNA, 20 bp, Artificial Sequence
  Description of Artificial Sequence: Synthetic oligonucleotide
  Target: ATXN2; (-) strand; PAM type: YTN; PAM sequence: CTG
ggtgacaagcaagaccttgt

SEQ ID NO: 73445 - DNA, 20 bp, Artificial Sequence
  Description of Artificial Sequence: Synthetic oligonucleotide
  Target: ATXN2; (-) strand; PAM type: YTN; PAM sequence: CTC
cagctgggtgacaagcaaga

SEQ ID NO: 73446 - DNA, 20 bp, Artificial Sequence
  Description of Artificial Sequence: Synthetic oligonucleotide
  Target: ATXN2; (-) strand; PAM type: YTN; PAM sequence: TTA
tgccacggcactccagctgg

SEQ ID NO: 73447 - DNA, 20 bp, Artificial Sequence
  Description of Artificial Sequence: Synthetic oligonucleotide
  Target: ATXN2; (-) strand; PAM type: YTN; PAM sequence: CTG
tggttatgccacggcactcc

SEQ ID NO: 73448 - DNA, 20 bp, Artificial Sequence
  Description of Artificial Sequence: Synthetic oligonucleotide
  Target: ATXN2; (-) strand; PAM type: YTN; PAM sequence: CTG
cagtgagctgtggttatgcc

SEQ ID NO: 73449 - DNA, 20 bp, Artificial Sequence
  Description of Artificial Sequence: Synthetic oligonucleotide
  Target: ATXN2; (-) strand; PAM type: YTN; PAM sequence: TTG
cagccagtaagtcaaggctg

SEQ ID NO: 73450 - DNA, 20 bp, Artificial Sequence
  Description of Artificial Sequence: Synthetic oligonucleotide
  Target: ATXN2; (-) strand; PAM type: YTN; PAM sequence: CTT
gcagccagtaagtcaaggct

SEQ ID NO: 73451 - DNA, 20 bp, Artificial Sequence
  Description of Artificial Sequence: Synthetic oligonucleotide
  Target: ATXN2; (-) strand; PAM type: YTN; PAM sequence: TTC
acttgcagccagtaagtcaa

SEQ ID NO: 73452 - DNA, 20 bp, Artificial Sequence
  Description of Artificial Sequence: Synthetic oligonucleotide
  Target: ATXN2; (-) strand; PAM type: YTN; PAM sequence: CTG
aggtgagaggttcacttgca

SEQ ID NO: 73453 - DNA, 20 bp, Artificial Sequence
  Description of Artificial Sequence: Synthetic oligonucleotide
  Target: ATXN2; (-) strand; PAM type: YTN; PAM sequence: TTG
gtgggctgaggtgagaggtt

SEQ ID NO: 73454 - DNA, 20 bp, Artificial Sequence
  Description of Artificial Sequence: Synthetic oligonucleotide
  Target: ATXN2; (-) strand; PAM type: YTN; PAM sequence: CTT
ggtgggctgaggtgagaggt

SEQ ID NO: 73455 - DNA, 20 bp, Artificial Sequence
  Description of Artificial Sequence: Synthetic oligonucleotide
  Target: ATXN2; (-) strand; PAM type: YTN; PAM sequence: CTA
cttggtgggctgaggtgaga

SEQ ID NO: 73456 - DNA, 20 bp, Artificial Sequence
  Description of Artificial Sequence: Synthetic oligonucleotide
  Target: ATXN2; (-) strand; PAM type: YTN; PAM sequence: CTG
taaacccagctacttggtgg

SEQ ID NO: 73457 - DNA, 20 bp, Artificial Sequence
  Description of Artificial Sequence: Synthetic oligonucleotide
  Target: ATXN2; (-) strand; PAM type: YTN; PAM sequence: CTC
ctgtaaacccagctacttgg

SEQ ID NO: 73458 - DNA, 20 bp, Artificial Sequence
  Description of Artificial Sequence: Synthetic oligonucleotide
  Target: ATXN2; (-) strand; PAM type: YTN; PAM sequence: TTA
gccgggtgtggtggtgtact

SEQ ID NO: 73459 - DNA, 20 bp, Artificial Sequence
  Description of Artificial Sequence: Synthetic oligonucleotide
  Target: ATXN2; (-) strand; PAM type: YTN; PAM sequence: CTA
caaaaagtacaaaaattagc

SEQ ID NO: 73460 - DNA, 20 bp, Artificial Sequence
  Description of Artificial Sequence: Synthetic oligonucleotide
  Target: ATXN2; (-) strand; PAM type: YTN; PAM sequence: CTC
tacaaaaagtacaaaaatta

SEQ ID NO: 73461 - DNA, 20 bp, Artificial Sequence
  Description of Artificial Sequence: Synthetic oligonucleotide
  Target: ATXN2; (-) strand; PAM type: YTN; PAM sequence: TTG
gcaaaaccccatctctacaa

SEQ ID NO: 73462 - DNA, 20 bp, Artificial Sequence
  Description of Artificial Sequence: Synthetic oligonucleotide
  Target: ATXN2; (-) strand; PAM type: YTN; PAM sequence: CTT
ggcaaaaccccatctctaca

SEQ ID NO: 73463 - DNA, 20 bp, Artificial Sequence
  Description of Artificial Sequence: Synthetic oligonucleotide
  Target: ATXN2; (-) strand; PAM type: YTN; PAM sequence: TTG
gcaacttggcaaaaccccat

SEQ ID NO: 73464 - DNA, 20 bp, Artificial Sequence
  Description of Artificial Sequence: Synthetic oligonucleotide
  Target: ATXN2; (-) strand; PAM type: YTN; PAM sequence: CTT
ggcaacttggcaaaacccca

SEQ ID NO: 73465 - DNA, 20 bp, Artificial Sequence
  Description of Artificial Sequence: Synthetic oligonucleotide
  Target: ATXN2; (-) strand; PAM type: YTN; PAM sequence: CTC
gccttggcaacttggcaaaa

SEQ ID NO: 73466 - DNA, 20 bp, Artificial Sequence
  Description of Artificial Sequence: Synthetic oligonucleotide
  Target: ATXN2; (-) strand; PAM type: YTN; PAM sequence: TTC
aagactcgccttggcaactt

SEQ ID NO: 73467 - DNA, 20 bp, Artificial Sequence
  Description of Artificial Sequence: Synthetic oligonucleotide
  Target: ATXN2; (-) strand; PAM type: YTN; PAM sequence: TTC
aggagttcaagactcgcctt

SEQ ID NO: 73468 - DNA, 20 bp, Artificial Sequence
  Description of Artificial Sequence: Synthetic oligonucleotide
  Target: ATXN2; (-) strand; PAM type: YTN; PAM sequence: CTG
aggcgggaggatgagttcag

SEQ ID NO: 73469 - DNA, 20 bp, Artificial Sequence
  Description of Artificial Sequence: Synthetic oligonucleotide
  Target: ATXN2; (-) strand; PAM type: YTN; PAM sequence: TTG
gaggctgaggcgggaggatg

SEQ ID NO: 73470 - DNA, 20 bp, Artificial Sequence
  Description of Artificial Sequence: Synthetic oligonucleotide
  Target: ATXN2; (-) strand; PAM type: YTN; PAM sequence: TTT
ggaggctgaggcgggaggat

SEQ ID NO: 73471 - DNA, 20 bp, Artificial Sequence
  Description of Artificial Sequence: Synthetic oligonucleotide
  Target: ATXN2; (-) strand; PAM type: YTN; PAM sequence: TTT
tggaggctgaggcgggagga

SEQ ID NO: 73472 - DNA, 20 bp, Artificial Sequence
  Description of Artificial Sequence: Synthetic oligonucleotide
  Target: ATXN2; (-) strand; PAM type: YTN; PAM sequence: CTT
ttggaggctgaggcgggagg

SEQ ID NO: 73473 - DNA, 20 bp, Artificial Sequence
  Description of Artificial Sequence: Synthetic oligonucleotide
  Target: ATXN2; (-) strand; PAM type: YTN; PAM sequence: TTC
aacacttttggaggctgagg

SEQ ID NO: 73474 - DNA, 20 bp, Artificial Sequence
  Description of Artificial Sequence: Synthetic oligonucleotide
  Target: ATXN2; (-) strand; PAM type: YTN; PAM sequence: TTT
caacacttttggaggctgag

SEQ ID NO: 73475 - DNA, 20 bp, Artificial Sequence
  Description of Artificial Sequence: Synthetic oligonucleotide
  Target: ATXN2; (-) strand; PAM type: YTN; PAM sequence: CTG
taatttcaacacttttggag

SEQ ID NO: 73476 - DNA, 20 bp, Artificial Sequence
  Description of Artificial Sequence: Synthetic oligonucleotide
  Target: ATXN2; (-) strand; PAM type: YTN; PAM sequence: CTC
atgcctgtaatttcaacact

SEQ ID NO: 73477 - DNA, 20 bp, Artificial Sequence
  Description of Artificial Sequence: Synthetic oligonucleotide
  Target: ATXN2; (-) strand; PAM type: YTN; PAM sequence: TTC
aagatacatgggagcagaat

SEQ ID NO: 73478 - DNA, 20 bp, Artificial Sequence
  Description of Artificial Sequence: Synthetic oligonucleotide
  Target: ATXN2; (-) strand; PAM type: YTN; PAM sequence: TTG
attcaagatacatgggagca

SEQ ID NO: 73479 - DNA, 20 bp, Artificial Sequence
  Description of Artificial Sequence: Synthetic oligonucleotide
  Target: ATXN2; (-) strand; PAM type: YTN; PAM sequence: CTA
gtaagagtaaggttgattca

SEQ ID NO: 73480 - DNA, 20 bp, Artificial Sequence
  Description of Artificial Sequence: Synthetic oligonucleotide
  Target: ATXN2; (-) strand; PAM type: YTN; PAM sequence: CTG
tgtggtactagtaagagtaa

SEQ ID NO: 73481 - DNA, 20 bp, Artificial Sequence
  Description of Artificial Sequence: Synthetic oligonucleotide
  Target: ATXN2; (-) strand; PAM type: YTN; PAM sequence: TTG
gacaaacgataaaaaaatac

SEQ ID NO: 73482 - DNA, 20 bp, Artificial Sequence
  Description of Artificial Sequence: Synthetic oligonucleotide
  Target: ATXN2; (-) strand; PAM type: YTN; PAM sequence: TTT
ggacaaacgataaaaaaata

SEQ ID NO: 73483 - DNA, 20 bp, Artificial Sequence
  Description of Artificial Sequence: Synthetic oligonucleotide
  Target: ATXN2; (-) strand; PAM type: YTN; PAM sequence: TTA
tttggacaaacgataaaaaa

SEQ ID NO: 73484 - DNA, 20 bp, Artificial Sequence
  Description of Artificial Sequence: Synthetic oligonucleotide
  Target: ATXN2; (-) strand; PAM type: YTN; PAM sequence: TTT
atttggacaaacgataaaaa

SEQ ID NO: 73485 - DNA, 20 bp, Artificial Sequence
  Description of Artificial Sequence: Synthetic oligonucleotide
  Target: ATXN2; (-) strand; PAM type: YTN; PAM sequence: TTT
tatttggacaaacgataaaa

SEQ ID NO: 73486 - DNA, 20 bp, Artificial Sequence
  Description of Artificial Sequence: Synthetic oligonucleotide
  Target: ATXN2; (-) strand; PAM type: YTN; PAM sequence: CTA
gcataaaatagaattttatt

SEQ ID NO: 73487 - DNA, 20 bp, Artificial Sequence
  Description of Artificial Sequence: Synthetic oligonucleotide
  Target: ATXN2; (-) strand; PAM type: YTN; PAM sequence: CTC
tagcataaaatagaatttta

SEQ ID NO: 73488 - DNA, 20 bp, Artificial Sequence
  Description of Artificial Sequence: Synthetic oligonucleotide
  Target: ATXN2; (-) strand; PAM type: YTN; PAM sequence: TTA
aatataaaaaaaataaaaac

SEQ ID NO: 73489 - DNA, 20 bp, Artificial Sequence
  Description of Artificial Sequence: Synthetic oligonucleotide
  Target: ATXN2; (-) strand; PAM type: YTN; PAM sequence: TTA
ttaaatataaaaaaaataaa

SEQ ID NO: 73490 - DNA, 20 bp, Artificial Sequence
  Description of Artificial Sequence: Synthetic oligonucleotide
  Target: ATXN2; (-) strand; PAM type: YTN; PAM sequence: TTT
attaaatataaaaaaaataa

SEQ ID NO: 73491 - DNA, 20 bp, Artificial Sequence
  Description of Artificial Sequence: Synthetic oligonucleotide
  Target: ATXN2; (-) strand; PAM type: YTN; PAM sequence: TTC
atttattaaatataaaaaaa

SEQ ID NO: 73492 - DNA, 20 bp, Artificial Sequence
  Description of Artificial Sequence: Synthetic oligonucleotide
  Target: ATXN2; (-) strand; PAM type: YTN; PAM sequence: CTT
catttattaaatataaaaaa

SEQ ID NO: 73493 - DNA, 20 bp, Artificial Sequence
  Description of Artificial Sequence: Synthetic oligonucleotide
  Target: ATXN2; (-) strand; PAM type: YTN; PAM sequence: TTG
ccaaagtcagaacaataact

SEQ ID NO: 73494 - DNA, 20 bp, Artificial Sequence
  Description of Artificial Sequence: Synthetic oligonucleotide
  Target: ATXN2; (-) strand; PAM type: YTN; PAM sequence: TTT
gccaaagtcagaacaataac

SEQ ID NO: 73495 - DNA, 20 bp, Artificial Sequence
  Description of Artificial Sequence: Synthetic oligonucleotide
  Target: ATXN2; (-) strand; PAM type: YTN; PAM sequence: CTA
tcatgtttgccaaagtcaga

SEQ ID NO: 73496 - DNA, 20 bp, Artificial Sequence
  Description of Artificial Sequence: Synthetic oligonucleotide
  Target: ATXN2; (-) strand; PAM type: YTN; PAM sequence: CTA
ccctatcatgtttgccaaag

SEQ ID NO: 73497 - DNA, 20 bp, Artificial Sequence
  Description of Artificial Sequence: Synthetic oligonucleotide
  Target: ATXN2; (-) strand; PAM type: YTN; PAM sequence: CTC
taccctatcatgtttgccaa

SEQ ID NO: 73498 - DNA, 20 bp, Artificial Sequence
  Description of Artificial Sequence: Synthetic oligonucleotide
  Target: ATXN2; (-) strand; PAM type: YTN; PAM sequence: TTC
tctaccctatcatgtttgcc

SEQ ID NO: 73499 - DNA, 20 bp, Artificial Sequence
  Description of Artificial Sequence: Synthetic oligonucleotide
  Target: ATXN2; (-) strand; PAM type: YTN; PAM sequence: TTA
gagtatatagaaattctcta

SEQ ID NO: 73500 - DNA, 20 bp, Artificial Sequence
  Description of Artificial Sequence: Synthetic oligonucleotide
  Target: ATXN2; (-) strand; PAM type: YTN; PAM sequence: TTT
agagtatatagaaattctct

SEQ ID NO: 73501 - DNA, 20 bp, Artificial Sequence
  Description of Artificial Sequence: Synthetic oligonucleotide
  Target: ATXN2; (-) strand; PAM type: YTN; PAM sequence: TTT
tagagtatatagaaattctc

SEQ ID NO: 73502 - DNA, 20 bp, Artificial Sequence
  Description of Artificial Sequence: Synthetic oligonucleotide
  Target: ATXN2; (-) strand; PAM type: YTN; PAM sequence: TTT
ttagagtatatagaaattct

SEQ ID NO: 73503 - DNA, 20 bp, Artificial Sequence
  Description of Artificial Sequence: Synthetic oligonucleotide
  Target: ATXN2; (-) strand; PAM type: YTN; PAM sequence: TTA
taatttttagagtatataga

SEQ ID NO: 73504 - DNA, 20 bp, Artificial Sequence
  Description of Artificial Sequence: Synthetic oligonucleotide
  Target: ATXN2; (-) strand; PAM type: YTN; PAM sequence: TTT
ataatttttagagtatatag

SEQ ID NO: 73505 - DNA, 20 bp, Artificial Sequence
  Description of Artificial Sequence: Synthetic oligonucleotide
  Target: ATXN2; (-) strand; PAM type: YTN; PAM sequence: TTT
tataatttttagagtatata

SEQ ID NO: 73506 - DNA, 20 bp, Artificial Sequence
  Description of Artificial Sequence: Synthetic oligonucleotide
  Target: ATXN2; (-) strand; PAM type: YTN; PAM sequence: TTA
catgttttataatttttaga

SEQ ID NO: 73507 - DNA, 20 bp, Artificial Sequence
  Description of Artificial Sequence: Synthetic oligonucleotide
  Target: ATXN2; (-) strand; PAM type: YTN; PAM sequence: TTA
aagttacatgttttataatt

SEQ ID NO: 73508 - DNA, 20 bp, Artificial Sequence
  Description of Artificial Sequence: Synthetic oligonucleotide
  Target: ATXN2; (-) strand; PAM type: YTN; PAM sequence: TTA
ttaaagttacatgttttata

SEQ ID NO: 73509 - DNA, 20 bp, Artificial Sequence
  Description of Artificial Sequence: Synthetic oligonucleotide
  Target: ATXN2; (-) strand; PAM type: YTN; PAM sequence: TTT
attaaagttacatgttttat

SEQ ID NO: 73510 - DNA, 20 bp, Artificial Sequence
  Description of Artificial Sequence: Synthetic oligonucleotide
  Target: ATXN2; (-) strand; PAM type: YTN; PAM sequence: TTC
catttattaaagttacatgt

SEQ ID NO: 73511 - DNA, 20 bp, Artificial Sequence
  Description of Artificial Sequence: Synthetic oligonucleotide
  Target: ATXN2; (-) strand; PAM type: YTN; PAM sequence: CTT
ccatttattaaagttacatg

SEQ ID NO: 73512 - DNA, 20 bp, Artificial Sequence
  Description of Artificial Sequence: Synthetic oligonucleotide
  Target: ATXN2; (-) strand; PAM type: YTN; PAM sequence: TTA
agatatggtcatcttccatt

SEQ ID NO: 73513 - DNA, 20 bp, Artificial Sequence
  Description of Artificial Sequence: Synthetic oligonucleotide
  Target: ATXN2; (-) strand; PAM type: YTN; PAM sequence: TTA
ttaagatatggtcatcttcc

SEQ ID NO: 73514 - DNA, 20 bp, Artificial Sequence
  Description of Artificial Sequence: Synthetic oligonucleotide
  Target: ATXN2; (-) strand; PAM type: YTN; PAM sequence: TTT
attaagatatggtcatcttc

SEQ ID NO: 73515 - DNA, 20 bp, Artificial Sequence
  Description of Artificial Sequence: Synthetic oligonucleotide
  Target: ATXN2; (-) strand; PAM type: YTN; PAM sequence: TTA
catgtttattaagatatggt

SEQ ID NO: 73516 - DNA, 20 bp, Artificial Sequence
  Description of Artificial Sequence: Synthetic oligonucleotide
  Target: ATXN2; (-) strand; PAM type: YTN; PAM sequence: TTC
gtggtacacagtagaaaagc

SEQ ID NO: 73517 - DNA, 20 bp, Artificial Sequence
  Description of Artificial Sequence: Synthetic oligonucleotide
  Target: ATXN2; (-) strand; PAM type: YTN; PAM sequence: CTA
aacagaatagttcgtggtac

SEQ ID NO: 73518 - DNA, 20 bp, Artificial Sequence
  Description of Artificial Sequence: Synthetic oligonucleotide
  Target: ATXN2; (-) strand; PAM type: YTN; PAM sequence: CTA
tgtaatggaaagctaaacag

SEQ ID NO: 73519 - DNA, 20 bp, Artificial Sequence
  Description of Artificial Sequence: Synthetic oligonucleotide
  Target: ATXN2; (-) strand; PAM type: YTN; PAM sequence: TTA
aaagaaagaaacaggtggaa

SEQ ID NO: 73520 - DNA, 20 bp, Artificial Sequence
  Description of Artificial Sequence: Synthetic oligonucleotide
  Target: ATXN2; (-) strand; PAM type: YTN; PAM sequence: TTG
agattaaaagaaagaaacag

SEQ ID NO: 73521 - DNA, 20 bp, Artificial Sequence
  Description of Artificial Sequence: Synthetic oligonucleotide
  Target: ATXN2; (-) strand; PAM type: YTN; PAM sequence: TTA
ttgagattaaaagaaagaaa

SEQ ID NO: 73522 - DNA, 20 bp, Artificial Sequence
  Description of Artificial Sequence: Synthetic oligonucleotide
  Target: ATXN2; (-) strand; PAM type: YTN; PAM sequence: TTG
aggccagtatggaggcagta

SEQ ID NO: 73523 - DNA, 20 bp, Artificial Sequence
  Description of Artificial Sequence: Synthetic oligonucleotide
  Target: ATXN2; (-) strand; PAM type: YTN; PAM sequence: TTA
ttgaggccagtatggaggca

SEQ ID NO: 73524 - DNA, 20 bp, Artificial Sequence
  Description of Artificial Sequence: Synthetic oligonucleotide
  Target: ATXN2; (-) strand; PAM type: YTN; PAM sequence: CTT
attgaggccagtatggaggc

SEQ ID NO: 73525 - DNA, 20 bp, Artificial Sequence
  Description of Artificial Sequence: Synthetic oligonucleotide
  Target: ATXN2; (-) strand; PAM type: YTN; PAM sequence: CTG
gagagtggcacttattgagg

SEQ ID NO: 73526 - DNA, 20 bp, Artificial Sequence
  Description of Artificial Sequence: Synthetic oligonucleotide
  Target: ATXN2; (-) strand; PAM type: YTN; PAM sequence: CTG
gggccaagcagtaactggag

SEQ ID NO: 73527 - DNA, 20 bp, Artificial Sequence
  Description of Artificial Sequence: Synthetic oligonucleotide
  Target: ATXN2; (-) strand; PAM type: YTN; PAM sequence: TTC
tggggccaagcagtaactgg

SEQ ID NO: 73528 - DNA, 20 bp, Artificial Sequence
  Description of Artificial Sequence: Synthetic oligonucleotide
  Target: ATXN2; (-) strand; PAM type: YTN; PAM sequence: TTC
attctggggccaagcagtaa

SEQ ID NO: 73529 - DNA, 20 bp, Artificial Sequence
  Description of Artificial Sequence: Synthetic oligonucleotide
  Target: ATXN2; (-) strand; PAM type: YTN; PAM sequence: TTA
agacacagatatgtgttcat

SEQ ID NO: 73530 - DNA, 20 bp, Artificial Sequence
  Description of Artificial Sequence: Synthetic oligonucleotide
  Target: ATXN2; (-) strand; PAM type: YTN; PAM sequence: TTA
ttaagacacagatatgtgtt

SEQ ID NO: 73531 - DNA, 20 bp, Artificial Sequence
  Description of Artificial Sequence: Synthetic oligonucleotide
  Target: ATXN2; (-) strand; PAM type: YTN; PAM sequence: TTT
attaagacacagatatgtgt

SEQ ID NO: 73532 - DNA, 20 bp, Artificial Sequence
  Description of Artificial Sequence: Synthetic oligonucleotide
  Target: ATXN2; (-) strand; PAM type: YTN; PAM sequence: CTG
tggtttattaagacacagat

SEQ ID NO: 73533 - DNA, 20 bp, Artificial Sequence
  Description of Artificial Sequence: Synthetic oligonucleotide
  Target: ATXN2; (-) strand; PAM type: YTN; PAM sequence: TTG
ctgtggtttattaagacaca

SEQ ID NO: 73534 - DNA, 20 bp, Artificial Sequence
  Description of Artificial Sequence: Synthetic oligonucleotide
  Target: ATXN2; (-) strand; PAM type: YTN; PAM sequence: TTT
gctgtggtttattaagacac

SEQ ID NO: 73535 - DNA, 20 bp, Artificial Sequence
  Description of Artificial Sequence: Synthetic oligonucleotide
  Target: ATXN2; (-) strand; PAM type: YTN; PAM sequence: CTT
tgctgtggtttattaagaca

SEQ ID NO: 73536 - DNA, 20 bp, Artificial Sequence
  Description of Artificial Sequence: Synthetic oligonucleotide
  Target: ATXN2; (-) strand; PAM type: YTN; PAM sequence: CTC
aactttgctgtggtttatta

SEQ ID NO: 73537 - DNA, 20 bp, Artificial Sequence
  Description of Artificial Sequence: Synthetic oligonucleotide
  Target: ATXN2; (-) strand; PAM type: YTN; PAM sequence: TTA
cggcctcaactttgctgtgg

SEQ ID NO: 73538 - DNA, 20 bp, Artificial Sequence
  Description of Artificial Sequence: Synthetic oligonucleotide
  Target: ATXN2; (-) strand; PAM type: YTN; PAM sequence: TTT
acggcctcaactttgctgtg

SEQ ID NO: 73539 - DNA, 20 bp, Artificial Sequence
  Description of Artificial Sequence: Synthetic oligonucleotide
  Target: ATXN2; (-) strand; PAM type: YTN; PAM sequence: CTG
tttacggcctcaactttgct

SEQ ID NO: 73540 - DNA, 20 bp, Artificial Sequence
  Description of Artificial Sequence: Synthetic oligonucleotide
  Target: ATXN2; (-) strand; PAM type: YTN; PAM sequence: TTA
gaaaagctgtttacggcctc

SEQ ID NO: 73541 - DNA, 20 bp, Artificial Sequence
  Description of Artificial Sequence: Synthetic oligonucleotide
  Target: ATXN2; (-) strand; PAM type: YTN; PAM sequence: CTG
aacggcgtgacattagaaaa

SEQ ID NO: 73542 - DNA, 20 bp, Artificial Sequence
  Description of Artificial Sequence: Synthetic oligonucleotide
  Target: ATXN2; (-) strand; PAM type: YTN; PAM sequence: TTC
tgaacggcgtgacattagaa

SEQ ID NO: 73543 - DNA, 20 bp, Artificial Sequence
  Description of Artificial Sequence: Synthetic oligonucleotide
  Target: ATXN2; (-) strand; PAM type: YTN; PAM sequence: CTT
ctgaacggcgtgacattaga

SEQ ID NO: 73544 - DNA, 20 bp, Artificial Sequence
  Description of Artificial Sequence: Synthetic oligonucleotide
  Target: ATXN2; (-) strand; PAM type: YTN; PAM sequence: CTC
ttctgaacggcgtgacatta

SEQ ID NO: 73545 - DNA, 20 bp, Artificial Sequence
  Description of Artificial Sequence: Synthetic oligonucleotide
  Target: ATXN2; (-) strand; PAM type: YTN; PAM sequence: TTG
atagtgtatcagtaacagag

SEQ ID NO: 73546 - DNA, 20 bp, Artificial Sequence
  Description of Artificial Sequence: Synthetic oligonucleotide
  Target: ATXN2; (-) strand; PAM type: YTN; PAM sequence: CTT
gatagtgtatcagtaacaga

SEQ ID NO: 73547 - DNA, 20 bp, Artificial Sequence
  Description of Artificial Sequence: Synthetic oligonucleotide
  Target: ATXN2; (-) strand; PAM type: YTN; PAM sequence: TTG
gtcttgatagtgtatcagta

SEQ ID NO: 73548 - DNA, 20 bp, Artificial Sequence
  Description of Artificial Sequence: Synthetic oligonucleotide
  Target: ATXN2; (-) strand; PAM type: YTN; PAM sequence: TTT
ggtcttgatagtgtatcagt

SEQ ID NO: 73549 - DNA, 20 bp, Artificial Sequence
  Description of Artificial Sequence: Synthetic oligonucleotide
  Target: ATXN2; (-) strand; PAM type: YTN; PAM sequence: TTT
tggtcttgatagtgtatcag

SEQ ID NO: 73550 - DNA, 20 bp, Artificial Sequence
  Description of Artificial Sequence: Synthetic oligonucleotide
  Target: ATXN2; (-) strand; PAM type: YTN; PAM sequence: TTT
ttggtcttgatagtgtatca

SEQ ID NO: 73551 - DNA, 20 bp, Artificial Sequence
  Description of Artificial Sequence: Synthetic oligonucleotide
  Target: ATXN2; (-) strand; PAM type: YTN; PAM sequence: CTT
tttggtcttgatagtgtatc

SEQ ID NO: 73552 - DNA, 20 bp, Artificial Sequence
  Description of Artificial Sequence: Synthetic oligonucleotide
  Target: ATXN2; (-) strand; PAM type: YTN; PAM sequence: TTG
tctttttggtcttgatagtg

SEQ ID NO: 73553 - DNA, 20 bp, Artificial Sequence
  Description of Artificial Sequence: Synthetic oligonucleotide
  Target: ATXN2; (-) strand; PAM type: YTN; PAM sequence: CTC
atatggttgtctttttggtc

SEQ ID NO: 73554 - DNA, 20 bp, Artificial Sequence
  Description of Artificial Sequence: Synthetic oligonucleotide
  Target: ATXN2; (-) strand; PAM type: YTN; PAM sequence: TTC
tcatatggttgtctttttgg

SEQ ID NO: 73555 - DNA, 20 bp, Artificial Sequence
  Description of Artificial Sequence: Synthetic oligonucleotide
  Target: ATXN2; (-) strand; PAM type: YTN; PAM sequence: TTG
tgttctcatatggttgtctt

SEQ ID NO: 73556 - DNA, 20 bp, Artificial Sequence
  Description of Artificial Sequence: Synthetic oligonucleotide
  Target: ATXN2; (-) strand; PAM type: YTN; PAM sequence: CTG
ttgtgttctcatatggttgt

SEQ ID NO: 73557 - DNA, 20 bp, Artificial Sequence
  Description of Artificial Sequence: Synthetic oligonucleotide
  Target: ATXN2; (-) strand; PAM type: YTN; PAM sequence: CTG
gtgtgctgttgtgttctcat

SEQ ID NO: 73558 - DNA, 20 bp, Artificial Sequence
  Description of Artificial Sequence: Synthetic oligonucleotide
  Target: ATXN2; (-) strand; PAM type: YTN; PAM sequence: TTC
tggtgtgctgttgtgttctc

SEQ ID NO: 73559 - DNA, 20 bp, Artificial Sequence
  Description of Artificial Sequence: Synthetic oligonucleotide
  Target: ATXN2; (-) strand; PAM type: YTN; PAM sequence: TTA
ttctggtgtgctgttgtgtt

SEQ ID NO: 73560 - DNA, 20 bp, Artificial Sequence
  Description of Artificial Sequence: Synthetic oligonucleotide
  Target: ATXN2; (-) strand; PAM type: YTN; PAM sequence: TTT
attctggtgtgctgttgtgt

SEQ ID NO: 73561 - DNA, 20 bp, Artificial Sequence
  Description of Artificial Sequence: Synthetic oligonucleotide
  Target: ATXN2; (-) strand; PAM type: YTN; PAM sequence: TTT
tattctggtgtgctgttgtg

SEQ ID NO: 73562 - DNA, 20 bp, Artificial Sequence
  Description of Artificial Sequence: Synthetic oligonucleotide
  Target: ATXN2; (-) strand; PAM type: YTN; PAM sequence: TTG
ttttattctggtgtgctgtt

SEQ ID NO: 73563 - DNA, 20 bp, Artificial Sequence
  Description of Artificial Sequence: Synthetic oligonucleotide
  Target: ATXN2; (-) strand; PAM type: YTN; PAM sequence: CTA
cagattgttttattctggtg

SEQ ID NO: 73564 - DNA, 20 bp, Artificial Sequence
  Description of Artificial Sequence: Synthetic oligonucleotide
  Target: ATXN2; (-) strand; PAM type: YTN; PAM sequence: TTC
tacagattgttttattctgg

SEQ ID NO: 73565 - DNA, 20 bp, Artificial Sequence
  Description of Artificial Sequence: Synthetic oligonucleotide
  Target: ATXN2; (-) strand; PAM type: YTN; PAM sequence: TTA
gagaacagtgagaaataaaa

SEQ ID NO: 73566 - DNA, 20 bp, Artificial Sequence
  Description of Artificial Sequence: Synthetic oligonucleotide
  Target: ATXN2; (-) strand; PAM type: YTN; PAM sequence: TTA
atgtgtaattagagaacagt

SEQ ID NO: 73567 - DNA, 20 bp, Artificial Sequence
  Description of Artificial Sequence: Synthetic oligonucleotide
  Target: ATXN2; (-) strand; PAM type: YTN; PAM sequence: TTG
gagtgttaatgtgtaattag

SEQ ID NO: 73568 - DNA, 20 bp, Artificial Sequence
  Description of Artificial Sequence: Synthetic oligonucleotide
  Target: ATXN2; (-) strand; PAM type: YTN; PAM sequence: TTG
gaagaagttggagtgttaat

SEQ ID NO: 73569 - DNA, 20 bp, Artificial Sequence
  Description of Artificial Sequence: Synthetic oligonucleotide
  Target: ATXN2; (-) strand; PAM type: YTN; PAM sequence: TTA
gtagttggaagaagttggag

SEQ ID NO: 73570 - DNA, 20 bp, Artificial Sequence
  Description of Artificial Sequence: Synthetic oligonucleotide
  Target: ATXN2; (-) strand; PAM type: YTN; PAM sequence: TTT
agtagttggaagaagttgga

SEQ ID NO: 73571 - DNA, 20 bp, Artificial Sequence
  Description of Artificial Sequence: Synthetic oligonucleotide
  Target: ATXN2; (-) strand; PAM type: YTN; PAM sequence: TTT
tagtagttggaagaagttgg

SEQ ID NO: 73572 - DNA, 20 bp, Artificial Sequence
  Description of Artificial Sequence: Synthetic oligonucleotide
  Target: ATXN2; (-) strand; PAM type: YTN; PAM sequence: TTG
tgtagattttagtagttgga

SEQ ID NO: 73573 - DNA, 20 bp, Artificial Sequence
  Description of Artificial Sequence: Synthetic oligonucleotide
  Target: ATXN2; (-) strand; PAM type: YTN; PAM sequence: CTC
aaaaataaaaaataaaagaa

SEQ ID NO: 73574 - DNA, 20 bp, Artificial Sequence
  Description of Artificial Sequence: Synthetic oligonucleotide
  Target: ATXN2; (-) strand; PAM type: YTN; PAM sequence: CTC
catctcaaaaataaaaaata

SEQ ID NO: 73575 - DNA, 20 bp, Artificial Sequence
  Description of Artificial Sequence: Synthetic oligonucleotide
  Target: ATXN2; (-) strand; PAM type: YTN; PAM sequence: CTG
agtgacagagcgagactcca

SEQ ID NO: 73576 - DNA, 20 bp, Artificial Sequence
  Description of Artificial Sequence: Synthetic oligonucleotide
  Target: ATXN2; (-) strand; PAM type: YTN; PAM sequence: CTC
cagcctgagtgacagagcga

SEQ ID NO: 73577 - DNA, 20 bp, Artificial Sequence
  Description of Artificial Sequence: Synthetic oligonucleotide
  Target: ATXN2; (-) strand; PAM type: YTN; PAM sequence: CTG
cactccagcctgagtgacag

SEQ ID NO: 73578 - DNA, 20 bp, Artificial Sequence
  Description of Artificial Sequence: Synthetic oligonucleotide
  Target: ATXN2; (-) strand; PAM type: YTN; PAM sequence: CTG
agatcgtaccactgcactcc

SEQ ID NO: 73579 - DNA, 20 bp, Artificial Sequence
  Description of Artificial Sequence: Synthetic oligonucleotide
  Target: ATXN2; (-) strand; PAM type: YTN; PAM sequence: TTG
caatgagctgagatcgtacc

SEQ ID NO: 73580 - DNA, 20 bp, Artificial Sequence
  Description of Artificial Sequence: Synthetic oligonucleotide
  Target: ATXN2; (-) strand; PAM type: YTN; PAM sequence: TTG
aacccagaaggtggaggttg

SEQ ID NO: 73581 - DNA, 20 bp, Artificial Sequence
  Description of Artificial Sequence: Synthetic oligonucleotide
  Target: ATXN2; (-) strand; PAM type: YTN; PAM sequence: TTT
gaacccagaaggtggaggtt

SEQ ID NO: 73582 - DNA, 20 bp, Artificial Sequence
  Description of Artificial Sequence: Synthetic oligonucleotide
  Target: ATXN2; (-) strand; PAM type: YTN; PAM sequence: CTG
agacaggagaatcatttgaa

SEQ ID NO: 73583 - DNA, 20 bp, Artificial Sequence
  Description of Artificial Sequence: Synthetic oligonucleotide
  Target: ATXN2; (-) strand; PAM type: YTN; PAM sequence: CTC
gggaggctgagacaggagaa

SEQ ID NO: 73584 - DNA, 20 bp, Artificial Sequence
  Description of Artificial Sequence: Synthetic oligonucleotide
  Target: ATXN2; (-) strand; PAM type: YTN; PAM sequence: CTA
ctcgggaggctgagacagga

SEQ ID NO: 73585 - DNA, 20 bp, Artificial Sequence
  Description of Artificial Sequence: Synthetic oligonucleotide
  Target: ATXN2; (-) strand; PAM type: YTN; PAM sequence: CTA
atcccagctactcgggaggc

SEQ ID NO: 73586 - DNA, 20 bp, Artificial Sequence
  Description of Artificial Sequence: Synthetic oligonucleotide
  Target: ATXN2; (-) strand; PAM type: YTN; PAM sequence: CTC
taatcccagctactcgggag

SEQ ID NO: 73587 - DNA, 20 bp, Artificial Sequence
  Description of Artificial Sequence: Synthetic oligonucleotide
  Target: ATXN2; (-) strand; PAM type: YTN; PAM sequence: CTG
gtgtgcgcctctaatcccag

SEQ ID NO: 73588 - DNA, 20 bp, Artificial Sequence
  Description of Artificial Sequence: Synthetic oligonucleotide
  Target: ATXN2; (-) strand; PAM type: YTN; PAM sequence: CTG
gtgtgctggtgtgcgcctct

SEQ ID NO: 73589 - DNA, 20 bp, Artificial Sequence
  Description of Artificial Sequence: Synthetic oligonucleotide
  Target: ATXN2; (-) strand; PAM type: YTN; PAM sequence: TTA
gcctggtgtgctggtgtgcg

SEQ ID NO: 73590 - DNA, 20 bp, Artificial Sequence
  Description of Artificial Sequence: Synthetic oligonucleotide
  Target: ATXN2; (-) strand; PAM type: YTN; PAM sequence: TTA
caaaaaaaattagcctggtg

SEQ ID NO: 73591 - DNA, 20 bp, Artificial Sequence
  Description of Artificial Sequence: Synthetic oligonucleotide
  Target: ATXN2; (-) strand; PAM type: YTN; PAM sequence: TTT
acaaaaaaaattagcctggt

SEQ ID NO: 73592 - DNA, 20 bp, Artificial Sequence
  Description of Artificial Sequence: Synthetic oligonucleotide
  Target: ATXN2; (-) strand; PAM type: YTN; PAM sequence: TTT
tacaaaaaaaattagcctgg

SEQ ID NO: 73593 - DNA, 20 bp, Artificial Sequence
  Description of Artificial Sequence: Synthetic oligonucleotide
  Target: ATXN2; (-) strand; PAM type: YTN; PAM sequence: CTA
gattttacaaaaaaaattag

SEQ ID NO: 73594 - DNA, 20 bp, Artificial Sequence
  Description of Artificial Sequence: Synthetic oligonucleotide
  Target: ATXN2; (-) strand; PAM type: YTN; PAM sequence: TTG
tctagattttacaaaaaaaa

SEQ ID NO: 73595 - DNA, 20 bp, Artificial Sequence
  Description of Artificial Sequence: Synthetic oligonucleotide
  Target: ATXN2; (-) strand; PAM type: YTN; PAM sequence: TTG
aatatcaaatggagtcagcg

SEQ ID NO: 73596 - DNA, 20 bp, Artificial Sequence
  Description of Artificial Sequence: Synthetic oligonucleotide
  Target: ATXN2; (-) strand; PAM type: YTN; PAM sequence: CTG
catgacattgaatatcaaat

SEQ ID NO: 73597 - DNA, 20 bp, Artificial Sequence
  Description of Artificial Sequence: Synthetic oligonucleotide
  Target: ATXN2; (-) strand; PAM type: YTN; PAM sequence: TTG
tactgcatgacattgaatat

SEQ ID NO: 73598 - DNA, 20 bp, Artificial Sequence
  Description of Artificial Sequence: Synthetic oligonucleotide
  Target: ATXN2; (-) strand; PAM type: YTN; PAM sequence: TTC
aagaaaaatggaatgttgta

SEQ ID NO: 73599 - DNA, 20 bp, Artificial Sequence
  Description of Artificial Sequence: Synthetic oligonucleotide
  Target: ATXN2; (-) strand; PAM type: YTN; PAM sequence: TTA
gagatagcaaagcacgtgaa

SEQ ID NO: 73600 - DNA, 20 bp, Artificial Sequence
  Description of Artificial Sequence: Synthetic oligonucleotide
  Target: ATXN2; (-) strand; PAM type: YTN; PAM sequence: TTA
gagttagagatagcaaagca

SEQ ID NO: 73601 - DNA, 20 bp, Artificial Sequence
  Description of Artificial Sequence: Synthetic oligonucleotide
  Target: ATXN2; (-) strand; PAM type: YTN; PAM sequence: TTT
agagttagagatagcaaagc

SEQ ID NO: 73602 - DNA, 20 bp, Artificial Sequence
  Description of Artificial Sequence: Synthetic oligonucleotide
  Target: ATXN2; (-) strand; PAM type: YTN; PAM sequence: TTT
tagagttagagatagcaaag

SEQ ID NO: 73603 - DNA, 20 bp, Artificial Sequence
  Description of Artificial Sequence: Synthetic oligonucleotide
  Target: ATXN2; (-) strand; PAM type: YTN; PAM sequence: TTT
ttagagttagagatagcaaa

SEQ ID NO: 73604 - DNA, 20 bp, Artificial Sequence
  Description of Artificial Sequence: Synthetic oligonucleotide
  Target: ATXN2; (-) strand; PAM type: YTN; PAM sequence: CTA
agcatttttagagttagaga

SEQ ID NO: 73605 - DNA, 20 bp, Artificial Sequence
  Description of Artificial Sequence: Synthetic oligonucleotide
  Target: ATXN2; (-) strand; PAM type: YTN; PAM sequence: TTC
taagcatttttagagttaga

SEQ ID NO: 73606 - DNA, 20 bp, Artificial Sequence
  Description of Artificial Sequence: Synthetic oligonucleotide
  Target: ATXN2; (-) strand; PAM type: YTN; PAM sequence: CTA
ttctaagcatttttagagtt

SEQ ID NO: 73607 - DNA, 20 bp, Artificial Sequence
  Description of Artificial Sequence: Synthetic oligonucleotide
  Target: ATXN2; (-) strand; PAM type: YTN; PAM sequence: CTC
tattctaagcatttttagag

SEQ ID NO: 73608 - DNA, 20 bp, Artificial Sequence
  Description of Artificial Sequence: Synthetic oligonucleotide
  Target: ATXN2; (-) strand; PAM type: YTN; PAM sequence: TTC
atatacgccatgtactctat

SEQ ID NO: 73609 - DNA, 20 bp, Artificial Sequence
  Description of Artificial Sequence: Synthetic oligonucleotide
  Target: ATXN2; (-) strand; PAM type: YTN; PAM sequence: TTC
agggagttcatatacgccat

SEQ ID NO: 73610 - DNA, 20 bp, Artificial Sequence
  Description of Artificial Sequence: Synthetic oligonucleotide
  Target: ATXN2; (-) strand; PAM type: YTN; PAM sequence: CTT
cagggagttcatatacgcca

SEQ ID NO: 73611 - DNA, 20 bp, Artificial Sequence
  Description of Artificial Sequence: Synthetic oligonucleotide
  Target: ATXN2; (-) strand; PAM type: YTN; PAM sequence: TTC
ttcagggagttcatatacgc

SEQ ID NO: 73612 - DNA, 20 bp, Artificial Sequence
  Description of Artificial Sequence: Synthetic oligonucleotide
  Target: ATXN2; (-) strand; PAM type: YTN; PAM sequence: TTT
cttcagggagttcatatacg

SEQ ID NO: 73613 - DNA, 20 bp, Artificial Sequence
  Description of Artificial Sequence: Synthetic oligonucleotide
  Target: ATXN2; (-) strand; PAM type: YTN; PAM sequence: TTC
acagtttcttcagggagttc

SEQ ID NO: 73614 - DNA, 20 bp, Artificial Sequence
  Description of Artificial Sequence: Synthetic oligonucleotide
  Target: ATXN2; (-) strand; PAM type: YTN; PAM sequence: TTC
atggtgttcacagtttcttc

SEQ ID NO: 73615 - DNA, 20 bp, Artificial Sequence
  Description of Artificial Sequence: Synthetic oligonucleotide
  Target: ATXN2; (-) strand; PAM type: YTN; PAM sequence: TTT
catggtgttcacagtttctt

SEQ ID NO: 73616 - DNA, 20 bp, Artificial Sequence
  Description of Artificial Sequence: Synthetic oligonucleotide
  Target: ATXN2; (-) strand; PAM type: YTN; PAM sequence: CTA
atgtaatttcatggtgttca

SEQ ID NO: 73617 - DNA, 20 bp, Artificial Sequence
  Description of Artificial Sequence: Synthetic oligonucleotide
  Target: ATXN2; (-) strand; PAM type: YTN; PAM sequence: CTG
tgcccacgctaatgtaattt

SEQ ID NO: 73618 - DNA, 20 bp, Artificial Sequence
  Description of Artificial Sequence: Synthetic oligonucleotide
  Target: ATXN2; (-) strand; PAM type: YTN; PAM sequence: TTA
taggtgcaagccactgtgcc

SEQ ID NO: 73619 - DNA, 20 bp, Artificial Sequence
  Description of Artificial Sequence: Synthetic oligonucleotide
  Target: ATXN2; (-) strand; PAM type: YTN; PAM sequence: TTC
aaaagtgatgggattatagg

SEQ ID NO: 73620 - DNA, 20 bp, Artificial Sequence
  Description of Artificial Sequence: Synthetic oligonucleotide
  Target: ATXN2; (-) strand; PAM type: YTN; PAM sequence: CTT
caaaagtgatgggattatag

SEQ ID NO: 73621 - DNA, 20 bp, Artificial Sequence
  Description of Artificial Sequence: Synthetic oligonucleotide
  Target: ATXN2; (-) strand; PAM type: YTN; PAM sequence: TTG
gccttcaaaagtgatgggat

SEQ ID NO: 73622 - DNA, 20 bp, Artificial Sequence
  Description of Artificial Sequence: Synthetic oligonucleotide
  Target: ATXN2; (-) strand; PAM type: YTN; PAM sequence: CTT
ggccttcaaaagtgatggga

SEQ ID NO: 73623 - DNA, 20 bp, Artificial Sequence
  Description of Artificial Sequence: Synthetic oligonucleotide
  Target: ATXN2; (-) strand; PAM type: YTN; PAM sequence: CTA
ccttggccttcaaaagtgat

SEQ ID NO: 73624 - DNA, 20 bp, Artificial Sequence
  Description of Artificial Sequence: Synthetic oligonucleotide
  Target: ATXN2; (-) strand; PAM type: YTN; PAM sequence: CTC
taccttggccttcaaaagtg

SEQ ID NO: 73625 - DNA, 20 bp, Artificial Sequence
  Description of Artificial Sequence: Synthetic oligonucleotide
  Target: ATXN2; (-) strand; PAM type: YTN; PAM sequence: TTC
aagcaatcctctaccttggc

SEQ ID NO: 73626 - DNA, 20 bp, Artificial Sequence
  Description of Artificial Sequence: Synthetic oligonucleotide
  Target: ATXN2; (-) strand; PAM type: YTN; PAM sequence: CTG
ggttcaagcaatcctctacc

SEQ ID NO: 73627 - DNA, 20 bp, Artificial Sequence
  Description of Artificial Sequence: Synthetic oligonucleotide
  Target: ATXN2; (-) strand; PAM type: YTN; PAM sequence: CTC
ctgggttcaagcaatcctct

SEQ ID NO: 73628 - DNA, 20 bp, Artificial Sequence
  Description of Artificial Sequence: Synthetic oligonucleotide
  Target: ATXN2; (-) strand; PAM type: YTN; PAM sequence: TTA
cctcctgggttcaagcaatc

SEQ ID NO: 73629 - DNA, 20 bp, Artificial Sequence
  Description of Artificial Sequence: Synthetic oligonucleotide
  Target: ATXN2; (-) strand; PAM type: YTN; PAM sequence: TTT
acctcctgggttcaagcaat

SEQ ID NO: 73630 - DNA, 20 bp, Artificial Sequence
  Description of Artificial Sequence: Synthetic oligonucleotide
  Target: ATXN2; (-) strand; PAM type: YTN; PAM sequence: CTT
tacctcctgggttcaagcaa

SEQ ID NO: 73631 - DNA, 20 bp, Artificial Sequence
  Description of Artificial Sequence: Synthetic oligonucleotide
  Target: ATXN2; (-) strand; PAM type: YTN; PAM sequence: CTG
gcctttacctcctgggttca

SEQ ID NO: 73632 - DNA, 20 bp, Artificial Sequence
  Description of Artificial Sequence: Synthetic oligonucleotide
  Target: ATXN2; (-) strand; PAM type: YTN; PAM sequence: TTC
ccaggctggcctttacctcc

SEQ ID NO: 73633 - DNA, 20 bp, Artificial Sequence
  Description of Artificial Sequence: Synthetic oligonucleotide
  Target: ATXN2; (-) strand; PAM type: YTN; PAM sequence: TTT
cccaggctggcctttacctc

SEQ ID NO: 73634 - DNA, 20 bp, Artificial Sequence
  Description of Artificial Sequence: Synthetic oligonucleotide
  Target: ATXN2; (-) strand; PAM type: YTN; PAM sequence: CTA
tgtttcccaggctggccttt

SEQ ID NO: 73635 - DNA, 20 bp, Artificial Sequence
  Description of Artificial Sequence: Synthetic oligonucleotide
  Target: ATXN2; (-) strand; PAM type: YTN; PAM sequence: CTC
actatgtttcccaggctggc

SEQ ID NO: 73636 - DNA, 20 bp, Artificial Sequence
  Description of Artificial Sequence: Synthetic oligonucleotide
  Target: ATXN2; (-) strand; PAM type: YTN; PAM sequence: TTC
tcactatgtttcccaggctg

SEQ ID NO: 73637 - DNA, 20 bp, Artificial Sequence
  Description of Artificial Sequence: Synthetic oligonucleotide
  Target: ATXN2; (-) strand; PAM type: YTN; PAM sequence: CTG
gttctcactatgtttcccag

SEQ ID NO: 73638 - DNA, 20 bp, Artificial Sequence
  Description of Artificial Sequence: Synthetic oligonucleotide
  Target: ATXN2; (-) strand; PAM type: YTN; PAM sequence: TTA
tagacactggttctcactat

SEQ ID NO: 73639 - DNA, 20 bp, Artificial Sequence
  Description of Artificial Sequence: Synthetic oligonucleotide
  Target: ATXN2; (-) strand; PAM type: YTN; PAM sequence: TTT
atagacactggttctcacta

SEQ ID NO: 73640 - DNA, 20 bp, Artificial Sequence
  Description of Artificial Sequence: Synthetic oligonucleotide
  Target: ATXN2; (-) strand; PAM type: YTN; PAM sequence: TTT
tatagacactggttctcact

SEQ ID NO: 73641 - DNA, 20 bp, Artificial Sequence
  Description of Artificial Sequence: Synthetic oligonucleotide
  Target: ATXN2; (-) strand; PAM type: YTN; PAM sequence: TTA
aaaatattttatagacactg

SEQ ID NO: 73642 - DNA, 20 bp, Artificial Sequence
  Description of Artificial Sequence: Synthetic oligonucleotide
  Target: ATXN2; (-) strand; PAM type: YTN; PAM sequence: TTT
aaaaatattttatagacact

SEQ ID NO: 73643 - DNA, 20 bp, Artificial Sequence
  Description of Artificial Sequence: Synthetic oligonucleotide
  Target: ATXN2; (-) strand; PAM type: YTN; PAM sequence: TTT
taaaaatattttatagacac

SEQ ID NO: 73644 - DNA, 20 bp, Artificial Sequence
  Description of Artificial Sequence: Synthetic oligonucleotide
  Target: ATXN2; (-) strand; PAM type: YTN; PAM sequence: TTT
ttaaaaatattttatagaca

SEQ ID NO: 73645 - DNA, 20 bp, Artificial Sequence
  Description of Artificial Sequence: Synthetic oligonucleotide
  Target: ATXN2; (-) strand; PAM type: YTN; PAM sequence: CTA
atttttaaaaatattttata

SEQ ID NO: 73646 - DNA, 20 bp, Artificial Sequence
  Description of Artificial Sequence: Synthetic oligonucleotide
  Target: ATXN2; (-) strand; PAM type: YTN; PAM sequence: CTA
tgcccggctaatttttaaaa

SEQ ID NO: 73647 - DNA, 20 bp, Artificial Sequence
  Description of Artificial Sequence: Synthetic oligonucleotide
  Target: ATXN2; (-) strand; PAM type: YTN; PAM sequence: CTA
caggtgcacgccgctatgcc

SEQ ID NO: 73648 - DNA, 20 bp, Artificial Sequence
  Description of Artificial Sequence: Synthetic oligonucleotide
  Target: ATXN2; (-) strand; PAM type: YTN; PAM sequence: CTG
gggctacaggtgcacgccgc

SEQ ID NO: 73649 - DNA, 20 bp, Artificial Sequence
  Description of Artificial Sequence: Synthetic oligonucleotide
  Target: ATXN2; (-) strand; PAM type: YTN; PAM sequence: CTC
ccaagtagctggggctacag

SEQ ID NO: 73650 - DNA, 20 bp, Artificial Sequence
  Description of Artificial Sequence: Synthetic oligonucleotide
  Target: ATXN2; (-) strand; PAM type: YTN; PAM sequence: CTC
agcctcccaagtagctgggg

SEQ ID NO: 73651 - DNA, 20 bp, Artificial Sequence
  Description of Artificial Sequence: Synthetic oligonucleotide
  Target: ATXN2; (-) strand; PAM type: YTN; PAM sequence: CTC
ccacctcagcctcccaagta

SEQ ID NO: 73652 - DNA, 20 bp, Artificial Sequence
  Description of Artificial Sequence: Synthetic oligonucleotide
  Target: ATXN2; (-) strand; PAM type: YTN; PAM sequence: CTC
tcccacctcagcctcccaag

SEQ ID NO: 73653 - DNA, 20 bp, Artificial Sequence
  Description of Artificial Sequence: Synthetic oligonucleotide
  Target: ATXN2; (-) strand; PAM type: YTN; PAM sequence: CTC
aagcgactctcccacctcag

SEQ ID NO: 73654 - DNA, 20 bp, Artificial Sequence
  Description of Artificial Sequence: Synthetic oligonucleotide
  Target: ATXN2; (-) strand; PAM type: YTN; PAM sequence: CTG
gctcaagcgactctcccacc

SEQ ID NO: 73655 - DNA, 20 bp, Artificial Sequence
  Description of Artificial Sequence: Synthetic oligonucleotide
  Target: ATXN2; (-) strand; PAM type: YTN; PAM sequence: CTC
ctggctcaagcgactctccc

SEQ ID NO: 73656 - DNA, 20 bp, Artificial Sequence
  Description of Artificial Sequence: Synthetic oligonucleotide
  Target: ATXN2; (-) strand; PAM type: YTN; PAM sequence: CTC
gacctcctggctcaagcgac

SEQ ID NO: 73657 - DNA, 20 bp, Artificial Sequence
  Description of Artificial Sequence: Synthetic oligonucleotide
  Target: ATXN2; (-) strand; PAM type: YTN; PAM sequence: CTG
tagcctcgacctcctggctc

SEQ ID NO: 73658 - DNA, 20 bp, Artificial Sequence
  Description of Artificial Sequence: Synthetic oligonucleotide
  Target: ATXN2; (-) strand; PAM type: YTN; PAM sequence: TTA
ctgtagcctcgacctcctgg

SEQ ID NO: 73659 - DNA, 20 bp, Artificial Sequence
  Description of Artificial Sequence: Synthetic oligonucleotide
  Target: ATXN2; (-) strand; PAM type: YTN; PAM sequence: CTT
actgtagcctcgacctcctg

SEQ ID NO: 73660 - DNA, 20 bp, Artificial Sequence
  Description of Artificial Sequence: Synthetic oligonucleotide
  Target: ATXN2; (-) strand; PAM type: YTN; PAM sequence: CTG
gaatgcagtggtgtgatcat

SEQ ID NO: 73661 - DNA, 20 bp, Artificial Sequence
  Description of Artificial Sequence: Synthetic oligonucleotide
  Target: ATXN2; (-) strand; PAM type: YTN; PAM sequence: CTC
aggctggaatgcagtggtgt

SEQ ID NO: 73662 - DNA, 20 bp, Artificial Sequence
  Description of Artificial Sequence: Synthetic oligonucleotide
  Target: ATXN2; (-) strand; PAM type: YTN; PAM sequence: CTG
tcactcaggctggaatgcag

SEQ ID NO: 73663 - DNA, 20 bp, Artificial Sequence
  Description of Artificial Sequence: Synthetic oligonucleotide
  Target: ATXN2; (-) strand; PAM type: YTN; PAM sequence: CTC
tgtcactcaggctggaatgc

SEQ ID NO: 73664 - DNA, 20 bp, Artificial Sequence
  Description of Artificial Sequence: Synthetic oligonucleotide
  Target: ATXN2; (-) strand; PAM type: YTN; PAM sequence: TTA
aagaaacagggtcatgctct

SEQ ID NO: 73665 - DNA, 20 bp, Artificial Sequence
  Description of Artificial Sequence: Synthetic oligonucleotide
  Target: ATXN2; (-) strand; PAM type: YTN; PAM sequence: TTT
aaagaaacagggtcatgctc

SEQ ID NO: 73666 - DNA, 20 bp, Artificial Sequence
  Description of Artificial Sequence: Synthetic oligonucleotide
  Target: ATXN2; (-) strand; PAM type: YTN; PAM sequence: TTT
taaagaaacagggtcatgct

SEQ ID NO: 73667 - DNA, 20 bp, Artificial Sequence
  Description of Artificial Sequence: Synthetic oligonucleotide
  Target: ATXN2; (-) strand; PAM type: YTN; PAM sequence: TTT
ttaaagaaacagggtcatgc

SEQ ID NO: 73668 - DNA, 20 bp, Artificial Sequence
  Description of Artificial Sequence: Synthetic oligonucleotide
  Target: ATXN2; (-) strand; PAM type: YTN; PAM sequence: TTT
tttaaagaaacagggtcatg

SEQ ID NO: 73669 - DNA, 20 bp, Artificial Sequence
  Description of Artificial Sequence: Synthetic oligonucleotide
  Target: ATXN2; (-) strand; PAM type: YTN; PAM sequence: TTT
ttttaaagaaacagggtcat

SEQ ID NO: 73670 - DNA, 20 bp, Artificial Sequence
  Description of Artificial Sequence: Synthetic oligonucleotide
  Target: ATXN2; (-) strand; PAM type: YTN; PAM sequence: TTT
tttttaaagaaacagggtca

SEQ ID NO: 73671 - DNA, 20 bp, Artificial Sequence
  Description of Artificial Sequence: Synthetic oligonucleotide
  Target: ATXN2; (-) strand; PAM type: YTN; PAM sequence: CTT
ttttttaaagaaacagggtc

SEQ ID NO: 73672 - DNA, 20 bp, Artificial Sequence
  Description of Artificial Sequence: Synthetic oligonucleotide
  Target: ATXN2; (-) strand; PAM type: YTN; PAM sequence: TTC
ttttttttaaagaaacaggg

SEQ ID NO: 73673 - DNA, 20 bp, Artificial Sequence
  Description of Artificial Sequence: Synthetic oligonucleotide
  Target: ATXN2; (-) strand; PAM type: YTN; PAM sequence: TTT
cttttttttaaagaaacagg

SEQ ID NO: 73674 - DNA, 20 bp, Artificial Sequence
  Description of Artificial Sequence: Synthetic oligonucleotide
  Target: ATXN2; (-) strand; PAM type: YTN; PAM sequence: TTT
tcttttttttaaagaaacag

SEQ ID NO: 73675 - DNA, 20 bp, Artificial Sequence
  Description of Artificial Sequence: Synthetic oligonucleotide
  Target: ATXN2; (-) strand; PAM type: YTN; PAM sequence: TTT
ttcttttttttaaagaaaca

SEQ ID NO: 73676 - DNA, 20 bp, Artificial Sequence
  Description of Artificial Sequence: Synthetic oligonucleotide
  Target: ATXN2; (-) strand; PAM type: YTN; PAM sequence: TTT
tttcttttttttaaagaaac

SEQ ID NO: 73677 - DNA, 20 bp, Artificial Sequence
  Description of Artificial Sequence: Synthetic oligonucleotide
  Target: ATXN2; (-) strand; PAM type: YTN; PAM sequence: TTT
ttttcttttttttaaagaaa

SEQ ID NO: 73678 - DNA, 20 bp, Artificial Sequence
  Description of Artificial Sequence: Synthetic oligonucleotide
  Target: ATXN2; (-) strand; PAM type: YTN; PAM sequence: TTT
tttttcttttttttaaagaa

SEQ ID NO: 73679 - DNA, 20 bp, Artificial Sequence
  Description of Artificial Sequence: Synthetic oligonucleotide
  Target: ATXN2; (-) strand; PAM type: YTN; PAM sequence: TTA
attttttttcttttttttaa

SEQ ID NO: 73680 - DNA, 20 bp, Artificial Sequence
  Description of Artificial Sequence: Synthetic oligonucleotide
  Target: ATXN2; (-) strand; PAM type: YTN; PAM sequence: TTA
aaaattaattttttttcttt

SEQ ID NO: 73681 - DNA, 20 bp, Artificial Sequence
  Description of Artificial Sequence: Synthetic oligonucleotide
  Target: ATXN2; (-) strand; PAM type: YTN; PAM sequence: TTT
aaaaattaattttttttctt

SEQ ID NO: 73682 - DNA, 20 bp, Artificial Sequence
  Description of Artificial Sequence: Synthetic oligonucleotide
  Target: ATXN2; (-) strand; PAM type: YTN; PAM sequence: TTT
taaaaattaattttttttct

SEQ ID NO: 73683 - DNA, 20 bp, Artificial Sequence
  Description of Artificial Sequence: Synthetic oligonucleotide
  Target: ATXN2; (-) strand; PAM type: YTN; PAM sequence: CTT
ttaaaaattaattttttttc

SEQ ID NO: 73684 - DNA, 20 bp, Artificial Sequence
  Description of Artificial Sequence: Synthetic oligonucleotide
  Target: ATXN2; (-) strand; PAM type: YTN; PAM sequence: TTC
ttttaaaaattaattttttt

SEQ ID NO: 73685 - DNA, 20 bp, Artificial Sequence
  Description of Artificial Sequence: Synthetic oligonucleotide
  Target: ATXN2; (-) strand; PAM type: YTN; PAM sequence: TTA
catgtaattcttttaaaaat

SEQ ID NO: 73686 - DNA, 20 bp, Artificial Sequence
  Description of Artificial Sequence: Synthetic oligonucleotide
  Target: ATXN2; (-) strand; PAM type: YTN; PAM sequence: TTT
acatgtaattcttttaaaaa

SEQ ID NO: 73687 - DNA, 20 bp, Artificial Sequence
  Description of Artificial Sequence: Synthetic oligonucleotide
  Target: ATXN2; (-) strand; PAM type: YTN; PAM sequence: TTT
tacatgtaattcttttaaaa

SEQ ID NO: 73688 - DNA, 20 bp, Artificial Sequence
  Description of Artificial Sequence: Synthetic oligonucleotide
  Target: ATXN2; (-) strand; PAM type: YTN; PAM sequence: TTA
cacacatgtagattttacat

SEQ ID NO: 73689 - DNA, 20 bp, Artificial Sequence
  Description of Artificial Sequence: Synthetic oligonucleotide
  Target: ATXN2; (-) strand; PAM type: YTN; PAM sequence: TTT
acacacatgtagattttaca

SEQ ID NO: 73690 - DNA, 20 bp, Artificial Sequence
  Description of Artificial Sequence: Synthetic oligonucleotide
  Target: ATXN2; (-) strand; PAM type: YTN; PAM sequence: CTA
gaaaaatttacacacatgta

SEQ ID NO: 73691 - DNA, 20 bp, Artificial Sequence
  Description of Artificial Sequence: Synthetic oligonucleotide
  Target: ATXN2; (-) strand; PAM type: YTN; PAM sequence: CTC
accctagaaaaatttacaca

SEQ ID NO: 73692 - DNA, 20 bp, Artificial Sequence
  Description of Artificial Sequence: Synthetic oligonucleotide
  Target: ATXN2; (-) strand; PAM type: YTN; PAM sequence: CTG
tataccctcaccctagaaaa

SEQ ID NO: 73693 - DNA, 20 bp, Artificial Sequence
  Description of Artificial Sequence: Synthetic oligonucleotide
  Target: ATXN2; (-) strand; PAM type: YTN; PAM sequence: CTA
gtgaaactgtataccctcac

SEQ ID NO: 73694 - DNA, 20 bp, Artificial Sequence
  Description of Artificial Sequence: Synthetic oligonucleotide
  Target: ATXN2; (-) strand; PAM type: YTN; PAM sequence: CTG
tgtacctagtgaaactgtat

SEQ ID NO: 73695 - DNA, 20 bp, Artificial Sequence
  Description of Artificial Sequence: Synthetic oligonucleotide
  Target: ATXN2; (-) strand; PAM type: YTN; PAM sequence: CTA
gtgaaactgtgtacctagtg

SEQ ID NO: 73696 - DNA, 20 bp, Artificial Sequence
  Description of Artificial Sequence: Synthetic oligonucleotide
  Target: ATXN2; (-) strand; PAM type: YTN; PAM sequence: TTG
agaacctagtgaaactgtgt

SEQ ID NO: 73697 - DNA, 20 bp, Artificial Sequence
  Description of Artificial Sequence: Synthetic oligonucleotide
  Target: ATXN2; (-) strand; PAM type: YTN; PAM sequence: TTT
gagaacctagtgaaactgtg

SEQ ID NO: 73698 - DNA, 20 bp, Artificial Sequence
  Description of Artificial Sequence: Synthetic oligonucleotide
  Target: ATXN2; (-) strand; PAM type: YTN; PAM sequence: TTT
tgagaacctagtgaaactgt

SEQ ID NO: 73699 - DNA, 20 bp, Artificial Sequence
  Description of Artificial Sequence: Synthetic oligonucleotide
  Target: ATXN2; (-) strand; PAM type: YTN; PAM sequence: CTT
ttgagaacctagtgaaactg

SEQ ID NO: 73700 - DNA, 20 bp, Artificial Sequence
  Description of Artificial Sequence: Synthetic oligonucleotide
  Target: ATXN2; (-) strand; PAM type: YTN; PAM sequence: TTG
ggtcccttttgagaacctag

SEQ ID NO: 73701 - DNA, 20 bp, Artificial Sequence
  Description of Artificial Sequence: Synthetic oligonucleotide
  Target: ATXN2; (-) strand; PAM type: YTN; PAM sequence: TTT
gggtcccttttgagaaccta

SEQ ID NO: 73702 - DNA, 20 bp, Artificial Sequence
  Description of Artificial Sequence: Synthetic oligonucleotide
  Target: ATXN2; (-) strand; PAM type: YTN; PAM sequence: TTT
tgggtcccttttgagaacct

SEQ ID NO: 73703 - DNA, 20 bp, Artificial Sequence
  Description of Artificial Sequence: Synthetic oligonucleotide
  Target: ATXN2; (-) strand; PAM type: YTN; PAM sequence: CTA
ttttgggtcccttttgagaa

SEQ ID NO: 73704 - DNA, 20 bp, Artificial Sequence
  Description of Artificial Sequence: Synthetic oligonucleotide
  Target: ATXN2; (-) strand; PAM type: YTN; PAM sequence: CTA
tggacagtacggagaaatac

SEQ ID NO: 73705 - DNA, 20 bp, Artificial Sequence
  Description of Artificial Sequence: Synthetic oligonucleotide
  Target: ATXN2; (-) strand; PAM type: YTN; PAM sequence: TTG
ctatggacagtacggagaaa

SEQ ID NO: 73706 - DNA, 20 bp, Artificial Sequence
  Description of Artificial Sequence: Synthetic oligonucleotide
  Target: ATXN2; (-) strand; PAM type: YTN; PAM sequence: TTG
ttgctatggacagtacggag

SEQ ID NO: 73707 - DNA, 20 bp, Artificial Sequence
  Description of Artificial Sequence: Synthetic oligonucleotide
  Target: ATXN2; (-) strand; PAM type: YTN; PAM sequence: CTT
gttgctatggacagtacgga

SEQ ID NO: 73708 - DNA, 20 bp, Artificial Sequence
  Description of Artificial Sequence: Synthetic oligonucleotide
  Target: ATXN2; (-) strand; PAM type: YTN; PAM sequence: CTG
tgcttgttgctatggacagt

SEQ ID NO: 73709 - DNA, 20 bp, Artificial Sequence
  Description of Artificial Sequence: Synthetic oligonucleotide
  Target: ATXN2; (-) strand; PAM type: YTN; PAM sequence: TTG
ctgtgcttgttgctatggac

SEQ ID NO: 73710 - DNA, 20 bp, Artificial Sequence
  Description of Artificial Sequence: Synthetic oligonucleotide
  Target: ATXN2; (-) strand; PAM type: YTN; PAM sequence: CTT
gctgtgcttgttgctatgga

SEQ ID NO: 73711 - DNA, 20 bp, Artificial Sequence
  Description of Artificial Sequence: Synthetic oligonucleotide
  Target: ATXN2; (-) strand; PAM type: YTN; PAM sequence: TTC
cttgctgtgcttgttgctat

SEQ ID NO: 73712 - DNA, 20 bp, Artificial Sequence
  Description of Artificial Sequence: Synthetic oligonucleotide
  Target: ATXN2; (-) strand; PAM type: YTN; PAM sequence: CTG
ggatgtgttccttgctgtgc

SEQ ID NO: 73713 - DNA, 20 bp, Artificial Sequence
  Description of Artificial Sequence: Synthetic oligonucleotide
  Target: ATXN2; (-) strand; PAM type: YTN; PAM sequence: CTC
tgggatgtgttccttgctgt

SEQ ID NO: 73714 - DNA, 20 bp, Artificial Sequence
  Description of Artificial Sequence: Synthetic oligonucleotide
  Target: ATXN2; (-) strand; PAM type: YTN; PAM sequence: TTA
gagagctctgggatgtgttc

SEQ ID NO: 73715 - DNA, 20 bp, Artificial Sequence
  Description of Artificial Sequence: Synthetic oligonucleotide
  Target: ATXN2; (-) strand; PAM type: YTN; PAM sequence: CTT
agagagctctgggatgtgtt

SEQ ID NO: 73716 - DNA, 20 bp, Artificial Sequence
  Description of Artificial Sequence: Synthetic oligonucleotide
  Target: ATXN2; (-) strand; PAM type: YTN; PAM sequence: TTA
catatatagtcatccagcag

SEQ ID NO: 73717 - DNA, 20 bp, Artificial Sequence
  Description of Artificial Sequence: Synthetic oligonucleotide
  Target: ATXN2; (-) strand; PAM type: YTN; PAM sequence: CTT
acatatatagtcatccagca

SEQ ID NO: 73718 - DNA, 20 bp, Artificial Sequence
  Description of Artificial Sequence: Synthetic oligonucleotide
  Target: ATXN2; (-) strand; PAM type: YTN; PAM sequence: CTG
taagtggtcttacatatata

SEQ ID NO: 73719 - DNA, 20 bp, Artificial Sequence
  Description of Artificial Sequence: Synthetic oligonucleotide
  Target: ATXN2; (-) strand; PAM type: YTN; PAM sequence: TTA
tggaaagaatgaaaaagctg

SEQ ID NO: 73720 - DNA, 20 bp, Artificial Sequence
  Description of Artificial Sequence: Synthetic oligonucleotide
  Target: ATXN2; (-) strand; PAM type: YTN; PAM sequence: TTT
atggaaagaatgaaaaagct

SEQ ID NO: 73721 - DNA, 20 bp, Artificial Sequence
  Description of Artificial Sequence: Synthetic oligonucleotide
  Target: ATXN2; (-) strand; PAM type: YTN; PAM sequence: TTT
tatggaaagaatgaaaaagc

SEQ ID NO: 73722 - DNA, 20 bp, Artificial Sequence
  Description of Artificial Sequence: Synthetic oligonucleotide
  Target: ATXN2; (-) strand; PAM type: YTN; PAM sequence: TTA
ttttatggaaagaatgaaaa

SEQ ID NO: 73723 - DNA, 20 bp, Artificial Sequence
  Description of Artificial Sequence: Synthetic oligonucleotide
  Target: ATXN2; (-) strand; PAM type: YTN; PAM sequence: TTG
tagaagcattattttatgga

SEQ ID NO: 73724 - DNA, 20 bp, Artificial Sequence
  Description of Artificial Sequence: Synthetic oligonucleotide
  Target: ATXN2; (-) strand; PAM type: YTN; PAM sequence: TTT
gtagaagcattattttatgg

SEQ ID NO: 73725 - DNA, 20 bp, Artificial Sequence
  Description of Artificial Sequence: Synthetic oligonucleotide
  Target: ATXN2; (-) strand; PAM type: YTN; PAM sequence: TTT
tgtagaagcattattttatg

SEQ ID NO: 73726 - DNA, 20 bp, Artificial Sequence
  Description of Artificial Sequence: Synthetic oligonucleotide
  Target: ATXN2; (-) strand; PAM type: YTN; PAM sequence: CTT
ttgtagaagcattattttat

SEQ ID NO: 73727 - DNA, 20 bp, Artificial Sequence
  Description of Artificial Sequence: Synthetic oligonucleotide
  Target: ATXN2; (-) strand; PAM type: YTN; PAM sequence: TTA
atacacttttgtagaagcat

SEQ ID NO: 73728 - DNA, 20 bp, Artificial Sequence
  Description of Artificial Sequence: Synthetic oligonucleotide
  Target: ATXN2; (-) strand; PAM type: YTN; PAM sequence: CTT
aatacacttttgtagaagca

SEQ ID NO: 73729 - DNA, 20 bp, Artificial Sequence
  Description of Artificial Sequence: Synthetic oligonucleotide
  Target: ATXN2; (-) strand; PAM type: YTN; PAM sequence: TTC
agtgccttaatacacttttg

SEQ ID NO: 73730 - DNA, 20 bp, Artificial Sequence
  Description of Artificial Sequence: Synthetic oligonucleotide
  Target: ATXN2; (-) strand; PAM type: YTN; PAM sequence: TTG
aataaatgaaattcagtgcc

SEQ ID NO: 73731 - DNA, 20 bp, Artificial Sequence
  Description of Artificial Sequence: Synthetic oligonucleotide
  Target: ATXN2; (-) strand; PAM type: YTN; PAM sequence: TTT
gaataaatgaaattcagtgc

SEQ ID NO: 73732 - DNA, 20 bp, Artificial Sequence
  Description of Artificial Sequence: Synthetic oligonucleotide
  Target: ATXN2; (-) strand; PAM type: YTN; PAM sequence: CTC
aatataaatgtgtttgaata

SEQ ID NO: 73733 - DNA, 20 bp, Artificial Sequence
  Description of Artificial Sequence: Synthetic oligonucleotide
  Target: ATXN2; (-) strand; PAM type: YTN; PAM sequence: TTG
gcacatagtacaggctcaat

SEQ ID NO: 73734 - DNA, 20 bp, Artificial Sequence
  Description of Artificial Sequence: Synthetic oligonucleotide
  Target: ATXN2; (-) strand; PAM type: YTN; PAM sequence: TTT
ggcacatagtacaggctcaa

SEQ ID NO: 73735 - DNA, 20 bp, Artificial Sequence
  Description of Artificial Sequence: Synthetic oligonucleotide
  Target: ATXN2; (-) strand; PAM type: YTN; PAM sequence: CTT
tggcacatagtacaggctca

SEQ ID NO: 73736 - DNA, 20 bp, Artificial Sequence
  Description of Artificial Sequence: Synthetic oligonucleotide
  Target: ATXN2; (-) strand; PAM type: YTN; PAM sequence: CTA
gtatagtgctttggcacata

SEQ ID NO: 73737 - DNA, 20 bp, Artificial Sequence
  Description of Artificial Sequence: Synthetic oligonucleotide
  Target: ATXN2; (-) strand; PAM type: YTN; PAM sequence: CTC
atggtctagtatagtgcttt

SEQ ID NO: 73738 - DNA, 20 bp, Artificial Sequence
  Description of Artificial Sequence: Synthetic oligonucleotide
  Target: ATXN2; (-) strand; PAM type: YTN; PAM sequence: TTC
tcatggtctagtatagtgct

SEQ ID NO: 73739 - DNA, 20 bp, Artificial Sequence
  Description of Artificial Sequence: Synthetic oligonucleotide
  Target: ATXN2; (-) strand; PAM type: YTN; PAM sequence: TTA
ttctcatggtctagtatagt

SEQ ID NO: 73740 - DNA, 20 bp, Artificial Sequence
  Description of Artificial Sequence: Synthetic oligonucleotide
  Target: ATXN2; (-) strand; PAM type: YTN; PAM sequence: TTT
attctcatggtctagtatag

SEQ ID NO: 73741 - DNA, 20 bp, Artificial Sequence
  Description of Artificial Sequence: Synthetic oligonucleotide
  Target: ATXN2; (-) strand; PAM type: YTN; PAM sequence: TTA
tttattctcatggtctagta

SEQ ID NO: 73742 - DNA, 20 bp, Artificial Sequence
  Description of Artificial Sequence: Synthetic oligonucleotide
  Target: ATXN2; (-) strand; PAM type: YTN; PAM sequence: TTA
ttatttattctcatggtcta

SEQ ID NO: 73743 - DNA, 20 bp, Artificial Sequence
  Description of Artificial Sequence: Synthetic oligonucleotide
  Target: ATXN2; (-) strand; PAM type: YTN; PAM sequence: TTT
attatttattctcatggtct

SEQ ID NO: 73744 - DNA, 20 bp, Artificial Sequence
  Description of Artificial Sequence: Synthetic oligonucleotide
  Target: ATXN2; (-) strand; PAM type: YTN; PAM sequence: CTT
tattatttattctcatggtc

SEQ ID NO: 73745 - DNA, 20 bp, Artificial Sequence
  Description of Artificial Sequence: Synthetic oligonucleotide
  Target: ATXN2; (-) strand; PAM type: YTN; PAM sequence: CTG
tctttattatttattctcat

SEQ ID NO: 73746 - DNA, 20 bp, Artificial Sequence
  Description of Artificial Sequence: Synthetic oligonucleotide
  Target: ATXN2; (-) strand; PAM type: YTN; PAM sequence: CTC
caagtaaagacagtgatact

SEQ ID NO: 73747 - DNA, 20 bp, Artificial Sequence
  Description of Artificial Sequence: Synthetic oligonucleotide
  Target: ATXN2; (-) strand; PAM type: YTN; PAM sequence: TTG
tgctccaagtaaagacagtg

SEQ ID NO: 73748 - DNA, 20 bp, Artificial Sequence
  Description of Artificial Sequence: Synthetic oligonucleotide
  Target: ATXN2; (-) strand; PAM type: YTN; PAM sequence: TTT
gtgctccaagtaaagacagt

SEQ ID NO: 73749 - DNA, 20 bp, Artificial Sequence
  Description of Artificial Sequence: Synthetic oligonucleotide
  Target: ATXN2; (-) strand; PAM type: YTN; PAM sequence: CTT
tgtgctccaagtaaagacag

SEQ ID NO: 73750 - DNA, 20 bp, Artificial Sequence
  Description of Artificial Sequence: Synthetic oligonucleotide
  Target: ATXN2; (-) strand; PAM type: YTN; PAM sequence: CTC
tttgtgctccaagtaaagac

SEQ ID NO: 73751 - DNA, 20 bp, Artificial Sequence
  Description of Artificial Sequence: Synthetic oligonucleotide
  Target: ATXN2; (-) strand; PAM type: YTN; PAM sequence: TTG
agctctttgtgctccaagta

SEQ ID NO: 73752 - DNA, 20 bp, Artificial Sequence
  Description of Artificial Sequence: Synthetic oligonucleotide
  Target: ATXN2; (-) strand; PAM type: YTN; PAM sequence: TTT
gagctctttgtgctccaagt

SEQ ID NO: 73753 - DNA, 20 bp, Artificial Sequence
  Description of Artificial Sequence: Synthetic oligonucleotide
  Target: ATXN2; (-) strand; PAM type: YTN; PAM sequence: TTA
cagtttgagctctttgtgct

SEQ ID NO: 73754 - DNA, 20 bp, Artificial Sequence
  Description of Artificial Sequence: Synthetic oligonucleotide
  Target: ATXN2; (-) strand; PAM type: YTN; PAM sequence: CTG
ttacagtttgagctctttgt

SEQ ID NO: 73755 - DNA, 20 bp, Artificial Sequence
  Description of Artificial Sequence: Synthetic oligonucleotide
  Target: ATXN2; (-) strand; PAM type: YTN; PAM sequence: CTC
ccctgttacagtttgagctc

SEQ ID NO: 73756 - DNA, 20 bp, Artificial Sequence
  Description of Artificial Sequence: Synthetic oligonucleotide
  Target: ATXN2; (-) strand; PAM type: YTN; PAM sequence: TTG
tctcccctgttacagtttga

SEQ ID NO: 73757 - DNA, 20 bp, Artificial Sequence
  Description of Artificial Sequence: Synthetic oligonucleotide
  Target: ATXN2; (-) strand; PAM type: YTN; PAM sequence: CTT
gtctcccctgttacagtttg

SEQ ID NO: 73758 - DNA, 20 bp, Artificial Sequence
  Description of Artificial Sequence: Synthetic oligonucleotide
  Target: ATXN2; (-) strand; PAM type: YTN; PAM sequence: TTA
tatgcttgtctcccctgtta

SEQ ID NO: 73759 - DNA, 20 bp, Artificial Sequence
  Description of Artificial Sequence: Synthetic oligonucleotide
  Target: ATXN2; (-) strand; PAM type: YTN; PAM sequence: TTA
aaattatatgcttgtctccc

SEQ ID NO: 73760 - DNA, 20 bp, Artificial Sequence
  Description of Artificial Sequence: Synthetic oligonucleotide
  Target: ATXN2; (-) strand; PAM type: YTN; PAM sequence: TTG
tattaaaattatatgcttgt

SEQ ID NO: 73761 - DNA, 20 bp, Artificial Sequence
  Description of Artificial Sequence: Synthetic oligonucleotide
  Target: ATXN2; (-) strand; PAM type: YTN; PAM sequence: TTA
taccatgttgtattaaaatt

SEQ ID NO: 73762 - DNA, 20 bp, Artificial Sequence
  Description of Artificial Sequence: Synthetic oligonucleotide
  Target: ATXN2; (-) strand; PAM type: YTN; PAM sequence: CTT
ataccatgttgtattaaaat

SEQ ID NO: 73763 - DNA, 20 bp, Artificial Sequence
  Description of Artificial Sequence: Synthetic oligonucleotide
  Target: ATXN2; (-) strand; PAM type: YTN; PAM sequence: TTG
cccttataccatgttgtatt

SEQ ID NO: 73764 - DNA, 20 bp, Artificial Sequence
  Description of Artificial Sequence: Synthetic oligonucleotide
  Target: ATXN2; (-) strand; PAM type: YTN; PAM sequence: CTA
tcatgtgtgtatcattgccc

SEQ ID NO: 73765 - DNA, 20 bp, Artificial Sequence
  Description of Artificial Sequence: Synthetic oligonucleotide
  Target: ATXN2; (-) strand; PAM type: YTN; PAM sequence: CTC
ctatcatgtgtgtatcattg

SEQ ID NO: 73766 - DNA, 20 bp, Artificial Sequence
  Description of Artificial Sequence: Synthetic oligonucleotide
  Target: ATXN2; (-) strand; PAM type: YTN; PAM sequence: TTC
cctcctatcatgtgtgtatc

SEQ ID NO: 73767 - DNA, 20 bp, Artificial Sequence
  Description of Artificial Sequence: Synthetic oligonucleotide
  Target: ATXN2; (-) strand; PAM type: YTN; PAM sequence: CTA
ccacacacaagttccctcct

SEQ ID NO: 73768 - DNA, 20 bp, Artificial Sequence
  Description of Artificial Sequence: Synthetic oligonucleotide
  Target: ATXN2; (-) strand; PAM type: YTN; PAM sequence: CTG
ccagctaccacacacaagtt

SEQ ID NO: 73769 - DNA, 20 bp, Artificial Sequence
  Description of Artificial Sequence: Synthetic oligonucleotide
  Target: ATXN2; (-) strand; PAM type: YTN; PAM sequence: TTG
ccacatgacacacactgcca

SEQ ID NO: 73770 - DNA, 20 bp, Artificial Sequence
  Description of Artificial Sequence: Synthetic oligonucleotide
  Target: ATXN2; (-) strand; PAM type: YTN; PAM sequence: CTT
gccacatgacacacactgcc

SEQ ID NO: 73771 - DNA, 20 bp, Artificial Sequence
  Description of Artificial Sequence: Synthetic oligonucleotide
  Target: ATXN2; (-) strand; PAM type: YTN; PAM sequence: CTC
ttgccacatgacacacactg

SEQ ID NO: 73772 - DNA, 20 bp, Artificial Sequence
  Description of Artificial Sequence: Synthetic oligonucleotide
  Target: ATXN2; (-) strand; PAM type: YTN; PAM sequence: CTG
ctcttgccacatgacacaca

SEQ ID NO: 73773 - DNA, 20 bp, Artificial Sequence
  Description of Artificial Sequence: Synthetic oligonucleotide
  Target: ATXN2; (-) strand; PAM type: YTN; PAM sequence: CTG
ctgctcttgccacatgacac

SEQ ID NO: 73774 - DNA, 20 bp, Artificial Sequence
  Description of Artificial Sequence: Synthetic oligonucleotide
  Target: ATXN2; (-) strand; PAM type: YTN; PAM sequence: TTG
cctgctgctcttgccacatg

SEQ ID NO: 73775 - DNA, 20 bp, Artificial Sequence
  Description of Artificial Sequence: Synthetic oligonucleotide
  Target: ATXN2; (-) strand; PAM type: YTN; PAM sequence: TTT
gcctgctgctcttgccacat

SEQ ID NO: 73776 - DNA, 20 bp, Artificial Sequence
  Description of Artificial Sequence: Synthetic oligonucleotide
  Target: ATXN2; (-) strand; PAM type: YTN; PAM sequence: CTT
tgcctgctgctcttgccaca

SEQ ID NO: 73777 - DNA, 20 bp, Artificial Sequence
  Description of Artificial Sequence: Synthetic oligonucleotide
  Target: ATXN2; (-) strand; PAM type: YTN; PAM sequence: TTC
tttgcctgctgctcttgcca

SEQ ID NO: 73778 - DNA, 20 bp, Artificial Sequence
  Description of Artificial Sequence: Synthetic oligonucleotide
  Target: ATXN2; (-) strand; PAM type: YTN; PAM sequence: TTT
ctttgcctgctgctcttgcc

SEQ ID NO: 73779 - DNA, 20 bp, Artificial Sequence
  Description of Artificial Sequence: Synthetic oligonucleotide
  Target: ATXN2; (-) strand; PAM type: YTN; PAM sequence: TTG
tttctttgcctgctgctctt

SEQ ID NO: 73780 - DNA, 20 bp, Artificial Sequence
  Description of Artificial Sequence: Synthetic oligonucleotide
  Target: ATXN2; (-) strand; PAM type: YTN; PAM sequence: TTT
gtttctttgcctgctgctct

SEQ ID NO: 73781 - DNA, 20 bp, Artificial Sequence
  Description of Artificial Sequence: Synthetic oligonucleotide
  Target: ATXN2; (-) strand; PAM type: YTN; PAM sequence: TTA
gatgtgtgtccccagtgttt

SEQ ID NO: 73782 - DNA, 20 bp, Artificial Sequence
  Description of Artificial Sequence: Synthetic oligonucleotide
  Target: ATXN2; (-) strand; PAM type: YTN; PAM sequence: CTT
agatgtgtgtccccagtgtt

SEQ ID NO: 73783 - DNA, 20 bp, Artificial Sequence
  Description of Artificial Sequence: Synthetic oligonucleotide
  Target: ATXN2; (-) strand; PAM type: YTN; PAM sequence: TTC
acacaccccttagatgtgtg

SEQ ID NO: 73784 - DNA, 20 bp, Artificial Sequence
  Description of Artificial Sequence: Synthetic oligonucleotide
  Target: ATXN2; (-) strand; PAM type: YTN; PAM sequence: CTT
cacacaccccttagatgtgt

SEQ ID NO: 73785 - DNA, 20 bp, Artificial Sequence
  Description of Artificial Sequence: Synthetic oligonucleotide
  Target: ATXN2; (-) strand; PAM type: YTN; PAM sequence: TTC
cttcacacaccccttagatg

SEQ ID NO: 73786 - DNA, 20 bp, Artificial Sequence
  Description of Artificial Sequence: Synthetic oligonucleotide
  Target: ATXN2; (-) strand; PAM type: YTN; PAM sequence: TTT
ccttcacacaccccttagat

SEQ ID NO: 73787 - DNA, 20 bp, Artificial Sequence
  Description of Artificial Sequence: Synthetic oligonucleotide
  Target: ATXN2; (-) strand; PAM type: YTN; PAM sequence: TTT
tccttcacacaccccttaga

SEQ ID NO: 73788 - DNA, 20 bp, Artificial Sequence
  Description of Artificial Sequence: Synthetic oligonucleotide
  Target: ATXN2; (-) strand; PAM type: YTN; PAM sequence: CTT
ttccttcacacaccccttag

SEQ ID NO: 73789 - DNA, 20 bp, Artificial Sequence
  Description of Artificial Sequence: Synthetic oligonucleotide
  Target: ATXN2; (-) strand; PAM type: YTN; PAM sequence: TTC
ttttccttcacacacccctt

SEQ ID NO: 73790 - DNA, 20 bp, Artificial Sequence
  Description of Artificial Sequence: Synthetic oligonucleotide
  Target: ATXN2; (-) strand; PAM type: YTN; PAM sequence: CTT
cttttccttcacacacccct

SEQ ID NO: 73791 - DNA, 20 bp, Artificial Sequence
  Description of Artificial Sequence: Synthetic oligonucleotide
  Target: ATXN2; (-) strand; PAM type: YTN; PAM sequence: CTG
ggcttcttttccttcacaca

SEQ ID NO: 73792 - DNA, 20 bp, Artificial Sequence
  Description of Artificial Sequence: Synthetic oligonucleotide
  Target: ATXN2; (-) strand; PAM type: YTN; PAM sequence: TTC
ctgggcttcttttccttcac

SEQ ID NO: 73793 - DNA, 20 bp, Artificial Sequence
  Description of Artificial Sequence: Synthetic oligonucleotide
  Target: ATXN2; (-) strand; PAM type: YTN; PAM sequence: CTC
attcctgggcttcttttcct

SEQ ID NO: 73794 - DNA, 20 bp, Artificial Sequence
  Description of Artificial Sequence: Synthetic oligonucleotide
  Target: ATXN2; (-) strand; PAM type: YTN; PAM sequence: CTG
cctcattcctgggcttcttt

SEQ ID NO: 73795 - DNA, 20 bp, Artificial Sequence
  Description of Artificial Sequence: Synthetic oligonucleotide
  Target: ATXN2; (-) strand; PAM type: YTN; PAM sequence: TTC
cctgcctcattcctgggctt

SEQ ID NO: 73796 - DNA, 20 bp, Artificial Sequence
  Description of Artificial Sequence: Synthetic oligonucleotide
  Target: ATXN2; (-) strand; PAM type: YTN; PAM sequence: CTT
ccctgcctcattcctgggct

SEQ ID NO: 73797 - DNA, 20 bp, Artificial Sequence
  Description of Artificial Sequence: Synthetic oligonucleotide
  Target: ATXN2; (-) strand; PAM type: YTN; PAM sequence: TTC
cttccctgcctcattcctgg

SEQ ID NO: 73798 - DNA, 20 bp, Artificial Sequence
  Description of Artificial Sequence: Synthetic oligonucleotide
  Target: ATXN2; (-) strand; PAM type: YTN; PAM sequence: TTG
atcattccttccctgcctca

SEQ ID NO: 73799 - DNA, 20 bp, Artificial Sequence
  Description of Artificial Sequence: Synthetic oligonucleotide
  Target: ATXN2; (-) strand; PAM type: YTN; PAM sequence: TTA
ttgatcattccttccctgcc

SEQ ID NO: 73800 - DNA, 20 bp, Artificial Sequence
  Description of Artificial Sequence: Synthetic oligonucleotide
  Target: ATXN2; (-) strand; PAM type: YTN; PAM sequence: TTT
attgatcattccttccctgc

SEQ ID NO: 73801 - DNA, 20 bp, Artificial Sequence
  Description of Artificial Sequence: Synthetic oligonucleotide
  Target: ATXN2; (-) strand; PAM type: YTN; PAM sequence: TTA
tgtttattgatcattccttc

SEQ ID NO: 73802 - DNA, 20 bp, Artificial Sequence
  Description of Artificial Sequence: Synthetic oligonucleotide
  Target: ATXN2; (-) strand; PAM type: YTN; PAM sequence: TTT
atgtttattgatcattcctt

SEQ ID NO: 73803 - DNA, 20 bp, Artificial Sequence
  Description of Artificial Sequence: Synthetic oligonucleotide
  Target: ATXN2; (-) strand; PAM type: YTN; PAM sequence: TTT
tatgtttattgatcattcct

SEQ ID NO: 73804 - DNA, 20 bp, Artificial Sequence
  Description of Artificial Sequence: Synthetic oligonucleotide
  Target: ATXN2; (-) strand; PAM type: YTN; PAM sequence: TTT
ttatgtttattgatcattcc

SEQ ID NO: 73805 - DNA, 20 bp, Artificial Sequence
  Description of Artificial Sequence: Synthetic oligonucleotide
  Target: ATXN2; (-) strand; PAM type: YTN; PAM sequence: TTT
tttatgtttattgatcattc

SEQ ID NO: 73806 - DNA, 20 bp, Artificial Sequence
  Description of Artificial Sequence: Synthetic oligonucleotide
  Target: ATXN2; (-) strand; PAM type: YTN; PAM sequence: CTG
tattttttatgtttattgat

SEQ ID NO: 73807 - DNA, 20 bp, Artificial Sequence
  Description of Artificial Sequence: Synthetic oligonucleotide
  Target: ATXN2; (-) strand; PAM type: YTN; PAM sequence: TTC
tgtattttttatgtttattg

SEQ ID NO: 73808 - DNA, 20 bp, Artificial Sequence
  Description of Artificial Sequence: Synthetic oligonucleotide
  Target: ATXN2; (-) strand; PAM type: YTN; PAM sequence: CTT
ctgtattttttatgtttatt

SEQ ID NO: 73809 - DNA, 20 bp, Artificial Sequence
  Description of Artificial Sequence: Synthetic oligonucleotide
  Target: ATXN2; (-) strand; PAM type: YTN; PAM sequence: CTC
ttctgtattttttatgttta

SEQ ID NO: 73810 - DNA, 20 bp, Artificial Sequence
  Description of Artificial Sequence: Synthetic oligonucleotide
  Target: ATXN2; (-) strand; PAM type: YTN; PAM sequence: TTC
ctcttctgtattttttatgt

SEQ ID NO: 73811 - DNA, 20 bp, Artificial Sequence
  Description of Artificial Sequence: Synthetic oligonucleotide
  Target: ATXN2; (-) strand; PAM type: YTN; PAM sequence: TTT
cctcttctgtattttttatg

SEQ ID NO: 73812 - DNA, 20 bp, Artificial Sequence
  Description of Artificial Sequence: Synthetic oligonucleotide
  Target: ATXN2; (-) strand; PAM type: YTN; PAM sequence: TTC
agaatttcctcttctgtatt

SEQ ID NO: 73813 - DNA, 20 bp, Artificial Sequence
  Description of Artificial Sequence: Synthetic oligonucleotide
  Target: ATXN2; (-) strand; PAM type: YTN; PAM sequence: CTT
cagaatttcctcttctgtat

SEQ ID NO: 73814 - DNA, 20 bp, Artificial Sequence
  Description of Artificial Sequence: Synthetic oligonucleotide
  Target: ATXN2; (-) strand; PAM type: YTN; PAM sequence: CTC
cttcagaatttcctcttctg

SEQ ID NO: 73815 - DNA, 20 bp, Artificial Sequence
  Description of Artificial Sequence: Synthetic oligonucleotide
  Target: ATXN2; (-) strand; PAM type: YTN; PAM sequence: TTC
accctccttcagaatttcct

SEQ ID NO: 73816 - DNA, 20 bp, Artificial Sequence
  Description of Artificial Sequence: Synthetic oligonucleotide
  Target: ATXN2; (-) strand; PAM type: YTN; PAM sequence: TTT
caccctccttcagaatttcc

SEQ ID NO: 73817 - DNA, 20 bp, Artificial Sequence
  Description of Artificial Sequence: Synthetic oligonucleotide
  Target: ATXN2; (-) strand; PAM type: YTN; PAM sequence: TTG
gtttcaccctccttcagaat

SEQ ID NO: 73818 - DNA, 20 bp, Artificial Sequence
  Description of Artificial Sequence: Synthetic oligonucleotide
  Target: ATXN2; (-) strand; PAM type: YTN; PAM sequence: TTG
aatgttggtttcaccctcct

SEQ ID NO: 73819 - DNA, 20 bp, Artificial Sequence
  Description of Artificial Sequence: Synthetic oligonucleotide
  Target: ATXN2; (-) strand; PAM type: YTN; PAM sequence: CTT
gaatgttggtttcaccctcc

SEQ ID NO: 73820 - DNA, 20 bp, Artificial Sequence
  Description of Artificial Sequence: Synthetic oligonucleotide
  Target: ATXN2; (-) strand; PAM type: YTN; PAM sequence: CTG
cacttgaatgttggtttcac

SEQ ID NO: 73821 - DNA, 20 bp, Artificial Sequence
  Description of Artificial Sequence: Synthetic oligonucleotide
  Target: ATXN2; (-) strand; PAM type: YTN; PAM sequence: TTG
ctgcacttgaatgttggttt

SEQ ID NO: 73822 - DNA, 20 bp, Artificial Sequence
  Description of Artificial Sequence: Synthetic oligonucleotide
  Target: ATXN2; (-) strand; PAM type: YTN; PAM sequence: TTA
ttgctgcacttgaatgttgg

SEQ ID NO: 73823 - DNA, 20 bp, Artificial Sequence
  Description of Artificial Sequence: Synthetic oligonucleotide
  Target: ATXN2; (-) strand; PAM type: YTN; PAM sequence: TTT
attgctgcacttgaatgttg

SEQ ID NO: 73824 - DNA, 20 bp, Artificial Sequence
  Description of Artificial Sequence: Synthetic oligonucleotide
  Target: ATXN2; (-) strand; PAM type: YTN; PAM sequence: CTT
tattgctgcacttgaatgtt

SEQ ID NO: 73825 - DNA, 20 bp, Artificial Sequence
  Description of Artificial Sequence: Synthetic oligonucleotide
  Target: ATXN2; (-) strand; PAM type: YTN; PAM sequence: CTG
tctttattgctgcacttgaa

SEQ ID NO: 73826 - DNA, 20 bp, Artificial Sequence
  Description of Artificial Sequence: Synthetic oligonucleotide
  Target: ATXN2; (-) strand; PAM type: YTN; PAM sequence: TTC
tgtctttattgctgcacttg

SEQ ID NO: 73827 - DNA, 20 bp, Artificial Sequence
  Description of Artificial Sequence: Synthetic oligonucleotide
  Target: ATXN2; (-) strand; PAM type: YTN; PAM sequence: TTT
ctgtctttattgctgcactt

SEQ ID NO: 73828 - DNA, 20 bp, Artificial Sequence
  Description of Artificial Sequence: Synthetic oligonucleotide
  Target: ATXN2; (-) strand; PAM type: YTN; PAM sequence: TTT
tctgtctttattgctgcact

SEQ ID NO: 73829 - DNA, 20 bp, Artificial Sequence
  Description of Artificial Sequence: Synthetic oligonucleotide
  Target: ATXN2; (-) strand; PAM type: YTN; PAM sequence: TTT
ttctgtctttattgctgcac

SEQ ID NO: 73830 - DNA, 20 bp, Artificial Sequence
  Description of Artificial Sequence: Synthetic oligonucleotide
  Target: ATXN2; (-) strand; PAM type: YTN; PAM sequence: CTT
tttctgtctttattgctgca

SEQ ID NO: 73831 - DNA, 20 bp, Artificial Sequence
  Description of Artificial Sequence: Synthetic oligonucleotide
  Target: ATXN2; (-) strand; PAM type: YTN; PAM sequence: TTG
gaatctttttctgtctttat

SEQ ID NO: 73832 - DNA, 20 bp, Artificial Sequence
  Description of Artificial Sequence: Synthetic oligonucleotide
  Target: ATXN2; (-) strand; PAM type: YTN; PAM sequence: TTT
ggaatctttttctgtcttta

SEQ ID NO: 73833 - DNA, 20 bp, Artificial Sequence
  Description of Artificial Sequence: Synthetic oligonucleotide
  Target: ATXN2; (-) strand; PAM type: YTN; PAM sequence: CTT
tggaatctttttctgtcttt

SEQ ID NO: 73834 - DNA, 20 bp, Artificial Sequence
  Description of Artificial Sequence: Synthetic oligonucleotide
  Target: ATXN2; (-) strand; PAM type: YTN; PAM sequence: CTG
ccaggtcctttggaatcttt

SEQ ID NO: 73835 - DNA, 20 bp, Artificial Sequence
  Description of Artificial Sequence: Synthetic oligonucleotide
  Target: ATXN2; (-) strand; PAM type: YTN; PAM sequence: CTA
actgccaggtcctttggaat

SEQ ID NO: 73836 - DNA, 20 bp, Artificial Sequence
  Description of Artificial Sequence: Synthetic oligonucleotide
  Target: ATXN2; (-) strand; PAM type: YTN; PAM sequence: CTC
taactgccaggtcctttgga

SEQ ID NO: 73837 - DNA, 20 bp, Artificial Sequence
  Description of Artificial Sequence: Synthetic oligonucleotide
  Target: ATXN2; (-) strand; PAM type: YTN; PAM sequence: TTA
acctctaactgccaggtcct

SEQ ID NO: 73838 - DNA, 20 bp, Artificial Sequence
  Description of Artificial Sequence: Synthetic oligonucleotide
  Target: ATXN2; (-) strand; PAM type: YTN; PAM sequence: CTA
cgattaacctctaactgcca

SEQ ID NO: 73839 - DNA, 20 bp, Artificial Sequence
  Description of Artificial Sequence: Synthetic oligonucleotide
  Target: ATXN2; (-) strand; PAM type: YTN; PAM sequence: CTA
aggctacgattaacctctaa

SEQ ID NO: 73840 - DNA, 20 bp, Artificial Sequence
  Description of Artificial Sequence: Synthetic oligonucleotide
  Target: ATXN2; (-) strand; PAM type: YTN; PAM sequence: CTG
cctaaggctacgattaacct

SEQ ID NO: 73841 - DNA, 20 bp, Artificial Sequence
  Description of Artificial Sequence: Synthetic oligonucleotide
  Target: ATXN2; (-) strand; PAM type: YTN; PAM sequence: TTA
tcctgcctaaggctacgatt

SEQ ID NO: 73842 - DNA, 20 bp, Artificial Sequence
  Description of Artificial Sequence: Synthetic oligonucleotide
  Target: ATXN2; (-) strand; PAM type: YTN; PAM sequence: CTA
gccattatcctgcctaaggc

SEQ ID NO: 73843 - DNA, 20 bp, Artificial Sequence
  Description of Artificial Sequence: Synthetic oligonucleotide
  Target: ATXN2; (-) strand; PAM type: YTN; PAM sequence: TTC
tagccattatcctgcctaag

SEQ ID NO: 73844 - DNA, 20 bp, Artificial Sequence
  Description of Artificial Sequence: Synthetic oligonucleotide
  Target: ATXN2; (-) strand; PAM type: YTN; PAM sequence: CTT
ctagccattatcctgcctaa

SEQ ID NO: 73845 - DNA, 20 bp, Artificial Sequence
  Description of Artificial Sequence: Synthetic oligonucleotide
  Target: ATXN2; (-) strand; PAM type: YTN; PAM sequence: TTC
ttctagccattatcctgcct

SEQ ID NO: 73846 - DNA, 20 bp, Artificial Sequence
  Description of Artificial Sequence: Synthetic oligonucleotide
  Target: ATXN2; (-) strand; PAM type: YTN; PAM sequence: CTG
aattcttctagccattatcc

SEQ ID NO: 73847 - DNA, 20 bp, Artificial Sequence
  Description of Artificial Sequence: Synthetic oligonucleotide
  Target: ATXN2; (-) strand; PAM type: YTN; PAM sequence: TTA
atcctgaattcttctagcca

SEQ ID NO: 73848 - DNA, 20 bp, Artificial Sequence
  Description of Artificial Sequence: Synthetic oligonucleotide
  Target: ATXN2; (-) strand; PAM type: YTN; PAM sequence: TTT
aatcctgaattcttctagcc

SEQ ID NO: 73849 - DNA, 20 bp, Artificial Sequence
  Description of Artificial Sequence: Synthetic oligonucleotide
  Target: ATXN2; (-) strand; PAM type: YTN; PAM sequence: TTT
taatcctgaattcttctagc

SEQ ID NO: 73850 - DNA, 20 bp, Artificial Sequence
  Description of Artificial Sequence: Synthetic oligonucleotide
  Target: ATXN2; (-) strand; PAM type: YTN; PAM sequence: TTT
ttaatcctgaattcttctag

SEQ ID NO: 73851 - DNA, 20 bp, Artificial Sequence
  Description of Artificial Sequence: Synthetic oligonucleotide
  Target: ATXN2; (-) strand; PAM type: YTN; PAM sequence: CTT
tttaatcctgaattcttcta

SEQ ID NO: 73852 - DNA, 20 bp, Artificial Sequence
  Description of Artificial Sequence: Synthetic oligonucleotide
  Target: ATXN2; (-) strand; PAM type: YTN; PAM sequence: TTC
tttttaatcctgaattcttc

SEQ ID NO: 73853 - DNA, 20 bp, Artificial Sequence
  Description of Artificial Sequence: Synthetic oligonucleotide
  Target: ATXN2; (-) strand; PAM type: YTN; PAM sequence: CTG
ggcccaaaaggattcttttt

SEQ ID NO: 73854 - DNA, 20 bp, Artificial Sequence
  Description of Artificial Sequence: Synthetic oligonucleotide
  Target: ATXN2; (-) strand; PAM type: YTN; PAM sequence: TTA
caggcatgagccaccgcact

SEQ ID NO: 73855 - DNA, 20 bp, Artificial Sequence
  Description of Artificial Sequence: Synthetic oligonucleotide
  Target: ATXN2; (-) strand; PAM type: YTN; PAM sequence: CTG
ggattacaggcatgagccac

SEQ ID NO: 73856 - DNA, 20 bp, Artificial Sequence
  Description of Artificial Sequence: Synthetic oligonucleotide
  Target: ATXN2; (-) strand; PAM type: YTN; PAM sequence: CTC
ccaaagtgctgggattacag

SEQ ID NO: 73857 - DNA, 20 bp, Artificial Sequence
  Description of Artificial Sequence: Synthetic oligonucleotide
  Target: ATXN2; (-) strand; PAM type: YTN; PAM sequence: CTC
ggcctcccaaagtgctggga

SEQ ID NO: 73858 - DNA, 20 bp, Artificial Sequence
  Description of Artificial Sequence: Synthetic oligonucleotide
  Target: ATXN2; (-) strand; PAM type: YTN; PAM sequence: CTG
cctcggcctcccaaagtgct

SEQ ID NO: 73859 - DNA, 20 bp, Artificial Sequence
  Description of Artificial Sequence: Synthetic oligonucleotide
  Target: ATXN2; (-) strand; PAM type: YTN; PAM sequence: TTG
tgatccatctgcctcggcct

SEQ ID NO: 73860 - DNA, 20 bp, Artificial Sequence
  Description of Artificial Sequence: Synthetic oligonucleotide
  Target: ATXN2; (-) strand; PAM type: YTN; PAM sequence: CTT
gtgatccatctgcctcggcc

SEQ ID NO: 73861 - DNA, 20 bp, Artificial Sequence
  Description of Artificial Sequence: Synthetic oligonucleotide
  Target: ATXN2; (-) strand; PAM type: YTN; PAM sequence: CTG
accttgtgatccatctgcct

SEQ ID NO: 73862 - DNA, 20 bp, Artificial Sequence
  Description of Artificial Sequence: Synthetic oligonucleotide
  Target: ATXN2; (-) strand; PAM type: YTN; PAM sequence: CTC
ctgaccttgtgatccatctg

SEQ ID NO: 73863 - DNA, 20 bp, Artificial Sequence
  Description of Artificial Sequence: Synthetic oligonucleotide
  Target: ATXN2; (-) strand; PAM type: YTN; PAM sequence: CTC
gatctcctgaccttgtgatc

SEQ ID NO: 73864 - DNA, 20 bp, Artificial Sequence
  Description of Artificial Sequence: Synthetic oligonucleotide
  Target: ATXN2; (-) strand; PAM type: YTN; PAM sequence: CTA
ggatggtctcgatctcctga

SEQ ID NO: 73865 - DNA, 20 bp, Artificial Sequence
  Description of Artificial Sequence: Synthetic oligonucleotide
  Target: ATXN2; (-) strand; PAM type: YTN; PAM sequence: TTA
gctaggatggtctcgatctc

SEQ ID NO: 73866 - DNA, 20 bp, Artificial Sequence
  Description of Artificial Sequence: Synthetic oligonucleotide
  Target: ATXN2; (-) strand; PAM type: YTN; PAM sequence: TTC
accgtgttagctaggatggt

SEQ ID NO: 73867 - DNA, 20 bp, Artificial Sequence
  Description of Artificial Sequence: Synthetic oligonucleotide
  Target: ATXN2; (-) strand; PAM type: YTN; PAM sequence: TTT
caccgtgttagctaggatgg

SEQ ID NO: 73868 - DNA, 20 bp, Artificial Sequence
  Description of Artificial Sequence: Synthetic oligonucleotide
  Target: ATXN2; (-) strand; PAM type: YTN; PAM sequence: TTA
gtagagatggggtttcaccg

SEQ ID NO: 73869 - DNA, 20 bp, Artificial Sequence
  Description of Artificial Sequence: Synthetic oligonucleotide
  Target: ATXN2; (-) strand; PAM type: YTN; PAM sequence: TTT
agtagagatggggtttcacc

SEQ ID NO: 73870 - DNA, 20 bp, Artificial Sequence
  Description of Artificial Sequence: Synthetic oligonucleotide
  Target: ATXN2; (-) strand; PAM type: YTN; PAM sequence: TTT
tagtagagatggggtttcac

SEQ ID NO: 73871 - DNA, 20 bp, Artificial Sequence
  Description of Artificial Sequence: Synthetic oligonucleotide
  Target: ATXN2; (-) strand; PAM type: YTN; PAM sequence: TTT
ttagtagagatggggtttca

SEQ ID NO: 73872 - DNA, 20 bp, Artificial Sequence
  Description of Artificial Sequence: Synthetic oligonucleotide
  Target: ATXN2; (-) strand; PAM type: YTN; PAM sequence: TTG
tatttttagtagagatgggg

SEQ ID NO: 73873 - DNA, 20 bp, Artificial Sequence
  Description of Artificial Sequence: Synthetic oligonucleotide
  Target: ATXN2; (-) strand; PAM type: YTN; PAM sequence: TTT
gtatttttagtagagatggg

SEQ ID NO: 73874 - DNA, 20 bp, Artificial Sequence
  Description of Artificial Sequence: Synthetic oligonucleotide
  Target: ATXN2; (-) strand; PAM type: YTN; PAM sequence: TTT
tgtatttttagtagagatgg

SEQ ID NO: 73875 - DNA, 20 bp, Artificial Sequence
  Description of Artificial Sequence: Synthetic oligonucleotide
  Target: ATXN2; (-) strand; PAM type: YTN; PAM sequence: TTT
ttgtatttttagtagagatg

SEQ ID NO: 73876 - DNA, 20 bp, Artificial Sequence
  Description of Artificial Sequence: Synthetic oligonucleotide
  Target: ATXN2; (-) strand; PAM type: YTN; PAM sequence: CTA
aatttttgtatttttagtag

SEQ ID NO: 73877 - DNA, 20 bp, Artificial Sequence
  Description of Artificial Sequence: Synthetic oligonucleotide
  Target: ATXN2; (-) strand; PAM type: YTN; PAM sequence: CTG
ccaccacgcccagctaaatt

SEQ ID NO: 73878 - DNA, 20 bp, Artificial Sequence
  Description of Artificial Sequence: Synthetic oligonucleotide
  Target: ATXN2; (-) strand; PAM type: YTN; PAM sequence: CTA
caggcacctgccaccacgcc

SEQ ID NO: 73879 - DNA, 20 bp, Artificial Sequence
  Description of Artificial Sequence: Synthetic oligonucleotide
  Target: ATXN2; (-) strand; PAM type: YTN; PAM sequence: CTG
ggactacaggcacctgccac

SEQ ID NO: 73880 - DNA, 20 bp, Artificial Sequence
  Description of Artificial Sequence: Synthetic oligonucleotide
  Target: ATXN2; (-) strand; PAM type: YTN; PAM sequence: CTC
ccgagtagctgggactacag

SEQ ID NO: 73881 - DNA, 20 bp, Artificial Sequence
  Description of Artificial Sequence: Synthetic oligonucleotide
  Target: ATXN2; (-) strand; PAM type: YTN; PAM sequence: CTC
agcctcccgagtagctggga

SEQ ID NO: 73882 - DNA, 20 bp, Artificial Sequence
  Description of Artificial Sequence: Synthetic oligonucleotide
  Target: ATXN2; (-) strand; PAM type: YTN; PAM sequence: CTG
cctcagcctcccgagtagct

SEQ ID NO: 73883 - DNA, 20 bp, Artificial Sequence
  Description of Artificial Sequence: Synthetic oligonucleotide
  Target: ATXN2; (-) strand; PAM type: YTN; PAM sequence: CTC
ctgcctcagcctcccgagta

SEQ ID NO: 73884 - DNA, 20 bp, Artificial Sequence
  Description of Artificial Sequence: Synthetic oligonucleotide
  Target: ATXN2; (-) strand; PAM type: YTN; PAM sequence: TTC
tcctgcctcagcctcccgag

SEQ ID NO: 73885 - DNA, 20 bp, Artificial Sequence
  Description of Artificial Sequence: Synthetic oligonucleotide
  Target: ATXN2; (-) strand; PAM type: YTN; PAM sequence: TTC
acgccattctcctgcctcag

SEQ ID NO: 73886 - DNA, 20 bp, Artificial Sequence
  Description of Artificial Sequence: Synthetic oligonucleotide
  Target: ATXN2; (-) strand; PAM type: YTN; PAM sequence: CTC
ccgggttcacgccattctcc

SEQ ID NO: 73887 - DNA, 20 bp, Artificial Sequence
  Description of Artificial Sequence: Synthetic oligonucleotide
  Target: ATXN2; (-) strand; PAM type: YTN; PAM sequence: CTC
cgcctcccgggttcacgcca

SEQ ID NO: 73888 - DNA, 20 bp, Artificial Sequence
  Description of Artificial Sequence: Synthetic oligonucleotide
  Target: ATXN2; (-) strand; PAM type: YTN; PAM sequence: CTG
caagctccgcctcccgggtt

SEQ ID NO: 73889 - DNA, 20 bp, Artificial Sequence
  Description of Artificial Sequence: Synthetic oligonucleotide
  Target: ATXN2; (-) strand; PAM type: YTN; PAM sequence: CTC
actgcaagctccgcctcccg

SEQ ID NO: 73890 - DNA, 20 bp, Artificial Sequence
  Description of Artificial Sequence: Synthetic oligonucleotide
  Target: ATXN2; (-) strand; PAM type: YTN; PAM sequence: TTG
gctcactgcaagctccgcct

SEQ ID NO: 73891 - DNA, 20 bp, Artificial Sequence
  Description of Artificial Sequence: Synthetic oligonucleotide
  Target: ATXN2; (-) strand; PAM type: YTN; PAM sequence: CTT
ggctcactgcaagctccgcc

SEQ ID NO: 73892 - DNA, 20 bp, Artificial Sequence
  Description of Artificial Sequence: Synthetic oligonucleotide
  Target: ATXN2; (-) strand; PAM type: YTN; PAM sequence: CTA
tcttggctcactgcaagctc

SEQ ID NO: 73893 - DNA, 20 bp, Artificial Sequence
  Description of Artificial Sequence: Synthetic oligonucleotide
  Target: ATXN2; (-) strand; PAM type: YTN; PAM sequence: CTG
gagtgcagtggcactatctt

SEQ ID NO: 73894 - DNA, 20 bp, Artificial Sequence
  Description of Artificial Sequence: Synthetic oligonucleotide
  Target: ATXN2; (-) strand; PAM type: YTN; PAM sequence: TTG
cccaggctggagtgcagtgg

SEQ ID NO: 73895 - DNA, 20 bp, Artificial Sequence
  Description of Artificial Sequence: Synthetic oligonucleotide
  Target: ATXN2; (-) strand; PAM type: YTN; PAM sequence: CTT
gcccaggctggagtgcagtg

SEQ ID NO: 73896 - DNA, 20 bp, Artificial Sequence
  Description of Artificial Sequence: Synthetic oligonucleotide
  Target: ATXN2; (-) strand; PAM type: YTN; PAM sequence: CTC
ttgcccaggctggagtgcag

SEQ ID NO: 73897 - DNA, 20 bp, Artificial Sequence
  Description of Artificial Sequence: Synthetic oligonucleotide
  Target: ATXN2; (-) strand; PAM type: YTN; PAM sequence: CTC
gctcttgcccaggctggagt

SEQ ID NO: 73898 - DNA, 20 bp, Artificial Sequence
  Description of Artificial Sequence: Synthetic oligonucleotide
  Target: ATXN2; (-) strand; PAM type: YTN; PAM sequence: TTG
agacagagtctcgctcttgc

SEQ ID NO: 73899 - DNA, 20 bp, Artificial Sequence
  Description of Artificial Sequence: Synthetic oligonucleotide
  Target: ATXN2; (-) strand; PAM type: YTN; PAM sequence: TTT
gagacagagtctcgctcttg

SEQ ID NO: 73900 - DNA, 20 bp, Artificial Sequence
  Description of Artificial Sequence: Synthetic oligonucleotide
  Target: ATXN2; (-) strand; PAM type: YTN; PAM sequence: TTT
tgagacagagtctcgctctt

SEQ ID NO: 73901 - DNA, 20 bp, Artificial Sequence
  Description of Artificial Sequence: Synthetic oligonucleotide
  Target: ATXN2; (-) strand; PAM type: YTN; PAM sequence: TTT
ttgagacagagtctcgctct

SEQ ID NO: 73902 - DNA, 20 bp, Artificial Sequence
  Description of Artificial Sequence: Synthetic oligonucleotide
  Target: ATXN2; (-) strand; PAM type: YTN; PAM sequence: TTG
tttttgagacagagtctcgc

SEQ ID NO: 73903 - DNA, 20 bp, Artificial Sequence
  Description of Artificial Sequence: Synthetic oligonucleotide
  Target: ATXN2; (-) strand; PAM type: YTN; PAM sequence: TTT
gtttttgagacagagtctcg

SEQ ID NO: 73904 - DNA, 20 bp, Artificial Sequence
  Description of Artificial Sequence: Synthetic oligonucleotide
  Target: ATXN2; (-) strand; PAM type: YTN; PAM sequence: TTT
tgtttttgagacagagtctc

SEQ ID NO: 73905 - DNA, 20 bp, Artificial Sequence
  Description of Artificial Sequence: Synthetic oligonucleotide
  Target: ATXN2; (-) strand; PAM type: YTN; PAM sequence: TTT
ttgtttttgagacagagtct

SEQ ID NO: 73906 - DNA, 20 bp, Artificial Sequence
  Description of Artificial Sequence: Synthetic oligonucleotide
  Target: ATXN2; (-) strand; PAM type: YTN; PAM sequence: TTG
tttttgtttttgagacagag

SEQ ID NO: 73907 - DNA, 20 bp, Artificial Sequence
  Description of Artificial Sequence: Synthetic oligonucleotide
  Target: ATXN2; (-) strand; PAM type: YTN; PAM sequence: TTT
gtttttgtttttgagacaga

SEQ ID NO: 73908 - DNA, 20 bp, Artificial Sequence
  Description of Artificial Sequence: Synthetic oligonucleotide
  Target: ATXN2; (-) strand; PAM type: YTN; PAM sequence: TTT
tgtttttgtttttgagacag

SEQ ID NO: 73909 - DNA, 20 bp, Artificial Sequence
  Description of Artificial Sequence: Synthetic oligonucleotide
  Target: ATXN2; (-) strand; PAM type: YTN; PAM sequence: TTG
ttttgtttttgtttttgaga

SEQ ID NO: 73910 - DNA, 20 bp, Artificial Sequence
  Description of Artificial Sequence: Synthetic oligonucleotide
  Target: ATXN2; (-) strand; PAM type: YTN; PAM sequence: TTT
gttttgtttttgtttttgag

SEQ ID NO: 73911 - DNA, 20 bp, Artificial Sequence
  Description of Artificial Sequence: Synthetic oligonucleotide
  Target: ATXN2; (-) strand; PAM type: YTN; PAM sequence: TTT
tgttttgtttttgtttttga

SEQ ID NO: 73912 - DNA, 20 bp, Artificial Sequence
  Description of Artificial Sequence: Synthetic oligonucleotide
  Target: ATXN2; (-) strand; PAM type: YTN; PAM sequence: TTG
ttttgttttgtttttgtttt

SEQ ID NO: 73913 - DNA, 20 bp, Artificial Sequence
  Description of Artificial Sequence: Synthetic oligonucleotide
  Target: ATXN2; (-) strand; PAM type: YTN; PAM sequence: TTT
gttttgttttgtttttgttt

SEQ ID NO: 73914 - DNA, 20 bp, Artificial Sequence
  Description of Artificial Sequence: Synthetic oligonucleotide
  Target: ATXN2; (-) strand; PAM type: YTN; PAM sequence: TTT
tgttttgttttgtttttgtt

SEQ ID NO: 73915 - DNA, 20 bp, Artificial Sequence
  Description of Artificial Sequence: Synthetic oligonucleotide
  Target: ATXN2; (-) strand; PAM type: YTN; PAM sequence: TTT
ttgttttgttttgtttttgt

SEQ ID NO: 73916 - DNA, 20 bp, Artificial Sequence
  Description of Artificial Sequence: Synthetic oligonucleotide
  Target: ATXN2; (-) strand; PAM type: YTN; PAM sequence: TTT
tttgttttgttttgtttttg

SEQ ID NO: 73917 - DNA, 20 bp, Artificial Sequence
  Description of Artificial Sequence: Synthetic oligonucleotide
  Target: ATXN2; (-) strand; PAM type: YTN; PAM sequence: CTT
ttttgttttgttttgttttt

SEQ ID NO: 73918 - DNA, 20 bp, Artificial Sequence
  Description of Artificial Sequence: Synthetic oligonucleotide
  Target: ATXN2; (-) strand; PAM type: YTN; PAM sequence: TTC
ttttttgttttgttttgttt

SEQ ID NO: 73919 - DNA, 20 bp, Artificial Sequence
  Description of Artificial Sequence: Synthetic oligonucleotide
  Target: ATXN2; (-) strand; PAM type: YTN; PAM sequence: CTA
aaaaggattcttttttgttt

SEQ ID NO: 73920 - DNA, 20 bp, Artificial Sequence
  Description of Artificial Sequence: Synthetic oligonucleotide
  Target: ATXN2; (-) strand; PAM type: YTN; PAM sequence: CTC
atcctaaaaaggattctttt

SEQ ID NO: 73921 - DNA, 20 bp, Artificial Sequence
  Description of Artificial Sequence: Synthetic oligonucleotide
  Target: ATXN2; (-) strand; PAM type: YTN; PAM sequence: CTG
ctcatcctaaaaaggattct

SEQ ID NO: 73922 - DNA, 20 bp, Artificial Sequence
  Description of Artificial Sequence: Synthetic oligonucleotide
  Target: ATXN2; (-) strand; PAM type: YTN; PAM sequence: TTC
ctgctcatcctaaaaaggat

SEQ ID NO: 73923 - DNA, 20 bp, Artificial Sequence
  Description of Artificial Sequence: Synthetic oligonucleotide
  Target: ATXN2; (-) strand; PAM type: YTN; PAM sequence: CTT
cctgctcatcctaaaaagga

SEQ ID NO: 73924 - DNA, 20 bp, Artificial Sequence
  Description of Artificial Sequence: Synthetic oligonucleotide
  Target: ATXN2; (-) strand; PAM type: YTN; PAM sequence: TTC
acttcctgctcatcctaaaa

SEQ ID NO: 73925 - DNA, 20 bp, Artificial Sequence
  Description of Artificial Sequence: Synthetic oligonucleotide
  Target: ATXN2; (-) strand; PAM type: YTN; PAM sequence: CTA
ttcacttcctgctcatccta

SEQ ID NO: 73926 - DNA, 20 bp, Artificial Sequence
  Description of Artificial Sequence: Synthetic oligonucleotide
  Target: ATXN2; (-) strand; PAM type: YTN; PAM sequence: TTA
gcatgaaaacctattcactt

SEQ ID NO: 73927 - DNA, 20 bp, Artificial Sequence
  Description of Artificial Sequence: Synthetic oligonucleotide
  Target: ATXN2; (-) strand; PAM type: YTN; PAM sequence: TTT
agcatgaaaacctattcact

SEQ ID NO: 73928 - DNA, 20 bp, Artificial Sequence
  Description of Artificial Sequence: Synthetic oligonucleotide
  Target: ATXN2; (-) strand; PAM type: YTN; PAM sequence: CTT
tagcatgaaaacctattcac

SEQ ID NO: 73929 - DNA, 20 bp, Artificial Sequence
  Description of Artificial Sequence: Synthetic oligonucleotide
  Target: ATXN2; (-) strand; PAM type: YTN; PAM sequence: TTC
cctttagcatgaaaacctat

SEQ ID NO: 73930 - DNA, 20 bp, Artificial Sequence
  Description of Artificial Sequence: Synthetic oligonucleotide
  Target: ATXN2; (-) strand; PAM type: YTN; PAM sequence: TTT
ccctttagcatgaaaaccta

SEQ ID NO: 73931 - DNA, 20 bp, Artificial Sequence
  Description of Artificial Sequence: Synthetic oligonucleotide
  Target: ATXN2; (-) strand; PAM type: YTN; PAM sequence: CTT
tccctttagcatgaaaacct

SEQ ID NO: 73932 - DNA, 20 bp, Artificial Sequence
  Description of Artificial Sequence: Synthetic oligonucleotide
  Target: ATXN2; (-) strand; PAM type: YTN; PAM sequence: TTA
atctttccctttagcatgaa

SEQ ID NO: 73933 - DNA, 20 bp, Artificial Sequence
  Description of Artificial Sequence: Synthetic oligonucleotide
  Target: ATXN2; (-) strand; PAM type: YTN; PAM sequence: CTA
gttaatctttccctttagca

SEQ ID NO: 73934 - DNA, 20 bp, Artificial Sequence
  Description of Artificial Sequence: Synthetic oligonucleotide
  Target: ATXN2; (-) strand; PAM type: YTN; PAM sequence: TTC
tagttaatctttccctttag

SEQ ID NO: 73935 - DNA, 20 bp, Artificial Sequence
  Description of Artificial Sequence: Synthetic oligonucleotide
  Target: ATXN2; (-) strand; PAM type: YTN; PAM sequence: TTT
ctagttaatctttcccttta

SEQ ID NO: 73936 - DNA, 20 bp, Artificial Sequence
  Description of Artificial Sequence: Synthetic oligonucleotide
  Target: ATXN2; (-) strand; PAM type: YTN; PAM sequence: CTT
tctagttaatctttcccttt

SEQ ID NO: 73937 - DNA, 20 bp, Artificial Sequence
  Description of Artificial Sequence: Synthetic oligonucleotide
  Target: ATXN2; (-) strand; PAM type: YTN; PAM sequence: CTG
cctttctagttaatctttcc

SEQ ID NO: 73938 - DNA, 20 bp, Artificial Sequence
  Description of Artificial Sequence: Synthetic oligonucleotide
  Target: ATXN2; (-) strand; PAM type: YTN; PAM sequence: TTC
aacatctgcctttctagtta

SEQ ID NO: 73939 - DNA, 20 bp, Artificial Sequence
  Description of Artificial Sequence: Synthetic oligonucleotide
  Target: ATXN2; (-) strand; PAM type: YTN; PAM sequence: CTT
caacatctgcctttctagtt

SEQ ID NO: 73940 - DNA, 20 bp, Artificial Sequence
  Description of Artificial Sequence: Synthetic oligonucleotide
  Target: ATXN2; (-) strand; PAM type: YTN; PAM sequence: CTC
ttcaacatctgcctttctag

SEQ ID NO: 73941 - DNA, 20 bp, Artificial Sequence
  Description of Artificial Sequence: Synthetic oligonucleotide
  Target: ATXN2; (-) strand; PAM type: YTN; PAM sequence: CTG
ggctcttcaacatctgcctt

SEQ ID NO: 73942 - DNA, 20 bp, Artificial Sequence
  Description of Artificial Sequence: Synthetic oligonucleotide
  Target: ATXN2; (-) strand; PAM type: YTN; PAM sequence: TTC
tgggctcttcaacatctgcc

SEQ ID NO: 73943 - DNA, 20 bp, Artificial Sequence
  Description of Artificial Sequence: Synthetic oligonucleotide
  Target: ATXN2; (-) strand; PAM type: YTN; PAM sequence: TTT
ctgggctcttcaacatctgc

SEQ ID NO: 73944 - DNA, 20 bp, Artificial Sequence
  Description of Artificial Sequence: Synthetic oligonucleotide
  Target: ATXN2; (-) strand; PAM type: YTN; PAM sequence: CTG
tttctgggctcttcaacatc

SEQ ID NO: 73945 - DNA, 20 bp, Artificial Sequence
  Description of Artificial Sequence: Synthetic oligonucleotide
  Target: ATXN2; (-) strand; PAM type: YTN; PAM sequence: CTC
tgtttctgggctcttcaaca

SEQ ID NO: 73946 - DNA, 20 bp, Artificial Sequence
  Description of Artificial Sequence: Synthetic oligonucleotide
  Target: ATXN2; (-) strand; PAM type: YTN; PAM sequence: TTC
tctgtttctgggctcttcaa

SEQ ID NO: 73947 - DNA, 20 bp, Artificial Sequence
  Description of Artificial Sequence: Synthetic oligonucleotide
  Target: ATXN2; (-) strand; PAM type: YTN; PAM sequence: CTT
ctctgtttctgggctcttca

SEQ ID NO: 73948 - DNA, 20 bp, Artificial Sequence
  Description of Artificial Sequence: Synthetic oligonucleotide
  Target: ATXN2; (-) strand; PAM type: YTN; PAM sequence: TTA
taccacttctctgtttctgg

SEQ ID NO: 73949 - DNA, 20 bp, Artificial Sequence
  Description of Artificial Sequence: Synthetic oligonucleotide
  Target: ATXN2; (-) strand; PAM type: YTN; PAM sequence: TTT
ataccacttctctgtttctg

SEQ ID NO: 73950 - DNA, 20 bp, Artificial Sequence
  Description of Artificial Sequence: Synthetic oligonucleotide
  Target: ATXN2; (-) strand; PAM type: YTN; PAM sequence: TTT
tataccacttctctgtttct

SEQ ID NO: 73951 - DNA, 20 bp, Artificial Sequence
  Description of Artificial Sequence: Synthetic oligonucleotide
  Target: ATXN2; (-) strand; PAM type: YTN; PAM sequence: CTT
ttataccacttctctgtttc

SEQ ID NO: 73952 - DNA, 20 bp, Artificial Sequence
  Description of Artificial Sequence: Synthetic oligonucleotide
  Target: ATXN2; (-) strand; PAM type: YTN; PAM sequence: CTC
ttttataccacttctctgtt

SEQ ID NO: 73953 - DNA, 20 bp, Artificial Sequence
  Description of Artificial Sequence: Synthetic oligonucleotide
  Target: ATXN2; (-) strand; PAM type: YTN; PAM sequence: TTG
ctcttttataccacttctct

SEQ ID NO: 73954 - DNA, 20 bp, Artificial Sequence
  Description of Artificial Sequence: Synthetic oligonucleotide
  Target: ATXN2; (-) strand; PAM type: YTN; PAM sequence: CTT
gctcttttataccacttctc

SEQ ID NO: 73955 - DNA, 20 bp, Artificial Sequence
  Description of Artificial Sequence: Synthetic oligonucleotide
  Target: ATXN2; (-) strand; PAM type: YTN; PAM sequence: CTC
cttgctcttttataccactt

SEQ ID NO: 73956 - DNA, 20 bp, Artificial Sequence
  Description of Artificial Sequence: Synthetic oligonucleotide
  Target: ATXN2; (-) strand; PAM type: YTN; PAM sequence: TTC
tccttgctcttttataccac

SEQ ID NO: 73957 - DNA, 20 bp, Artificial Sequence
  Description of Artificial Sequence: Synthetic oligonucleotide
  Target: ATXN2; (-) strand; PAM type: YTN; PAM sequence: TTT
ctccttgctcttttatacca

SEQ ID NO: 73958 - DNA, 20 bp, Artificial Sequence
  Description of Artificial Sequence: Synthetic oligonucleotide
  Target: ATXN2; (-) strand; PAM type: YTN; PAM sequence: TTT
tctccttgctcttttatacc

SEQ ID NO: 73959 - DNA, 20 bp, Artificial Sequence
  Description of Artificial Sequence: Synthetic oligonucleotide
  Target: ATXN2; (-) strand; PAM type: YTN; PAM sequence: TTT
ttctccttgctcttttatac

SEQ ID NO: 73960 - DNA, 20 bp, Artificial Sequence
  Description of Artificial Sequence: Synthetic oligonucleotide
  Target: ATXN2; (-) strand; PAM type: YTN; PAM sequence: TTT
tttctccttgctcttttata

SEQ ID NO: 73961 - DNA, 20 bp, Artificial Sequence
  Description of Artificial Sequence: Synthetic oligonucleotide
  Target: ATXN2; (-) strand; PAM type: YTN; PAM sequence: TTT
ttttctccttgctcttttat

SEQ ID NO: 73962 - DNA, 20 bp, Artificial Sequence
  Description of Artificial Sequence: Synthetic oligonucleotide
  Target: ATXN2; (-) strand; PAM type: YTN; PAM sequence: TTT
tttttctccttgctctttta

SEQ ID NO: 73963 - DNA, 20 bp, Artificial Sequence
  Description of Artificial Sequence: Synthetic oligonucleotide
  Target: ATXN2; (-) strand; PAM type: YTN; PAM sequence: TTT
ttttttctccttgctctttt

SEQ ID NO: 73964 - DNA, 20 bp, Artificial Sequence
  Description of Artificial Sequence: Synthetic oligonucleotide
  Target: ATXN2; (-) strand; PAM type: YTN; PAM sequence: CTT
tttttttctccttgctcttt

SEQ ID NO: 73965 - DNA, 20 bp, Artificial Sequence
  Description of Artificial Sequence: Synthetic oligonucleotide
  Target: ATXN2; (-) strand; PAM type: YTN; PAM sequence: CTG
gccatctttttttttctcct

SEQ ID NO: 73966 - DNA, 20 bp, Artificial Sequence
  Description of Artificial Sequence: Synthetic oligonucleotide
  Target: ATXN2; (-) strand; PAM type: YTN; PAM sequence: TTA
caggcgtgagccaccacgcc

SEQ ID NO: 73967 - DNA, 20 bp, Artificial Sequence
  Description of Artificial Sequence: Synthetic oligonucleotide
  Target: ATXN2; (-) strand; PAM type: YTN; PAM sequence: CTG
ggattacaggcgtgagccac

SEQ ID NO: 73968 - DNA, 20 bp, Artificial Sequence
  Description of Artificial Sequence: Synthetic oligonucleotide
  Target: ATXN2; (-) strand; PAM type: YTN; PAM sequence: CTC
ccaaagtgctgggattacag

SEQ ID NO: 73969 - DNA, 20 bp, Artificial Sequence
  Description of Artificial Sequence: Synthetic oligonucleotide
  Target: ATXN2; (-) strand; PAM type: YTN; PAM sequence: CTC
agcctcccaaagtgctggga

SEQ ID NO: 73970 - DNA, 20 bp, Artificial Sequence
  Description of Artificial Sequence: Synthetic oligonucleotide
  Target: ATXN2; (-) strand; PAM type: YTN; PAM sequence: CTG
cctcagcctcccaaagtgct

SEQ ID NO: 73971 - DNA, 20 bp, Artificial Sequence
  Description of Artificial Sequence: Synthetic oligonucleotide
  Target: ATXN2; (-) strand; PAM type: YTN; PAM sequence: CTC
aagtgatcacctgcctcagc

SEQ ID NO: 73972 - DNA, 20 bp, Artificial Sequence
  Description of Artificial Sequence: Synthetic oligonucleotide
  Target: ATXN2; (-) strand; PAM type: YTN; PAM sequence: CTG
acctcaagtgatcacctgcc

SEQ ID NO: 73973 - DNA, 20 bp, Artificial Sequence
  Description of Artificial Sequence: Synthetic oligonucleotide
  Target: ATXN2; (-) strand; PAM type: YTN; PAM sequence: CTC
ctgacctcaagtgatcacct

SEQ ID NO: 73974 - DNA, 20 bp, Artificial Sequence
  Description of Artificial Sequence: Synthetic oligonucleotide
  Target: ATXN2; (-) strand; PAM type: YTN; PAM sequence: CTC
gaactcctgacctcaagtga

SEQ ID NO: 73975 - DNA, 20 bp, Artificial Sequence
  Description of Artificial Sequence: Synthetic oligonucleotide
  Target: ATXN2; (-) strand; PAM type: YTN; PAM sequence: CTG
gtctcgaactcctgacctca

SEQ ID NO: 73976 - DNA, 20 bp, Artificial Sequence
  Description of Artificial Sequence: Synthetic oligonucleotide
  Target: ATXN2; (-) strand; PAM type: YTN; PAM sequence: TTG
gccaggctggtctcgaactc

SEQ ID NO: 73977 - DNA, 20 bp, Artificial Sequence
  Description of Artificial Sequence: Synthetic oligonucleotide
  Target: ATXN2; (-) strand; PAM type: YTN; PAM sequence: TTC
accatgttggccaggctggt

SEQ ID NO: 73978 - DNA, 20 bp, Artificial Sequence
  Description of Artificial Sequence: Synthetic oligonucleotide
  Target: ATXN2; (-) strand; PAM type: YTN; PAM sequence: TTT
caccatgttggccaggctgg

SEQ ID NO: 73979 - DNA, 20 bp, Artificial Sequence
  Description of Artificial Sequence: Synthetic oligonucleotide
  Target: ATXN2; (-) strand; PAM type: YTN; PAM sequence: TTA
gtagagatggggtttcacca

SEQ ID NO: 73980 - DNA, 20 bp, Artificial Sequence
  Description of Artificial Sequence: Synthetic oligonucleotide
  Target: ATXN2; (-) strand; PAM type: YTN; PAM sequence: TTT
agtagagatggggtttcacc

SEQ ID NO: 73981 - DNA, 20 bp, Artificial Sequence
  Description of Artificial Sequence: Synthetic oligonucleotide
  Target: ATXN2; (-) strand; PAM type: YTN; PAM sequence: TTT
tagtagagatggggtttcac

SEQ ID NO: 73982 - DNA, 20 bp, Artificial Sequence
  Description of Artificial Sequence: Synthetic oligonucleotide
  Target: ATXN2; (-) strand; PAM type: YTN; PAM sequence: TTT
ttagtagagatggggtttca

SEQ ID NO: 73983 - DNA, 20 bp, Artificial Sequence
  Description of Artificial Sequence: Synthetic oligonucleotide
  Target: ATXN2; (-) strand; PAM type: YTN; PAM sequence: TTG
tatttttagtagagatgggg

SEQ ID NO: 73984 - DNA, 20 bp, Artificial Sequence
  Description of Artificial Sequence: Synthetic oligonucleotide
  Target: ATXN2; (-) strand; PAM type: YTN; PAM sequence: TTT
gtatttttagtagagatggg

SEQ ID NO: 73985 - DNA, 20 bp, Artificial Sequence
  Description of Artificial Sequence: Synthetic oligonucleotide
  Target: ATXN2; (-) strand; PAM type: YTN; PAM sequence: TTT
tgtatttttagtagagatgg

SEQ ID NO: 73986 - DNA, 20 bp, Artificial Sequence
  Description of Artificial Sequence: Synthetic oligonucleotide
  Target: ATXN2; (-) strand; PAM type: YTN; PAM sequence: TTT
ttgtatttttagtagagatg

SEQ ID NO: 73987 - DNA, 20 bp, Artificial Sequence
  Description of Artificial Sequence: Synthetic oligonucleotide
  Target: ATXN2; (-) strand; PAM type: YTN; PAM sequence: CTA
atttttgtatttttagtaga

SEQ ID NO: 73988 - DNA, 20 bp, Artificial Sequence
  Description of Artificial Sequence: Synthetic oligonucleotide
  Target: ATXN2; (-) strand; PAM type: YTN; PAM sequence: CTG
ccaccacgcccggctaattt

SEQ ID NO: 73989 - DNA, 20 bp, Artificial Sequence
  Description of Artificial Sequence: Synthetic oligonucleotide
  Target: ATXN2; (-) strand; PAM type: YTN; PAM sequence: CTA
taggtgcctgccaccacgcc

SEQ ID NO: 73990 - DNA, 20 bp, Artificial Sequence
  Description of Artificial Sequence: Synthetic oligonucleotide
  Target: ATXN2; (-) strand; PAM type: YTN; PAM sequence: CTG
gggctataggtgcctgccac

SEQ ID NO: 73991 - DNA, 20 bp, Artificial Sequence
  Description of Artificial Sequence: Synthetic oligonucleotide
  Target: ATXN2; (-) strand; PAM type: YTN; PAM sequence: CTG
agtagctggggctataggtg

SEQ ID NO: 73992 - DNA, 20 bp, Artificial Sequence
  Description of Artificial Sequence: Synthetic oligonucleotide
  Target: ATXN2; (-) strand; PAM type: YTN; PAM sequence: CTC
ctgagtagctggggctatag

SEQ ID NO: 73993 - DNA, 20 bp, Artificial Sequence
  Description of Artificial Sequence: Synthetic oligonucleotide
  Target: ATXN2; (-) strand; PAM type: YTN; PAM sequence: CTC
agcctcctgagtagctgggg

SEQ ID NO: 73994 - DNA, 20 bp, Artificial Sequence
  Description of Artificial Sequence: Synthetic oligonucleotide
  Target: ATXN2; (-) strand; PAM type: YTN; PAM sequence: CTG
cagcctcagcctcctgagta

SEQ ID NO: 73995 - DNA, 20 bp, Artificial Sequence
  Description of Artificial Sequence: Synthetic oligonucleotide
  Target: ATXN2; (-) strand; PAM type: YTN; PAM sequence: CTC
actgcagcctcagcctcctg

SEQ ID NO: 73996 - DNA, 20 bp, Artificial Sequence
  Description of Artificial Sequence: Synthetic oligonucleotide
  Target: ATXN2; (-) strand; PAM type: YTN; PAM sequence: TTC
agctcactgcagcctcagcc

SEQ ID NO: 73997 - DNA, 20 bp, Artificial Sequence
  Description of Artificial Sequence: Synthetic oligonucleotide
  Target: ATXN2; (-) strand; PAM type: YTN; PAM sequence: TTT
cagctcactgcagcctcagc

SEQ ID NO: 73998 - DNA, 20 bp, Artificial Sequence
  Description of Artificial Sequence: Synthetic oligonucleotide
  Target: ATXN2; (-) strand; PAM type: YTN; PAM sequence: CTG
aagtgcagtggcgtgatttc

SEQ ID NO: 73999 - DNA, 20 bp, Artificial Sequence
  Description of Artificial Sequence: Synthetic oligonucleotide
  Target: ATXN2; (-) strand; PAM type: YTN; PAM sequence: CTG
tcacccaggctgaagtgcag

SEQ ID NO: 74000 - DNA, 20 bp, Artificial Sequence
  Description of Artificial Sequence: Synthetic oligonucleotide
  Target: ATXN2; (-) strand; PAM type: YTN; PAM sequence: CTC
ggtctgtcacccaggctgaa

SEQ ID NO: 74001 - DNA, 20 bp, Artificial Sequence
  Description of Artificial Sequence: Synthetic oligonucleotide
  Target: ATXN2; (-) strand; PAM type: YTN; PAM sequence: TTA
gatggagtctcggtctgtca

SEQ ID NO: 74002 - DNA, 20 bp, Artificial Sequence
  Description of Artificial Sequence: Synthetic oligonucleotide
  Target: ATXN2; (-) strand; PAM type: YTN; PAM sequence: TTT
agatggagtctcggtctgtc

SEQ ID NO: 74003 - DNA, 20 bp, Artificial Sequence
  Description of Artificial Sequence: Synthetic oligonucleotide
  Target: ATXN2; (-) strand; PAM type: YTN; PAM sequence: TTT
tagatggagtctcggtctgt

SEQ ID NO: 74004 - DNA, 20 bp, Artificial Sequence
  Description of Artificial Sequence: Synthetic oligonucleotide
  Target: ATXN2; (-) strand; PAM type: YTN; PAM sequence: TTT
ttagatggagtctcggtctg

SEQ ID NO: 74005 - DNA, 20 bp, Artificial Sequence
  Description of Artificial Sequence: Synthetic oligonucleotide
  Target: ATXN2; (-) strand; PAM type: YTN; PAM sequence: TTT
tttagatggagtctcggtct

SEQ ID NO: 74006 - DNA, 20 bp, Artificial Sequence
  Description of Artificial Sequence: Synthetic oligonucleotide
  Target: ATXN2; (-) strand; PAM type: YTN; PAM sequence: TTT
ttttagatggagtctcggtc

SEQ ID NO: 74007 - DNA, 20 bp, Artificial Sequence
  Description of Artificial Sequence: Synthetic oligonucleotide
  Target: ATXN2; (-) strand; PAM type: YTN; PAM sequence: TTT
tttttagatggagtctcggt

SEQ ID NO: 74008 - DNA, 20 bp, Artificial Sequence
  Description of Artificial Sequence: Synthetic oligonucleotide
  Target: ATXN2; (-) strand; PAM type: YTN; PAM sequence: TTT
ttttttagatggagtctcgg

SEQ ID NO: 74009 - DNA, 20 bp, Artificial Sequence
  Description of Artificial Sequence: Synthetic oligonucleotide
  Target: ATXN2; (-) strand; PAM type: YTN; PAM sequence: CTT
tttttttagatggagtctcg

SEQ ID NO: 74010 - DNA, 20 bp, Artificial Sequence
  Description of Artificial Sequence: Synthetic oligonucleotide
  Target: ATXN2; (-) strand; PAM type: YTN; PAM sequence: TTC
tttttttttagatggagtct

SEQ ID NO: 74011 - DNA, 20 bp, Artificial Sequence
  Description of Artificial Sequence: Synthetic oligonucleotide
  Target: ATXN2; (-) strand; PAM type: YTN; PAM sequence: TTT
ctttttttttagatggagtc

SEQ ID NO: 74012 - DNA, 20 bp, Artificial Sequence
  Description of Artificial Sequence: Synthetic oligonucleotide
  Target: ATXN2; (-) strand; PAM type: YTN; PAM sequence: TTT
tctttttttttagatggagt

SEQ ID NO: 74013 - DNA, 20 bp, Artificial Sequence
  Description of Artificial Sequence: Synthetic oligonucleotide
  Target: ATXN2; (-) strand; PAM type: YTN; PAM sequence: TTT
ttctttttttttagatggag

SEQ ID NO: 74014 - DNA, 20 bp, Artificial Sequence
  Description of Artificial Sequence: Synthetic oligonucleotide
  Target: ATXN2; (-) strand; PAM type: YTN; PAM sequence: CTT
tttctttttttttagatgga

SEQ ID NO: 74015 - DNA, 20 bp, Artificial Sequence
  Description of Artificial Sequence: Synthetic oligonucleotide
  Target: ATXN2; (-) strand; PAM type: YTN; PAM sequence: TTC
tttttctttttttttagatg

SEQ ID NO: 74016 - DNA, 20 bp, Artificial Sequence
  Description of Artificial Sequence: Synthetic oligonucleotide
  Target: ATXN2; (-) strand; PAM type: YTN; PAM sequence: TTT
ctttttctttttttttagat

SEQ ID NO: 74017 - DNA, 20 bp, Artificial Sequence
  Description of Artificial Sequence: Synthetic oligonucleotide
  Target: ATXN2; (-) strand; PAM type: YTN; PAM sequence: TTT
tctttttctttttttttaga

SEQ ID NO: 74018 - DNA, 20 bp, Artificial Sequence
  Description of Artificial Sequence: Synthetic oligonucleotide
  Target: ATXN2; (-) strand; PAM type: YTN; PAM sequence: TTT
ttctttttctttttttttag

SEQ ID NO: 74019 - DNA, 20 bp, Artificial Sequence
  Description of Artificial Sequence: Synthetic oligonucleotide
  Target: ATXN2; (-) strand; PAM type: YTN; PAM sequence: CTT
tttctttttcttttttttta

SEQ ID NO: 74020 - DNA, 20 bp, Artificial Sequence
  Description of Artificial Sequence: Synthetic oligonucleotide
  Target: ATXN2; (-) strand; PAM type: YTN; PAM sequence: CTC
tttttctttttctttttttt

SEQ ID NO: 74021 - DNA, 20 bp, Artificial Sequence
  Description of Artificial Sequence: Synthetic oligonucleotide
  Target: ATXN2; (-) strand; PAM type: YTN; PAM sequence: TTC
tctttttctttttctttttt

SEQ ID NO: 74022 - DNA, 20 bp, Artificial Sequence
  Description of Artificial Sequence: Synthetic oligonucleotide
  Target: ATXN2; (-) strand; PAM type: YTN; PAM sequence: TTG
ttctctttttctttttcttt

SEQ ID NO: 74023 - DNA, 20 bp, Artificial Sequence
  Description of Artificial Sequence: Synthetic oligonucleotide
  Target: ATXN2; (-) strand; PAM type: YTN; PAM sequence: CTT
gttctctttttctttttctt

SEQ ID NO: 74024 - DNA, 20 bp, Artificial Sequence
  Description of Artificial Sequence: Synthetic oligonucleotide
  Target: ATXN2; (-) strand; PAM type: YTN; PAM sequence: CTC
cttgttctctttttcttttt

SEQ ID NO: 74025 - DNA, 20 bp, Artificial Sequence
  Description of Artificial Sequence: Synthetic oligonucleotide
  Target: ATXN2; (-) strand; PAM type: YTN; PAM sequence: TTA
cctccttgttctctttttct

SEQ ID NO: 74026 - DNA, 20 bp, Artificial Sequence
  Description of Artificial Sequence: Synthetic oligonucleotide
  Target: ATXN2; (-) strand; PAM type: YTN; PAM sequence: CTT
acctccttgttctctttttc

SEQ ID NO: 74027 - DNA, 20 bp, Artificial Sequence
  Description of Artificial Sequence: Synthetic oligonucleotide
  Target: ATXN2; (-) strand; PAM type: YTN; PAM sequence: CTA
cttacctccttgttctcttt

SEQ ID NO: 74028 - DNA, 20 bp, Artificial Sequence
  Description of Artificial Sequence: Synthetic oligonucleotide
  Target: ATXN2; (-) strand; PAM type: YTN; PAM sequence: TTC
tacttacctccttgttctct

SEQ ID NO: 74029 - DNA, 20 bp, Artificial Sequence
  Description of Artificial Sequence: Synthetic oligonucleotide
  Target: ATXN2; (-) strand; PAM type: YTN; PAM sequence: CTT
ctacttacctccttgttctc

SEQ ID NO: 74030 - DNA, 20 bp, Artificial Sequence
  Description of Artificial Sequence: Synthetic oligonucleotide
  Target: ATXN2; (-) strand; PAM type: YTN; PAM sequence: CTC
ccttctacttacctccttgt

SEQ ID NO: 74031 - DNA, 20 bp, Artificial Sequence
  Description of Artificial Sequence: Synthetic oligonucleotide
  Target: ATXN2; (-) strand; PAM type: YTN; PAM sequence: CTC
tcccttctacttacctcctt

SEQ ID NO: 74032 - DNA, 20 bp, Artificial Sequence
  Description of Artificial Sequence: Synthetic oligonucleotide
  Target: ATXN2; (-) strand; PAM type: YTN; PAM sequence: CTC
tctcccttctacttacctcc

SEQ ID NO: 74033 - DNA, 20 bp, Artificial Sequence
  Description of Artificial Sequence: Synthetic oligonucleotide
  Target: ATXN2; (-) strand; PAM type: YTN; PAM sequence: TTG
actctctcccttctacttac

SEQ ID NO: 74034 - DNA, 20 bp, Artificial Sequence
  Description of Artificial Sequence: Synthetic oligonucleotide
  Target: ATXN2; (-) strand; PAM type: YTN; PAM sequence: CTT
gactctctcccttctactta

SEQ ID NO: 74035 - DNA, 20 bp, Artificial Sequence
  Description of Artificial Sequence: Synthetic oligonucleotide
  Target: ATXN2; (-) strand; PAM type: YTN; PAM sequence: TTC
aatcatgcccttgactctct

SEQ ID NO: 74036 - DNA, 20 bp, Artificial Sequence
  Description of Artificial Sequence: Synthetic oligonucleotide
  Target: ATXN2; (-) strand; PAM type: YTN; PAM sequence: CTT
caatcatgcccttgactctc

SEQ ID NO: 74037 - DNA, 20 bp, Artificial Sequence
  Description of Artificial Sequence: Synthetic oligonucleotide
  Target: ATXN2; (-) strand; PAM type: YTN; PAM sequence: TTA
agccaacttcaatcatgccc

SEQ ID NO: 74038 - DNA, 20 bp, Artificial Sequence
  Description of Artificial Sequence: Synthetic oligonucleotide
  Target: ATXN2; (-) strand; PAM type: YTN; PAM sequence: TTT
aagccaacttcaatcatgcc

SEQ ID NO: 74039 - DNA, 20 bp, Artificial Sequence
  Description of Artificial Sequence: Synthetic oligonucleotide
  Target: ATXN2; (-) strand; PAM type: YTN; PAM sequence: TTT
taagccaacttcaatcatgc

SEQ ID NO: 74040 - DNA, 20 bp, Artificial Sequence
  Description of Artificial Sequence: Synthetic oligonucleotide
  Target: ATXN2; (-) strand; PAM type: YTN; PAM sequence: TTT
ttaagccaacttcaatcatg

SEQ ID NO: 74041 - DNA, 20 bp, Artificial Sequence
  Description of Artificial Sequence: Synthetic oligonucleotide
  Target: ATXN2; (-) strand; PAM type: YTN; PAM sequence: TTA
gtagagaggatttttaagcc

SEQ ID NO: 74042 - DNA, 20 bp, Artificial Sequence
  Description of Artificial Sequence: Synthetic oligonucleotide
  Target: ATXN2; (-) strand; PAM type: YTN; PAM sequence: TTT
agtagagaggatttttaagc

SEQ ID NO: 74043 - DNA, 20 bp, Artificial Sequence
  Description of Artificial Sequence: Synthetic oligonucleotide
  Target: ATXN2; (-) strand; PAM type: YTN; PAM sequence: TTT
tagtagagaggatttttaag

SEQ ID NO: 74044 - DNA, 20 bp, Artificial Sequence
  Description of Artificial Sequence: Synthetic oligonucleotide
  Target: ATXN2; (-) strand; PAM type: YTN; PAM sequence: CTG
gttttagtagagaggatttt

SEQ ID NO: 74045 - DNA, 20 bp, Artificial Sequence
  Description of Artificial Sequence: Synthetic oligonucleotide
  Target: ATXN2; (-) strand; PAM type: YTN; PAM sequence: CTC
tggttttagtagagaggatt

SEQ ID NO: 74046 - DNA, 20 bp, Artificial Sequence
  Description of Artificial Sequence: Synthetic oligonucleotide
  Target: ATXN2; (-) strand; PAM type: YTN; PAM sequence: TTC
ctctggttttagtagagagg

SEQ ID NO: 74047 - DNA, 20 bp, Artificial Sequence
  Description of Artificial Sequence: Synthetic oligonucleotide
  Target: ATXN2; (-) strand; PAM type: YTN; PAM sequence: TTT
cctctggttttagtagagag

SEQ ID NO: 74048 - DNA, 20 bp, Artificial Sequence
  Description of Artificial Sequence: Synthetic oligonucleotide
  Target: ATXN2; (-) strand; PAM type: YTN; PAM sequence: TTT
tcctctggttttagtagaga

SEQ ID NO: 74049 - DNA, 20 bp, Artificial Sequence
  Description of Artificial Sequence: Synthetic oligonucleotide
  Target: ATXN2; (-) strand; PAM type: YTN; PAM sequence: TTT
ttcctctggttttagtagag

SEQ ID NO: 74050 - DNA, 20 bp, Artificial Sequence
  Description of Artificial Sequence: Synthetic oligonucleotide
  Target: ATXN2; (-) strand; PAM type: YTN; PAM sequence: TTA
tttttcctctggttttagta

SEQ ID NO: 74051 - DNA, 20 bp, Artificial Sequence
  Description of Artificial Sequence: Synthetic oligonucleotide
  Target: ATXN2; (-) strand; PAM type: YTN; PAM sequence: TTA
ttatttttcctctggtttta

SEQ ID NO: 74052 - DNA, 20 bp, Artificial Sequence
  Description of Artificial Sequence: Synthetic oligonucleotide
  Target: ATXN2; (-) strand; PAM type: YTN; PAM sequence: CTC
attattatttttcctctggt

SEQ ID NO: 74053 - DNA, 20 bp, Artificial Sequence
  Description of Artificial Sequence: Synthetic oligonucleotide
  Target: ATXN2; (-) strand; PAM type: YTN; PAM sequence: TTA
catgagtcaccgcacccggc

SEQ ID NO: 74054 - DNA, 20 bp, Artificial Sequence
  Description of Artificial Sequence: Synthetic oligonucleotide
  Target: ATXN2; (-) strand; PAM type: YTN; PAM sequence: CTG
ggattacatgagtcaccgca

SEQ ID NO: 74055 - DNA, 20 bp, Artificial Sequence
  Description of Artificial Sequence: Synthetic oligonucleotide
  Target: ATXN2; (-) strand; PAM type: YTN; PAM sequence: CTC
ccaaagtcctgggattacat

SEQ ID NO: 74056 - DNA, 20 bp, Artificial Sequence
  Description of Artificial Sequence: Synthetic oligonucleotide
  Target: ATXN2; (-) strand; PAM type: YTN; PAM sequence: TTG
gcctcccaaagtcctgggat

SEQ ID NO: 74057 - DNA, 20 bp, Artificial Sequence
  Description of Artificial Sequence: Synthetic oligonucleotide
  Target: ATXN2; (-) strand; PAM type: YTN; PAM sequence: CTT
ggcctcccaaagtcctggga

SEQ ID NO: 74058 - DNA, 20 bp, Artificial Sequence
  Description of Artificial Sequence: Synthetic oligonucleotide
  Target: ATXN2; (-) strand; PAM type: YTN; PAM sequence: TTC
ccaccttggcctcccaaagt

SEQ ID NO: 74059 - DNA, 20 bp, Artificial Sequence
  Description of Artificial Sequence: Synthetic oligonucleotide
  Target: ATXN2; (-) strand; PAM type: YTN; PAM sequence: CTT
cccaccttggcctcccaaag

SEQ ID NO: 74060 - DNA, 20 bp, Artificial Sequence
  Description of Artificial Sequence: Synthetic oligonucleotide
  Target: ATXN2; (-) strand; PAM type: YTN; PAM sequence: CTA
agagtcttcccaccttggcc

SEQ ID NO: 74061 - DNA, 20 bp, Artificial Sequence
  Description of Artificial Sequence: Synthetic oligonucleotide
  Target: ATXN2; (-) strand; PAM type: YTN; PAM sequence: CTG
ggcctaagagtcttcccacc

SEQ ID NO: 74062 - DNA, 20 bp, Artificial Sequence
  Description of Artificial Sequence: Synthetic oligonucleotide
  Target: ATXN2; (-) strand; PAM type: YTN; PAM sequence: CTG
ctgggcctaagagtcttccc

SEQ ID NO: 74063 - DNA, 20 bp, Artificial Sequence
  Description of Artificial Sequence: Synthetic oligonucleotide
  Target: ATXN2; (-) strand; PAM type: YTN; PAM sequence: CTC
aaactgctgggcctaagagt

SEQ ID NO: 74064 - DNA, 20 bp, Artificial Sequence
  Description of Artificial Sequence: Synthetic oligonucleotide
  Target: ATXN2; (-) strand; PAM type: YTN; PAM sequence: CTG
gtctcaaactgctgggccta

SEQ ID NO: 74065 - DNA, 20 bp, Artificial Sequence
  Description of Artificial Sequence: Synthetic oligonucleotide
  Target: ATXN2; (-) strand; PAM type: YTN; PAM sequence: TTG
cacaggctggtctcaaactg

SEQ ID NO: 74066 - DNA, 20 bp, Artificial Sequence
  Description of Artificial Sequence: Synthetic oligonucleotide
  Target: ATXN2; (-) strand; PAM type: YTN; PAM sequence: CTG
tattgcacaggctggtctca

SEQ ID NO: 74067 - DNA, 20 bp, Artificial Sequence
  Description of Artificial Sequence: Synthetic oligonucleotide
  Target: ATXN2; (-) strand; PAM type: YTN; PAM sequence: TTC
cctgtattgcacaggctggt

SEQ ID NO: 74068 - DNA, 20 bp, Artificial Sequence
  Description of Artificial Sequence: Synthetic oligonucleotide
  Target: ATXN2; (-) strand; PAM type: YTN; PAM sequence: TTT
ccctgtattgcacaggctgg

SEQ ID NO: 74069 - DNA, 20 bp, Artificial Sequence
  Description of Artificial Sequence: Synthetic oligonucleotide
  Target: ATXN2; (-) strand; PAM type: YTN; PAM sequence: TTG
tagagatggggtttccctgt

SEQ ID NO: 74070 - DNA, 20 bp, Artificial Sequence
  Description of Artificial Sequence: Synthetic oligonucleotide
  Target: ATXN2; (-) strand; PAM type: YTN; PAM sequence: TTT
gtagagatggggtttccctg

SEQ ID NO: 74071 - DNA, 20 bp, Artificial Sequence
  Description of Artificial Sequence: Synthetic oligonucleotide
  Target: ATXN2; (-) strand; PAM type: YTN; PAM sequence: TTT
tgtagagatggggtttccct

SEQ ID NO: 74072 - DNA, 20 bp, Artificial Sequence
  Description of Artificial Sequence: Synthetic oligonucleotide
  Target: ATXN2; (-) strand; PAM type: YTN; PAM sequence: TTT
ttgtagagatggggtttccc

SEQ ID NO: 74073 - DNA, 20 bp, Artificial Sequence
  Description of Artificial Sequence: Synthetic oligonucleotide
  Target: ATXN2; (-) strand; PAM type: YTN; PAM sequence: TTT
tttgtagagatggggtttcc

SEQ ID NO: 74074 - DNA, 20 bp, Artificial Sequence
  Description of Artificial Sequence: Synthetic oligonucleotide
  Target: ATXN2; (-) strand; PAM type: YTN; PAM sequence: TTA
tattttttgtagagatgggg

SEQ ID NO: 74075 - DNA, 20 bp, Artificial Sequence
  Description of Artificial Sequence: Synthetic oligonucleotide
  Target: ATXN2; (-) strand; PAM type: YTN; PAM sequence: TTT
atattttttgtagagatggg

SEQ ID NO: 74076 - DNA, 20 bp, Artificial Sequence
  Description of Artificial Sequence: Synthetic oligonucleotide
  Target: ATXN2; (-) strand; PAM type: YTN; PAM sequence: TTA
tatttatattttttgtagag

SEQ ID NO: 74077 - DNA, 20 bp, Artificial Sequence
  Description of Artificial Sequence: Synthetic oligonucleotide
  Target: ATXN2; (-) strand; PAM type: YTN; PAM sequence: TTT
atatttatattttttgtaga

SEQ ID NO: 74078 - DNA, 20 bp, Artificial Sequence
  Description of Artificial Sequence: Synthetic oligonucleotide
  Target: ATXN2; (-) strand; PAM type: YTN; PAM sequence: TTT
tatatttatattttttgtag

SEQ ID NO: 74079 - DNA, 20 bp, Artificial Sequence
  Description of Artificial Sequence: Synthetic oligonucleotide
  Target: ATXN2; (-) strand; PAM type: YTN; PAM sequence: TTT
ttatatttatattttttgta

SEQ ID NO: 74080 - DNA, 20 bp, Artificial Sequence
  Description of Artificial Sequence: Synthetic oligonucleotide
  Target: ATXN2; (-) strand; PAM type: YTN; PAM sequence: TTT
tttatatttatattttttgt

SEQ ID NO: 74081 - DNA, 20 bp, Artificial Sequence
  Description of Artificial Sequence: Synthetic oligonucleotide
  Target: ATXN2; (-) strand; PAM type: YTN; PAM sequence: CTA
attttttatatttatatttt

SEQ ID NO: 74082 - DNA, 20 bp, Artificial Sequence
  Description of Artificial Sequence: Synthetic oligonucleotide
  Target: ATXN2; (-) strand; PAM type: YTN; PAM sequence: CTG
actaattttttatatttata

SEQ ID NO: 74083 - DNA, 20 bp, Artificial Sequence
  Description of Artificial Sequence: Synthetic oligonucleotide
  Target: ATXN2; (-) strand; PAM type: YTN; PAM sequence: CTA
tgcctgactaattttttata

SEQ ID NO: 74084 - DNA, 20 bp, Artificial Sequence
  Description of Artificial Sequence: Synthetic oligonucleotide
  Target: ATXN2; (-) strand; PAM type: YTN; PAM sequence: CTG
tatgtgcacatcactatgcc

SEQ ID NO: 74085 - DNA, 20 bp, Artificial Sequence
  Description of Artificial Sequence: Synthetic oligonucleotide
  Target: ATXN2; (-) strand; PAM type: YTN; PAM sequence: CTG
ggactgtatgtgcacatcac

SEQ ID NO: 74086 - DNA, 20 bp, Artificial Sequence
  Description of Artificial Sequence: Synthetic oligonucleotide
  Target: ATXN2; (-) strand; PAM type: YTN; PAM sequence: CTA
cataactgggactgtatgtg

SEQ ID NO: 74087 - DNA, 20 bp, Artificial Sequence
  Description of Artificial Sequence: Synthetic oligonucleotide
  Target: ATXN2; (-) strand; PAM type: YTN; PAM sequence: CTC
ctacataactgggactgtat

SEQ ID NO: 74088 - DNA, 20 bp, Artificial Sequence
  Description of Artificial Sequence: Synthetic oligonucleotide
  Target: ATXN2; (-) strand; PAM type: YTN; PAM sequence: CTC
aacctcctacataactggga

SEQ ID NO: 74089 - DNA, 20 bp, Artificial Sequence
  Description of Artificial Sequence: Synthetic oligonucleotide
  Target: ATXN2; (-) strand; PAM type: YTN; PAM sequence: CTC
acctcaacctcctacataac

SEQ ID NO: 74090 - DNA, 20 bp, Artificial Sequence
  Description of Artificial Sequence: Synthetic oligonucleotide
  Target: ATXN2; (-) strand; PAM type: YTN; PAM sequence: CTC
tcacctcaacctcctacata

SEQ ID NO: 74091 - DNA, 20 bp, Artificial Sequence
  Description of Artificial Sequence: Synthetic oligonucleotide
  Target: ATXN2; (-) strand; PAM type: YTN; PAM sequence: CTC
aggtgatcctctcacctcaa

SEQ ID NO: 74092 - DNA, 20 bp, Artificial Sequence
  Description of Artificial Sequence: Synthetic oligonucleotide
  Target: ATXN2; (-) strand; PAM type: YTN; PAM sequence: TTC
ccaggctcaggtgatcctct

SEQ ID NO: 74093 - DNA, 20 bp, Artificial Sequence
  Description of Artificial Sequence: Synthetic oligonucleotide
  Target: ATXN2; (-) strand; PAM type: YTN; PAM sequence: CTT
cccaggctcaggtgatcctc

SEQ ID NO: 74094 - DNA, 20 bp, Artificial Sequence
  Description of Artificial Sequence: Synthetic oligonucleotide
  Target: ATXN2; (-) strand; PAM type: YTN; PAM sequence: CTC
gacttcccaggctcaggtga

SEQ ID NO: 74095 - DNA, 20 bp, Artificial Sequence
  Description of Artificial Sequence: Synthetic oligonucleotide
  Target: ATXN2; (-) strand; PAM type: YTN; PAM sequence: CTG
cagcctcgacttcccaggct

SEQ ID NO: 74096 - DNA, 20 bp, Artificial Sequence
  Description of Artificial Sequence: Synthetic oligonucleotide
  Target: ATXN2; (-) strand; PAM type: YTN; PAM sequence: CTC
actgcagcctcgacttccca

SEQ ID NO: 74097 - DNA, 20 bp, Artificial Sequence
  Description of Artificial Sequence: Synthetic oligonucleotide
  Target: ATXN2; (-) strand; PAM type: YTN; PAM sequence: CTG
gagtgcagtgatgcaatcac

SEQ ID NO: 74098 - DNA, 20 bp, Artificial Sequence
  Description of Artificial Sequence: Synthetic oligonucleotide
  Target: ATXN2; (-) strand; PAM type: YTN; PAM sequence: TTG
cccaggctggagtgcagtga

SEQ ID NO: 74099 - DNA, 20 bp, Artificial Sequence
  Description of Artificial Sequence: Synthetic oligonucleotide
  Target: ATXN2; (-) strand; PAM type: YTN; PAM sequence: CTG
ttgcccaggctggagtgcag

SEQ ID NO: 74100 - DNA, 20 bp, Artificial Sequence
  Description of Artificial Sequence: Synthetic oligonucleotide
  Target: ATXN2; (-) strand; PAM type: YTN; PAM sequence: CTC
tgttgcccaggctggagtgc

SEQ ID NO: 74101 - DNA, 20 bp, Artificial Sequence
  Description of Artificial Sequence: Synthetic oligonucleotide
  Target: ATXN2; (-) strand; PAM type: YTN; PAM sequence: TTG
ctctgttgcccaggctggag

SEQ ID NO: 74102 - DNA, 20 bp, Artificial Sequence
  Description of Artificial Sequence: Synthetic oligonucleotide
  Target: ATXN2; (-) strand; PAM type: YTN; PAM sequence: CTT
gctctgttgcccaggctgga

SEQ ID NO: 74103 - DNA, 20 bp, Artificial Sequence
  Description of Artificial Sequence: Synthetic oligonucleotide
  Target: ATXN2; (-) strand; PAM type: YTN; PAM sequence: TTC
agatgatcttgctctgttgc

SEQ ID NO: 74104 - DNA, 20 bp, Artificial Sequence
  Description of Artificial Sequence: Synthetic oligonucleotide
  Target: ATXN2; (-) strand; PAM type: YTN; PAM sequence: TTT
cagatgatcttgctctgttg

SEQ ID NO: 74105 - DNA, 20 bp, Artificial Sequence
  Description of Artificial Sequence: Synthetic oligonucleotide
  Target: ATXN2; (-) strand; PAM type: YTN; PAM sequence: TTT
tcagatgatcttgctctgtt

SEQ ID NO: 74106 - DNA, 20 bp, Artificial Sequence
  Description of Artificial Sequence: Synthetic oligonucleotide
  Target: ATXN2; (-) strand; PAM type: YTN; PAM sequence: TTT
ttcagatgatcttgctctgt

SEQ ID NO: 74107 - DNA, 20 bp, Artificial Sequence
  Description of Artificial Sequence: Synthetic oligonucleotide
  Target: ATXN2; (-) strand; PAM type: YTN; PAM sequence: TTT
tttcagatgatcttgctctg

SEQ ID NO: 74108 - DNA, 20 bp, Artificial Sequence
  Description of Artificial Sequence: Synthetic oligonucleotide
  Target: ATXN2; (-) strand; PAM type: YTN; PAM sequence: TTT
ttttcagatgatcttgctct

SEQ ID NO: 74109 - DNA, 20 bp, Artificial Sequence
  Description of Artificial Sequence: Synthetic oligonucleotide
  Target: ATXN2; (-) strand; PAM type: YTN; PAM sequence: TTT
tttttcagatgatcttgctc

SEQ ID NO: 74110 - DNA, 20 bp, Artificial Sequence
  Description of Artificial Sequence: Synthetic oligonucleotide
  Target: ATXN2; (-) strand; PAM type: YTN; PAM sequence: TTT
ttttttcagatgatcttgct

SEQ ID NO: 74111 - DNA, 20 bp, Artificial Sequence
  Description of Artificial Sequence: Synthetic oligonucleotide
  Target: ATXN2; (-) strand; PAM type: YTN; PAM sequence: TTT
tttttttcagatgatcttgc

SEQ ID NO: 74112 - DNA, 20 bp, Artificial Sequence
  Description of Artificial Sequence: Synthetic oligonucleotide
  Target: ATXN2; (-) strand; PAM type: YTN; PAM sequence: TTT
ttttttttcagatgatcttg

SEQ ID NO: 74113 - DNA, 20 bp, Artificial Sequence
  Description of Artificial Sequence: Synthetic oligonucleotide
  Target: ATXN2; (-) strand; PAM type: YTN; PAM sequence: TTT
tttttttttcagatgatctt

SEQ ID NO: 74114 - DNA, 20 bp, Artificial Sequence
  Description of Artificial Sequence: Synthetic oligonucleotide
  Target: ATXN2; (-) strand; PAM type: YTN; PAM sequence: TTT
ttttttttttcagatgatct

SEQ ID NO: 74115 - DNA, 20 bp, Artificial Sequence
  Description of Artificial Sequence: Synthetic oligonucleotide
  Target: ATXN2; (-) strand; PAM type: YTN; PAM sequence: TTT
tttttttttttcagatgatc

SEQ ID NO: 74116 - DNA, 20 bp, Artificial Sequence
  Description of Artificial Sequence: Synthetic oligonucleotide
  Target: ATXN2; (-) strand; PAM type: YTN; PAM sequence: TTT
ttttttttttttcagatgat

SEQ ID NO: 74117 - DNA, 20 bp, Artificial Sequence
  Description of Artificial Sequence: Synthetic oligonucleotide
  Target: ATXN2; (-) strand; PAM type: YTN; PAM sequence: TTT
tttttttttttttcagatga

SEQ ID NO: 74118 - DNA, 20 bp, Artificial Sequence
  Description of Artificial Sequence: Synthetic oligonucleotide
  Target: ATXN2; (-) strand; PAM type: YTN; PAM sequence: TTT
ttttttttttttttcagatg

SEQ ID NO: 74119 - DNA, 20 bp, Artificial Sequence
  Description of Artificial Sequence: Synthetic oligonucleotide
  Target: ATXN2; (-) strand; PAM type: YTN; PAM sequence: CTT
tttttttttttttttcagat

SEQ ID NO: 74120 - DNA, 20 bp, Artificial Sequence
  Description of Artificial Sequence: Synthetic oligonucleotide
  Target: ATXN2; (-) strand; PAM type: YTN; PAM sequence: CTC
cgtgccatcttttttttttt

SEQ ID NO: 74121 - DNA, 20 bp, Artificial Sequence
  Description of Artificial Sequence: Synthetic oligonucleotide
  Target: ATXN2; (-) strand; PAM type: YTN; PAM sequence: TTC
ctccgtgccatctttttttt

SEQ ID NO: 74122 - DNA, 20 bp, Artificial Sequence
  Description of Artificial Sequence: Synthetic oligonucleotide
  Target: ATXN2; (-) strand; PAM type: YTN; PAM sequence: CTT
cctccgtgccatcttttttt

SEQ ID NO: 74123 - DNA, 20 bp, Artificial Sequence
  Description of Artificial Sequence: Synthetic oligonucleotide
  Target: ATXN2; (-) strand; PAM type: YTN; PAM sequence: TTC
ttcctccgtgccatcttttt

SEQ ID NO: 74124 - DNA, 20 bp, Artificial Sequence
  Description of Artificial Sequence: Synthetic oligonucleotide
  Target: ATXN2; (-) strand; PAM type: YTN; PAM sequence: CTT
cttcctccgtgccatctttt

SEQ ID NO: 74125 - DNA, 20 bp, Artificial Sequence
  Description of Artificial Sequence: Synthetic oligonucleotide
  Target: ATXN2; (-) strand; PAM type: YTN; PAM sequence: TTA
tcttcttcctccgtgccatc

SEQ ID NO: 74126 - DNA, 20 bp, Artificial Sequence
  Description of Artificial Sequence: Synthetic oligonucleotide
  Target: ATXN2; (-) strand; PAM type: YTN; PAM sequence: TTT
atcttcttcctccgtgccat

SEQ ID NO: 74127 - DNA, 20 bp, Artificial Sequence
  Description of Artificial Sequence: Synthetic oligonucleotide
  Target: ATXN2; (-) strand; PAM type: YTN; PAM sequence: CTA
caaatttatcttcttcctcc

SEQ ID NO: 74128 - DNA, 20 bp, Artificial Sequence
  Description of Artificial Sequence: Synthetic oligonucleotide
  Target: ATXN2; (-) strand; PAM type: YTN; PAM sequence: TTA
tctacaaatttatcttcttc

SEQ ID NO: 74129 - DNA, 20 bp, Artificial Sequence
  Description of Artificial Sequence: Synthetic oligonucleotide
  Target: ATXN2; (-) strand; PAM type: YTN; PAM sequence: CTT
atctacaaatttatcttctt

SEQ ID NO: 74130 - DNA, 20 bp, Artificial Sequence
  Description of Artificial Sequence: Synthetic oligonucleotide
  Target: ATXN2; (-) strand; PAM type: YTN; PAM sequence: TTC
cttatctacaaatttatctt

SEQ ID NO: 74131 - DNA, 20 bp, Artificial Sequence
  Description of Artificial Sequence: Synthetic oligonucleotide
  Target: ATXN2; (-) strand; PAM type: YTN; PAM sequence: CTT
ccttatctacaaatttatct

SEQ ID NO: 74132 - DNA, 20 bp, Artificial Sequence
  Description of Artificial Sequence: Synthetic oligonucleotide
  Target: ATXN2; (-) strand; PAM type: YTN; PAM sequence: CTA
ccttccttatctacaaattt

SEQ ID NO: 74133 - DNA, 20 bp, Artificial Sequence
  Description of Artificial Sequence: Synthetic oligonucleotide
  Target: ATXN2; (-) strand; PAM type: YTN; PAM sequence: CTA
accactaccttccttatcta

SEQ ID NO: 74134 - DNA, 20 bp, Artificial Sequence
  Description of Artificial Sequence: Synthetic oligonucleotide
  Target: ATXN2; (-) strand; PAM type: YTN; PAM sequence: CTC
catcaactaaccactacctt

SEQ ID NO: 74135 - DNA, 20 bp, Artificial Sequence
  Description of Artificial Sequence: Synthetic oligonucleotide
  Target: ATXN2; (-) strand; PAM type: YTN; PAM sequence: TTA
atggaaaagatctccatcaa

SEQ ID NO: 74136 - DNA, 20 bp, Artificial Sequence
  Description of Artificial Sequence: Synthetic oligonucleotide
  Target: ATXN2; (-) strand; PAM type: YTN; PAM sequence: TTG
gttaatggaaaagatctcca

SEQ ID NO: 74137 - DNA, 20 bp, Artificial Sequence
  Description of Artificial Sequence: Synthetic oligonucleotide
  Target: ATXN2; (-) strand; PAM type: YTN; PAM sequence: TTA
gtgaaaaatcataaaagggg

SEQ ID NO: 74138 - DNA, 20 bp, Artificial Sequence
  Description of Artificial Sequence: Synthetic oligonucleotide
  Target: ATXN2; (-) strand; PAM type: YTN; PAM sequence: TTT
agtgaaaaatcataaaaggg

SEQ ID NO: 74139 - DNA, 20 bp, Artificial Sequence
  Description of Artificial Sequence: Synthetic oligonucleotide
  Target: ATXN2; (-) strand; PAM type: YTN; PAM sequence: TTG
tcacatttagtgaaaaatca

SEQ ID NO: 74140 - DNA, 20 bp, Artificial Sequence
  Description of Artificial Sequence: Synthetic oligonucleotide
  Target: ATXN2; (-) strand; PAM type: YTN; PAM sequence: TTT
gtcacatttagtgaaaaatc

SEQ ID NO: 74141 - DNA, 20 bp, Artificial Sequence
  Description of Artificial Sequence: Synthetic oligonucleotide
  Target: ATXN2; (-) strand; PAM type: YTN; PAM sequence: CTT
tgtcacatttagtgaaaaat

SEQ ID NO: 74142 - DNA, 20 bp, Artificial Sequence
  Description of Artificial Sequence: Synthetic oligonucleotide
  Target: ATXN2; (-) strand; PAM type: YTN; PAM sequence: TTC
tttgtcacatttagtgaaaa

SEQ ID NO: 74143 - DNA, 20 bp, Artificial Sequence
  Description of Artificial Sequence: Synthetic oligonucleotide
  Target: ATXN2; (-) strand; PAM type: YTN; PAM sequence: TTA
acagattctttgtcacattt

SEQ ID NO: 74144 - DNA, 20 bp, Artificial Sequence
  Description of Artificial Sequence: Synthetic oligonucleotide
  Target: ATXN2; (-) strand; PAM type: YTN; PAM sequence: CTT
aacagattctttgtcacatt

SEQ ID NO: 74145 - DNA, 20 bp, Artificial Sequence
  Description of Artificial Sequence: Synthetic oligonucleotide
  Target: ATXN2; (-) strand; PAM type: YTN; PAM sequence: TTG
cttaacagattctttgtcac

SEQ ID NO: 74146 - DNA, 20 bp, Artificial Sequence
  Description of Artificial Sequence: Synthetic oligonucleotide
  Target: ATXN2; (-) strand; PAM type: YTN; PAM sequence: TTT
gcttaacagattctttgtca

SEQ ID NO: 74147 - DNA, 20 bp, Artificial Sequence
  Description of Artificial Sequence: Synthetic oligonucleotide
  Target: ATXN2; (-) strand; PAM type: YTN; PAM sequence: TTT
tgcttaacagattctttgtc

SEQ ID NO: 74148 - DNA, 20 bp, Artificial Sequence
  Description of Artificial Sequence: Synthetic oligonucleotide
  Target: ATXN2; (-) strand; PAM type: YTN; PAM sequence: CTT
ttgcttaacagattctttgt

SEQ ID NO: 74149 - DNA, 20 bp, Artificial Sequence
  Description of Artificial Sequence: Synthetic oligonucleotide
  Target: ATXN2; (-) strand; PAM type: YTN; PAM sequence: TTA
cttttgcttaacagattctt

SEQ ID NO: 74150 - DNA, 20 bp, Artificial Sequence
  Description of Artificial Sequence: Synthetic oligonucleotide
  Target: ATXN2; (-) strand; PAM type: YTN; PAM sequence: CTG
aagaattacttttgcttaac

SEQ ID NO: 74151 - DNA, 20 bp, Artificial Sequence
  Description of Artificial Sequence: Synthetic oligonucleotide
  Target: ATXN2; (-) strand; PAM type: YTN; PAM sequence: TTA
gtctgaagaattacttttgc

SEQ ID NO: 74152 - DNA, 20 bp, Artificial Sequence
  Description of Artificial Sequence: Synthetic oligonucleotide
  Target: ATXN2; (-) strand; PAM type: YTN; PAM sequence: TTT
agtctgaagaattacttttg

SEQ ID NO: 74153 - DNA, 20 bp, Artificial Sequence
  Description of Artificial Sequence: Synthetic oligonucleotide
  Target: ATXN2; (-) strand; PAM type: YTN; PAM sequence: TTG
gatttagtctgaagaattac

SEQ ID NO: 74154 - DNA, 20 bp, Artificial Sequence
  Description of Artificial Sequence: Synthetic oligonucleotide
  Target: ATXN2; (-) strand; PAM type: YTN; PAM sequence: CTA
attggatttagtctgaagaa

SEQ ID NO: 74155 - DNA, 20 bp, Artificial Sequence
  Description of Artificial Sequence: Synthetic oligonucleotide
  Target: ATXN2; (-) strand; PAM type: YTN; PAM sequence: TTC
taattggatttagtctgaag

SEQ ID NO: 74156 - DNA, 20 bp, Artificial Sequence
  Description of Artificial Sequence: Synthetic oligonucleotide
  Target: ATXN2; (-) strand; PAM type: YTN; PAM sequence: TTC
atgaccattctaattggatt

SEQ ID NO: 74157 - DNA, 20 bp, Artificial Sequence
  Description of Artificial Sequence: Synthetic oligonucleotide
  Target: ATXN2; (-) strand; PAM type: YTN; PAM sequence: TTA
ttcatgaccattctaattgg

SEQ ID NO: 74158 - DNA, 20 bp, Artificial Sequence
  Description of Artificial Sequence: Synthetic oligonucleotide
  Target: ATXN2; (-) strand; PAM type: YTN; PAM sequence: CTT
attcatgaccattctaattg

SEQ ID NO: 74159 - DNA, 20 bp, Artificial Sequence
  Description of Artificial Sequence: Synthetic oligonucleotide
  Target: ATXN2; (-) strand; PAM type: YTN; PAM sequence: TTC
ttattcatgaccattctaat

SEQ ID NO: 74160 - DNA, 20 bp, Artificial Sequence
  Description of Artificial Sequence: Synthetic oligonucleotide
  Target: ATXN2; (-) strand; PAM type: YTN; PAM sequence: CTG
cgattcttattcatgaccat

SEQ ID NO: 74161 - DNA, 20 bp, Artificial Sequence
  Description of Artificial Sequence: Synthetic oligonucleotide
  Target: ATXN2; (-) strand; PAM type: YTN; PAM sequence: CTG
tataatatcctgcgattctt

SEQ ID NO: 74162 - DNA, 20 bp, Artificial Sequence
  Description of Artificial Sequence: Synthetic oligonucleotide
  Target: ATXN2; (-) strand; PAM type: YTN; PAM sequence: CTA
atactgtataatatcctgcg

SEQ ID NO: 74163 - DNA, 20 bp, Artificial Sequence
  Description of Artificial Sequence: Synthetic oligonucleotide
  Target: ATXN2; (-) strand; PAM type: YTN; PAM sequence: TTC
taatactgtataatatcctg

SEQ ID NO: 74164 - DNA, 20 bp, Artificial Sequence
  Description of Artificial Sequence: Synthetic oligonucleotide
  Target: ATXN2; (-) strand; PAM type: YTN; PAM sequence: TTG
attctaatactgtataatat

SEQ ID NO: 74165 - DNA, 20 bp, Artificial Sequence
  Description of Artificial Sequence: Synthetic oligonucleotide
  Target: ATXN2; (-) strand; PAM type: YTN; PAM sequence: TTT
gattctaatactgtataata

SEQ ID NO: 74166 - DNA, 20 bp, Artificial Sequence
  Description of Artificial Sequence: Synthetic oligonucleotide
  Target: ATXN2; (-) strand; PAM type: YTN; PAM sequence: CTT
tgattctaatactgtataat

SEQ ID NO: 74167 - DNA, 20 bp, Artificial Sequence
  Description of Artificial Sequence: Synthetic oligonucleotide
  Target: ATXN2; (-) strand; PAM type: YTN; PAM sequence: TTG
catgctttgattctaatact

SEQ ID NO: 74168 - DNA, 20 bp, Artificial Sequence
  Description of Artificial Sequence: Synthetic oligonucleotide
  Target: ATXN2; (-) strand; PAM type: YTN; PAM sequence: CTA
attgcatgctttgattctaa

SEQ ID NO: 74169 - DNA, 20 bp, Artificial Sequence
  Description of Artificial Sequence: Synthetic oligonucleotide
  Target: ATXN2; (-) strand; PAM type: YTN; PAM sequence: TTA
caactaattgcatgctttga

SEQ ID NO: 74170 - DNA, 20 bp, Artificial Sequence
  Description of Artificial Sequence: Synthetic oligonucleotide
  Target: ATXN2; (-) strand; PAM type: YTN; PAM sequence: CTT
acaactaattgcatgctttg

SEQ ID NO: 74171 - DNA, 20 bp, Artificial Sequence
  Description of Artificial Sequence: Synthetic oligonucleotide
  Target: ATXN2; (-) strand; PAM type: YTN; PAM sequence: TTA
aacttacaactaattgcatg

SEQ ID NO: 74172 - DNA, 20 bp, Artificial Sequence
  Description of Artificial Sequence: Synthetic oligonucleotide
  Target: ATXN2; (-) strand; PAM type: YTN; PAM sequence: TTT
aaacttacaactaattgcat

SEQ ID NO: 74173 - DNA, 20 bp, Artificial Sequence
  Description of Artificial Sequence: Synthetic oligonucleotide
  Target: ATXN2; (-) strand; PAM type: YTN; PAM sequence: CTT
taaacttacaactaattgca

SEQ ID NO: 74174 - DNA, 20 bp, Artificial Sequence
  Description of Artificial Sequence: Synthetic oligonucleotide
  Target: ATXN2; (-) strand; PAM type: YTN; PAM sequence: CTG
tcctttaaacttacaactaa

SEQ ID NO: 74175 - DNA, 20 bp, Artificial Sequence
  Description of Artificial Sequence: Synthetic oligonucleotide
  Target: ATXN2; (-) strand; PAM type: YTN; PAM sequence: CTC
tgtcctttaaacttacaact

SEQ ID NO: 74176 - DNA, 20 bp, Artificial Sequence
  Description of Artificial Sequence: Synthetic oligonucleotide
  Target: ATXN2; (-) strand; PAM type: YTN; PAM sequence: TTG
gtgaagtaacagaatgtgct

SEQ ID NO: 74177 - DNA, 20 bp, Artificial Sequence
  Description of Artificial Sequence: Synthetic oligonucleotide
  Target: ATXN2; (-) strand; PAM type: YTN; PAM sequence: TTT
ggtgaagtaacagaatgtgc

SEQ ID NO: 74178 - DNA, 20 bp, Artificial Sequence
  Description of Artificial Sequence: Synthetic oligonucleotide
  Target: ATXN2; (-) strand; PAM type: YTN; PAM sequence: CTT
tggtgaagtaacagaatgtg

SEQ ID NO: 74179 - DNA, 20 bp, Artificial Sequence
  Description of Artificial Sequence: Synthetic oligonucleotide
  Target: ATXN2; (-) strand; PAM type: YTN; PAM sequence: CTG
gctttggtgaagtaacagaa

SEQ ID NO: 74180 - DNA, 20 bp, Artificial Sequence
  Description of Artificial Sequence: Synthetic oligonucleotide
  Target: ATXN2; (-) strand; PAM type: YTN; PAM sequence: CTA
tactggctttggtgaagtaa

SEQ ID NO: 74181 - DNA, 20 bp, Artificial Sequence
  Description of Artificial Sequence: Synthetic oligonucleotide
  Target: ATXN2; (-) strand; PAM type: YTN; PAM sequence: CTG
atcaaaaatacatgctatac

SEQ ID NO: 74182 - DNA, 20 bp, Artificial Sequence
  Description of Artificial Sequence: Synthetic oligonucleotide
  Target: ATXN2; (-) strand; PAM type: YTN; PAM sequence: TTA
ggactgatcaaaaatacatg

SEQ ID NO: 74183 - DNA, 20 bp, Artificial Sequence
  Description of Artificial Sequence: Synthetic oligonucleotide
  Target: ATXN2; (-) strand; PAM type: YTN; PAM sequence: TTT
aggactgatcaaaaatacat

SEQ ID NO: 74184 - DNA, 20 bp, Artificial Sequence
  Description of Artificial Sequence: Synthetic oligonucleotide
  Target: ATXN2; (-) strand; PAM type: YTN; PAM sequence: TTT
taggactgatcaaaaataca

SEQ ID NO: 74185 - DNA, 20 bp, Artificial Sequence
  Description of Artificial Sequence: Synthetic oligonucleotide
  Target: ATXN2; (-) strand; PAM type: YTN; PAM sequence: TTT
ttaggactgatcaaaaatac

SEQ ID NO: 74186 - DNA, 20 bp, Artificial Sequence
  Description of Artificial Sequence: Synthetic oligonucleotide
  Target: ATXN2; (-) strand; PAM type: YTN; PAM sequence: CTT
tttaggactgatcaaaaata

SEQ ID NO: 74187 - DNA, 20 bp, Artificial Sequence
  Description of Artificial Sequence: Synthetic oligonucleotide
  Target: ATXN2; (-) strand; PAM type: YTN; PAM sequence: TTA
gggctttttaggactgatca

SEQ ID NO: 74188 - DNA, 20 bp, Artificial Sequence
  Description of Artificial Sequence: Synthetic oligonucleotide
  Target: ATXN2; (-) strand; PAM type: YTN; PAM sequence: TTT
agggctttttaggactgatc

SEQ ID NO: 74189 - DNA, 20 bp, Artificial Sequence
  Description of Artificial Sequence: Synthetic oligonucleotide
  Target: ATXN2; (-) strand; PAM type: YTN; PAM sequence: CTG
catttagggctttttaggac

SEQ ID NO: 74190 - DNA, 20 bp, Artificial Sequence
  Description of Artificial Sequence: Synthetic oligonucleotide
  Target: ATXN2; (-) strand; PAM type: YTN; PAM sequence: TTC
cgctgcatttagggcttttt

SEQ ID NO: 74191 - DNA, 20 bp, Artificial Sequence
  Description of Artificial Sequence: Synthetic oligonucleotide
  Target: ATXN2; (-) strand; PAM type: YTN; PAM sequence: TTT
ccgctgcatttagggctttt

SEQ ID NO: 74192 - DNA, 20 bp, Artificial Sequence
  Description of Artificial Sequence: Synthetic oligonucleotide
  Target: ATXN2; (-) strand; PAM type: YTN; PAM sequence: TTT
tccgctgcatttagggcttt

SEQ ID NO: 74193 - DNA, 20 bp, Artificial Sequence
  Description of Artificial Sequence: Synthetic oligonucleotide
  Target: ATXN2; (-) strand; PAM type: YTN; PAM sequence: CTA
aatcatattttccgctgcat

SEQ ID NO: 74194 - DNA, 20 bp, Artificial Sequence
  Description of Artificial Sequence: Synthetic oligonucleotide
  Target: ATXN2; (-) strand; PAM type: YTN; PAM sequence: TTG
gcctaaatcatattttccgc

SEQ ID NO: 74195 - DNA, 20 bp, Artificial Sequence
  Description of Artificial Sequence: Synthetic oligonucleotide
  Target: ATXN2; (-) strand; PAM type: YTN; PAM sequence: CTT
ggcctaaatcatattttccg

SEQ ID NO: 74196 - DNA, 20 bp, Artificial Sequence
  Description of Artificial Sequence: Synthetic oligonucleotide
  Target: ATXN2; (-) strand; PAM type: YTN; PAM sequence: CTC
ttggcctaaatcatattttc

SEQ ID NO: 74197 - DNA, 20 bp, Artificial Sequence
  Description of Artificial Sequence: Synthetic oligonucleotide
  Target: ATXN2; (-) strand; PAM type: YTN; PAM sequence: TTG
ccagctcttggcctaaatca

SEQ ID NO: 74198 - DNA, 20 bp, Artificial Sequence
  Description of Artificial Sequence: Synthetic oligonucleotide
  Target: ATXN2; (-) strand; PAM type: YTN; PAM sequence: TTT
gccagctcttggcctaaatc

SEQ ID NO: 74199 - DNA, 20 bp, Artificial Sequence
  Description of Artificial Sequence: Synthetic oligonucleotide
  Target: ATXN2; (-) strand; PAM type: YTN; PAM sequence: TTA
cagaaaagtttgccagctct

SEQ ID NO: 74200 - DNA, 20 bp, Artificial Sequence
  Description of Artificial Sequence: Synthetic oligonucleotide
  Target: ATXN2; (-) strand; PAM type: YTN; PAM sequence: TTT
acagaaaagtttgccagctc

SEQ ID NO: 74201 - DNA, 20 bp, Artificial Sequence
  Description of Artificial Sequence: Synthetic oligonucleotide
  Target: ATXN2; (-) strand; PAM type: YTN; PAM sequence: CTT
tacagaaaagtttgccagct

SEQ ID NO: 74202 - DNA, 20 bp, Artificial Sequence
  Description of Artificial Sequence: Synthetic oligonucleotide
  Target: ATXN2; (-) strand; PAM type: YTN; PAM sequence: CTC
tttacagaaaagtttgccag

SEQ ID NO: 74203 - DNA, 20 bp, Artificial Sequence
  Description of Artificial Sequence: Synthetic oligonucleotide
  Target: ATXN2; (-) strand; PAM type: YTN; PAM sequence: CTG
tctctttacagaaaagtttg

SEQ ID NO: 74204 - DNA, 20 bp, Artificial Sequence
  Description of Artificial Sequence: Synthetic oligonucleotide
  Target: ATXN2; (-) strand; PAM type: YTN; PAM sequence: TTG
actgtctctttacagaaaag

SEQ ID NO: 74205 - DNA, 20 bp, Artificial Sequence
  Description of Artificial Sequence: Synthetic oligonucleotide
  Target: ATXN2; (-) strand; PAM type: YTN; PAM sequence: TTT
gactgtctctttacagaaaa

SEQ ID NO: 74206 - DNA, 20 bp, Artificial Sequence
  Description of Artificial Sequence: Synthetic oligonucleotide
  Target: ATXN2; (-) strand; PAM type: YTN; PAM sequence: TTG
caaagccagaaaatttgact

SEQ ID NO: 74207 - DNA, 20 bp, Artificial Sequence
  Description of Artificial Sequence: Synthetic oligonucleotide
  Target: ATXN2; (-) strand; PAM type: YTN; PAM sequence: CTT
gcaaagccagaaaatttgac

SEQ ID NO: 74208 - DNA, 20 bp, Artificial Sequence
  Description of Artificial Sequence: Synthetic oligonucleotide
  Target: ATXN2; (-) strand; PAM type: YTN; PAM sequence: CTG
taggacttgcaaagccagaa

SEQ ID NO: 74209 - DNA, 20 bp, Artificial Sequence
  Description of Artificial Sequence: Synthetic oligonucleotide
  Target: ATXN2; (-) strand; PAM type: YTN; PAM sequence: CTG
actgtaggacttgcaaagcc

SEQ ID NO: 74210 - DNA, 20 bp, Artificial Sequence
  Description of Artificial Sequence: Synthetic oligonucleotide
  Target: ATXN2; (-) strand; PAM type: YTN; PAM sequence: TTG
tagctgactgtaggacttgc

SEQ ID NO: 74211 - DNA, 20 bp, Artificial Sequence
  Description of Artificial Sequence: Synthetic oligonucleotide
  Target: ATXN2; (-) strand; PAM type: YTN; PAM sequence: TTG
agtagttgtagctgactgta

SEQ ID NO: 74212 - DNA, 20 bp, Artificial Sequence
  Description of Artificial Sequence: Synthetic oligonucleotide
  Target: ATXN2; (-) strand; PAM type: YTN; PAM sequence: CTG
tagccatagagttgagtagt

SEQ ID NO: 74213 - DNA, 20 bp, Artificial Sequence
  Description of Artificial Sequence: Synthetic oligonucleotide
  Target: ATXN2; (-) strand; PAM type: YTN; PAM sequence: TTG
atggctgtagccatagagtt

SEQ ID NO: 74214 - DNA, 20 bp, Artificial Sequence
  Description of Artificial Sequence: Synthetic oligonucleotide
  Target: ATXN2; (-) strand; PAM type: YTN; PAM sequence: TTT
gatggctgtagccatagagt

SEQ ID NO: 74215 - DNA, 20 bp, Artificial Sequence
  Description of Artificial Sequence: Synthetic oligonucleotide
  Target: ATXN2; (-) strand; PAM type: YTN; PAM sequence: TTT
tgatggctgtagccatagag

SEQ ID NO: 74216 - DNA, 20 bp, Artificial Sequence
  Description of Artificial Sequence: Synthetic oligonucleotide
  Target: ATXN2; (-) strand; PAM type: YTN; PAM sequence: CTG
ttttgatggctgtagccata

SEQ ID NO: 74217 - DNA, 20 bp, Artificial Sequence
  Description of Artificial Sequence: Synthetic oligonucleotide
  Target: ATXN2; (-) strand; PAM type: YTN; PAM sequence: CTA
tggctgttttgatggctgta

SEQ ID NO: 74218 - DNA, 20 bp, Artificial Sequence
  Description of Artificial Sequence: Synthetic oligonucleotide
  Target: ATXN2; (-) strand; PAM type: YTN; PAM sequence: TTG
tctatggctgttttgatggc

SEQ ID NO: 74219 - DNA, 20 bp, Artificial Sequence
  Description of Artificial Sequence: Synthetic oligonucleotide
  Target: ATXN2; (-) strand; PAM type: YTN; PAM sequence: TTG
tgcattgtctatggctgttt

SEQ ID NO: 74220 - DNA, 20 bp, Artificial Sequence
  Description of Artificial Sequence: Synthetic oligonucleotide
  Target: ATXN2; (-) strand; PAM type: YTN; PAM sequence: TTT
gtgcattgtctatggctgtt

SEQ ID NO: 74221 - DNA, 20 bp, Artificial Sequence
  Description of Artificial Sequence: Synthetic oligonucleotide
  Target: ATXN2; (-) strand; PAM type: YTN; PAM sequence: CTA
tgcccatgcgtttgtgcatt

SEQ ID NO: 74222 - DNA, 20 bp, Artificial Sequence
  Description of Artificial Sequence: Synthetic oligonucleotide
  Target: ATXN2; (-) strand; PAM type: YTN; PAM sequence: TTG
tagcatagctatgcccatgc

SEQ ID NO: 74223 - DNA, 20 bp, Artificial Sequence
  Description of Artificial Sequence: Synthetic oligonucleotide
  Target: ATXN2; (-) strand; PAM type: YTN; PAM sequence: TTA
ttgtagcatagctatgccca

SEQ ID NO: 74224 - DNA, 20 bp, Artificial Sequence
  Description of Artificial Sequence: Synthetic oligonucleotide
  Target: ATXN2; (-) strand; PAM type: YTN; PAM sequence: TTT
attgtagcatagctatgccc

SEQ ID NO: 74225 - DNA, 20 bp, Artificial Sequence
  Description of Artificial Sequence: Synthetic oligonucleotide
  Target: ATXN2; (-) strand; PAM type: YTN; PAM sequence: TTT
tattgtagcatagctatgcc

SEQ ID NO: 74226 - DNA, 20 bp, Artificial Sequence
  Description of Artificial Sequence: Synthetic oligonucleotide
  Target: ATXN2; (-) strand; PAM type: YTN; PAM sequence: CTC
atcagtaaataaattttatt

SEQ ID NO: 74227 - DNA, 20 bp, Artificial Sequence
  Description of Artificial Sequence: Synthetic oligonucleotide
  Target: ATXN2; (-) strand; PAM type: YTN; PAM sequence: CTG
ctcatcagtaaataaatttt

SEQ ID NO: 74228 - DNA, 20 bp, Artificial Sequence
  Description of Artificial Sequence: Synthetic oligonucleotide
  Target: ATXN2; (-) strand; PAM type: YTN; PAM sequence: CTA
gatgataggggtcagcaaat

SEQ ID NO: 74229 - DNA, 20 bp, Artificial Sequence
  Description of Artificial Sequence: Synthetic oligonucleotide
  Target: ATXN2; (-) strand; PAM type: YTN; PAM sequence: CTC
agcctagatgataggggtca

SEQ ID NO: 74230 - DNA, 20 bp, Artificial Sequence
  Description of Artificial Sequence: Synthetic oligonucleotide
  Target: ATXN2; (-) strand; PAM type: YTN; PAM sequence: TTC
tcagcctagatgataggggt

SEQ ID NO: 74231 - DNA, 20 bp, Artificial Sequence
  Description of Artificial Sequence: Synthetic oligonucleotide
  Target: ATXN2; (-) strand; PAM type: YTN; PAM sequence: TTG
cagtattctcagcctagatg

SEQ ID NO: 74232 - DNA, 20 bp, Artificial Sequence
  Description of Artificial Sequence: Synthetic oligonucleotide
  Target: ATXN2; (-) strand; PAM type: YTN; PAM sequence: TTT
gcagtattctcagcctagat

SEQ ID NO: 74233 - DNA, 20 bp, Artificial Sequence
  Description of Artificial Sequence: Synthetic oligonucleotide
  Target: ATXN2; (-) strand; PAM type: YTN; PAM sequence: CTT
tgcagtattctcagcctaga

SEQ ID NO: 74234 - DNA, 20 bp, Artificial Sequence
  Description of Artificial Sequence: Synthetic oligonucleotide
  Target: ATXN2; (-) strand; PAM type: YTN; PAM sequence: TTC
tttgcagtattctcagccta

SEQ ID NO: 74235 - DNA, 20 bp, Artificial Sequence
  Description of Artificial Sequence: Synthetic oligonucleotide
  Target: ATXN2; (-) strand; PAM type: YTN; PAM sequence: TTT
ctttgcagtattctcagcct

SEQ ID NO: 74236 - DNA, 20 bp, Artificial Sequence
  Description of Artificial Sequence: Synthetic oligonucleotide
  Target: ATXN2; (-) strand; PAM type: YTN; PAM sequence: TTT
tctttgcagtattctcagcc

SEQ ID NO: 74237 - DNA, 20 bp, Artificial Sequence
  Description of Artificial Sequence: Synthetic oligonucleotide
  Target: ATXN2; (-) strand; PAM type: YTN; PAM sequence: TTC
attttctttgcagtattctc

SEQ ID NO: 74238 - DNA, 20 bp, Artificial Sequence
  Description of Artificial Sequence: Synthetic oligonucleotide
  Target: ATXN2; (-) strand; PAM type: YTN; PAM sequence: CTT
cattttctttgcagtattct

SEQ ID NO: 74239 - DNA, 20 bp, Artificial Sequence
  Description of Artificial Sequence: Synthetic oligonucleotide
  Target: ATXN2; (-) strand; PAM type: YTN; PAM sequence: CTG
cttcattttctttgcagtat

SEQ ID NO: 74240 - DNA, 20 bp, Artificial Sequence
  Description of Artificial Sequence: Synthetic oligonucleotide
  Target: ATXN2; (-) strand; PAM type: YTN; PAM sequence: CTA
ctgcttcattttctttgcag

SEQ ID NO: 74241 - DNA, 20 bp, Artificial Sequence
  Description of Artificial Sequence: Synthetic oligonucleotide
  Target: ATXN2; (-) strand; PAM type: YTN; PAM sequence: TTC
ctactgcttcattttctttg

SEQ ID NO: 74242 - DNA, 20 bp, Artificial Sequence
  Description of Artificial Sequence: Synthetic oligonucleotide
  Target: ATXN2; (-) strand; PAM type: YTN; PAM sequence: TTT
cctactgcttcattttcttt

SEQ ID NO: 74243 - DNA, 20 bp, Artificial Sequence
  Description of Artificial Sequence: Synthetic oligonucleotide
  Target: ATXN2; (-) strand; PAM type: YTN; PAM sequence: TTT
tcctactgcttcattttctt

SEQ ID NO: 74244 - DNA, 20 bp, Artificial Sequence
  Description of Artificial Sequence: Synthetic oligonucleotide
  Target: ATXN2; (-) strand; PAM type: YTN; PAM sequence: TTT
ttcctactgcttcattttct

SEQ ID NO: 74245 - DNA, 20 bp, Artificial Sequence
  Description of Artificial Sequence: Synthetic oligonucleotide
  Target: ATXN2; (-) strand; PAM type: YTN; PAM sequence: CTT
tttcctactgcttcattttc

SEQ ID NO: 74246 - DNA, 20 bp, Artificial Sequence
  Description of Artificial Sequence: Synthetic oligonucleotide
  Target: ATXN2; (-) strand; PAM type: YTN; PAM sequence: CTC
atactttttcctactgcttc

SEQ ID NO: 74247 - DNA, 20 bp, Artificial Sequence
  Description of Artificial Sequence: Synthetic oligonucleotide
  Target: ATXN2; (-) strand; PAM type: YTN; PAM sequence: TTC
ctcatactttttcctactgc

SEQ ID NO: 74248 - DNA, 20 bp, Artificial Sequence
  Description of Artificial Sequence: Synthetic oligonucleotide
  Target: ATXN2; (-) strand; PAM type: YTN; PAM sequence: TTG
ttcctcatactttttcctac

SEQ ID NO: 74249 - DNA, 20 bp, Artificial Sequence
  Description of Artificial Sequence: Synthetic oligonucleotide
  Target: ATXN2; (-) strand; PAM type: YTN; PAM sequence: TTC
cattgttcctcatacttttt

SEQ ID NO: 74250 - DNA, 20 bp, Artificial Sequence
  Description of Artificial Sequence: Synthetic oligonucleotide
  Target: ATXN2; (-) strand; PAM type: YTN; PAM sequence: TTA
ttccattgttcctcatactt

SEQ ID NO: 74251 - DNA, 20 bp, Artificial Sequence
  Description of Artificial Sequence: Synthetic oligonucleotide
  Target: ATXN2; (-) strand; PAM type: YTN; PAM sequence: CTT
attccattgttcctcatact

SEQ ID NO: 74252 - DNA, 20 bp, Artificial Sequence
  Description of Artificial Sequence: Synthetic oligonucleotide
  Target: ATXN2; (-) strand; PAM type: YTN; PAM sequence: TTC
cttattccattgttcctcat

SEQ ID NO: 74253 - DNA, 20 bp, Artificial Sequence
  Description of Artificial Sequence: Synthetic oligonucleotide
  Target: ATXN2; (-) strand; PAM type: YTN; PAM sequence: TTT
ccttattccattgttcctca

SEQ ID NO: 74254 - DNA, 20 bp, Artificial Sequence
  Description of Artificial Sequence: Synthetic oligonucleotide
  Target: ATXN2; (-) strand; PAM type: YTN; PAM sequence: CTG
tttccttattccattgttcc

SEQ ID NO: 74255 - DNA, 20 bp, Artificial Sequence
  Description of Artificial Sequence: Synthetic oligonucleotide
  Target: ATXN2; (-) strand; PAM type: YTN; PAM sequence: TTC
tgtttccttattccattgtt

SEQ ID NO: 74256 - DNA, 20 bp, Artificial Sequence
  Description of Artificial Sequence: Synthetic oligonucleotide
  Target: ATXN2; (-) strand; PAM type: YTN; PAM sequence: CTT
ctgtttccttattccattgt

SEQ ID NO: 74257 - DNA, 20 bp, Artificial Sequence
  Description of Artificial Sequence: Synthetic oligonucleotide
  Target: ATXN2; (-) strand; PAM type: YTN; PAM sequence: TTA
cttctgtttccttattccat

SEQ ID NO: 74258 - DNA, 20 bp, Artificial Sequence
  Description of Artificial Sequence: Synthetic oligonucleotide
  Target: ATXN2; (-) strand; PAM type: YTN; PAM sequence: TTT
acttctgtttccttattcca

SEQ ID NO: 74259 - DNA, 20 bp, Artificial Sequence
  Description of Artificial Sequence: Synthetic oligonucleotide
  Target: ATXN2; (-) strand; PAM type: YTN; PAM sequence: CTT
tacttctgtttccttattcc

SEQ ID NO: 74260 - DNA, 20 bp, Artificial Sequence
  Description of Artificial Sequence: Synthetic oligonucleotide
  Target: ATXN2; (-) strand; PAM type: YTN; PAM sequence: CTA
tggctttacttctgtttcct

SEQ ID NO: 74261 - DNA, 20 bp, Artificial Sequence
  Description of Artificial Sequence: Synthetic oligonucleotide
  Target: ATXN2; (-) strand; PAM type: YTN; PAM sequence: CTC
aactatggctttacttctgt

SEQ ID NO: 74262 - DNA, 20 bp, Artificial Sequence
  Description of Artificial Sequence: Synthetic oligonucleotide
  Target: ATXN2; (-) strand; PAM type: YTN; PAM sequence: CTC
caactcaactatggctttac

SEQ ID NO: 74263 - DNA, 20 bp, Artificial Sequence
  Description of Artificial Sequence: Synthetic oligonucleotide
  Target: ATXN2; (-) strand; PAM type: YTN; PAM sequence: TTA
ctccaactcaactatggctt

SEQ ID NO: 74264 - DNA, 20 bp, Artificial Sequence
  Description of Artificial Sequence: Synthetic oligonucleotide
  Target: ATXN2; (-) strand; PAM type: YTN; PAM sequence: TTT
actccaactcaactatggct

SEQ ID NO: 74265 - DNA, 20 bp, Artificial Sequence
  Description of Artificial Sequence: Synthetic oligonucleotide
  Target: ATXN2; (-) strand; PAM type: YTN; PAM sequence: CTT
tactccaactcaactatggc

SEQ ID NO: 74266 - DNA, 20 bp, Artificial Sequence
  Description of Artificial Sequence: Synthetic oligonucleotide
  Target: ATXN2; (-) strand; PAM type: YTN; PAM sequence: CTC
tttactccaactcaactatg

SEQ ID NO: 74267 - DNA, 20 bp, Artificial Sequence
  Description of Artificial Sequence: Synthetic oligonucleotide
  Target: ATXN2; (-) strand; PAM type: YTN; PAM sequence: TTC
ctctttactccaactcaact

SEQ ID NO: 74268 - DNA, 20 bp, Artificial Sequence
  Description of Artificial Sequence: Synthetic oligonucleotide
  Target: ATXN2; (-) strand; PAM type: YTN; PAM sequence: TTT
cctctttactccaactcaac

SEQ ID NO: 74269 - DNA, 20 bp, Artificial Sequence
  Description of Artificial Sequence: Synthetic oligonucleotide
  Target: ATXN2; (-) strand; PAM type: YTN; PAM sequence: TTT
tcctctttactccaactcaa

SEQ ID NO: 74270 - DNA, 20 bp, Artificial Sequence
  Description of Artificial Sequence: Synthetic oligonucleotide
  Target: ATXN2; (-) strand; PAM type: YTN; PAM sequence: TTC
atgttttcctctttactcca

SEQ ID NO: 74271 - DNA, 20 bp, Artificial Sequence
  Description of Artificial Sequence: Synthetic oligonucleotide
  Target: ATXN2; (-) strand; PAM type: YTN; PAM sequence: TTA
ttcatgttttcctctttact

SEQ ID NO: 74272 - DNA, 20 bp, Artificial Sequence
  Description of Artificial Sequence: Synthetic oligonucleotide
  Target: ATXN2; (-) strand; PAM type: YTN; PAM sequence: TTG
cgccattattcatgttttcc

SEQ ID NO: 74273 - DNA, 20 bp, Artificial Sequence
  Description of Artificial Sequence: Synthetic oligonucleotide
  Target: ATXN2; (-) strand; PAM type: YTN; PAM sequence: CTG
ttgcgccattattcatgttt

SEQ ID NO: 74274 - DNA, 20 bp, Artificial Sequence
  Description of Artificial Sequence: Synthetic oligonucleotide
  Target: ATXN2; (-) strand; PAM type: YTN; PAM sequence: TTC
ctgttgcgccattattcatg

SEQ ID NO: 74275 - DNA, 20 bp, Artificial Sequence
  Description of Artificial Sequence: Synthetic oligonucleotide
  Target: ATXN2; (-) strand; PAM type: YTN; PAM sequence: CTT
cctgttgcgccattattcat

SEQ ID NO: 74276 - DNA, 20 bp, Artificial Sequence
  Description of Artificial Sequence: Synthetic oligonucleotide
  Target: ATXN2; (-) strand; PAM type: YTN; PAM sequence: CTC
ttcctgttgcgccattattc

SEQ ID NO: 74277 - DNA, 20 bp, Artificial Sequence
  Description of Artificial Sequence: Synthetic oligonucleotide
  Target: ATXN2; (-) strand; PAM type: YTN; PAM sequence: CTG
ctcttcctgttgcgccatta

SEQ ID NO: 74278 - DNA, 20 bp, Artificial Sequence
  Description of Artificial Sequence: Synthetic oligonucleotide
  Target: ATXN2; (-) strand; PAM type: YTN; PAM sequence: TTC
tgctcttcctgttgcgccat

SEQ ID NO: 74279 - DNA, 20 bp, Artificial Sequence
  Description of Artificial Sequence: Synthetic oligonucleotide
  Target: ATXN2; (-) strand; PAM type: YTN; PAM sequence: TTT
ctgctcttcctgttgcgcca

SEQ ID NO: 74280 - DNA, 20 bp, Artificial Sequence
  Description of Artificial Sequence: Synthetic oligonucleotide
  Target: ATXN2; (-) strand; PAM type: YTN; PAM sequence: CTT
tctgctcttcctgttgcgcc

SEQ ID NO: 74281 - DNA, 20 bp, Artificial Sequence
  Description of Artificial Sequence: Synthetic oligonucleotide
  Target: ATXN2; (-) strand; PAM type: YTN; PAM sequence: TTC
tttctgctcttcctgttgcg

SEQ ID NO: 74282 - DNA, 20 bp, Artificial Sequence
  Description of Artificial Sequence: Synthetic oligonucleotide
  Target: ATXN2; (-) strand; PAM type: YTN; PAM sequence: TTT
ctttctgctcttcctgttgc

SEQ ID NO: 74283 - DNA, 20 bp, Artificial Sequence
  Description of Artificial Sequence: Synthetic oligonucleotide
  Target: ATXN2; (-) strand; PAM type: YTN; PAM sequence: TTT
tctttctgctcttcctgttg

SEQ ID NO: 74284 - DNA, 20 bp, Artificial Sequence
  Description of Artificial Sequence: Synthetic oligonucleotide
  Target: ATXN2; (-) strand; PAM type: YTN; PAM sequence: TTC
attttctttctgctcttcct

SEQ ID NO: 74285 - DNA, 20 bp, Artificial Sequence
  Description of Artificial Sequence: Synthetic oligonucleotide
  Target: ATXN2; (-) strand; PAM type: YTN; PAM sequence: CTT
cattttctttctgctcttcc

SEQ ID NO: 74286 - DNA, 20 bp, Artificial Sequence
  Description of Artificial Sequence: Synthetic oligonucleotide
  Target: ATXN2; (-) strand; PAM type: YTN; PAM sequence: TTC
cttcattttctttctgctct

SEQ ID NO: 74287 - DNA, 20 bp, Artificial Sequence
  Description of Artificial Sequence: Synthetic oligonucleotide
  Target: ATXN2; (-) strand; PAM type: YTN; PAM sequence: TTT
ccttcattttctttctgctc

SEQ ID NO: 74288 - DNA, 20 bp, Artificial Sequence
  Description of Artificial Sequence: Synthetic oligonucleotide
  Target: ATXN2; (-) strand; PAM type: YTN; PAM sequence: TTT
tccttcattttctttctgct

SEQ ID NO: 74289 - DNA, 20 bp, Artificial Sequence
  Description of Artificial Sequence: Synthetic oligonucleotide
  Target: ATXN2; (-) strand; PAM type: YTN; PAM sequence: TTT
ttccttcattttctttctgc

SEQ ID NO: 74290 - DNA, 20 bp, Artificial Sequence
  Description of Artificial Sequence: Synthetic oligonucleotide
  Target: ATXN2; (-) strand; PAM type: YTN; PAM sequence: TTT
tttccttcattttctttctg

SEQ ID NO: 74291 - DNA, 20 bp, Artificial Sequence
  Description of Artificial Sequence: Synthetic oligonucleotide
  Target: ATXN2; (-) strand; PAM type: YTN; PAM sequence: TTT
ttttccttcattttctttct

SEQ ID NO: 74292 - DNA, 20 bp, Artificial Sequence
  Description of Artificial Sequence: Synthetic oligonucleotide
  Target: ATXN2; (-) strand; PAM type: YTN; PAM sequence: CTA
tttttttccttcattttctt

SEQ ID NO: 74293 - DNA, 20 bp, Artificial Sequence
  Description of Artificial Sequence: Synthetic oligonucleotide
  Target: ATXN2; (-) strand; PAM type: YTN; PAM sequence: CTC
tatttttttccttcattttc

SEQ ID NO: 74294 - DNA, 20 bp, Artificial Sequence
  Description of Artificial Sequence: Synthetic oligonucleotide
  Target: ATXN2; (-) strand; PAM type: YTN; PAM sequence: CTC
ctctatttttttccttcatt

SEQ ID NO: 74295 - DNA, 20 bp, Artificial Sequence
  Description of Artificial Sequence: Synthetic oligonucleotide
  Target: ATXN2; (-) strand; PAM type: YTN; PAM sequence: TTC
tcctctatttttttccttca

SEQ ID NO: 74296 - DNA, 20 bp, Artificial Sequence
  Description of Artificial Sequence: Synthetic oligonucleotide
  Target: ATXN2; (-) strand; PAM type: YTN; PAM sequence: TTT
ctcctctatttttttccttc

SEQ ID NO: 74297 - DNA, 20 bp, Artificial Sequence
  Description of Artificial Sequence: Synthetic oligonucleotide
  Target: ATXN2; (-) strand; PAM type: YTN; PAM sequence: CTT
tctcctctatttttttcctt

SEQ ID NO: 74298 - DNA, 20 bp, Artificial Sequence
  Description of Artificial Sequence: Synthetic oligonucleotide
  Target: ATXN2; (-) strand; PAM type: YTN; PAM sequence: TTC
ctttctcctctatttttttc

SEQ ID NO: 74299 - DNA, 20 bp, Artificial Sequence
  Description of Artificial Sequence: Synthetic oligonucleotide
  Target: ATXN2; (-) strand; PAM type: YTN; PAM sequence: TTC
cagtattcctttctcctcta

SEQ ID NO: 74300 - DNA, 20 bp, Artificial Sequence
  Description of Artificial Sequence: Synthetic oligonucleotide
  Target: ATXN2; (-) strand; PAM type: YTN; PAM sequence: TTT
ccagtattcctttctcctct

SEQ ID NO: 74301 - DNA, 20 bp, Artificial Sequence
  Description of Artificial Sequence: Synthetic oligonucleotide
  Target: ATXN2; (-) strand; PAM type: YTN; PAM sequence: TTC
catccatttccagtattcct

SEQ ID NO: 74302 - DNA, 20 bp, Artificial Sequence
  Description of Artificial Sequence: Synthetic oligonucleotide
  Target: ATXN2; (-) strand; PAM type: YTN; PAM sequence: TTT
ccatccatttccagtattcc

SEQ ID NO: 74303 - DNA, 20 bp, Artificial Sequence
  Description of Artificial Sequence: Synthetic oligonucleotide
  Target: ATXN2; (-) strand; PAM type: YTN; PAM sequence: TTT
tccatccatttccagtattc

SEQ ID NO: 74304 - DNA, 20 bp, Artificial Sequence
  Description of Artificial Sequence: Synthetic oligonucleotide
  Target: ATXN2; (-) strand; PAM type: YTN; PAM sequence: TTG
attttccatccatttccagt

SEQ ID NO: 74305 - DNA, 20 bp, Artificial Sequence
  Description of Artificial Sequence: Synthetic oligonucleotide
  Target: ATXN2; (-) strand; PAM type: YTN; PAM sequence: CTT
gattttccatccatttccag

SEQ ID NO: 74306 - DNA, 20 bp, Artificial Sequence
  Description of Artificial Sequence: Synthetic oligonucleotide
  Target: ATXN2; (-) strand; PAM type: YTN; PAM sequence: TTA
cttgattttccatccatttc

SEQ ID NO: 74307 - DNA, 20 bp, Artificial Sequence
  Description of Artificial Sequence: Synthetic oligonucleotide
  Target: ATXN2; (-) strand; PAM type: YTN; PAM sequence: TTT
acttgattttccatccattt

SEQ ID NO: 74308 - DNA, 20 bp, Artificial Sequence
  Description of Artificial Sequence: Synthetic oligonucleotide
  Target: ATXN2; (-) strand; PAM type: YTN; PAM sequence: TTT
tacttgattttccatccatt

SEQ ID NO: 74309 - DNA, 20 bp, Artificial Sequence
  Description of Artificial Sequence: Synthetic oligonucleotide
  Target: ATXN2; (-) strand; PAM type: YTN; PAM sequence: TTT
ttacttgattttccatccat

SEQ ID NO: 74310 - DNA, 20 bp, Artificial Sequence
  Description of Artificial Sequence: Synthetic oligonucleotide
  Target: ATXN2; (-) strand; PAM type: YTN; PAM sequence: TTT
tttacttgattttccatcca

SEQ ID NO: 74311 - DNA, 20 bp, Artificial Sequence
  Description of Artificial Sequence: Synthetic oligonucleotide
  Target: ATXN2; (-) strand; PAM type: YTN; PAM sequence: TTG
ttttttacttgattttccat

SEQ ID NO: 74312 - DNA, 20 bp, Artificial Sequence
  Description of Artificial Sequence: Synthetic oligonucleotide
  Target: ATXN2; (-) strand; PAM type: YTN; PAM sequence: CTT
gttttttacttgattttcca

SEQ ID NO: 74313 - DNA, 20 bp, Artificial Sequence
  Description of Artificial Sequence: Synthetic oligonucleotide
  Target: ATXN2; (-) strand; PAM type: YTN; PAM sequence: CTG
cttgttttttacttgatttt

SEQ ID NO: 74314 - DNA, 20 bp, Artificial Sequence
  Description of Artificial Sequence: Synthetic oligonucleotide
  Target: ATXN2; (-) strand; PAM type: YTN; PAM sequence: CTC
tgcttgttttttacttgatt

SEQ ID NO: 74315 - DNA, 20 bp, Artificial Sequence
  Description of Artificial Sequence: Synthetic oligonucleotide
  Target: ATXN2; (-) strand; PAM type: YTN; PAM sequence: TTA
tctctgcttgttttttactt

SEQ ID NO: 74316 - DNA, 20 bp, Artificial Sequence
  Description of Artificial Sequence: Synthetic oligonucleotide
  Target: ATXN2; (-) strand; PAM type: YTN; PAM sequence: CTG
ttatctctgcttgtttttta

SEQ ID NO: 74317 - DNA, 20 bp, Artificial Sequence
  Description of Artificial Sequence: Synthetic oligonucleotide
  Target: ATXN2; (-) strand; PAM type: YTN; PAM sequence: TTG
tcctgttatctctgcttgtt

SEQ ID NO: 74318 - DNA, 20 bp, Artificial Sequence
  Description of Artificial Sequence: Synthetic oligonucleotide
  Target: ATXN2; (-) strand; PAM type: YTN; PAM sequence: TTG
gaattgtcctgttatctctg

SEQ ID NO: 74319 - DNA, 20 bp, Artificial Sequence
  Description of Artificial Sequence: Synthetic oligonucleotide
  Target: ATXN2; (-) strand; PAM type: YTN; PAM sequence: TTT
ggaattgtcctgttatctct

SEQ ID NO: 74320 - DNA, 20 bp, Artificial Sequence
  Description of Artificial Sequence: Synthetic oligonucleotide
  Target: ATXN2; (-) strand; PAM type: YTN; PAM sequence: CTT
tggaattgtcctgttatctc

SEQ ID NO: 74321 - DNA, 20 bp, Artificial Sequence
  Description of Artificial Sequence: Synthetic oligonucleotide
  Target: ATXN2; (-) strand; PAM type: YTN; PAM sequence: TTC
gtgtatctttggaattgtcc

SEQ ID NO: 74322 - DNA, 20 bp, Artificial Sequence
  Description of Artificial Sequence: Synthetic oligonucleotide
  Target: ATXN2; (-) strand; PAM type: YTN; PAM sequence: CTG
tattcgtgtatctttggaat

SEQ ID NO: 74323 - DNA, 20 bp, Artificial Sequence
  Description of Artificial Sequence: Synthetic oligonucleotide
  Target: ATXN2; (-) strand; PAM type: YTN; PAM sequence: CTC
tgtattcgtgtatctttgga

SEQ ID NO: 74324 - DNA, 20 bp, Artificial Sequence
  Description of Artificial Sequence: Synthetic oligonucleotide
  Target: ATXN2; (-) strand; PAM type: YTN; PAM sequence: TTG
gctctgtattcgtgtatctt

SEQ ID NO: 74325 - DNA, 20 bp, Artificial Sequence
  Description of Artificial Sequence: Synthetic oligonucleotide
  Target: ATXN2; (-) strand; PAM type: YTN; PAM sequence: TTT
ggctctgtattcgtgtatct

SEQ ID NO: 74326 - DNA, 20 bp, Artificial Sequence
  Description of Artificial Sequence: Synthetic oligonucleotide
  Target: ATXN2; (-) strand; PAM type: YTN; PAM sequence: TTT
tggctctgtattcgtgtatc

SEQ ID NO: 74327 - DNA, 20 bp, Artificial Sequence
  Description of Artificial Sequence: Synthetic oligonucleotide
  Target: ATXN2; (-) strand; PAM type: YTN; PAM sequence: CTT
ttggctctgtattcgtgtat

SEQ ID NO: 74328 - DNA, 20 bp, Artificial Sequence
  Description of Artificial Sequence: Synthetic oligonucleotide
  Target: ATXN2; (-) strand; PAM type: YTN; PAM sequence: TTC
agtcgcttttggctctgtat

SEQ ID NO: 74329 - DNA, 20 bp, Artificial Sequence
  Description of Artificial Sequence: Synthetic oligonucleotide
  Target: ATXN2; (-) strand; PAM type: YTN; PAM sequence: CTT
cagtcgcttttggctctgta

SEQ ID NO: 74330 - DNA, 20 bp, Artificial Sequence
  Description of Artificial Sequence: Synthetic oligonucleotide
  Target: ATXN2; (-) strand; PAM type: YTN; PAM sequence: TTA
gggccttcagtcgcttttgg

SEQ ID NO: 74331 - DNA, 20 bp, Artificial Sequence
  Description of Artificial Sequence: Synthetic oligonucleotide
  Target: ATXN2; (-) strand; PAM type: YTN; PAM sequence: CTT
agggccttcagtcgcttttg

SEQ ID NO: 74332 - DNA, 20 bp, Artificial Sequence
  Description of Artificial Sequence: Synthetic oligonucleotide
  Target: ATXN2; (-) strand; PAM type: YTN; PAM sequence: TTC
ttagggccttcagtcgcttt

SEQ ID NO: 74333 - DNA, 20 bp, Artificial Sequence
  Description of Artificial Sequence: Synthetic oligonucleotide
  Target: ATXN2; (-) strand; PAM type: YTN; PAM sequence: CTT
cttagggccttcagtcgctt

SEQ ID NO: 74334 - DNA, 20 bp, Artificial Sequence
  Description of Artificial Sequence: Synthetic oligonucleotide
  Target: ATXN2; (-) strand; PAM type: YTN; PAM sequence: CTA
aaacttcttagggccttcag

SEQ ID NO: 74335 - DNA, 20 bp, Artificial Sequence
  Description of Artificial Sequence: Synthetic oligonucleotide
  Target: ATXN2; (-) strand; PAM type: YTN; PAM sequence: TTG
ctaaaacttcttagggcctt

SEQ ID NO: 74336 - DNA, 20 bp, Artificial Sequence
  Description of Artificial Sequence: Synthetic oligonucleotide
  Target: ATXN2; (-) strand; PAM type: YTN; PAM sequence: TTT
gctaaaacttcttagggcct

SEQ ID NO: 74337 - DNA, 20 bp, Artificial Sequence
  Description of Artificial Sequence: Synthetic oligonucleotide
  Target: ATXN2; (-) strand; PAM type: YTN; PAM sequence: TTT
tgctaaaacttcttagggcc

SEQ ID NO: 74338 - DNA, 20 bp, Artificial Sequence
  Description of Artificial Sequence: Synthetic oligonucleotide
  Target: ATXN2; (-) strand; PAM type: YTN; PAM sequence: TTC
attttgctaaaacttcttag

SEQ ID NO: 74339 - DNA, 20 bp, Artificial Sequence
  Description of Artificial Sequence: Synthetic oligonucleotide
  Target: ATXN2; (-) strand; PAM type: YTN; PAM sequence: CTT
cattttgctaaaacttctta

SEQ ID NO: 74340 - DNA, 20 bp, Artificial Sequence
  Description of Artificial Sequence: Synthetic oligonucleotide
  Target: ATXN2; (-) strand; PAM type: YTN; PAM sequence: CTC
ttcattttgctaaaacttct

SEQ ID NO: 74341 - DNA, 20 bp, Artificial Sequence
  Description of Artificial Sequence: Synthetic oligonucleotide
  Target: ATXN2; (-) strand; PAM type: YTN; PAM sequence: TTC
tcttcattttgctaaaactt

SEQ ID NO: 74342 - DNA, 20 bp, Artificial Sequence
  Description of Artificial Sequence: Synthetic oligonucleotide
  Target: ATXN2; (-) strand; PAM type: YTN; PAM sequence: CTG
aggttctcttcattttgcta

SEQ ID NO: 74343 - DNA, 20 bp, Artificial Sequence
  Description of Artificial Sequence: Synthetic oligonucleotide
  Target: ATXN2; (-) strand; PAM type: YTN; PAM sequence: TTC
cagtgcagacagatctgagg

SEQ ID NO: 74344 - DNA, 20 bp, Artificial Sequence
  Description of Artificial Sequence: Synthetic oligonucleotide
  Target: ATXN2; (-) strand; PAM type: YTN; PAM sequence: TTG
aattccagtgcagacagatc

SEQ ID NO: 74345 - DNA, 20 bp, Artificial Sequence
  Description of Artificial Sequence: Synthetic oligonucleotide
  Target: ATXN2; (-) strand; PAM type: YTN; PAM sequence: TTT
gaattccagtgcagacagat

SEQ ID NO: 74346 - DNA, 20 bp, Artificial Sequence
  Description of Artificial Sequence: Synthetic oligonucleotide
  Target: ATXN2; (-) strand; PAM type: YTN; PAM sequence: TTA
tttgaattccagtgcagaca

SEQ ID NO: 74347 - DNA, 20 bp, Artificial Sequence
  Description of Artificial Sequence: Synthetic oligonucleotide
  Target: ATXN2; (-) strand; PAM type: YTN; PAM sequence: TTT
atttgaattccagtgcagac

SEQ ID NO: 74348 - DNA, 20 bp, Artificial Sequence
  Description of Artificial Sequence: Synthetic oligonucleotide
  Target: ATXN2; (-) strand; PAM type: YTN; PAM sequence: CTT
tatttgaattccagtgcaga

SEQ ID NO: 74349 - DNA, 20 bp, Artificial Sequence
  Description of Artificial Sequence: Synthetic oligonucleotide
  Target: ATXN2; (-) strand; PAM type: YTN; PAM sequence: TTA
tcctttatttgaattccagt

SEQ ID NO: 74350 - DNA, 20 bp, Artificial Sequence
  Description of Artificial Sequence: Synthetic oligonucleotide
  Target: ATXN2; (-) strand; PAM type: YTN; PAM sequence: TTT
atcctttatttgaattccag

SEQ ID NO: 74351 - DNA, 20 bp, Artificial Sequence
  Description of Artificial Sequence: Synthetic oligonucleotide
  Target: ATXN2; (-) strand; PAM type: YTN; PAM sequence: TTG
tatttatcctttatttgaat

SEQ ID NO: 74352 - DNA, 20 bp, Artificial Sequence
  Description of Artificial Sequence: Synthetic oligonucleotide
  Target: ATXN2; (-) strand; PAM type: YTN; PAM sequence: TTT
gtatttatcctttatttgaa

SEQ ID NO: 74353 - DNA, 20 bp, Artificial Sequence
  Description of Artificial Sequence: Synthetic oligonucleotide
  Target: ATXN2; (-) strand; PAM type: YTN; PAM sequence: TTG
gaaaatcagtttgtatttat

SEQ ID NO: 74354 - DNA, 20 bp, Artificial Sequence
  Description of Artificial Sequence: Synthetic oligonucleotide
  Target: ATXN2; (-) strand; PAM type: YTN; PAM sequence: TTA
tcattggaaaatcagtttgt

SEQ ID NO: 74355 - DNA, 20 bp, Artificial Sequence
  Description of Artificial Sequence: Synthetic oligonucleotide
  Target: ATXN2; (-) strand; PAM type: YTN; PAM sequence: TTA
gaagagaccatcagattatc

SEQ ID NO: 74356 - DNA, 20 bp, Artificial Sequence
  Description of Artificial Sequence: Synthetic oligonucleotide
  Target: ATXN2; (-) strand; PAM type: YTN; PAM sequence: TTC
ataattagaagagaccatca

SEQ ID NO: 74357 - DNA, 20 bp, Artificial Sequence
  Description of Artificial Sequence: Synthetic oligonucleotide
  Target: ATXN2; (-) strand; PAM type: YTN; PAM sequence: TTG
gcacattcataattagaaga

SEQ ID NO: 74358 - DNA, 20 bp, Artificial Sequence
  Description of Artificial Sequence: Synthetic oligonucleotide
  Target: ATXN2; (-) strand; PAM type: YTN; PAM sequence: CTT
ggcacattcataattagaag

SEQ ID NO: 74359 - DNA, 20 bp, Artificial Sequence
  Description of Artificial Sequence: Synthetic oligonucleotide
  Target: ATXN2; (-) strand; PAM type: YTN; PAM sequence: CTG
tgagtcaccttggcacattc

SEQ ID NO: 74360 - DNA, 20 bp, Artificial Sequence
  Description of Artificial Sequence: Synthetic oligonucleotide
  Target: ATXN2; (-) strand; PAM type: YTN; PAM sequence: TTA
cgtcatatgagctgtgagtc

SEQ ID NO: 74361 - DNA, 20 bp, Artificial Sequence
  Description of Artificial Sequence: Synthetic oligonucleotide
  Target: ATXN2; (-) strand; PAM type: YTN; PAM sequence: TTT
acgtcatatgagctgtgagt

SEQ ID NO: 74362 - DNA, 20 bp, Artificial Sequence
  Description of Artificial Sequence: Synthetic oligonucleotide
  Target: ATXN2; (-) strand; PAM type: YTN; PAM sequence: CTT
tacgtcatatgagctgtgag

SEQ ID NO: 74363 - DNA, 20 bp, Artificial Sequence
  Description of Artificial Sequence: Synthetic oligonucleotide
  Target: ATXN2; (-) strand; PAM type: YTN; PAM sequence: CTG
aaagtacctttacgtcatat

SEQ ID NO: 74364 - DNA, 20 bp, Artificial Sequence
  Description of Artificial Sequence: Synthetic oligonucleotide
  Target: ATXN2; (-) strand; PAM type: YTN; PAM sequence: CTG
agaaactgaaagtaccttta

SEQ ID NO: 74365 - DNA, 20 bp, Artificial Sequence
  Description of Artificial Sequence: Synthetic oligonucleotide
  Target: ATXN2; (-) strand; PAM type: YTN; PAM sequence: TTA
ctgagaaactgaaagtacct

SEQ ID NO: 74366 - DNA, 20 bp, Artificial Sequence
  Description of Artificial Sequence: Synthetic oligonucleotide
  Target: ATXN2; (-) strand; PAM type: YTN; PAM sequence: TTT
actgagaaactgaaagtacc

SEQ ID NO: 74367 - DNA, 20 bp, Artificial Sequence
  Description of Artificial Sequence: Synthetic oligonucleotide
  Target: ATXN2; (-) strand; PAM type: YTN; PAM sequence: TTG
atttactgagaaactgaaag

SEQ ID NO: 74368 - DNA, 20 bp, Artificial Sequence
  Description of Artificial Sequence: Synthetic oligonucleotide
  Target: ATXN2; (-) strand; PAM type: YTN; PAM sequence: TTT
gatttactgagaaactgaaa

SEQ ID NO: 74369 - DNA, 20 bp, Artificial Sequence
  Description of Artificial Sequence: Synthetic oligonucleotide
  Target: ATXN2; (-) strand; PAM type: YTN; PAM sequence: TTC
cagtttgatttactgagaaa

SEQ ID NO: 74370 - DNA, 20 bp, Artificial Sequence
  Description of Artificial Sequence: Synthetic oligonucleotide
  Target: ATXN2; (-) strand; PAM type: YTN; PAM sequence: TTA
tacatgttccagtttgattt

SEQ ID NO: 74371 - DNA, 20 bp, Artificial Sequence
  Description of Artificial Sequence: Synthetic oligonucleotide
  Target: ATXN2; (-) strand; PAM type: YTN; PAM sequence: TTG
aatgttatacatgttccagt

SEQ ID NO: 74372 - DNA, 20 bp, Artificial Sequence
  Description of Artificial Sequence: Synthetic oligonucleotide
  Target: ATXN2; (-) strand; PAM type: YTN; PAM sequence: CTT
gaatgttatacatgttccag

SEQ ID NO: 74373 - DNA, 20 bp, Artificial Sequence
  Description of Artificial Sequence: Synthetic oligonucleotide
  Target: ATXN2; (-) strand; PAM type: YTN; PAM sequence: CTC
ttgaatgttatacatgttcc

SEQ ID NO: 74374 - DNA, 20 bp, Artificial Sequence
  Description of Artificial Sequence: Synthetic oligonucleotide
  Target: ATXN2; (-) strand; PAM type: YTN; PAM sequence: TTG
gtctcttgaatgttatacat

SEQ ID NO: 74375 - DNA, 20 bp, Artificial Sequence
  Description of Artificial Sequence: Synthetic oligonucleotide
  Target: ATXN2; (-) strand; PAM type: YTN; PAM sequence: TTT
ggtctcttgaatgttataca

SEQ ID NO: 74376 - DNA, 20 bp, Artificial Sequence
  Description of Artificial Sequence: Synthetic oligonucleotide
  Target: ATXN2; (-) strand; PAM type: YTN; PAM sequence: CTT
tggtctcttgaatgttatac

SEQ ID NO: 74377 - DNA, 20 bp, Artificial Sequence
  Description of Artificial Sequence: Synthetic oligonucleotide
  Target: ATXN2; (-) strand; PAM type: YTN; PAM sequence: TTC
ctttggtctcttgaatgtta

SEQ ID NO: 74378 - DNA, 20 bp, Artificial Sequence
  Description of Artificial Sequence: Synthetic oligonucleotide
  Target: ATXN2; (-) strand; PAM type: YTN; PAM sequence: TTT
cctttggtctcttgaatgtt

SEQ ID NO: 74379 - DNA, 20 bp, Artificial Sequence
  Description of Artificial Sequence: Synthetic oligonucleotide
  Target: ATXN2; (-) strand; PAM type: YTN; PAM sequence: TTA
cggtacagtgaataagtttc

SEQ ID NO: 74380 - DNA, 20 bp, Artificial Sequence
  Description of Artificial Sequence: Synthetic oligonucleotide
  Target: ATXN2; (-) strand; PAM type: YTN; PAM sequence: CTT
acggtacagtgaataagttt

SEQ ID NO: 74381 - DNA, 20 bp, Artificial Sequence
  Description of Artificial Sequence: Synthetic oligonucleotide
  Target: ATXN2; (-) strand; PAM type: YTN; PAM sequence: TTC
ttacggtacagtgaataagt

SEQ ID NO: 74382 - DNA, 20 bp, Artificial Sequence
  Description of Artificial Sequence: Synthetic oligonucleotide
  Target: ATXN2; (-) strand; PAM type: YTN; PAM sequence: CTT
cttacggtacagtgaataag

SEQ ID NO: 74383 - DNA, 20 bp, Artificial Sequence
  Description of Artificial Sequence: Synthetic oligonucleotide
  Target: ATXN2; (-) strand; PAM type: YTN; PAM sequence: TTG
aaatagtgacttcttacggt

SEQ ID NO: 74384 - DNA, 20 bp, Artificial Sequence
  Description of Artificial Sequence: Synthetic oligonucleotide
  Target: ATXN2; (-) strand; PAM type: YTN; PAM sequence: TTT
gaaatagtgacttcttacgg

SEQ ID NO: 74385 - DNA, 20 bp, Artificial Sequence
  Description of Artificial Sequence: Synthetic oligonucleotide
  Target: ATXN2; (-) strand; PAM type: YTN; PAM sequence: CTT
tgaaatagtgacttcttacg

SEQ ID NO: 74386 - DNA, 20 bp, Artificial Sequence
  Description of Artificial Sequence: Synthetic oligonucleotide
  Target: ATXN2; (-) strand; PAM type: YTN; PAM sequence: TTC
atgcatatatgcaaatgaat

SEQ ID NO: 74387 - DNA, 20 bp, Artificial Sequence
  Description of Artificial Sequence: Synthetic oligonucleotide
  Target: ATXN2; (-) strand; PAM type: YTN; PAM sequence: TTA
tattcatgcatatatgcaaa

SEQ ID NO: 74388 - DNA, 20 bp, Artificial Sequence
  Description of Artificial Sequence: Synthetic oligonucleotide
  Target: ATXN2; (-) strand; PAM type: YTN; PAM sequence: TTA
aaagttatattcatgcatat

SEQ ID NO: 74389 - DNA, 20 bp, Artificial Sequence
  Description of Artificial Sequence: Synthetic oligonucleotide
  Target: ATXN2; (-) strand; PAM type: YTN; PAM sequence: TTT
aaaagttatattcatgcata

SEQ ID NO: 74390 - DNA, 20 bp, Artificial Sequence
  Description of Artificial Sequence: Synthetic oligonucleotide
  Target: ATXN2; (-) strand; PAM type: YTN; PAM sequence: TTC
aataaagtttaaaagttata

SEQ ID NO: 74391 - DNA, 20 bp, Artificial Sequence
  Description of Artificial Sequence: Synthetic oligonucleotide
  Target: ATXN2; (-) strand; PAM type: YTN; PAM sequence: TTT
caataaagtttaaaagttat

SEQ ID NO: 74392 - DNA, 20 bp, Artificial Sequence
  Description of Artificial Sequence: Synthetic oligonucleotide
  Target: ATXN2; (-) strand; PAM type: YTN; PAM sequence: TTG
atttcaataaagtttaaaag

SEQ ID NO: 74393 - DNA, 20 bp, Artificial Sequence
  Description of Artificial Sequence: Synthetic oligonucleotide
  Target: ATXN2; (-) strand; PAM type: YTN; PAM sequence: CTA
acatcattgatttcaataaa

SEQ ID NO: 74394 - DNA, 20 bp, Artificial Sequence
  Description of Artificial Sequence: Synthetic oligonucleotide
  Target: ATXN2; (-) strand; PAM type: YTN; PAM sequence: TTG
atgctaacatcattgatttc

SEQ ID NO: 74395 - DNA, 20 bp, Artificial Sequence
  Description of Artificial Sequence: Synthetic oligonucleotide
  Target: ATXN2; (-) strand; PAM type: YTN; PAM sequence: CTT
gatgctaacatcattgattt

SEQ ID NO: 74396 - DNA, 20 bp, Artificial Sequence
  Description of Artificial Sequence: Synthetic oligonucleotide
  Target: ATXN2; (-) strand; PAM type: YTN; PAM sequence: TTC
ttgatgctaacatcattgat

SEQ ID NO: 74397 - DNA, 20 bp, Artificial Sequence
  Description of Artificial Sequence: Synthetic oligonucleotide
  Target: ATXN2; (-) strand; PAM type: YTN; PAM sequence: TTA
agttcttgatgctaacatca

SEQ ID NO: 74398 - DNA, 20 bp, Artificial Sequence
  Description of Artificial Sequence: Synthetic oligonucleotide
  Target: ATXN2; (-) strand; PAM type: YTN; PAM sequence: TTT
aagttcttgatgctaacatc

SEQ ID NO: 74399 - DNA, 20 bp, Artificial Sequence
  Description of Artificial Sequence: Synthetic oligonucleotide
  Target: ATXN2; (-) strand; PAM type: YTN; PAM sequence: TTT
taagttcttgatgctaacat

SEQ ID NO: 74400 - DNA, 20 bp, Artificial Sequence
  Description of Artificial Sequence: Synthetic oligonucleotide
  Target: ATXN2; (-) strand; PAM type: YTN; PAM sequence: CTT
ttaagttcttgatgctaaca

SEQ ID NO: 74401 - DNA, 20 bp, Artificial Sequence
  Description of Artificial Sequence: Synthetic oligonucleotide
  Target: ATXN2; (-) strand; PAM type: YTN; PAM sequence: TTA
acatgagtaaggtcagtgtg

SEQ ID NO: 74402 - DNA, 20 bp, Artificial Sequence
  Description of Artificial Sequence: Synthetic oligonucleotide
  Target: ATXN2; (-) strand; PAM type: YTN; PAM sequence: TTT
aacatgagtaaggtcagtgt

SEQ ID NO: 74403 - DNA, 20 bp, Artificial Sequence
  Description of Artificial Sequence: Synthetic oligonucleotide
  Target: ATXN2; (-) strand; PAM type: YTN; PAM sequence: TTT
taacatgagtaaggtcagtg

SEQ ID NO: 74404 - DNA, 20 bp, Artificial Sequence
  Description of Artificial Sequence: Synthetic oligonucleotide
  Target: ATXN2; (-) strand; PAM type: YTN; PAM sequence: CTT
ttaacatgagtaaggtcagt

SEQ ID NO: 74405 - DNA, 20 bp, Artificial Sequence
  Description of Artificial Sequence: Synthetic oligonucleotide
  Target: ATXN2; (-) strand; PAM type: YTN; PAM sequence: CTG
gggaaaccttttaacatgag

SEQ ID NO: 74406 - DNA, 20 bp, Artificial Sequence
  Description of Artificial Sequence: Synthetic oligonucleotide
  Target: ATXN2; (-) strand; PAM type: YTN; PAM sequence: CTG
ctggggaaaccttttaacat

SEQ ID NO: 74407 - DNA, 20 bp, Artificial Sequence
  Description of Artificial Sequence: Synthetic oligonucleotide
  Target: ATXN2; (-) strand; PAM type: YTN; PAM sequence: CTC
ggctgctggggaaacctttt

SEQ ID NO: 74408 - DNA, 20 bp, Artificial Sequence
  Description of Artificial Sequence: Synthetic oligonucleotide
  Target: ATXN2; (-) strand; PAM type: YTN; PAM sequence: TTA
caggcgtgagccaccacact

SEQ ID NO: 74409 - DNA, 20 bp, Artificial Sequence
  Description of Artificial Sequence: Synthetic oligonucleotide
  Target: ATXN2; (-) strand; PAM type: YTN; PAM sequence: CTA
ggattacaggcgtgagccac

SEQ ID NO: 74410 - DNA, 20 bp, Artificial Sequence
  Description of Artificial Sequence: Synthetic oligonucleotide
  Target: ATXN2; (-) strand; PAM type: YTN; PAM sequence: CTC
ccaaagtgctaggattacag

SEQ ID NO: 74411 - DNA, 20 bp, Artificial Sequence
  Description of Artificial Sequence: Synthetic oligonucleotide
  Target: ATXN2; (-) strand; PAM type: YTN; PAM sequence: TTG
gcctcccaaagtgctaggat

SEQ ID NO: 74412 - DNA, 20 bp, Artificial Sequence
  Description of Artificial Sequence: Synthetic oligonucleotide
  Target: ATXN2; (-) strand; PAM type: YTN; PAM sequence: CTT
ggcctcccaaagtgctagga

SEQ ID NO: 74413 - DNA, 20 bp, Artificial Sequence
  Description of Artificial Sequence: Synthetic oligonucleotide
  Target: ATXN2; (-) strand; PAM type: YTN; PAM sequence: CTC
atgatccacccaccttggcc

SEQ ID NO: 74414 - DNA, 20 bp, Artificial Sequence
  Description of Artificial Sequence: Synthetic oligonucleotide
  Target: ATXN2; (-) strand; PAM type: YTN; PAM sequence: CTG
acctcatgatccacccacct

SEQ ID NO: 74415 - DNA, 20 bp, Artificial Sequence
  Description of Artificial Sequence: Synthetic oligonucleotide
  Target: ATXN2; (-) strand; PAM type: YTN; PAM sequence: TTC
ctgacctcatgatccaccca

SEQ ID NO: 74416 - DNA, 20 bp, Artificial Sequence
  Description of Artificial Sequence: Synthetic oligonucleotide
  Target: ATXN2; (-) strand; PAM type: YTN; PAM sequence: CTC
aaattcctgacctcatgatc

SEQ ID NO: 74417 - DNA, 20 bp, Artificial Sequence
  Description of Artificial Sequence: Synthetic oligonucleotide
  Target: ATXN2; (-) strand; PAM type: YTN; PAM sequence: TTC
tcaaattcctgacctcatga

SEQ ID NO: 74418 - DNA, 20 bp, Artificial Sequence
  Description of Artificial Sequence: Synthetic oligonucleotide
  Target: ATXN2; (-) strand; PAM type: YTN; PAM sequence: CTT
ctcaaattcctgacctcatg

SEQ ID NO: 74419 - DNA, 20 bp, Artificial Sequence
  Description of Artificial Sequence: Synthetic oligonucleotide
  Target: ATXN2; (-) strand; PAM type: YTN; PAM sequence: CTC
ttctcaaattcctgacctca

SEQ ID NO: 74420 - DNA, 20 bp, Artificial Sequence
  Description of Artificial Sequence: Synthetic oligonucleotide
  Target: ATXN2; (-) strand; PAM type: YTN; PAM sequence: TTG
gccaggctcttctcaaattc

SEQ ID NO: 74421 - DNA, 20 bp, Artificial Sequence
  Description of Artificial Sequence: Synthetic oligonucleotide
  Target: ATXN2; (-) strand; PAM type: YTN; PAM sequence: TTC
accatattggccaggctctt

SEQ ID NO: 74422 - DNA, 20 bp, Artificial Sequence
  Description of Artificial Sequence: Synthetic oligonucleotide
  Target: ATXN2; (-) strand; PAM type: YTN; PAM sequence: TTT
caccatattggccaggctct

SEQ ID NO: 74423 - DNA, 20 bp, Artificial Sequence
  Description of Artificial Sequence: Synthetic oligonucleotide
  Target: ATXN2; (-) strand; PAM type: YTN; PAM sequence: TTA
gtagagacggggtttcacca

SEQ ID NO: 74424 - DNA, 20 bp, Artificial Sequence
  Description of Artificial Sequence: Synthetic oligonucleotide
  Target: ATXN2; (-) strand; PAM type: YTN; PAM sequence: TTT
agtagagacggggtttcacc

SEQ ID NO: 74425 - DNA, 20 bp, Artificial Sequence
  Description of Artificial Sequence: Synthetic oligonucleotide
  Target: ATXN2; (-) strand; PAM type: YTN; PAM sequence: TTT
tagtagagacggggtttcac

SEQ ID NO: 74426 - DNA, 20 bp, Artificial Sequence
  Description of Artificial Sequence: Synthetic oligonucleotide
  Target: ATXN2; (-) strand; PAM type: YTN; PAM sequence: TTT
ttagtagagacggggtttca

SEQ ID NO: 74427 - DNA, 20 bp, Artificial Sequence
  Description of Artificial Sequence: Synthetic oligonucleotide
  Target: ATXN2; (-) strand; PAM type: YTN; PAM sequence: TTA
tatttttagtagagacgggg

SEQ ID NO: 74428 - DNA, 20 bp, Artificial Sequence
  Description of Artificial Sequence: Synthetic oligonucleotide
  Target: ATXN2; (-) strand; PAM type: YTN; PAM sequence: TTT
atatttttagtagagacggg

SEQ ID NO: 74429 - DNA, 20 bp, Artificial Sequence
  Description of Artificial Sequence: Synthetic oligonucleotide
  Target: ATXN2; (-) strand; PAM type: YTN; PAM sequence: TTT
tatatttttagtagagacgg

SEQ ID NO: 74430 - DNA, 20 bp, Artificial Sequence
  Description of Artificial Sequence: Synthetic oligonucleotide
  Target: ATXN2; (-) strand; PAM type: YTN; PAM sequence: TTT
ttatatttttagtagagacg

SEQ ID NO: 74431 - DNA, 20 bp, Artificial Sequence
  Description of Artificial Sequence: Synthetic oligonucleotide
  Target: ATXN2; (-) strand; PAM type: YTN; PAM sequence: CTA
atttttatatttttagtaga

SEQ ID NO: 74432 - DNA, 20 bp, Artificial Sequence
  Description of Artificial Sequence: Synthetic oligonucleotide
  Target: ATXN2; (-) strand; PAM type: YTN; PAM sequence: CTG
ccaccatgcccagctaattt

SEQ ID NO: 74433 - DNA, 20 bp, Artificial Sequence
  Description of Artificial Sequence: Synthetic oligonucleotide
  Target: ATXN2; (-) strand; PAM type: YTN; PAM sequence: TTA
taggcgtctgccaccatgcc

SEQ ID NO: 74434 - DNA, 20 bp, Artificial Sequence
  Description of Artificial Sequence: Synthetic oligonucleotide
  Target: ATXN2; (-) strand; PAM type: YTN; PAM sequence: CTG
ggattataggcgtctgccac

SEQ ID NO: 74435 - DNA, 20 bp, Artificial Sequence
  Description of Artificial Sequence: Synthetic oligonucleotide
  Target: ATXN2; (-) strand; PAM type: YTN; PAM sequence: CTC
ccgaggagctgggattatag

SEQ ID NO: 74436 - DNA, 20 bp, Artificial Sequence
  Description of Artificial Sequence: Synthetic oligonucleotide
  Target: ATXN2; (-) strand; PAM type: YTN; PAM sequence: CTA
agcctcccgaggagctggga

SEQ ID NO: 74437 - DNA, 20 bp, Artificial Sequence
  Description of Artificial Sequence: Synthetic oligonucleotide
  Target: ATXN2; (-) strand; PAM type: YTN; PAM sequence: CTG
cctaagcctcccgaggagct

SEQ ID NO: 74438 - DNA, 20 bp, Artificial Sequence
  Description of Artificial Sequence: Synthetic oligonucleotide
  Target: ATXN2; (-) strand; PAM type: YTN; PAM sequence: TTC
tgcctaagcctcccgaggag

SEQ ID NO: 74439 - DNA, 20 bp, Artificial Sequence
  Description of Artificial Sequence: Synthetic oligonucleotide
  Target: ATXN2; (-) strand; PAM type: YTN; PAM sequence: CTT
ctgcctaagcctcccgagga

SEQ ID NO: 74440 - DNA, 20 bp, Artificial Sequence
  Description of Artificial Sequence: Synthetic oligonucleotide
  Target: ATXN2; (-) strand; PAM type: YTN; PAM sequence: TTC
ttctgcctaagcctcccgag

SEQ ID NO: 74441 - DNA, 20 bp, Artificial Sequence
  Description of Artificial Sequence: Synthetic oligonucleotide
  Target: ATXN2; (-) strand; PAM type: YTN; PAM sequence: TTC
aagcaattcttctgcctaag

SEQ ID NO: 74442 - DNA, 20 bp, Artificial Sequence
  Description of Artificial Sequence: Synthetic oligonucleotide
  Target: ATXN2; (-) strand; PAM type: YTN; PAM sequence: CTA
ggttcaagcaattcttctgc

SEQ ID NO: 74443 - DNA, 20 bp, Artificial Sequence
  Description of Artificial Sequence: Synthetic oligonucleotide
  Target: ATXN2; (-) strand; PAM type: YTN; PAM sequence: TTC
ctaggttcaagcaattcttc

SEQ ID NO: 74444 - DNA, 20 bp, Artificial Sequence
  Description of Artificial Sequence: Synthetic oligonucleotide
  Target: ATXN2; (-) strand; PAM type: YTN; PAM sequence: CTT
cctaggttcaagcaattctt

SEQ ID NO: 74445 - DNA, 20 bp, Artificial Sequence
  Description of Artificial Sequence: Synthetic oligonucleotide
  Target: ATXN2; (-) strand; PAM type: YTN; PAM sequence: CTG
cttcctaggttcaagcaatt

SEQ ID NO: 74446 - DNA, 20 bp, Artificial Sequence
  Description of Artificial Sequence: Synthetic oligonucleotide
  Target: ATXN2; (-) strand; PAM type: YTN; PAM sequence: CTC
tgcttcctaggttcaagcaa

SEQ ID NO: 74447 - DNA, 20 bp, Artificial Sequence
  Description of Artificial Sequence: Synthetic oligonucleotide
  Target: ATXN2; (-) strand; PAM type: YTN; PAM sequence: CTG
caacctctgcttcctaggtt

SEQ ID NO: 74448 - DNA, 20 bp, Artificial Sequence
  Description of Artificial Sequence: Synthetic oligonucleotide
  Target: ATXN2; (-) strand; PAM type: YTN; PAM sequence: CTC
actgcaacctctgcttccta

SEQ ID NO: 74449 - DNA, 20 bp, Artificial Sequence
  Description of Artificial Sequence: Synthetic oligonucleotide
  Target: ATXN2; (-) strand; PAM type: YTN; PAM sequence: CTC
agctcactgcaacctctgct

SEQ ID NO: 74450 - DNA, 20 bp, Artificial Sequence
  Description of Artificial Sequence: Synthetic oligonucleotide
  Target: ATXN2; (-) strand; PAM type: YTN; PAM sequence: CTG
gagtgcagtggcgtgatctc

SEQ ID NO: 74451 - DNA, 20 bp, Artificial Sequence
  Description of Artificial Sequence: Synthetic oligonucleotide
  Target: ATXN2; (-) strand; PAM type: YTN; PAM sequence: CTG
tcacccaggctggagtgcag

SEQ ID NO: 74452 - DNA, 20 bp, Artificial Sequence
  Description of Artificial Sequence: Synthetic oligonucleotide
  Target: ATXN2; (-) strand; PAM type: YTN; PAM sequence: CTC
tgtcacccaggctggagtgc

SEQ ID NO: 74453 - DNA, 20 bp, Artificial Sequence
  Description of Artificial Sequence: Synthetic oligonucleotide
  Target: ATXN2; (-) strand; PAM type: YTN; PAM sequence: CTC
gctctgtcacccaggctgga

SEQ ID NO: 74454 - DNA, 20 bp, Artificial Sequence
  Description of Artificial Sequence: Synthetic oligonucleotide
  Target: ATXN2; (-) strand; PAM type: YTN; PAM sequence: TTG
aggcggagtctcgctctgtc

SEQ ID NO: 74455 - DNA, 20 bp, Artificial Sequence
  Description of Artificial Sequence: Synthetic oligonucleotide
  Target: ATXN2; (-) strand; PAM type: YTN; PAM sequence: TTT
gaggcggagtctcgctctgt

SEQ ID NO: 74456 - DNA, 20 bp, Artificial Sequence
  Description of Artificial Sequence: Synthetic oligonucleotide
  Target: ATXN2; (-) strand; PAM type: YTN; PAM sequence: TTT
tgaggcggagtctcgctctg

SEQ ID NO: 74457 - DNA, 20 bp, Artificial Sequence
  Description of Artificial Sequence: Synthetic oligonucleotide
  Target: ATXN2; (-) strand; PAM type: YTN; PAM sequence: TTA
ttttgaggcggagtctcgct

SEQ ID NO: 74458 - DNA, 20 bp, Artificial Sequence
  Description of Artificial Sequence: Synthetic oligonucleotide
  Target: ATXN2; (-) strand; PAM type: YTN; PAM sequence: TTT
attttgaggcggagtctcgc

SEQ ID NO: 74459 - DNA, 20 bp, Artificial Sequence
  Description of Artificial Sequence: Synthetic oligonucleotide
  Target: ATXN2; (-) strand; PAM type: YTN; PAM sequence: CTT
tattttgaggcggagtctcg

SEQ ID NO: 74460 - DNA, 20 bp, Artificial Sequence
  Description of Artificial Sequence: Synthetic oligonucleotide
  Target: ATXN2; (-) strand; PAM type: YTN; PAM sequence: CTG
ggatcacaagcgtgagccac

SEQ ID NO: 74461 - DNA, 20 bp, Artificial Sequence
  Description of Artificial Sequence: Synthetic oligonucleotide
  Target: ATXN2; (-) strand; PAM type: YTN; PAM sequence: CTC
ccaaagtgctgggatcacaa

SEQ ID NO: 74462 - DNA, 20 bp, Artificial Sequence
  Description of Artificial Sequence: Synthetic oligonucleotide
  Target: ATXN2; (-) strand; PAM type: YTN; PAM sequence: CTA
ggcctcccaaagtgctggga

SEQ ID NO: 74463 - DNA, 20 bp, Artificial Sequence
  Description of Artificial Sequence: Synthetic oligonucleotide
  Target: ATXN2; (-) strand; PAM type: YTN; PAM sequence: CTG
cctaggcctcccaaagtgct

SEQ ID NO: 74464 - DNA, 20 bp, Artificial Sequence
  Description of Artificial Sequence: Synthetic oligonucleotide
  Target: ATXN2; (-) strand; PAM type: YTN; PAM sequence: CTC
aggtgatccacctgcctagg

SEQ ID NO: 74465 - DNA, 20 bp, Artificial Sequence
  Description of Artificial Sequence: Synthetic oligonucleotide
  Target: ATXN2; (-) strand; PAM type: YTN; PAM sequence: CTG
acctcaggtgatccacctgc

SEQ ID NO: 74466 - DNA, 20 bp, Artificial Sequence
  Description of Artificial Sequence: Synthetic oligonucleotide
  Target: ATXN2; (-) strand; PAM type: YTN; PAM sequence: CTC
ctgacctcaggtgatccacc

SEQ ID NO: 74467 - DNA, 20 bp, Artificial Sequence
  Description of Artificial Sequence: Synthetic oligonucleotide
  Target: ATXN2; (-) strand; PAM type: YTN; PAM sequence: TTG
aactcctgacctcaggtgat

SEQ ID NO: 74468 - DNA, 20 bp, Artificial Sequence
  Description of Artificial Sequence: Synthetic oligonucleotide
  Target: ATXN2; (-) strand; PAM type: YTN; PAM sequence: CTT
gaactcctgacctcaggtga

SEQ ID NO: 74469 - DNA, 20 bp, Artificial Sequence
  Description of Artificial Sequence: Synthetic oligonucleotide
  Target: ATXN2; (-) strand; PAM type: YTN; PAM sequence: CTG
gtcttgaactcctgacctca

SEQ ID NO: 74470 - DNA, 20 bp, Artificial Sequence
  Description of Artificial Sequence: Synthetic oligonucleotide
  Target: ATXN2; (-) strand; PAM type: YTN; PAM sequence: TTG
gtcaggctggtcttgaactc

SEQ ID NO: 74471 - DNA, 20 bp, Artificial Sequence
  Description of Artificial Sequence: Synthetic oligonucleotide
  Target: ATXN2; (-) strand; PAM type: YTN; PAM sequence: CTC
cacgttggtcaggctggtct

SEQ ID NO: 74472 - DNA, 20 bp, Artificial Sequence
  Description of Artificial Sequence: Synthetic oligonucleotide
  Target: ATXN2; (-) strand; PAM type: YTN; PAM sequence: TTC
tccacgttggtcaggctggt

SEQ ID NO: 74473 - DNA, 20 bp, Artificial Sequence
  Description of Artificial Sequence: Synthetic oligonucleotide
  Target: ATXN2; (-) strand; PAM type: YTN; PAM sequence: TTT
ctccacgttggtcaggctgg

SEQ ID NO: 74474 - DNA, 20 bp, Artificial Sequence
  Description of Artificial Sequence: Synthetic oligonucleotide
  Target: ATXN2; (-) strand; PAM type: YTN; PAM sequence: CTG
ggtttctccacgttggtcag

SEQ ID NO: 74475 - DNA, 20 bp, Artificial Sequence
  Description of Artificial Sequence: Synthetic oligonucleotide
  Target: ATXN2; (-) strand; PAM type: YTN; PAM sequence: TTA
gtagagactgggtttctcca

SEQ ID NO: 74476 - DNA, 20 bp, Artificial Sequence
  Description of Artificial Sequence: Synthetic oligonucleotide
  Target: ATXN2; (-) strand; PAM type: YTN; PAM sequence: TTT
agtagagactgggtttctcc

SEQ ID NO: 74477 - DNA, 20 bp, Artificial Sequence
  Description of Artificial Sequence: Synthetic oligonucleotide
  Target: ATXN2; (-) strand; PAM type: YTN; PAM sequence: TTT
tagtagagactgggtttctc

SEQ ID NO: 74478 - DNA, 20 bp, Artificial Sequence
  Description of Artificial Sequence: Synthetic oligonucleotide
  Target: ATXN2; (-) strand; PAM type: YTN; PAM sequence: TTT
ttagtagagactgggtttct

SEQ ID NO: 74479 - DNA, 20 bp, Artificial Sequence
  Description of Artificial Sequence: Synthetic oligonucleotide
  Target: ATXN2; (-) strand; PAM type: YTN; PAM sequence: TTG
tatttttagtagagactggg

SEQ ID NO: 74480 - DNA, 20 bp, Artificial Sequence
  Description of Artificial Sequence: Synthetic oligonucleotide
  Target: ATXN2; (-) strand; PAM type: YTN; PAM sequence: TTT
gtatttttagtagagactgg

SEQ ID NO: 74481 - DNA, 20 bp, Artificial Sequence
  Description of Artificial Sequence: Synthetic oligonucleotide
  Target: ATXN2; (-) strand; PAM type: YTN; PAM sequence: CTT
tgtatttttagtagagactg

SEQ ID NO: 74482 - DNA, 20 bp, Artificial Sequence
  Description of Artificial Sequence: Synthetic oligonucleotide
  Target: ATXN2; (-) strand; PAM type: YTN; PAM sequence: CTA
actttgtatttttagtagag

SEQ ID NO: 74483 - DNA, 20 bp, Artificial Sequence
  Description of Artificial Sequence: Synthetic oligonucleotide
  Target: ATXN2; (-) strand; PAM type: YTN; PAM sequence: TTA
caggcatgtgccaccatgcc

SEQ ID NO: 74484 - DNA, 20 bp, Artificial Sequence
  Description of Artificial Sequence: Synthetic oligonucleotide
  Target: ATXN2; (-) strand; PAM type: YTN; PAM sequence: CTG
ggattacaggcatgtgccac

SEQ ID NO: 74485 - DNA, 20 bp, Artificial Sequence
  Description of Artificial Sequence: Synthetic oligonucleotide
  Target: ATXN2; (-) strand; PAM type: YTN; PAM sequence: CTC
ccgagtagctgggattacag

SEQ ID NO: 74486 - DNA, 20 bp, Artificial Sequence
  Description of Artificial Sequence: Synthetic oligonucleotide
  Target: ATXN2; (-) strand; PAM type: YTN; PAM sequence: CTC
agcctcccgagtagctggga

SEQ ID NO: 74487 - DNA, 20 bp, Artificial Sequence
  Description of Artificial Sequence: Synthetic oligonucleotide
  Target: ATXN2; (-) strand; PAM type: YTN; PAM sequence: CTA
tctcagcctcccgagtagct

SEQ ID NO: 74488 - DNA, 20 bp, Artificial Sequence
  Description of Artificial Sequence: Synthetic oligonucleotide
  Target: ATXN2; (-) strand; PAM type: YTN; PAM sequence: CTC
ctatctcagcctcccgagta

SEQ ID NO: 74489 - DNA, 20 bp, Artificial Sequence
  Description of Artificial Sequence: Synthetic oligonucleotide
  Target: ATXN2; (-) strand; PAM type: YTN; PAM sequence: TTC
tcctatctcagcctcccgag

SEQ ID NO: 74490 - DNA, 20 bp, Artificial Sequence
  Description of Artificial Sequence: Synthetic oligonucleotide
  Target: ATXN2; (-) strand; PAM type: YTN; PAM sequence: TTC
aagcgattctcctatctcag

SEQ ID NO: 74491 - DNA, 20 bp, Artificial Sequence
  Description of Artificial Sequence: Synthetic oligonucleotide
  Target: ATXN2; (-) strand; PAM type: YTN; PAM sequence: CTG
ggttcaagcgattctcctat

SEQ ID NO: 74492 - DNA, 20 bp, Artificial Sequence
  Description of Artificial Sequence: Synthetic oligonucleotide
  Target: ATXN2; (-) strand; PAM type: YTN; PAM sequence: TTC
tgggttcaagcgattctcct

SEQ ID NO: 74493 - DNA, 20 bp, Artificial Sequence
  Description of Artificial Sequence: Synthetic oligonucleotide
  Target: ATXN2; (-) strand; PAM type: YTN; PAM sequence: CTT
ctgggttcaagcgattctcc

SEQ ID NO: 74494 - DNA, 20 bp, Artificial Sequence
  Description of Artificial Sequence: Synthetic oligonucleotide
  Target: ATXN2; (-) strand; PAM type: YTN; PAM sequence: CTC
cgccttctgggttcaagcga

SEQ ID NO: 74495 - DNA, 20 bp, Artificial Sequence
  Description of Artificial Sequence: Synthetic oligonucleotide
  Target: ATXN2; (-) strand; PAM type: YTN; PAM sequence: CTG
caacctccgccttctgggtt

SEQ ID NO: 74496 - DNA, 20 bp, Artificial Sequence
  Description of Artificial Sequence: Synthetic oligonucleotide
  Target: ATXN2; (-) strand; PAM type: YTN; PAM sequence: CTC
actgcaacctccgccttctg

SEQ ID NO: 74497 - DNA, 20 bp, Artificial Sequence
  Description of Artificial Sequence: Synthetic oligonucleotide
  Target: ATXN2; (-) strand; PAM type: YTN; PAM sequence: TTC
gctcactgcaacctccgcct

SEQ ID NO: 74498 - DNA, 20 bp, Artificial Sequence
  Description of Artificial Sequence: Synthetic oligonucleotide
  Target: ATXN2; (-) strand; PAM type: YTN; PAM sequence: CTT
cgctcactgcaacctccgcc

SEQ ID NO: 74499 - DNA, 20 bp, Artificial Sequence
  Description of Artificial Sequence: Synthetic oligonucleotide
  Target: ATXN2; (-) strand; PAM type: YTN; PAM sequence: CTG
gagtgcaatggtgcaatctt

SEQ ID NO: 74500 - DNA, 20 bp, Artificial Sequence
  Description of Artificial Sequence: Synthetic oligonucleotide
  Target: ATXN2; (-) strand; PAM type: YTN; PAM sequence: TTG
tcgcccaggctggagtgcaa

SEQ ID NO: 74501 - DNA, 20 bp, Artificial Sequence
  Description of Artificial Sequence: Synthetic oligonucleotide
  Target: ATXN2; (-) strand; PAM type: YTN; PAM sequence: CTT
gtcgcccaggctggagtgca

SEQ ID NO: 74502 - DNA, 20 bp, Artificial Sequence
  Description of Artificial Sequence: Synthetic oligonucleotide
  Target: ATXN2; (-) strand; PAM type: YTN; PAM sequence: CTC
ttgtcgcccaggctggagtg

SEQ ID NO: 74503 - DNA, 20 bp, Artificial Sequence
  Description of Artificial Sequence: Synthetic oligonucleotide
  Target: ATXN2; (-) strand; PAM type: YTN; PAM sequence: TTG
ctcttgtcgcccaggctgga

SEQ ID NO: 74504 - DNA, 20 bp, Artificial Sequence
  Description of Artificial Sequence: Synthetic oligonucleotide
  Target: ATXN2; (-) strand; PAM type: YTN; PAM sequence: TTT
gctcttgtcgcccaggctgg

SEQ ID NO: 74505 - DNA, 20 bp, Artificial Sequence
  Description of Artificial Sequence: Synthetic oligonucleotide
  Target: ATXN2; (-) strand; PAM type: YTN; PAM sequence: TTT
tgctcttgtcgcccaggctg

SEQ ID NO: 74506 - DNA, 20 bp, Artificial Sequence
  Description of Artificial Sequence: Synthetic oligonucleotide
  Target: ATXN2; (-) strand; PAM type: YTN; PAM sequence: TTG
ggacggagttttgctcttgt

SEQ ID NO: 74507 - DNA, 20 bp, Artificial Sequence
  Description of Artificial Sequence: Synthetic oligonucleotide
  Target: ATXN2; (-) strand; PAM type: YTN; PAM sequence: CTT
gggacggagttttgctcttg

SEQ ID NO: 74508 - DNA, 20 bp, Artificial Sequence
  Description of Artificial Sequence: Synthetic oligonucleotide
  Target: ATXN2; (-) strand; PAM type: YTN; PAM sequence: TTC
cttgggacggagttttgctc

SEQ ID NO: 74509 - DNA, 20 bp, Artificial Sequence
  Description of Artificial Sequence: Synthetic oligonucleotide
  Target: ATXN2; (-) strand; PAM type: YTN; PAM sequence: TTT
ccttgggacggagttttgct

SEQ ID NO: 74510 - DNA, 20 bp, Artificial Sequence
  Description of Artificial Sequence: Synthetic oligonucleotide
  Target: ATXN2; (-) strand; PAM type: YTN; PAM sequence: TTT
tccttgggacggagttttgc

SEQ ID NO: 74511 - DNA, 20 bp, Artificial Sequence
  Description of Artificial Sequence: Synthetic oligonucleotide
  Target: ATXN2; (-) strand; PAM type: YTN; PAM sequence: TTG
ttttccttgggacggagttt

SEQ ID NO: 74512 - DNA, 20 bp, Artificial Sequence
  Description of Artificial Sequence: Synthetic oligonucleotide
  Target: ATXN2; (-) strand; PAM type: YTN; PAM sequence: TTT
gttttccttgggacggagtt

SEQ ID NO: 74513 - DNA, 20 bp, Artificial Sequence
  Description of Artificial Sequence: Synthetic oligonucleotide
  Target: ATXN2; (-) strand; PAM type: YTN; PAM sequence: TTT
tgttttccttgggacggagt

SEQ ID NO: 74514 - DNA, 20 bp, Artificial Sequence
  Description of Artificial Sequence: Synthetic oligonucleotide
  Target: ATXN2; (-) strand; PAM type: YTN; PAM sequence: TTT
ttgttttccttgggacggag

SEQ ID NO: 74515 - DNA, 20 bp, Artificial Sequence
  Description of Artificial Sequence: Synthetic oligonucleotide
  Target: ATXN2; (-) strand; PAM type: YTN; PAM sequence: TTT
tttgttttccttgggacgga

SEQ ID NO: 74516 - DNA, 20 bp, Artificial Sequence
  Description of Artificial Sequence: Synthetic oligonucleotide
  Target: ATXN2; (-) strand; PAM type: YTN; PAM sequence: CTT
ttttgttttccttgggacgg

SEQ ID NO: 74517 - DNA, 20 bp, Artificial Sequence
  Description of Artificial Sequence: Synthetic oligonucleotide
  Target: ATXN2; (-) strand; PAM type: YTN; PAM sequence: TTC
ttttttgttttccttgggac

SEQ ID NO: 74518 - DNA, 20 bp, Artificial Sequence
  Description of Artificial Sequence: Synthetic oligonucleotide
  Target: ATXN2; (-) strand; PAM type: YTN; PAM sequence: TTT
cttttttgttttccttggga

SEQ ID NO: 74519 - DNA, 20 bp, Artificial Sequence
  Description of Artificial Sequence: Synthetic oligonucleotide
  Target: ATXN2; (-) strand; PAM type: YTN; PAM sequence: TTT
tcttttttgttttccttggg

SEQ ID NO: 74520 - DNA, 20 bp, Artificial Sequence
  Description of Artificial Sequence: Synthetic oligonucleotide
  Target: ATXN2; (-) strand; PAM type: YTN; PAM sequence: TTT
ttcttttttgttttccttgg

SEQ ID NO: 74521 - DNA, 20 bp, Artificial Sequence
  Description of Artificial Sequence: Synthetic oligonucleotide
  Target: ATXN2; (-) strand; PAM type: YTN; PAM sequence: TTT
tttcttttttgttttccttg

SEQ ID NO: 74522 - DNA, 20 bp, Artificial Sequence
  Description of Artificial Sequence: Synthetic oligonucleotide
  Target: ATXN2; (-) strand; PAM type: YTN; PAM sequence: TTT
ttttcttttttgttttcctt

SEQ ID NO: 74523 - DNA, 20 bp, Artificial Sequence
  Description of Artificial Sequence: Synthetic oligonucleotide
  Target: ATXN2; (-) strand; PAM type: YTN; PAM sequence: TTT
tttttcttttttgttttcct

SEQ ID NO: 74524 - DNA, 20 bp, Artificial Sequence
  Description of Artificial Sequence: Synthetic oligonucleotide
  Target: ATXN2; (-) strand; PAM type: YTN; PAM sequence: CTT
ttttttcttttttgttttcc

SEQ ID NO: 74525 - DNA, 20 bp, Artificial Sequence
  Description of Artificial Sequence: Synthetic oligonucleotide
  Target: ATXN2; (-) strand; PAM type: YTN; PAM sequence: TTG
gggaaaccttttttttcttt

SEQ ID NO: 74526 - DNA, 20 bp, Artificial Sequence
  Description of Artificial Sequence: Synthetic oligonucleotide
  Target: ATXN2; (-) strand; PAM type: YTN; PAM sequence: TTT
ggggaaaccttttttttctt

SEQ ID NO: 74527 - DNA, 20 bp, Artificial Sequence
  Description of Artificial Sequence: Synthetic oligonucleotide
  Target: ATXN2; (-) strand; PAM type: YTN; PAM sequence: TTT
tggggaaaccttttttttct

SEQ ID NO: 74528 - DNA, 20 bp, Artificial Sequence
  Description of Artificial Sequence: Synthetic oligonucleotide
  Target: ATXN2; (-) strand; PAM type: YTN; PAM sequence: TTT
ttggggaaaccttttttttc

SEQ ID NO: 74529 - DNA, 20 bp, Artificial Sequence
  Description of Artificial Sequence: Synthetic oligonucleotide
  Target: ATXN2; (-) strand; PAM type: YTN; PAM sequence: TTA
tttttggggaaacctttttt

SEQ ID NO: 74530 - DNA, 20 bp, Artificial Sequence
  Description of Artificial Sequence: Synthetic oligonucleotide
  Target: ATXN2; (-) strand; PAM type: YTN; PAM sequence: TTT
atttttggggaaaccttttt

SEQ ID NO: 74531 - DNA, 20 bp, Artificial Sequence
  Description of Artificial Sequence: Synthetic oligonucleotide
  Target: ATXN2; (-) strand; PAM type: YTN; PAM sequence: CTT
tatttttggggaaacctttt

SEQ ID NO: 74532 - DNA, 20 bp, Artificial Sequence
  Description of Artificial Sequence: Synthetic oligonucleotide
  Target: ATXN2; (-) strand; PAM type: YTN; PAM sequence: TTG
gctttatttttggggaaacc

SEQ ID NO: 74533 - DNA, 20 bp, Artificial Sequence
  Description of Artificial Sequence: Synthetic oligonucleotide
  Target: ATXN2; (-) strand; PAM type: YTN; PAM sequence: TTT
ggctttatttttggggaaac

SEQ ID NO: 74534 - DNA, 20 bp, Artificial Sequence
  Description of Artificial Sequence: Synthetic oligonucleotide
  Target: ATXN2; (-) strand; PAM type: YTN; PAM sequence: CTT
tggctttatttttggggaaa

SEQ ID NO: 74535 - DNA, 20 bp, Artificial Sequence
  Description of Artificial Sequence: Synthetic oligonucleotide
  Target: ATXN2; (-) strand; PAM type: YTN; PAM sequence: TTA
atctttggctttatttttgg

SEQ ID NO: 74536 - DNA, 20 bp, Artificial Sequence
  Description of Artificial Sequence: Synthetic oligonucleotide
  Target: ATXN2; (-) strand; PAM type: YTN; PAM sequence: TTT
aatctttggctttatttttg

SEQ ID NO: 74537 - DNA, 20 bp, Artificial Sequence
  Description of Artificial Sequence: Synthetic oligonucleotide
  Target: ATXN2; (-) strand; PAM type: YTN; PAM sequence: TTT
taatctttggctttattttt

SEQ ID NO: 74538 - DNA, 20 bp, Artificial Sequence
  Description of Artificial Sequence: Synthetic oligonucleotide
  Target: ATXN2; (-) strand; PAM type: YTN; PAM sequence: TTT
ttaatctttggctttatttt

SEQ ID NO: 74539 - DNA, 20 bp, Artificial Sequence
  Description of Artificial Sequence: Synthetic oligonucleotide
  Target: ATXN2; (-) strand; PAM type: YTN; PAM sequence: TTT
tttaatctttggctttattt

SEQ ID NO: 74540 - DNA, 20 bp, Artificial Sequence
  Description of Artificial Sequence: Synthetic oligonucleotide
  Target: ATXN2; (-) strand; PAM type: YTN; PAM sequence: TTT
ttttaatctttggctttatt

SEQ ID NO: 74541 - DNA, 20 bp, Artificial Sequence
  Description of Artificial Sequence: Synthetic oligonucleotide
  Target: ATXN2; (-) strand; PAM type: YTN; PAM sequence: TTT
tttttaatctttggctttat

SEQ ID NO: 74542 - DNA, 20 bp, Artificial Sequence
  Description of Artificial Sequence: Synthetic oligonucleotide
  Target: ATXN2; (-) strand; PAM type: YTN; PAM sequence: TTT
ttttttaatctttggcttta

SEQ ID NO: 74543 - DNA, 20 bp, Artificial Sequence
  Description of Artificial Sequence: Synthetic oligonucleotide
  Target: ATXN2; (-) strand; PAM type: YTN; PAM sequence: TTT
tttttttaatctttggcttt

SEQ ID NO: 74544 - DNA, 20 bp, Artificial Sequence
  Description of Artificial Sequence: Synthetic oligonucleotide
  Target: ATXN2; (-) strand; PAM type: YTN; PAM sequence: TTT
ttttttttaatctttggctt

SEQ ID NO: 74545 - DNA, 20 bp, Artificial Sequence
  Description of Artificial Sequence: Synthetic oligonucleotide
  Target: ATXN2; (-) strand; PAM type: YTN; PAM sequence: TTT
tttttttttaatctttggct

SEQ ID NO: 74546 - DNA, 20 bp, Artificial Sequence
  Description of Artificial Sequence: Synthetic oligonucleotide
  Target: ATXN2; (-) strand; PAM type: YTN; PAM sequence: TTT
ttttttttttaatctttggc

SEQ ID NO: 74547 - DNA, 20 bp, Artificial Sequence
  Description of Artificial Sequence: Synthetic oligonucleotide
  Target: ATXN2; (-) strand; PAM type: YTN; PAM sequence: TTT
tttttttttttaatctttgg

SEQ ID NO: 74548 - DNA, 20 bp, Artificial Sequence
  Description of Artificial Sequence: Synthetic oligonucleotide
  Target: ATXN2; (-) strand; PAM type: YTN; PAM sequence: TTT
ttttttttttttaatctttg

SEQ ID NO: 74549 - DNA, 20 bp, Artificial Sequence
  Description of Artificial Sequence: Synthetic oligonucleotide
  Target: ATXN2; (-) strand; PAM type: YTN; PAM sequence: TTT
tttttttttttttaatcttt

SEQ ID NO: 74550 - DNA, 20 bp, Artificial Sequence
  Description of Artificial Sequence: Synthetic oligonucleotide
  Target: ATXN2; (-) strand; PAM type: YTN; PAM sequence: TTT
ttttttttttttttaatctt

SEQ ID NO: 74551 - DNA, 20 bp, Artificial Sequence
  Description of Artificial Sequence: Synthetic oligonucleotide
  Target: ATXN2; (-) strand; PAM type: YTN; PAM sequence: TTT
tttttttttttttttaatct

SEQ ID NO: 74552 - DNA, 20 bp, Artificial Sequence
  Description of Artificial Sequence: Synthetic oligonucleotide
  Target: ATXN2; (-) strand; PAM type: YTN; PAM sequence: TTC
aagttttttttttttttttt

SEQ ID NO: 74553 - DNA, 20 bp, Artificial Sequence
  Description of Artificial Sequence: Synthetic oligonucleotide
  Target: ATXN2; (-) strand; PAM type: YTN; PAM sequence: TTG
ttcaagtttttttttttttt

SEQ ID NO: 74554 - DNA, 20 bp, Artificial Sequence
  Description of Artificial Sequence: Synthetic oligonucleotide
  Target: ATXN2; (-) strand; PAM type: YTN; PAM sequence: TTA
tgttgttcaagttttttttt

SEQ ID NO: 74555 - DNA, 20 bp, Artificial Sequence
  Description of Artificial Sequence: Synthetic oligonucleotide
  Target: ATXN2; (-) strand; PAM type: YTN; PAM sequence: CTA
ttatgttgttcaagtttttt

SEQ ID NO: 74556 - DNA, 20 bp, Artificial Sequence
  Description of Artificial Sequence: Synthetic oligonucleotide
  Target: ATXN2; (-) strand; PAM type: YTN; PAM sequence: CTC
aagcaatataagatgcagac

SEQ ID NO: 74557 - DNA, 20 bp, Artificial Sequence
  Description of Artificial Sequence: Synthetic oligonucleotide
  Target: ATXN2; (-) strand; PAM type: YTN; PAM sequence: TTC
tcaagcaatataagatgcag

SEQ ID NO: 74558 - DNA, 20 bp, Artificial Sequence
  Description of Artificial Sequence: Synthetic oligonucleotide
  Target: ATXN2; (-) strand; PAM type: YTN; PAM sequence: CTA
aaagtaaaaaaaaaaaaaaa

SEQ ID NO: 74559 - DNA, 20 bp, Artificial Sequence
  Description of Artificial Sequence: Synthetic oligonucleotide
  Target: ATXN2; (-) strand; PAM type: YTN; PAM sequence: CTC
cacaaataaagctaaaagta

SEQ ID NO: 74560 - DNA, 20 bp, Artificial Sequence
  Description of Artificial Sequence: Synthetic oligonucleotide
  Target: ATXN2; (-) strand; PAM type: YTN; PAM sequence: TTC
tccacaaataaagctaaaag

SEQ ID NO: 74561 - DNA, 20 bp, Artificial Sequence
  Description of Artificial Sequence: Synthetic oligonucleotide
  Target: ATXN2; (-) strand; PAM type: YTN; PAM sequence: TTT
ctccacaaataaagctaaaa

SEQ ID NO: 74562 - DNA, 20 bp, Artificial Sequence
  Description of Artificial Sequence: Synthetic oligonucleotide
  Target: ATXN2; (-) strand; PAM type: YTN; PAM sequence: TTA
aaggatttctccacaaataa

SEQ ID NO: 74563 - DNA, 20 bp, Artificial Sequence
  Description of Artificial Sequence: Synthetic oligonucleotide
  Target: ATXN2; (-) strand; PAM type: YTN; PAM sequence: TTG
ttaaaggatttctccacaaa

SEQ ID NO: 74564 - DNA, 20 bp, Artificial Sequence
  Description of Artificial Sequence: Synthetic oligonucleotide
  Target: ATXN2; (-) strand; PAM type: YTN; PAM sequence: TTC
catggttgttaaaggatttc

SEQ ID NO: 74565 - DNA, 20 bp, Artificial Sequence
  Description of Artificial Sequence: Synthetic oligonucleotide
  Target: ATXN2; (-) strand; PAM type: YTN; PAM sequence: CTG
tgcccagccagtaagttcca

SEQ ID NO: 74566 - DNA, 20 bp, Artificial Sequence
  Description of Artificial Sequence: Synthetic oligonucleotide
  Target: ATXN2; (-) strand; PAM type: YTN; PAM sequence: TTG
taggcatgaaccactgtgcc

SEQ ID NO: 74567 - DNA, 20 bp, Artificial Sequence
  Description of Artificial Sequence: Synthetic oligonucleotide
  Target: ATXN2; (-) strand; PAM type: YTN; PAM sequence: CTG
ggattgtaggcatgaaccac

SEQ ID NO: 74568 - DNA, 20 bp, Artificial Sequence
  Description of Artificial Sequence: Synthetic oligonucleotide
  Target: ATXN2; (-) strand; PAM type: YTN; PAM sequence: TTG
ctgggattgtaggcatgaac

SEQ ID NO: 74569 - DNA, 20 bp, Artificial Sequence
  Description of Artificial Sequence: Synthetic oligonucleotide
  Target: ATXN2; (-) strand; PAM type: YTN; PAM sequence: CTC
ccaaattgctgggattgtag

SEQ ID NO: 74570 - DNA, 20 bp, Artificial Sequence
  Description of Artificial Sequence: Synthetic oligonucleotide
  Target: ATXN2; (-) strand; PAM type: YTN; PAM sequence: CTG
ggcctcccaaattgctggga

SEQ ID NO: 74571 - DNA, 20 bp, Artificial Sequence
  Description of Artificial Sequence: Synthetic oligonucleotide
  Target: ATXN2; (-) strand; PAM type: YTN; PAM sequence: TTA
ggtgatccacccacctgggc

SEQ ID NO: 74572 - DNA, 20 bp, Artificial Sequence
  Description of Artificial Sequence: Synthetic oligonucleotide
  Target: ATXN2; (-) strand; PAM type: YTN; PAM sequence: CTT
aggtgatccacccacctggg

SEQ ID NO: 74573 - DNA, 20 bp, Artificial Sequence
  Description of Artificial Sequence: Synthetic oligonucleotide
  Target: ATXN2; (-) strand; PAM type: YTN; PAM sequence: CTG
accttaggtgatccacccac

SEQ ID NO: 74574 - DNA, 20 bp, Artificial Sequence
  Description of Artificial Sequence: Synthetic oligonucleotide
  Target: ATXN2; (-) strand; PAM type: YTN; PAM sequence: CTC
ctgaccttaggtgatccacc

SEQ ID NO: 74575 - DNA, 20 bp, Artificial Sequence
  Description of Artificial Sequence: Synthetic oligonucleotide
  Target: ATXN2; (-) strand; PAM type: YTN; PAM sequence: TTC
aagctcctgaccttaggtga

SEQ ID NO: 74576 - DNA, 20 bp, Artificial Sequence
  Description of Artificial Sequence: Synthetic oligonucleotide
  Target: ATXN2; (-) strand; PAM type: YTN; PAM sequence: TTT
caagctcctgaccttaggtg

SEQ ID NO: 74577 - DNA, 20 bp, Artificial Sequence
  Description of Artificial Sequence: Synthetic oligonucleotide
  Target: ATXN2; (-) strand; PAM type: YTN; PAM sequence: CTG
atttcaagctcctgacctta

SEQ ID NO: 74578 - DNA, 20 bp, Artificial Sequence
  Description of Artificial Sequence: Synthetic oligonucleotide
  Target: ATXN2; (-) strand; PAM type: YTN; PAM sequence: TTG
gccaggctgatttcaagctc

SEQ ID NO: 74579 - DNA, 20 bp, Artificial Sequence
  Description of Artificial Sequence: Synthetic oligonucleotide
  Target: ATXN2; (-) strand; PAM type: YTN; PAM sequence: TTA
ccatgttggccaggctgatt

SEQ ID NO: 74580 - DNA, 20 bp, Artificial Sequence
  Description of Artificial Sequence: Synthetic oligonucleotide
  Target: ATXN2; (-) strand; PAM type: YTN; PAM sequence: TTT
accatgttggccaggctgat

SEQ ID NO: 74581 - DNA, 20 bp, Artificial Sequence
  Description of Artificial Sequence: Synthetic oligonucleotide
  Target: ATXN2; (-) strand; PAM type: YTN; PAM sequence: TTT
taccatgttggccaggctga

SEQ ID NO: 74582 - DNA, 20 bp, Artificial Sequence
  Description of Artificial Sequence: Synthetic oligonucleotide
  Target: ATXN2; (-) strand; PAM type: YTN; PAM sequence: TTA
gtagagatggggttttacca

SEQ ID NO: 74583 - DNA, 20 bp, Artificial Sequence
  Description of Artificial Sequence: Synthetic oligonucleotide
  Target: ATXN2; (-) strand; PAM type: YTN; PAM sequence: TTT
agtagagatggggttttacc

SEQ ID NO: 74584 - DNA, 20 bp, Artificial Sequence
  Description of Artificial Sequence: Synthetic oligonucleotide
  Target: ATXN2; (-) strand; PAM type: YTN; PAM sequence: TTT
tagtagagatggggttttac

SEQ ID NO: 74585 - DNA, 20 bp, Artificial Sequence
  Description of Artificial Sequence: Synthetic oligonucleotide
  Target: ATXN2; (-) strand; PAM type: YTN; PAM sequence: TTT
ttagtagagatggggtttta

SEQ ID NO: 74586 - DNA, 20 bp, Artificial Sequence
  Description of Artificial Sequence: Synthetic oligonucleotide
  Target: ATXN2; (-) strand; PAM type: YTN; PAM sequence: TTG
tatttttagtagagatgggg

SEQ ID NO: 74587 - DNA, 20 bp, Artificial Sequence
  Description of Artificial Sequence: Synthetic oligonucleotide
  Target: ATXN2; (-) strand; PAM type: YTN; PAM sequence: TTT
gtatttttagtagagatggg

SEQ ID NO: 74588 - DNA, 20 bp, Artificial Sequence
  Description of Artificial Sequence: Synthetic oligonucleotide
  Target: ATXN2; (-) strand; PAM type: YTN; PAM sequence: TTT
tgtatttttagtagagatgg

SEQ ID NO: 74589 - DNA, 20 bp, Artificial Sequence
  Description of Artificial Sequence: Synthetic oligonucleotide
  Target: ATXN2; (-) strand; PAM type: YTN; PAM sequence: TTT
ttgtatttttagtagagatg

SEQ ID NO: 74590 - DNA, 20 bp, Artificial Sequence
  Description of Artificial Sequence: Synthetic oligonucleotide
  Target: ATXN2; (-) strand; PAM type: YTN; PAM sequence: TTA
caggcacgtaccaccacacc

SEQ ID NO: 74591 - DNA, 20 bp, Artificial Sequence
  Description of Artificial Sequence: Synthetic oligonucleotide
  Target: ATXN2; (-) strand; PAM type: YTN; PAM sequence: CTG
ggattacaggcacgtaccac

SEQ ID NO: 74592 - DNA, 20 bp, Artificial Sequence
  Description of Artificial Sequence: Synthetic oligonucleotide
  Target: ATXN2; (-) strand; PAM type: YTN; PAM sequence: CTA
ataactgggattacaggcac

SEQ ID NO: 74593 - DNA, 20 bp, Artificial Sequence
  Description of Artificial Sequence: Synthetic oligonucleotide
  Target: ATXN2; (-) strand; PAM type: YTN; PAM sequence: CTC
cctaataactgggattacag

SEQ ID NO: 74594 - DNA, 20 bp, Artificial Sequence
  Description of Artificial Sequence: Synthetic oligonucleotide
  Target: ATXN2; (-) strand; PAM type: YTN; PAM sequence: TTC
agcctccctaataactggga

SEQ ID NO: 74595 - DNA, 20 bp, Artificial Sequence
  Description of Artificial Sequence: Synthetic oligonucleotide
  Target: ATXN2; (-) strand; PAM type: YTN; PAM sequence: CTT
cagcctccctaataactggg

SEQ ID NO: 74596 - DNA, 20 bp, Artificial Sequence
  Description of Artificial Sequence: Synthetic oligonucleotide
  Target: ATXN2; (-) strand; PAM type: YTN; PAM sequence: TTG
cttcagcctccctaataact

SEQ ID NO: 74597 - DNA, 20 bp, Artificial Sequence
  Description of Artificial Sequence: Synthetic oligonucleotide
  Target: ATXN2; (-) strand; PAM type: YTN; PAM sequence: CTT
gcttcagcctccctaataac

SEQ ID NO: 74598 - DNA, 20 bp, Artificial Sequence
  Description of Artificial Sequence: Synthetic oligonucleotide
  Target: ATXN2; (-) strand; PAM type: YTN; PAM sequence: TTA
tcttgcttcagcctccctaa

SEQ ID NO: 74599 - DNA, 20 bp, Artificial Sequence
  Description of Artificial Sequence: Synthetic oligonucleotide
  Target: ATXN2; (-) strand; PAM type: YTN; PAM sequence: TTC
aagcagttatcttgcttcag

SEQ ID NO: 74600 - DNA, 20 bp, Artificial Sequence
  Description of Artificial Sequence: Synthetic oligonucleotide
  Target: ATXN2; (-) strand; PAM type: YTN; PAM sequence: CTG
ggttcaagcagttatcttgc

SEQ ID NO: 74601 - DNA, 20 bp, Artificial Sequence
  Description of Artificial Sequence: Synthetic oligonucleotide
  Target: ATXN2; (-) strand; PAM type: YTN; PAM sequence: CTC
ctgggttcaagcagttatct

SEQ ID NO: 74602 - DNA, 20 bp, Artificial Sequence
  Description of Artificial Sequence: Synthetic oligonucleotide
  Target: ATXN2; (-) strand; PAM type: YTN; PAM sequence: CTC
cacctcctgggttcaagcag

SEQ ID NO: 74603 - DNA, 20 bp, Artificial Sequence
  Description of Artificial Sequence: Synthetic oligonucleotide
  Target: ATXN2; (-) strand; PAM type: YTN; PAM sequence: CTG
caacctccacctcctgggtt

SEQ ID NO: 74604 - DNA, 20 bp, Artificial Sequence
  Description of Artificial Sequence: Synthetic oligonucleotide
  Target: ATXN2; (-) strand; PAM type: YTN; PAM sequence: TTG
gcgcactgcaacctccacct

SEQ ID NO: 74605 - DNA, 20 bp, Artificial Sequence
  Description of Artificial Sequence: Synthetic oligonucleotide
  Target: ATXN2; (-) strand; PAM type: YTN; PAM sequence: CTT
ggcgcactgcaacctccacc

SEQ ID NO: 74606 - DNA, 20 bp, Artificial Sequence
  Description of Artificial Sequence: Synthetic oligonucleotide
  Target: ATXN2; (-) strand; PAM type: YTN; PAM sequence: CTG
ggtacagtggcgtgatcttg

SEQ ID NO: 74607 - DNA, 20 bp, Artificial Sequence
  Description of Artificial Sequence: Synthetic oligonucleotide
  Target: ATXN2; (-) strand; PAM type: YTN; PAM sequence: CTG
tcgcccaggctgggtacagt

SEQ ID NO: 74608 - DNA, 20 bp, Artificial Sequence
  Description of Artificial Sequence: Synthetic oligonucleotide
  Target: ATXN2; (-) strand; PAM type: YTN; PAM sequence: CTC
tgtcgcccaggctgggtaca

SEQ ID NO: 74609 - DNA, 20 bp, Artificial Sequence
  Description of Artificial Sequence: Synthetic oligonucleotide
  Target: ATXN2; (-) strand; PAM type: YTN; PAM sequence: TTG
ctctgtcgcccaggctgggt

SEQ ID NO: 74610 - DNA, 20 bp, Artificial Sequence
  Description of Artificial Sequence: Synthetic oligonucleotide
  Target: ATXN2; (-) strand; PAM type: YTN; PAM sequence: CTT
gctctgtcgcccaggctggg

SEQ ID NO: 74611 - DNA, 20 bp, Artificial Sequence
  Description of Artificial Sequence: Synthetic oligonucleotide
  Target: ATXN2; (-) strand; PAM type: YTN; PAM sequence: TTG
agacagagtcttgctctgtc

SEQ ID NO: 74612 - DNA, 20 bp, Artificial Sequence
  Description of Artificial Sequence: Synthetic oligonucleotide
  Target: ATXN2; (-) strand; PAM type: YTN; PAM sequence: TTT
gagacagagtcttgctctgt

SEQ ID NO: 74613 - DNA, 20 bp, Artificial Sequence
  Description of Artificial Sequence: Synthetic oligonucleotide
  Target: ATXN2; (-) strand; PAM type: YTN; PAM sequence: TTT
tgagacagagtcttgctctg

SEQ ID NO: 74614 - DNA, 20 bp, Artificial Sequence
  Description of Artificial Sequence: Synthetic oligonucleotide
  Target: ATXN2; (-) strand; PAM type: YTN; PAM sequence: TTG
ttttgagacagagtcttgct

SEQ ID NO: 74615 - DNA, 20 bp, Artificial Sequence
  Description of Artificial Sequence: Synthetic oligonucleotide
  Target: ATXN2; (-) strand; PAM type: YTN; PAM sequence: TTT
gttttgagacagagtcttgc

SEQ ID NO: 74616 - DNA, 20 bp, Artificial Sequence
  Description of Artificial Sequence: Synthetic oligonucleotide
  Target: ATXN2; (-) strand; PAM type: YTN; PAM sequence: TTG
tttgttttgagacagagtct

SEQ ID NO: 74617 - DNA, 20 bp, Artificial Sequence
  Description of Artificial Sequence: Synthetic oligonucleotide
  Target: ATXN2; (-) strand; PAM type: YTN; PAM sequence: TTT
gtttgttttgagacagagtc

SEQ ID NO: 74618 - DNA, 20 bp, Artificial Sequence
  Description of Artificial Sequence: Synthetic oligonucleotide
  Target: ATXN2; (-) strand; PAM type: YTN; PAM sequence: TTG
tttgtttgttttgagacaga

SEQ ID NO: 74619 - DNA, 20 bp, Artificial Sequence
  Description of Artificial Sequence: Synthetic oligonucleotide
  Target: ATXN2; (-) strand; PAM type: YTN; PAM sequence: TTT
gtttgtttgttttgagacag

SEQ ID NO: 74620 - DNA, 20 bp, Artificial Sequence
  Description of Artificial Sequence: Synthetic oligonucleotide
  Target: ATXN2; (-) strand; PAM type: YTN; PAM sequence: TTA
atgtttgtttgtttgttttg

SEQ ID NO: 74621 - DNA, 20 bp, Artificial Sequence
  Description of Artificial Sequence: Synthetic oligonucleotide
  Target: ATXN2; (-) strand; PAM type: YTN; PAM sequence: TTG
tcataagtcgaattaatgtt

SEQ ID NO: 74622 - DNA, 20 bp, Artificial Sequence
  Description of Artificial Sequence: Synthetic oligonucleotide
  Target: ATXN2; (-) strand; PAM type: YTN; PAM sequence: CTC
agttgtcataagtcgaatta

SEQ ID NO: 74623 - DNA, 20 bp, Artificial Sequence
  Description of Artificial Sequence: Synthetic oligonucleotide
  Target: ATXN2; (-) strand; PAM type: YTN; PAM sequence: TTA
tctcagttgtcataagtcga

SEQ ID NO: 74624 - DNA, 20 bp, Artificial Sequence
  Description of Artificial Sequence: Synthetic oligonucleotide
  Target: ATXN2; (-) strand; PAM type: YTN; PAM sequence: TTT
atctcagttgtcataagtcg

SEQ ID NO: 74625 - DNA, 20 bp, Artificial Sequence
  Description of Artificial Sequence: Synthetic oligonucleotide
  Target: ATXN2; (-) strand; PAM type: YTN; PAM sequence: TTG
tttatctcagttgtcataag

SEQ ID NO: 74626 - DNA, 20 bp, Artificial Sequence
  Description of Artificial Sequence: Synthetic oligonucleotide
  Target: ATXN2; (-) strand; PAM type: YTN; PAM sequence: TTG
ttgtttatctcagttgtcat

SEQ ID NO: 74627 - DNA, 20 bp, Artificial Sequence
  Description of Artificial Sequence: Synthetic oligonucleotide
  Target: ATXN2; (-) strand; PAM type: YTN; PAM sequence: TTT
gttgtttatctcagttgtca

SEQ ID NO: 74628 - DNA, 20 bp, Artificial Sequence
  Description of Artificial Sequence: Synthetic oligonucleotide
  Target: ATXN2; (-) strand; PAM type: YTN; PAM sequence: TTG
gtttgttgtttatctcagtt

SEQ ID NO: 74629 - DNA, 20 bp, Artificial Sequence
  Description of Artificial Sequence: Synthetic oligonucleotide
  Target: ATXN2; (-) strand; PAM type: YTN; PAM sequence: TTT
ggtttgttgtttatctcagt

SEQ ID NO: 74630 - DNA, 20 bp, Artificial Sequence
  Description of Artificial Sequence: Synthetic oligonucleotide
  Target: ATXN2; (-) strand; PAM type: YTN; PAM sequence: TTA
tgtggtttggtttgttgttt

SEQ ID NO: 74631 - DNA, 20 bp, Artificial Sequence
  Description of Artificial Sequence: Synthetic oligonucleotide
  Target: ATXN2; (-) strand; PAM type: YTN; PAM sequence: CTG
cagtgacataaattatgtgg

SEQ ID NO: 74632 - DNA, 20 bp, Artificial Sequence
  Description of Artificial Sequence: Synthetic oligonucleotide
  Target: ATXN2; (-) strand; PAM type: YTN; PAM sequence: TTA
tactgcagtgacataaatta

SEQ ID NO: 74633 - DNA, 20 bp, Artificial Sequence
  Description of Artificial Sequence: Synthetic oligonucleotide
  Target: ATXN2; (-) strand; PAM type: YTN; PAM sequence: TTA
acattatactgcagtgacat

SEQ ID NO: 74634 - DNA, 20 bp, Artificial Sequence
  Description of Artificial Sequence: Synthetic oligonucleotide
  Target: ATXN2; (-) strand; PAM type: YTN; PAM sequence: CTT
aacattatactgcagtgaca

SEQ ID NO: 74635 - DNA, 20 bp, Artificial Sequence
  Description of Artificial Sequence: Synthetic oligonucleotide
  Target: ATXN2; (-) strand; PAM type: YTN; PAM sequence: TTC
ttaacattatactgcagtga

SEQ ID NO: 74636 - DNA, 20 bp, Artificial Sequence
  Description of Artificial Sequence: Synthetic oligonucleotide
  Target: ATXN2; (-) strand; PAM type: YTN; PAM sequence: CTC
atgttcttaacattatactg

SEQ ID NO: 74637 - DNA, 20 bp, Artificial Sequence
  Description of Artificial Sequence: Synthetic oligonucleotide
  Target: ATXN2; (-) strand; PAM type: YTN; PAM sequence: CTA
actcatgttcttaacattat

SEQ ID NO: 74638 - DNA, 20 bp, Artificial Sequence
  Description of Artificial Sequence: Synthetic oligonucleotide
  Target: ATXN2; (-) strand; PAM type: YTN; PAM sequence: CTC
taactcatgttcttaacatt

SEQ ID NO: 74639 - DNA, 20 bp, Artificial Sequence
  Description of Artificial Sequence: Synthetic oligonucleotide
  Target: ATXN2; (-) strand; PAM type: YTN; PAM sequence: CTA
ctctaactcatgttcttaac

SEQ ID NO: 74640 - DNA, 20 bp, Artificial Sequence
  Description of Artificial Sequence: Synthetic oligonucleotide
  Target: ATXN2; (-) strand; PAM type: YTN; PAM sequence: TTC
tactctaactcatgttctta

SEQ ID NO: 74641 - DNA, 20 bp, Artificial Sequence
  Description of Artificial Sequence: Synthetic oligonucleotide
  Target: ATXN2; (-) strand; PAM type: YTN; PAM sequence: TTT
ctactctaactcatgttctt

SEQ ID NO: 74642 - DNA, 20 bp, Artificial Sequence
  Description of Artificial Sequence: Synthetic oligonucleotide
  Target: ATXN2; (-) strand; PAM type: YTN; PAM sequence: TTT
tctactctaactcatgttct

SEQ ID NO: 74643 - DNA, 20 bp, Artificial Sequence
  Description of Artificial Sequence: Synthetic oligonucleotide
  Target: ATXN2; (-) strand; PAM type: YTN; PAM sequence: CTT
ttctactctaactcatgttc

SEQ ID NO: 74644 - DNA, 20 bp, Artificial Sequence
  Description of Artificial Sequence: Synthetic oligonucleotide
  Target: ATXN2; (-) strand; PAM type: YTN; PAM sequence: CTA
gcttttctactctaactcat

SEQ ID NO: 74645 - DNA, 20 bp, Artificial Sequence
  Description of Artificial Sequence: Synthetic oligonucleotide
  Target: ATXN2; (-) strand; PAM type: YTN; PAM sequence: CTA
aagtgaggacacaaatctag

SEQ ID NO: 74646 - DNA, 20 bp, Artificial Sequence
  Description of Artificial Sequence: Synthetic oligonucleotide
  Target: ATXN2; (-) strand; PAM type: YTN; PAM sequence: TTG
ctaaagtgaggacacaaatc

SEQ ID NO: 74647 - DNA, 20 bp, Artificial Sequence
  Description of Artificial Sequence: Synthetic oligonucleotide
  Target: ATXN2; (-) strand; PAM type: YTN; PAM sequence: CTT
gctaaagtgaggacacaaat

SEQ ID NO: 74648 - DNA, 20 bp, Artificial Sequence
  Description of Artificial Sequence: Synthetic oligonucleotide
  Target: ATXN2; (-) strand; PAM type: YTN; PAM sequence: TTA
ggaaacttgctaaagtgagg

SEQ ID NO: 74649 - DNA, 20 bp, Artificial Sequence
  Description of Artificial Sequence: Synthetic oligonucleotide
  Target: ATXN2; (-) strand; PAM type: YTN; PAM sequence: TTT
aggaaacttgctaaagtgag

SEQ ID NO: 74650 - DNA, 20 bp, Artificial Sequence
  Description of Artificial Sequence: Synthetic oligonucleotide
  Target: ATXN2; (-) strand; PAM type: YTN; PAM sequence: TTA
tccacgtcatagatgaggaa

SEQ ID NO: 74651 - DNA, 20 bp, Artificial Sequence
  Description of Artificial Sequence: Synthetic oligonucleotide
  Target: ATXN2; (-) strand; PAM type: YTN; PAM sequence: CTA
ttatccacgtcatagatgag

SEQ ID NO: 74652 - DNA, 20 bp, Artificial Sequence
  Description of Artificial Sequence: Synthetic oligonucleotide
  Target: ATXN2; (-) strand; PAM type: YTN; PAM sequence: CTG
tagtagatacagctattatc

SEQ ID NO: 74653 - DNA, 20 bp, Artificial Sequence
  Description of Artificial Sequence: Synthetic oligonucleotide
  Target: ATXN2; (-) strand; PAM type: YTN; PAM sequence: TTC
tgtagtagatacagctatta

SEQ ID NO: 74654 - DNA, 20 bp, Artificial Sequence
  Description of Artificial Sequence: Synthetic oligonucleotide
  Target: ATXN2; (-) strand; PAM type: YTN; PAM sequence: TTT
ctgtagtagatacagctatt

SEQ ID NO: 74655 - DNA, 20 bp, Artificial Sequence
  Description of Artificial Sequence: Synthetic oligonucleotide
  Target: ATXN2; (-) strand; PAM type: YTN; PAM sequence: TTG
tttctgtagtagatacagct

SEQ ID NO: 74656 - DNA, 20 bp, Artificial Sequence
  Description of Artificial Sequence: Synthetic oligonucleotide
  Target: ATXN2; (-) strand; PAM type: YTN; PAM sequence: TTC
acataatcatcacaagttgt

SEQ ID NO: 74657 - DNA, 20 bp, Artificial Sequence
  Description of Artificial Sequence: Synthetic oligonucleotide
  Target: ATXN2; (-) strand; PAM type: YTN; PAM sequence: TTG
ttcacataatcatcacaagt

SEQ ID NO: 74658 - DNA, 20 bp, Artificial Sequence
  Description of Artificial Sequence: Synthetic oligonucleotide
  Target: ATXN2; (-) strand; PAM type: YTN; PAM sequence: TTT
gttcacataatcatcacaag

SEQ ID NO: 74659 - DNA, 20 bp, Artificial Sequence
  Description of Artificial Sequence: Synthetic oligonucleotide
  Target: ATXN2; (-) strand; PAM type: YTN; PAM sequence: CTA
catttgttcacataatcatc

SEQ ID NO: 74660 - DNA, 20 bp, Artificial Sequence
  Description of Artificial Sequence: Synthetic oligonucleotide
  Target: ATXN2; (-) strand; PAM type: YTN; PAM sequence: TTA
cctacatttgttcacataat

SEQ ID NO: 74661 - DNA, 20 bp, Artificial Sequence
  Description of Artificial Sequence: Synthetic oligonucleotide
  Target: ATXN2; (-) strand; PAM type: YTN; PAM sequence: TTT
acctacatttgttcacataa

SEQ ID NO: 74662 - DNA, 20 bp, Artificial Sequence
  Description of Artificial Sequence: Synthetic oligonucleotide
  Target: ATXN2; (-) strand; PAM type: YTN; PAM sequence: CTA
acagatttacctacatttgt

SEQ ID NO: 74663 - DNA, 20 bp, Artificial Sequence
  Description of Artificial Sequence: Synthetic oligonucleotide
  Target: ATXN2; (-) strand; PAM type: YTN; PAM sequence: CTG
tgctaacagatttacctaca

SEQ ID NO: 74664 - DNA, 20 bp, Artificial Sequence
  Description of Artificial Sequence: Synthetic oligonucleotide
  Target: ATXN2; (-) strand; PAM type: YTN; PAM sequence: CTC
tgtgctaacagatttaccta

SEQ ID NO: 74665 - DNA, 20 bp, Artificial Sequence
  Description of Artificial Sequence: Synthetic oligonucleotide
  Target: ATXN2; (-) strand; PAM type: YTN; PAM sequence: CTA
tgtgccagactctgtgctaa

SEQ ID NO: 74666 - DNA, 20 bp, Artificial Sequence
  Description of Artificial Sequence: Synthetic oligonucleotide
  Target: ATXN2; (-) strand; PAM type: YTN; PAM sequence: TTC
tatgtgccagactctgtgct

SEQ ID NO: 74667 - DNA, 20 bp, Artificial Sequence
  Description of Artificial Sequence: Synthetic oligonucleotide
  Target: ATXN2; (-) strand; PAM type: YTN; PAM sequence: TTG
agtgcatattctatgtgcca

SEQ ID NO: 74668 - DNA, 20 bp, Artificial Sequence
  Description of Artificial Sequence: Synthetic oligonucleotide
  Target: ATXN2; (-) strand; PAM type: YTN; PAM sequence: TTT
gagtgcatattctatgtgcc

SEQ ID NO: 74669 - DNA, 20 bp, Artificial Sequence
  Description of Artificial Sequence: Synthetic oligonucleotide
  Target: ATXN2; (-) strand; PAM type: YTN; PAM sequence: CTA
aaatttgagtgcatattcta

SEQ ID NO: 74670 - DNA, 20 bp, Artificial Sequence
  Description of Artificial Sequence: Synthetic oligonucleotide
  Target: ATXN2; (-) strand; PAM type: YTN; PAM sequence: TTA
actaaaatttgagtgcatat

SEQ ID NO: 74671 - DNA, 20 bp, Artificial Sequence
  Description of Artificial Sequence: Synthetic oligonucleotide
  Target: ATXN2; (-) strand; PAM type: YTN; PAM sequence: TTG
ataatattaactaaaatttg

SEQ ID NO: 74672 - DNA, 20 bp, Artificial Sequence
  Description of Artificial Sequence: Synthetic oligonucleotide
  Target: ATXN2; (-) strand; PAM type: YTN; PAM sequence: TTA
aggttgataatattaactaa

SEQ ID NO: 74673 - DNA, 20 bp, Artificial Sequence
  Description of Artificial Sequence: Synthetic oligonucleotide
  Target: ATXN2; (-) strand; PAM type: YTN; PAM sequence: TTA
ttaaggttgataatattaac

SEQ ID NO: 74674 - DNA, 20 bp, Artificial Sequence
  Description of Artificial Sequence: Synthetic oligonucleotide
  Target: ATXN2; (-) strand; PAM type: YTN; PAM sequence: CTG
tcaaattattaaggttgata

SEQ ID NO: 74675 - DNA, 20 bp, Artificial Sequence
  Description of Artificial Sequence: Synthetic oligonucleotide
  Target: ATXN2; (-) strand; PAM type: YTN; PAM sequence: CTG
taatagtctgtcaaattatt

SEQ ID NO: 74676 - DNA, 20 bp, Artificial Sequence
  Description of Artificial Sequence: Synthetic oligonucleotide
  Target: ATXN2; (-) strand; PAM type: YTN; PAM sequence: TTC
tgtaatagtctgtcaaatta

SEQ ID NO: 74677 - DNA, 20 bp, Artificial Sequence
  Description of Artificial Sequence: Synthetic oligonucleotide
  Target: ATXN2; (-) strand; PAM type: YTN; PAM sequence: CTT
ctgtaatagtctgtcaaatt

SEQ ID NO: 74678 - DNA, 20 bp, Artificial Sequence
  Description of Artificial Sequence: Synthetic oligonucleotide
  Target: ATXN2; (-) strand; PAM type: YTN; PAM sequence: CTC
ttctgtaatagtctgtcaaa

SEQ ID NO: 74679 - DNA, 20 bp, Artificial Sequence
  Description of Artificial Sequence: Synthetic oligonucleotide
  Target: ATXN2; (-) strand; PAM type: YTN; PAM sequence: TTC
tcttctgtaatagtctgtca

SEQ ID NO: 74680 - DNA, 20 bp, Artificial Sequence
  Description of Artificial Sequence: Synthetic oligonucleotide
  Target: ATXN2; (-) strand; PAM type: YTN; PAM sequence: TTA
taattctcttctgtaatagt

SEQ ID NO: 74681 - DNA, 20 bp, Artificial Sequence
  Description of Artificial Sequence: Synthetic oligonucleotide
  Target: ATXN2; (-) strand; PAM type: YTN; PAM sequence: TTT
ataattctcttctgtaatag

SEQ ID NO: 74682 - DNA, 20 bp, Artificial Sequence
  Description of Artificial Sequence: Synthetic oligonucleotide
  Target: ATXN2; (-) strand; PAM type: YTN; PAM sequence: TTT
tataattctcttctgtaata

SEQ ID NO: 74683 - DNA, 20 bp, Artificial Sequence
  Description of Artificial Sequence: Synthetic oligonucleotide
  Target: ATXN2; (-) strand; PAM type: YTN; PAM sequence: CTT
ttataattctcttctgtaat

SEQ ID NO: 74684 - DNA, 20 bp, Artificial Sequence
  Description of Artificial Sequence: Synthetic oligonucleotide
  Target: ATXN2; (-) strand; PAM type: YTN; PAM sequence: CTG
agcttttataattctcttct

SEQ ID NO: 74685 - DNA, 20 bp, Artificial Sequence
  Description of Artificial Sequence: Synthetic oligonucleotide
  Target: ATXN2; (-) strand; PAM type: YTN; PAM sequence: TTC
tgagcttttataattctctt

SEQ ID NO: 74686 - DNA, 20 bp, Artificial Sequence
  Description of Artificial Sequence: Synthetic oligonucleotide
  Target: ATXN2; (-) strand; PAM type: YTN; PAM sequence: TTT
ctgagcttttataattctct

SEQ ID NO: 74687 - DNA, 20 bp, Artificial Sequence
  Description of Artificial Sequence: Synthetic oligonucleotide
  Target: ATXN2; (-) strand; PAM type: YTN; PAM sequence: TTC
atttctgagcttttataatt

SEQ ID NO: 74688 - DNA, 20 bp, Artificial Sequence
  Description of Artificial Sequence: Synthetic oligonucleotide
  Target: ATXN2; (-) strand; PAM type: YTN; PAM sequence: TTT
catttctgagcttttataat

SEQ ID NO: 74689 - DNA, 20 bp, Artificial Sequence
  Description of Artificial Sequence: Synthetic oligonucleotide
  Target: ATXN2; (-) strand; PAM type: YTN; PAM sequence: TTG
atttcatttctgagctttta

SEQ ID NO: 74690 - DNA, 20 bp, Artificial Sequence
  Description of Artificial Sequence: Synthetic oligonucleotide
  Target: ATXN2; (-) strand; PAM type: YTN; PAM sequence: CTA
aaagatatgaattgatttca

SEQ ID NO: 74691 - DNA, 20 bp, Artificial Sequence
  Description of Artificial Sequence: Synthetic oligonucleotide
  Target: ATXN2; (-) strand; PAM type: YTN; PAM sequence: TTC
ctaaaagatatgaattgatt

SEQ ID NO: 74692 - DNA, 20 bp, Artificial Sequence
  Description of Artificial Sequence: Synthetic oligonucleotide
  Target: ATXN2; (-) strand; PAM type: YTN; PAM sequence: TTT
cctaaaagatatgaattgat

SEQ ID NO: 74693 - DNA, 20 bp, Artificial Sequence
  Description of Artificial Sequence: Synthetic oligonucleotide
  Target: ATXN2; (-) strand; PAM type: YTN; PAM sequence: TTT
tcctaaaagatatgaattga

SEQ ID NO: 74694 - DNA, 20 bp, Artificial Sequence
  Description of Artificial Sequence: Synthetic oligonucleotide
  Target: ATXN2; (-) strand; PAM type: YTN; PAM sequence: TTG
tattttcctaaaagatatga

SEQ ID NO: 74695 - DNA, 20 bp, Artificial Sequence
  Description of Artificial Sequence: Synthetic oligonucleotide
  Target: ATXN2; (-) strand; PAM type: YTN; PAM sequence: CTA
atatgacattgtattttcct

SEQ ID NO: 74696 - DNA, 20 bp, Artificial Sequence
  Description of Artificial Sequence: Synthetic oligonucleotide
  Target: ATXN2; (-) strand; PAM type: YTN; PAM sequence: TTA
gagtatactaatatgacatt

SEQ ID NO: 74697 - DNA, 20 bp, Artificial Sequence
  Description of Artificial Sequence: Synthetic oligonucleotide
  Target: ATXN2; (-) strand; PAM type: YTN; PAM sequence: TTA
taatagaagtggatgaatga

SEQ ID NO: 74698 - DNA, 20 bp, Artificial Sequence
  Description of Artificial Sequence: Synthetic oligonucleotide
  Target: ATXN2; (-) strand; PAM type: YTN; PAM sequence: TTT
ataatagaagtggatgaatg

SEQ ID NO: 74699 - DNA, 20 bp, Artificial Sequence
  Description of Artificial Sequence: Synthetic oligonucleotide
  Target: ATXN2; (-) strand; PAM type: YTN; PAM sequence: TTT
tataatagaagtggatgaat

SEQ ID NO: 74700 - DNA, 20 bp, Artificial Sequence
  Description of Artificial Sequence: Synthetic oligonucleotide
  Target: ATXN2; (-) strand; PAM type: YTN; PAM sequence: TTT
ttataatagaagtggatgaa

SEQ ID NO: 74701 - DNA, 20 bp, Artificial Sequence
  Description of Artificial Sequence: Synthetic oligonucleotide
  Target: ATXN2; (-) strand; PAM type: YTN; PAM sequence: TTT
tttataatagaagtggatga

SEQ ID NO: 74702 - DNA, 20 bp, Artificial Sequence
  Description of Artificial Sequence: Synthetic oligonucleotide
  Target: ATXN2; (-) strand; PAM type: YTN; PAM sequence: TTG
aatggatagatagagtgttt

SEQ ID NO: 74703 - DNA, 20 bp, Artificial Sequence
  Description of Artificial Sequence: Synthetic oligonucleotide
  Target: ATXN2; (-) strand; PAM type: YTN; PAM sequence: CTT
gaatggatagatagagtgtt

SEQ ID NO: 74704 - DNA, 20 bp, Artificial Sequence
  Description of Artificial Sequence: Synthetic oligonucleotide
  Target: ATXN2; (-) strand; PAM type: YTN; PAM sequence: TTC
cacatcttgaatggatagat

SEQ ID NO: 74705 - DNA, 20 bp, Artificial Sequence
  Description of Artificial Sequence: Synthetic oligonucleotide
  Target: ATXN2; (-) strand; PAM type: YTN; PAM sequence: TTT
ccacatcttgaatggataga

SEQ ID NO: 74706 - DNA, 20 bp, Artificial Sequence
  Description of Artificial Sequence: Synthetic oligonucleotide
  Target: ATXN2; (-) strand; PAM type: YTN; PAM sequence: TTT
tccacatcttgaatggatag

SEQ ID NO: 74707 - DNA, 20 bp, Artificial Sequence
  Description of Artificial Sequence: Synthetic oligonucleotide
  Target: ATXN2; (-) strand; PAM type: YTN; PAM sequence: CTT
ttccacatcttgaatggata

SEQ ID NO: 74708 - DNA, 20 bp, Artificial Sequence
  Description of Artificial Sequence: Synthetic oligonucleotide
  Target: ATXN2; (-) strand; PAM type: YTN; PAM sequence: TTG
atagtacttttccacatctt

SEQ ID NO: 74709 - DNA, 20 bp, Artificial Sequence
  Description of Artificial Sequence: Synthetic oligonucleotide
  Target: ATXN2; (-) strand; PAM type: YTN; PAM sequence: TTT
gatagtacttttccacatct

SEQ ID NO: 74710 - DNA, 20 bp, Artificial Sequence
  Description of Artificial Sequence: Synthetic oligonucleotide
  Target: ATXN2; (-) strand; PAM type: YTN; PAM sequence: TTA
tcatttgatagtacttttcc

SEQ ID NO: 74711 - DNA, 20 bp, Artificial Sequence
  Description of Artificial Sequence: Synthetic oligonucleotide
  Target: ATXN2; (-) strand; PAM type: YTN; PAM sequence: CTG
ttatcatttgatagtacttt

SEQ ID NO: 74712 - DNA, 20 bp, Artificial Sequence
  Description of Artificial Sequence: Synthetic oligonucleotide
  Target: ATXN2; (-) strand; PAM type: YTN; PAM sequence: CTG
ctgttatcatttgatagtac

SEQ ID NO: 74713 - DNA, 20 bp, Artificial Sequence
  Description of Artificial Sequence: Synthetic oligonucleotide
  Target: ATXN2; (-) strand; PAM type: YTN; PAM sequence: CTC
tgctgttatcatttgatagt

SEQ ID NO: 74714 - DNA, 20 bp, Artificial Sequence
  Description of Artificial Sequence: Synthetic oligonucleotide
  Target: ATXN2; (-) strand; PAM type: YTN; PAM sequence: CTG
aaatagtctctgctgttatc

SEQ ID NO: 74715 - DNA, 20 bp, Artificial Sequence
  Description of Artificial Sequence: Synthetic oligonucleotide
  Target: ATXN2; (-) strand; PAM type: YTN; PAM sequence: CTG
cctgaaatagtctctgctgt

SEQ ID NO: 74716 - DNA, 20 bp, Artificial Sequence
  Description of Artificial Sequence: Synthetic oligonucleotide
  Target: ATXN2; (-) strand; PAM type: YTN; PAM sequence: TTG
gcaactgcctgaaatagtct

SEQ ID NO: 74717 - DNA, 20 bp, Artificial Sequence
  Description of Artificial Sequence: Synthetic oligonucleotide
  Target: ATXN2; (-) strand; PAM type: YTN; PAM sequence: CTC
agaattggcaactgcctgaa

SEQ ID NO: 74718 - DNA, 20 bp, Artificial Sequence
  Description of Artificial Sequence: Synthetic oligonucleotide
  Target: ATXN2; (-) strand; PAM type: YTN; PAM sequence: CTG
tctcagaattggcaactgcc

SEQ ID NO: 74719 - DNA, 20 bp, Artificial Sequence
  Description of Artificial Sequence: Synthetic oligonucleotide
  Target: ATXN2; (-) strand; PAM type: YTN; PAM sequence: TTC
tgtctcagaattggcaactg

SEQ ID NO: 74720 - DNA, 20 bp, Artificial Sequence
  Description of Artificial Sequence: Synthetic oligonucleotide
  Target: ATXN2; (-) strand; PAM type: YTN; PAM sequence: TTT
ctgtctcagaattggcaact

SEQ ID NO: 74721 - DNA, 20 bp, Artificial Sequence
  Description of Artificial Sequence: Synthetic oligonucleotide
  Target: ATXN2; (-) strand; PAM type: YTN; PAM sequence: CTT
tctgtctcagaattggcaac

SEQ ID NO: 74722 - DNA, 20 bp, Artificial Sequence
  Description of Artificial Sequence: Synthetic oligonucleotide
  Target: ATXN2; (-) strand; PAM type: YTN; PAM sequence: CTC
acagtcccctttctgtctca

SEQ ID NO: 74723 - DNA, 20 bp, Artificial Sequence
  Description of Artificial Sequence: Synthetic oligonucleotide
  Target: ATXN2; (-) strand; PAM type: YTN; PAM sequence: TTG
cctcacagtcccctttctgt

SEQ ID NO: 74724 - DNA, 20 bp, Artificial Sequence
  Description of Artificial Sequence: Synthetic oligonucleotide
  Target: ATXN2; (-) strand; PAM type: YTN; PAM sequence: CTT
gcctcacagtcccctttctg

SEQ ID NO: 74725 - DNA, 20 bp, Artificial Sequence
  Description of Artificial Sequence: Synthetic oligonucleotide
  Target: ATXN2; (-) strand; PAM type: YTN; PAM sequence: TTC
ttgcctcacagtcccctttc

SEQ ID NO: 74726 - DNA, 20 bp, Artificial Sequence
  Description of Artificial Sequence: Synthetic oligonucleotide
  Target: ATXN2; (-) strand; PAM type: YTN; PAM sequence: TTT
cttgcctcacagtccccttt

SEQ ID NO: 74727 - DNA, 20 bp, Artificial Sequence
  Description of Artificial Sequence: Synthetic oligonucleotide
  Target: ATXN2; (-) strand; PAM type: YTN; PAM sequence: TTT
tcttgcctcacagtcccctt

SEQ ID NO: 74728 - DNA, 20 bp, Artificial Sequence
  Description of Artificial Sequence: Synthetic oligonucleotide
  Target: ATXN2; (-) strand; PAM type: YTN; PAM sequence: TTA
ttttcttgcctcacagtccc

SEQ ID NO: 74729 - DNA, 20 bp, Artificial Sequence
  Description of Artificial Sequence: Synthetic oligonucleotide
  Target: ATXN2; (-) strand; PAM type: YTN; PAM sequence: TTT
attttcttgcctcacagtcc

SEQ ID NO: 74730 - DNA, 20 bp, Artificial Sequence
  Description of Artificial Sequence: Synthetic oligonucleotide
  Target: ATXN2; (-) strand; PAM type: YTN; PAM sequence: CTT
tattttcttgcctcacagtc

SEQ ID NO: 74731 - DNA, 20 bp, Artificial Sequence
  Description of Artificial Sequence: Synthetic oligonucleotide
  Target: ATXN2; (-) strand; PAM type: YTN; PAM sequence: TTG
tgctttattttcttgcctca

SEQ ID NO: 74732 - DNA, 20 bp, Artificial Sequence
  Description of Artificial Sequence: Synthetic oligonucleotide
  Target: ATXN2; (-) strand; PAM type: YTN; PAM sequence: TTT
gtgctttattttcttgcctc

SEQ ID NO: 74733 - DNA, 20 bp, Artificial Sequence
  Description of Artificial Sequence: Synthetic oligonucleotide
  Target: ATXN2; (-) strand; PAM type: YTN; PAM sequence: CTG
ggcaacagaataaaaaaaga

SEQ ID NO: 74734 - DNA, 20 bp, Artificial Sequence
  Description of Artificial Sequence: Synthetic oligonucleotide
  Target: ATXN2; (-) strand; PAM type: YTN; PAM sequence: CTC
cagcctgggcaacagaataa

SEQ ID NO: 74735 - DNA, 20 bp, Artificial Sequence
  Description of Artificial Sequence: Synthetic oligonucleotide
  Target: ATXN2; (-) strand; PAM type: YTN; PAM sequence: CTG
cactccagcctgggcaacag

SEQ ID NO: 74736 - DNA, 20 bp, Artificial Sequence
  Description of Artificial Sequence: Synthetic oligonucleotide
  Target: ATXN2; (-) strand; PAM type: YTN; PAM sequence: TTG
cgagatcatgccactgcact

SEQ ID NO: 74737 - DNA, 20 bp, Artificial Sequence
  Description of Artificial Sequence: Synthetic oligonucleotide
  Target: ATXN2; (-) strand; PAM type: YTN; PAM sequence: TTG
aacccgggaggcagagattg

SEQ ID NO: 74738 - DNA, 20 bp, Artificial Sequence
  Description of Artificial Sequence: Synthetic oligonucleotide
  Target: ATXN2; (-) strand; PAM type: YTN; PAM sequence: CTT
gaacccgggaggcagagatt

SEQ ID NO: 74739 - DNA, 20 bp, Artificial Sequence
  Description of Artificial Sequence: Synthetic oligonucleotide
  Target: ATXN2; (-) strand; PAM type: YTN; PAM sequence: CTG
aggcagaagaatcgcttgaa

SEQ ID NO: 74740 - DNA, 20 bp, Artificial Sequence
  Description of Artificial Sequence: Synthetic oligonucleotide
  Target: ATXN2; (-) strand; PAM type: YTN; PAM sequence: TTG
gggagaggctgaggcagaag

SEQ ID NO: 74741 - DNA, 20 bp, Artificial Sequence
  Description of Artificial Sequence: Synthetic oligonucleotide
  Target: ATXN2; (-) strand; PAM type: YTN; PAM sequence: CTT
ggggagaggctgaggcagaa

SEQ ID NO: 74742 - DNA, 20 bp, Artificial Sequence
  Description of Artificial Sequence: Synthetic oligonucleotide
  Target: ATXN2; (-) strand; PAM type: YTN; PAM sequence: CTA
cttggggagaggctgaggca

SEQ ID NO: 74743 - DNA, 20 bp, Artificial Sequence
  Description of Artificial Sequence: Synthetic oligonucleotide
  Target: ATXN2; (-) strand; PAM type: YTN; PAM sequence: CTA
taatcccagctacttgggga

SEQ ID NO: 74744 - DNA, 20 bp, Artificial Sequence
  Description of Artificial Sequence: Synthetic oligonucleotide
  Target: ATXN2; (-) strand; PAM type: YTN; PAM sequence: TTA
gcgggacgtgatggcacatg

SEQ ID NO: 74745 - DNA, 20 bp, Artificial Sequence
  Description of Artificial Sequence: Synthetic oligonucleotide
  Target: ATXN2; (-) strand; PAM type: YTN; PAM sequence: CTA
aaaaagtaaaaaattagcgg

SEQ ID NO: 74746 - DNA, 20 bp, Artificial Sequence
  Description of Artificial Sequence: Synthetic oligonucleotide
  Target: ATXN2; (-) strand; PAM type: YTN; PAM sequence: TTA
ctaaaaaagtaaaaaattag

SEQ ID NO: 74747 - DNA, 20 bp, Artificial Sequence
  Description of Artificial Sequence: Synthetic oligonucleotide
  Target: ATXN2; (-) strand; PAM type: YTN; PAM sequence: TTT
actaaaaaagtaaaaaatta

SEQ ID NO: 74748 - DNA, 20 bp, Artificial Sequence
  Description of Artificial Sequence: Synthetic oligonucleotide
  Target: ATXN2; (-) strand; PAM type: YTN; PAM sequence: CTT
tactaaaaaagtaaaaaatt

SEQ ID NO: 74749 - DNA, 20 bp, Artificial Sequence
  Description of Artificial Sequence: Synthetic oligonucleotide
  Target: ATXN2; (-) strand; PAM type: YTN; PAM sequence: TTG
aaaccccgtctttactaaaa

SEQ ID NO: 74750 - DNA, 20 bp, Artificial Sequence
  Description of Artificial Sequence: Synthetic oligonucleotide
  Target: ATXN2; (-) strand; PAM type: YTN; PAM sequence: CTG
gccaacatgttgaaaccccg

SEQ ID NO: 74751 - DNA, 20 bp, Artificial Sequence
  Description of Artificial Sequence: Synthetic oligonucleotide
  Target: ATXN2; (-) strand; PAM type: YTN; PAM sequence: TTC
gagaccagcctggccaacat

SEQ ID NO: 74752 - DNA, 20 bp, Artificial Sequence
  Description of Artificial Sequence: Synthetic oligonucleotide
  Target: ATXN2; (-) strand; PAM type: YTN; PAM sequence: TTG
aggtcaggagttcgagacca

SEQ ID NO: 74753 - DNA, 20 bp, Artificial Sequence
  Description of Artificial Sequence: Synthetic oligonucleotide
  Target: ATXN2; (-) strand; PAM type: YTN; PAM sequence: TTT
gaggtcaggagttcgagacc

SEQ ID NO: 74754 - DNA, 20 bp, Artificial Sequence
  Description of Artificial Sequence: Synthetic oligonucleotide
  Target: ATXN2; (-) strand; PAM type: YTN; PAM sequence: TTG
ggagaccaaggtgggcagat

SEQ ID NO: 74755 - DNA, 20 bp, Artificial Sequence
  Description of Artificial Sequence: Synthetic oligonucleotide
  Target: ATXN2; (-) strand; PAM type: YTN; PAM sequence: TTT
gggagaccaaggtgggcaga

SEQ ID NO: 74756 - DNA, 20 bp, Artificial Sequence
  Description of Artificial Sequence: Synthetic oligonucleotide
  Target: ATXN2; (-) strand; PAM type: YTN; PAM sequence: CTT
tgggagaccaaggtgggcag

SEQ ID NO: 74757 - DNA, 20 bp, Artificial Sequence
  Description of Artificial Sequence: Synthetic oligonucleotide
  Target: ATXN2; (-) strand; PAM type: YTN; PAM sequence: CTC
actttgggagaccaaggtgg

SEQ ID NO: 74758 - DNA, 20 bp, Artificial Sequence
  Description of Artificial Sequence: Synthetic oligonucleotide
  Target: ATXN2; (-) strand; PAM type: YTN; PAM sequence: CTG
taatctcactttgggagacc

SEQ ID NO: 74759 - DNA, 20 bp, Artificial Sequence
  Description of Artificial Sequence: Synthetic oligonucleotide
  Target: ATXN2; (-) strand; PAM type: YTN; PAM sequence: CTC
ctgtaatctcactttgggag

SEQ ID NO: 74760 - DNA, 20 bp, Artificial Sequence
  Description of Artificial Sequence: Synthetic oligonucleotide
  Target: ATXN2; (-) strand; PAM type: YTN; PAM sequence: CTC
actcctgtaatctcactttg

SEQ ID NO: 74761 - DNA, 20 bp, Artificial Sequence
  Description of Artificial Sequence: Synthetic oligonucleotide
  Target: ATXN2; (-) strand; PAM type: YTN; PAM sequence: CTA
ggccaggtgcggtggctcac

SEQ ID NO: 74762 - DNA, 20 bp, Artificial Sequence
  Description of Artificial Sequence: Synthetic oligonucleotide
  Target: ATXN2; (-) strand; PAM type: YTN; PAM sequence: TTC
taggccaggtgcggtggctc

SEQ ID NO: 74763 - DNA, 20 bp, Artificial Sequence
  Description of Artificial Sequence: Synthetic oligonucleotide
  Target: ATXN2; (-) strand; PAM type: YTN; PAM sequence: TTT
ctaggccaggtgcggtggct

SEQ ID NO: 74764 - DNA, 20 bp, Artificial Sequence
  Description of Artificial Sequence: Synthetic oligonucleotide
  Target: ATXN2; (-) strand; PAM type: YTN; PAM sequence: CTT
tctaggccaggtgcggtggc

SEQ ID NO: 74765 - DNA, 20 bp, Artificial Sequence
  Description of Artificial Sequence: Synthetic oligonucleotide
  Target: ATXN2; (-) strand; PAM type: YTN; PAM sequence: TTG
tgctttctaggccaggtgcg

SEQ ID NO: 74766 - DNA, 20 bp, Artificial Sequence
  Description of Artificial Sequence: Synthetic oligonucleotide
  Target: ATXN2; (-) strand; PAM type: YTN; PAM sequence: TTT
gtgctttctaggccaggtgc

SEQ ID NO: 74767 - DNA, 20 bp, Artificial Sequence
  Description of Artificial Sequence: Synthetic oligonucleotide
  Target: ATXN2; (-) strand; PAM type: YTN; PAM sequence: TTG
agaatttgtgctttctaggc

SEQ ID NO: 74768 - DNA, 20 bp, Artificial Sequence
  Description of Artificial Sequence: Synthetic oligonucleotide
  Target: ATXN2; (-) strand; PAM type: YTN; PAM sequence: CTT
gagaatttgtgctttctagg

SEQ ID NO: 74769 - DNA, 20 bp, Artificial Sequence
  Description of Artificial Sequence: Synthetic oligonucleotide
  Target: ATXN2; (-) strand; PAM type: YTN; PAM sequence: CTG
tggccttgagaatttgtgct

SEQ ID NO: 74770 - DNA, 20 bp, Artificial Sequence
  Description of Artificial Sequence: Synthetic oligonucleotide
  Target: ATXN2; (-) strand; PAM type: YTN; PAM sequence: TTC
tgtggccttgagaatttgtg

SEQ ID NO: 74771 - DNA, 20 bp, Artificial Sequence
  Description of Artificial Sequence: Synthetic oligonucleotide
  Target: ATXN2; (-) strand; PAM type: YTN; PAM sequence: CTG
ttctgtggccttgagaattt

SEQ ID NO: 74772 - DNA, 20 bp, Artificial Sequence
  Description of Artificial Sequence: Synthetic oligonucleotide
  Target: ATXN2; (-) strand; PAM type: YTN; PAM sequence: CTC
tgttctgtggccttgagaat

SEQ ID NO: 74773 - DNA, 20 bp, Artificial Sequence
  Description of Artificial Sequence: Synthetic oligonucleotide
  Target: ATXN2; (-) strand; PAM type: YTN; PAM sequence: TTC
atgtgatgagatcccaggag

SEQ ID NO: 74774 - DNA, 20 bp, Artificial Sequence
  Description of Artificial Sequence: Synthetic oligonucleotide
  Target: ATXN2; (-) strand; PAM type: YTN; PAM sequence: TTT
catgtgatgagatcccagga

SEQ ID NO: 74775 - DNA, 20 bp, Artificial Sequence
  Description of Artificial Sequence: Synthetic oligonucleotide
  Target: ATXN2; (-) strand; PAM type: YTN; PAM sequence: CTA
tgggtttcatgtgatgagat

SEQ ID NO: 74776 - DNA, 20 bp, Artificial Sequence
  Description of Artificial Sequence: Synthetic oligonucleotide
  Target: ATXN2; (-) strand; PAM type: YTN; PAM sequence: CTG
gacagtcagggtgtgagcta

SEQ ID NO: 74777 - DNA, 20 bp, Artificial Sequence
  Description of Artificial Sequence: Synthetic oligonucleotide
  Target: ATXN2; (-) strand; PAM type: YTN; PAM sequence: CTC
tggacagtcagggtgtgagc

SEQ ID NO: 74778 - DNA, 20 bp, Artificial Sequence
  Description of Artificial Sequence: Synthetic oligonucleotide
  Target: ATXN2; (-) strand; PAM type: YTN; PAM sequence: CTG
ggtgaggctctggacagtca

SEQ ID NO: 74779 - DNA, 20 bp, Artificial Sequence
  Description of Artificial Sequence: Synthetic oligonucleotide
  Target: ATXN2; (-) strand; PAM type: YTN; PAM sequence: TTA
gcctgggtgaggctctggac

SEQ ID NO: 74780 - DNA, 20 bp, Artificial Sequence
  Description of Artificial Sequence: Synthetic oligonucleotide
  Target: ATXN2; (-) strand; PAM type: YTN; PAM sequence: TTA
taattagcctgggtgaggct

SEQ ID NO: 74781 - DNA, 20 bp, Artificial Sequence
  Description of Artificial Sequence: Synthetic oligonucleotide
  Target: ATXN2; (-) strand; PAM type: YTN; PAM sequence: TTA
attataattagcctgggtga

SEQ ID NO: 74782 - DNA, 20 bp, Artificial Sequence
  Description of Artificial Sequence: Synthetic oligonucleotide
  Target: ATXN2; (-) strand; PAM type: YTN; PAM sequence: TTT
aattataattagcctgggtg

SEQ ID NO: 74783 - DNA, 20 bp, Artificial Sequence
  Description of Artificial Sequence: Synthetic oligonucleotide
  Target: ATXN2; (-) strand; PAM type: YTN; PAM sequence: CTG
gtttaattataattagcctg

SEQ ID NO: 74784 - DNA, 20 bp, Artificial Sequence
  Description of Artificial Sequence: Synthetic oligonucleotide
  Target: ATXN2; (-) strand; PAM type: YTN; PAM sequence: CTA
gggatcctggtttaattata

SEQ ID NO: 74785 - DNA, 20 bp, Artificial Sequence
  Description of Artificial Sequence: Synthetic oligonucleotide
  Target: ATXN2; (-) strand; PAM type: YTN; PAM sequence: TTC
tagggatcctggtttaatta

SEQ ID NO: 74786 - DNA, 20 bp, Artificial Sequence
  Description of Artificial Sequence: Synthetic oligonucleotide
  Target: ATXN2; (-) strand; PAM type: YTN; PAM sequence: CTT
ctagggatcctggtttaatt

SEQ ID NO: 74787 - DNA, 20 bp, Artificial Sequence
  Description of Artificial Sequence: Synthetic oligonucleotide
  Target: ATXN2; (-) strand; PAM type: YTN; PAM sequence: CTC
acttctagggatcctggttt

SEQ ID NO: 74788 - DNA, 20 bp, Artificial Sequence
  Description of Artificial Sequence: Synthetic oligonucleotide
  Target: ATXN2; (-) strand; PAM type: YTN; PAM sequence: TTC
tcacttctagggatcctggt

SEQ ID NO: 74789 - DNA, 20 bp, Artificial Sequence
  Description of Artificial Sequence: Synthetic oligonucleotide
  Target: ATXN2; (-) strand; PAM type: YTN; PAM sequence: TTA
aaaatgttctcacttctagg

SEQ ID NO: 74790 - DNA, 20 bp, Artificial Sequence
  Description of Artificial Sequence: Synthetic oligonucleotide
  Target: ATXN2; (-) strand; PAM type: YTN; PAM sequence: TTT
aaaaatgttctcacttctag

SEQ ID NO: 74791 - DNA, 20 bp, Artificial Sequence
  Description of Artificial Sequence: Synthetic oligonucleotide
  Target: ATXN2; (-) strand; PAM type: YTN; PAM sequence: TTT
taaaaatgttctcacttcta

SEQ ID NO: 74792 - DNA, 20 bp, Artificial Sequence
  Description of Artificial Sequence: Synthetic oligonucleotide
  Target: ATXN2; (-) strand; PAM type: YTN; PAM sequence: TTT
ttaaaaatgttctcacttct

SEQ ID NO: 74793 - DNA, 20 bp, Artificial Sequence
  Description of Artificial Sequence: Synthetic oligonucleotide
  Target: ATXN2; (-) strand; PAM type: YTN; PAM sequence: CTG
gggagtttttaaaaatgttc

SEQ ID NO: 74794 - DNA, 20 bp, Artificial Sequence
  Description of Artificial Sequence: Synthetic oligonucleotide
  Target: ATXN2; (-) strand; PAM type: YTN; PAM sequence: TTA
gtcacctggggagtttttaa

SEQ ID NO: 74795 - DNA, 20 bp, Artificial Sequence
  Description of Artificial Sequence: Synthetic oligonucleotide
  Target: ATXN2; (-) strand; PAM type: YTN; PAM sequence: TTT
agtcacctggggagttttta

SEQ ID NO: 74796 - DNA, 20 bp, Artificial Sequence
  Description of Artificial Sequence: Synthetic oligonucleotide
  Target: ATXN2; (-) strand; PAM type: YTN; PAM sequence: TTC
acgtttagtcacctggggag

SEQ ID NO: 74797 - DNA, 20 bp, Artificial Sequence
  Description of Artificial Sequence: Synthetic oligonucleotide
  Target: ATXN2; (-) strand; PAM type: YTN; PAM sequence: CTG
ggttcacgtttagtcacctg

SEQ ID NO: 74798 - DNA, 20 bp, Artificial Sequence
  Description of Artificial Sequence: Synthetic oligonucleotide
  Target: ATXN2; (-) strand; PAM type: YTN; PAM sequence: TTA
atgctgggttcacgtttagt

SEQ ID NO: 74799 - DNA, 20 bp, Artificial Sequence
  Description of Artificial Sequence: Synthetic oligonucleotide
  Target: ATXN2; (-) strand; PAM type: YTN; PAM sequence: CTT
aatgctgggttcacgtttag

SEQ ID NO: 74800 - DNA, 20 bp, Artificial Sequence
  Description of Artificial Sequence: Synthetic oligonucleotide
  Target: ATXN2; (-) strand; PAM type: YTN; PAM sequence: TTC
ttaatgctgggttcacgttt

SEQ ID NO: 74801 - DNA, 20 bp, Artificial Sequence
  Description of Artificial Sequence: Synthetic oligonucleotide
  Target: ATXN2; (-) strand; PAM type: YTN; PAM sequence: CTT
cttaatgctgggttcacgtt

SEQ ID NO: 74802 - DNA, 20 bp, Artificial Sequence
  Description of Artificial Sequence: Synthetic oligonucleotide
  Target: ATXN2; (-) strand; PAM type: YTN; PAM sequence: TTA
atcaatgcttcttaatgctg

SEQ ID NO: 74803 - DNA, 20 bp, Artificial Sequence
  Description of Artificial Sequence: Synthetic oligonucleotide
  Target: ATXN2; (-) strand; PAM type: YTN; PAM sequence: TTT
aatcaatgcttcttaatgct

SEQ ID NO: 74804 - DNA, 20 bp, Artificial Sequence
  Description of Artificial Sequence: Synthetic oligonucleotide
  Target: ATXN2; (-) strand; PAM type: YTN; PAM sequence: CTC
ccaaagtaaaggaaggtatg

SEQ ID NO: 74805 - DNA, 20 bp, Artificial Sequence
  Description of Artificial Sequence: Synthetic oligonucleotide
  Target: ATXN2; (-) strand; PAM type: YTN; PAM sequence: TTA
ctcccaaagtaaaggaaggt

SEQ ID NO: 74806 - DNA, 20 bp, Artificial Sequence
  Description of Artificial Sequence: Synthetic oligonucleotide
  Target: ATXN2; (-) strand; PAM type: YTN; PAM sequence: CTC
agattactcccaaagtaaag

SEQ ID NO: 74807 - DNA, 20 bp, Artificial Sequence
  Description of Artificial Sequence: Synthetic oligonucleotide
  Target: ATXN2; (-) strand; PAM type: YTN; PAM sequence: TTA
ctcagattactcccaaagta

SEQ ID NO: 74808 - DNA, 20 bp, Artificial Sequence
  Description of Artificial Sequence: Synthetic oligonucleotide
  Target: ATXN2; (-) strand; PAM type: YTN; PAM sequence: CTT
actcagattactcccaaagt

SEQ ID NO: 74809 - DNA, 20 bp, Artificial Sequence
  Description of Artificial Sequence: Synthetic oligonucleotide
  Target: ATXN2; (-) strand; PAM type: YTN; PAM sequence: TTA
gagacttactcagattactc

SEQ ID NO: 74810 - DNA, 20 bp, Artificial Sequence
  Description of Artificial Sequence: Synthetic oligonucleotide
  Target: ATXN2; (-) strand; PAM type: YTN; PAM sequence: TTA
ttagagacttactcagatta

SEQ ID NO: 74811 - DNA, 20 bp, Artificial Sequence
  Description of Artificial Sequence: Synthetic oligonucleotide
  Target: ATXN2; (-) strand; PAM type: YTN; PAM sequence: TTT
attagagacttactcagatt

SEQ ID NO: 74812 - DNA, 20 bp, Artificial Sequence
  Description of Artificial Sequence: Synthetic oligonucleotide
  Target: ATXN2; (-) strand; PAM type: YTN; PAM sequence: TTT
tattagagacttactcagat

SEQ ID NO: 74813 - DNA, 20 bp, Artificial Sequence
  Description of Artificial Sequence: Synthetic oligonucleotide
  Target: ATXN2; (-) strand; PAM type: YTN; PAM sequence: TTT
ttattagagacttactcaga

SEQ ID NO: 74814 - DNA, 20 bp, Artificial Sequence
  Description of Artificial Sequence: Synthetic oligonucleotide
  Target: ATXN2; (-) strand; PAM type: YTN; PAM sequence: TTT
tttattagagacttactcag

SEQ ID NO: 74815 - DNA, 20 bp, Artificial Sequence
  Description of Artificial Sequence: Synthetic oligonucleotide
  Target: ATXN2; (-) strand; PAM type: YTN; PAM sequence: TTA
ttttttattagagacttact

SEQ ID NO: 74816 - DNA, 20 bp, Artificial Sequence
  Description of Artificial Sequence: Synthetic oligonucleotide
  Target: ATXN2; (-) strand; PAM type: YTN; PAM sequence: TTT
attttttattagagacttac

SEQ ID NO: 74817 - DNA, 20 bp, Artificial Sequence
  Description of Artificial Sequence: Synthetic oligonucleotide
  Target: ATXN2; (-) strand; PAM type: YTN; PAM sequence: TTT
tattttttattagagactta

SEQ ID NO: 74818 - DNA, 20 bp, Artificial Sequence
  Description of Artificial Sequence: Synthetic oligonucleotide
  Target: ATXN2; (-) strand; PAM type: YTN; PAM sequence: TTT
ttattttttattagagactt

SEQ ID NO: 74819 - DNA, 20 bp, Artificial Sequence
  Description of Artificial Sequence: Synthetic oligonucleotide
  Target: ATXN2; (-) strand; PAM type: YTN; PAM sequence: TTT
tttattttttattagagact

SEQ ID NO: 74820 - DNA, 20 bp, Artificial Sequence
  Description of Artificial Sequence: Synthetic oligonucleotide
  Target: ATXN2; (-) strand; PAM type: YTN; PAM sequence: TTT
ttttattttttattagagac

SEQ ID NO: 74821 - DNA, 20 bp, Artificial Sequence
  Description of Artificial Sequence: Synthetic oligonucleotide
  Target: ATXN2; (-) strand; PAM type: YTN; PAM sequence: TTT
tttttattttttattagaga

SEQ ID NO: 74822 - DNA, 20 bp, Artificial Sequence
  Description of Artificial Sequence: Synthetic oligonucleotide
  Target: ATXN2; (-) strand; PAM type: YTN; PAM sequence: CTA
gattttttttattttttatt

SEQ ID NO: 74823 - DNA, 20 bp, Artificial Sequence
  Description of Artificial Sequence: Synthetic oligonucleotide
  Target: ATXN2; (-) strand; PAM type: YTN; PAM sequence: CTG
catctagattttttttattt

SEQ ID NO: 74824 - DNA, 20 bp, Artificial Sequence
  Description of Artificial Sequence: Synthetic oligonucleotide
  Target: ATXN2; (-) strand; PAM type: YTN; PAM sequence: TTA
ctgcatctagatttttttta

SEQ ID NO: 74825 - DNA, 20 bp, Artificial Sequence
  Description of Artificial Sequence: Synthetic oligonucleotide
  Target: ATXN2; (-) strand; PAM type: YTN; PAM sequence: TTA
ttactgcatctagatttttt

SEQ ID NO: 74826 - DNA, 20 bp, Artificial Sequence
  Description of Artificial Sequence: Synthetic oligonucleotide
  Target: ATXN2; (-) strand; PAM type: YTN; PAM sequence: TTT
attactgcatctagattttt

SEQ ID NO: 74827 - DNA, 20 bp, Artificial Sequence
  Description of Artificial Sequence: Synthetic oligonucleotide
  Target: ATXN2; (-) strand; PAM type: YTN; PAM sequence: TTA
aggcatttattactgcatct

SEQ ID NO: 74828 - DNA, 20 bp, Artificial Sequence
  Description of Artificial Sequence: Synthetic oligonucleotide
  Target: ATXN2; (-) strand; PAM type: YTN; PAM sequence: TTA
ataacaaaattaaggcattt

SEQ ID NO: 74829 - DNA, 20 bp, Artificial Sequence
  Description of Artificial Sequence: Synthetic oligonucleotide
  Target: ATXN2; (-) strand; PAM type: YTN; PAM sequence: CTT
aataacaaaattaaggcatt

SEQ ID NO: 74830 - DNA, 20 bp, Artificial Sequence
  Description of Artificial Sequence: Synthetic oligonucleotide
  Target: ATXN2; (-) strand; PAM type: YTN; PAM sequence: TTC
cttaataacaaaattaaggc

SEQ ID NO: 74831 - DNA, 20 bp, Artificial Sequence
  Description of Artificial Sequence: Synthetic oligonucleotide
  Target: ATXN2; (-) strand; PAM type: YTN; PAM sequence: TTT
ccttaataacaaaattaagg

SEQ ID NO: 74832 - DNA, 20 bp, Artificial Sequence
  Description of Artificial Sequence: Synthetic oligonucleotide
  Target: ATXN2; (-) strand; PAM type: YTN; PAM sequence: TTT
tccttaataacaaaattaag

SEQ ID NO: 74833 - DNA, 20 bp, Artificial Sequence
  Description of Artificial Sequence: Synthetic oligonucleotide
  Target: ATXN2; (-) strand; PAM type: YTN; PAM sequence: TTG
gccaggccgcatggttttcc

SEQ ID NO: 74834 - DNA, 20 bp, Artificial Sequence
  Description of Artificial Sequence: Synthetic oligonucleotide
  Target: ATXN2; (-) strand; PAM type: YTN; PAM sequence: TTC
accatgttggccaggccgca

SEQ ID NO: 74835 - DNA, 20 bp, Artificial Sequence
  Description of Artificial Sequence: Synthetic oligonucleotide
  Target: ATXN2; (-) strand; PAM type: YTN; PAM sequence: TTT
caccatgttggccaggccgc

SEQ ID NO: 74836 - DNA, 20 bp, Artificial Sequence
  Description of Artificial Sequence: Synthetic oligonucleotide
  Target: ATXN2; (-) strand; PAM type: YTN; PAM sequence: CTG
ggtttcaccatgttggccag

SEQ ID NO: 74837 - DNA, 20 bp, Artificial Sequence
  Description of Artificial Sequence: Synthetic oligonucleotide
  Target: ATXN2; (-) strand; PAM type: YTN; PAM sequence: TTA
gtacagactgggtttcacca

SEQ ID NO: 74838 - DNA, 20 bp, Artificial Sequence
  Description of Artificial Sequence: Synthetic oligonucleotide
  Target: ATXN2; (-) strand; PAM type: YTN; PAM sequence: CTT
agtacagactgggtttcacc

SEQ ID NO: 74839 - DNA, 20 bp, Artificial Sequence
  Description of Artificial Sequence: Synthetic oligonucleotide
  Target: ATXN2; (-) strand; PAM type: YTN; PAM sequence: TTC
ttagtacagactgggtttca

SEQ ID NO: 74840 - DNA, 20 bp, Artificial Sequence
  Description of Artificial Sequence: Synthetic oligonucleotide
  Target: ATXN2; (-) strand; PAM type: YTN; PAM sequence: TTG
tattcttagtacagactggg

SEQ ID NO: 74841 - DNA, 20 bp, Artificial Sequence
  Description of Artificial Sequence: Synthetic oligonucleotide
  Target: ATXN2; (-) strand; PAM type: YTN; PAM sequence: TTT
gtattcttagtacagactgg

SEQ ID NO: 74842 - DNA, 20 bp, Artificial Sequence
  Description of Artificial Sequence: Synthetic oligonucleotide
  Target: ATXN2; (-) strand; PAM type: YTN; PAM sequence: TTG
tttgtattcttagtacagac

SEQ ID NO: 74843 - DNA, 20 bp, Artificial Sequence
  Description of Artificial Sequence: Synthetic oligonucleotide
  Target: ATXN2; (-) strand; PAM type: YTN; PAM sequence: TTT
gtttgtattcttagtacaga

SEQ ID NO: 74844 - DNA, 20 bp, Artificial Sequence
  Description of Artificial Sequence: Synthetic oligonucleotide
  Target: ATXN2; (-) strand; PAM type: YTN; PAM sequence: TTT
tgtttgtattcttagtacag

SEQ ID NO: 74845 - DNA, 20 bp, Artificial Sequence
  Description of Artificial Sequence: Synthetic oligonucleotide
  Target: ATXN2; (-) strand; PAM type: YTN; PAM sequence: TTT
ttgtttgtattcttagtaca

SEQ ID NO: 74846 - DNA, 20 bp, Artificial Sequence
  Description of Artificial Sequence: Synthetic oligonucleotide
  Target: ATXN2; (-) strand; PAM type: YTN; PAM sequence: TTT
tttgtttgtattcttagtac

SEQ ID NO: 74847 - DNA, 20 bp, Artificial Sequence
  Description of Artificial Sequence: Synthetic oligonucleotide
  Target: ATXN2; (-) strand; PAM type: YTN; PAM sequence: TTT
ttttgtttgtattcttagta

SEQ ID NO: 74848 - DNA, 20 bp, Artificial Sequence
  Description of Artificial Sequence: Synthetic oligonucleotide
  Target: ATXN2; (-) strand; PAM type: YTN; PAM sequence: TTT
tttttgtttgtattcttagt

SEQ ID NO: 74849 - DNA, 20 bp, Artificial Sequence
  Description of Artificial Sequence: Synthetic oligonucleotide
  Target: ATXN2; (-) strand; PAM type: YTN; PAM sequence: TTT
ttttttgtttgtattcttag

SEQ ID NO: 74850 - DNA, 20 bp, Artificial Sequence
  Description of Artificial Sequence: Synthetic oligonucleotide
  Target: ATXN2; (-) strand; PAM type: YTN; PAM sequence: TTT
tttttttgtttgtattctta

SEQ ID NO: 74851 - DNA, 20 bp, Artificial Sequence
  Description of Artificial Sequence: Synthetic oligonucleotide
  Target: ATXN2; (-) strand; PAM type: YTN; PAM sequence: TTT
ttttttttgtttgtattctt

SEQ ID NO: 74852 - DNA, 20 bp, Artificial Sequence
  Description of Artificial Sequence: Synthetic oligonucleotide
  Target: ATXN2; (-) strand; PAM type: YTN; PAM sequence: CTA
atttttttttttgtttgtat

SEQ ID NO: 74853 - DNA, 20 bp, Artificial Sequence
  Description of Artificial Sequence: Synthetic oligonucleotide
  Target: ATXN2; (-) strand; PAM type: YTN; PAM sequence: CTG
ctaatttttttttttgtttg

SEQ ID NO: 74854 - DNA, 20 bp, Artificial Sequence
  Description of Artificial Sequence: Synthetic oligonucleotide
  Target: ATXN2; (-) strand; PAM type: YTN; PAM sequence: TTA
taggcacataccaccatgcc

SEQ ID NO: 74855 - DNA, 20 bp, Artificial Sequence
  Description of Artificial Sequence: Synthetic oligonucleotide
  Target: ATXN2; (-) strand; PAM type: YTN; PAM sequence: CTG
ggattataggcacataccac

SEQ ID NO: 74856 - DNA, 20 bp, Artificial Sequence
  Description of Artificial Sequence: Synthetic oligonucleotide
  Target: ATXN2; (-) strand; PAM type: YTN; PAM sequence: CTC
ccgagtagctgggattatag

SEQ ID NO: 74857 - DNA, 20 bp, Artificial Sequence
  Description of Artificial Sequence: Synthetic oligonucleotide
  Target: ATXN2; (-) strand; PAM type: YTN; PAM sequence: CTC
agcctcccgagtagctggga

SEQ ID NO: 74858 - DNA, 20 bp, Artificial Sequence
  Description of Artificial Sequence: Synthetic oligonucleotide
  Target: ATXN2; (-) strand; PAM type: YTN; PAM sequence: CTG
cctcagcctcccgagtagct

SEQ ID NO: 74859 - DNA, 20 bp, Artificial Sequence
  Description of Artificial Sequence: Synthetic oligonucleotide
  Target: ATXN2; (-) strand; PAM type: YTN; PAM sequence: CTC
ctgcctcagcctcccgagta

SEQ ID NO: 74860 - DNA, 20 bp, Artificial Sequence
  Description of Artificial Sequence: Synthetic oligonucleotide
  Target: ATXN2; (-) strand; PAM type: YTN; PAM sequence: TTC
tcctgcctcagcctcccgag

SEQ ID NO: 74861 - DNA, 20 bp, Artificial Sequence
  Description of Artificial Sequence: Synthetic oligonucleotide
  Target: ATXN2; (-) strand; PAM type: YTN; PAM sequence: TTA
agcgattctcctgcctcagc

SEQ ID NO: 74862 - DNA, 20 bp, Artificial Sequence
  Description of Artificial Sequence: Synthetic oligonucleotide
  Target: ATXN2; (-) strand; PAM type: YTN; PAM sequence: TTT
aagcgattctcctgcctcag

SEQ ID NO: 74863 - DNA, 20 bp, Artificial Sequence
  Description of Artificial Sequence: Synthetic oligonucleotide
  Target: ATXN2; (-) strand; PAM type: YTN; PAM sequence: CTG
ggtttaagcgattctcctgc

SEQ ID NO: 74864 - DNA, 20 bp, Artificial Sequence
  Description of Artificial Sequence: Synthetic oligonucleotide
  Target: ATXN2; (-) strand; PAM type: YTN; PAM sequence: CTC
ctgggtttaagcgattctcc

SEQ ID NO: 74865 - DNA, 20 bp, Artificial Sequence
  Description of Artificial Sequence: Synthetic oligonucleotide
  Target: ATXN2; (-) strand; PAM type: YTN; PAM sequence: CTG
cctcctgggtttaagcgatt

SEQ ID NO: 74866 - DNA, 20 bp, Artificial Sequence
  Description of Artificial Sequence: Synthetic oligonucleotide
  Target: ATXN2; (-) strand; PAM type: YTN; PAM sequence: CTC
tgcctcctgggtttaagcga

SEQ ID NO: 74867 - DNA, 20 bp, Artificial Sequence
  Description of Artificial Sequence: Synthetic oligonucleotide
  Target: ATXN2; (-) strand; PAM type: YTN; PAM sequence: CTG
caacctctgcctcctgggtt

SEQ ID NO: 74868 - DNA, 20 bp, Artificial Sequence
  Description of Artificial Sequence: Synthetic oligonucleotide
  Target: ATXN2; (-) strand; PAM type: YTN; PAM sequence: CTC
actgcaacctctgcctcctg

SEQ ID NO: 74869 - DNA, 20 bp, Artificial Sequence
  Description of Artificial Sequence: Synthetic oligonucleotide
  Target: ATXN2; (-) strand; PAM type: YTN; PAM sequence: CTC
ggctcactgcaacctctgcc

SEQ ID NO: 74870 - DNA, 20 bp, Artificial Sequence
  Description of Artificial Sequence: Synthetic oligonucleotide
  Target: ATXN2; (-) strand; PAM type: YTN; PAM sequence: CTG
gagtgcagtggtgcgatctc

SEQ ID NO: 74871 - DNA, 20 bp, Artificial Sequence
  Description of Artificial Sequence: Synthetic oligonucleotide
  Target: ATXN2; (-) strand; PAM type: YTN; PAM sequence: TTC
ccaggctggagtgcagtggt

SEQ ID NO: 74872 - DNA, 20 bp, Artificial Sequence
  Description of Artificial Sequence: Synthetic oligonucleotide
  Target: ATXN2; (-) strand; PAM type: YTN; PAM sequence: TTT
cccaggctggagtgcagtgg

SEQ ID NO: 74873 - DNA, 20 bp, Artificial Sequence
  Description of Artificial Sequence: Synthetic oligonucleotide
  Target: ATXN2; (-) strand; PAM type: YTN; PAM sequence: CTA
tttcccaggctggagtgcag

SEQ ID NO: 74874 - DNA, 20 bp, Artificial Sequence
  Description of Artificial Sequence: Synthetic oligonucleotide
  Target: ATXN2; (-) strand; PAM type: YTN; PAM sequence: CTC
tatttcccaggctggagtgc

SEQ ID NO: 74875 - DNA, 20 bp, Artificial Sequence
  Description of Artificial Sequence: Synthetic oligonucleotide
  Target: ATXN2; (-) strand; PAM type: YTN; PAM sequence: CTC
actctatttcccaggctgga

SEQ ID NO: 74876 - DNA, 20 bp, Artificial Sequence
  Description of Artificial Sequence: Synthetic oligonucleotide
  Target: ATXN2; (-) strand; PAM type: YTN; PAM sequence: TTC
gagatggagtctcactctat

SEQ ID NO: 74877 - DNA, 20 bp, Artificial Sequence
  Description of Artificial Sequence: Synthetic oligonucleotide
  Target: ATXN2; (-) strand; PAM type: YTN; PAM sequence: TTT
cgagatggagtctcactcta

SEQ ID NO: 74878 - DNA, 20 bp, Artificial Sequence
  Description of Artificial Sequence: Synthetic oligonucleotide
  Target: ATXN2; (-) strand; PAM type: YTN; PAM sequence: TTA
tttcgagatggagtctcact

SEQ ID NO: 74879 - DNA, 20 bp, Artificial Sequence
  Description of Artificial Sequence: Synthetic oligonucleotide
  Target: ATXN2; (-) strand; PAM type: YTN; PAM sequence: TTT
atttcgagatggagtctcac

SEQ ID NO: 74880 - DNA, 20 bp, Artificial Sequence
  Description of Artificial Sequence: Synthetic oligonucleotide
  Target: ATXN2; (-) strand; PAM type: YTN; PAM sequence: TTT
tatttcgagatggagtctca

SEQ ID NO: 74881 - DNA, 20 bp, Artificial Sequence
  Description of Artificial Sequence: Synthetic oligonucleotide
  Target: ATXN2; (-) strand; PAM type: YTN; PAM sequence: TTT
ttatttcgagatggagtctc

SEQ ID NO: 74882 - DNA, 20 bp, Artificial Sequence
  Description of Artificial Sequence: Synthetic oligonucleotide
  Target: ATXN2; (-) strand; PAM type: YTN; PAM sequence: TTT
tttatttcgagatggagtct

SEQ ID NO: 74883 - DNA, 20 bp, Artificial Sequence
  Description of Artificial Sequence: Synthetic oligonucleotide
  Target: ATXN2; (-) strand; PAM type: YTN; PAM sequence: TTT
ttttatttcgagatggagtc

SEQ ID NO: 74884 - DNA, 20 bp, Artificial Sequence
  Description of Artificial Sequence: Synthetic oligonucleotide
  Target: ATXN2; (-) strand; PAM type: YTN; PAM sequence: TTT
tttttatttcgagatggagt

SEQ ID NO: 74885 - DNA, 20 bp, Artificial Sequence
  Description of Artificial Sequence: Synthetic oligonucleotide
  Target: ATXN2; (-) strand; PAM type: YTN; PAM sequence: TTT
ttttttatttcgagatggag

SEQ ID NO: 74886 - DNA, 20 bp, Artificial Sequence
  Description of Artificial Sequence: Synthetic oligonucleotide
  Target: ATXN2; (-) strand; PAM type: YTN; PAM sequence: TTT
tttttttatttcgagatgga

SEQ ID NO: 74887 - DNA, 20 bp, Artificial Sequence
  Description of Artificial Sequence: Synthetic oligonucleotide
  Target: ATXN2; (-) strand; PAM type: YTN; PAM sequence: TTT
ttttttttatttcgagatgg

SEQ ID NO: 74888 - DNA, 20 bp, Artificial Sequence
  Description of Artificial Sequence: Synthetic oligonucleotide
  Target: ATXN2; (-) strand; PAM type: YTN; PAM sequence: CTT
tttttttttatttcgagatg

SEQ ID NO: 74889 - DNA, 20 bp, Artificial Sequence
  Description of Artificial Sequence: Synthetic oligonucleotide
  Target: ATXN2; (-) strand; PAM type: YTN; PAM sequence: TTC
tttttttttttatttcgaga

SEQ ID NO: 74890 - DNA, 20 bp, Artificial Sequence
  Description of Artificial Sequence: Synthetic oligonucleotide
  Target: ATXN2; (-) strand; PAM type: YTN; PAM sequence: CTT
ctttttttttttatttcgag

SEQ ID NO: 74891 - DNA, 20 bp, Artificial Sequence
  Description of Artificial Sequence: Synthetic oligonucleotide
  Target: ATXN2; (-) strand; PAM type: YTN; PAM sequence: TTC
cttctttttttttttatttc

SEQ ID NO: 74892 - DNA, 20 bp, Artificial Sequence
  Description of Artificial Sequence: Synthetic oligonucleotide
  Target: ATXN2; (-) strand; PAM type: YTN; PAM sequence: TTT
ccttctttttttttttattt

SEQ ID NO: 74893 - DNA, 20 bp, Artificial Sequence
  Description of Artificial Sequence: Synthetic oligonucleotide
  Target: ATXN2; (-) strand; PAM type: YTN; PAM sequence: TTG
gcatggtttccttctttttt

SEQ ID NO: 74894 - DNA, 20 bp, Artificial Sequence
  Description of Artificial Sequence: Synthetic oligonucleotide
  Target: ATXN2; (-) strand; PAM type: YTN; PAM sequence: TTA
attggcatggtttccttctt

SEQ ID NO: 74895 - DNA, 20 bp, Artificial Sequence
  Description of Artificial Sequence: Synthetic oligonucleotide
  Target: ATXN2; (-) strand; PAM type: YTN; PAM sequence: TTA
ttaattggcatggtttcctt

SEQ ID NO: 74896 - DNA, 20 bp, Artificial Sequence
  Description of Artificial Sequence: Synthetic oligonucleotide
  Target: ATXN2; (-) strand; PAM type: YTN; PAM sequence: TTA
gaattattaattggcatggt

SEQ ID NO: 74897 - DNA, 20 bp, Artificial Sequence
  Description of Artificial Sequence: Synthetic oligonucleotide
  Target: ATXN2; (-) strand; PAM type: YTN; PAM sequence: TTT
agaattattaattggcatgg

SEQ ID NO: 74898 - DNA, 20 bp, Artificial Sequence
  Description of Artificial Sequence: Synthetic oligonucleotide
  Target: ATXN2; (-) strand; PAM type: YTN; PAM sequence: TTT
tagaattattaattggcatg

SEQ ID NO: 74899 - DNA, 20 bp, Artificial Sequence
  Description of Artificial Sequence: Synthetic oligonucleotide
  Target: ATXN2; (-) strand; PAM type: YTN; PAM sequence: CTA
tcagtatggagaaaaccatt

SEQ ID NO: 74900 - DNA, 20 bp, Artificial Sequence
  Description of Artificial Sequence: Synthetic oligonucleotide
  Target: ATXN2; (-) strand; PAM type: YTN; PAM sequence: TTA
ggaagtactatcagtatgga

SEQ ID NO: 74901 - DNA, 20 bp, Artificial Sequence
  Description of Artificial Sequence: Synthetic oligonucleotide
  Target: ATXN2; (-) strand; PAM type: YTN; PAM sequence: TTA
attaggaagtactatcagta

SEQ ID NO: 74902 - DNA, 20 bp, Artificial Sequence
  Description of Artificial Sequence: Synthetic oligonucleotide
  Target: ATXN2; (-) strand; PAM type: YTN; PAM sequence: CTA
taaaagaagaaaagtattaa

SEQ ID NO: 74903 - DNA, 20 bp, Artificial Sequence
  Description of Artificial Sequence: Synthetic oligonucleotide
  Target: ATXN2; (-) strand; PAM type: YTN; PAM sequence: TTC
tataaaagaagaaaagtatt

SEQ ID NO: 74904 - DNA, 20 bp, Artificial Sequence
  Description of Artificial Sequence: Synthetic oligonucleotide
  Target: ATXN2; (-) strand; PAM type: YTN; PAM sequence: CTT
ctataaaagaagaaaagtat

SEQ ID NO: 74905 - DNA, 20 bp, Artificial Sequence
  Description of Artificial Sequence: Synthetic oligonucleotide
  Target: ATXN2; (-) strand; PAM type: YTN; PAM sequence: CTC
ttctataaaagaagaaaagt

SEQ ID NO: 74906 - DNA, 20 bp, Artificial Sequence
  Description of Artificial Sequence: Synthetic oligonucleotide
  Target: ATXN2; (-) strand; PAM type: YTN; PAM sequence: TTG
ccctcttctataaaagaaga

SEQ ID NO: 74907 - DNA, 20 bp, Artificial Sequence
  Description of Artificial Sequence: Synthetic oligonucleotide
  Target: ATXN2; (-) strand; PAM type: YTN; PAM sequence: CTA
tccaggcagaaattgccctc

SEQ ID NO: 74908 - DNA, 20 bp, Artificial Sequence
  Description of Artificial Sequence: Synthetic oligonucleotide
  Target: ATXN2; (-) strand; PAM type: YTN; PAM sequence: CTA
agactatccaggcagaaatt

SEQ ID NO: 74909 - DNA, 20 bp, Artificial Sequence
  Description of Artificial Sequence: Synthetic oligonucleotide
  Target: ATXN2; (-) strand; PAM type: YTN; PAM sequence: TTA
agctaagactatccaggcag

SEQ ID NO: 74910 - DNA, 20 bp, Artificial Sequence
  Description of Artificial Sequence: Synthetic oligonucleotide
  Target: ATXN2; (-) strand; PAM type: YTN; PAM sequence: CTT
aagctaagactatccaggca

SEQ ID NO: 74911 - DNA, 20 bp, Artificial Sequence
  Description of Artificial Sequence: Synthetic oligonucleotide
  Target: ATXN2; (-) strand; PAM type: YTN; PAM sequence: CTC
ttaagctaagactatccagg

SEQ ID NO: 74912 - DNA, 20 bp, Artificial Sequence
  Description of Artificial Sequence: Synthetic oligonucleotide
  Target: ATXN2; (-) strand; PAM type: YTN; PAM sequence: TTA
ggacatcaggtctcttaagc

SEQ ID NO: 74913 - DNA, 20 bp, Artificial Sequence
  Description of Artificial Sequence: Synthetic oligonucleotide
  Target: ATXN2; (-) strand; PAM type: YTN; PAM sequence: TTT
aggacatcaggtctcttaag

SEQ ID NO: 74914 - DNA, 20 bp, Artificial Sequence
  Description of Artificial Sequence: Synthetic oligonucleotide
  Target: ATXN2; (-) strand; PAM type: YTN; PAM sequence: TTA
agtcatgtgtttaggacatc

SEQ ID NO: 74915 - DNA, 20 bp, Artificial Sequence
  Description of Artificial Sequence: Synthetic oligonucleotide
  Target: ATXN2; (-) strand; PAM type: YTN; PAM sequence: CTG
aaaatagtattaagtcatgt

SEQ ID NO: 74916 - DNA, 20 bp, Artificial Sequence
  Description of Artificial Sequence: Synthetic oligonucleotide
  Target: ATXN2; (-) strand; PAM type: YTN; PAM sequence: TTG
cgtccagtgcgtagtatcct

SEQ ID NO: 74917 - DNA, 20 bp, Artificial Sequence
  Description of Artificial Sequence: Synthetic oligonucleotide
  Target: ATXN2; (-) strand; PAM type: YTN; PAM sequence: TTA
tacaattgcgtccagtgcgt

SEQ ID NO: 74918 - DNA, 20 bp, Artificial Sequence
  Description of Artificial Sequence: Synthetic oligonucleotide
  Target: ATXN2; (-) strand; PAM type: YTN; PAM sequence: TTA
gtgaattatacaattgcgtc

SEQ ID NO: 74919 - DNA, 20 bp, Artificial Sequence
  Description of Artificial Sequence: Synthetic oligonucleotide
  Target: ATXN2; (-) strand; PAM type: YTN; PAM sequence: TTT
agtgaattatacaattgcgt

SEQ ID NO: 74920 - DNA, 20 bp, Artificial Sequence
  Description of Artificial Sequence: Synthetic oligonucleotide
  Target: ATXN2; (-) strand; PAM type: YTN; PAM sequence: TTA
cagtggtttagtgaattata

SEQ ID NO: 74921 - DNA, 20 bp, Artificial Sequence
  Description of Artificial Sequence: Synthetic oligonucleotide
  Target: ATXN2; (-) strand; PAM type: YTN; PAM sequence: CTT
acagtggtttagtgaattat

SEQ ID NO: 74922 - DNA, 20 bp, Artificial Sequence
  Description of Artificial Sequence: Synthetic oligonucleotide
  Target: ATXN2; (-) strand; PAM type: YTN; PAM sequence: TTC
aaaacttacagtggtttagt

SEQ ID NO: 74923 - DNA, 20 bp, Artificial Sequence
  Description of Artificial Sequence: Synthetic oligonucleotide
  Target: ATXN2; (-) strand; PAM type: YTN; PAM sequence: TTT
caaaacttacagtggtttag

SEQ ID NO: 74924 - DNA, 20 bp, Artificial Sequence
  Description of Artificial Sequence: Synthetic oligonucleotide
  Target: ATXN2; (-) strand; PAM type: YTN; PAM sequence: TTA
tttcaaaacttacagtggtt

SEQ ID NO: 74925 - DNA, 20 bp, Artificial Sequence
  Description of Artificial Sequence: Synthetic oligonucleotide
  Target: ATXN2; (-) strand; PAM type: YTN; PAM sequence: CTT
atttcaaaacttacagtggt

SEQ ID NO: 74926 - DNA, 20 bp, Artificial Sequence
  Description of Artificial Sequence: Synthetic oligonucleotide
  Target: ATXN2; (-) strand; PAM type: YTN; PAM sequence: CTG
ggcaggtatcttatttcaaa

SEQ ID NO: 74927 - DNA, 20 bp, Artificial Sequence
  Description of Artificial Sequence: Synthetic oligonucleotide
  Target: ATXN2; (-) strand; PAM type: YTN; PAM sequence: TTA
taggcgtgagccaccacgcc

SEQ ID NO: 74928 - DNA, 20 bp, Artificial Sequence
  Description of Artificial Sequence: Synthetic oligonucleotide
  Target: ATXN2; (-) strand; PAM type: YTN; PAM sequence: CTG
ggattataggcgtgagccac

SEQ ID NO: 74929 - DNA, 20 bp, Artificial Sequence
  Description of Artificial Sequence: Synthetic oligonucleotide
  Target: ATXN2; (-) strand; PAM type: YTN; PAM sequence: CTC
ccagagtgctgggattatag

SEQ ID NO: 74930 - DNA, 20 bp, Artificial Sequence
  Description of Artificial Sequence: Synthetic oligonucleotide
  Target: ATXN2; (-) strand; PAM type: YTN; PAM sequence: TTG
gcctcccagagtgctgggat

SEQ ID NO: 74931 - DNA, 20 bp, Artificial Sequence
  Description of Artificial Sequence: Synthetic oligonucleotide
  Target: ATXN2; (-) strand; PAM type: YTN; PAM sequence: CTT
ggcctcccagagtgctggga

SEQ ID NO: 74932 - DNA, 20 bp, Artificial Sequence
  Description of Artificial Sequence: Synthetic oligonucleotide
  Target: ATXN2; (-) strand; PAM type: YTN; PAM sequence: CTG
ccttggcctcccagagtgct

SEQ ID NO: 74933 - DNA, 20 bp, Artificial Sequence
  Description of Artificial Sequence: Synthetic oligonucleotide
  Target: ATXN2; (-) strand; PAM type: YTN; PAM sequence: CTC
ctgccttggcctcccagagt

SEQ ID NO: 74934 - DNA, 20 bp, Artificial Sequence
  Description of Artificial Sequence: Synthetic oligonucleotide
  Target: ATXN2; (-) strand; PAM type: YTN; PAM sequence: TTG
tgatcctcctgccttggcct

SEQ ID NO: 74935 - DNA, 20 bp, Artificial Sequence
  Description of Artificial Sequence: Synthetic oligonucleotide
  Target: ATXN2; (-) strand; PAM type: YTN; PAM sequence: CTT
gtgatcctcctgccttggcc

SEQ ID NO: 74936 - DNA, 20 bp, Artificial Sequence
  Description of Artificial Sequence: Synthetic oligonucleotide
  Target: ATXN2; (-) strand; PAM type: YTN; PAM sequence: CTG
accttgtgatcctcctgcct

SEQ ID NO: 74937 - DNA, 20 bp, Artificial Sequence
  Description of Artificial Sequence: Synthetic oligonucleotide
  Target: ATXN2; (-) strand; PAM type: YTN; PAM sequence: CTC
ctgaccttgtgatcctcctg

SEQ ID NO: 74938 - DNA, 20 bp, Artificial Sequence
  Description of Artificial Sequence: Synthetic oligonucleotide
  Target: ATXN2; (-) strand; PAM type: YTN; PAM sequence: TTG
aactcctgaccttgtgatcc

SEQ ID NO: 74939 - DNA, 20 bp, Artificial Sequence
  Description of Artificial Sequence: Synthetic oligonucleotide
  Target: ATXN2; (-) strand; PAM type: YTN; PAM sequence: CTT
gaactcctgaccttgtgatc

SEQ ID NO: 74940 - DNA, 20 bp, Artificial Sequence
  Description of Artificial Sequence: Synthetic oligonucleotide
  Target: ATXN2; (-) strand; PAM type: YTN; PAM sequence: CTG
gtcttgaactcctgaccttg

SEQ ID NO: 74941 - DNA, 20 bp, Artificial Sequence
  Description of Artificial Sequence: Synthetic oligonucleotide
  Target: ATXN2; (-) strand; PAM type: YTN; PAM sequence: TTG
gccaggctggtcttgaactc

SEQ ID NO: 74942 - DNA, 20 bp, Artificial Sequence
  Description of Artificial Sequence: Synthetic oligonucleotide
  Target: ATXN2; (-) strand; PAM type: YTN; PAM sequence: CTA
tgttggccaggctggtcttg

SEQ ID NO: 74943 - DNA, 20 bp, Artificial Sequence
  Description of Artificial Sequence: Synthetic oligonucleotide
  Target: ATXN2; (-) strand; PAM type: YTN; PAM sequence: TTC
actatgttggccaggctggt

SEQ ID NO: 74944 - DNA, 20 bp, Artificial Sequence
  Description of Artificial Sequence: Synthetic oligonucleotide
  Target: ATXN2; (-) strand; PAM type: YTN; PAM sequence: TTT
cactatgttggccaggctgg

SEQ ID NO: 74945 - DNA, 20 bp, Artificial Sequence
  Description of Artificial Sequence: Synthetic oligonucleotide
  Target: ATXN2; (-) strand; PAM type: YTN; PAM sequence: TTA
gtagagacggggtttcacta

SEQ ID NO: 74946 - DNA, 20 bp, Artificial Sequence
  Description of Artificial Sequence: Synthetic oligonucleotide
  Target: ATXN2; (-) strand; PAM type: YTN; PAM sequence: TTT
agtagagacggggtttcact

SEQ ID NO: 74947 - DNA, 20 bp, Artificial Sequence
  Description of Artificial Sequence: Synthetic oligonucleotide
  Target: ATXN2; (-) strand; PAM type: YTN; PAM sequence: TTT
tagtagagacggggtttcac

SEQ ID NO: 74948 - DNA, 20 bp, Artificial Sequence
  Description of Artificial Sequence: Synthetic oligonucleotide
  Target: ATXN2; (-) strand; PAM type: YTN; PAM sequence: TTT
ttagtagagacggggtttca

SEQ ID NO: 74949 - DNA, 20 bp, Artificial Sequence
  Description of Artificial Sequence: Synthetic oligonucleotide
  Target: ATXN2; (-) strand; PAM type: YTN; PAM sequence: TTG
tatttttagtagagacgggg

SEQ ID NO: 74950 - DNA, 20 bp, Artificial Sequence
  Description of Artificial Sequence: Synthetic oligonucleotide
  Target: ATXN2; (-) strand; PAM type: YTN; PAM sequence: TTT
gtatttttagtagagacggg

SEQ ID NO: 74951 - DNA, 20 bp, Artificial Sequence
  Description of Artificial Sequence: Synthetic oligonucleotide
  Target: ATXN2; (-) strand; PAM type: YTN; PAM sequence: TTT
tgtatttttagtagagacgg

SEQ ID NO: 74952 - DNA, 20 bp, Artificial Sequence
  Description of Artificial Sequence: Synthetic oligonucleotide
  Target: ATXN2; (-) strand; PAM type: YTN; PAM sequence: TTT
ttgtatttttagtagagacg

SEQ ID NO: 74953 - DNA, 20 bp, Artificial Sequence
  Description of Artificial Sequence: Synthetic oligonucleotide
  Target: ATXN2; (-) strand; PAM type: YTN; PAM sequence: CTA
atttttgtatttttagtaga

SEQ ID NO: 74954 - DNA, 20 bp, Artificial Sequence
  Description of Artificial Sequence: Synthetic oligonucleotide
  Target: ATXN2; (-) strand; PAM type: YTN; PAM sequence: CTG
aggcatgtgccaccatgccc

SEQ ID NO: 74955 - DNA, 20 bp, Artificial Sequence
  Description of Artificial Sequence: Synthetic oligonucleotide
  Target: ATXN2; (-) strand; PAM type: YTN; PAM sequence: TTA
ctgaggcatgtgccaccatg

SEQ ID NO: 74956 - DNA, 20 bp, Artificial Sequence
  Description of Artificial Sequence: Synthetic oligonucleotide
  Target: ATXN2; (-) strand; PAM type: YTN; PAM sequence: CTG
gttactgaggcatgtgccac

SEQ ID NO: 74957 - DNA, 20 bp, Artificial Sequence
  Description of Artificial Sequence: Synthetic oligonucleotide
  Target: ATXN2; (-) strand; PAM type: YTN; PAM sequence: CTC
ccgagtagctggttactgag

SEQ ID NO: 74958 - DNA, 20 bp, Artificial Sequence
  Description of Artificial Sequence: Synthetic oligonucleotide
  Target: ATXN2; (-) strand; PAM type: YTN; PAM sequence: CTC
agcctcccgagtagctggtt

SEQ ID NO: 74959 - DNA, 20 bp, Artificial Sequence
  Description of Artificial Sequence: Synthetic oligonucleotide
  Target: ATXN2; (-) strand; PAM type: YTN; PAM sequence: TTG
cctcagcctcccgagtagct

SEQ ID NO: 74960 - DNA, 20 bp, Artificial Sequence
  Description of Artificial Sequence: Synthetic oligonucleotide
  Target: ATXN2; (-) strand; PAM type: YTN; PAM sequence: CTT
gcctcagcctcccgagtagc

SEQ ID NO: 74961 - DNA, 20 bp, Artificial Sequence
  Description of Artificial Sequence: Synthetic oligonucleotide
  Target: ATXN2; (-) strand; PAM type: YTN; PAM sequence: CTC
ttgcctcagcctcccgagta

SEQ ID NO: 74962 - DNA, 20 bp, Artificial Sequence
  Description of Artificial Sequence: Synthetic oligonucleotide
  Target: ATXN2; (-) strand; PAM type: YTN; PAM sequence: TTC
tcttgcctcagcctcccgag

SEQ ID NO: 74963 - DNA, 20 bp, Artificial Sequence
  Description of Artificial Sequence: Synthetic oligonucleotide
  Target: ATXN2; (-) strand; PAM type: YTN; PAM sequence: TTC
aagcgattctcttgcctcag

SEQ ID NO: 74964 - DNA, 20 bp, Artificial Sequence
  Description of Artificial Sequence: Synthetic oligonucleotide
  Target: ATXN2; (-) strand; PAM type: YTN; PAM sequence: CTG
ggttcaagcgattctcttgc

SEQ ID NO: 74965 - DNA, 20 bp, Artificial Sequence
  Description of Artificial Sequence: Synthetic oligonucleotide
  Target: ATXN2; (-) strand; PAM type: YTN; PAM sequence: CTC
ctgggttcaagcgattctct

SEQ ID NO: 74966 - DNA, 20 bp, Artificial Sequence
  Description of Artificial Sequence: Synthetic oligonucleotide
  Target: ATXN2; (-) strand; PAM type: YTN; PAM sequence: CTG
cctcctgggttcaagcgatt

SEQ ID NO: 74967 - DNA, 20 bp, Artificial Sequence
  Description of Artificial Sequence: Synthetic oligonucleotide
  Target: ATXN2; (-) strand; PAM type: YTN; PAM sequence: CTC
tgcctcctgggttcaagcga

SEQ ID NO: 74968 - DNA, 20 bp, Artificial Sequence
  Description of Artificial Sequence: Synthetic oligonucleotide
  Target: ATXN2; (-) strand; PAM type: YTN; PAM sequence: CTC
accgcaacctctgcctcctg

SEQ ID NO: 74969 - DNA, 20 bp, Artificial Sequence
  Description of Artificial Sequence: Synthetic oligonucleotide
  Target: ATXN2; (-) strand; PAM type: YTN; PAM sequence: CTC
ggctcaccgcaacctctgcc

SEQ ID NO: 74970 - DNA, 20 bp, Artificial Sequence
  Description of Artificial Sequence: Synthetic oligonucleotide
  Target: ATXN2; (-) strand; PAM type: YTN; PAM sequence: CTG
atctcggctcaccgcaacct

SEQ ID NO: 74971 - DNA, 20 bp, Artificial Sequence
  Description of Artificial Sequence: Synthetic oligonucleotide
  Target: ATXN2; (-) strand; PAM type: YTN; PAM sequence: CTG
gagtgcagtggcctgatctc

SEQ ID NO: 74972 - DNA, 20 bp, Artificial Sequence
  Description of Artificial Sequence: Synthetic oligonucleotide
  Target: ATXN2; (-) strand; PAM type: YTN; PAM sequence: TTG
cccaggctggagtgcagtgg

SEQ ID NO: 74973 - DNA, 20 bp, Artificial Sequence
  Description of Artificial Sequence: Synthetic oligonucleotide
  Target: ATXN2; (-) strand; PAM type: YTN; PAM sequence: CTG
ttgcccaggctggagtgcag

SEQ ID NO: 74974 - DNA, 20 bp, Artificial Sequence
  Description of Artificial Sequence: Synthetic oligonucleotide
  Target: ATXN2; (-) strand; PAM type: YTN; PAM sequence: CTC
tgttgcccaggctggagtgc

SEQ ID NO: 74975 - DNA, 20 bp, Artificial Sequence
  Description of Artificial Sequence: Synthetic oligonucleotide
  Target: ATXN2; (-) strand; PAM type: YTN; PAM sequence: TTC
gctctgttgcccaggctgga

SEQ ID NO: 74976 - DNA, 20 bp, Artificial Sequence
  Description of Artificial Sequence: Synthetic oligonucleotide
  Target: ATXN2; (-) strand; PAM type: YTN; PAM sequence: TTT
cgctctgttgcccaggctgg

SEQ ID NO: 74977 - DNA, 20 bp, Artificial Sequence
  Description of Artificial Sequence: Synthetic oligonucleotide
  Target: ATXN2; (-) strand; PAM type: YTN; PAM sequence: TTG
gagacggagtttcgctctgt

SEQ ID NO: 74978 - DNA, 20 bp, Artificial Sequence
  Description of Artificial Sequence: Synthetic oligonucleotide
  Target: ATXN2; (-) strand; PAM type: YTN; PAM sequence: TTT
ggagacggagtttcgctctg

SEQ ID NO: 74979 - DNA, 20 bp, Artificial Sequence
  Description of Artificial Sequence: Synthetic oligonucleotide
  Target: ATXN2; (-) strand; PAM type: YTN; PAM sequence: TTT
tggagacggagtttcgctct

SEQ ID NO: 74980 - DNA, 20 bp, Artificial Sequence
  Description of Artificial Sequence: Synthetic oligonucleotide
  Target: ATXN2; (-) strand; PAM type: YTN; PAM sequence: TTT
ttggagacggagtttcgctc

SEQ ID NO: 74981 - DNA, 20 bp, Artificial Sequence
  Description of Artificial Sequence: Synthetic oligonucleotide
  Target: ATXN2; (-) strand; PAM type: YTN; PAM sequence: TTT
tttggagacggagtttcgct

SEQ ID NO: 74982 - DNA, 20 bp, Artificial Sequence
  Description of Artificial Sequence: Synthetic oligonucleotide
  Target: ATXN2; (-) strand; PAM type: YTN; PAM sequence: TTT
ttttggagacggagtttcgc

SEQ ID NO: 74983 - DNA, 20 bp, Artificial Sequence
  Description of Artificial Sequence: Synthetic oligonucleotide
  Target: ATXN2; (-) strand; PAM type: YTN; PAM sequence: TTT
tttttggagacggagtttcg

SEQ ID NO: 74984 - DNA, 20 bp, Artificial Sequence
  Description of Artificial Sequence: Synthetic oligonucleotide
  Target: ATXN2; (-) strand; PAM type: YTN; PAM sequence: TTT
ttttttggagacggagtttc

SEQ ID NO: 74985 - DNA, 20 bp, Artificial Sequence
  Description of Artificial Sequence: Synthetic oligonucleotide
  Target: ATXN2; (-) strand; PAM type: YTN; PAM sequence: TTT
tttttttggagacggagttt

SEQ ID NO: 74986 - DNA, 20 bp, Artificial Sequence
  Description of Artificial Sequence: Synthetic oligonucleotide
  Target: ATXN2; (-) strand; PAM type: YTN; PAM sequence: TTT
ttttttttggagacggagtt

SEQ ID NO: 74987 - DNA, 20 bp, Artificial Sequence
  Description of Artificial Sequence: Synthetic oligonucleotide
  Target: ATXN2; (-) strand; PAM type: YTN; PAM sequence: TTT
tttttttttggagacggagt

SEQ ID NO: 74988 - DNA, 20 bp, Artificial Sequence
  Description of Artificial Sequence: Synthetic oligonucleotide
  Target: ATXN2; (-) strand; PAM type: YTN; PAM sequence: TTT
ttttttttttggagacggag

SEQ ID NO: 74989 - DNA, 20 bp, Artificial Sequence
  Description of Artificial Sequence: Synthetic oligonucleotide
  Target: ATXN2; (-) strand; PAM type: YTN; PAM sequence: TTT
tttttttttttggagacgga

SEQ ID NO: 74990 - DNA, 20 bp, Artificial Sequence
  Description of Artificial Sequence: Synthetic oligonucleotide
  Target: ATXN2; (-) strand; PAM type: YTN; PAM sequence: TTT
ttttttttttttggagacgg

SEQ ID NO: 74991 - DNA, 20 bp, Artificial Sequence
  Description of Artificial Sequence: Synthetic oligonucleotide
  Target: ATXN2; (-) strand; PAM type: YTN; PAM sequence: TTT
tttttttttttttggagacg

SEQ ID NO: 74992 - DNA, 20 bp, Artificial Sequence
  Description of Artificial Sequence: Synthetic oligonucleotide
  Target: ATXN2; (-) strand; PAM type: YTN; PAM sequence: TTT
ttttttttttttttggagac

SEQ ID NO: 74993 - DNA, 20 bp, Artificial Sequence
  Description of Artificial Sequence: Synthetic oligonucleotide
  Target: ATXN2; (-) strand; PAM type: YTN; PAM sequence: CTT
tttttttttttttttggaga

SEQ ID NO: 74994 - DNA, 20 bp, Artificial Sequence
  Description of Artificial Sequence: Synthetic oligonucleotide
  Target: ATXN2; (-) strand; PAM type: YTN; PAM sequence: CTC
tttttttttttttttttgga

SEQ ID NO: 74995 - DNA, 20 bp, Artificial Sequence
  Description of Artificial Sequence: Synthetic oligonucleotide
  Target: ATXN2; (-) strand; PAM type: YTN; PAM sequence: CTC
tctttttttttttttttttg

SEQ ID NO: 74996 - DNA, 20 bp, Artificial Sequence
  Description of Artificial Sequence: Synthetic oligonucleotide
  Target: ATXN2; (-) strand; PAM type: YTN; PAM sequence: CTC
tctctttttttttttttttt

SEQ ID NO: 74997 - DNA, 20 bp, Artificial Sequence
  Description of Artificial Sequence: Synthetic oligonucleotide
  Target: ATXN2; (-) strand; PAM type: YTN; PAM sequence: TTC
tctctctttttttttttttt

SEQ ID NO: 74998 - DNA, 20 bp, Artificial Sequence
  Description of Artificial Sequence: Synthetic oligonucleotide
  Target: ATXN2; (-) strand; PAM type: YTN; PAM sequence: TTT
ctctctcttttttttttttt

SEQ ID NO: 74999 - DNA, 20 bp, Artificial Sequence
  Description of Artificial Sequence: Synthetic oligonucleotide
  Target: ATXN2; (-) strand; PAM type: YTN; PAM sequence: TTT
tctctctctttttttttttt

SEQ ID NO: 75000 - DNA, 20 bp, Artificial Sequence
  Description of Artificial Sequence: Synthetic oligonucleotide
  Target: ATXN2; (-) strand; PAM type: YTN; PAM sequence: CTT
ttctctctcttttttttttt

SEQ ID NO: 75001 - DNA, 20 bp, Artificial Sequence
  Description of Artificial Sequence: Synthetic oligonucleotide
  Target: ATXN2; (-) strand; PAM type: YTN; PAM sequence: TTC
ttttctctctcttttttttt

SEQ ID NO: 75002 - DNA, 20 bp, Artificial Sequence
  Description of Artificial Sequence: Synthetic oligonucleotide
  Target: ATXN2; (-) strand; PAM type: YTN; PAM sequence: TTT
cttttctctctctttttttt

SEQ ID NO: 75003 - DNA, 20 bp, Artificial Sequence
  Description of Artificial Sequence: Synthetic oligonucleotide
  Target: ATXN2; (-) strand; PAM type: YTN; PAM sequence: TTT
tcttttctctctcttttttt

SEQ ID NO: 75004 - DNA, 20 bp, Artificial Sequence
  Description of Artificial Sequence: Synthetic oligonucleotide
  Target: ATXN2; (-) strand; PAM type: YTN; PAM sequence: TTT
ttcttttctctctctttttt

SEQ ID NO: 75005 - DNA, 20 bp, Artificial Sequence
  Description of Artificial Sequence: Synthetic oligonucleotide
  Target: ATXN2; (-) strand; PAM type: YTN; PAM sequence: TTT
tttcttttctctctcttttt

SEQ ID NO: 75006 - DNA, 20 bp, Artificial Sequence
  Description of Artificial Sequence: Synthetic oligonucleotide
  Target: ATXN2; (-) strand; PAM type: YTN; PAM sequence: TTA
ttttttcttttctctctctt

SEQ ID NO: 75007 - DNA, 20 bp, Artificial Sequence
  Description of Artificial Sequence: Synthetic oligonucleotide
  Target: ATXN2; (-) strand; PAM type: YTN; PAM sequence: CTT
attttttcttttctctctct

SEQ ID NO: 75008 - DNA, 20 bp, Artificial Sequence
  Description of Artificial Sequence: Synthetic oligonucleotide
  Target: ATXN2; (-) strand; PAM type: YTN; PAM sequence: TTC
aggtatcttattttttcttt

SEQ ID NO: 75009 - DNA, 20 bp, Artificial Sequence
  Description of Artificial Sequence: Synthetic oligonucleotide
  Target: ATXN2; (-) strand; PAM type: YTN; PAM sequence: TTT
caggtatcttattttttctt

SEQ ID NO: 75010 - DNA, 20 bp, Artificial Sequence
  Description of Artificial Sequence: Synthetic oligonucleotide
  Target: ATXN2; (-) strand; PAM type: YTN; PAM sequence: TTG
gagtaatttcaggtatctta

SEQ ID NO: 75011 - DNA, 20 bp, Artificial Sequence
  Description of Artificial Sequence: Synthetic oligonucleotide
  Target: ATXN2; (-) strand; PAM type: YTN; PAM sequence: CTA
ttggagtaatttcaggtatc

SEQ ID NO: 75012 - DNA, 20 bp, Artificial Sequence
  Description of Artificial Sequence: Synthetic oligonucleotide
  Target: ATXN2; (-) strand; PAM type: YTN; PAM sequence: TTG
atgaggacatccactattgg

SEQ ID NO: 75013 - DNA, 20 bp, Artificial Sequence
  Description of Artificial Sequence: Synthetic oligonucleotide
  Target: ATXN2; (-) strand; PAM type: YTN; PAM sequence: CTT
gatgaggacatccactattg

SEQ ID NO: 75014 - DNA, 20 bp, Artificial Sequence
  Description of Artificial Sequence: Synthetic oligonucleotide
  Target: ATXN2; (-) strand; PAM type: YTN; PAM sequence: TTC
ttgatgaggacatccactat

SEQ ID NO: 75015 - DNA, 20 bp, Artificial Sequence
  Description of Artificial Sequence: Synthetic oligonucleotide
  Target: ATXN2; (-) strand; PAM type: YTN; PAM sequence: TTT
cttgatgaggacatccacta

SEQ ID NO: 75016 - DNA, 20 bp, Artificial Sequence
  Description of Artificial Sequence: Synthetic oligonucleotide
  Target: ATXN2; (-) strand; PAM type: YTN; PAM sequence: TTT
tcttgatgaggacatccact

SEQ ID NO: 75017 - DNA, 20 bp, Artificial Sequence
  Description of Artificial Sequence: Synthetic oligonucleotide
  Target: ATXN2; (-) strand; PAM type: YTN; PAM sequence: TTA
gttttcttgatgaggacatc

SEQ ID NO: 75018 - DNA, 20 bp, Artificial Sequence
  Description of Artificial Sequence: Synthetic oligonucleotide
  Target: ATXN2; (-) strand; PAM type: YTN; PAM sequence: TTA
caaaattagttttcttgatg

SEQ ID NO: 75019 - DNA, 20 bp, Artificial Sequence
  Description of Artificial Sequence: Synthetic oligonucleotide
  Target: ATXN2; (-) strand; PAM type: YTN; PAM sequence: CTA
tatattacaaaattagtttt

SEQ ID NO: 75020 - DNA, 20 bp, Artificial Sequence
  Description of Artificial Sequence: Synthetic oligonucleotide
  Target: ATXN2; (-) strand; PAM type: YTN; PAM sequence: TTG
ctatatattacaaaattagt

SEQ ID NO: 75021 - DNA, 20 bp, Artificial Sequence
  Description of Artificial Sequence: Synthetic oligonucleotide
  Target: ATXN2; (-) strand; PAM type: YTN; PAM sequence: TTT
gctatatattacaaaattag

SEQ ID NO: 75022 - DNA, 20 bp, Artificial Sequence
  Description of Artificial Sequence: Synthetic oligonucleotide
  Target: ATXN2; (-) strand; PAM type: YTN; PAM sequence: TTT
tgctatatattacaaaatta

SEQ ID NO: 75023 - DNA, 20 bp, Artificial Sequence
  Description of Artificial Sequence: Synthetic oligonucleotide
  Target: ATXN2; (-) strand; PAM type: YTN; PAM sequence: CTC
ataaggggatgggtgtattt

SEQ ID NO: 75024 - DNA, 20 bp, Artificial Sequence
  Description of Artificial Sequence: Synthetic oligonucleotide
  Target: ATXN2; (-) strand; PAM type: YTN; PAM sequence: CTA
ctcataaggggatgggtgta

SEQ ID NO: 75025 - DNA, 20 bp, Artificial Sequence
  Description of Artificial Sequence: Synthetic oligonucleotide
  Target: ATXN2; (-) strand; PAM type: YTN; PAM sequence: CTC
tactcataaggggatgggtg

SEQ ID NO: 75026 - DNA, 20 bp, Artificial Sequence
  Description of Artificial Sequence: Synthetic oligonucleotide
  Target: ATXN2; (-) strand; PAM type: YTN; PAM sequence: CTC
actctactcataaggggatg

SEQ ID NO: 75027 - DNA, 20 bp, Artificial Sequence
  Description of Artificial Sequence: Synthetic oligonucleotide
  Target: ATXN2; (-) strand; PAM type: YTN; PAM sequence: TTG
aaaatctcactctactcata

SEQ ID NO: 75028 - DNA, 20 bp, Artificial Sequence
  Description of Artificial Sequence: Synthetic oligonucleotide
  Target: ATXN2; (-) strand; PAM type: YTN; PAM sequence: TTT
gaaaatctcactctactcat

SEQ ID NO: 75029 - DNA, 20 bp, Artificial Sequence
  Description of Artificial Sequence: Synthetic oligonucleotide
  Target: ATXN2; (-) strand; PAM type: YTN; PAM sequence: CTT
tgaaaatctcactctactca

SEQ ID NO: 75030 - DNA, 20 bp, Artificial Sequence
  Description of Artificial Sequence: Synthetic oligonucleotide
  Target: ATXN2; (-) strand; PAM type: YTN; PAM sequence: TTA
tagaaaggcaagaaaataca

SEQ ID NO: 75031 - DNA, 20 bp, Artificial Sequence
  Description of Artificial Sequence: Synthetic oligonucleotide
  Target: ATXN2; (-) strand; PAM type: YTN; PAM sequence: TTC
attatagaaaggcaagaaaa

SEQ ID NO: 75032 - DNA, 20 bp, Artificial Sequence
  Description of Artificial Sequence: Synthetic oligonucleotide
  Target: ATXN2; (-) strand; PAM type: YTN; PAM sequence: TTA
gttcattatagaaaggcaag

SEQ ID NO: 75033 - DNA, 20 bp, Artificial Sequence
  Description of Artificial Sequence: Synthetic oligonucleotide
  Target: ATXN2; (-) strand; PAM type: YTN; PAM sequence: TTT
agttcattatagaaaggcaa

SEQ ID NO: 75034 - DNA, 20 bp, Artificial Sequence
  Description of Artificial Sequence: Synthetic oligonucleotide
  Target: ATXN2; (-) strand; PAM type: YTN; PAM sequence: TTT
tagttcattatagaaaggca

SEQ ID NO: 75035 - DNA, 20 bp, Artificial Sequence
  Description of Artificial Sequence: Synthetic oligonucleotide
  Target: ATXN2; (-) strand; PAM type: YTN; PAM sequence: CTC
agataattttagttcattat

SEQ ID NO: 75036 - DNA, 20 bp, Artificial Sequence
  Description of Artificial Sequence: Synthetic oligonucleotide
  Target: ATXN2; (-) strand; PAM type: YTN; PAM sequence: TTC
tcagataattttagttcatt

SEQ ID NO: 75037 - DNA, 20 bp, Artificial Sequence
  Description of Artificial Sequence: Synthetic oligonucleotide
  Target: ATXN2; (-) strand; PAM type: YTN; PAM sequence: TTT
ctcagataattttagttcat

SEQ ID NO: 75038 - DNA, 20 bp, Artificial Sequence
  Description of Artificial Sequence: Synthetic oligonucleotide
  Target: ATXN2; (-) strand; PAM type: YTN; PAM sequence: TTC
atttctcagataattttagt

SEQ ID NO: 75039 - DNA, 20 bp, Artificial Sequence
  Description of Artificial Sequence: Synthetic oligonucleotide
  Target: ATXN2; (-) strand; PAM type: YTN; PAM sequence: CTT
catttctcagataattttag

SEQ ID NO: 75040 - DNA, 20 bp, Artificial Sequence
  Description of Artificial Sequence: Synthetic oligonucleotide
  Target: ATXN2; (-) strand; PAM type: YTN; PAM sequence: TTA
gatcttcatttctcagataa

SEQ ID NO: 75041 - DNA, 20 bp, Artificial Sequence
  Description of Artificial Sequence: Synthetic oligonucleotide
  Target: ATXN2; (-) strand; PAM type: YTN; PAM sequence: TTA
ttagatcttcatttctcaga

SEQ ID NO: 75042 - DNA, 20 bp, Artificial Sequence
  Description of Artificial Sequence: Synthetic oligonucleotide
  Target: ATXN2; (-) strand; PAM type: YTN; PAM sequence: TTT
attagatcttcatttctcag

SEQ ID NO: 75043 - DNA, 20 bp, Artificial Sequence
  Description of Artificial Sequence: Synthetic oligonucleotide
  Target: ATXN2; (-) strand; PAM type: YTN; PAM sequence: CTT
tattagatcttcatttctca

SEQ ID NO: 75044 - DNA, 20 bp, Artificial Sequence
  Description of Artificial Sequence: Synthetic oligonucleotide
  Target: ATXN2; (-) strand; PAM type: YTN; PAM sequence: TTA
ctttattagatcttcatttc

SEQ ID NO: 75045 - DNA, 20 bp, Artificial Sequence
  Description of Artificial Sequence: Synthetic oligonucleotide
  Target: ATXN2; (-) strand; PAM type: YTN; PAM sequence: TTA
ttactttattagatcttcat

SEQ ID NO: 75046 - DNA, 20 bp, Artificial Sequence
  Description of Artificial Sequence: Synthetic oligonucleotide
  Target: ATXN2; (-) strand; PAM type: YTN; PAM sequence: TTT
attactttattagatcttca

SEQ ID NO: 75047 - DNA, 20 bp, Artificial Sequence
  Description of Artificial Sequence: Synthetic oligonucleotide
  Target: ATXN2; (-) strand; PAM type: YTN; PAM sequence: TTT
tattactttattagatcttc

SEQ ID NO: 75048 - DNA, 20 bp, Artificial Sequence
  Description of Artificial Sequence: Synthetic oligonucleotide
  Target: ATXN2; (-) strand; PAM type: YTN; PAM sequence: TTT
ttattactttattagatctt

SEQ ID NO: 75049 - DNA, 20 bp, Artificial Sequence
  Description of Artificial Sequence: Synthetic oligonucleotide
  Target: ATXN2; (-) strand; PAM type: YTN; PAM sequence: TTA
aatttttattactttattag

SEQ ID NO: 75050 - DNA, 20 bp, Artificial Sequence
  Description of Artificial Sequence: Synthetic oligonucleotide
  Target: ATXN2; (-) strand; PAM type: YTN; PAM sequence: TTA
atgtcattaaatttttatta

SEQ ID NO: 75051 - DNA, 20 bp, Artificial Sequence
  Description of Artificial Sequence: Synthetic oligonucleotide
  Target: ATXN2; (-) strand; PAM type: YTN; PAM sequence: TTC
aaaattaatgtcattaaatt

SEQ ID NO: 75052 - DNA, 20 bp, Artificial Sequence
  Description of Artificial Sequence: Synthetic oligonucleotide
  Target: ATXN2; (-) strand; PAM type: YTN; PAM sequence: CTT
caaaattaatgtcattaaat

SEQ ID NO: 75053 - DNA, 20 bp, Artificial Sequence
  Description of Artificial Sequence: Synthetic oligonucleotide
  Target: ATXN2; (-) strand; PAM type: YTN; PAM sequence: CTC
ttcaaaattaatgtcattaa

SEQ ID NO: 75054 - DNA, 20 bp, Artificial Sequence
  Description of Artificial Sequence: Synthetic oligonucleotide
  Target: ATXN2; (-) strand; PAM type: YTN; PAM sequence: CTC
ctcttcaaaattaatgtcat

SEQ ID NO: 75055 - DNA, 20 bp, Artificial Sequence
  Description of Artificial Sequence: Synthetic oligonucleotide
  Target: ATXN2; (-) strand; PAM type: YTN; PAM sequence: TTG
ctcctcttcaaaattaatgt

SEQ ID NO: 75056 - DNA, 20 bp, Artificial Sequence
  Description of Artificial Sequence: Synthetic oligonucleotide
  Target: ATXN2; (-) strand; PAM type: YTN; PAM sequence: CTT
gctcctcttcaaaattaatg

SEQ ID NO: 75057 - DNA, 20 bp, Artificial Sequence
  Description of Artificial Sequence: Synthetic oligonucleotide
  Target: ATXN2; (-) strand; PAM type: YTN; PAM sequence: TTC
cttgctcctcttcaaaatta

SEQ ID NO: 75058 - DNA, 20 bp, Artificial Sequence
  Description of Artificial Sequence: Synthetic oligonucleotide
  Target: ATXN2; (-) strand; PAM type: YTN; PAM sequence: TTG
tgatagtccattccttgctc

SEQ ID NO: 75059 - DNA, 20 bp, Artificial Sequence
  Description of Artificial Sequence: Synthetic oligonucleotide
  Target: ATXN2; (-) strand; PAM type: YTN; PAM sequence: TTT
gtgatagtccattccttgct

SEQ ID NO: 75060 - DNA, 20 bp, Artificial Sequence
  Description of Artificial Sequence: Synthetic oligonucleotide
  Target: ATXN2; (-) strand; PAM type: YTN; PAM sequence: TTG
agatgtttgtgatagtccat

SEQ ID NO: 75061 - DNA, 20 bp, Artificial Sequence
  Description of Artificial Sequence: Synthetic oligonucleotide
  Target: ATXN2; (-) strand; PAM type: YTN; PAM sequence: TTT
gagatgtttgtgatagtcca

SEQ ID NO: 75062 - DNA, 20 bp, Artificial Sequence
  Description of Artificial Sequence: Synthetic oligonucleotide
  Target: ATXN2; (-) strand; PAM type: YTN; PAM sequence: CTT
tgagatgtttgtgatagtcc

SEQ ID NO: 75063 - DNA, 20 bp, Artificial Sequence
  Description of Artificial Sequence: Synthetic oligonucleotide
  Target: ATXN2; (-) strand; PAM type: YTN; PAM sequence: TTA
ctttgagatgtttgtgatag

SEQ ID NO: 75064 - DNA, 20 bp, Artificial Sequence
  Description of Artificial Sequence: Synthetic oligonucleotide
  Target: ATXN2; (-) strand; PAM type: YTN; PAM sequence: TTC
ccaaatgtggaagagtgaat

SEQ ID NO: 75065 - DNA, 20 bp, Artificial Sequence
  Description of Artificial Sequence: Synthetic oligonucleotide
  Target: ATXN2; (-) strand; PAM type: YTN; PAM sequence: TTT
cccaaatgtggaagagtgaa

SEQ ID NO: 75066 - DNA, 20 bp, Artificial Sequence
  Description of Artificial Sequence: Synthetic oligonucleotide
  Target: ATXN2; (-) strand; PAM type: YTN; PAM sequence: TTG
atatttcccaaatgtggaag

SEQ ID NO: 75067 - DNA, 20 bp, Artificial Sequence
  Description of Artificial Sequence: Synthetic oligonucleotide
  Target: ATXN2; (-) strand; PAM type: YTN; PAM sequence: TTA
tgatgaattgatatttccca

SEQ ID NO: 75068 - DNA, 20 bp, Artificial Sequence
  Description of Artificial Sequence: Synthetic oligonucleotide
  Target: ATXN2; (-) strand; PAM type: YTN; PAM sequence: TTT
atgatgaattgatatttccc

SEQ ID NO: 75069 - DNA, 20 bp, Artificial Sequence
  Description of Artificial Sequence: Synthetic oligonucleotide
  Target: ATXN2; (-) strand; PAM type: YTN; PAM sequence: TTT
tatgatgaattgatatttcc

SEQ ID NO: 75070 - DNA, 20 bp, Artificial Sequence
  Description of Artificial Sequence: Synthetic oligonucleotide
  Target: ATXN2; (-) strand; PAM type: YTN; PAM sequence: TTT
ttatgatgaattgatatttc

SEQ ID NO: 75071 - DNA, 20 bp, Artificial Sequence
  Description of Artificial Sequence: Synthetic oligonucleotide
  Target: ATXN2; (-) strand; PAM type: YTN; PAM sequence: TTG
tttttatgatgaattgatat

SEQ ID NO: 75072 - DNA, 20 bp, Artificial Sequence
  Description of Artificial Sequence: Synthetic oligonucleotide
  Target: ATXN2; (-) strand; PAM type: YTN; PAM sequence: TTT
gtttttatgatgaattgata

SEQ ID NO: 75073 - DNA, 20 bp, Artificial Sequence
  Description of Artificial Sequence: Synthetic oligonucleotide
  Target: ATXN2; (-) strand; PAM type: YTN; PAM sequence: TTT
tgtttttatgatgaattgat

SEQ ID NO: 75074 - DNA, 20 bp, Artificial Sequence
  Description of Artificial Sequence: Synthetic oligonucleotide
  Target: ATXN2; (-) strand; PAM type: YTN; PAM sequence: TTT
ttgtttttatgatgaattga

SEQ ID NO: 75075 - DNA, 20 bp, Artificial Sequence
  Description of Artificial Sequence: Synthetic oligonucleotide
  Target: ATXN2; (-) strand; PAM type: YTN; PAM sequence: CTT
tttgtttttatgatgaattg

SEQ ID NO: 75076 - DNA, 20 bp, Artificial Sequence
  Description of Artificial Sequence: Synthetic oligonucleotide
  Target: ATXN2; (-) strand; PAM type: YTN; PAM sequence: TTG
tctttttgtttttatgatga

SEQ ID NO: 75077 - DNA, 20 bp, Artificial Sequence
  Description of Artificial Sequence: Synthetic oligonucleotide
  Target: ATXN2; (-) strand; PAM type: YTN; PAM sequence: TTA
cggtatgcattgtctttttg

SEQ ID NO: 75078 - DNA, 20 bp, Artificial Sequence
  Description of Artificial Sequence: Synthetic oligonucleotide
  Target: ATXN2; (-) strand; PAM type: YTN; PAM sequence: TTT
acggtatgcattgtcttttt

SEQ ID NO: 75079 - DNA, 20 bp, Artificial Sequence
  Description of Artificial Sequence: Synthetic oligonucleotide
  Target: ATXN2; (-) strand; PAM type: YTN; PAM sequence: TTA
acagccatttacggtatgca

SEQ ID NO: 75080 - DNA, 20 bp, Artificial Sequence
  Description of Artificial Sequence: Synthetic oligonucleotide
  Target: ATXN2; (-) strand; PAM type: YTN; PAM sequence: TTT
aacagccatttacggtatgc

SEQ ID NO: 75081 - DNA, 20 bp, Artificial Sequence
  Description of Artificial Sequence: Synthetic oligonucleotide
  Target: ATXN2; (-) strand; PAM type: YTN; PAM sequence: TTG
gataccaggtcatttaacag

SEQ ID NO: 75082 - DNA, 20 bp, Artificial Sequence
  Description of Artificial Sequence: Synthetic oligonucleotide
  Target: ATXN2; (-) strand; PAM type: YTN; PAM sequence: CTA
ttggataccaggtcatttaa

SEQ ID NO: 75083 - DNA, 20 bp, Artificial Sequence
  Description of Artificial Sequence: Synthetic oligonucleotide
  Target: ATXN2; (-) strand; PAM type: YTN; PAM sequence: CTC
tattggataccaggtcattt

SEQ ID NO: 75084 - DNA, 20 bp, Artificial Sequence
  Description of Artificial Sequence: Synthetic oligonucleotide
  Target: ATXN2; (-) strand; PAM type: YTN; PAM sequence: CTA
ctctattggataccaggtca

SEQ ID NO: 75085 - DNA, 20 bp, Artificial Sequence
  Description of Artificial Sequence: Synthetic oligonucleotide
  Target: ATXN2; (-) strand; PAM type: YTN; PAM sequence: TTC
cctactctattggataccag

SEQ ID NO: 75086 - DNA, 20 bp, Artificial Sequence
  Description of Artificial Sequence: Synthetic oligonucleotide
  Target: ATXN2; (-) strand; PAM type: YTN; PAM sequence: TTG
gccacaacaaaaaaaaaggt

SEQ ID NO: 75087 - DNA, 20 bp, Artificial Sequence
  Description of Artificial Sequence: Synthetic oligonucleotide
  Target: ATXN2; (-) strand; PAM type: YTN; PAM sequence: CTG
gaaagagtattggccacaac

SEQ ID NO: 75088 - DNA, 20 bp, Artificial Sequence
  Description of Artificial Sequence: Synthetic oligonucleotide
  Target: ATXN2; (-) strand; PAM type: YTN; PAM sequence: CTC
tggaaagagtattggccaca

SEQ ID NO: 75089 - DNA, 20 bp, Artificial Sequence
  Description of Artificial Sequence: Synthetic oligonucleotide
  Target: ATXN2; (-) strand; PAM type: YTN; PAM sequence: TTA
atacatagcactctggaaag

SEQ ID NO: 75090 - DNA, 20 bp, Artificial Sequence
  Description of Artificial Sequence: Synthetic oligonucleotide
  Target: ATXN2; (-) strand; PAM type: YTN; PAM sequence: TTT
aatacatagcactctggaaa

SEQ ID NO: 75091 - DNA, 20 bp, Artificial Sequence
  Description of Artificial Sequence: Synthetic oligonucleotide
  Target: ATXN2; (-) strand; PAM type: YTN; PAM sequence: TTG
aatttaatacatagcactct

SEQ ID NO: 75092 - DNA, 20 bp, Artificial Sequence
  Description of Artificial Sequence: Synthetic oligonucleotide
  Target: ATXN2; (-) strand; PAM type: YTN; PAM sequence: TTA
gttgaatttaatacatagca

SEQ ID NO: 75093 - DNA, 20 bp, Artificial Sequence
  Description of Artificial Sequence: Synthetic oligonucleotide
  Target: ATXN2; (-) strand; PAM type: YTN; PAM sequence: TTT
agttgaatttaatacatagc

SEQ ID NO: 75094 - DNA, 20 bp, Artificial Sequence
  Description of Artificial Sequence: Synthetic oligonucleotide
  Target: ATXN2; (-) strand; PAM type: YTN; PAM sequence: TTT
tagttgaatttaatacatag

SEQ ID NO: 75095 - DNA, 20 bp, Artificial Sequence
  Description of Artificial Sequence: Synthetic oligonucleotide
  Target: ATXN2; (-) strand; PAM type: YTN; PAM sequence: TTG
gaagataaaattttagttga

SEQ ID NO: 75096 - DNA, 20 bp, Artificial Sequence
  Description of Artificial Sequence: Synthetic oligonucleotide
  Target: ATXN2; (-) strand; PAM type: YTN; PAM sequence: TTT
ggaagataaaattttagttg

SEQ ID NO: 75097 - DNA, 20 bp, Artificial Sequence
  Description of Artificial Sequence: Synthetic oligonucleotide
  Target: ATXN2; (-) strand; PAM type: YTN; PAM sequence: CTT
tggaagataaaattttagtt

SEQ ID NO: 75098 - DNA, 20 bp, Artificial Sequence
  Description of Artificial Sequence: Synthetic oligonucleotide
  Target: ATXN2; (-) strand; PAM type: YTN; PAM sequence: TTG
actttggaagataaaatttt

SEQ ID NO: 75099 - DNA, 20 bp, Artificial Sequence
  Description of Artificial Sequence: Synthetic oligonucleotide
  Target: ATXN2; (-) strand; PAM type: YTN; PAM sequence: TTC
aaaaattgactttggaagat

SEQ ID NO: 75100 - DNA, 20 bp, Artificial Sequence
  Description of Artificial Sequence: Synthetic oligonucleotide
  Target: ATXN2; (-) strand; PAM type: YTN; PAM sequence: TTA
taaattcaaaaattgacttt

SEQ ID NO: 75101 - DNA, 20 bp, Artificial Sequence
  Description of Artificial Sequence: Synthetic oligonucleotide
  Target: ATXN2; (-) strand; PAM type: YTN; PAM sequence: CTG
ttataaattcaaaaattgac

SEQ ID NO: 75102 - DNA, 20 bp, Artificial Sequence
  Description of Artificial Sequence: Synthetic oligonucleotide
  Target: ATXN2; (-) strand; PAM type: YTN; PAM sequence: CTC
tgttataaattcaaaaattg

SEQ ID NO: 75103 - DNA, 20 bp, Artificial Sequence
  Description of Artificial Sequence: Synthetic oligonucleotide
  Target: ATXN2; (-) strand; PAM type: YTN; PAM sequence: TTC
ctctgttataaattcaaaaa

SEQ ID NO: 75104 - DNA, 20 bp, Artificial Sequence
  Description of Artificial Sequence: Synthetic oligonucleotide
  Target: ATXN2; (-) strand; PAM type: YTN; PAM sequence: TTG
aaatattcctctgttataaa

SEQ ID NO: 75105 - DNA, 20 bp, Artificial Sequence
  Description of Artificial Sequence: Synthetic oligonucleotide
  Target: ATXN2; (-) strand; PAM type: YTN; PAM sequence: CTA
ttgaaatattcctctgttat

SEQ ID NO: 75106 - DNA, 20 bp, Artificial Sequence
  Description of Artificial Sequence: Synthetic oligonucleotide
  Target: ATXN2; (-) strand; PAM type: YTN; PAM sequence: TTA
tactattgaaatattcctct

SEQ ID NO: 75107 - DNA, 20 bp, Artificial Sequence
  Description of Artificial Sequence: Synthetic oligonucleotide
  Target: ATXN2; (-) strand; PAM type: YTN; PAM sequence: CTT
atactattgaaatattcctc

SEQ ID NO: 75108 - DNA, 20 bp, Artificial Sequence
  Description of Artificial Sequence: Synthetic oligonucleotide
  Target: ATXN2; (-) strand; PAM type: YTN; PAM sequence: TTA
tacttatactattgaaatat

SEQ ID NO: 75109 - DNA, 20 bp, Artificial Sequence
  Description of Artificial Sequence: Synthetic oligonucleotide
  Target: ATXN2; (-) strand; PAM type: YTN; PAM sequence: TTT
atacttatactattgaaata

SEQ ID NO: 75110 - DNA, 20 bp, Artificial Sequence
  Description of Artificial Sequence: Synthetic oligonucleotide
  Target: ATXN2; (-) strand; PAM type: YTN; PAM sequence: TTA
tttatacttatactattgaa

SEQ ID NO: 75111 - DNA, 20 bp, Artificial Sequence
  Description of Artificial Sequence: Synthetic oligonucleotide
  Target: ATXN2; (-) strand; PAM type: YTN; PAM sequence: CTA
aattatttatacttatacta

SEQ ID NO: 75112 - DNA, 20 bp, Artificial Sequence
  Description of Artificial Sequence: Synthetic oligonucleotide
  Target: ATXN2; (-) strand; PAM type: YTN; PAM sequence: CTA
ggagcactaaattatttata

SEQ ID NO: 75113 - DNA, 20 bp, Artificial Sequence
  Description of Artificial Sequence: Synthetic oligonucleotide
  Target: ATXN2; (-) strand; PAM type: YTN; PAM sequence: TTA
tgtctaggagcactaaatta

SEQ ID NO: 75114 - DNA, 20 bp, Artificial Sequence
  Description of Artificial Sequence: Synthetic oligonucleotide
  Target: ATXN2; (-) strand; PAM type: YTN; PAM sequence: TTT
atgtctaggagcactaaatt

SEQ ID NO: 75115 - DNA, 20 bp, Artificial Sequence
  Description of Artificial Sequence: Synthetic oligonucleotide
  Target: ATXN2; (-) strand; PAM type: YTN; PAM sequence: TTG
tttatgtctaggagcactaa

SEQ ID NO: 75116 - DNA, 20 bp, Artificial Sequence
  Description of Artificial Sequence: Synthetic oligonucleotide
  Target: ATXN2; (-) strand; PAM type: YTN; PAM sequence: TTT
gtttatgtctaggagcacta

SEQ ID NO: 75117 - DNA, 20 bp, Artificial Sequence
  Description of Artificial Sequence: Synthetic oligonucleotide
  Target: ATXN2; (-) strand; PAM type: YTN; PAM sequence: TTT
tgtttatgtctaggagcact

SEQ ID NO: 75118 - DNA, 20 bp, Artificial Sequence
  Description of Artificial Sequence: Synthetic oligonucleotide
  Target: ATXN2; (-) strand; PAM type: YTN; PAM sequence: TTG
attttgtttatgtctaggag

SEQ ID NO: 75119 - DNA, 20 bp, Artificial Sequence
  Description of Artificial Sequence: Synthetic oligonucleotide
  Target: ATXN2; (-) strand; PAM type: YTN; PAM sequence: TTG
gagttgattttgtttatgtc

SEQ ID NO: 75120 - DNA, 20 bp, Artificial Sequence
  Description of Artificial Sequence: Synthetic oligonucleotide
  Target: ATXN2; (-) strand; PAM type: YTN; PAM sequence: TTT
ggagttgattttgtttatgt

SEQ ID NO: 75121 - DNA, 20 bp, Artificial Sequence
  Description of Artificial Sequence: Synthetic oligonucleotide
  Target: ATXN2; (-) strand; PAM type: YTN; PAM sequence: CTT
tggagttgattttgtttatg

SEQ ID NO: 75122 - DNA, 20 bp, Artificial Sequence
  Description of Artificial Sequence: Synthetic oligonucleotide
  Target: ATXN2; (-) strand; PAM type: YTN; PAM sequence: CTA
cctttggagttgattttgtt

SEQ ID NO: 75123 - DNA, 20 bp, Artificial Sequence
  Description of Artificial Sequence: Synthetic oligonucleotide
  Target: ATXN2; (-) strand; PAM type: YTN; PAM sequence: CTG
ctacctttggagttgatttt

SEQ ID NO: 75124 - DNA, 20 bp, Artificial Sequence
  Description of Artificial Sequence: Synthetic oligonucleotide
  Target: ATXN2; (-) strand; PAM type: YTN; PAM sequence: TTA
gctgctacctttggagttga

SEQ ID NO: 75125 - DNA, 20 bp, Artificial Sequence
  Description of Artificial Sequence: Synthetic oligonucleotide
  Target: ATXN2; (-) strand; PAM type: YTN; PAM sequence: TTT
agctgctacctttggagttg

SEQ ID NO: 75126 - DNA, 20 bp, Artificial Sequence
  Description of Artificial Sequence: Synthetic oligonucleotide
  Target: ATXN2; (-) strand; PAM type: YTN; PAM sequence: TTT
tagctgctacctttggagtt

SEQ ID NO: 75127 - DNA, 20 bp, Artificial Sequence
  Description of Artificial Sequence: Synthetic oligonucleotide
  Target: ATXN2; (-) strand; PAM type: YTN; PAM sequence: TTT
ttagctgctacctttggagt

SEQ ID NO: 75128 - DNA, 20 bp, Artificial Sequence
  Description of Artificial Sequence: Synthetic oligonucleotide
  Target: ATXN2; (-) strand; PAM type: YTN; PAM sequence: TTT
tttagctgctacctttggag

SEQ ID NO: 75129 - DNA, 20 bp, Artificial Sequence
  Description of Artificial Sequence: Synthetic oligonucleotide
  Target: ATXN2; (-) strand; PAM type: YTN; PAM sequence: TTT
ttttagctgctacctttgga

SEQ ID NO: 75130 - DNA, 20 bp, Artificial Sequence
  Description of Artificial Sequence: Synthetic oligonucleotide
  Target: ATXN2; (-) strand; PAM type: YTN; PAM sequence: CTT
tttttagctgctacctttgg

SEQ ID NO: 75131 - DNA, 20 bp, Artificial Sequence
  Description of Artificial Sequence: Synthetic oligonucleotide
  Target: ATXN2; (-) strand; PAM type: YTN; PAM sequence: TTC
agcatcccatacaaggaaac

SEQ ID NO: 75132 - DNA, 20 bp, Artificial Sequence
  Description of Artificial Sequence: Synthetic oligonucleotide
  Target: ATXN2; (-) strand; PAM type: YTN; PAM sequence: CTT
cagcatcccatacaaggaaa

SEQ ID NO: 75133 - DNA, 20 bp, Artificial Sequence
  Description of Artificial Sequence: Synthetic oligonucleotide
  Target: ATXN2; (-) strand; PAM type: YTN; PAM sequence: TTA
agaggccttcagcatcccat

SEQ ID NO: 75134 - DNA, 20 bp, Artificial Sequence
  Description of Artificial Sequence: Synthetic oligonucleotide
  Target: ATXN2; (-) strand; PAM type: YTN; PAM sequence: CTT
aagaggccttcagcatccca

SEQ ID NO: 75135 - DNA, 20 bp, Artificial Sequence
  Description of Artificial Sequence: Synthetic oligonucleotide
  Target: ATXN2; (-) strand; PAM type: YTN; PAM sequence: TTG
tcttaagaggccttcagcat

SEQ ID NO: 75136 - DNA, 20 bp, Artificial Sequence
  Description of Artificial Sequence: Synthetic oligonucleotide
  Target: ATXN2; (-) strand; PAM type: YTN; PAM sequence: TTT
gtcttaagaggccttcagca

SEQ ID NO: 75137 - DNA, 20 bp, Artificial Sequence
  Description of Artificial Sequence: Synthetic oligonucleotide
  Target: ATXN2; (-) strand; PAM type: YTN; PAM sequence: TTT
tgtcttaagaggccttcagc

SEQ ID NO: 75138 - DNA, 20 bp, Artificial Sequence
  Description of Artificial Sequence: Synthetic oligonucleotide
  Target: ATXN2; (-) strand; PAM type: YTN; PAM sequence: TTT
ttgtcttaagaggccttcag

SEQ ID NO: 75139 - DNA, 20 bp, Artificial Sequence
  Description of Artificial Sequence: Synthetic oligonucleotide
  Target: ATXN2; (-) strand; PAM type: YTN; PAM sequence: CTT
tttgtcttaagaggccttca

SEQ ID NO: 75140 - DNA, 20 bp, Artificial Sequence
  Description of Artificial Sequence: Synthetic oligonucleotide
  Target: ATXN2; (-) strand; PAM type: YTN; PAM sequence: TTC
acaactttttgtcttaagag

SEQ ID NO: 75141 - DNA, 20 bp, Artificial Sequence
  Description of Artificial Sequence: Synthetic oligonucleotide
  Target: ATXN2; (-) strand; PAM type: YTN; PAM sequence: TTG
attcacaactttttgtctta

SEQ ID NO: 75142 - DNA, 20 bp, Artificial Sequence
  Description of Artificial Sequence: Synthetic oligonucleotide
  Target: ATXN2; (-) strand; PAM type: YTN; PAM sequence: TTT
gattcacaactttttgtctt

SEQ ID NO: 75143 - DNA, 20 bp, Artificial Sequence
  Description of Artificial Sequence: Synthetic oligonucleotide
  Target: ATXN2; (-) strand; PAM type: YTN; PAM sequence: CTT
tgattcacaactttttgtct

SEQ ID NO: 75144 - DNA, 20 bp, Artificial Sequence
  Description of Artificial Sequence: Synthetic oligonucleotide
  Target: ATXN2; (-) strand; PAM type: YTN; PAM sequence: TTG
tctttgattcacaacttttt

SEQ ID NO: 75145 - DNA, 20 bp, Artificial Sequence
  Description of Artificial Sequence: Synthetic oligonucleotide
  Target: ATXN2; (-) strand; PAM type: YTN; PAM sequence: CTT
gtctttgattcacaactttt

SEQ ID NO: 75146 - DNA, 20 bp, Artificial Sequence
  Description of Artificial Sequence: Synthetic oligonucleotide
  Target: ATXN2; (-) strand; PAM type: YTN; PAM sequence: CTC
aaatgtccttgtctttgatt

SEQ ID NO: 75147 - DNA, 20 bp, Artificial Sequence
  Description of Artificial Sequence: Synthetic oligonucleotide
  Target: ATXN2; (-) strand; PAM type: YTN; PAM sequence: TTC
tcaaatgtccttgtctttga

SEQ ID NO: 75148 - DNA, 20 bp, Artificial Sequence
  Description of Artificial Sequence: Synthetic oligonucleotide
  Target: ATXN2; (-) strand; PAM type: YTN; PAM sequence: CTT
ctcaaatgtccttgtctttg

SEQ ID NO: 75149 - DNA, 20 bp, Artificial Sequence
  Description of Artificial Sequence: Synthetic oligonucleotide
  Target: ATXN2; (-) strand; PAM type: YTN; PAM sequence: TTG
aatcttctcaaatgtccttg

SEQ ID NO: 75150 - DNA, 20 bp, Artificial Sequence
  Description of Artificial Sequence: Synthetic oligonucleotide
  Target: ATXN2; (-) strand; PAM type: YTN; PAM sequence: TTT
gaatcttctcaaatgtcctt

SEQ ID NO: 75151 - DNA, 20 bp, Artificial Sequence
  Description of Artificial Sequence: Synthetic oligonucleotide
  Target: ATXN2; (-) strand; PAM type: YTN; PAM sequence: TTT
tgaatcttctcaaatgtcct

SEQ ID NO: 75152 - DNA, 20 bp, Artificial Sequence
  Description of Artificial Sequence: Synthetic oligonucleotide
  Target: ATXN2; (-) strand; PAM type: YTN; PAM sequence: TTT
ttgaatcttctcaaatgtcc

SEQ ID NO: 75153 - DNA, 20 bp, Artificial Sequence
  Description of Artificial Sequence: Synthetic oligonucleotide
  Target: ATXN2; (-) strand; PAM type: YTN; PAM sequence: CTG
tttttgaatcttctcaaatg

SEQ ID NO: 75154 - DNA, 20 bp, Artificial Sequence
  Description of Artificial Sequence: Synthetic oligonucleotide
  Target: ATXN2; (-) strand; PAM type: YTN; PAM sequence: TTC
tgtttttgaatcttctcaaa

SEQ ID NO: 75155 - DNA, 20 bp, Artificial Sequence
  Description of Artificial Sequence: Synthetic oligonucleotide
  Target: ATXN2; (-) strand; PAM type: YTN; PAM sequence: CTG
atgaaagcacagtgttctgt

SEQ ID NO: 75156 - DNA, 20 bp, Artificial Sequence
  Description of Artificial Sequence: Synthetic oligonucleotide
  Target: ATXN2; (-) strand; PAM type: YTN; PAM sequence: TTG
atatgctgatgaaagcacag

SEQ ID NO: 75157 - DNA, 20 bp, Artificial Sequence
  Description of Artificial Sequence: Synthetic oligonucleotide
  Target: ATXN2; (-) strand; PAM type: YTN; PAM sequence: CTT
gatatgctgatgaaagcaca

SEQ ID NO: 75158 - DNA, 20 bp, Artificial Sequence
  Description of Artificial Sequence: Synthetic oligonucleotide
  Target: ATXN2; (-) strand; PAM type: YTN; PAM sequence: CTG
tcttgatatgctgatgaaag

SEQ ID NO: 75159 - DNA, 20 bp, Artificial Sequence
  Description of Artificial Sequence: Synthetic oligonucleotide
  Target: ATXN2; (-) strand; PAM type: YTN; PAM sequence: TTA
actgtcttgatatgctgatg

SEQ ID NO: 75160 - DNA, 20 bp, Artificial Sequence
  Description of Artificial Sequence: Synthetic oligonucleotide
  Target: ATXN2; (-) strand; PAM type: YTN; PAM sequence: TTT
aactgtcttgatatgctgat

SEQ ID NO: 75161 - DNA, 20 bp, Artificial Sequence
  Description of Artificial Sequence: Synthetic oligonucleotide
  Target: ATXN2; (-) strand; PAM type: YTN; PAM sequence: CTT
taactgtcttgatatgctga

SEQ ID NO: 75162 - DNA, 20 bp, Artificial Sequence
  Description of Artificial Sequence: Synthetic oligonucleotide
  Target: ATXN2; (-) strand; PAM type: YTN; PAM sequence: TTC
tttaactgtcttgatatgct

SEQ ID NO: 75163 - DNA, 20 bp, Artificial Sequence
  Description of Artificial Sequence: Synthetic oligonucleotide
  Target: ATXN2; (-) strand; PAM type: YTN; PAM sequence: CTG
ggtattctttaactgtcttg

SEQ ID NO: 75164 - DNA, 20 bp, Artificial Sequence
  Description of Artificial Sequence: Synthetic oligonucleotide
  Target: ATXN2; (-) strand; PAM type: YTN; PAM sequence: CTA
acagtactgggtattcttta

SEQ ID NO: 75165 - DNA, 20 bp, Artificial Sequence
  Description of Artificial Sequence: Synthetic oligonucleotide
  Target: ATXN2; (-) strand; PAM type: YTN; PAM sequence: TTC
agaggctaacagtactgggt

SEQ ID NO: 75166 - DNA, 20 bp, Artificial Sequence
  Description of Artificial Sequence: Synthetic oligonucleotide
  Target: ATXN2; (-) strand; PAM type: YTN; PAM sequence: TTT
cagaggctaacagtactggg

SEQ ID NO: 75167 - DNA, 20 bp, Artificial Sequence
  Description of Artificial Sequence: Synthetic oligonucleotide
  Target: ATXN2; (-) strand; PAM type: YTN; PAM sequence: TTT
tcagaggctaacagtactgg

SEQ ID NO: 75168 - DNA, 20 bp, Artificial Sequence
  Description of Artificial Sequence: Synthetic oligonucleotide
  Target: ATXN2; (-) strand; PAM type: YTN; PAM sequence: TTT
ttcagaggctaacagtactg

SEQ ID NO: 75169 - DNA, 20 bp, Artificial Sequence
  Description of Artificial Sequence: Synthetic oligonucleotide
  Target: ATXN2; (-) strand; PAM type: YTN; PAM sequence: CTT
tttcagaggctaacagtact

SEQ ID NO: 75170 - DNA, 20 bp, Artificial Sequence
  Description of Artificial Sequence: Synthetic oligonucleotide
  Target: ATXN2; (-) strand; PAM type: YTN; PAM sequence: TTG
ctttttcagaggctaacagt

SEQ ID NO: 75171 - DNA, 20 bp, Artificial Sequence
  Description of Artificial Sequence: Synthetic oligonucleotide
  Target: ATXN2; (-) strand; PAM type: YTN; PAM sequence: CTT
gctttttcagaggctaacag

SEQ ID NO: 75172 - DNA, 20 bp, Artificial Sequence
  Description of Artificial Sequence: Synthetic oligonucleotide
  Target: ATXN2; (-) strand; PAM type: YTN; PAM sequence: TTG
cttgctttttcagaggctaa

SEQ ID NO: 75173 - DNA, 20 bp, Artificial Sequence
  Description of Artificial Sequence: Synthetic oligonucleotide
  Target: ATXN2; (-) strand; PAM type: YTN; PAM sequence: TTT
gcttgctttttcagaggcta

SEQ ID NO: 75174 - DNA, 20 bp, Artificial Sequence
  Description of Artificial Sequence: Synthetic oligonucleotide
  Target: ATXN2; (-) strand; PAM type: YTN; PAM sequence: CTT
tgcttgctttttcagaggct

SEQ ID NO: 75175 - DNA, 20 bp, Artificial Sequence
  Description of Artificial Sequence: Synthetic oligonucleotide
  Target: ATXN2; (-) strand; PAM type: YTN; PAM sequence: CTC
tttgcttgctttttcagagg

SEQ ID NO: 75176 - DNA, 20 bp, Artificial Sequence
  Description of Artificial Sequence: Synthetic oligonucleotide
  Target: ATXN2; (-) strand; PAM type: YTN; PAM sequence: TTC
tctttgcttgctttttcaga

SEQ ID NO: 75177 - DNA, 20 bp, Artificial Sequence
  Description of Artificial Sequence: Synthetic oligonucleotide
  Target: ATXN2; (-) strand; PAM type: YTN; PAM sequence: TTT
ctctttgcttgctttttcag

SEQ ID NO: 75178 - DNA, 20 bp, Artificial Sequence
  Description of Artificial Sequence: Synthetic oligonucleotide
  Target: ATXN2; (-) strand; PAM type: YTN; PAM sequence: CTT
tctctttgcttgctttttca

SEQ ID NO: 75179 - DNA, 20 bp, Artificial Sequence
  Description of Artificial Sequence: Synthetic oligonucleotide
  Target: ATXN2; (-) strand; PAM type: YTN; PAM sequence: TTA
ggagtctttctctttgcttg

SEQ ID NO: 75180 - DNA, 20 bp, Artificial Sequence
  Description of Artificial Sequence: Synthetic oligonucleotide
  Target: ATXN2; (-) strand; PAM type: YTN; PAM sequence: CTT
aggagtctttctctttgctt

SEQ ID NO: 75181 - DNA, 20 bp, Artificial Sequence
  Description of Artificial Sequence: Synthetic oligonucleotide
  Target: ATXN2; (-) strand; PAM type: YTN; PAM sequence: TTA
gacttaggagtctttctctt

SEQ ID NO: 75182 - DNA, 20 bp, Artificial Sequence
  Description of Artificial Sequence: Synthetic oligonucleotide
  Target: ATXN2; (-) strand; PAM type: YTN; PAM sequence: CTT
agacttaggagtctttctct

SEQ ID NO: 75183 - DNA, 20 bp, Artificial Sequence
  Description of Artificial Sequence: Synthetic oligonucleotide
  Target: ATXN2; (-) strand; PAM type: YTN; PAM sequence: CTC
ttagacttaggagtctttct

SEQ ID NO: 75184 - DNA, 20 bp, Artificial Sequence
  Description of Artificial Sequence: Synthetic oligonucleotide
  Target: ATXN2; (-) strand; PAM type: YTN; PAM sequence: TTC
tcttagacttaggagtcttt

SEQ ID NO: 75185 - DNA, 20 bp, Artificial Sequence
  Description of Artificial Sequence: Synthetic oligonucleotide
  Target: ATXN2; (-) strand; PAM type: YTN; PAM sequence: TTT
ctcttagacttaggagtctt

SEQ ID NO: 75186 - DNA, 20 bp, Artificial Sequence
  Description of Artificial Sequence: Synthetic oligonucleotide
  Target: ATXN2; (-) strand; PAM type: YTN; PAM sequence: CTT
tctcttagacttaggagtct

SEQ ID NO: 75187 - DNA, 20 bp, Artificial Sequence
  Description of Artificial Sequence: Synthetic oligonucleotide
  Target: ATXN2; (-) strand; PAM type: YTN; PAM sequence: TTC
tttctcttagacttaggagt

SEQ ID NO: 75188 - DNA, 20 bp, Artificial Sequence
  Description of Artificial Sequence: Synthetic oligonucleotide
  Target: ATXN2; (-) strand; PAM type: YTN; PAM sequence: TTG
gaaataataatataccagga

SEQ ID NO: 75189 - DNA, 20 bp, Artificial Sequence
  Description of Artificial Sequence: Synthetic oligonucleotide
  Target: ATXN2; (-) strand; PAM type: YTN; PAM sequence: CTT
ggaaataataatataccagg

SEQ ID NO: 75190 - DNA, 20 bp, Artificial Sequence
  Description of Artificial Sequence: Synthetic oligonucleotide
  Target: ATXN2; (-) strand; PAM type: YTN; PAM sequence: TTA
cttggaaataataatatacc

SEQ ID NO: 75191 - DNA, 20 bp, Artificial Sequence
  Description of Artificial Sequence: Synthetic oligonucleotide
  Target: ATXN2; (-) strand; PAM type: YTN; PAM sequence: CTG
ttacttggaaataataatat

SEQ ID NO: 75192 - DNA, 20 bp, Artificial Sequence
  Description of Artificial Sequence: Synthetic oligonucleotide
  Target: ATXN2; (-) strand; PAM type: YTN; PAM sequence: CTA
cactgttacttggaaataat

SEQ ID NO: 75193 - DNA, 20 bp, Artificial Sequence
  Description of Artificial Sequence: Synthetic oligonucleotide
  Target: ATXN2; (-) strand; PAM type: YTN; PAM sequence: TTC
tacactgttacttggaaata

SEQ ID NO: 75194 - DNA, 20 bp, Artificial Sequence
  Description of Artificial Sequence: Synthetic oligonucleotide
  Target: ATXN2; (-) strand; PAM type: YTN; PAM sequence: CTT
ctacactgttacttggaaat

SEQ ID NO: 75195 - DNA, 20 bp, Artificial Sequence
  Description of Artificial Sequence: Synthetic oligonucleotide
  Target: ATXN2; (-) strand; PAM type: YTN; PAM sequence: TTC
ttctacactgttacttggaa

SEQ ID NO: 75196 - DNA, 20 bp, Artificial Sequence
  Description of Artificial Sequence: Synthetic oligonucleotide
  Target: ATXN2; (-) strand; PAM type: YTN; PAM sequence: CTG
attcttctacactgttactt

SEQ ID NO: 75197 - DNA, 20 bp, Artificial Sequence
  Description of Artificial Sequence: Synthetic oligonucleotide
  Target: ATXN2; (-) strand; PAM type: YTN; PAM sequence: TTG
ggctgattcttctacactgt

SEQ ID NO: 75198 - DNA, 20 bp, Artificial Sequence
  Description of Artificial Sequence: Synthetic oligonucleotide
  Target: ATXN2; (-) strand; PAM type: YTN; PAM sequence: TTG
ttgggctgattcttctacac

SEQ ID NO: 75199 - DNA, 20 bp, Artificial Sequence
  Description of Artificial Sequence: Synthetic oligonucleotide
  Target: ATXN2; (-) strand; PAM type: YTN; PAM sequence: TTA
ttgttgggctgattcttcta

SEQ ID NO: 75200 - DNA, 20 bp, Artificial Sequence
  Description of Artificial Sequence: Synthetic oligonucleotide
  Target: ATXN2; (-) strand; PAM type: YTN; PAM sequence: TTT
attgttgggctgattcttct

SEQ ID NO: 75201 - DNA, 20 bp, Artificial Sequence
  Description of Artificial Sequence: Synthetic oligonucleotide
  Target: ATXN2; (-) strand; PAM type: YTN; PAM sequence: TTT
tattgttgggctgattcttc

SEQ ID NO: 75202 - DNA, 20 bp, Artificial Sequence
  Description of Artificial Sequence: Synthetic oligonucleotide
  Target: ATXN2; (-) strand; PAM type: YTN; PAM sequence: TTT
ttattgttgggctgattctt

SEQ ID NO: 75203 - DNA, 20 bp, Artificial Sequence
  Description of Artificial Sequence: Synthetic oligonucleotide
  Target: ATXN2; (-) strand; PAM type: YTN; PAM sequence: CTG
tttttattgttgggctgatt

SEQ ID NO: 75204 - DNA, 20 bp, Artificial Sequence
  Description of Artificial Sequence: Synthetic oligonucleotide
  Target: ATXN2; (-) strand; PAM type: YTN; PAM sequence: CTA
taccaaaagctgtttttatt

SEQ ID NO: 75205 - DNA, 20 bp, Artificial Sequence
  Description of Artificial Sequence: Synthetic oligonucleotide
  Target: ATXN2; (-) strand; PAM type: YTN; PAM sequence: TTC
aaatctataccaaaagctgt

SEQ ID NO: 75206 - DNA, 20 bp, Artificial Sequence
  Description of Artificial Sequence: Synthetic oligonucleotide
  Target: ATXN2; (-) strand; PAM type: YTN; PAM sequence: CTA
ttcaaatctataccaaaagc

SEQ ID NO: 75207 - DNA, 20 bp, Artificial Sequence
  Description of Artificial Sequence: Synthetic oligonucleotide
  Target: ATXN2; (-) strand; PAM type: YTN; PAM sequence: TTC
actattcaaatctataccaa

SEQ ID NO: 75208 - DNA, 20 bp, Artificial Sequence
  Description of Artificial Sequence: Synthetic oligonucleotide
  Target: ATXN2; (-) strand; PAM type: YTN; PAM sequence: TTT
cactattcaaatctatacca

SEQ ID NO: 75209 - DNA, 20 bp, Artificial Sequence
  Description of Artificial Sequence: Synthetic oligonucleotide
  Target: ATXN2; (-) strand; PAM type: YTN; PAM sequence: TTT
tcactattcaaatctatacc

SEQ ID NO: 75210 - DNA, 20 bp, Artificial Sequence
  Description of Artificial Sequence: Synthetic oligonucleotide
  Target: ATXN2; (-) strand; PAM type: YTN; PAM sequence: TTG
attttcactattcaaatcta

SEQ ID NO: 75211 - DNA, 20 bp, Artificial Sequence
  Description of Artificial Sequence: Synthetic oligonucleotide
  Target: ATXN2; (-) strand; PAM type: YTN; PAM sequence: TTT
gattttcactattcaaatct

SEQ ID NO: 75212 - DNA, 20 bp, Artificial Sequence
  Description of Artificial Sequence: Synthetic oligonucleotide
  Target: ATXN2; (-) strand; PAM type: YTN; PAM sequence: TTC
agtacaatttgattttcact

SEQ ID NO: 75213 - DNA, 20 bp, Artificial Sequence
  Description of Artificial Sequence: Synthetic oligonucleotide
  Target: ATXN2; (-) strand; PAM type: YTN; PAM sequence: TTG
tagttcagtacaatttgatt

SEQ ID NO: 75214 - DNA, 20 bp, Artificial Sequence
  Description of Artificial Sequence: Synthetic oligonucleotide
  Target: ATXN2; (-) strand; PAM type: YTN; PAM sequence: TTG
taaattgtagttcagtacaa

SEQ ID NO: 75215 - DNA, 20 bp, Artificial Sequence
  Description of Artificial Sequence: Synthetic oligonucleotide
  Target: ATXN2; (-) strand; PAM type: YTN; PAM sequence: CTG
ttgtaaattgtagttcagta

SEQ ID NO: 75216 - DNA, 20 bp, Artificial Sequence
  Description of Artificial Sequence: Synthetic oligonucleotide
  Target: ATXN2; (-) strand; PAM type: YTN; PAM sequence: TTC
tgttgtaaattgtagttcag

SEQ ID NO: 75217 - DNA, 20 bp, Artificial Sequence
  Description of Artificial Sequence: Synthetic oligonucleotide
  Target: ATXN2; (-) strand; PAM type: YTN; PAM sequence: CTG
tagtgaaatacgtaattctg

SEQ ID NO: 75218 - DNA, 20 bp, Artificial Sequence
  Description of Artificial Sequence: Synthetic oligonucleotide
  Target: ATXN2; (-) strand; PAM type: YTN; PAM sequence: TTC
tgtagtgaaatacgtaattc

SEQ ID NO: 75219 - DNA, 20 bp, Artificial Sequence
  Description of Artificial Sequence: Synthetic oligonucleotide
  Target: ATXN2; (-) strand; PAM type: YTN; PAM sequence: TTG
tatatgccaaattctgtagt

SEQ ID NO: 75220 - DNA, 20 bp, Artificial Sequence
  Description of Artificial Sequence: Synthetic oligonucleotide
  Target: ATXN2; (-) strand; PAM type: YTN; PAM sequence: TTT
gtatatgccaaattctgtag

SEQ ID NO: 75221 - DNA, 20 bp, Artificial Sequence
  Description of Artificial Sequence: Synthetic oligonucleotide
  Target: ATXN2; (-) strand; PAM type: YTN; PAM sequence: TTA
tttgtatatgccaaattctg

SEQ ID NO: 75222 - DNA, 20 bp, Artificial Sequence
  Description of Artificial Sequence: Synthetic oligonucleotide
  Target: ATXN2; (-) strand; PAM type: YTN; PAM sequence: TTT
atttgtatatgccaaattct

SEQ ID NO: 75223 - DNA, 20 bp, Artificial Sequence
  Description of Artificial Sequence: Synthetic oligonucleotide
  Target: ATXN2; (-) strand; PAM type: YTN; PAM sequence: TTA
tttatttgtatatgccaaat

SEQ ID NO: 75224 - DNA, 20 bp, Artificial Sequence
  Description of Artificial Sequence: Synthetic oligonucleotide
  Target: ATXN2; (-) strand; PAM type: YTN; PAM sequence: TTT
atttatttgtatatgccaaa

SEQ ID NO: 75225 - DNA, 20 bp, Artificial Sequence
  Description of Artificial Sequence: Synthetic oligonucleotide
  Target: ATXN2; (-) strand; PAM type: YTN; PAM sequence: TTT
tatttatttgtatatgccaa

SEQ ID NO: 75226 - DNA, 20 bp, Artificial Sequence
  Description of Artificial Sequence: Synthetic oligonucleotide
  Target: ATXN2; (-) strand; PAM type: YTN; PAM sequence: CTT
ttatttatttgtatatgcca

SEQ ID NO: 75227 - DNA, 20 bp, Artificial Sequence
  Description of Artificial Sequence: Synthetic oligonucleotide
  Target: ATXN2; (-) strand; PAM type: YTN; PAM sequence: TTC
ttttatttatttgtatatgc

SEQ ID NO: 75228 - DNA, 20 bp, Artificial Sequence
  Description of Artificial Sequence: Synthetic oligonucleotide
  Target: ATXN2; (-) strand; PAM type: YTN; PAM sequence: CTA
aaattcttttatttatttgt

SEQ ID NO: 75229 - DNA, 20 bp, Artificial Sequence
  Description of Artificial Sequence: Synthetic oligonucleotide
  Target: ATXN2; (-) strand; PAM type: YTN; PAM sequence: TTC
taaaattcttttatttattt

SEQ ID NO: 75230 - DNA, 20 bp, Artificial Sequence
  Description of Artificial Sequence: Synthetic oligonucleotide
  Target: ATXN2; (-) strand; PAM type: YTN; PAM sequence: CTG
cacccagccggttctaaaat

SEQ ID NO: 75231 - DNA, 20 bp, Artificial Sequence
  Description of Artificial Sequence: Synthetic oligonucleotide
  Target: ATXN2; (-) strand; PAM type: YTN; PAM sequence: TTA
caggcatgagccactgcacc

SEQ ID NO: 75232 - DNA, 20 bp, Artificial Sequence
  Description of Artificial Sequence: Synthetic oligonucleotide
  Target: ATXN2; (-) strand; PAM type: YTN; PAM sequence: CTG
gaattacaggcatgagccac

SEQ ID NO: 75233 - DNA, 20 bp, Artificial Sequence
  Description of Artificial Sequence: Synthetic oligonucleotide
  Target: ATXN2; (-) strand; PAM type: YTN; PAM sequence: CTC
ccaaagtgctggaattacag

SEQ ID NO: 75234 - DNA, 20 bp, Artificial Sequence
  Description of Artificial Sequence: Synthetic oligonucleotide
  Target: ATXN2; (-) strand; PAM type: YTN; PAM sequence: CTC
ggcctcccaaagtgctggaa

SEQ ID NO: 75235 - DNA, 20 bp, Artificial Sequence
  Description of Artificial Sequence: Synthetic oligonucleotide
  Target: ATXN2; (-) strand; PAM type: YTN; PAM sequence: CTC
gtgatccgcccgcctcggcc

SEQ ID NO: 75236 - DNA, 20 bp, Artificial Sequence
  Description of Artificial Sequence: Synthetic oligonucleotide
  Target: ATXN2; (-) strand; PAM type: YTN; PAM sequence: TTG
acctcgtgatccgcccgcct

SEQ ID NO: 75237 - DNA, 20 bp, Artificial Sequence
  Description of Artificial Sequence: Synthetic oligonucleotide
  Target: ATXN2; (-) strand; PAM type: YTN; PAM sequence: TTT
gacctcgtgatccgcccgcc

SEQ ID NO: 75238 - DNA, 20 bp, Artificial Sequence
  Description of Artificial Sequence: Synthetic oligonucleotide
  Target: ATXN2; (-) strand; PAM type: YTN; PAM sequence: TTG
tttgacctcgtgatccgccc

SEQ ID NO: 75239 - DNA, 20 bp, Artificial Sequence
  Description of Artificial Sequence: Synthetic oligonucleotide
  Target: ATXN2; (-) strand; PAM type: YTN; PAM sequence: CTC
gattgtttgacctcgtgatc

SEQ ID NO: 75240 - DNA, 20 bp, Artificial Sequence
  Description of Artificial Sequence: Synthetic oligonucleotide
  Target: ATXN2; (-) strand; PAM type: YTN; PAM sequence: TTG
gccaggatggtctcgattgt

SEQ ID NO: 75241 - DNA, 20 bp, Artificial Sequence
  Description of Artificial Sequence: Synthetic oligonucleotide
  Target: ATXN2; (-) strand; PAM type: YTN; PAM sequence: TTC
accatgttggccaggatggt

SEQ ID NO: 75242 - DNA, 20 bp, Artificial Sequence
  Description of Artificial Sequence: Synthetic oligonucleotide
  Target: ATXN2; (-) strand; PAM type: YTN; PAM sequence: TTT
caccatgttggccaggatgg

SEQ ID NO: 75243 - DNA, 20 bp, Artificial Sequence
  Description of Artificial Sequence: Synthetic oligonucleotide
  Target: ATXN2; (-) strand; PAM type: YTN; PAM sequence: TTG
tagagacagggtttcaccat

SEQ ID NO: 75244 - DNA, 20 bp, Artificial Sequence
  Description of Artificial Sequence: Synthetic oligonucleotide
  Target: ATXN2; (-) strand; PAM type: YTN; PAM sequence: TTT
gtagagacagggtttcacca

SEQ ID NO: 75245 - DNA, 20 bp, Artificial Sequence
  Description of Artificial Sequence: Synthetic oligonucleotide
  Target: ATXN2; (-) strand; PAM type: YTN; PAM sequence: TTT
tgtagagacagggtttcacc

SEQ ID NO: 75246 - DNA, 20 bp, Artificial Sequence
  Description of Artificial Sequence: Synthetic oligonucleotide
  Target: ATXN2; (-) strand; PAM type: YTN; PAM sequence: TTT
ttgtagagacagggtttcac

SEQ ID NO: 75247 - DNA, 20 bp, Artificial Sequence
  Description of Artificial Sequence: Synthetic oligonucleotide
  Target: ATXN2; (-) strand; PAM type: YTN; PAM sequence: TTT
tttgtagagacagggtttca

SEQ ID NO: 75248 - DNA, 20 bp, Artificial Sequence
  Description of Artificial Sequence: Synthetic oligonucleotide
  Target: ATXN2; (-) strand; PAM type: YTN; PAM sequence: TTG
tattttttgtagagacaggg

SEQ ID NO: 75249 - DNA, 20 bp, Artificial Sequence
  Description of Artificial Sequence: Synthetic oligonucleotide
  Target: ATXN2; (-) strand; PAM type: YTN; PAM sequence: TTT
gtattttttgtagagacagg

SEQ ID NO: 75250 - DNA, 20 bp, Artificial Sequence
  Description of Artificial Sequence: Synthetic oligonucleotide
  Target: ATXN2; (-) strand; PAM type: YTN; PAM sequence: TTT
tgtattttttgtagagacag

SEQ ID NO: 75251 - DNA, 20 bp, Artificial Sequence
  Description of Artificial Sequence: Synthetic oligonucleotide
  Target: ATXN2; (-) strand; PAM type: YTN; PAM sequence: TTT
ttgtattttttgtagagaca

SEQ ID NO: 75252 - DNA, 20 bp, Artificial Sequence
  Description of Artificial Sequence: Synthetic oligonucleotide
  Target: ATXN2; (-) strand; PAM type: YTN; PAM sequence: CTA
atttttgtattttttgtaga

SEQ ID NO: 75253 - DNA, 20 bp, Artificial Sequence
  Description of Artificial Sequence: Synthetic oligonucleotide
  Target: ATXN2; (-) strand; PAM type: YTN; PAM sequence: CTA
caggcgtgtgccaccacacc

SEQ ID NO: 75254 - DNA, 20 bp, Artificial Sequence
  Description of Artificial Sequence: Synthetic oligonucleotide
  Target: ATXN2; (-) strand; PAM type: YTN; PAM sequence: CTG
ggactacaggcgtgtgccac

SEQ ID NO: 75255 - DNA, 20 bp, Artificial Sequence
  Description of Artificial Sequence: Synthetic oligonucleotide
  Target: ATXN2; (-) strand; PAM type: YTN; PAM sequence: CTG
agtagctgggactacaggcg

SEQ ID NO: 75256 - DNA, 20 bp, Artificial Sequence
  Description of Artificial Sequence: Synthetic oligonucleotide
  Target: ATXN2; (-) strand; PAM type: YTN; PAM sequence: CTC
ctgagtagctgggactacag

SEQ ID NO: 75257 - DNA, 20 bp, Artificial Sequence
  Description of Artificial Sequence: Synthetic oligonucleotide
  Target: ATXN2; (-) strand; PAM type: YTN; PAM sequence: CTC
agcctcctgagtagctggga

SEQ ID NO: 75258 - DNA, 20 bp, Artificial Sequence
  Description of Artificial Sequence: Synthetic oligonucleotide
  Target: ATXN2; (-) strand; PAM type: YTN; PAM sequence: CTG
cctcagcctcctgagtagct

SEQ ID NO: 75259 - DNA, 20 bp, Artificial Sequence
  Description of Artificial Sequence: Synthetic oligonucleotide
  Target: ATXN2; (-) strand; PAM type: YTN; PAM sequence: CTC
ctgcctcagcctcctgagta

SEQ ID NO: 75260 - DNA, 20 bp, Artificial Sequence
  Description of Artificial Sequence: Synthetic oligonucleotide
  Target: ATXN2; (-) strand; PAM type: YTN; PAM sequence: TTC
tcctgcctcagcctcctgag

SEQ ID NO: 75261 - DNA, 20 bp, Artificial Sequence
  Description of Artificial Sequence: Synthetic oligonucleotide
  Target: ATXN2; (-) strand; PAM type: YTN; PAM sequence: TTC
aagcgattctcctgcctcag

SEQ ID NO: 75262 - DNA, 20 bp, Artificial Sequence
  Description of Artificial Sequence: Synthetic oligonucleotide
  Target: ATXN2; (-) strand; PAM type: YTN; PAM sequence: CTC
ccaggttcaagcgattctcc

SEQ ID NO: 75263 - DNA, 20 bp, Artificial Sequence
  Description of Artificial Sequence: Synthetic oligonucleotide
  Target: ATXN2; (-) strand; PAM type: YTN; PAM sequence: CTG
cctcccaggttcaagcgatt

SEQ ID NO: 75264 - DNA, 20 bp, Artificial Sequence
  Description of Artificial Sequence: Synthetic oligonucleotide
  Target: ATXN2; (-) strand; PAM type: YTN; PAM sequence: CTC
tgcctcccaggttcaagcga

SEQ ID NO: 75265 - DNA, 20 bp, Artificial Sequence
  Description of Artificial Sequence: Synthetic oligonucleotide
  Target: ATXN2; (-) strand; PAM type: YTN; PAM sequence: CTG
cagcctctgcctcccaggtt

SEQ ID NO: 75266 - DNA, 20 bp, Artificial Sequence
  Description of Artificial Sequence: Synthetic oligonucleotide
  Target: ATXN2; (-) strand; PAM type: YTN; PAM sequence: CTC
actgcagcctctgcctccca

SEQ ID NO: 75267 - DNA, 20 bp, Artificial Sequence
  Description of Artificial Sequence: Synthetic oligonucleotide
  Target: ATXN2; (-) strand; PAM type: YTN; PAM sequence: CTC
ggctcactgcagcctctgcc

SEQ ID NO: 75268 - DNA, 20 bp, Artificial Sequence
  Description of Artificial Sequence: Synthetic oligonucleotide
  Target: ATXN2; (-) strand; PAM type: YTN; PAM sequence: CTG
ggtggagtgcagtggcacga

SEQ ID NO: 75269 - DNA, 20 bp, Artificial Sequence
  Description of Artificial Sequence: Synthetic oligonucleotide
  Target: ATXN2; (-) strand; PAM type: YTN; PAM sequence: CTG
tcccctgggtggagtgcagt

SEQ ID NO: 75270 - DNA, 20 bp, Artificial Sequence
  Description of Artificial Sequence: Synthetic oligonucleotide
  Target: ATXN2; (-) strand; PAM type: YTN; PAM sequence: TTC
tgtcccctgggtggagtgca

SEQ ID NO: 75271 - DNA, 20 bp, Artificial Sequence
  Description of Artificial Sequence: Synthetic oligonucleotide
  Target: ATXN2; (-) strand; PAM type: YTN; PAM sequence: TTG
ttctgtcccctgggtggagt

SEQ ID NO: 75272 - DNA, 20 bp, Artificial Sequence
  Description of Artificial Sequence: Synthetic oligonucleotide
  Target: ATXN2; (-) strand; PAM type: YTN; PAM sequence: CTT
gttctgtcccctgggtggag

SEQ ID NO: 75273 - DNA, 20 bp, Artificial Sequence
  Description of Artificial Sequence: Synthetic oligonucleotide
  Target: ATXN2; (-) strand; PAM type: YTN; PAM sequence: TTG
agacggagtcttgttctgtc

SEQ ID NO: 75274 - DNA, 20 bp, Artificial Sequence
  Description of Artificial Sequence: Synthetic oligonucleotide
  Target: ATXN2; (-) strand; PAM type: YTN; PAM sequence: TTT
gagacggagtcttgttctgt

SEQ ID NO: 75275 - DNA, 20 bp, Artificial Sequence
  Description of Artificial Sequence: Synthetic oligonucleotide
  Target: ATXN2; (-) strand; PAM type: YTN; PAM sequence: TTT
tgagacggagtcttgttctg

SEQ ID NO: 75276 - DNA, 20 bp, Artificial Sequence
  Description of Artificial Sequence: Synthetic oligonucleotide
  Target: ATXN2; (-) strand; PAM type: YTN; PAM sequence: TTT
ttgagacggagtcttgttct

SEQ ID NO: 75277 - DNA, 20 bp, Artificial Sequence
  Description of Artificial Sequence: Synthetic oligonucleotide
  Target: ATXN2; (-) strand; PAM type: YTN; PAM sequence: TTT
tttgagacggagtcttgttc

SEQ ID NO: 75278 - DNA, 20 bp, Artificial Sequence
  Description of Artificial Sequence: Synthetic oligonucleotide
  Target: ATXN2; (-) strand; PAM type: YTN; PAM sequence: TTT
ttttgagacggagtcttgtt

SEQ ID NO: 75279 - DNA, 20 bp, Artificial Sequence
  Description of Artificial Sequence: Synthetic oligonucleotide
  Target: ATXN2; (-) strand; PAM type: YTN; PAM sequence: TTT
tttttgagacggagtcttgt

SEQ ID NO: 75280 - DNA, 20 bp, Artificial Sequence
  Description of Artificial Sequence: Synthetic oligonucleotide
  Target: ATXN2; (-) strand; PAM type: YTN; PAM sequence: TTT
ttttttgagacggagtcttg

SEQ ID NO: 75281 - DNA, 20 bp, Artificial Sequence
  Description of Artificial Sequence: Synthetic oligonucleotide
  Target: ATXN2; (-) strand; PAM type: YTN; PAM sequence: TTT
tttttttgagacggagtctt

SEQ ID NO: 75282 - DNA, 20 bp, Artificial Sequence
  Description of Artificial Sequence: Synthetic oligonucleotide
  Target: ATXN2; (-) strand; PAM type: YTN; PAM sequence: TTT
ttttttttgagacggagtct

SEQ ID NO: 75283 - DNA, 20 bp, Artificial Sequence
  Description of Artificial Sequence: Synthetic oligonucleotide
  Target: ATXN2; (-) strand; PAM type: YTN; PAM sequence: TTT
tttttttttgagacggagtc

SEQ ID NO: 75284 - DNA, 20 bp, Artificial Sequence
  Description of Artificial Sequence: Synthetic oligonucleotide
  Target: ATXN2; (-) strand; PAM type: YTN; PAM sequence: TTT
ttttttttttgagacggagt

SEQ ID NO: 75285 - DNA, 20 bp, Artificial Sequence
  Description of Artificial Sequence: Synthetic oligonucleotide
  Target: ATXN2; (-) strand; PAM type: YTN; PAM sequence: TTT
tttttttttttgagacggag

SEQ ID NO: 75286 - DNA, 20 bp, Artificial Sequence
  Description of Artificial Sequence: Synthetic oligonucleotide
  Target: ATXN2; (-) strand; PAM type: YTN; PAM sequence: TTT
ttttttttttttgagacgga

SEQ ID NO: 75287 - DNA, 20 bp, Artificial Sequence
  Description of Artificial Sequence: Synthetic oligonucleotide
  Target: ATXN2; (-) strand; PAM type: YTN; PAM sequence: TTT
tttttttttttttgagacgg

SEQ ID NO: 75288 - DNA, 20 bp, Artificial Sequence
  Description of Artificial Sequence: Synthetic oligonucleotide
  Target: ATXN2; (-) strand; PAM type: YTN; PAM sequence: TTT
ttttttttttttttgagacg

SEQ ID NO: 75289 - DNA, 20 bp, Artificial Sequence
  Description of Artificial Sequence: Synthetic oligonucleotide
  Target: ATXN2; (-) strand; PAM type: YTN; PAM sequence: CTT
tttttttttttttttgagac

SEQ ID NO: 75290 - DNA, 20 bp, Artificial Sequence
  Description of Artificial Sequence: Synthetic oligonucleotide
  Target: ATXN2; (-) strand; PAM type: YTN; PAM sequence: TTC
tttttttttttttttttgag

SEQ ID NO: 75291 - DNA, 20 bp, Artificial Sequence
  Description of Artificial Sequence: Synthetic oligonucleotide
  Target: ATXN2; (-) strand; PAM type: YTN; PAM sequence: CTC
aaattctttttttttttttt

SEQ ID NO: 75292 - DNA, 20 bp, Artificial Sequence
  Description of Artificial Sequence: Synthetic oligonucleotide
  Target: ATXN2; (-) strand; PAM type: YTN; PAM sequence: TTC
tcaaattctttttttttttt

SEQ ID NO: 75293 - DNA, 20 bp, Artificial Sequence
  Description of Artificial Sequence: Synthetic oligonucleotide
  Target: ATXN2; (-) strand; PAM type: YTN; PAM sequence: TTG
gttctcaaattctttttttt

SEQ ID NO: 75294 - DNA, 20 bp, Artificial Sequence
  Description of Artificial Sequence: Synthetic oligonucleotide
  Target: ATXN2; (-) strand; PAM type: YTN; PAM sequence: CTT
ggttctcaaattcttttttt

SEQ ID NO: 75295 - DNA, 20 bp, Artificial Sequence
  Description of Artificial Sequence: Synthetic oligonucleotide
  Target: ATXN2; (-) strand; PAM type: YTN; PAM sequence: CTG
aacttggttctcaaattctt

SEQ ID NO: 75296 - DNA, 20 bp, Artificial Sequence
  Description of Artificial Sequence: Synthetic oligonucleotide
  Target: ATXN2; (-) strand; PAM type: YTN; PAM sequence: CTG
ggcaatcctgaacttggttc

SEQ ID NO: 75297 - DNA, 20 bp, Artificial Sequence
  Description of Artificial Sequence: Synthetic oligonucleotide
  Target: ATXN2; (-) strand; PAM type: YTN; PAM sequence: TTC
tgggcaatcctgaacttggt

SEQ ID NO: 75298 - DNA, 20 bp, Artificial Sequence
  Description of Artificial Sequence: Synthetic oligonucleotide
  Target: ATXN2; (-) strand; PAM type: YTN; PAM sequence: CTT
ctgggcaatcctgaacttgg

SEQ ID NO: 75299 - DNA, 20 bp, Artificial Sequence
  Description of Artificial Sequence: Synthetic oligonucleotide
  Target: ATXN2; (-) strand; PAM type: YTN; PAM sequence: TTG
caaggcacttctgggcaatc

SEQ ID NO: 75300 - DNA, 20 bp, Artificial Sequence
  Description of Artificial Sequence: Synthetic oligonucleotide
  Target: ATXN2; (-) strand; PAM type: YTN; PAM sequence: TTC
agtaacacgttgcaaggcac

SEQ ID NO: 75301 - DNA, 20 bp, Artificial Sequence
  Description of Artificial Sequence: Synthetic oligonucleotide
  Target: ATXN2; (-) strand; PAM type: YTN; PAM sequence: TTG
agtgttcagtaacacgttgc

SEQ ID NO: 75302 - DNA, 20 bp, Artificial Sequence
  Description of Artificial Sequence: Synthetic oligonucleotide
  Target: ATXN2; (-) strand; PAM type: YTN; PAM sequence: TTA
ttgagtgttcagtaacacgt

SEQ ID NO: 75303 - DNA, 20 bp, Artificial Sequence
  Description of Artificial Sequence: Synthetic oligonucleotide
  Target: ATXN2; (-) strand; PAM type: YTN; PAM sequence: TTG
caaggcattattgagtgttc

SEQ ID NO: 75304 - DNA, 20 bp, Artificial Sequence
  Description of Artificial Sequence: Synthetic oligonucleotide
  Target: ATXN2; (-) strand; PAM type: YTN; PAM sequence: TTT
gcaaggcattattgagtgtt

SEQ ID NO: 75305 - DNA, 20 bp, Artificial Sequence
  Description of Artificial Sequence: Synthetic oligonucleotide
  Target: ATXN2; (-) strand; PAM type: YTN; PAM sequence: CTC
atttgcaaggcattattgag

SEQ ID NO: 75306 - DNA, 20 bp, Artificial Sequence
  Description of Artificial Sequence: Synthetic oligonucleotide
  Target: ATXN2; (-) strand; PAM type: YTN; PAM sequence: TTA
ctcatttgcaaggcattatt

SEQ ID NO: 75307 - DNA, 20 bp, Artificial Sequence
  Description of Artificial Sequence: Synthetic oligonucleotide
  Target: ATXN2; (-) strand; PAM type: YTN; PAM sequence: CTG
ttactcatttgcaaggcatt

SEQ ID NO: 75308 - DNA, 20 bp, Artificial Sequence
  Description of Artificial Sequence: Synthetic oligonucleotide
  Target: ATXN2; (-) strand; PAM type: YTN; PAM sequence: TTC
ctgttactcatttgcaaggc

SEQ ID NO: 75309 - DNA, 20 bp, Artificial Sequence
  Description of Artificial Sequence: Synthetic oligonucleotide
  Target: ATXN2; (-) strand; PAM type: YTN; PAM sequence: TTG
atgaacaaagtgggaattcc

SEQ ID NO: 75310 - DNA, 20 bp, Artificial Sequence
  Description of Artificial Sequence: Synthetic oligonucleotide
  Target: ATXN2; (-) strand; PAM type: YTN; PAM sequence: TTA
agtgtccattgatgaacaaa

SEQ ID NO: 75311 - DNA, 20 bp, Artificial Sequence
  Description of Artificial Sequence: Synthetic oligonucleotide
  Target: ATXN2; (-) strand; PAM type: YTN; PAM sequence: TTT
aagtgtccattgatgaacaa

SEQ ID NO: 75312 - DNA, 20 bp, Artificial Sequence
  Description of Artificial Sequence: Synthetic oligonucleotide
  Target: ATXN2; (-) strand; PAM type: YTN; PAM sequence: TTT
taagtgtccattgatgaaca

SEQ ID NO: 75313 - DNA, 20 bp, Artificial Sequence
  Description of Artificial Sequence: Synthetic oligonucleotide
  Target: ATXN2; (-) strand; PAM type: YTN; PAM sequence: TTT
ttaagtgtccattgatgaac

SEQ ID NO: 75314 - DNA, 20 bp, Artificial Sequence
  Description of Artificial Sequence: Synthetic oligonucleotide
  Target: ATXN2; (-) strand; PAM type: YTN; PAM sequence: CTT
tttaagtgtccattgatgaa

SEQ ID NO: 75315 - DNA, 20 bp, Artificial Sequence
  Description of Artificial Sequence: Synthetic oligonucleotide
  Target: ATXN2; (-) strand; PAM type: YTN; PAM sequence: CTC
tttttaagtgtccattgatg

SEQ ID NO: 75316 - DNA, 20 bp, Artificial Sequence
  Description of Artificial Sequence: Synthetic oligonucleotide
  Target: ATXN2; (-) strand; PAM type: YTN; PAM sequence: TTA
gtctctttttaagtgtccat

SEQ ID NO: 75317 - DNA, 20 bp, Artificial Sequence
  Description of Artificial Sequence: Synthetic oligonucleotide
  Target: ATXN2; (-) strand; PAM type: YTN; PAM sequence: TTT
agtctctttttaagtgtcca

SEQ ID NO: 75318 - DNA, 20 bp, Artificial Sequence
  Description of Artificial Sequence: Synthetic oligonucleotide
  Target: ATXN2; (-) strand; PAM type: YTN; PAM sequence: TTA
aaaatttagtctctttttaa

SEQ ID NO: 75319 - DNA, 20 bp, Artificial Sequence
  Description of Artificial Sequence: Synthetic oligonucleotide
  Target: ATXN2; (-) strand; PAM type: YTN; PAM sequence: TTA
tattaaaaatttagtctctt

SEQ ID NO: 75320 - DNA, 20 bp, Artificial Sequence
  Description of Artificial Sequence: Synthetic oligonucleotide
  Target: ATXN2; (-) strand; PAM type: YTN; PAM sequence: TTA
tgtagttatattaaaaattt

SEQ ID NO: 75321 - DNA, 20 bp, Artificial Sequence
  Description of Artificial Sequence: Synthetic oligonucleotide
  Target: ATXN2; (-) strand; PAM type: YTN; PAM sequence: TTA
aaagcgattatgtagttata

SEQ ID NO: 75322 - DNA, 20 bp, Artificial Sequence
  Description of Artificial Sequence: Synthetic oligonucleotide
  Target: ATXN2; (-) strand; PAM type: YTN; PAM sequence: TTT
aaaagcgattatgtagttat

SEQ ID NO: 75323 - DNA, 20 bp, Artificial Sequence
  Description of Artificial Sequence: Synthetic oligonucleotide
  Target: ATXN2; (-) strand; PAM type: YTN; PAM sequence: TTG
agaatttaaaagcgattatg

SEQ ID NO: 75324 - DNA, 20 bp, Artificial Sequence
  Description of Artificial Sequence: Synthetic oligonucleotide
  Target: ATXN2; (-) strand; PAM type: YTN; PAM sequence: TTT
gagaatttaaaagcgattat

SEQ ID NO: 75325 - DNA, 20 bp, Artificial Sequence
  Description of Artificial Sequence: Synthetic oligonucleotide
  Target: ATXN2; (-) strand; PAM type: YTN; PAM sequence: TTT
tgagaatttaaaagcgatta

SEQ ID NO: 75326 - DNA, 20 bp, Artificial Sequence
  Description of Artificial Sequence: Synthetic oligonucleotide
  Target: ATXN2; (-) strand; PAM type: YTN; PAM sequence: TTC
agagtatgagacaaggtttt

SEQ ID NO: 75327 - DNA, 20 bp, Artificial Sequence
  Description of Artificial Sequence: Synthetic oligonucleotide
  Target: ATXN2; (-) strand; PAM type: YTN; PAM sequence: TTA
aaaatattcagagtatgaga

SEQ ID NO: 75328 - DNA, 20 bp, Artificial Sequence
  Description of Artificial Sequence: Synthetic oligonucleotide
  Target: ATXN2; (-) strand; PAM type: YTN; PAM sequence: TTT
aaaaatattcagagtatgag

SEQ ID NO: 75329 - DNA, 20 bp, Artificial Sequence
  Description of Artificial Sequence: Synthetic oligonucleotide
  Target: ATXN2; (-) strand; PAM type: YTN; PAM sequence: TTT
taaaaatattcagagtatga

SEQ ID NO: 75330 - DNA, 20 bp, Artificial Sequence
  Description of Artificial Sequence: Synthetic oligonucleotide
  Target: ATXN2; (-) strand; PAM type: YTN; PAM sequence: CTA
atgaaaatgaaaaagggtga

SEQ ID NO: 75331 - DNA, 20 bp, Artificial Sequence
  Description of Artificial Sequence: Synthetic oligonucleotide
  Target: ATXN2; (-) strand; PAM type: YTN; PAM sequence: TTG
tctaatgaaaatgaaaaagg

SEQ ID NO: 75332 - DNA, 20 bp, Artificial Sequence
  Description of Artificial Sequence: Synthetic oligonucleotide
  Target: ATXN2; (-) strand; PAM type: YTN; PAM sequence: TTG
gtagaaaacaattgtctaat

SEQ ID NO: 75333 - DNA, 20 bp, Artificial Sequence
  Description of Artificial Sequence: Synthetic oligonucleotide
  Target: ATXN2; (-) strand; PAM type: YTN; PAM sequence: CTA
aggaagaaaggtagagaacg

SEQ ID NO: 75334 - DNA, 20 bp, Artificial Sequence
  Description of Artificial Sequence: Synthetic oligonucleotide
  Target: ATXN2; (-) strand; PAM type: YTN; PAM sequence: CTG
gaaagaaatcaaagtataag

SEQ ID NO: 75335 - DNA, 20 bp, Artificial Sequence
  Description of Artificial Sequence: Synthetic oligonucleotide
  Target: ATXN2; (-) strand; PAM type: YTN; PAM sequence: TTA
taagtgggcatgtggcaaat

SEQ ID NO: 75336 - DNA, 20 bp, Artificial Sequence
  Description of Artificial Sequence: Synthetic oligonucleotide
  Target: ATXN2; (-) strand; PAM type: YTN; PAM sequence: TTT
ataagtgggcatgtggcaaa

SEQ ID NO: 75337 - DNA, 20 bp, Artificial Sequence
  Description of Artificial Sequence: Synthetic oligonucleotide
  Target: ATXN2; (-) strand; PAM type: YTN; PAM sequence: TTA
gtttataagtgggcatgtgg

SEQ ID NO: 75338 - DNA, 20 bp, Artificial Sequence
  Description of Artificial Sequence: Synthetic oligonucleotide
  Target: ATXN2; (-) strand; PAM type: YTN; PAM sequence: TTT
agtttataagtgggcatgtg

SEQ ID NO: 75339 - DNA, 20 bp, Artificial Sequence
  Description of Artificial Sequence: Synthetic oligonucleotide
  Target: ATXN2; (-) strand; PAM type: YTN; PAM sequence: CTT
tagtttataagtgggcatgt

SEQ ID NO: 75340 - DNA, 20 bp, Artificial Sequence
  Description of Artificial Sequence: Synthetic oligonucleotide
  Target: ATXN2; (-) strand; PAM type: YTN; PAM sequence: CTA
caatgctttagtttataagt

SEQ ID NO: 75341 - DNA, 20 bp, Artificial Sequence
  Description of Artificial Sequence: Synthetic oligonucleotide
  Target: ATXN2; (-) strand; PAM type: YTN; PAM sequence: TTG
gcctacaatgctttagttta

SEQ ID NO: 75342 - DNA, 20 bp, Artificial Sequence
  Description of Artificial Sequence: Synthetic oligonucleotide
  Target: ATXN2; (-) strand; PAM type: YTN; PAM sequence: TTT
ggcctacaatgctttagttt

SEQ ID NO: 75343 - DNA, 20 bp, Artificial Sequence
  Description of Artificial Sequence: Synthetic oligonucleotide
  Target: ATXN2; (-) strand; PAM type: YTN; PAM sequence: TTG
tcccatttggcctacaatgc

SEQ ID NO: 75344 - DNA, 20 bp, Artificial Sequence
  Description of Artificial Sequence: Synthetic oligonucleotide
  Target: ATXN2; (-) strand; PAM type: YTN; PAM sequence: CTT
gtcccatttggcctacaatg

SEQ ID NO: 75345 - DNA, 20 bp, Artificial Sequence
  Description of Artificial Sequence: Synthetic oligonucleotide
  Target: ATXN2; (-) strand; PAM type: YTN; PAM sequence: TTC
ttgtcccatttggcctacaa

SEQ ID NO: 75346 - DNA, 20 bp, Artificial Sequence
  Description of Artificial Sequence: Synthetic oligonucleotide
  Target: ATXN2; (-) strand; PAM type: YTN; PAM sequence: TTT
cttgtcccatttggcctaca

SEQ ID NO: 75347 - DNA, 20 bp, Artificial Sequence
  Description of Artificial Sequence: Synthetic oligonucleotide
  Target: ATXN2; (-) strand; PAM type: YTN; PAM sequence: CTG
aaaatttcttgtcccatttg

SEQ ID NO: 75348 - DNA, 20 bp, Artificial Sequence
  Description of Artificial Sequence: Synthetic oligonucleotide
  Target: ATXN2; (-) strand; PAM type: YTN; PAM sequence: TTC
aactgaaaatttcttgtccc

SEQ ID NO: 75349 - DNA, 20 bp, Artificial Sequence
  Description of Artificial Sequence: Synthetic oligonucleotide
  Target: ATXN2; (-) strand; PAM type: YTN; PAM sequence: TTA
tattcaactgaaaatttctt

SEQ ID NO: 75350 - DNA, 20 bp, Artificial Sequence
  Description of Artificial Sequence: Synthetic oligonucleotide
  Target: ATXN2; (-) strand; PAM type: YTN; PAM sequence: CTG
attatattcaactgaaaatt

SEQ ID NO: 75351 - DNA, 20 bp, Artificial Sequence
  Description of Artificial Sequence: Synthetic oligonucleotide
  Target: ATXN2; (-) strand; PAM type: YTN; PAM sequence: CTA
ctgattatattcaactgaaa

SEQ ID NO: 75352 - DNA, 20 bp, Artificial Sequence
  Description of Artificial Sequence: Synthetic oligonucleotide
  Target: ATXN2; (-) strand; PAM type: YTN; PAM sequence: TTG
tggtcaagaatgctactgat

SEQ ID NO: 75353 - DNA, 20 bp, Artificial Sequence
  Description of Artificial Sequence: Synthetic oligonucleotide
  Target: ATXN2; (-) strand; PAM type: YTN; PAM sequence: TTT
gtggtcaagaatgctactga

SEQ ID NO: 75354 - DNA, 20 bp, Artificial Sequence
  Description of Artificial Sequence: Synthetic oligonucleotide
  Target: ATXN2; (-) strand; PAM type: YTN; PAM sequence: TTT
tgtggtcaagaatgctactg

SEQ ID NO: 75355 - DNA, 20 bp, Artificial Sequence
  Description of Artificial Sequence: Synthetic oligonucleotide
  Target: ATXN2; (-) strand; PAM type: YTN; PAM sequence: CTA
cagttttgtggtcaagaatg

SEQ ID NO: 75356 - DNA, 20 bp, Artificial Sequence
  Description of Artificial Sequence: Synthetic oligonucleotide
  Target: ATXN2; (-) strand; PAM type: YTN; PAM sequence: TTC
tacagttttgtggtcaagaa

SEQ ID NO: 75357 - DNA, 20 bp, Artificial Sequence
  Description of Artificial Sequence: Synthetic oligonucleotide
  Target: ATXN2; (-) strand; PAM type: YTN; PAM sequence: TTT
ctacagttttgtggtcaaga

SEQ ID NO: 75358 - DNA, 20 bp, Artificial Sequence
  Description of Artificial Sequence: Synthetic oligonucleotide
  Target: ATXN2; (-) strand; PAM type: YTN; PAM sequence: TTT
tctacagttttgtggtcaag

SEQ ID NO: 75359 - DNA, 20 bp, Artificial Sequence
  Description of Artificial Sequence: Synthetic oligonucleotide
  Target: ATXN2; (-) strand; PAM type: YTN; PAM sequence: TTG
taaagcattttctacagttt

SEQ ID NO: 75360 - DNA, 20 bp, Artificial Sequence
  Description of Artificial Sequence: Synthetic oligonucleotide
  Target: ATXN2; (-) strand; PAM type: YTN; PAM sequence: TTT
gtaaagcattttctacagtt

SEQ ID NO: 75361 - DNA, 20 bp, Artificial Sequence
  Description of Artificial Sequence: Synthetic oligonucleotide
  Target: ATXN2; (-) strand; PAM type: YTN; PAM sequence: TTA
gtttgtaaagcattttctac

SEQ ID NO: 75362 - DNA, 20 bp, Artificial Sequence
  Description of Artificial Sequence: Synthetic oligonucleotide
  Target: ATXN2; (-) strand; PAM type: YTN; PAM sequence: TTA
aaaaattagtttgtaaagca

SEQ ID NO: 75363 - DNA, 20 bp, Artificial Sequence
  Description of Artificial Sequence: Synthetic oligonucleotide
  Target: ATXN2; (-) strand; PAM type: YTN; PAM sequence: CTT
aaaaaattagtttgtaaagc

SEQ ID NO: 75364 - DNA, 20 bp, Artificial Sequence
  Description of Artificial Sequence: Synthetic oligonucleotide
  Target: ATXN2; (-) strand; PAM type: YTN; PAM sequence: CTC
ttaaaaaattagtttgtaaa

SEQ ID NO: 75365 - DNA, 20 bp, Artificial Sequence
  Description of Artificial Sequence: Synthetic oligonucleotide
  Target: ATXN2; (-) strand; PAM type: YTN; PAM sequence: TTG
tgatctcttaaaaaattagt

SEQ ID NO: 75366 - DNA, 20 bp, Artificial Sequence
  Description of Artificial Sequence: Synthetic oligonucleotide
  Target: ATXN2; (-) strand; PAM type: YTN; PAM sequence: TTT
gtgatctcttaaaaaattag

SEQ ID NO: 75367 - DNA, 20 bp, Artificial Sequence
  Description of Artificial Sequence: Synthetic oligonucleotide
  Target: ATXN2; (-) strand; PAM type: YTN; PAM sequence: TTT
tgtgatctcttaaaaaatta

SEQ ID NO: 75368 - DNA, 20 bp, Artificial Sequence
  Description of Artificial Sequence: Synthetic oligonucleotide
  Target: ATXN2; (-) strand; PAM type: YTN; PAM sequence: TTT
ttgtgatctcttaaaaaatt

SEQ ID NO: 75369 - DNA, 20 bp, Artificial Sequence
  Description of Artificial Sequence: Synthetic oligonucleotide
  Target: ATXN2; (-) strand; PAM type: YTN; PAM sequence: TTA
aatagagtttttgtgatctc

SEQ ID NO: 75370 - DNA, 20 bp, Artificial Sequence
  Description of Artificial Sequence: Synthetic oligonucleotide
  Target: ATXN2; (-) strand; PAM type: YTN; PAM sequence: TTA
gagaaaaattaaatagagtt

SEQ ID NO: 75371 - DNA, 20 bp, Artificial Sequence
  Description of Artificial Sequence: Synthetic oligonucleotide
  Target: ATXN2; (-) strand; PAM type: YTN; PAM sequence: TTT
agagaaaaattaaatagagt

SEQ ID NO: 75372 - DNA, 20 bp, Artificial Sequence
  Description of Artificial Sequence: Synthetic oligonucleotide
  Target: ATXN2; (-) strand; PAM type: YTN; PAM sequence: CTT
tagagaaaaattaaatagag

SEQ ID NO: 75373 - DNA, 20 bp, Artificial Sequence
  Description of Artificial Sequence: Synthetic oligonucleotide
  Target: ATXN2; (-) strand; PAM type: YTN; PAM sequence: TTA
gaactttagagaaaaattaa

SEQ ID NO: 75374 - DNA, 20 bp, Artificial Sequence
  Description of Artificial Sequence: Synthetic oligonucleotide
  Target: ATXN2; (-) strand; PAM type: YTN; PAM sequence: TTG
gaaaacaattagaactttag

SEQ ID NO: 75375 - DNA, 20 bp, Artificial Sequence
  Description of Artificial Sequence: Synthetic oligonucleotide
  Target: ATXN2; (-) strand; PAM type: YTN; PAM sequence: TTG
ttggaaaacaattagaactt

SEQ ID NO: 75376 - DNA, 20 bp, Artificial Sequence
  Description of Artificial Sequence: Synthetic oligonucleotide
  Target: ATXN2; (-) strand; PAM type: YTN; PAM sequence: TTT
gttggaaaacaattagaact

SEQ ID NO: 75377 - DNA, 20 bp, Artificial Sequence
  Description of Artificial Sequence: Synthetic oligonucleotide
  Target: ATXN2; (-) strand; PAM type: YTN; PAM sequence: TTT
tgttggaaaacaattagaac

SEQ ID NO: 75378 - DNA, 20 bp, Artificial Sequence
  Description of Artificial Sequence: Synthetic oligonucleotide
  Target: ATXN2; (-) strand; PAM type: YTN; PAM sequence: TTT
ttgttggaaaacaattagaa

SEQ ID NO: 75379 - DNA, 20 bp, Artificial Sequence
  Description of Artificial Sequence: Synthetic oligonucleotide
  Target: ATXN2; (-) strand; PAM type: YTN; PAM sequence: TTA
atgcatttttgttggaaaac

SEQ ID NO: 75380 - DNA, 20 bp, Artificial Sequence
  Description of Artificial Sequence: Synthetic oligonucleotide
  Target: ATXN2; (-) strand; PAM type: YTN; PAM sequence: TTA
gaaaaatgagaatgttaatg

SEQ ID NO: 75381 - DNA, 20 bp, Artificial Sequence
  Description of Artificial Sequence: Synthetic oligonucleotide
  Target: ATXN2; (-) strand; PAM type: YTN; PAM sequence: TTT
agaaaaatgagaatgttaat

SEQ ID NO: 75382 - DNA, 20 bp, Artificial Sequence
  Description of Artificial Sequence: Synthetic oligonucleotide
  Target: ATXN2; (-) strand; PAM type: YTN; PAM sequence: TTT
tagaaaaatgagaatgttaa

SEQ ID NO: 75383 - DNA, 20 bp, Artificial Sequence
  Description of Artificial Sequence: Synthetic oligonucleotide
  Target: ATXN2; (-) strand; PAM type: YTN; PAM sequence: TTT
ttagaaaaatgagaatgtta

SEQ ID NO: 75384 - DNA, 20 bp, Artificial Sequence
  Description of Artificial Sequence: Synthetic oligonucleotide
  Target: ATXN2; (-) strand; PAM type: YTN; PAM sequence: TTT
tttagaaaaatgagaatgtt

SEQ ID NO: 75385 - DNA, 20 bp, Artificial Sequence
  Description of Artificial Sequence: Synthetic oligonucleotide
  Target: ATXN2; (-) strand; PAM type: YTN; PAM sequence: CTA
gaatagcccaagtaaggtaa

SEQ ID NO: 75386 - DNA, 20 bp, Artificial Sequence
  Description of Artificial Sequence: Synthetic oligonucleotide
  Target: ATXN2; (-) strand; PAM type: YTN; PAM sequence: TTC
tagaatagcccaagtaaggt

SEQ ID NO: 75387 - DNA, 20 bp, Artificial Sequence
  Description of Artificial Sequence: Synthetic oligonucleotide
  Target: ATXN2; (-) strand; PAM type: YTN; PAM sequence: TTT
ctagaatagcccaagtaagg

SEQ ID NO: 75388 - DNA, 20 bp, Artificial Sequence
  Description of Artificial Sequence: Synthetic oligonucleotide
  Target: ATXN2; (-) strand; PAM type: YTN; PAM sequence: CTT
tctagaatagcccaagtaag

SEQ ID NO: 75389 - DNA, 20 bp, Artificial Sequence
  Description of Artificial Sequence: Synthetic oligonucleotide
  Target: ATXN2; (-) strand; PAM type: YTN; PAM sequence: CTA
ctttctagaatagcccaagt

SEQ ID NO: 75390 - DNA, 20 bp, Artificial Sequence
  Description of Artificial Sequence: Synthetic oligonucleotide
  Target: ATXN2; (-) strand; PAM type: YTN; PAM sequence: TTC
aaaaaaaaaaagaaagaaaa

SEQ ID NO: 75391 - DNA, 20 bp, Artificial Sequence
  Description of Artificial Sequence: Synthetic oligonucleotide
  Target: ATXN2; (-) strand; PAM type: YTN; PAM sequence: TTT
caaaaaaaaaaagaaagaaa

SEQ ID NO: 75392 - DNA, 20 bp, Artificial Sequence
  Description of Artificial Sequence: Synthetic oligonucleotide
  Target: ATXN2; (-) strand; PAM type: YTN; PAM sequence: CTC
cgtttcaaaaaaaaaaagaa

SEQ ID NO: 75393 - DNA, 20 bp, Artificial Sequence
  Description of Artificial Sequence: Synthetic oligonucleotide
  Target: ATXN2; (-) strand; PAM type: YTN; PAM sequence: CTG
ggtgacagagcaagactccg

SEQ ID NO: 75394 - DNA, 20 bp, Artificial Sequence
  Description of Artificial Sequence: Synthetic oligonucleotide
  Target: ATXN2; (-) strand; PAM type: YTN; PAM sequence: CTC
cagcctgggtgacagagcaa

SEQ ID NO: 75395 - DNA, 20 bp, Artificial Sequence
  Description of Artificial Sequence: Synthetic oligonucleotide
  Target: ATXN2; (-) strand; PAM type: YTN; PAM sequence: CTG
cactccagcctgggtgacag

SEQ ID NO: 75396 - DNA, 20 bp, Artificial Sequence
  Description of Artificial Sequence: Synthetic oligonucleotide
  Target: ATXN2; (-) strand; PAM type: YTN; PAM sequence: CTG
ataccgcaccactgcactcc

SEQ ID NO: 75397 - DNA, 20 bp, Artificial Sequence
  Description of Artificial Sequence: Synthetic oligonucleotide
  Target: ATXN2; (-) strand; PAM type: YTN; PAM sequence: TTG
cagtgagctgataccgcacc

SEQ ID NO: 75398 - DNA, 20 bp, Artificial Sequence
  Description of Artificial Sequence: Synthetic oligonucleotide
  Target: ATXN2; (-) strand; PAM type: YTN; PAM sequence: TTG
aacccaggaggcagaggttg

SEQ ID NO: 75399 - DNA, 20 bp, Artificial Sequence
  Description of Artificial Sequence: Synthetic oligonucleotide
  Target: ATXN2; (-) strand; PAM type: YTN; PAM sequence: CTT
gaacccaggaggcagaggtt

SEQ ID NO: 75400 - DNA, 20 bp, Artificial Sequence
  Description of Artificial Sequence: Synthetic oligonucleotide
  Target: ATXN2; (-) strand; PAM type: YTN; PAM sequence: TTG
cttgaacccaggaggcagag

SEQ ID NO: 75401 - DNA, 20 bp, Artificial Sequence
  Description of Artificial Sequence: Synthetic oligonucleotide
  Target: ATXN2; (-) strand; PAM type: YTN; PAM sequence: CTG
agacagaattgcttgaaccc

SEQ ID NO: 75402 - DNA, 20 bp, Artificial Sequence
  Description of Artificial Sequence: Synthetic oligonucleotide
  Target: ATXN2; (-) strand; PAM type: YTN; PAM sequence: CTA
gggaggctgagacagaattg

SEQ ID NO: 75403 - DNA, 20 bp, Artificial Sequence
  Description of Artificial Sequence: Synthetic oligonucleotide
  Target: ATXN2; (-) strand; PAM type: YTN; PAM sequence: CTA
ctagggaggctgagacagaa

SEQ ID NO: 75404 - DNA, 20 bp, Artificial Sequence
  Description of Artificial Sequence: Synthetic oligonucleotide
  Target: ATXN2; (-) strand; PAM type: YTN; PAM sequence: CTA
gctactagggaggctgagac

SEQ ID NO: 75405 - DNA, 20 bp, Artificial Sequence
  Description of Artificial Sequence: Synthetic oligonucleotide
  Target: ATXN2; (-) strand; PAM type: YTN; PAM sequence: CTA
tagtcctagctactagggag

SEQ ID NO: 75406 - DNA, 20 bp, Artificial Sequence
  Description of Artificial Sequence: Synthetic oligonucleotide
  Target: ATXN2; (-) strand; PAM type: YTN; PAM sequence: TTG
tgtgtggtggcgtgcgccta

SEQ ID NO: 75407 - DNA, 20 bp, Artificial Sequence
  Description of Artificial Sequence: Synthetic oligonucleotide
  Target: ATXN2; (-) strand; PAM type: YTN; PAM sequence: TTT
gtgtgtggtggcgtgcgcct

SEQ ID NO: 75408 - DNA, 20 bp, Artificial Sequence
  Description of Artificial Sequence: Synthetic oligonucleotide
  Target: ATXN2; (-) strand; PAM type: YTN; PAM sequence: TTT
tgtgtgtggtggcgtgcgcc

SEQ ID NO: 75409 - DNA, 20 bp, Artificial Sequence
  Description of Artificial Sequence: Synthetic oligonucleotide
  Target: ATXN2; (-) strand; PAM type: YTN; PAM sequence: TTT
ttgtgtgtggtggcgtgcgc

SEQ ID NO: 75410 - DNA, 20 bp, Artificial Sequence
  Description of Artificial Sequence: Synthetic oligonucleotide
  Target: ATXN2; (-) strand; PAM type: YTN; PAM sequence: TTA
tttttgtgtgtggtggcgtg

SEQ ID NO: 75411 - DNA, 20 bp, Artificial Sequence
  Description of Artificial Sequence: Synthetic oligonucleotide
  Target: ATXN2; (-) strand; PAM type: YTN; PAM sequence: TTT
atttttgtgtgtggtggcgt

SEQ ID NO: 75412 - DNA, 20 bp, Artificial Sequence
  Description of Artificial Sequence: Synthetic oligonucleotide
  Target: ATXN2; (-) strand; PAM type: YTN; PAM sequence: CTA
aaaatacaaaaatttatttt

SEQ ID NO: 75413 - DNA, 20 bp, Artificial Sequence
  Description of Artificial Sequence: Synthetic oligonucleotide
  Target: ATXN2; (-) strand; PAM type: YTN; PAM sequence: CTA
ctaaaaatacaaaaatttat

SEQ ID NO: 75414 - DNA, 20 bp, Artificial Sequence
  Description of Artificial Sequence: Synthetic oligonucleotide
  Target: ATXN2; (-) strand; PAM type: YTN; PAM sequence: CTC
tactaaaaatacaaaaattt

SEQ ID NO: 75415 - DNA, 20 bp, Artificial Sequence
  Description of Artificial Sequence: Synthetic oligonucleotide
  Target: ATXN2; (-) strand; PAM type: YTN; PAM sequence: CTG
gccaacatggcgaaaccccg

SEQ ID NO: 75416 - DNA, 20 bp, Artificial Sequence
  Description of Artificial Sequence: Synthetic oligonucleotide
  Target: ATXN2; (-) strand; PAM type: YTN; PAM sequence: TTC
gagaccagcctggccaacat

SEQ ID NO: 75417 - DNA, 20 bp, Artificial Sequence
  Description of Artificial Sequence: Synthetic oligonucleotide
  Target: ATXN2; (-) strand; PAM type: YTN; PAM sequence: CTG
aggtcaggagttcgagacca

SEQ ID NO: 75418 - DNA, 20 bp, Artificial Sequence
  Description of Artificial Sequence: Synthetic oligonucleotide
  Target: ATXN2; (-) strand; PAM type: YTN; PAM sequence: CTG
aggcgggtggatcacctgag

SEQ ID NO: 75419 - DNA, 20 bp, Artificial Sequence
  Description of Artificial Sequence: Synthetic oligonucleotide
  Target: ATXN2; (-) strand; PAM type: YTN; PAM sequence: TTA
gggaggctgaggcgggtgga

SEQ ID NO: 75420 - DNA, 20 bp, Artificial Sequence
  Description of Artificial Sequence: Synthetic oligonucleotide
  Target: ATXN2; (-) strand; PAM type: YTN; PAM sequence: CTT
agggaggctgaggcgggtgg

SEQ ID NO: 75421 - DNA, 20 bp, Artificial Sequence
  Description of Artificial Sequence: Synthetic oligonucleotide
  Target: ATXN2; (-) strand; PAM type: YTN; PAM sequence: TTA
gcacttagggaggctgaggc

SEQ ID NO: 75422 - DNA, 20 bp, Artificial Sequence
  Description of Artificial Sequence: Synthetic oligonucleotide
  Target: ATXN2; (-) strand; PAM type: YTN; PAM sequence: CTT
agcacttagggaggctgagg

SEQ ID NO: 75423 - DNA, 20 bp, Artificial Sequence
  Description of Artificial Sequence: Synthetic oligonucleotide
  Target: ATXN2; (-) strand; PAM type: YTN; PAM sequence: CTG
taatcttagcacttagggag

SEQ ID NO: 75424 - DNA, 20 bp, Artificial Sequence
  Description of Artificial Sequence: Synthetic oligonucleotide
  Target: ATXN2; (-) strand; PAM type: YTN; PAM sequence: TTC
ctgtaatcttagcacttagg

SEQ ID NO: 75425 - DNA, 20 bp, Artificial Sequence
  Description of Artificial Sequence: Synthetic oligonucleotide
  Target: ATXN2; (-) strand; PAM type: YTN; PAM sequence: CTC
attcctgtaatcttagcact

SEQ ID NO: 75426 - DNA, 20 bp, Artificial Sequence
  Description of Artificial Sequence: Synthetic oligonucleotide
  Target: ATXN2; (-) strand; PAM type: YTN; PAM sequence: CTG
ggtatggcggctcattcctg

SEQ ID NO: 75427 - DNA, 20 bp, Artificial Sequence
  Description of Artificial Sequence: Synthetic oligonucleotide
  Target: ATXN2; (-) strand; PAM type: YTN; PAM sequence: CTG
ggctgggtatggcggctcat

SEQ ID NO: 75428 - DNA, 20 bp, Artificial Sequence
  Description of Artificial Sequence: Synthetic oligonucleotide
  Target: ATXN2; (-) strand; PAM type: YTN; PAM sequence: TTA
aagaaatatctgggctgggt

SEQ ID NO: 75429 - DNA, 20 bp, Artificial Sequence
  Description of Artificial Sequence: Synthetic oligonucleotide
  Target: ATXN2; (-) strand; PAM type: YTN; PAM sequence: TTT
aaagaaatatctgggctggg

SEQ ID NO: 75430 - DNA, 20 bp, Artificial Sequence
  Description of Artificial Sequence: Synthetic oligonucleotide
  Target: ATXN2; (-) strand; PAM type: YTN; PAM sequence: TTT
taaagaaatatctgggctgg

SEQ ID NO: 75431 - DNA, 20 bp, Artificial Sequence
  Description of Artificial Sequence: Synthetic oligonucleotide
  Target: ATXN2; (-) strand; PAM type: YTN; PAM sequence: TTT
ttaaagaaatatctgggctg

SEQ ID NO: 75432 - DNA, 20 bp, Artificial Sequence
  Description of Artificial Sequence: Synthetic oligonucleotide
  Target: ATXN2; (-) strand; PAM type: YTN; PAM sequence: TTT
tttaaagaaatatctgggct

SEQ ID NO: 75433 - DNA, 20 bp, Artificial Sequence
  Description of Artificial Sequence: Synthetic oligonucleotide
  Target: ATXN2; (-) strand; PAM type: YTN; PAM sequence: TTT
ttttaaagaaatatctgggc

SEQ ID NO: 75434 - DNA, 20 bp, Artificial Sequence
  Description of Artificial Sequence: Synthetic oligonucleotide
  Target: ATXN2; (-) strand; PAM type: YTN; PAM sequence: CTT
tttttaaagaaatatctggg

SEQ ID NO: 75435 - DNA, 20 bp, Artificial Sequence
  Description of Artificial Sequence: Synthetic oligonucleotide
  Target: ATXN2; (-) strand; PAM type: YTN; PAM sequence: TTA
caaactttttttaaagaaat

SEQ ID NO: 75436 - DNA, 20 bp, Artificial Sequence
  Description of Artificial Sequence: Synthetic oligonucleotide
  Target: ATXN2; (-) strand; PAM type: YTN; PAM sequence: CTT
acaaactttttttaaagaaa

SEQ ID NO: 75437 - DNA, 20 bp, Artificial Sequence
  Description of Artificial Sequence: Synthetic oligonucleotide
  Target: ATXN2; (-) strand; PAM type: YTN; PAM sequence: TTC
acagtgatcttacaaacttt

SEQ ID NO: 75438 - DNA, 20 bp, Artificial Sequence
  Description of Artificial Sequence: Synthetic oligonucleotide
  Target: ATXN2; (-) strand; PAM type: YTN; PAM sequence: TTT
cacagtgatcttacaaactt

SEQ ID NO: 75439 - DNA, 20 bp, Artificial Sequence
  Description of Artificial Sequence: Synthetic oligonucleotide
  Target: ATXN2; (-) strand; PAM type: YTN; PAM sequence: TTT
tcacagtgatcttacaaact

SEQ ID NO: 75440 - DNA, 20 bp, Artificial Sequence
  Description of Artificial Sequence: Synthetic oligonucleotide
  Target: ATXN2; (-) strand; PAM type: YTN; PAM sequence: TTC
aagcaaagattttcacagtg

SEQ ID NO: 75441 - DNA, 20 bp, Artificial Sequence
  Description of Artificial Sequence: Synthetic oligonucleotide
  Target: ATXN2; (-) strand; PAM type: YTN; PAM sequence: TTA
ttcaagcaaagattttcaca

SEQ ID NO: 75442 - DNA, 20 bp, Artificial Sequence
  Description of Artificial Sequence: Synthetic oligonucleotide
  Target: ATXN2; (-) strand; PAM type: YTN; PAM sequence: TTT
attcaagcaaagattttcac

SEQ ID NO: 75443 - DNA, 20 bp, Artificial Sequence
  Description of Artificial Sequence: Synthetic oligonucleotide
  Target: ATXN2; (-) strand; PAM type: YTN; PAM sequence: TTA
gatttattcaagcaaagatt

SEQ ID NO: 75444 - DNA, 20 bp, Artificial Sequence
  Description of Artificial Sequence: Synthetic oligonucleotide
  Target: ATXN2; (-) strand; PAM type: YTN; PAM sequence: TTA
ttagatttattcaagcaaag

SEQ ID NO: 75445 - DNA, 20 bp, Artificial Sequence
  Description of Artificial Sequence: Synthetic oligonucleotide
  Target: ATXN2; (-) strand; PAM type: YTN; PAM sequence: TTT
attagatttattcaagcaaa

SEQ ID NO: 75446 - DNA, 20 bp, Artificial Sequence
  Description of Artificial Sequence: Synthetic oligonucleotide
  Target: ATXN2; (-) strand; PAM type: YTN; PAM sequence: CTC
atggtttattagatttattc

SEQ ID NO: 75447 - DNA, 20 bp, Artificial Sequence
  Description of Artificial Sequence: Synthetic oligonucleotide
  Target: ATXN2; (-) strand; PAM type: YTN; PAM sequence: CTA
aatatgcctcatggtttatt

SEQ ID NO: 75448 - DNA, 20 bp, Artificial Sequence
  Description of Artificial Sequence: Synthetic oligonucleotide
  Target: ATXN2; (-) strand; PAM type: YTN; PAM sequence: TTC
ctaaatatgcctcatggttt

SEQ ID NO: 75449 - DNA, 20 bp, Artificial Sequence
  Description of Artificial Sequence: Synthetic oligonucleotide
  Target: ATXN2; (-) strand; PAM type: YTN; PAM sequence: TTT
cctaaatatgcctcatggtt

SEQ ID NO: 75450 - DNA, 20 bp, Artificial Sequence
  Description of Artificial Sequence: Synthetic oligonucleotide
  Target: ATXN2; (-) strand; PAM type: YTN; PAM sequence: TTG
atttcctaaatatgcctcat

SEQ ID NO: 75451 - DNA, 20 bp, Artificial Sequence
  Description of Artificial Sequence: Synthetic oligonucleotide
  Target: ATXN2; (-) strand; PAM type: YTN; PAM sequence: TTT
gatttcctaaatatgcctca

SEQ ID NO: 75452 - DNA, 20 bp, Artificial Sequence
  Description of Artificial Sequence: Synthetic oligonucleotide
  Target: ATXN2; (-) strand; PAM type: YTN; PAM sequence: TTT
tgatttcctaaatatgcctc

SEQ ID NO: 75453 - DNA, 20 bp, Artificial Sequence
  Description of Artificial Sequence: Synthetic oligonucleotide
  Target: ATXN2; (-) strand; PAM type: YTN; PAM sequence: TTA
tgcaaaaagaggtgggtttt

SEQ ID NO: 75454 - DNA, 20 bp, Artificial Sequence
  Description of Artificial Sequence: Synthetic oligonucleotide
  Target: ATXN2; (-) strand; PAM type: YTN; PAM sequence: CTC
cagttatgcaaaaagaggtg

SEQ ID NO: 75455 - DNA, 20 bp, Artificial Sequence
  Description of Artificial Sequence: Synthetic oligonucleotide
  Target: ATXN2; (-) strand; PAM type: YTN; PAM sequence: TTA
aagatatggactccagttat

SEQ ID NO: 75456 - DNA, 20 bp, Artificial Sequence
  Description of Artificial Sequence: Synthetic oligonucleotide
  Target: ATXN2; (-) strand; PAM type: YTN; PAM sequence: TTT
aaagatatggactccagtta

SEQ ID NO: 75457 - DNA, 20 bp, Artificial Sequence
  Description of Artificial Sequence: Synthetic oligonucleotide
  Target: ATXN2; (-) strand; PAM type: YTN; PAM sequence: TTG
tggtacagtttaaagatatg

SEQ ID NO: 75458 - DNA, 20 bp, Artificial Sequence
  Description of Artificial Sequence: Synthetic oligonucleotide
  Target: ATXN2; (-) strand; PAM type: YTN; PAM sequence: TTG
ttgtggtacagtttaaagat

SEQ ID NO: 75459 - DNA, 20 bp, Artificial Sequence
  Description of Artificial Sequence: Synthetic oligonucleotide
  Target: ATXN2; (-) strand; PAM type: YTN; PAM sequence: TTT
gttgtggtacagtttaaaga

SEQ ID NO: 75460 - DNA, 20 bp, Artificial Sequence
  Description of Artificial Sequence: Synthetic oligonucleotide
  Target: ATXN2; (-) strand; PAM type: YTN; PAM sequence: CTT
tgttgtggtacagtttaaag

SEQ ID NO: 75461 - DNA, 20 bp, Artificial Sequence
  Description of Artificial Sequence: Synthetic oligonucleotide
  Target: ATXN2; (-) strand; PAM type: YTN; PAM sequence: TTC
agactttgttgtggtacagt

SEQ ID NO: 75462 - DNA, 20 bp, Artificial Sequence
  Description of Artificial Sequence: Synthetic oligonucleotide
  Target: ATXN2; (-) strand; PAM type: YTN; PAM sequence: TTC
aaatgttcagactttgttgt

SEQ ID NO: 75463 - DNA, 20 bp, Artificial Sequence
  Description of Artificial Sequence: Synthetic oligonucleotide
  Target: ATXN2; (-) strand; PAM type: YTN; PAM sequence: TTG
ttcaaatgttcagactttgt

SEQ ID NO: 75464 - DNA, 20 bp, Artificial Sequence
  Description of Artificial Sequence: Synthetic oligonucleotide
  Target: ATXN2; (-) strand; PAM type: YTN; PAM sequence: TTT
gttcaaatgttcagactttg

SEQ ID NO: 75465 - DNA, 20 bp, Artificial Sequence
  Description of Artificial Sequence: Synthetic oligonucleotide
  Target: ATXN2; (-) strand; PAM type: YTN; PAM sequence: TTT
tgttcaaatgttcagacttt

SEQ ID NO: 75466 - DNA, 20 bp, Artificial Sequence
  Description of Artificial Sequence: Synthetic oligonucleotide
  Target: ATXN2; (-) strand; PAM type: YTN; PAM sequence: TTC
ggggccgaaacgtgaagaaa

SEQ ID NO: 75467 - DNA, 20 bp, Artificial Sequence
  Description of Artificial Sequence: Synthetic oligonucleotide
  Target: ATXN2; (-) strand; PAM type: YTN; PAM sequence: TTG
atgccgcacatgagaaaagt

SEQ ID NO: 75468 - DNA, 20 bp, Artificial Sequence
  Description of Artificial Sequence: Synthetic oligonucleotide
  Target: ATXN2; (-) strand; PAM type: YTN; PAM sequence: CTT
gatgccgcacatgagaaaag

SEQ ID NO: 75469 - DNA, 20 bp, Artificial Sequence
  Description of Artificial Sequence: Synthetic oligonucleotide
  Target: ATXN2; (-) strand; PAM type: YTN; PAM sequence: TTG
gtacttgatgccgcacatga

SEQ ID NO: 75470 - DNA, 20 bp, Artificial Sequence
  Description of Artificial Sequence: Synthetic oligonucleotide
  Target: ATXN2; (-) strand; PAM type: YTN; PAM sequence: TTT
ggtacttgatgccgcacatg

SEQ ID NO: 75471 - DNA, 20 bp, Artificial Sequence
  Description of Artificial Sequence: Synthetic oligonucleotide
  Target: ATXN2; (-) strand; PAM type: YTN; PAM sequence: TTA
gtgtgatttggtacttgatg

SEQ ID NO: 75472 - DNA, 20 bp, Artificial Sequence
  Description of Artificial Sequence: Synthetic oligonucleotide
  Target: ATXN2; (-) strand; PAM type: YTN; PAM sequence: TTT
agtgtgatttggtacttgat

SEQ ID NO: 75473 - DNA, 20 bp, Artificial Sequence
  Description of Artificial Sequence: Synthetic oligonucleotide
  Target: ATXN2; (-) strand; PAM type: YTN; PAM sequence: TTT
tagtgtgatttggtacttga

SEQ ID NO: 75474 - DNA, 20 bp, Artificial Sequence
  Description of Artificial Sequence: Synthetic oligonucleotide
  Target: ATXN2; (-) strand; PAM type: YTN; PAM sequence: TTC
attttagtgtgatttggtac

SEQ ID NO: 75475 - DNA, 20 bp, Artificial Sequence
  Description of Artificial Sequence: Synthetic oligonucleotide
  Target: ATXN2; (-) strand; PAM type: YTN; PAM sequence: TTT
cattttagtgtgatttggta

SEQ ID NO: 75476 - DNA, 20 bp, Artificial Sequence
  Description of Artificial Sequence: Synthetic oligonucleotide
  Target: ATXN2; (-) strand; PAM type: YTN; PAM sequence: TTT
tcattttagtgtgatttggt

SEQ ID NO: 75477 - DNA, 20 bp, Artificial Sequence
  Description of Artificial Sequence: Synthetic oligonucleotide
  Target: ATXN2; (-) strand; PAM type: YTN; PAM sequence: TTT
ttcattttagtgtgatttgg

SEQ ID NO: 75478 - DNA, 20 bp, Artificial Sequence
  Description of Artificial Sequence: Synthetic oligonucleotide
  Target: ATXN2; (-) strand; PAM type: YTN; PAM sequence: TTG
tgtttttcattttagtgtga

SEQ ID NO: 75479 - DNA, 20 bp, Artificial Sequence
  Description of Artificial Sequence: Synthetic oligonucleotide
  Target: ATXN2; (-) strand; PAM type: YTN; PAM sequence: CTT
gtgtttttcattttagtgtg

SEQ ID NO: 75480 - DNA, 20 bp, Artificial Sequence
  Description of Artificial Sequence: Synthetic oligonucleotide
  Target: ATXN2; (-) strand; PAM type: YTN; PAM sequence: TTA
cttgtgtttttcattttagt

SEQ ID NO: 75481 - DNA, 20 bp, Artificial Sequence
  Description of Artificial Sequence: Synthetic oligonucleotide
  Target: ATXN2; (-) strand; PAM type: YTN; PAM sequence: CTT
acttgtgtttttcattttag

SEQ ID NO: 75482 - DNA, 20 bp, Artificial Sequence
  Description of Artificial Sequence: Synthetic oligonucleotide
  Target: ATXN2; (-) strand; PAM type: YTN; PAM sequence: TTG
gagtacttacttgtgttttt

SEQ ID NO: 75483 - DNA, 20 bp, Artificial Sequence
  Description of Artificial Sequence: Synthetic oligonucleotide
  Target: ATXN2; (-) strand; PAM type: YTN; PAM sequence: TTT
ggagtacttacttgtgtttt

SEQ ID NO: 75484 - DNA, 20 bp, Artificial Sequence
  Description of Artificial Sequence: Synthetic oligonucleotide
  Target: ATXN2; (-) strand; PAM type: YTN; PAM sequence: TTG
taaaggtttggagtacttac

SEQ ID NO: 75485 - DNA, 20 bp, Artificial Sequence
  Description of Artificial Sequence: Synthetic oligonucleotide
  Target: ATXN2; (-) strand; PAM type: YTN; PAM sequence: TTT
gtaaaggtttggagtactta

SEQ ID NO: 75486 - DNA, 20 bp, Artificial Sequence
  Description of Artificial Sequence: Synthetic oligonucleotide
  Target: ATXN2; (-) strand; PAM type: YTN; PAM sequence: TTT
tgtaaaggtttggagtactt

SEQ ID NO: 75487 - DNA, 20 bp, Artificial Sequence
  Description of Artificial Sequence: Synthetic oligonucleotide
  Target: ATXN2; (-) strand; PAM type: YTN; PAM sequence: TTA
ttttgtaaaggtttggagta

SEQ ID NO: 75488 - DNA, 20 bp, Artificial Sequence
  Description of Artificial Sequence: Synthetic oligonucleotide
  Target: ATXN2; (-) strand; PAM type: YTN; PAM sequence: TTT
attttgtaaaggtttggagt

SEQ ID NO: 75489 - DNA, 20 bp, Artificial Sequence
  Description of Artificial Sequence: Synthetic oligonucleotide
  Target: ATXN2; (-) strand; PAM type: YTN; PAM sequence: TTT
tattttgtaaaggtttggag

SEQ ID NO: 75490 - DNA, 20 bp, Artificial Sequence
  Description of Artificial Sequence: Synthetic oligonucleotide
  Target: ATXN2; (-) strand; PAM type: YTN; PAM sequence: CTA
acaaattttattttgtaaag

SEQ ID NO: 75491 - DNA, 20 bp, Artificial Sequence
  Description of Artificial Sequence: Synthetic oligonucleotide
  Target: ATXN2; (-) strand; PAM type: YTN; PAM sequence: TTC
ctaacaaattttattttgta

SEQ ID NO: 75492 - DNA, 20 bp, Artificial Sequence
  Description of Artificial Sequence: Synthetic oligonucleotide
  Target: ATXN2; (-) strand; PAM type: YTN; PAM sequence: CTA
aagaattcctaacaaatttt

SEQ ID NO: 75493 - DNA, 20 bp, Artificial Sequence
  Description of Artificial Sequence: Synthetic oligonucleotide
  Target: ATXN2; (-) strand; PAM type: YTN; PAM sequence: TTG
atgagctaaagaattcctaa

SEQ ID NO: 75494 - DNA, 20 bp, Artificial Sequence
  Description of Artificial Sequence: Synthetic oligonucleotide
  Target: ATXN2; (-) strand; PAM type: YTN; PAM sequence: CTT
gatgagctaaagaattccta

SEQ ID NO: 75495 - DNA, 20 bp, Artificial Sequence
  Description of Artificial Sequence: Synthetic oligonucleotide
  Target: ATXN2; (-) strand; PAM type: YTN; PAM sequence: CTG
gtaccttgatgagctaaaga

SEQ ID NO: 75496 - DNA, 20 bp, Artificial Sequence
  Description of Artificial Sequence: Synthetic oligonucleotide
  Target: ATXN2; (-) strand; PAM type: YTN; PAM sequence: TTG
tcaaaggcatataagaactg

SEQ ID NO: 75497 - DNA, 20 bp, Artificial Sequence
  Description of Artificial Sequence: Synthetic oligonucleotide
  Target: ATXN2; (-) strand; PAM type: YTN; PAM sequence: TTT
gtcaaaggcatataagaact

SEQ ID NO: 75498 - DNA, 20 bp, Artificial Sequence
  Description of Artificial Sequence: Synthetic oligonucleotide
  Target: ATXN2; (-) strand; PAM type: YTN; PAM sequence: TTT
tgtcaaaggcatataagaac

SEQ ID NO: 75499 - DNA, 20 bp, Artificial Sequence
  Description of Artificial Sequence: Synthetic oligonucleotide
  Target: ATXN2; (-) strand; PAM type: YTN; PAM sequence: TTT
ttgtcaaaggcatataagaa

SEQ ID NO: 75500 - DNA, 20 bp, Artificial Sequence
  Description of Artificial Sequence: Synthetic oligonucleotide
  Target: ATXN2; (-) strand; PAM type: YTN; PAM sequence: TTA
tttttgtcaaaggcatataa

SEQ ID NO: 75501 - DNA, 20 bp, Artificial Sequence
  Description of Artificial Sequence: Synthetic oligonucleotide
  Target: ATXN2; (-) strand; PAM type: YTN; PAM sequence: TTG
agattatttttgtcaaaggc

SEQ ID NO: 75502 - DNA, 20 bp, Artificial Sequence
  Description of Artificial Sequence: Synthetic oligonucleotide
  Target: ATXN2; (-) strand; PAM type: YTN; PAM sequence: CTT
gagattatttttgtcaaagg

SEQ ID NO: 75503 - DNA, 20 bp, Artificial Sequence
  Description of Artificial Sequence: Synthetic oligonucleotide
  Target: ATXN2; (-) strand; PAM type: YTN; PAM sequence: CTC
ttgagattatttttgtcaaa

SEQ ID NO: 75504 - DNA, 20 bp, Artificial Sequence
  Description of Artificial Sequence: Synthetic oligonucleotide
  Target: ATXN2; (-) strand; PAM type: YTN; PAM sequence: TTC
tcttgagattatttttgtca

SEQ ID NO: 75505 - DNA, 20 bp, Artificial Sequence
  Description of Artificial Sequence: Synthetic oligonucleotide
  Target: ATXN2; (-) strand; PAM type: YTN; PAM sequence: CTG
ggaaaaagggtatgattctc

SEQ ID NO: 75506 - DNA, 20 bp, Artificial Sequence
  Description of Artificial Sequence: Synthetic oligonucleotide
  Target: ATXN2; (-) strand; PAM type: YTN; PAM sequence: TTA
aatgatggaatggataatag

SEQ ID NO: 75507 - DNA, 20 bp, Artificial Sequence
  Description of Artificial Sequence: Synthetic oligonucleotide
  Target: ATXN2; (-) strand; PAM type: YTN; PAM sequence: TTT
aaatgatggaatggataata

SEQ ID NO: 75508 - DNA, 20 bp, Artificial Sequence
  Description of Artificial Sequence: Synthetic oligonucleotide
  Target: ATXN2; (-) strand; PAM type: YTN; PAM sequence: TTT
taaatgatggaatggataat

SEQ ID NO: 75509 - DNA, 20 bp, Artificial Sequence
  Description of Artificial Sequence: Synthetic oligonucleotide
  Target: ATXN2; (-) strand; PAM type: YTN; PAM sequence: TTT
ttaaatgatggaatggataa

SEQ ID NO: 75510 - DNA, 20 bp, Artificial Sequence
  Description of Artificial Sequence: Synthetic oligonucleotide
  Target: ATXN2; (-) strand; PAM type: YTN; PAM sequence: TTA
gatatgaggatttttaaatg

SEQ ID NO: 75511 - DNA, 20 bp, Artificial Sequence
  Description of Artificial Sequence: Synthetic oligonucleotide
  Target: ATXN2; (-) strand; PAM type: YTN; PAM sequence: TTT
agatatgaggatttttaaat

SEQ ID NO: 75512 - DNA, 20 bp, Artificial Sequence
  Description of Artificial Sequence: Synthetic oligonucleotide
  Target: ATXN2; (-) strand; PAM type: YTN; PAM sequence: TTA
agacaaaccatagaaacaaa

SEQ ID NO: 75513 - DNA, 20 bp, Artificial Sequence
  Description of Artificial Sequence: Synthetic oligonucleotide
  Target: ATXN2; (-) strand; PAM type: YTN; PAM sequence: CTT
aagacaaaccatagaaacaa

SEQ ID NO: 75514 - DNA, 20 bp, Artificial Sequence
  Description of Artificial Sequence: Synthetic oligonucleotide
  Target: ATXN2; (-) strand; PAM type: YTN; PAM sequence: TTA
atgtacttaagacaaaccat

SEQ ID NO: 75515 - DNA, 20 bp, Artificial Sequence
  Description of Artificial Sequence: Synthetic oligonucleotide
  Target: ATXN2; (-) strand; PAM type: YTN; PAM sequence: TTA
ttaatgtacttaagacaaac

SEQ ID NO: 75516 - DNA, 20 bp, Artificial Sequence
  Description of Artificial Sequence: Synthetic oligonucleotide
  Target: ATXN2; (-) strand; PAM type: YTN; PAM sequence: TTA
ttattaatgtacttaagaca

SEQ ID NO: 75517 - DNA, 20 bp, Artificial Sequence
  Description of Artificial Sequence: Synthetic oligonucleotide
  Target: ATXN2; (-) strand; PAM type: YTN; PAM sequence: TTA
aaaattattattaatgtact

SEQ ID NO: 75518 - DNA, 20 bp, Artificial Sequence
  Description of Artificial Sequence: Synthetic oligonucleotide
  Target: ATXN2; (-) strand; PAM type: YTN; PAM sequence: CTT
aaaaattattattaatgtac

SEQ ID NO: 75519 - DNA, 20 bp, Artificial Sequence
  Description of Artificial Sequence: Synthetic oligonucleotide
  Target: ATXN2; (-) strand; PAM type: YTN; PAM sequence: CTC
ttaaaaattattattaatgt

SEQ ID NO: 75520 - DNA, 20 bp, Artificial Sequence
  Description of Artificial Sequence: Synthetic oligonucleotide
  Target: ATXN2; (-) strand; PAM type: YTN; PAM sequence: TTC
ctcttaaaaattattattaa

SEQ ID NO: 75521 - DNA, 20 bp, Artificial Sequence
  Description of Artificial Sequence: Synthetic oligonucleotide
  Target: ATXN2; (-) strand; PAM type: YTN; PAM sequence: TTT
cctcttaaaaattattatta

SEQ ID NO: 75522 - DNA, 20 bp, Artificial Sequence
  Description of Artificial Sequence: Synthetic oligonucleotide
  Target: ATXN2; (-) strand; PAM type: YTN; PAM sequence: TTT
tcctcttaaaaattattatt

SEQ ID NO: 75523 - DNA, 20 bp, Artificial Sequence
  Description of Artificial Sequence: Synthetic oligonucleotide
  Target: ATXN2; (-) strand; PAM type: YTN; PAM sequence: TTT
ttcctcttaaaaattattat

SEQ ID NO: 75524 - DNA, 20 bp, Artificial Sequence
  Description of Artificial Sequence: Synthetic oligonucleotide
  Target: ATXN2; (-) strand; PAM type: YTN; PAM sequence: TTT
tttcctcttaaaaattatta

SEQ ID NO: 75525 - DNA, 20 bp, Artificial Sequence
  Description of Artificial Sequence: Synthetic oligonucleotide
  Target: ATXN2; (-) strand; PAM type: YTN; PAM sequence: TTG
ttttttcctcttaaaaatta

SEQ ID NO: 75526 - DNA, 20 bp, Artificial Sequence
  Description of Artificial Sequence: Synthetic oligonucleotide
  Target: ATXN2; (-) strand; PAM type: YTN; PAM sequence: TTT
gttttttcctcttaaaaatt

SEQ ID NO: 75527 - DNA, 20 bp, Artificial Sequence
  Description of Artificial Sequence: Synthetic oligonucleotide
  Target: ATXN2; (-) strand; PAM type: YTN; PAM sequence: CTA
atagagggatgtggtggttt

SEQ ID NO: 75528 - DNA, 20 bp, Artificial Sequence
  Description of Artificial Sequence: Synthetic oligonucleotide
  Target: ATXN2; (-) strand; PAM type: YTN; PAM sequence: TTG
tgagctaatagagggatgtg

SEQ ID NO: 75529 - DNA, 20 bp, Artificial Sequence
  Description of Artificial Sequence: Synthetic oligonucleotide
  Target: ATXN2; (-) strand; PAM type: YTN; PAM sequence: TTA
agcattgtgagctaatagag

SEQ ID NO: 75530 - DNA, 20 bp, Artificial Sequence
  Description of Artificial Sequence: Synthetic oligonucleotide
  Target: ATXN2; (-) strand; PAM type: YTN; PAM sequence: TTT
aagcattgtgagctaataga

SEQ ID NO: 75531 - DNA, 20 bp, Artificial Sequence
  Description of Artificial Sequence: Synthetic oligonucleotide
  Target: ATXN2; (-) strand; PAM type: YTN; PAM sequence: TTT
taagcattgtgagctaatag

SEQ ID NO: 75532 - DNA, 20 bp, Artificial Sequence
  Description of Artificial Sequence: Synthetic oligonucleotide
  Target: ATXN2; (-) strand; PAM type: YTN; PAM sequence: TTT
ttaagcattgtgagctaata

SEQ ID NO: 75533 - DNA, 20 bp, Artificial Sequence
  Description of Artificial Sequence: Synthetic oligonucleotide
  Target: ATXN2; (-) strand; PAM type: YTN; PAM sequence: TTC
aaccatttttaagcattgtg

SEQ ID NO: 75534 - DNA, 20 bp, Artificial Sequence
  Description of Artificial Sequence: Synthetic oligonucleotide
  Target: ATXN2; (-) strand; PAM type: YTN; PAM sequence: TTT
caaccatttttaagcattgt

SEQ ID NO: 75535 - DNA, 20 bp, Artificial Sequence
  Description of Artificial Sequence: Synthetic oligonucleotide
  Target: ATXN2; (-) strand; PAM type: YTN; PAM sequence: TTA
aaatatttcaaccattttta

SEQ ID NO: 75536 - DNA, 20 bp, Artificial Sequence
  Description of Artificial Sequence: Synthetic oligonucleotide
  Target: ATXN2; (-) strand; PAM type: YTN; PAM sequence: TTA
ttaaaatatttcaaccattt

SEQ ID NO: 75537 - DNA, 20 bp, Artificial Sequence
  Description of Artificial Sequence: Synthetic oligonucleotide
  Target: ATXN2; (-) strand; PAM type: YTN; PAM sequence: CTT
attaaaatatttcaaccatt

SEQ ID NO: 75538 - DNA, 20 bp, Artificial Sequence
  Description of Artificial Sequence: Synthetic oligonucleotide
  Target: ATXN2; (-) strand; PAM type: YTN; PAM sequence: TTG
atgtgtgtgcttattaaaat

SEQ ID NO: 75539 - DNA, 20 bp, Artificial Sequence
  Description of Artificial Sequence: Synthetic oligonucleotide
  Target: ATXN2; (-) strand; PAM type: YTN; PAM sequence: CTT
gatgtgtgtgcttattaaaa

SEQ ID NO: 75540 - DNA, 20 bp, Artificial Sequence
  Description of Artificial Sequence: Synthetic oligonucleotide
  Target: ATXN2; (-) strand; PAM type: YTN; PAM sequence: TTC
ttgatgtgtgtgcttattaa

SEQ ID NO: 75541 - DNA, 20 bp, Artificial Sequence
  Description of Artificial Sequence: Synthetic oligonucleotide
  Target: ATXN2; (-) strand; PAM type: YTN; PAM sequence: CTT
cttgatgtgtgtgcttatta

SEQ ID NO: 75542 - DNA, 20 bp, Artificial Sequence
  Description of Artificial Sequence: Synthetic oligonucleotide
  Target: ATXN2; (-) strand; PAM type: YTN; PAM sequence: TTG
tgtaatcagagaggcttctt

SEQ ID NO: 75543 - DNA, 20 bp, Artificial Sequence
  Description of Artificial Sequence: Synthetic oligonucleotide
  Target: ATXN2; (-) strand; PAM type: YTN; PAM sequence: TTT
gtgtaatcagagaggcttct

SEQ ID NO: 75544 - DNA, 20 bp, Artificial Sequence
  Description of Artificial Sequence: Synthetic oligonucleotide
  Target: ATXN2; (-) strand; PAM type: YTN; PAM sequence: CTG
gtttgtgtaatcagagaggc

SEQ ID NO: 75545 - DNA, 20 bp, Artificial Sequence
  Description of Artificial Sequence: Synthetic oligonucleotide
  Target: ATXN2; (-) strand; PAM type: YTN; PAM sequence: TTA
tagactggtttgtgtaatca

SEQ ID NO: 75546 - DNA, 20 bp, Artificial Sequence
  Description of Artificial Sequence: Synthetic oligonucleotide
  Target: ATXN2; (-) strand; PAM type: YTN; PAM sequence: TTT
atagactggtttgtgtaatc

SEQ ID NO: 75547 - DNA, 20 bp, Artificial Sequence
  Description of Artificial Sequence: Synthetic oligonucleotide
  Target: ATXN2; (-) strand; PAM type: YTN; PAM sequence: TTT
tatagactggtttgtgtaat

SEQ ID NO: 75548 - DNA, 20 bp, Artificial Sequence
  Description of Artificial Sequence: Synthetic oligonucleotide
  Target: ATXN2; (-) strand; PAM type: YTN; PAM sequence: TTA
ttttatagactggtttgtgt

SEQ ID NO: 75549 - DNA, 20 bp, Artificial Sequence
  Description of Artificial Sequence: Synthetic oligonucleotide
  Target: ATXN2; (-) strand; PAM type: YTN; PAM sequence: CTG
attattttatagactggttt

SEQ ID NO: 75550 - DNA, 20 bp, Artificial Sequence
  Description of Artificial Sequence: Synthetic oligonucleotide
  Target: ATXN2; (-) strand; PAM type: YTN; PAM sequence: TTC
aaatactgattattttatag

SEQ ID NO: 75551 - DNA, 20 bp, Artificial Sequence
  Description of Artificial Sequence: Synthetic oligonucleotide
  Target: ATXN2; (-) strand; PAM type: YTN; PAM sequence: TTT
caaatactgattattttata

SEQ ID NO: 75552 - DNA, 20 bp, Artificial Sequence
  Description of Artificial Sequence: Synthetic oligonucleotide
  Target: ATXN2; (-) strand; PAM type: YTN; PAM sequence: CTC
agtttcaaatactgattatt

SEQ ID NO: 75553 - DNA, 20 bp, Artificial Sequence
  Description of Artificial Sequence: Synthetic oligonucleotide
  Target: ATXN2; (-) strand; PAM type: YTN; PAM sequence: TTC
tcagtttcaaatactgatta

SEQ ID NO: 75554 - DNA, 20 bp, Artificial Sequence
  Description of Artificial Sequence: Synthetic oligonucleotide
  Target: ATXN2; (-) strand; PAM type: YTN; PAM sequence: CTT
ctcagtttcaaatactgatt

SEQ ID NO: 75555 - DNA, 20 bp, Artificial Sequence
  Description of Artificial Sequence: Synthetic oligonucleotide
  Target: ATXN2; (-) strand; PAM type: YTN; PAM sequence: TTA
cttctcagtttcaaatactg

SEQ ID NO: 75556 - DNA, 20 bp, Artificial Sequence
  Description of Artificial Sequence: Synthetic oligonucleotide
  Target: ATXN2; (-) strand; PAM type: YTN; PAM sequence: TTT
acttctcagtttcaaatact

SEQ ID NO: 75557 - DNA, 20 bp, Artificial Sequence
  Description of Artificial Sequence: Synthetic oligonucleotide
  Target: ATXN2; (-) strand; PAM type: YTN; PAM sequence: TTT
tacttctcagtttcaaatac

SEQ ID NO: 75558 - DNA, 20 bp, Artificial Sequence
  Description of Artificial Sequence: Synthetic oligonucleotide
  Target: ATXN2; (-) strand; PAM type: YTN; PAM sequence: TTG
aatgattttacttctcagtt

SEQ ID NO: 75559 - DNA, 20 bp, Artificial Sequence
  Description of Artificial Sequence: Synthetic oligonucleotide
  Target: ATXN2; (-) strand; PAM type: YTN; PAM sequence: TTT
gaatgattttacttctcagt

SEQ ID NO: 75560 - DNA, 20 bp, Artificial Sequence
  Description of Artificial Sequence: Synthetic oligonucleotide
  Target: ATXN2; (-) strand; PAM type: YTN; PAM sequence: CTT
tgaatgattttacttctcag

SEQ ID NO: 75561 - DNA, 20 bp, Artificial Sequence
  Description of Artificial Sequence: Synthetic oligonucleotide
  Target: ATXN2; (-) strand; PAM type: YTN; PAM sequence: TTA
aagccactttgaatgatttt

SEQ ID NO: 75562 - DNA, 20 bp, Artificial Sequence
  Description of Artificial Sequence: Synthetic oligonucleotide
  Target: ATXN2; (-) strand; PAM type: YTN; PAM sequence: TTT
aaagccactttgaatgattt

SEQ ID NO: 75563 - DNA, 20 bp, Artificial Sequence
  Description of Artificial Sequence: Synthetic oligonucleotide
  Target: ATXN2; (-) strand; PAM type: YTN; PAM sequence: TTT
taaagccactttgaatgatt

SEQ ID NO: 75564 - DNA, 20 bp, Artificial Sequence
  Description of Artificial Sequence: Synthetic oligonucleotide
  Target: ATXN2; (-) strand; PAM type: YTN; PAM sequence: TTT
ttaaagccactttgaatgat

SEQ ID NO: 75565 - DNA, 20 bp, Artificial Sequence
  Description of Artificial Sequence: Synthetic oligonucleotide
  Target: ATXN2; (-) strand; PAM type: YTN; PAM sequence: CTA
gtttttaaagccactttgaa

SEQ ID NO: 75566 - DNA, 20 bp, Artificial Sequence
  Description of Artificial Sequence: Synthetic oligonucleotide
  Target: ATXN2; (-) strand; PAM type: YTN; PAM sequence: TTA
cctagtttttaaagccactt

SEQ ID NO: 75567 - DNA, 20 bp, Artificial Sequence
  Description of Artificial Sequence: Synthetic oligonucleotide
  Target: ATXN2; (-) strand; PAM type: YTN; PAM sequence: TTT
acctagtttttaaagccact

SEQ ID NO: 75568 - DNA, 20 bp, Artificial Sequence
  Description of Artificial Sequence: Synthetic oligonucleotide
  Target: ATXN2; (-) strand; PAM type: YTN; PAM sequence: TTT
tacctagtttttaaagccac

SEQ ID NO: 75569 - DNA, 20 bp, Artificial Sequence
  Description of Artificial Sequence: Synthetic oligonucleotide
  Target: ATXN2; (-) strand; PAM type: YTN; PAM sequence: TTC
atagtcagtgttttacctag

SEQ ID NO: 75570 - DNA, 20 bp, Artificial Sequence
  Description of Artificial Sequence: Synthetic oligonucleotide
  Target: ATXN2; (-) strand; PAM type: YTN; PAM sequence: TTT
catagtcagtgttttaccta

SEQ ID NO: 75571 - DNA, 20 bp, Artificial Sequence
  Description of Artificial Sequence: Synthetic oligonucleotide
  Target: ATXN2; (-) strand; PAM type: YTN; PAM sequence: TTT
tcatagtcagtgttttacct

SEQ ID NO: 75572 - DNA, 20 bp, Artificial Sequence
  Description of Artificial Sequence: Synthetic oligonucleotide
  Target: ATXN2; (-) strand; PAM type: YTN; PAM sequence: TTA
caaagtaaaagaacattttc

SEQ ID NO: 75573 - DNA, 20 bp, Artificial Sequence
  Description of Artificial Sequence: Synthetic oligonucleotide
  Target: ATXN2; (-) strand; PAM type: YTN; PAM sequence: CTT
acaaagtaaaagaacatttt

SEQ ID NO: 75574 - DNA, 20 bp, Artificial Sequence
  Description of Artificial Sequence: Synthetic oligonucleotide
  Target: ATXN2; (-) strand; PAM type: YTN; PAM sequence: TTC
ttacaaagtaaaagaacatt

SEQ ID NO: 75575 - DNA, 20 bp, Artificial Sequence
  Description of Artificial Sequence: Synthetic oligonucleotide
  Target: ATXN2; (-) strand; PAM type: YTN; PAM sequence: TTT
cttacaaagtaaaagaacat

SEQ ID NO: 75576 - DNA, 20 bp, Artificial Sequence
  Description of Artificial Sequence: Synthetic oligonucleotide
  Target: ATXN2; (-) strand; PAM type: YTN; PAM sequence: TTT
tcttacaaagtaaaagaaca

SEQ ID NO: 75577 - DNA, 20 bp, Artificial Sequence
  Description of Artificial Sequence: Synthetic oligonucleotide
  Target: ATXN2; (-) strand; PAM type: YTN; PAM sequence: TTT
ttcttacaaagtaaaagaac

SEQ ID NO: 75578 - DNA, 20 bp, Artificial Sequence
  Description of Artificial Sequence: Synthetic oligonucleotide
  Target: ATXN2; (-) strand; PAM type: YTN; PAM sequence: CTT
tttcttacaaagtaaaagaa

SEQ ID NO: 75579 - DNA, 20 bp, Artificial Sequence
  Description of Artificial Sequence: Synthetic oligonucleotide
  Target: ATXN2; (-) strand; PAM type: YTN; PAM sequence: TTC
tttttcttacaaagtaaaag

SEQ ID NO: 75580 - DNA, 20 bp, Artificial Sequence
  Description of Artificial Sequence: Synthetic oligonucleotide
  Target: ATXN2; (-) strand; PAM type: YTN; PAM sequence: TTT
ctttttcttacaaagtaaaa

SEQ ID NO: 75581 - DNA, 20 bp, Artificial Sequence
  Description of Artificial Sequence: Synthetic oligonucleotide
  Target: ATXN2; (-) strand; PAM type: YTN; PAM sequence: TTT
tctttttcttacaaagtaaa

SEQ ID NO: 75582 - DNA, 20 bp, Artificial Sequence
  Description of Artificial Sequence: Synthetic oligonucleotide
  Target: ATXN2; (-) strand; PAM type: YTN; PAM sequence: TTT
ttctttttcttacaaagtaa

SEQ ID NO: 75583 - DNA, 20 bp, Artificial Sequence
  Description of Artificial Sequence: Synthetic oligonucleotide
  Target: ATXN2; (-) strand; PAM type: YTN; PAM sequence: TTT
tttctttttcttacaaagta

SEQ ID NO: 75584 - DNA, 20 bp, Artificial Sequence
  Description of Artificial Sequence: Synthetic oligonucleotide
  Target: ATXN2; (-) strand; PAM type: YTN; PAM sequence: TTT
ttttctttttcttacaaagt

SEQ ID NO: 75585 - DNA, 20 bp, Artificial Sequence
  Description of Artificial Sequence: Synthetic oligonucleotide
  Target: ATXN2; (-) strand; PAM type: YTN; PAM sequence: CTT
tttttctttttcttacaaag

SEQ ID NO: 75586 - DNA, 20 bp, Artificial Sequence
  Description of Artificial Sequence: Synthetic oligonucleotide
  Target: ATXN2; (-) strand; PAM type: YTN; PAM sequence: TTA
ctttttttctttttcttaca

SEQ ID NO: 75587 - DNA, 20 bp, Artificial Sequence
  Description of Artificial Sequence: Synthetic oligonucleotide
  Target: ATXN2; (-) strand; PAM type: YTN; PAM sequence: TTT
actttttttctttttcttac

SEQ ID NO: 75588 - DNA, 20 bp, Artificial Sequence
  Description of Artificial Sequence: Synthetic oligonucleotide
  Target: ATXN2; (-) strand; PAM type: YTN; PAM sequence: TTT
tactttttttctttttctta

SEQ ID NO: 75589 - DNA, 20 bp, Artificial Sequence
  Description of Artificial Sequence: Synthetic oligonucleotide
  Target: ATXN2; (-) strand; PAM type: YTN; PAM sequence: TTT
ttactttttttctttttctt

SEQ ID NO: 75590 - DNA, 20 bp, Artificial Sequence
  Description of Artificial Sequence: Synthetic oligonucleotide
  Target: ATXN2; (-) strand; PAM type: YTN; PAM sequence: TTA
cagtccgaaggtaattttta

SEQ ID NO: 75591 - DNA, 20 bp, Artificial Sequence
  Description of Artificial Sequence: Synthetic oligonucleotide
  Target: ATXN2; (-) strand; PAM type: YTN; PAM sequence: CTT
acagtccgaaggtaattttt

SEQ ID NO: 75592 - DNA, 20 bp, Artificial Sequence
  Description of Artificial Sequence: Synthetic oligonucleotide
  Target: ATXN2; (-) strand; PAM type: YTN; PAM sequence: TTA
aaacttacagtccgaaggta

SEQ ID NO: 75593 - DNA, 20 bp, Artificial Sequence
  Description of Artificial Sequence: Synthetic oligonucleotide
  Target: ATXN2; (-) strand; PAM type: YTN; PAM sequence: TTT
aaaacttacagtccgaaggt

SEQ ID NO: 75594 - DNA, 20 bp, Artificial Sequence
  Description of Artificial Sequence: Synthetic oligonucleotide
  Target: ATXN2; (-) strand; PAM type: YTN; PAM sequence: TTT
taaaacttacagtccgaagg

SEQ ID NO: 75595 - DNA, 20 bp, Artificial Sequence
  Description of Artificial Sequence: Synthetic oligonucleotide
  Target: ATXN2; (-) strand; PAM type: YTN; PAM sequence: TTT
ttaaaacttacagtccgaag

SEQ ID NO: 75596 - DNA, 20 bp, Artificial Sequence
  Description of Artificial Sequence: Synthetic oligonucleotide
  Target: ATXN2; (-) strand; PAM type: YTN; PAM sequence: CTC
caaatgtgaagtacaagtga

SEQ ID NO: 75597 - DNA, 20 bp, Artificial Sequence
  Description of Artificial Sequence: Synthetic oligonucleotide
  Target: ATXN2; (-) strand; PAM type: YTN; PAM sequence: TTA
gggctccaaatgtgaagtac

SEQ ID NO: 75598 - DNA, 20 bp, Artificial Sequence
  Description of Artificial Sequence: Synthetic oligonucleotide
  Target: ATXN2; (-) strand; PAM type: YTN; PAM sequence: TTT
agggctccaaatgtgaagta

SEQ ID NO: 75599 - DNA, 20 bp, Artificial Sequence
  Description of Artificial Sequence: Synthetic oligonucleotide
  Target: ATXN2; (-) strand; PAM type: YTN; PAM sequence: TTT
tagggctccaaatgtgaagt

SEQ ID NO: 75600 - DNA, 20 bp, Artificial Sequence
  Description of Artificial Sequence: Synthetic oligonucleotide
  Target: ATXN2; (-) strand; PAM type: YTN; PAM sequence: TTT
ttagggctccaaatgtgaag

SEQ ID NO: 75601 - DNA, 20 bp, Artificial Sequence
  Description of Artificial Sequence: Synthetic oligonucleotide
  Target: ATXN2; (-) strand; PAM type: YTN; PAM sequence: TTA
tatgtttttagggctccaaa

SEQ ID NO: 75602 - DNA, 20 bp, Artificial Sequence
  Description of Artificial Sequence: Synthetic oligonucleotide
  Target: ATXN2; (-) strand; PAM type: YTN; PAM sequence: TTG
ataaataaattatatgtttt

SEQ ID NO: 75603 - DNA, 20 bp, Artificial Sequence
  Description of Artificial Sequence: Synthetic oligonucleotide
  Target: ATXN2; (-) strand; PAM type: YTN; PAM sequence: TTT
gataaataaattatatgttt

SEQ ID NO: 75604 - DNA, 20 bp, Artificial Sequence
  Description of Artificial Sequence: Synthetic oligonucleotide
  Target: ATXN2; (-) strand; PAM type: YTN; PAM sequence: CTT
tgataaataaattatatgtt

SEQ ID NO: 75605 - DNA, 20 bp, Artificial Sequence
  Description of Artificial Sequence: Synthetic oligonucleotide
  Target: ATXN2; (-) strand; PAM type: YTN; PAM sequence: TTC
tttgataaataaattatatg

SEQ ID NO: 75606 - DNA, 20 bp, Artificial Sequence
  Description of Artificial Sequence: Synthetic oligonucleotide
  Target: ATXN2; (-) strand; PAM type: YTN; PAM sequence: TTT
ctttgataaataaattatat

SEQ ID NO: 75607 - DNA, 20 bp, Artificial Sequence
  Description of Artificial Sequence: Synthetic oligonucleotide
  Target: ATXN2; (-) strand; PAM type: YTN; PAM sequence: CTG
tttctttgataaataaatta

SEQ ID NO: 75608 - DNA, 20 bp, Artificial Sequence
  Description of Artificial Sequence: Synthetic oligonucleotide
  Target: ATXN2; (-) strand; PAM type: YTN; PAM sequence: CTG
gtgaccgggtagtatactgt

SEQ ID NO: 75609 - DNA, 20 bp, Artificial Sequence
  Description of Artificial Sequence: Synthetic oligonucleotide
  Target: ATXN2; (-) strand; PAM type: YTN; PAM sequence: CTG
atgaggtataaaaagtaaaa

SEQ ID NO: 75610 - DNA, 20 bp, Artificial Sequence
  Description of Artificial Sequence: Synthetic oligonucleotide
  Target: ATXN2; (-) strand; PAM type: YTN; PAM sequence: TTG
aatgaagcctgatgaggtat

SEQ ID NO: 75611 - DNA, 20 bp, Artificial Sequence
  Description of Artificial Sequence: Synthetic oligonucleotide
  Target: ATXN2; (-) strand; PAM type: YTN; PAM sequence: CTA
atattgaatgaagcctgatg

SEQ ID NO: 75612 - DNA, 20 bp, Artificial Sequence
  Description of Artificial Sequence: Synthetic oligonucleotide
  Target: ATXN2; (-) strand; PAM type: YTN; PAM sequence: TTA
gtgaatacctaatattgaat

SEQ ID NO: 75613 - DNA, 20 bp, Artificial Sequence
  Description of Artificial Sequence: Synthetic oligonucleotide
  Target: ATXN2; (-) strand; PAM type: YTN; PAM sequence: TTG
ttagtgaatacctaatattg

SEQ ID NO: 75614 - DNA, 20 bp, Artificial Sequence
  Description of Artificial Sequence: Synthetic oligonucleotide
  Target: ATXN2; (-) strand; PAM type: YTN; PAM sequence: TTT
gttagtgaatacctaatatt

SEQ ID NO: 75615 - DNA, 20 bp, Artificial Sequence
  Description of Artificial Sequence: Synthetic oligonucleotide
  Target: ATXN2; (-) strand; PAM type: YTN; PAM sequence: TTT
tgttagtgaatacctaatat

SEQ ID NO: 75616 - DNA, 20 bp, Artificial Sequence
  Description of Artificial Sequence: Synthetic oligonucleotide
  Target: ATXN2; (-) strand; PAM type: YTN; PAM sequence: TTG
ttttgttagtgaatacctaa

SEQ ID NO: 75617 - DNA, 20 bp, Artificial Sequence
  Description of Artificial Sequence: Synthetic oligonucleotide
  Target: ATXN2; (-) strand; PAM type: YTN; PAM sequence: TTA
ttgttttgttagtgaatacc

SEQ ID NO: 75618 - DNA, 20 bp, Artificial Sequence
  Description of Artificial Sequence: Synthetic oligonucleotide
  Target: ATXN2; (-) strand; PAM type: YTN; PAM sequence: TTT
attgttttgttagtgaatac

SEQ ID NO: 75619 - DNA, 20 bp, Artificial Sequence
  Description of Artificial Sequence: Synthetic oligonucleotide
  Target: ATXN2; (-) strand; PAM type: YTN; PAM sequence: TTT
tattgttttgttagtgaata

SEQ ID NO: 75620 - DNA, 20 bp, Artificial Sequence
  Description of Artificial Sequence: Synthetic oligonucleotide
  Target: ATXN2; (-) strand; PAM type: YTN; PAM sequence: TTT
ttattgttttgttagtgaat

SEQ ID NO: 75621 - DNA, 20 bp, Artificial Sequence
  Description of Artificial Sequence: Synthetic oligonucleotide
  Target: ATXN2; (-) strand; PAM type: YTN; PAM sequence: TTT
tttattgttttgttagtgaa

SEQ ID NO: 75622 - DNA, 20 bp, Artificial Sequence
  Description of Artificial Sequence: Synthetic oligonucleotide
  Target: ATXN2; (-) strand; PAM type: YTN; PAM sequence: TTT
ttttattgttttgttagtga

SEQ ID NO: 75623 - DNA, 20 bp, Artificial Sequence
  Description of Artificial Sequence: Synthetic oligonucleotide
  Target: ATXN2; (-) strand; PAM type: YTN; PAM sequence: TTG
aaatttttttattgttttgt

SEQ ID NO: 75624 - DNA, 20 bp, Artificial Sequence
  Description of Artificial Sequence: Synthetic oligonucleotide
  Target: ATXN2; (-) strand; PAM type: YTN; PAM sequence: TTT
gaaatttttttattgttttg

SEQ ID NO: 75625 - DNA, 20 bp, Artificial Sequence
  Description of Artificial Sequence: Synthetic oligonucleotide
  Target: ATXN2; (-) strand; PAM type: YTN; PAM sequence: TTT
tgaaatttttttattgtttt

SEQ ID NO: 75626 - DNA, 20 bp, Artificial Sequence
  Description of Artificial Sequence: Synthetic oligonucleotide
  Target: ATXN2; (-) strand; PAM type: YTN; PAM sequence: TTA
atgttttgaaatttttttat

SEQ ID NO: 75627 - DNA, 20 bp, Artificial Sequence
  Description of Artificial Sequence: Synthetic oligonucleotide
  Target: ATXN2; (-) strand; PAM type: YTN; PAM sequence: TTG
ttaatgttttgaaatttttt

SEQ ID NO: 75628 - DNA, 20 bp, Artificial Sequence
  Description of Artificial Sequence: Synthetic oligonucleotide
  Target: ATXN2; (-) strand; PAM type: YTN; PAM sequence: TTC
agtgtattgttaatgttttg

SEQ ID NO: 75629 - DNA, 20 bp, Artificial Sequence
  Description of Artificial Sequence: Synthetic oligonucleotide
  Target: ATXN2; (-) strand; PAM type: YTN; PAM sequence: TTC
aagagttcagtgtattgtta

SEQ ID NO: 75630 - DNA, 20 bp, Artificial Sequence
  Description of Artificial Sequence: Synthetic oligonucleotide
  Target: ATXN2; (-) strand; PAM type: YTN; PAM sequence: TTT
caagagttcagtgtattgtt

SEQ ID NO: 75631 - DNA, 20 bp, Artificial Sequence
  Description of Artificial Sequence: Synthetic oligonucleotide
  Target: ATXN2; (-) strand; PAM type: YTN; PAM sequence: CTG
aagaatttcaagagttcagt

SEQ ID NO: 75632 - DNA, 20 bp, Artificial Sequence
  Description of Artificial Sequence: Synthetic oligonucleotide
  Target: ATXN2; (-) strand; PAM type: YTN; PAM sequence: CTC
ctgaagaatttcaagagttc

SEQ ID NO: 75633 - DNA, 20 bp, Artificial Sequence
  Description of Artificial Sequence: Synthetic oligonucleotide
  Target: ATXN2; (-) strand; PAM type: YTN; PAM sequence: CTG
agtagagcctcctgaagaat

SEQ ID NO: 75634 - DNA, 20 bp, Artificial Sequence
  Description of Artificial Sequence: Synthetic oligonucleotide
  Target: ATXN2; (-) strand; PAM type: YTN; PAM sequence: CTC
tgagtagagcctcctgaaga

SEQ ID NO: 75635 - DNA, 20 bp, Artificial Sequence
  Description of Artificial Sequence: Synthetic oligonucleotide
  Target: ATXN2; (-) strand; PAM type: YTN; PAM sequence: CTG
caaactctgagtagagcctc

SEQ ID NO: 75636 - DNA, 20 bp, Artificial Sequence
  Description of Artificial Sequence: Synthetic oligonucleotide
  Target: ATXN2; (-) strand; PAM type: YTN; PAM sequence: TTC
gtactgcaaactctgagtag

SEQ ID NO: 75637 - DNA, 20 bp, Artificial Sequence
  Description of Artificial Sequence: Synthetic oligonucleotide
  Target: ATXN2; (-) strand; PAM type: YTN; PAM sequence: TTA
aaattcgtactgcaaactct

SEQ ID NO: 75638 - DNA, 20 bp, Artificial Sequence
  Description of Artificial Sequence: Synthetic oligonucleotide
  Target: ATXN2; (-) strand; PAM type: YTN; PAM sequence: TTC
agtattaaaattcgtactgc

SEQ ID NO: 75639 - DNA, 20 bp, Artificial Sequence
  Description of Artificial Sequence: Synthetic oligonucleotide
  Target: ATXN2; (-) strand; PAM type: YTN; PAM sequence: CTT
cagtattaaaattcgtactg

SEQ ID NO: 75640 - DNA, 20 bp, Artificial Sequence
  Description of Artificial Sequence: Synthetic oligonucleotide
  Target: ATXN2; (-) strand; PAM type: YTN; PAM sequence: TTG
acttcagtattaaaattcgt

SEQ ID NO: 75641 - DNA, 20 bp, Artificial Sequence
  Description of Artificial Sequence: Synthetic oligonucleotide
  Target: ATXN2; (-) strand; PAM type: YTN; PAM sequence: TTT
gacttcagtattaaaattcg

SEQ ID NO: 75642 - DNA, 20 bp, Artificial Sequence
  Description of Artificial Sequence: Synthetic oligonucleotide
  Target: ATXN2; (-) strand; PAM type: YTN; PAM sequence: CTG
gggtcagaaatgtttgactt

SEQ ID NO: 75643 - DNA, 20 bp, Artificial Sequence
  Description of Artificial Sequence: Synthetic oligonucleotide
  Target: ATXN2; (-) strand; PAM type: YTN; PAM sequence: TTA
aaatagctggggtcagaaat

SEQ ID NO: 75644 - DNA, 20 bp, Artificial Sequence
  Description of Artificial Sequence: Synthetic oligonucleotide
  Target: ATXN2; (-) strand; PAM type: YTN; PAM sequence: CTT
aaaatagctggggtcagaaa

SEQ ID NO: 75645 - DNA, 20 bp, Artificial Sequence
  Description of Artificial Sequence: Synthetic oligonucleotide
  Target: ATXN2; (-) strand; PAM type: YTN; PAM sequence: TTG
tcacttaaaatagctggggt

SEQ ID NO: 75646 - DNA, 20 bp, Artificial Sequence
  Description of Artificial Sequence: Synthetic oligonucleotide
  Target: ATXN2; (-) strand; PAM type: YTN; PAM sequence: TTT
gtcacttaaaatagctgggg

SEQ ID NO: 75647 - DNA, 20 bp, Artificial Sequence
  Description of Artificial Sequence: Synthetic oligonucleotide
  Target: ATXN2; (-) strand; PAM type: YTN; PAM sequence: TTT
tgtcacttaaaatagctggg

SEQ ID NO: 75648 - DNA, 20 bp, Artificial Sequence
  Description of Artificial Sequence: Synthetic oligonucleotide
  Target: ATXN2; (-) strand; PAM type: YTN; PAM sequence: TTA
ttttgtcacttaaaatagct

SEQ ID NO: 75649 - DNA, 20 bp, Artificial Sequence
  Description of Artificial Sequence: Synthetic oligonucleotide
  Target: ATXN2; (-) strand; PAM type: YTN; PAM sequence: TTG
tacattattttgtcacttaa

SEQ ID NO: 75650 - DNA, 20 bp, Artificial Sequence
  Description of Artificial Sequence: Synthetic oligonucleotide
  Target: ATXN2; (-) strand; PAM type: YTN; PAM sequence: TTT
gtacattattttgtcactta

SEQ ID NO: 75651 - DNA, 20 bp, Artificial Sequence
  Description of Artificial Sequence: Synthetic oligonucleotide
  Target: ATXN2; (-) strand; PAM type: YTN; PAM sequence: TTT
tgtacattattttgtcactt

SEQ ID NO: 75652 - DNA, 20 bp, Artificial Sequence
  Description of Artificial Sequence: Synthetic oligonucleotide
  Target: ATXN2; (-) strand; PAM type: YTN; PAM sequence: CTT
ttgtacattattttgtcact

SEQ ID NO: 75653 - DNA, 20 bp, Artificial Sequence
  Description of Artificial Sequence: Synthetic oligonucleotide
  Target: ATXN2; (-) strand; PAM type: YTN; PAM sequence: TTG
tcttttgtacattattttgt

SEQ ID NO: 75654 - DNA, 20 bp, Artificial Sequence
  Description of Artificial Sequence: Synthetic oligonucleotide
  Target: ATXN2; (-) strand; PAM type: YTN; PAM sequence: TTG
attgtcttttgtacattatt

SEQ ID NO: 75655 - DNA, 20 bp, Artificial Sequence
  Description of Artificial Sequence: Synthetic oligonucleotide
  Target: ATXN2; (-) strand; PAM type: YTN; PAM sequence: TTA
gtagttgattgtcttttgta

SEQ ID NO: 75656 - DNA, 20 bp, Artificial Sequence
  Description of Artificial Sequence: Synthetic oligonucleotide
  Target: ATXN2; (-) strand; PAM type: YTN; PAM sequence: CTG
tgtgtgtaaaataatgttag

SEQ ID NO: 75657 - DNA, 20 bp, Artificial Sequence
  Description of Artificial Sequence: Synthetic oligonucleotide
  Target: ATXN2; (-) strand; PAM type: YTN; PAM sequence: CTG
ctgtgtgtgtaaaataatgt

SEQ ID NO: 75658 - DNA, 20 bp, Artificial Sequence
  Description of Artificial Sequence: Synthetic oligonucleotide
  Target: ATXN2; (-) strand; PAM type: YTN; PAM sequence: TTA
accctgctgtgtgtgtaaaa

SEQ ID NO: 75659 - DNA, 20 bp, Artificial Sequence
  Description of Artificial Sequence: Synthetic oligonucleotide
  Target: ATXN2; (-) strand; PAM type: YTN; PAM sequence: TTG
ttaaccctgctgtgtgtgta

SEQ ID NO: 75660 - DNA, 20 bp, Artificial Sequence
  Description of Artificial Sequence: Synthetic oligonucleotide
  Target: ATXN2; (-) strand; PAM type: YTN; PAM sequence: CTT
gttaaccctgctgtgtgtgt

SEQ ID NO: 75661 - DNA, 20 bp, Artificial Sequence
  Description of Artificial Sequence: Synthetic oligonucleotide
  Target: ATXN2; (-) strand; PAM type: YTN; PAM sequence: TTC
ttgttaaccctgctgtgtgt

SEQ ID NO: 75662 - DNA, 20 bp, Artificial Sequence
  Description of Artificial Sequence: Synthetic oligonucleotide
  Target: ATXN2; (-) strand; PAM type: YTN; PAM sequence: CTG
tattcttgttaaccctgctg

SEQ ID NO: 75663 - DNA, 20 bp, Artificial Sequence
  Description of Artificial Sequence: Synthetic oligonucleotide
  Target: ATXN2; (-) strand; PAM type: YTN; PAM sequence: CTA
ccaataacaacagatagctg

SEQ ID NO: 75664 - DNA, 20 bp, Artificial Sequence
  Description of Artificial Sequence: Synthetic oligonucleotide
  Target: ATXN2; (-) strand; PAM type: YTN; PAM sequence: CTG
gaaccagtcccctaccaata

SEQ ID NO: 75665 - DNA, 20 bp, Artificial Sequence
  Description of Artificial Sequence: Synthetic oligonucleotide
  Target: ATXN2; (-) strand; PAM type: YTN; PAM sequence: CTG
aaggaggtcctggaaccagt

SEQ ID NO: 75666 - DNA, 20 bp, Artificial Sequence
  Description of Artificial Sequence: Synthetic oligonucleotide
  Target: ATXN2; (-) strand; PAM type: YTN; PAM sequence: TTC
ggtatctgaaggaggtcctg

SEQ ID NO: 75667 - DNA, 20 bp, Artificial Sequence
  Description of Artificial Sequence: Synthetic oligonucleotide
  Target: ATXN2; (-) strand; PAM type: YTN; PAM sequence: TTA
tgtaattcggtatctgaagg

SEQ ID NO: 75668 - DNA, 20 bp, Artificial Sequence
  Description of Artificial Sequence: Synthetic oligonucleotide
  Target: ATXN2; (-) strand; PAM type: YTN; PAM sequence: TTA
agtattatgtaattcggtat

SEQ ID NO: 75669 - DNA, 20 bp, Artificial Sequence
  Description of Artificial Sequence: Synthetic oligonucleotide
  Target: ATXN2; (-) strand; PAM type: YTN; PAM sequence: CTT
aagtattatgtaattcggta

SEQ ID NO: 75670 - DNA, 20 bp, Artificial Sequence
  Description of Artificial Sequence: Synthetic oligonucleotide
  Target: ATXN2; (-) strand; PAM type: YTN; PAM sequence: TTA
tgtaagtgacttaagtatta

SEQ ID NO: 75671 - DNA, 20 bp, Artificial Sequence
  Description of Artificial Sequence: Synthetic oligonucleotide
  Target: ATXN2; (-) strand; PAM type: YTN; PAM sequence: TTT
atgtaagtgacttaagtatt

SEQ ID NO: 75672 - DNA, 20 bp, Artificial Sequence
  Description of Artificial Sequence: Synthetic oligonucleotide
  Target: ATXN2; (-) strand; PAM type: YTN; PAM sequence: TTT
tatgtaagtgacttaagtat

SEQ ID NO: 75673 - DNA, 20 bp, Artificial Sequence
  Description of Artificial Sequence: Synthetic oligonucleotide
  Target: ATXN2; (-) strand; PAM type: YTN; PAM sequence: TTA
cattttatgtaagtgactta

SEQ ID NO: 75674 - DNA, 20 bp, Artificial Sequence
  Description of Artificial Sequence: Synthetic oligonucleotide
  Target: ATXN2; (-) strand; PAM type: YTN; PAM sequence: CTA
ttacattttatgtaagtgac

SEQ ID NO: 75675 - DNA, 20 bp, Artificial Sequence
  Description of Artificial Sequence: Synthetic oligonucleotide
  Target: ATXN2; (-) strand; PAM type: YTN; PAM sequence: TTA
tatgcaaatactattacatt

SEQ ID NO: 75676 - DNA, 20 bp, Artificial Sequence
  Description of Artificial Sequence: Synthetic oligonucleotide
  Target: ATXN2; (-) strand; PAM type: YTN; PAM sequence: TTA
gttatatgcaaatactatta

SEQ ID NO: 75677 - DNA, 20 bp, Artificial Sequence
  Description of Artificial Sequence: Synthetic oligonucleotide
  Target: ATXN2; (-) strand; PAM type: YTN; PAM sequence: CTT
agttatatgcaaatactatt

SEQ ID NO: 75678 - DNA, 20 bp, Artificial Sequence
  Description of Artificial Sequence: Synthetic oligonucleotide
  Target: ATXN2; (-) strand; PAM type: YTN; PAM sequence: TTG
ggagaatgtgcttagttata

SEQ ID NO: 75679 - DNA, 20 bp, Artificial Sequence
  Description of Artificial Sequence: Synthetic oligonucleotide
  Target: ATXN2; (-) strand; PAM type: YTN; PAM sequence: TTT
gggagaatgtgcttagttat

SEQ ID NO: 75680 - DNA, 20 bp, Artificial Sequence
  Description of Artificial Sequence: Synthetic oligonucleotide
  Target: ATXN2; (-) strand; PAM type: YTN; PAM sequence: TTA
aagtatttgggagaatgtgc

SEQ ID NO: 75681 - DNA, 20 bp, Artificial Sequence
  Description of Artificial Sequence: Synthetic oligonucleotide
  Target: ATXN2; (-) strand; PAM type: YTN; PAM sequence: TTT
aaagtatttgggagaatgtg

SEQ ID NO: 75682 - DNA, 20 bp, Artificial Sequence
  Description of Artificial Sequence: Synthetic oligonucleotide
  Target: ATXN2; (-) strand; PAM type: YTN; PAM sequence: TTA
gggatagtttaaagtatttg

SEQ ID NO: 75683 - DNA, 20 bp, Artificial Sequence
  Description of Artificial Sequence: Synthetic oligonucleotide
  Target: ATXN2; (-) strand; PAM type: YTN; PAM sequence: TTT
agggatagtttaaagtattt

SEQ ID NO: 75684 - DNA, 20 bp, Artificial Sequence
  Description of Artificial Sequence: Synthetic oligonucleotide
  Target: ATXN2; (-) strand; PAM type: YTN; PAM sequence: TTA
caagtaatttagggatagtt

SEQ ID NO: 75685 - DNA, 20 bp, Artificial Sequence
  Description of Artificial Sequence: Synthetic oligonucleotide
  Target: ATXN2; (-) strand; PAM type: YTN; PAM sequence: TTA
ggtattacaagtaatttagg

SEQ ID NO: 75686 - DNA, 20 bp, Artificial Sequence
  Description of Artificial Sequence: Synthetic oligonucleotide
  Target: ATXN2; (-) strand; PAM type: YTN; PAM sequence: TTA
tattaggtattacaagtaat

SEQ ID NO: 75687 - DNA, 20 bp, Artificial Sequence
  Description of Artificial Sequence: Synthetic oligonucleotide
  Target: ATXN2; (-) strand; PAM type: YTN; PAM sequence: TTA
cattatattaggtattacaa

SEQ ID NO: 75688 - DNA, 20 bp, Artificial Sequence
  Description of Artificial Sequence: Synthetic oligonucleotide
  Target: ATXN2; (-) strand; PAM type: YTN; PAM sequence: TTT
acattatattaggtattaca

SEQ ID NO: 75689 - DNA, 20 bp, Artificial Sequence
  Description of Artificial Sequence: Synthetic oligonucleotide
  Target: ATXN2; (-) strand; PAM type: YTN; PAM sequence: TTA
catagcatttacattatatt

SEQ ID NO: 75690 - DNA, 20 bp, Artificial Sequence
  Description of Artificial Sequence: Synthetic oligonucleotide
  Target: ATXN2; (-) strand; PAM type: YTN; PAM sequence: TTT
acatagcatttacattatat

SEQ ID NO: 75691 - DNA, 20 bp, Artificial Sequence
  Description of Artificial Sequence: Synthetic oligonucleotide
  Target: ATXN2; (-) strand; PAM type: YTN; PAM sequence: CTA
aaacaatacagtatgacaat

SEQ ID NO: 75692 - DNA, 20 bp, Artificial Sequence
  Description of Artificial Sequence: Synthetic oligonucleotide
  Target: ATXN2; (-) strand; PAM type: YTN; PAM sequence: TTC
ctaaaacaatacagtatgac

SEQ ID NO: 75693 - DNA, 20 bp, Artificial Sequence
  Description of Artificial Sequence: Synthetic oligonucleotide
  Target: ATXN2; (-) strand; PAM type: YTN; PAM sequence: TTA
ttcctaaaacaatacagtat

SEQ ID NO: 75694 - DNA, 20 bp, Artificial Sequence
  Description of Artificial Sequence: Synthetic oligonucleotide
  Target: ATXN2; (-) strand; PAM type: YTN; PAM sequence: TTG
tcattattcctaaaacaata

SEQ ID NO: 75695 - DNA, 20 bp, Artificial Sequence
  Description of Artificial Sequence: Synthetic oligonucleotide
  Target: ATXN2; (-) strand; PAM type: YTN; PAM sequence: CTT
gtcattattcctaaaacaat

SEQ ID NO: 75696 - DNA, 20 bp, Artificial Sequence
  Description of Artificial Sequence: Synthetic oligonucleotide
  Target: ATXN2; (-) strand; PAM type: YTN; PAM sequence: TTC
ttgtcattattcctaaaaca

SEQ ID NO: 75697 - DNA, 20 bp, Artificial Sequence
  Description of Artificial Sequence: Synthetic oligonucleotide
  Target: ATXN2; (-) strand; PAM type: YTN; PAM sequence: TTT
cttgtcattattcctaaaac

SEQ ID NO: 75698 - DNA, 20 bp, Artificial Sequence
  Description of Artificial Sequence: Synthetic oligonucleotide
  Target: ATXN2; (-) strand; PAM type: YTN; PAM sequence: TTT
tcttgtcattattcctaaaa

SEQ ID NO: 75699 - DNA, 20 bp, Artificial Sequence
  Description of Artificial Sequence: Synthetic oligonucleotide
  Target: ATXN2; (-) strand; PAM type: YTN; PAM sequence: TTT
ttcttgtcattattcctaaa

SEQ ID NO: 75700 - DNA, 20 bp, Artificial Sequence
  Description of Artificial Sequence: Synthetic oligonucleotide
  Target: ATXN2; (-) strand; PAM type: YTN; PAM sequence: CTG
aaccaaagatgtacggacgt

SEQ ID NO: 75701 - DNA, 20 bp, Artificial Sequence
  Description of Artificial Sequence: Synthetic oligonucleotide
  Target: ATXN2; (-) strand; PAM type: YTN; PAM sequence: TTG
cgtctgaaccaaagatgtac

SEQ ID NO: 75702 - DNA, 20 bp, Artificial Sequence
  Description of Artificial Sequence: Synthetic oligonucleotide
  Target: ATXN2; (-) strand; PAM type: YTN; PAM sequence: TTG
agaaaaaagaggcatggttg

SEQ ID NO: 75703 - DNA, 20 bp, Artificial Sequence
  Description of Artificial Sequence: Synthetic oligonucleotide
  Target: ATXN2; (-) strand; PAM type: YTN; PAM sequence: TTT
gagaaaaaagaggcatggtt

SEQ ID NO: 75704 - DNA, 20 bp, Artificial Sequence
  Description of Artificial Sequence: Synthetic oligonucleotide
  Target: ATXN2; (-) strand; PAM type: YTN; PAM sequence: TTT
tgagaaaaaagaggcatggt

SEQ ID NO: 75705 - DNA, 20 bp, Artificial Sequence
  Description of Artificial Sequence: Synthetic oligonucleotide
  Target: ATXN2; (-) strand; PAM type: YTN; PAM sequence: TTT
ttgagaaaaaagaggcatgg

SEQ ID NO: 75706 - DNA, 20 bp, Artificial Sequence
  Description of Artificial Sequence: Synthetic oligonucleotide
  Target: ATXN2; (-) strand; PAM type: YTN; PAM sequence: TTT
tttgagaaaaaagaggcatg

SEQ ID NO: 75707 - DNA, 20 bp, Artificial Sequence
  Description of Artificial Sequence: Synthetic oligonucleotide
  Target: ATXN2; (-) strand; PAM type: YTN; PAM sequence: TTT
ttttgagaaaaaagaggcat

SEQ ID NO: 75708 - DNA, 20 bp, Artificial Sequence
  Description of Artificial Sequence: Synthetic oligonucleotide
  Target: ATXN2; (-) strand; PAM type: YTN; PAM sequence: TTT
tttttgagaaaaaagaggca

SEQ ID NO: 75709 - DNA, 20 bp, Artificial Sequence
  Description of Artificial Sequence: Synthetic oligonucleotide
  Target: ATXN2; (-) strand; PAM type: YTN; PAM sequence: TTT
ttttttgagaaaaaagaggc

SEQ ID NO: 75710 - DNA, 20 bp, Artificial Sequence
  Description of Artificial Sequence: Synthetic oligonucleotide
  Target: ATXN2; (-) strand; PAM type: YTN; PAM sequence: TTT
tttttttgagaaaaaagagg

SEQ ID NO: 75711 - DNA, 20 bp, Artificial Sequence
  Description of Artificial Sequence: Synthetic oligonucleotide
  Target: ATXN2; (-) strand; PAM type: YTN; PAM sequence: TTT
ttttttttgagaaaaaagag

SEQ ID NO: 75712 - DNA, 20 bp, Artificial Sequence
  Description of Artificial Sequence: Synthetic oligonucleotide
  Target: ATXN2; (-) strand; PAM type: YTN; PAM sequence: TTT
tttttttttgagaaaaaaga

SEQ ID NO: 75713 - DNA, 20 bp, Artificial Sequence
  Description of Artificial Sequence: Synthetic oligonucleotide
  Target: ATXN2; (-) strand; PAM type: YTN; PAM sequence: TTT
ttttttttttgagaaaaaag

SEQ ID NO: 75714 - DNA, 20 bp, Artificial Sequence
  Description of Artificial Sequence: Synthetic oligonucleotide
  Target: ATXN2; (-) strand; PAM type: YTN; PAM sequence: TTT
tttttttttttgagaaaaaa

SEQ ID NO: 75715 - DNA, 20 bp, Artificial Sequence
  Description of Artificial Sequence: Synthetic oligonucleotide
  Target: ATXN2; (-) strand; PAM type: YTN; PAM sequence: TTT
ttttttttttttgagaaaaa

SEQ ID NO: 75716 - DNA, 20 bp, Artificial Sequence
  Description of Artificial Sequence: Synthetic oligonucleotide
  Target: ATXN2; (-) strand; PAM type: YTN; PAM sequence: TTT
tttttttttttttgagaaaa

SEQ ID NO: 75717 - DNA, 20 bp, Artificial Sequence
  Description of Artificial Sequence: Synthetic oligonucleotide
  Target: ATXN2; (-) strand; PAM type: YTN; PAM sequence: TTT
ttttttttttttttgagaaa

SEQ ID NO: 75718 - DNA, 20 bp, Artificial Sequence
  Description of Artificial Sequence: Synthetic oligonucleotide
  Target: ATXN2; (-) strand; PAM type: YTN; PAM sequence: TTT
tttttttttttttttgagaa

SEQ ID NO: 75719 - DNA, 20 bp, Artificial Sequence
  Description of Artificial Sequence: Synthetic oligonucleotide
  Target: ATXN2; (-) strand; PAM type: YTN; PAM sequence: TTT
ttttttttttttttttgaga

SEQ ID NO: 75720 - DNA, 20 bp, Artificial Sequence
  Description of Artificial Sequence: Synthetic oligonucleotide
  Target: ATXN2; (-) strand; PAM type: YTN; PAM sequence: TTT
tttttttttttttttttgag

SEQ ID NO: 75721 - DNA, 20 bp, Artificial Sequence
  Description of Artificial Sequence: Synthetic oligonucleotide
  Target: ATXN2; (-) strand; PAM type: YTN; PAM sequence: TTT
ttttttttttttttttttga

SEQ ID NO: 75722 - DNA, 20 bp, Artificial Sequence
  Description of Artificial Sequence: Synthetic oligonucleotide
  Target: ATXN2; (-) strand; PAM type: YTN; PAM sequence: TTT
tttttttttttttttttttg

SEQ ID NO: 75723 - DNA, 20 bp, Artificial Sequence
  Description of Artificial Sequence: Synthetic oligonucleotide
  Target: ATXN2; (-) strand; PAM type: YTN; PAM sequence: TTT
tttttttttttttttttttt

SEQ ID NO: 75724 - DNA, 20 bp, Artificial Sequence
  Description of Artificial Sequence: Synthetic oligonucleotide
  Target: ATXN2; (-) strand; PAM type: YTN; PAM sequence: TTT
tttttttttttttttttttt

SEQ ID NO: 75725 - DNA, 20 bp, Artificial Sequence
  Description of Artificial Sequence: Synthetic oligonucleotide
  Target: ATXN2; (-) strand; PAM type: YTN; PAM sequence: TTT
tttttttttttttttttttt

SEQ ID NO: 75726 - DNA, 20 bp, Artificial Sequence
  Description of Artificial Sequence: Synthetic oligonucleotide
  Target: ATXN2; (-) strand; PAM type: YTN; PAM sequence: TTT
tttttttttttttttttttt

SEQ ID NO: 75727 - DNA, 20 bp, Artificial Sequence
  Description of Artificial Sequence: Synthetic oligonucleotide
  Target: ATXN2; (-) strand; PAM type: YTN; PAM sequence: TTT
tttttttttttttttttttt

SEQ ID NO: 75728 - DNA, 20 bp, Artificial Sequence
  Description of Artificial Sequence: Synthetic oligonucleotide
  Target: ATXN2; (-) strand; PAM type: YTN; PAM sequence: TTT
tttttttttttttttttttt

SEQ ID NO: 75729 - DNA, 20 bp, Artificial Sequence
  Description of Artificial Sequence: Synthetic oligonucleotide
  Target: ATXN2; (-) strand; PAM type: YTN; PAM sequence: TTT
tttttttttttttttttttt

SEQ ID NO: 75730 - DNA, 20 bp, Artificial Sequence
  Description of Artificial Sequence: Synthetic oligonucleotide
  Target: ATXN2; (-) strand; PAM type: YTN; PAM sequence: TTT
tttttttttttttttttttt

SEQ ID NO: 75731 - DNA, 20 bp, Artificial Sequence
  Description of Artificial Sequence: Synthetic oligonucleotide
  Target: ATXN2; (-) strand; PAM type: YTN; PAM sequence: TTT
tttttttttttttttttttt

SEQ ID NO: 75732 - DNA, 20 bp, Artificial Sequence
  Description of Artificial Sequence: Synthetic oligonucleotide
  Target: ATXN2; (-) strand; PAM type: YTN; PAM sequence: TTT
tttttttttttttttttttt

SEQ ID NO: 75733 - DNA, 20 bp, Artificial Sequence
  Description of Artificial Sequence: Synthetic oligonucleotide
  Target: ATXN2; (-) strand; PAM type: YTN; PAM sequence: CTC
aaaaaaaaaaattttttttt

SEQ ID NO: 75734 - DNA, 20 bp, Artificial Sequence
  Description of Artificial Sequence: Synthetic oligonucleotide
  Target: ATXN2; (-) strand; PAM type: YTN; PAM sequence: TTC
tcaaaaaaaaaaattttttt

SEQ ID NO: 75735 - DNA, 20 bp, Artificial Sequence
  Description of Artificial Sequence: Synthetic oligonucleotide
  Target: ATXN2; (-) strand; PAM type: YTN; PAM sequence: CTT
ctcaaaaaaaaaaatttttt

SEQ ID NO: 75736 - DNA, 20 bp, Artificial Sequence
  Description of Artificial Sequence: Synthetic oligonucleotide
  Target: ATXN2; (-) strand; PAM type: YTN; PAM sequence: CTG
gtcaacagtgccagacagac

SEQ ID NO: 75737 - DNA, 20 bp, Artificial Sequence
  Description of Artificial Sequence: Synthetic oligonucleotide
  Target: ATXN2; (-) strand; PAM type: YTN; PAM sequence: CTC
agcctggtcaacagtgccag

SEQ ID NO: 75738 - DNA, 20 bp, Artificial Sequence
  Description of Artificial Sequence: Synthetic oligonucleotide
  Target: ATXN2; (-) strand; PAM type: YTN; PAM sequence: CTG
cactcagcctggtcaacagt

SEQ ID NO: 75739 - DNA, 20 bp, Artificial Sequence
  Description of Artificial Sequence: Synthetic oligonucleotide
  Target: ATXN2; (-) strand; PAM type: YTN; PAM sequence: CTG
agataatgcccctgcactca

SEQ ID NO: 75740 - DNA, 20 bp, Artificial Sequence
  Description of Artificial Sequence: Synthetic oligonucleotide
  Target: ATXN2; (-) strand; PAM type: YTN; PAM sequence: CTG
agctgagataatgcccctgc

SEQ ID NO: 75741 - DNA, 20 bp, Artificial Sequence
  Description of Artificial Sequence: Synthetic oligonucleotide
  Target: ATXN2; (-) strand; PAM type: YTN; PAM sequence: TTC
actgagctgagataatgccc

SEQ ID NO: 75742 - DNA, 20 bp, Artificial Sequence
  Description of Artificial Sequence: Synthetic oligonucleotide
  Target: ATXN2; (-) strand; PAM type: YTN; PAM sequence: TTT
cactgagctgagataatgcc

SEQ ID NO: 75743 - DNA, 20 bp, Artificial Sequence
  Description of Artificial Sequence: Synthetic oligonucleotide
  Target: ATXN2; (-) strand; PAM type: YTN; PAM sequence: CTG
ggaggtggaggtttcactga

SEQ ID NO: 75744 - DNA, 20 bp, Artificial Sequence
  Description of Artificial Sequence: Synthetic oligonucleotide
  Target: ATXN2; (-) strand; PAM type: YTN; PAM sequence: TTG
agcctgggaggtggaggttt

SEQ ID NO: 75745 - DNA, 20 bp, Artificial Sequence
  Description of Artificial Sequence: Synthetic oligonucleotide
  Target: ATXN2; (-) strand; PAM type: YTN; PAM sequence: TTT
gagcctgggaggtggaggtt

SEQ ID NO: 75746 - DNA, 20 bp, Artificial Sequence
  Description of Artificial Sequence: Synthetic oligonucleotide
  Target: ATXN2; (-) strand; PAM type: YTN; PAM sequence: TTG
tttgagcctgggaggtggag

SEQ ID NO: 75747 - DNA, 20 bp, Artificial Sequence
  Description of Artificial Sequence: Synthetic oligonucleotide
  Target: ATXN2; (-) strand; PAM type: YTN; PAM sequence: CTG
acgtgggaggattgtttgag

SEQ ID NO: 75748 - DNA, 20 bp, Artificial Sequence
  Description of Artificial Sequence: Synthetic oligonucleotide
  Target: ATXN2; (-) strand; PAM type: YTN; PAM sequence: TTG
ggaggctgacgtgggaggat

SEQ ID NO: 75749 - DNA, 20 bp, Artificial Sequence
  Description of Artificial Sequence: Synthetic oligonucleotide
  Target: ATXN2; (-) strand; PAM type: YTN; PAM sequence: CTT
gggaggctgacgtgggagga

SEQ ID NO: 75750 - DNA, 20 bp, Artificial Sequence
  Description of Artificial Sequence: Synthetic oligonucleotide
  Target: ATXN2; (-) strand; PAM type: YTN; PAM sequence: CTA
gtgacttgggaggctgacgt

SEQ ID NO: 75751 - DNA, 20 bp, Artificial Sequence
  Description of Artificial Sequence: Synthetic oligonucleotide
  Target: ATXN2; (-) strand; PAM type: YTN; PAM sequence: CTG
tagtcctagtgacttgggag

SEQ ID NO: 75752 - DNA, 20 bp, Artificial Sequence
  Description of Artificial Sequence: Synthetic oligonucleotide
  Target: ATXN2; (-) strand; PAM type: YTN; PAM sequence: CTA
gccgaacgtggtggtacgtg

SEQ ID NO: 75753 - DNA, 20 bp, Artificial Sequence
  Description of Artificial Sequence: Synthetic oligonucleotide
  Target: ATXN2; (-) strand; PAM type: YTN; PAM sequence: CTA
caaaaagtaaaaaaactagc

SEQ ID NO: 75754 - DNA, 20 bp, Artificial Sequence
  Description of Artificial Sequence: Synthetic oligonucleotide
  Target: ATXN2; (-) strand; PAM type: YTN; PAM sequence: CTC
tacaaaaagtaaaaaaacta

SEQ ID NO: 75755 - DNA, 20 bp, Artificial Sequence
  Description of Artificial Sequence: Synthetic oligonucleotide
  Target: ATXN2; (-) strand; PAM type: YTN; PAM sequence: CTC
cgtctctacaaaaagtaaaa

SEQ ID NO: 75756 - DNA, 20 bp, Artificial Sequence
  Description of Artificial Sequence: Synthetic oligonucleotide
  Target: ATXN2; (-) strand; PAM type: YTN; PAM sequence: CTG
ggcaacatggcagaactccg

SEQ ID NO: 75757 - DNA, 20 bp, Artificial Sequence
  Description of Artificial Sequence: Synthetic oligonucleotide
  Target: ATXN2; (-) strand; PAM type: YTN; PAM sequence: TTA
agaccagcctgggcaacatg

SEQ ID NO: 75758 - DNA, 20 bp, Artificial Sequence
  Description of Artificial Sequence: Synthetic oligonucleotide
  Target: ATXN2; (-) strand; PAM type: YTN; PAM sequence: TTT
aagaccagcctgggcaacat

SEQ ID NO: 75759 - DNA, 20 bp, Artificial Sequence
  Description of Artificial Sequence: Synthetic oligonucleotide
  Target: ATXN2; (-) strand; PAM type: YTN; PAM sequence: CTC
acaagtttaagaccagcctg

SEQ ID NO: 75760 - DNA, 20 bp, Artificial Sequence
  Description of Artificial Sequence: Synthetic oligonucleotide
  Target: ATXN2; (-) strand; PAM type: YTN; PAM sequence: TTG
agctcacaagtttaagacca

SEQ ID NO: 75761 - DNA, 20 bp, Artificial Sequence
  Description of Artificial Sequence: Synthetic oligonucleotide
  Target: ATXN2; (-) strand; PAM type: YTN; PAM sequence: CTT
gagctcacaagtttaagacc

SEQ ID NO: 75762 - DNA, 20 bp, Artificial Sequence
  Description of Artificial Sequence: Synthetic oligonucleotide
  Target: ATXN2; (-) strand; PAM type: YTN; PAM sequence: TTG
aggtgggcagatggcttgag

SEQ ID NO: 75763 - DNA, 20 bp, Artificial Sequence
  Description of Artificial Sequence: Synthetic oligonucleotide
  Target: ATXN2; (-) strand; PAM type: YTN; PAM sequence: TTT
gaggtgggcagatggcttga

SEQ ID NO: 75764 - DNA, 20 bp, Artificial Sequence
  Description of Artificial Sequence: Synthetic oligonucleotide
  Target: ATXN2; (-) strand; PAM type: YTN; PAM sequence: TTG
ggagtttgaggtgggcagat

SEQ ID NO: 75765 - DNA, 20 bp, Artificial Sequence
  Description of Artificial Sequence: Synthetic oligonucleotide
  Target: ATXN2; (-) strand; PAM type: YTN; PAM sequence: TTT
gggagtttgaggtgggcaga

SEQ ID NO: 75766 - DNA, 20 bp, Artificial Sequence
  Description of Artificial Sequence: Synthetic oligonucleotide
  Target: ATXN2; (-) strand; PAM type: YTN; PAM sequence: CTT
tgggagtttgaggtgggcag

SEQ ID NO: 75767 - DNA, 20 bp, Artificial Sequence
  Description of Artificial Sequence: Synthetic oligonucleotide
  Target: ATXN2; (-) strand; PAM type: YTN; PAM sequence: CTG
taatcccagcactttgggag

SEQ ID NO: 75768 - DNA, 20 bp, Artificial Sequence
  Description of Artificial Sequence: Synthetic oligonucleotide
  Target: ATXN2; (-) strand; PAM type: YTN; PAM sequence: CTC
acgcctgtaatcccagcact

SEQ ID NO: 75769 - DNA, 20 bp, Artificial Sequence
  Description of Artificial Sequence: Synthetic oligonucleotide
  Target: ATXN2; (-) strand; PAM type: YTN; PAM sequence: TTA
aaaaggccaggcacagtgac

SEQ ID NO: 75770 - DNA, 20 bp, Artificial Sequence
  Description of Artificial Sequence: Synthetic oligonucleotide
  Target: ATXN2; (-) strand; PAM type: YTN; PAM sequence: TTG
ttaaaaaggccaggcacagt

SEQ ID NO: 75771 - DNA, 20 bp, Artificial Sequence
  Description of Artificial Sequence: Synthetic oligonucleotide
  Target: ATXN2; (-) strand; PAM type: YTN; PAM sequence: TTT
gttaaaaaggccaggcacag

SEQ ID NO: 75772 - DNA, 20 bp, Artificial Sequence
  Description of Artificial Sequence: Synthetic oligonucleotide
  Target: ATXN2; (-) strand; PAM type: YTN; PAM sequence: TTG
gatcaaaaatatttgttaaa

SEQ ID NO: 75773 - DNA, 20 bp, Artificial Sequence
  Description of Artificial Sequence: Synthetic oligonucleotide
  Target: ATXN2; (-) strand; PAM type: YTN; PAM sequence: CTT
ggatcaaaaatatttgttaa

SEQ ID NO: 75774 - DNA, 20 bp, Artificial Sequence
  Description of Artificial Sequence: Synthetic oligonucleotide
  Target: ATXN2; (-) strand; PAM type: YTN; PAM sequence: TTC
agccaaccttggatcaaaaa

SEQ ID NO: 75775 - DNA, 20 bp, Artificial Sequence
  Description of Artificial Sequence: Synthetic oligonucleotide
  Target: ATXN2; (-) strand; PAM type: YTN; PAM sequence: TTC
atggattcagccaaccttgg

SEQ ID NO: 75776 - DNA, 20 bp, Artificial Sequence
  Description of Artificial Sequence: Synthetic oligonucleotide
  Target: ATXN2; (-) strand; PAM type: YTN; PAM sequence: TTC
catattcatggattcagcca

SEQ ID NO: 75777 - DNA, 20 bp, Artificial Sequence
  Description of Artificial Sequence: Synthetic oligonucleotide
  Target: ATXN2; (-) strand; PAM type: YTN; PAM sequence: CTG
tgggttccatattcatggat

SEQ ID NO: 75778 - DNA, 20 bp, Artificial Sequence
  Description of Artificial Sequence: Synthetic oligonucleotide
  Target: ATXN2; (-) strand; PAM type: YTN; PAM sequence: CTG
catctgtgggttccatattc

SEQ ID NO: 75779 - DNA, 20 bp, Artificial Sequence
  Description of Artificial Sequence: Synthetic oligonucleotide
  Target: ATXN2; (-) strand; PAM type: YTN; PAM sequence: CTC
tgcatctgtgggttccatat

SEQ ID NO: 75780 - DNA, 20 bp, Artificial Sequence
  Description of Artificial Sequence: Synthetic oligonucleotide
  Target: ATXN2; (-) strand; PAM type: YTN; PAM sequence: TTG
gtcctctgcatctgtgggtt

SEQ ID NO: 75781 - DNA, 20 bp, Artificial Sequence
  Description of Artificial Sequence: Synthetic oligonucleotide
  Target: ATXN2; (-) strand; PAM type: YTN; PAM sequence: TTG
taaaagtacagttggtcctc

SEQ ID NO: 75782 - DNA, 20 bp, Artificial Sequence
  Description of Artificial Sequence: Synthetic oligonucleotide
  Target: ATXN2; (-) strand; PAM type: YTN; PAM sequence: TTC
attgtaaaagtacagttggt

SEQ ID NO: 75783 - DNA, 20 bp, Artificial Sequence
  Description of Artificial Sequence: Synthetic oligonucleotide
  Target: ATXN2; (-) strand; PAM type: YTN; PAM sequence: CTA
atataattcattgtaaaagt

SEQ ID NO: 75784 - DNA, 20 bp, Artificial Sequence
  Description of Artificial Sequence: Synthetic oligonucleotide
  Target: ATXN2; (-) strand; PAM type: YTN; PAM sequence: TTA
tccagtctaatataattcat

SEQ ID NO: 75785 - DNA, 20 bp, Artificial Sequence
  Description of Artificial Sequence: Synthetic oligonucleotide
  Target: ATXN2; (-) strand; PAM type: YTN; PAM sequence: TTT
atccagtctaatataattca

SEQ ID NO: 75786 - DNA, 20 bp, Artificial Sequence
  Description of Artificial Sequence: Synthetic oligonucleotide
  Target: ATXN2; (-) strand; PAM type: YTN; PAM sequence: TTT
tatccagtctaatataattc

SEQ ID NO: 75787 - DNA, 20 bp, Artificial Sequence
  Description of Artificial Sequence: Synthetic oligonucleotide
  Target: ATXN2; (-) strand; PAM type: YTN; PAM sequence: CTT
ttatccagtctaatataatt

SEQ ID NO: 75788 - DNA, 20 bp, Artificial Sequence
  Description of Artificial Sequence: Synthetic oligonucleotide
  Target: ATXN2; (-) strand; PAM type: YTN; PAM sequence: CTC
cttttatccagtctaatata

SEQ ID NO: 75789 - DNA, 20 bp, Artificial Sequence
  Description of Artificial Sequence: Synthetic oligonucleotide
  Target: ATXN2; (-) strand; PAM type: YTN; PAM sequence: TTA
gaactccttttatccagtct

SEQ ID NO: 75790 - DNA, 20 bp, Artificial Sequence
  Description of Artificial Sequence: Synthetic oligonucleotide
  Target: ATXN2; (-) strand; PAM type: YTN; PAM sequence: TTA
gagaaatagattagaactcc

SEQ ID NO: 75791 - DNA, 20 bp, Artificial Sequence
  Description of Artificial Sequence: Synthetic oligonucleotide
  Target: ATXN2; (-) strand; PAM type: YTN; PAM sequence: TTT
agagaaatagattagaactc

SEQ ID NO: 75792 - DNA, 20 bp, Artificial Sequence
  Description of Artificial Sequence: Synthetic oligonucleotide
  Target: ATXN2; (-) strand; PAM type: YTN; PAM sequence: TTA
gtcaggatgatttagagaaa

SEQ ID NO: 75793 - DNA, 20 bp, Artificial Sequence
  Description of Artificial Sequence: Synthetic oligonucleotide
  Target: ATXN2; (-) strand; PAM type: YTN; PAM sequence: TTT
agtcaggatgatttagagaa

SEQ ID NO: 75794 - DNA, 20 bp, Artificial Sequence
  Description of Artificial Sequence: Synthetic oligonucleotide
  Target: ATXN2; (-) strand; PAM type: YTN; PAM sequence: TTA
gatcatgtttagtcaggatg

SEQ ID NO: 75795 - DNA, 20 bp, Artificial Sequence
  Description of Artificial Sequence: Synthetic oligonucleotide
  Target: ATXN2; (-) strand; PAM type: YTN; PAM sequence: CTT
agatcatgtttagtcaggat

SEQ ID NO: 75796 - DNA, 20 bp, Artificial Sequence
  Description of Artificial Sequence: Synthetic oligonucleotide
  Target: ATXN2; (-) strand; PAM type: YTN; PAM sequence: TTG
cttagatcatgtttagtcag

SEQ ID NO: 75797 - DNA, 20 bp, Artificial Sequence
  Description of Artificial Sequence: Synthetic oligonucleotide
  Target: ATXN2; (-) strand; PAM type: YTN; PAM sequence: TTG
tcaaagtaacattgcttaga

SEQ ID NO: 75798 - DNA, 20 bp, Artificial Sequence
  Description of Artificial Sequence: Synthetic oligonucleotide
  Target: ATXN2; (-) strand; PAM type: YTN; PAM sequence: TTA
aaatgtggataaatgattgt

SEQ ID NO: 75799 - DNA, 20 bp, Artificial Sequence
  Description of Artificial Sequence: Synthetic oligonucleotide
  Target: ATXN2; (-) strand; PAM type: YTN; PAM sequence: TTC
catgaagttaaaatgtggat

SEQ ID NO: 75800 - DNA, 20 bp, Artificial Sequence
  Description of Artificial Sequence: Synthetic oligonucleotide
  Target: ATXN2; (-) strand; PAM type: YTN; PAM sequence: TTG
ggggtagaataaagtaattc

SEQ ID NO: 75801 - DNA, 20 bp, Artificial Sequence
  Description of Artificial Sequence: Synthetic oligonucleotide
  Target: ATXN2; (-) strand; PAM type: YTN; PAM sequence: CTT
gggggtagaataaagtaatt

SEQ ID NO: 75802 - DNA, 20 bp, Artificial Sequence
  Description of Artificial Sequence: Synthetic oligonucleotide
  Target: ATXN2; (-) strand; PAM type: YTN; PAM sequence: CTG
ccttgggggtagaataaagt

SEQ ID NO: 75803 - DNA, 20 bp, Artificial Sequence
  Description of Artificial Sequence: Synthetic oligonucleotide
  Target: ATXN2; (-) strand; PAM type: YTN; PAM sequence: TTG
gggataaactgccttggggg

SEQ ID NO: 75804 - DNA, 20 bp, Artificial Sequence
  Description of Artificial Sequence: Synthetic oligonucleotide
  Target: ATXN2; (-) strand; PAM type: YTN; PAM sequence: TTA
ttggggataaactgccttgg

SEQ ID NO: 75805 - DNA, 20 bp, Artificial Sequence
  Description of Artificial Sequence: Synthetic oligonucleotide
  Target: ATXN2; (-) strand; PAM type: YTN; PAM sequence: TTA
gattattggggataaactgc

SEQ ID NO: 75806 - DNA, 20 bp, Artificial Sequence
  Description of Artificial Sequence: Synthetic oligonucleotide
  Target: ATXN2; (-) strand; PAM type: YTN; PAM sequence: TTA
ttagattattggggataaac

SEQ ID NO: 75807 - DNA, 20 bp, Artificial Sequence
  Description of Artificial Sequence: Synthetic oligonucleotide
  Target: ATXN2; (-) strand; PAM type: YTN; PAM sequence: TTG
taagttattagattattggg

SEQ ID NO: 75808 - DNA, 20 bp, Artificial Sequence
  Description of Artificial Sequence: Synthetic oligonucleotide
  Target: ATXN2; (-) strand; PAM type: YTN; PAM sequence: TTG
ttgtaagttattagattatt

SEQ ID NO: 75809 - DNA, 20 bp, Artificial Sequence
  Description of Artificial Sequence: Synthetic oligonucleotide
  Target: ATXN2; (-) strand; PAM type: YTN; PAM sequence: TTA
catcagttgttgtaagttat

SEQ ID NO: 75810 - DNA, 20 bp, Artificial Sequence
  Description of Artificial Sequence: Synthetic oligonucleotide
  Target: ATXN2; (-) strand; PAM type: YTN; PAM sequence: CTT
acatcagttgttgtaagtta

SEQ ID NO: 75811 - DNA, 20 bp, Artificial Sequence
  Description of Artificial Sequence: Synthetic oligonucleotide
  Target: ATXN2; (-) strand; PAM type: YTN; PAM sequence: TTC
atatacttacatcagttgtt

SEQ ID NO: 75812 - DNA, 20 bp, Artificial Sequence
  Description of Artificial Sequence: Synthetic oligonucleotide
  Target: ATXN2; (-) strand; PAM type: YTN; PAM sequence: CTA
tgcaaatatgaggatggttc

SEQ ID NO: 75813 - DNA, 20 bp, Artificial Sequence
  Description of Artificial Sequence: Synthetic oligonucleotide
  Target: ATXN2; (-) strand; PAM type: YTN; PAM sequence: TTG
atggaatctatgcaaatatg

SEQ ID NO: 75814 - DNA, 20 bp, Artificial Sequence
  Description of Artificial Sequence: Synthetic oligonucleotide
  Target: ATXN2; (-) strand; PAM type: YTN; PAM sequence: TTT
gatggaatctatgcaaatat

SEQ ID NO: 75815 - DNA, 20 bp, Artificial Sequence
  Description of Artificial Sequence: Synthetic oligonucleotide
  Target: ATXN2; (-) strand; PAM type: YTN; PAM sequence: TTT
tgatggaatctatgcaaata

SEQ ID NO: 75816 - DNA, 20 bp, Artificial Sequence
  Description of Artificial Sequence: Synthetic oligonucleotide
  Target: ATXN2; (-) strand; PAM type: YTN; PAM sequence: CTT
ttgatggaatctatgcaaat

SEQ ID NO: 75817 - DNA, 20 bp, Artificial Sequence
  Description of Artificial Sequence: Synthetic oligonucleotide
  Target: ATXN2; (-) strand; PAM type: YTN; PAM sequence: TTC
ttttgatggaatctatgcaa

SEQ ID NO: 75818 - DNA, 20 bp, Artificial Sequence
  Description of Artificial Sequence: Synthetic oligonucleotide
  Target: ATXN2; (-) strand; PAM type: YTN; PAM sequence: TTT
cttttgatggaatctatgca

SEQ ID NO: 75819 - DNA, 20 bp, Artificial Sequence
  Description of Artificial Sequence: Synthetic oligonucleotide
  Target: ATXN2; (-) strand; PAM type: YTN; PAM sequence: TTC
cagatttcttttgatggaat

SEQ ID NO: 75820 - DNA, 20 bp, Artificial Sequence
  Description of Artificial Sequence: Synthetic oligonucleotide
  Target: ATXN2; (-) strand; PAM type: YTN; PAM sequence: TTA
atattccagatttcttttga

SEQ ID NO: 75821 - DNA, 20 bp, Artificial Sequence
  Description of Artificial Sequence: Synthetic oligonucleotide
  Target: ATXN2; (-) strand; PAM type: YTN; PAM sequence: TTT
aatattccagatttcttttg

SEQ ID NO: 75822 - DNA, 20 bp, Artificial Sequence
  Description of Artificial Sequence: Synthetic oligonucleotide
  Target: ATXN2; (-) strand; PAM type: YTN; PAM sequence: TTT
taatattccagatttctttt

SEQ ID NO: 75823 - DNA, 20 bp, Artificial Sequence
  Description of Artificial Sequence: Synthetic oligonucleotide
  Target: ATXN2; (-) strand; PAM type: YTN; PAM sequence: TTT
ttaatattccagatttcttt

SEQ ID NO: 75824 - DNA, 20 bp, Artificial Sequence
  Description of Artificial Sequence: Synthetic oligonucleotide
  Target: ATXN2; (-) strand; PAM type: YTN; PAM sequence: TTT
tttaatattccagatttctt

SEQ ID NO: 75825 - DNA, 20 bp, Artificial Sequence
  Description of Artificial Sequence: Synthetic oligonucleotide
  Target: ATXN2; (-) strand; PAM type: YTN; PAM sequence: TTT
ttttaatattccagatttct

SEQ ID NO: 75826 - DNA, 20 bp, Artificial Sequence
  Description of Artificial Sequence: Synthetic oligonucleotide
  Target: ATXN2; (-) strand; PAM type: YTN; PAM sequence: TTT
tttttaatattccagatttc

SEQ ID NO: 75827 - DNA, 20 bp, Artificial Sequence
  Description of Artificial Sequence: Synthetic oligonucleotide
  Target: ATXN2; (-) strand; PAM type: YTN; PAM sequence: TTT
ttttttaatattccagattt

SEQ ID NO: 75828 - DNA, 20 bp, Artificial Sequence
  Description of Artificial Sequence: Synthetic oligonucleotide
  Target: ATXN2; (-) strand; PAM type: YTN; PAM sequence: TTT
tttttttaatattccagatt

SEQ ID NO: 75829 - DNA, 20 bp, Artificial Sequence
  Description of Artificial Sequence: Synthetic oligonucleotide
  Target: ATXN2; (-) strand; PAM type: YTN; PAM sequence: TTT
ttttttttaatattccagat

SEQ ID NO: 75830 - DNA, 20 bp, Artificial Sequence
  Description of Artificial Sequence: Synthetic oligonucleotide
  Target: ATXN2; (-) strand; PAM type: YTN; PAM sequence: TTT
tttttttttaatattccaga

SEQ ID NO: 75831 - DNA, 20 bp, Artificial Sequence
  Description of Artificial Sequence: Synthetic oligonucleotide
  Target: ATXN2; (-) strand; PAM type: YTN; PAM sequence: TTT
ttttttttttaatattccag

SEQ ID NO: 75832 - DNA, 20 bp, Artificial Sequence
  Description of Artificial Sequence: Synthetic oligonucleotide
  Target: ATXN2; (-) strand; PAM type: YTN; PAM sequence: TTT
tttttttttttaatattcca

SEQ ID NO: 75833 - DNA, 20 bp, Artificial Sequence
  Description of Artificial Sequence: Synthetic oligonucleotide
  Target: ATXN2; (-) strand; PAM type: YTN; PAM sequence: CTA
atagttttttttttttttaa

SEQ ID NO: 75834 - DNA, 20 bp, Artificial Sequence
  Description of Artificial Sequence: Synthetic oligonucleotide
  Target: ATXN2; (-) strand; PAM type: YTN; PAM sequence: TTC
taatagtttttttttttttt

SEQ ID NO: 75835 - DNA, 20 bp, Artificial Sequence
  Description of Artificial Sequence: Synthetic oligonucleotide
  Target: ATXN2; (-) strand; PAM type: YTN; PAM sequence: TTT
ctaatagttttttttttttt

SEQ ID NO: 75836 - DNA, 20 bp, Artificial Sequence
  Description of Artificial Sequence: Synthetic oligonucleotide
  Target: ATXN2; (-) strand; PAM type: YTN; PAM sequence: CTA
atttctaatagttttttttt

SEQ ID NO: 75837 - DNA, 20 bp, Artificial Sequence
  Description of Artificial Sequence: Synthetic oligonucleotide
  Target: ATXN2; (-) strand; PAM type: YTN; PAM sequence: TTG
tactaatttctaatagtttt

SEQ ID NO: 75838 - DNA, 20 bp, Artificial Sequence
  Description of Artificial Sequence: Synthetic oligonucleotide
  Target: ATXN2; (-) strand; PAM type: YTN; PAM sequence: TTT
gtactaatttctaatagttt

SEQ ID NO: 75839 - DNA, 20 bp, Artificial Sequence
  Description of Artificial Sequence: Synthetic oligonucleotide
  Target: ATXN2; (-) strand; PAM type: YTN; PAM sequence: TTC
agtttgtactaatttctaat

SEQ ID NO: 75840 - DNA, 20 bp, Artificial Sequence
  Description of Artificial Sequence: Synthetic oligonucleotide
  Target: ATXN2; (-) strand; PAM type: YTN; PAM sequence: TTA
gatgaggaagattcagtttg

SEQ ID NO: 75841 - DNA, 20 bp, Artificial Sequence
  Description of Artificial Sequence: Synthetic oligonucleotide
  Target: ATXN2; (-) strand; PAM type: YTN; PAM sequence: TTT
agatgaggaagattcagttt

SEQ ID NO: 75842 - DNA, 20 bp, Artificial Sequence
  Description of Artificial Sequence: Synthetic oligonucleotide
  Target: ATXN2; (-) strand; PAM type: YTN; PAM sequence: TTT
tagatgaggaagattcagtt

SEQ ID NO: 75843 - DNA, 20 bp, Artificial Sequence
  Description of Artificial Sequence: Synthetic oligonucleotide
  Target: ATXN2; (-) strand; PAM type: YTN; PAM sequence: CTG
gtcccaagcattttagatga
